United States Patent Application Publication US 2005/0228172 A9 - sequence listing, part 103

SEQ ID NO: 474995 - DNA, 587 bp, Homo sapiens
cacagaacagaatctaagtctctcctcattttttccaattggatgccagttcacttccaaagagatgtcatgtgcctgtgaatctggctcaggccaccaccaaggcagagagtctccagcccagcttgtgtcacactcttatcagcgtctcaatttccatctaaacccaaagctcttgtatggaagaggtttcctaacttcttttccttttatttccctttcctttgcttcacgcttctacatatcctttggttcagtggtctctctcagccttattgctcatttgattttaatatgttgacaaaaagtcttgtcagttccaaagaggagtgtctgtcctttgctaattaggtcctaatagcaggggagagaacacacatcatcggttttctcctggtggtttgactcatcctataaattgtrtgtgaaatcacttttgccattggctcttggcatacttaattgcattgtggaaaatctgacccacttacctccctgaaatgatagaaataatgccctcttactgtgggagcgaattttgttgttgaaatttttcctatgaattaacagattgggatttttatttc

SEQ ID NO: 474996 - DNA, 613 bp, Homo sapiens
gatgtctggactgcaggaccctggttcattacagtgtgttaattactcaggaataattatgtctggctgcctggctgtccttttccctgccgtccatgtggaattaatgagaacactttggtttcagtcattcatcaatgttctttgttcagcttctgctttcctaactgcaaataaattgcttataatagcaagtaccttttattctattgttaacacttgagagtgtttaaaggatgggtttcaattggattccttaatagaaggaactggctgcttttccaggccaaaaattacctgaatggcaatagcaaactgtgcaactaagtaaaagattatgggatgggaaacataaaaaggatataacagctaaatgraaaactgtgactgagcaccaactcatgcacacccaaaccaggaaggacaggaaggaaataagaaaacaaaaatgatttacttttgtgccaagcagcacagactcgcaaatcagttaatgggtacggtaaatgatgatgtgcttgctgtttgggagtttatttctcagtggacttggtggccatccaggaactcatcaaatcaacttaatggagagttaaatggctcttgaaacaag

SEQ ID NO: 474997 - DNA, 613 bp, Homo sapiens
gatgtctggactgcaggaccctggttcattacagtgtgttaattactcaggaataattatgtctggctgcctggctgtccttttccctgccgtccatgtggaattaatgagaacactttggtttcagtcattcatcaatgttctttgttcagcttctgctttcctaactgcaaataaattgcttataatagcaagtaccttttattctattgttaacacttgagagtgtttaaaggatgggtttcaattggattccttaatagaaggaactggctgcttttccaggccaaaaattacctgaatggcaatagcaaactgtgcaactaagtaaaagattatgggatgggaaacataaaaaggatataacagctaaatgaaaaactgtgactgagcaccaactcatgcacacccaaaccaggaaggacaggaaggaaataagaaaacaaaaatgatttacttttgtgccaagcagcacagactcgcaaatcagttaatgggtacggtaaatgatgatgtgcttgctgttygggagtttatttctcagtggacttggtggccatccaggaactcatcaaatcaacttaatggagagttaaatggctcttgaaacaag

SEQ ID NO: 474998 - DNA, 329 bp, Homo sapiens
gggcaacagagtgaaactccgtctcaaaaaaaaaaaaaaaaaaaattcacccttgattgcctagtcctggggagcttttactgtgtgaccaagaacaggcaggaacacatgcccgttccaggtgagcaggttgccaaaagagaacccagatgaagctgaaccaccacatgtcccttcatcccaaacccactrtgttaattatttgtcccattaatgaaatagctgcatttcttcttctgggaacatggtgggctccctcttagagtgaagtgcaggtatgttacttgctttagccagttacatgtcattagttgtgacgcgtgtcacct

SEQ ID NO: 474999 - DNA, 642 bp, Homo sapiens
ggctcatgggagaacatgagacaggccagacacccaaaatgaggaagttgggggggcttttttctcagccttcctgacctggcgtgacctcctctgggcccatgtaacaggcctccacacccccttatgcctggtgcaggcaccctgttaacttctatgtccctgtaggtccctttccaaggactctacctgcttgactgctcccaaagcagccagagccagtattgcccctggtggggaatggagctggagagcaggctggcagcaaggaggagagagggacagagaggtctgtcactcattatcccagagaagcatcatggggtggactcctctgacctggctccttttgtttcccatggctggggtccttctttccctctagagcctgtaacgcccccgctctgtcaaattcctcatacagcaaacttattctactctctttacccagaaataggtcagactcaactacatccatatctgatttcttcctttgtttttttttttttttgtatgtttagtagagacagggtttgaccatgttggccaggctggtctrgaactcctgatctcaggtgatccacccacctgggcctcccaaagtgctgggattacaggtgtgagccacggcgcctggccccc

SEQ ID NO: 475000 - DNA, 585 bp, Homo sapiens
tgggagtcaagagctggcaagcagggaagagatagaaatctaggagattctggtgagaagcttaaggcaggaccctctgaggtcaaggaggggcaaaagacagaaggttgcaggtgggatggctcaggatggcgggcgacgggagcacgggagtagaggagggaatcgcggggttgggagatggaagccagggagkcaggaagaagaaagccagcaagtgagagaagaaaaggatccgggagaagagccggtgatttcctcgagccagcaacgagatctcgatccgagaaagaagtcaggactctggccaggaatgagcgtccctgagcgtccccaggcagccaccggagctcgcagtagcttcaaccccgggtagcctgcggaggccgggccgccacactcctgccactggagcgcggggccaatggggagccttcaagagccacaaccgaggccctcagccaatcagcgccgagccggctccgcggccaaagggaggagctctcggcgctcctgtccccggaatcacccggaggcggttggaattaactgtccaggctccgccaccagcgctcggccgccgac

SEQ ID NO: 475001 - DNA, 585 bp, Homo sapiens
tgggagtcaagagctggcaagcagggaagagatagaaatctaggagattctggtgagaagcttaaggcaggaccctctgaggtcaaggaggggcaaaagacagaaggttgcaggtgggatggctcaggatggcgggcgacgggagcacgggagtagaggagggaatcgcggggttgggagatggaagccagggaggcaggaagaagaaagccagcaagtgagagaagaaaaggatccgggagaasagccggtgatttcctcgagccagcaacgagatctcgatccgagaaagaagtcaggactctggccaggaatgagcgtccctgagcgtccccaggcagccaccggagctcgcagtagcttcaaccccgggtagcctgcggaggccgggccgccacactcctgccactggagcgcggggccaatggggagccttcaagagccacaaccgaggccctcagccaatcagcgccgagccggctccgcggccaaagggaggagctctcggcgctcctgtccccggaatcacccggaggcggttggaattaactgtccaggctccgccaccagcgctcggccgccgac

SEQ ID NO: 475002 - DNA, 484 bp, Homo sapiens
agattctggtgagaagcttaaggcaggaccctctgaggtcaaggaggggcaaaagacagaaggttgcaggtgggatggctcaggatggcgggcgacgggagcacgggagtagaggagggaatcgcggggttgggagatggaagccagggaggcaggaagaagaaagccagcaagtgagagaagaaaaggatccgggagaagagccggtgatttcctcgagccagcaacgagatctcgatccgagaaagaagtcaggactctggccaggaatgagcgtccctgagcgtccccaggcagccaccggagctcgcagtagcttcaaccccgggtagcytgcggaggccgggccgccacactcctgccactggagcgcggggccaatggggagccttcaagagccacaaccgaggccctcagccaatcagcgccgagccggctccgcggccaaagggaggagctctcggcgctcctgtccccggaatca

SEQ ID NO: 475003 - DNA, 654 bp, Homo sapiens
aaccagtattgcaactatattttcttttttattctgttgctagtttgtggtctctgatatggcaattagcttccttgggcctatgctctttcctcagaaaagaaagttttattttaacattatctagcatagtgtcttgggcacacacacacagggacagttaaatgtaggaaacaatgaattagaagaagtaaaagaaaggagaagaagtaaaagaaaggaaaaattgagaaggagagaaagacagcagmgatgctctgtaattattgctataagaattacgtgcccatttcatggatttgtatggcttaggttgagagagatgaataaaatatctttgatataattaaaatcataatataaataatattttttctatatctcccctctttgctgaaagctgttgggtgagacatcacaatgaccacttctatgtaaaaggtagattatagatggccctctgcatatgtgggattgcatctgcattcaaccaactaactgtgaatcaaaaatatttttaaaaaattgtgtctgtactgaacatgtacagacttttttcttactattattccctaaacaatacagtataacaactatttacctagcacttacattgtactagacattgtaagtaacctagagatgatttaaaat

SEQ ID NO: 475004 - DNA, 639 bp, Homo sapiens
ccattctggtttcaagtactagtttcattgctcaaagctctacgtccaggggcaaattgctcaaccactttataaaaaatgtaaacaacaggtaatttcacattttaatttatttttatctaaacaatatattcacatagtttatttttagtgtatatatgtatatatatttatttcttatttatttcttatttatatatttatttatagagatgaggtcttactttatttcccaggttggtctcaaactcctgggctcaagtgatcctcctgcgttggagtgctgggattagaggtgtgagccactgtggttggcctaagtaatacagccacacaatttaaaaccttgaactgtgcctagatatcccctttggggaaaaggcatcacyttagttgctagagtgctggctgatggctgttggctaaatccttcacgaagaactgcctttgactattgaagccaccttgcccaaccaaggtcaagccccttcctgaagggtggcccatatccaattaatgatggtgaagggtggcccatatccaattaatgatggatgatggagctggggggatctatcaagactcagcccattgtctcaagactggataactgggaagggccttttagctagagagttt

SEQ ID NO: 475005 - DNA, 649 bp, Homo sapiens
ttcctcctgtcttcctgtctcagaggaaaaatttgcttatcaccttccacagttgagtctacctaggtccttggcctcctgcccttttatcttttctgagatctcatgccatctgttacctcatctctattttatctgttataattcctctcctctgcttcttccccagctgctcagaacatactgaaatatatgtaagattttgggttttttttctggtcattttgctcaatgacttcctaataccaactgaagagagtttatatttcttaatacaacattgaaagcctaacatgatttggcctcaacctacctttttttatccagtaaaattcatttctctctaatgtatactatattccatccaaactaacccactgattagacttcattttycttttaattactgctttttgctgtgctggtcccactgcttagaatgttatttcctcaaccttatttctgtttcctacatttgttgaaatcctagatgtccttcagaacccagcctctgagtcacctcttgcaggaagccttccttgctttccctagcagaacaacaatttctactgaaaccctgttgaattttgtctccattattgcctttaccaccttctatgttttgacagctattttgactatgtcttat

SEQ ID NO: 475006 - DNA, 626 bp, Homo sapiens
ctttccatgcatccaggatttatgtactggtttctcattgaagaacagtggtgcaataaacagccctcatttgtggggtgggcagaggagtaatggtgtctgcagtcatggtttcttaactcctctagtacttccattctgctaagcaggttatggctcacattattacagcctagcttatttaggcatgagggtcgtgggcagtgacacacacacacccttagaaatgaataccagttctttaagagaaagcagaaaagtcatattaccatttctgaattccttgagaaataagaagaataaaatggacaataatattagytatgggcatgaaaagtacaaaaagaacccataatcaggttcatttatatatgcatgcatattttaaagctaggtgcttttcctagtgcagagatgtagatagcggtttcaacaaacagatttacgaaatcatgagtgtgtttagtcacaattttgggaggtacctggaactcttttcccagagaacagaacatggggattgcagacatcattttatattgcatattatgtaatcagggcacaaaggaaatactgaggtccaccctgtatctctgcatccttgaatgctcacagcctgctttggt

SEQ ID NO: 475007 - DNA, 626 bp, Homo sapiens
ctttccatgcatccaggatttatgtactggtttctcattgaagaacagtggtgcaataaacagccctcatttgtggggtgggcagaggagtaatggtgtctgcagtcatggtttcttaactcctctagtacttccattctgctaagcaggttatggctcacattattacagcctagcttatttaggcatgagggtcgtgggcagtgacacacacacacccttagaaatgaataccagttctttaagagaaagcagaaaagtcatattaccatttctgaattccttgagaaataagaagaataaaatggacaataatattagctatgggcatgaaaagtacaaaaagaacccataatcaggttcatttatatatgcatgcatattttaaagctaggtgcttttcctastgcagagatgtagatagcggtttcaacaaacagatttacgaaatcatgagtgtgtttagtcacaattttgggaggtacctggaactcttttcccagagaacagaacatggggattgcagacatcattttatattgcatattatgtaatcagggcacaaaggaaatactgaggtccaccctgtatctctgcatccttgaatgctcacagcctgctttggt

SEQ ID NO: 475008 - DNA, 528 bp, Homo sapiens
ttggatatgtcacatgtgagcacagaataaccaaaagaagtacacattttgttaccaggaggaagtgttcaaaactacggtgctattccagtgactacatttttttaaattttgcgaagttcaacaggtctccctccggctgggtgctcactggccctgccacccgtgctggaccgaggcgctttcccctggggacrggaactttttactccactgagacaaagagactctccttttcaaagtgtcatttttgtttaccttttgttgtttcccccccaaaacaaaagactttgtacaacttcctaagcaggattgggggagggatcagcttcgcctgtgctgaccgcgcctctggattccgctcatcaggaagtgtttggggtctttgagcgagtgatctacgcgttgaattgctgtttttccaaactttcatggcttaaaaattttttttcttctccctgtaaaagaaactcagagactggtgatctgttaccgaagacgactttttaggcgttttctgtttcccca

SEQ ID NO: 475009 - DNA, 608 bp, Homo sapiens
acttcatacaaaccctgtgtgagcagtgggattcactgtaggaggtgcagtgggtattttctcaaaggcatttacacccaagagttaacaccaagttgacgggaccagagggtctttggtgagcaggccaccagagatggaaaggaagcttctcttgttctctggtgccagttgtggctggatcttcgcatcctggagcccagcagtcctgtgatgtagtgagtcaatccaagacccaaatgtaggcaggaggcatccttgcttccttcaagaacaagtcagagaatcaagtaaggaggaaataagtgacatgctagtgaaggcacrgttatctagatggttgttatggggttctcgtctcgccaagctttagatagatctgtttccggaaagctcacttttaaaaaaatcagatttgaagattgttggaattctggctctttatagtgagtcacatctctatagtcagttcattttcactcgcatatgaggtctcagtttgagcatcatgttttaaactgtctgcaatttgatttactggaaatacacctctacagagaaggtgtagtctttcctggttccattcccaatagtatgagggttatgtg

SEQ ID NO: 475010 - DNA, 608 bp, Homo sapiens
acttcatacaaaccctgtgtgagcagtgggattcactgtaggaggtgcagtgggtattttctcaaaggcatttacacccaagagttaacaccaagttgacgggaccagagggtctttggtgagcaggccaccagagatggaaaggaagcttctcttgttctctggtgccagttgtggctggatcttcgcatcctggagcccagcagtcctgtgatgtagtgagtcaatccaagacccaaatgtaggcaggaggcatccttgcttccttcaagaacaagtcagagaatcaagtaaggaggaaataagtgacatgctagtgaaggcacagttatctagatggttgttatggggttctcgtctcgccaagctttagatagatctgtttccggaaagctcacttttaaaaaaatcagatttgaagattgttggaattctggctctttatagtgagtcacatctctatagtcagttcattttcactygcatatgaggtctcagtttgagcatcatgttttaaactgtctgcaatttgatttactggaaatacacctctacagagaaggtgtagtctttcctggttccattcccaatagtatgagggttatgtg

SEQ ID NO: 475011 - DNA, 451 bp, Homo sapiens
gaagccagagctgtggaacagatctgtgcccagtgccggtggggcaggctggcccctcgggcggctctgtgtctgttctctttgggcccaggctgtgtccaccttgccaggcagtgggagagaggcagcatccaggcaccccatcccatacaccagggagcggcaccggctgggaccatcaagcttccctggaaggacagcagagcgtggtcactttcacaccgccgaggggaggctcyctcagtcacagcctcccatcacaggagggaaccggggacgcagaaccggggggacaggggcccagctcccggcctcgccccgcccagggaggactgtcctgagcaccgctgcccaggccttcatgcttcagaagctaccagaagcagaggctgaacgcggccgccccggccactgcagagcccaggaagggcagggcgctgaatggcccgcc

SEQ ID NO: 475012 - DNA, 681 bp, Homo sapiens
gacggagagaggaaaccagtccggaaatggcagagaggaagagtttgcttcctcctgggaaggttccctgtaaatgggttaggacgtctttattatggaaagatgactctgtggtatcatgcaataagcttggtagtcatggaaaagaaatctgtatgggaaattatacttttgacttatgacagagtgaagagtcacgttgcccatcctttcattcagattattagttaaatgaggaaataaccacagactgttccattctatttggtatacatttctagaagtctatgaaatcaakctgtatttgggaagaccacttccttcagagcactttattttgtgaactattttggcacctgaggatccaacggtcatggtcccctttgccatcaaaatacaataagtggagcttacaactaacttaatgtatacatgtccatttcttttaagtgtggatgttggtctgaaggatttcttcaaacagtcttgtcactaattttatcatgtgaccaaaaatgagcactggacattggattttcaagattttccctgataaaaatgaatcctctaatcctcccctaattgaacaattctgcatgtgatttgggtttgaattgtaaattataacccttttcctattttctaaaatgctcttttaaaagtcttgtaaattcaccagta

SEQ ID NO: 475013 - DNA, 641 bp, Homo sapiens
gcgtccagacccgcgggatgcagacccggatcagtcaggcttgagggctgctccgcatagaccaacgtccggggaaggcacacagtggccgagggcccgcgcgcttgggctacggctgtgatggtatctgcgctgcttgcgccttggggatgggaggccgcctttgctgactgaagggcctgaagaggaggcttctggggtccctgtagcctcaccctggattcacaaaatcaaacactatctcctttccccttcaccacccccaccccwcgaatacacatggtgaagagaggttcacttctgttcctgttgctgagtttcagctatgcccctcggcctcggaggatggctcacctttactgtgaatttctagctgaaagaacaatgctgagaacagggataacaagaggacctctctaacaaatgcatctgctagttacaaaagggctgggaagaacggctcagggacattcctcccagacccaaggaaagggaatggagacacattttgatgttttctacatacttggtcaacttgcagctactatagaacccgctccccacggccagctcttcctcctgttttagggagaattttgttcaacattctacattctagggacccttcctcatcagattaa

SEQ ID NO: 475014 - DNA, 630 bp, Homo sapiens
aagaccccacccaactgttccacagtcctggaggggctgaggtgcactgcccccaagccaggggtgcggaattggatcaccgggaggctcccccagccccttctcaggattctgcaccacaggttccattccattgcccagcgggaagcgcttctccagtgccgacagtggtaactgataactaacaggaagcgcggactcattctgccasctgcgagaagggccctgagctgggctggggcctttcccaggtacaaatcaatgtgggaatgaaagggaaggaagcagtgggctcaccctcctccccgagataaagctttgtttgagcctacgctgtggcgtctgttcctttgggatccaccttggcggggtgaggatagcctacgctcaagggccccggcagggatgcaggacagccaggggaccccgaggcacagatgccgcggcggccagcctgggctttctgccctcactgcctgtgcccaggggctccgcctgggccagccggccctgggctaggtcacccggccggcctatgcagggcccaggctggggcctctgcgcctgctgccgcctgggctgaggtatgaggctgaaggtaccttactcaacactgtcagtgcacgggag

SEQ ID NO: 475015 - DNA, 547 bp, Homo sapiens
ctcagagggctcctactgctttccaaaaactcctaagaggagaaagtgacagtacgtaaaaaggcagaggcaacaatattgcggcataaacggagcatgatgcgaatgtgttcattcattcaacaaatatttactgaactccatctaatgtcagacaaatacacttctctaattccgacgtttaaaaagaggacgcttccgtgattctgcataaaaattaaaataaaatttttggaaaagaacatgtgcccagtggaagtccaataaacatgaattaatgataatataaccctttgtcatcgattgtcgtcaactgtttccttattttacagttttctgcccaacaaagatctgcatgtttcaccgtcttgttactgagaacataatggttgatgagtgatgatccgtttggaaccacctcygcaaaacatttccccaacctagaagagcggaaaagtcctatttttggaatctgttggggcatttcccaacttggtcttctgaatacttgcgggcatatggcaagacttccttataaaatgttaga

SEQ ID NO: 475016 - DNA, 581 bp, Homo sapiens
tttttggaatctgttggggcatttcccaacttggtcttctgaatacttgcgggcatatggcaagacttccttataaaatgttagacgtctggctgggtgcagtggctcacacctgtaatcccagcactttggaaggccragatgggtggatcacctgaggttgggagttcaagaccagcctgaccaacatggagagacccggtctctactaaaaatacaaaattagccaggtgtggtggtgcatgcctgtcatcccagctactcaggaggctaaggcgggagaatcgcttgaacccgggaggtggaggttgcggtgagccgagatcgcgccattgcactccagcctgggcaacaagagcaaaactctgtctcaaaaaataaagtaaaataaaataaaataaaataaaaaatgttagatatctaagaggaaaagggacaaatgaactggatgatgagtcaggaaattctgcgtgcttcatctcacagatgagaaagcacacacatactgcacacacgcacacaccacgccatgcatataggcacacagatgcatgcacacacatggattatgcagaaggggc

SEQ ID NO: 475017 - DNA, 620 bp, Homo sapiens
acagtccccaaccgctacccgttcctccaccgcccaccaagcccagagcagcctccctcagccagaagacagctyggaggatggaagactgttcaacttgtggcttaagcacattattaaaaccaaagaggaaaattctttgaagagatggggtggagctgaatttaagagaaataataaaaaccatgaccaggtttttctgtgtctgtttttcctccctcatttctccagcagcctggggagcactgatagaataattccccggtgatttcatcatggaacttccctttcatcaaccttccactgatctacgttgcctgtggaataaagtccaaatgcctttgcttgattctccctcttcttcctcaccaagcaaacgcctttttaaactaataacggtggccacctgtgtagaaagcagaaggaatgaggcaggtgtgggacaggaaatgaggttgctaaggtatcagtcagccactgctgtgacaaggctgcataacaaatggccccaacatggaaatggcttcctgcagcaaacgtgtgtttttcttgctttggggtctctgggcaatgagcagccctgcgtcaggctgttggtcaagtctgttccacatgtttct

SEQ ID NO: 475018 - DNA, 595 bp, Homo sapiens
gccccccagcggggcccatcttcctgagaggtggggcgcctgagggactgcaccagcatccccttcaaagccttccctgtcccttttttgccctctccccagaacagctcccccagggcggctgctctcttctccactgggcaggggaggaagcaggcccagcactcgcccagggaggtgccaggaccagagcccatcccgggaggtgctgccacctggtcccgtccccactcacgctgtggagagggctcctgtgggtcagaagtcagttggcacaggcccccgccttcatccccaagtrgtacccatcatcgttacatggcacctgtggccccaccaccgggtcaagggctgagctcagggccagcattcccgtctccccgtctggtgcctgcccaggcctgcttgtggtcttgtgaggaggtggctctgcaggctgcggccctggaagggggattcaagcccacccgacttgctgaggcagcataggtgagcgtcctgcgcctggggtcacctgccccgctgccccggccccagcaccaccgcccggaggaatttgtgggtgtcagttccctgcttctctcctatcaggaaa

SEQ ID NO: 475019 - DNA, 493 bp, Homo sapiens
gcttgaaatattttttaaaggaaaatatgaagaatcaattagaaagagaatatcaaacaagattttcttgtttaaaaaaatgacaaaatccctccatatttaaactgagttcgagagaaccgtcctggtgyctttctgccttttctgtgctgctggcttggaagcctgacagcaattctcccagtttctgaaatctttttttcacagtccacggggtggtgtttgcgagacacacagcagagggcagagctagaaggggagacgcagccggtccctgggagagccacaggctgcccccgaaccctccacctgtgtgctgaggcacggtcccctcggctcgcccagtacgactcgactggttacaggaccccagactcagtcctcgccccagtcacccctgctcagaggtgccagtggctctgggcctctgccttcctccagagccccttggctcaaaaaaccctcagcatctcccgcccacagcctgtggggg

SEQ ID NO: 475020 - DNA, 584 bp, Homo sapiens
gcttagaatcctagctctattcacgtgaagcagcacttcggcatgaggtggtgcttgagggccccttgtctgagtaaaacgtggatgttgtagctggttttgggggctgtgggactcccccatctgcacaccccctactcagccratgtggtaagcatttagccacagcaagtgcttacttagtatttgttggttcctgatacacagaaatctctgtgatccaagcagtgtttctcccataggactctaccctgccaaccctcagctcggctcagctcagcagctcgctaactgtgaaactcggacggacatcctgtgatcactccaacgctttaaaattcatcaaagcgcagagcgctgcctggccgcagcccattgctctgttgttctgaggggcaaggccacagcgacctacagcagggaagagacaaacacagatctggtgcagagattattcgggtcatcgatgacaggcaggcaagaaagcaggagcgtttcctgcacggccacacccaagcagaaccttttcagggtactcatccctttttaggctgggcttcgctccccagcgaggtcagcagggc

SEQ ID NO: 475021 - DNA, 567 bp, Homo sapiens
tgagagctgatatcaaagctcactcgtcggctcccaaacaagagaggagcacagagaagccggcaagagagatgaggagggtttgggagaattagctgaggagacggcagccacacatcaggaaaacgcgccaagagaagggcttcaaacataaatctttgaggatagacagtccctctagttacaaagcaaagatgtgcaaagcttggttctctgttttcacagaagcagcctcttgggccccagcacaactgagcaggctcagtcacggtcagctcagggatgagtagctacatggacaggcttcccatgaggccaggtggccgtggcaaaggctcctggcaaggctgcctcccctgyccacagtgcaaatttccgagcaaattgccgagggcccttgccctgatttcatgatcaaactccttgcaggcggagagctgccctcccactgctcttctgcatgttcctggggcacatgagggtcctcagcctccctccccagtggctcttctggttctcttgccaacaaaagtgatgtctcatgatttacacagctttcccatgagt

SEQ ID NO: 475022 - DNA, 509 bp, Homo sapiens
ctgcagcatggcgcgtgctgtaccattacagatgggtcagcctagtggccctggacctggagacagtgcccgcccttctgctgcaggacctcaccttaatgaattacatctgcaccagccctgcttcscggtacatttctgttgtctgaagctaccaagctgcaaacctgggcaaggagtggagcttggataagaatcacctgggaaaggagtggagcttggaataagaatcacctgggcaatcactataaactgtggctcccgaggccctgccagaaaccctgatttaagctgcaggctgcaggtgatcgtgatgagagcccgttctatggaatggaagccttccggcactgtgctgggcaaagatcatcctatttgtctgtgggcttcagacccttatccttgcctgtcagcccacagttctctctcgattctgaccactggtcacctctggttacaacccaagcccccacctcagcccagagccacaaacaccccgaactcctctg

SEQ ID NO: 475023 - DNA, 522 bp, Homo sapiens
ggcacatctgcaccagacgatgtaatcaccagagaaaggggcatccgggctttcctagcccctcaatccccagtggtcctgttggcggagatggggttgtccaaaaggagaggtagccgttggtgaagttctaggaaagcccagcacagtaattccatgattccccgttgcttgcattcatagcctagatcaaaaccacgcaaacagtgctttgtaactgcgacacacyagctcagagcatcgccatcagcccccttcatccagagtccagtgggatattcgtcgaggcatagacaggcctcactgcacggctgtcccacacatgtctgggaaggggccctacccgctaaacgccagtggcatgcccctactatcgtggcaataagaaggtccctgcaggacgtgaagatgctccctgagttcaaccgctgggctcttaacctgggctcaaatccacgtcctaccacttcctcaccctgcgaactggacaagttacatggcctgttgtttctcagccttgtc

SEQ ID NO: 475024 - DNA, 501 bp, Homo sapiens
agccccagcaccctagttgactctcctgacctgggcagggtgcagtcccagggcctccaaggagatccacattcctcttctcctcagtgtgcccggcagctctccggccctgaagggtggggggcccccagccttctccagccacagggacctgtgatgaagctggggccagatgctccctaaagccgattcatacaccgcacaaattgaaacccagaggcgaggtcaccactccctgccartggccttgcccccttcttcccccacagggaacgccagggggttgagcctcttatcaccaaaaagaaactgatgacacttccctccttctgctctcctccctctgccctttccccatggatagcaggtcctagaagccttacagcgaccctgtccaaaacctggggcaggtccacagggagaaggccaggtcaggttcataagtctgaatcccagttgggaggcacagtggggagggtcagaagtggacctggacaaggt

SEQ ID NO: 475025 - DNA, 497 bp, Homo sapiens
agccccagcaccctagttgactctcctgacctgggcagggtgcagtcccagggcctccaaggagatccacattcctcttctcctcagtgtgcccggcagctctccggccctgaagggtggggggcccccagccttctccagccacagggacctgtgatgaagctggggccagatgctccctaaagccgattcatacaccgcacaaattgaaacccagaggcgaggtcaccactccctgccagtggccttgcccccttcttcccccacagggaacgccagggggttgagcctcttatcaccaaaaagaaactgatgacacttccctccttctgctctcctccctctgccctttccccatggatagcaggtcctagaagccttacagcgaccctgyccaaaacctggggcaggtccacagggagaaggccaggtcaggttcataagtctgaatcccagttgggaggcacagtggggagggtcagaagtggacctggaca

SEQ ID NO: 475026 - DNA, 466 bp, Homo sapiens
ataataattttccaaacagaaatggacttctgtttaaatgcatgcagaaacccactatgtgcaatgtttcttaatgtgtgggccaagaccacctgcatcagaatcatcaagggtgtttttaaaaaaattcagttttctgagtttcaccccaaacctgaatcataccctctgcagggtggggcttggacatctgcattttaacaggctctctcagggtcatcccagaccacctcagtctcagaaacactttgggagarggatcattctgtgaagcaaagcaaagcaacatttttacaaagaaaataagccttctctagttttctgaaaaatatggatttttaaacatctgtacttatgatttgcttaaagtatggtatgtctgttcattgcactgcatatgtttgggatctgtcacaaagaaaactgcgctaccaccagtcactatggggtgacttccaagaaggca

SEQ ID NO: 475027 - DNA, 649 bp, Homo sapiens
tcaaagattcatctgccatgtggtcagatcatagtggagctcaagggagaaagtgaggcgtatttgtctgcataccaatgtacaaatctttttctttggaaagagaacttggattgattgaggttctacaatatgctttacataaggaattgctttcaatatttacaatatattcatttctaaggctactgtctgtaacaaagtaccacaaacggtgtggtaattgattgttgtacaattgtacaattctggaaactggaagtctggaatgaagatgatggcagggccgtgcaatctctggaaactccagaggaagggtcctcccattccccttcctacattctcgtggtttgccagcagtcccagacttctttggcttatagagtcattatttcaatcrtctgtcttcgcgtggtattctctctgtctcttcacaccatcttcttcctgtgtgtgtccgtatccaaatttcctctttttataaggactccagtcatattggatcagagcccatcccaatgacctcatcttcatgtgactatatttgcaaagatcttatttacaactaaggtcacattctgaggtactggggttaggacttcggtgccagggggcaaaattcaacccataatatacaaaagccttattc

SEQ ID NO: 475028 - DNA, 624 bp, Homo sapiens
cagtatgggatcacttatctttatcaaagaacaacaacaaaaacaaacccaacacacaagttccaaataagagagtaatacattttctttgtgctcttccttcctataatgagtatggcaataactaattgaaatcatttgcaatgccacctctgatacttagcctgaacttcctaytcacttaccattccctgctgttcctagtgtggtttagtgttttggtttggttttttgggtcttcagtgtacggaatttatttatcatattcctctgtttatgccttattgttatttgtccatgcaagtctctttatttcttattttatgaatgtatgaatatatttatatgcacacatataataacataaatctatctacctacctacatacctacctatctacttaggcaccattatggtagatggaattactgattccaaatatttagcctacctgtattattattatatatctatacccttgccatagccaggaggaatattcctcctggtgggtggaacatttttcctgacactggactttgggcttggctgaataacttgctttggttaacaggatattagtcccattgcattagcatggttaggcttgcccacctgagcac

SEQ ID NO: 475029 - DNA, 624 bp, Homo sapiens
cagtatgggatcacttatctttatcaaagaacaacaacaaaaacaaacccaacacacaagttccaaataagagagtaatacattttctttgtgctcttccttcctataatgagtatggcaataactaattgaaatcatttgcaatgccacctctgatacttagcctgaacttcctattcacttaccattccctkctgttcctagtgtggtttagtgttttggtttggttttttgggtcttcagtgtacggaatttatttatcatattcctctgtttatgccttattgttatttgtccatgcaagtctctttatttcttattttatgaatgtatgaatatatttatatgcacacatataataacataaatctatctacctacctacatacctacctatctacttaggcaccattatggtagatggaattactgattccaaatatttagcctacctgtattattattatatatctatacccttgccatagccaggaggaatattcctcctggtgggtggaacatttttcctgacactggactttgggcttggctgaataacttgctttggttaacaggatattagtcccattgcattagcatggttaggcttgcccacctgagcac

SEQ ID NO: 475030 - DNA, 634 bp, Homo sapiens
catcaaaagaaagtgaggaccacaccttttctgtccttcaggtttcaggccatgggtcaagcagcatgagctctgggcagaggagggaactctatgagaatgatgttttaactggattaaaataaattaggctggaagtaacctaaaagtaactgataaggaaggtttatcctagcacaactgaatgcagcaaattggaggagaaaaaaaaaacggttttaggtttgaacctcttcccagttcaaactgtttgataaactaattatgtgcatgttttattgattttaagttcatcattgaaataaacacacgaaccaaaaaaaaaaaaaatctcctagataacagagagaaagacactctaaatagactgaaatggagaggtaagttgtggaaaagaactgtgggactggctgaggcacragaggcaggttcttactgtgtcctgggtcaggtgctatggagacaaattttcaggcatggccatcaaagttttggtactttggaatcagggaatcccacttttctaacataggcaataagtaatgtgaagaggccagcacacagagcaaaggctcaatatatggtcttcagggccttaattgttccacttattatgtttctaagatttacctgt

SEQ ID NO: 475031 - DNA, 593 bp, Homo sapiens
aagtaaggccaggggagactgaaactagtagttctcacttgcttgcatcctacagtgagtattccattatgtgagtgttttatacatttaggcaagctaaaaagacatgaaagtccttaaataaaagaatccaccaaaacatcactgattccagmcccttcttaaatattatcgtgtataccagctttattatttagctctgcaatactgctaaattggtcaattacttccctgcctccccaccctccaactgaattctcaccacccttgagggaaaacagtctgggttccctgtggaacatcatttctcaaaactgtattttggggcttgctttctcatttttcctttccatttcagatatccttactgctgtctttgggctctttaaacactgccttttttcctttttcgatcacacccaaaaacttttctcaaaaattacatgtaaatttaaaaatttacaaattaaatttaaaattgaaattttaaaaatcccgactctccctaatttcaggaagcatgcatttattatacataacaagacgtgaaagccgcaagagtttcagcctaaacactgaagaccccgcgaagt

SEQ ID NO: 475032 - DNA, 593 bp, Homo sapiens
aagtaaggccaggggagactgaaactagtagttctcacttgcttgcatcctacagtgagtattccattatgtgagtgttttatacatttaggcaagctaaaaagacatgaaagtccttaaataaaagaatccaccaaaacatcactgattccagacccttcttaaatattatcgtgtataccagctttattatttagctctgcaatactgctaaattggtcaattacttccctgcctccccaccctccaactgaattctcaccacccttgagggaaaacagtctgggttccctgtggaacatcatttctcaaaactgtattttggggcttgctttctcatttttcctttccatttcagatatccttactgctgtctttgggctctttaaacactgccttttttcctttktcgatcacacccaaaaacttttctcaaaaattacatgtaaatttaaaaatttacaaattaaatttaaaattgaaattttaaaaatcccgactctccctaatttcaggaagcatgcatttattatacataacaagacgtgaaagccgcaagagtttcagcctaaacactgaagaccccgcgaagt

SEQ ID NO: 475033 - DNA, 593 bp, Homo sapiens
aagtaaggccaggggagactgaaactagtagttctcacttgcttgcatcctacagtgagtattccattatgtgagtgttttatacatttaggcaagctaaaaagacatgaaagtccttaaataaaagaatccaccaaaacatcactgattccagacccttcttaaatattatcgtgtataccagctttattatttagctctgcaatactgctaaattggtcaattacttccctgcctccccaccctccaactgaattctcaccacccttgagggaaaacagtctgggttccctgtggaacatcatttctcaaaactgtattttggggcttgctttctcatttttcctttccatttcagatatccttactgctgtctttgggctctttaaacactgccttttttccttttycgatcacacccaaaaacttttctcaaaaattacatgtaaatttaaaaatttacaaattaaatttaaaattgaaattttaaaaatcccgactctccctaatttcaggaagcatgcatttattatacataacaagacgtgaaagccgcaagagtttcagcctaaacactgaagaccccgcgaagt

SEQ ID NO: 475034 - DNA, 593 bp, Homo sapiens
aagtaaggccaggggagactgaaactagtagttctcacttgcttgcatcctacagtgagtattccattatgtgagtgttttatacatttaggcaagctaaaaagacatgaaagtccttaaataaaagaatccaccaaaacatcactgattccagacccttcttaaatattatcgtgtataccagctttattatttagctctgcaatactgctaaattggtcaattacttccctgcctccccaccctccaactgaattctcaccacccttgagggaaaacagtctgggttccctgtggaacatcatttctcaaaactgtattttggggcttgctttctcatttttcctttccatttcagatatccttactgctgtctttgggctctttaaacactgccttttttcctttttcgatcacacccaaaaacttttctcaaaaattacatgtaaatttaaaaatttacaaattaaatttaaaattgaaattttaaaaatcccgactctccctaatttcaggaagcatgcatttattatacataacaagacgtgaaagccgcaagagttkcagcctaaacactgaagaccccgcgaagt

SEQ ID NO: 475035 - DNA, 525 bp, Homo sapiens
tgcagggcactgtgtctccagcaggaggtgagatgtgaccgccttcctccttatcaggttattcattctggctcatggaaccagaatcaggttatgatgattaatatttctgcttaatatgttacattttctttgccaccaatctttctgttattaacactggaaaccaaacttacccagtgaaacaccttttttgctcatgagtcacaaatatcaggaccttggatagaagaagcttaaaaaataaaaagggtttttgattgttggatggtcacacttcacaccacactcacacatgctttttaaataatttgaagagtgggttcagatgaaagactatatagaataagaatttttatcgagtttgttgaggcttaaagcctgyaagcaccaaaaaaaaaagttttctctcaattaaggaagttaactattaattcaaattcttgggtgtaaatgttaatattgtcacagaaagaagactgtgcagaaagatgatacatttctatgggccataatattggtcca

SEQ ID NO: 475036 - DNA, 418 bp, Homo sapiens
tggatgccttagcaactttgacaaaacaggctgacactttcagaaaaacttaaatggggacaagcagaactcaataataatatcctatctatttctaactataagaaaagtaaaactctatattactatgtaaacaaatttaaagtaagttttctatcatggattatactcccaatgaggcagcataatacaaccagacagactgagttcaatgtgctgaccagcagtgtgacttgggacaagtgtctttgctgctctgagccttgatttcttcacctataaaatgacagtctctacaaccaccawgaggattccatagacacttaagacagtatcttgtacagagtaagcaactcagaaaatggcagttattactaacttttgtttagggtaaatgcttaaaatatatgaaatgtca

SEQ ID NO: 475037 - DNA, 667 bp, Homo sapiens
ggaaagcagaagatactatctcttttttcttgttatttttattttccttcttgtcatttttagtataataacttaatgaaaggtcaacatatatgtgtatttttcatatgagaactggaacagatgagactttcattattggatcctggtgctatatctggtcttcttgatgtatgttggatgagaggggatggtaagaaggagaaggttggttctcatcgttccattttattttgataacctgccckcacaaattactggcatagctttcaccacattggcacacacaggctatttctattgatctcgaaacttaaagagtccatgacctcatctgaagtatgctttttaataattcactccatttaaagacccattaaaatgtcataactgtcataaaccttgtaaacagttgttacttctaatgtcttcaaaataataatgcattattgatgaaaacttggttcataatcacattactcccatttgacaaagccaatacagtatatgcttttttccacatcccagaacttgttcattccccttcagctaggcctccccgggttcttccaaagagttctttggaatcttctcatgacccaagccaagactgacttatgggctgacttacttcaaagaggacactagcgcaaagatatgattataa

SEQ ID NO: 475038 - DNA, 667 bp, Homo sapiens
ggaaagcagaagatactatctcttttttcttgttatttttattttccttcttgtcatttttagtataataacttaatgaaaggtcaacatatatgtgtatttttcatatgagaactggaacagatgagactttcattattggatcctggtgctatatctggtcttcttgatgtatgttggatgagaggggatggtaagaaggagaaggttggttctcatcgttccattttattttgataacctgcccgcacaaattactggcatagctttcaccacattggcacacacaggctatttctattgatctcgaaacttaaagagtccatgacctcatctgaagtatgctttttaataattcactccatttaaagacccattaaaatgtcataactrtcataaaccttgtaaacagttgttacttctaatgtcttcaaaataataatgcattattgatgaaaacttggttcataatcacattactcccatttgacaaagccaatacagtatatgcttttttccacatcccagaacttgttcattccccttcagctaggcctccccgggttcttccaaagagttctttggaatcttctcatgacccaagccaagactgacttatgggctgacttacttcaaagaggacactagcgcaaagatatgattataa

SEQ ID NO: 475039 - DNA, 310 bp, Homo sapiens
ctgcaatgagtagtagacccaacttgttcaactattaacacatatgtgttcctggtgttctttggctacaggacattgagacttggaacatcagaatttatccttatcttttcaaatgtcatttcccctggcatatttgagagaaagggttacctagcttccatacttgggtcaatcctgcttcgtggctgttctctggatcctaaccgacatgctcagctccatgttaggagttctgraccactgtcttttgccctctttctgcagaacatcacaaacacaaggttatgagcaaaataagtatttgtgt

SEQ ID NO: 475040 - DNA, 498 bp, Homo sapiens
acagtttagtgtgaccacaagactgaggacattgaaatgtggtggaagtgatggctgtctctttcagacctgggctataaaaacctcttagaccaccgttactctttatgaccactggctgacagtgaaggacttagaagtcctgaaagatggtggggtcatgagatggaaaagactgggcccctaaatcaccctgtgatagttcatctcctgaccacgctcattgaattgtcagcaagacagtaatttttattatggtaaatcactatgatttctggggatttatctactacagaaggaagtattaccctaatttataygccacttagtcctgttatacattacactccatgttgctttctaagatttcgtttttcccttctctgtaatcttcttcatagaaggtacttgaccctcagtgagagggattttgaaattcaaagtaaaatatcacaatcattttcattccatgttatttcaacaacaaacctaaaatgc

SEQ ID NO: 475041 - DNA, 592 bp, Homo sapiens
tttattctacctgtgtattaagaagctggaggggacggggcactgtggctcatgcctgtaatcccaccactttgggaggctgaggcaggtggatcacttgaggtcaggagttcaagaccaacctggccaacgtggtgaaaccctgtctctactaaaaatacaaaaattagccaggcttggtggtgcatgcatgtaatcccagctactcggatggctgaggcaagagaatcccttgaacttgggaggcaaagtttgcagtaagccaaagttgtaccattgcactccagcctgggtaacagagtgcaactcgaaaaaaaaaaaaaaaaagaaaaagaaagaaggaaagcaagcaagcaagcaagcaagcaagcaaactggggggacaaaaaaacacagggtgggtctgtagaattactgyacccattgacagatagctttagattacatctctattgtttaccagatcctcatgaacctccactcaaactaggggagcccggtgctattttaatagctctataatagctccataattagtattaaccaagaggccatgtgtagtaactgctgaaatatttggtaatttcttttt

SEQ ID NO: 475042 - DNA, 592 bp, Homo sapiens
tttattctacctgtgtattaagaagctggaggggacggggcactgtggctcatgcctgtaatcccaccactttgggaggctgaggcaggtggatcacttgaggtcaggagttcaagaccaacctggccaacgtggtgaaaccctgtctctactaaaaatacaaaaattagccaggcttggtggtgcatgcatgtaatcccagctactcggatggctgaggcaagagaatcccttgaacttgggaggcaaagtttgcagtaagccaaagttgtaccattgcactccagcctgggtaacagagtgcaactcgaaaaaaaaaaaaaaaaagaaaaagaaagaaggaaagcaagcaagcaagcaagcaagcaagcaaactggggggacaaaaaaacacagggtgggtctgtagaattactgtacccattgacagatagctttagattacatstctattgtttaccagatcctcatgaacctccactcaaactaggggagcccggtgctattttaatagctctataatagctccataattagtattaaccaagaggccatgtgtagtaactgctgaaatatttggtaatttcttttt

SEQ ID NO: 475043 - DNA, 601 bp, Homo sapiens
atcaaaaacactccaaacttcaaaatgttagctaagcaaacagatgaagtccctcctctccagggagcatcagggaacctaacattaactgttggcttctgctactctgtggaggccaagaagcaaagaatactgggggttgaagacggacaggaaactgcctatcttcccccactccatttcctaattaagttctataagctggaagagtttcaatgccccaagatgtatatgtaaaaataggagaagttgggaaaatgaagtacggcctaacttgaatatttatggcaatgagggcaggtaaggcagcatcaacagctcaaaattatagataatggaggcccattttggttaagatcttgaacacggtatccttccccaagtaaatatgaccaacacttattctgtctcaacaataagtcagaaaatargctatagtctgaattctaccactagggaccttggacaaatttttatggaactcaatggctagatccttctgggttctaaaaactaacattcctcctctatatttgacaaaaacatttagaaagagatcataaagcttcagatagtggaagaatcagaggtacaacagaaa

SEQ ID NO: 475044 - DNA, 630 bp, Homo sapiens
cttgctaaatcagaaaatatccaagaatcaagtcaccaaccaagccactattatcaacttctgcgactatccacaatttttgtaaggttaacacaaaataggcgtaaactacagaaaacaaatataatgtattacaaaccatcatggcggtgatccatattacagcatgtcctatatcataagcatttgttaaaaatcttgggactaacacttgactgcttcccactgggaggttcaagcttctcagaattcttgtaaatatcttttaaaagaaaaaaataaktaaggatatttacaggtatcaaaataattctttagcttagtaagtgctgtatattagtgttactgaagatattttcattttatcacaagggtttttaagtgaaattacatagtatttagtaacttgctttattcttcaaaaattacatataaatatcaacagatgtgctgtatgacactctgaggtcagaggcacatggacataaagcagttgtgtccatgtatccaaagaacagacaaatgtgattatttatggctaaatataaaaagacaaaaacatactgtggctaaacatgaaatattttgacttctttcttgtcccaaatgcacaaataatttttcctgagc

SEQ ID NO: 475045 - DNA, 630 bp, Homo sapiens
cttgctaaatcagaaaatatccaagaatcaagtcaccaaccaagccactattatcaacttctgcgactatccacaatttttgtaaggttaacacaaaataggcgtaaactacagaaaacaaatataatgtattacaaaccatcatggcggtgatccatattacagcatgtcctatatcataagcatttgttaaaaatcttgggactaacacttgactgcttcccactgggaggttcaagcttctcagaattcttgtaaatatcttttaaaagaaaaaaataagtaaggatatttacaggtatcaaaataattctttagcttagtaagtgctgtatattagtgttactgaagatattttcattttatcacaagggtttttaagtgaaattacatagtatttagtaacttgctttattcttyaaaaattacatataaatatcaacagatgtgctgtatgacactctgaggtcagaggcacatggacataaagcagttgtgtccatgtatccaaagaacagacaaatgtgattatttatggctaaatataaaaagacaaaaacatactgtggctaaacatgaaatattttgacttctttcttgtcccaaatgcacaaataatttttcctgagc

SEQ ID NO: 475046 - DNA, 597 bp, Homo sapiens
tacagggtaactttttctcagatctacataaagtgtaatgctttaaattcatgcccatagataattcctcctatttttaaattccttcaagttcttacaaggtagtctcaatgctattgtccaaattcccattgagagtttagagactgtcatggaaacaggcagaagattctgtataagaaaaatatattttttgctaggatccatttgatttctaccatgatgtttttaacttttacatacttttaaatctactatttttccttttaggaaaacttcttctatatgctgaataatacccaaattacgaggttattatacgactttaaaacaattastgcagacttttaggtgaaaatactgacccgattttccattgatttctttactaagttgaagcttttccatcgggagtcaaattcatgcttgtgagatccttggaattgtaaaaggtctccaataatctgtgtcaaagaatttcaaattgtatttgcaagtcatcaatccaagcttgatcgtattaatcattatgcaactatcaaatgacaaatgtacctttataataagaaacaatgacttagtatcatcttctgaatt

SEQ ID NO: 475047 - DNA, 551 bp, Homo sapiens
cattttcagtttgtatttctctgactacttatgaacttgataatgtcttcatctgcttgttatctttttttgggtatcctcttctgtaaattttttgtccataccttttgcccagttttctactgggggttctaatcttatgttgatttgagggacatcattatattctggatatatatcccttattatggcgttacaaaagtctttaatatcccacttgtctgtaaactttattgaacagaaatcattaaatgtgctatcaaaatcatcgtttgttctcccttcaccccccaccccagccatatagcttgaaggttttgttcaaatccttctctagccctagttctcaaggtattcttcgtgctttcttttttatttttaatttttatttttgagacaggttctcactctgtcacccaggctggagtacagtgaagcaagtatggctcactgcagcttcgacctcccaggctcaagcarcccctcatgtcagccaccctagtagctagaggtgaagtagatggagcacaggtgcgcatcaccatgctgga

SEQ ID NO: 475048 - DNA, 655 bp, Homo sapiens
ctggccaacatggcaaaaccccatatctactaaaactacaaaaattagctgggcgtggtggcacacacctgtaatcccagctacttgggaggctgaggcaggagaatcacttgaacccaggaggcggaggttgcagtgagccaagattgcgccactgtactccagcctcggggggagagtgaaattctgtctcaaaaaaaaaaagttaagttggtgctctttattttctgtacatagtgtattatgtatcaaaagtgtgattttggttaaacaattttatttgaatcctataatttaccattactacaaaacaaatgttctatcctttggaagaaattagtaaatgggagaattttctttaactttgaaaaatttaatctagtatttaactgatgtactatatttgctcaattaactgtcacctgacttaatttccttctagaaaacagtgacaaattgtatttatcagagagagaaagggagagccctgcyaaccaattaggaataaattttcaaaattaaacatttttgatttgcagttttatttttgtacaagctttcatgtagaatatgattatttaccttcctctgactatgaaatggcatttaaattttacacatgaagtagaagcacatgcaaacacaggctagtcat

SEQ ID NO: 475049 - DNA, 531 bp, Homo sapiens
tcagtaactcaaatgatgaatgatgacgaagattgaggaaacatttattaccttattgttgtactatttttcgtaacttggaatgtggcatgaaagattgctctataaccgtgacacatgtctgacgttagaactgtgttttcaagaaaaattatttcagtttattctagtaacaagatgtcaacatttttttttattcctcaatgaaatttgaagtttttaaactttccacaaagagtttgagaagatgcaagatatagtcagtacaattttcatcttccaccaaactataaaatgtctaagcttctgttatctttaggagagaaaaaaggactcttcgatagcacttcatagttgtcaagatttgacccacggagcygttaagatgagaagcctcagatttatttggggctcttagtatatactgtgttttggtgaaacgtggtaaatttatcaaaatgtttagaaatgacttaaaactattaactgcgtgcagtaaacatagcaatgggaatgtctgtttgtaccttg

SEQ ID NO: 475050 - DNA, 656 bp, Homo sapiens
tctggttggatcatactgttgctatgagttaatatgggaggtgtcatatgcataaagtacccatgagtttaaagttttggtttgttcaagtaaaatgtttatataattattcaagttaaatttaaataaacacatgctgaaagaacttgaaggtaaaaatagtttctgcaaatactattccacactttttctttataccactttgaatgctgagtaaggacattgtactggaccattgcccagcatagttctggcttatagagacttgatggtgaaagaaagactgagagagagagagagagagaagagagagaagggggagggagggaggaaggaagggaggaaggaaaaagatttgacaagggaatgtgttttttaagagaagctctttggggaataaatatagtcttgaaatacaccatgtaaaataagtttagtagaaaactatggagatatgcctaaatcataaatgaaaatattgattcgtttcttcagttgtggaattattcatttctgatttctttgcacaggatcaagctatattctaggtagaccctttatgtttttcaatctgttccacctatatccacaaatttattactgccacctactaaattrtttataaccattgtatgatctgatttttgtatacatgt

SEQ ID NO: 475051 - DNA, 541 bp, Homo sapiens
ctgccttttaatgacatttctcgggagcttatacataatactttcagttatatcccattggctagaatttagtcagtttctgtctaactgtaaggatggctgggatatgtaatgtttattctgggcagccacatgcccagctaaaattcagaatttaattacctaaaaattaaagagacaatggatattaggggraaattagcaagttcagctatgggttctcagcagtggaattcctgagccaagctataattttgctgtttgaagcccttgttatatatgaggacacactggtgccagaacgtctctactgcttaatcctccttaagctgtgcatgagagagtctgcacacttgtcacgtccttgccaacacccaatactatcatccaaaataagtctctgccagtttgataggagggaaaaatatcctgtttatatttgcattactttgacaataaaaagagctaaacttttccatgtatttgctggtcattcatatttctttttgtgaatatcctatgtcctttgtctaccattaaa

SEQ ID NO: 475052 - DNA, 619 bp, Homo sapiens
gcctgagtagctggaactacaggtgcatactaccatgcccagctttgacaattttattttttaaaaaatttattgttttatttttataaaagttctaaatgtacatttcacggtaatttggaaaatacaaaaagataaaaatgaaaaacatcatagttattccgtaattcagagagtcacatttttttctaactgttcttcctataaagatttctttaccaaaattagaaatatgctatgcatgaaatattatatccttacttttattttttttctttttgagacagagtctagctctgtcgcccaggctggagtgcaagtggtgcgatctcggctcactgcaagctccacctcccgggttcatgccattctcctgcctcagcctcccgtagctgggattacaagcgtctgcccccgcgccaggctaattttttgtacttttagtagagacggggtttcaccatgttagccaacatggtttcgatctcctgacctcgtgatccacctgcctyggcctcccaaagtgctgggattataggcgtgagccactgcacctggcctatatccttacttttaaaatttaacattaacataagcagttttacatcagtcagtagta

SEQ ID NO: 475053 - DNA, 591 bp, Homo sapiens
ctcagaattttcggtacagcaaataattttcagtgaagtcaaaattatttagataaagtcttctcttcgtgccctagcagaaaatgttcagaaacaaaatgaaataaagagacaaaggaaaaaaaaaactggcaaagggtcaggttttgagaattgttttcaagaagtcattgtattcagattggtggagcaggctactgtaaaccgtaagtaggaaatgagaacccgttgtaagttgataaaatggatgtcttttcaactaaacagattgctatcagcctaacagagccaactcatgttccttttyggccggtcatttcctgtactaagtgtctataagagccgcccatttgggtgtttctcaggattataggtttttaggtcacgcagaaaccctggggaacgcctgaaaaggctaaacacaagcagttacattatgcacaagctggatgacgtgaccccgctgctgctgtgtggagagggaggctgctgaacccgagctggtgtgagcttctcttgccgtaagtccacgggtggccaggagcacgtgttagtctggttaagagctctgctcagaagtagccgctgcag

SEQ ID NO: 475054 - DNA, 591 bp, Homo sapiens
ctcagaattttcggtacagcaaataattttcagtgaagtcaaaattatttagataaagtcttctcttcgtgccctagcagaaaatgttcagaaacaaaatgaaataaagagacaaaggaaaaaaaaaactggcaaagggtcaggttttgagaattgttttcaagaagtcattgtattcagattggtggagcaggctactgtaaaccgtaagtaggaaatgagaacccgttgtaagttgataaaatggatgtcttttcaactaaacagattgctatcagcctaacagagccaactcatgttccttttcggccggtcatttcctgtactaagtgtctataagagccgcccatttgggtgtttctcaggattataggtttttaggtcacgcagaaaccctggggaacgcctgaaaaggctaaacacaagcagttacattatgcacaagctggatgacgtgaccccrctgctgctgtgtggagagggaggctgctgaacccgagctggtgtgagcttctcttgccgtaagtccacgggtggccaggagcacgtgttagtctggttaagagctctgctcagaagtagccgctgcag

SEQ ID NO: 475055 - DNA, 591 bp, Homo sapiens
ctcagaattttcggtacagcaaataattttcagtgaagtcaaaattatttagataaagtcttctcttcgtgccctagcagaaaatgttcagaaacaaaatgaaataaagagacaaaggaaaaaaaaaactggcaaagggtcaggttttgagaattgttttcaagaagtcattgtattcagattggtggagcaggctactgtaaaccgtaagtaggaaatgagaacccgttgtaagttgataaaatggatgtcttttcaactaaacagattgctatcagcctaacagagccaactcatgttccttttcggccggtcatttcctgtactaagtgtctataagagccgcccatttgggtgtttctcaggattataggtttttaggtcacgcagaaaccctggggaacgcctgaaaaggctaaacacaagcagttacattatgcacaagctggatgacgtgaccccgctgctgctgtgtggagagggaggctgctgaacccgagctggtgtgagcttctcttgcygtaagtccacgggtggccaggagcacgtgttagtctggttaagagctctgctcagaagtagccgctgcag

SEQ ID NO: 475056 - DNA, 463 bp, Homo sapiens
tatttgtattacgtgtcaccctccctttgcccactccactgcttgctctctttctctctctccccacccaactctcctctgtctttcactccatcagagctaggatctgtctgtcatctccataactgtatccataggacataaaacagtgcctgaacaagggaaagaaagaatgaaagaytgggtttccttggactgtggccccttagcactttatccataaatttggtgctgctcttaacctattgtgtcagtgttgggtatgtatgtacatatgtatagatccctggttttaatatgcgctccctgaggcctgtttttcataattccaggcaatcatttctgccccataattcagagcaataaaattgtgtgccaagtattatgctacacgctgacttggttattaataatagataaagacaagtataaatacagcccacacattgcataggtttgattt

SEQ ID NO: 475057 - DNA, 463 bp, Homo sapiens
tatttgtattacgtgtcaccctccctttgcccactccactgcttgctctctttctctctctccccacccaactctcctctgtctttcactccatcagagctaggatctgtctgtcatctccataactgtatccataggacataaaacagtgcctgaacaagggaaagaaagaatgaaagattgggtttccttggactgtggccccttagcactttatccataaatttggtgctgctcttaacctattgtgtcagtgttgggtatgtatgtacatatgtatagatccctggttttaatatgygctccctgaggcctgtttttcataattccaggcaatcatttctgccccataattcagagcaataaaattgtgtgccaagtattatgctacacgctgacttggttattaataatagataaagacaagtataaatacagcccacacattgcataggtttgattt

SEQ ID NO: 475058 - DNA, 433 bp, Homo sapiens
gcccactccactgcttgctctctttctctctctccccacccaactctcctctgtctttcactccatcagagctaggatctgtctgtcatctccataactgtatccataggacataaaacagtgcctgaacaagggaaagaaagaatgaaagattgggtttccttggactgtggccccttagcactttatccataaatttggtgctgctcttaacctattgtgtcagtgttgggtatgtatgtacatatgtatagatccctggttttaatatgcgctccctgaggcctgtttttcataattccaggcaatcatttctgccccataattcagagcaataaaattgtgtgccaagtattatgctacacgctgacttggttattaataatagataaagrcaagtataaatacagcccacacattgcataggtttgat

SEQ ID NO: 475059 - DNA, 528 bp, Homo sapiens
atcaccagaatgaaagcaccaagctacctaccctgacaggcagagcacttgtatcttccatatggacayatccaaaaagatcaggcatctatacaaacacctgtgctctgtctacccacctgtattgaaatgcatatatgtaactcgtatagcttccagagtttcttctatatatagcactaagcaaattgcttatacagggattactcaacattcctgagatcatctagttattgagcatttaaagccaactttcggcatatataatataaagcacagtgtattctgaaaatctcaattctcataaaatctgaatatcctgatctggaaaaactgcttttgcccagagcaaaaagattgggagacatctgaatgacaagttttgtctataatttagtgagtttcactcattcatgcatttgcacactccctgaaaagtagaaggattgtctcccttagctcgctgttgctgaatcccactgaaactatagtttttcagggggaattgttgcaaaagagtccactgtg

SEQ ID NO: 475060 - DNA, 528 bp, Homo sapiens
atcaccagaatgaaagcaccaagctacctaccctgacaggcagagcacttgtatcttccatatggacacatccaaaaagatcaggcatctatacraacacctgtgctctgtctacccacctgtattgaaatgcatatatgtaactcgtatagcttccagagtttcttctatatatagcactaagcaaattgcttatacagggattactcaacattcctgagatcatctagttattgagcatttaaagccaactttcggcatatataatataaagcacagtgtattctgaaaatctcaattctcataaaatctgaatatcctgatctggaaaaactgcttttgcccagagcaaaaagattgggagacatctgaatgacaagttttgtctataatttagtgagtttcactcattcatgcatttgcacactccctgaaaagtagaaggattgtctcccttagctcgctgttgctgaatcccactgaaactatagtttttcagggggaattgttgcaaaagagtccactgtg

SEQ ID NO: 475061 - DNA, 528 bp, Homo sapiens
atcaccagaatgaaagcaccaagctacctaccctgacaggcagagcacttgtatcttccatatggacacatccaaaaagatcaggcatctatacaaacacctgtgctctgtctacccacctgtattgaaatgcatatatgtaactcgtatagcttccagagtttcttctatatatagcactaagcaaattgcttatacagggattactcaacattcctgagatcatctagttattgagcatttaaagccaactttcggcatatawaatataaagcacagtgtattctgaaaatctcaattctcataaaatctgaatatcctgatctggaaaaactgcttttgcccagagcaaaaagattgggagacatctgaatgacaagttttgtctataatttagtgagtttcactcattcatgcatttgcacactccctgaaaagtagaaggattgtctcccttagctcgctgttgctgaatcccactgaaactatagtttttcagggggaattgttgcaaaagagtccactgtg

SEQ ID NO: 475062 - DNA, 519 bp, Homo sapiens
ccatttttataaaacagtatgaaggacatatttcaagaggtgatgggaattgtattgtcttcctttcgtttctcagcacttcctaatttttctgtagaaaatgtaaatccatccaatcttccaaaaagtagattgaccaatctattacaagtagtagttttattgagtaactactaggtagtttattgaggaactactaagtatcaagcactctgctgggtcagtactgagagatgagattcctgttcaccagaacttttctgtttattacyacttgtgtgattttttaaaattattttttcagttgtaccagttaggtattttttcagtctagaatccagggagtgagttatatcagaggctttcaaatagttctagtccacaaatcttcttagtgttgctaaaaacccactgatctcctggttctttctcccacaccccactgctgcttgctatggcaaatcaggcaaaatctttggcaaggcagtagggaaagcctgacctgcttttagagaaggc

SEQ ID NO: 475063 - DNA, 363 bp, Homo sapiens
ggaggtgggcgagggggagtgggtggagcaaggtggggggtcaccaagcccttcataagggatctgcctctatgatccaaacacctccctgcaggccctacctccaacactggggatcacatttcaacagagatttagagggaatacctatccaaactatatcactacctattccagtgttggcaggagctggtttttgttggaagacatatttgtgtcaaccatgtaaaaagcttattcatattcccactgccttttgataccacaccatggccaattacggatgaaatgccagtttctttcctcctaggyttttgtggagagactgagaaaatcacttcctggagaaatgaaggctgaaag

SEQ ID NO: 475064 - DNA, 609 bp, Homo sapiens
tgtttagcacgtaagctgatcatgaacaaattctcttgtcagagataaaagcttgaaattccaagactatgtaaaatcacagacaattagagtgttctgtgtaccgtacaaaataatggtaaaaaaaattcaaacggtcatascacagtatagtttaaactgctgttttactaattcttctggagtgagaaacattttctgtagtagttaagcacccaaagaagccattttaccttgcctgttaaaaaatgtgtgcaaggtctgtggttcaagattgagaatgaaggatgtgtgagccaattgaataggtaataggagttcaggtaagcagtttaggtaatggtttaaattggagaaaggccagaccatagggattaacaccctaccattatgaaaagtcccataagatctcagatgacctcaagaggcttgtacttttgtttgttaagaacctttgtaagattgtgctaagacaccgtgaaaaatactgaggctgtaatgttgcttaaccatctaagtaccagtaaatgtggtagaaattatctttctactcaattatagcaactaaaagtcaggccctgaatcagtcagaggaaatgaactcttggg

SEQ ID NO: 475065 - DNA, 609 bp, Homo sapiens
tgtcattgcttccagaattatttcccttgctccatcgtggggatcccgcaatactgctgctgctgaaatcactgttgttgctccttccagaactgtcggcaccgcagcattattatcactgcagctaccactggagatggctacagacaccagaaacggaagagcacctctcccctcctccggcagtgtgactttcagtcggctcctctcgtagccagatggtatagaaatgacacaccaatgtccttcagaacatacatgcaaaatagtttaaatataytagaaattctattccccttagaaaactaagtccacctacatatttttcaaaaatccatcagcaatacagaataaaggcattggttctatacagcgttgcaagaatattttaacaatagaaggtattttaatgtcattcaccacattaggagattgaaaaagggaaaacacaggattaccttagcagatgtaggaaaaaaaataagatggtaaaatacaacattcatttatattaaaatctttataccaaactaggaaaagcagacaaatttcttaacctgataagcttatctataacaaaaccatcgacaccaccatatgtaatgttga

SEQ ID NO: 475066 - DNA, 554 bp, Homo sapiens
gacactcaccagatgcagcattatcctttctagtcagtgtggagatgacacatcactctgtgattctcttggctttagttagccactctccaygtggtacttcatggttggaagtgtgtttagcttcactgttgctgaagctggtccatttccacctgaacctgttttgtttggtgcaattacaggttagcttagatttgggggactaggaagaagacctagtaggaagagaggagaaatggagggtattagaaacgttccatccagaggaatttgtcaaggctaggagtagatctggagttttctcagaggccacaggagacacccattccagaagtccctagaactgagaacacagttggcatgggtggaagttgaagtctaaatctgcacatcaggaagctggagagttgctaaccaaaaggtgtcacatgtagggataaaagccagagtataggatcagaaatcccgaaactaagggataaaagcaactggtaggagaccaagagtggcctgaaaagggcattgtgtgattgcccaggtgggatatgggg

SEQ ID NO: 475067 - DNA, 554 bp, Homo sapiens
gacactcaccagatgcagcattatcctttctagtcagtgtggagatgacacatcactctgtgattctcttggctttagttagccactctccatgtggtacttcatggttggaagtgtgtttagcttcactgttgctgaagctggtccatttccacctgaacctgttttgtttggtgcaattacaggttagcttagatttgggggactaggaagaagacctagtaggaagagaggagaaatggagggtattagaaaygttccatccagaggaatttgtcaaggctaggagtagatctggagttttctcagaggccacaggagacacccattccagaagtccctagaactgagaacacagttggcatgggtggaagttgaagtctaaatctgcacatcaggaagctggagagttgctaaccaaaaggtgtcacatgtagggataaaagccagagtataggatcagaaatcccgaaactaagggataaaagcaactggtaggagaccaagagtggcctgaaaagggcattgtgtgattgcccaggtgggatatgggg

SEQ ID NO: 475068 - DNA, 403 bp, Homo sapiens
ctgctacagcagatggagacagtgaatgagttactgcagaaaaatggggtcagcaaactgaaagctgcaaggccctggggagagcgagatgctcttcagacaggagggccagggagcaggagtaagggcggccgcaaaaaaaagccaggagtggaagatggggctggccgtttatttgtaaggaggcagtgctggcccaggcctggctgatttaccagatatggcccrggagacagtgtttctttaagtatcacttgctcaagaatgtgaaggagcgccaagccagtaagggcagcacctgcgaaactttatttgtacagaaggcagacccaccaggtgggagccggctctggtttcctataccccaaccttgaaattctcctgcaaatctcagtggggtttt

SEQ ID NO: 475069 - DNA, 631 bp, Homo sapiens
tctagtagtaaatttacttccttagctttcccaggaagcactttctcctctaacaatggttaccattagttagcacctgcaaaaactgtactcggtgctttaaatatgtatttttaattttattttattaaaaaaaataytttttagagacaaggtctcactatgttgcccaggctggcttccaactcctaggctaaagctatcctccccctcagcctcctgagtagctgggactacaggcataagccactgtgcccagtttgtatttcatttaatcctcatagtcatcccttggggtataggatgaagaaaaaaagaggaaaagtgacttcttccaagtcacatagccgctgaggctgaggagtgggaatcccggccctggtgggccctgattttcattacaccactaggcctctctaattttagtaacgtgccttcctctatagcctctctgactttgacaacttgccagttgccttctatggatattcacagcattaaaacaatctgagctagccgtggaggtgcacagaaatcagtacaacccacccagagctacaggacccgggtgagggcttccagcggccctggagccgtgcatggaaaagctgtctggacaagctcagcggga

SEQ ID NO: 475070 - DNA, 639 bp, Homo sapiens
ttttcttttctttgaaaaaagacctgttctgtttcctttggcaatcattcctgtactgtcctaggtttggcatgcttcctgtgactccggcctgtctaaagcgattccagagggcagatcagtcttacactctcttccccacttttctcagctcctcgargacagcctgagtatgttatggctttcgacagacagagatgtcaatcaaacagctcagccacctaggctctcctctcattattagggatgttttccctccagaatcctcactcttatcttgctgtgtctcaggcaacagtgatgccatcttttccaccaagaagtcatacactgaaccttgagtttttccctgaagtctctttttttctcagaattgttttatgttcttttgagtagccttgaataacagcagcatgtgtacctgttgattgtgctgtctttatggggcttctccttggagctccttttgagcttaacagagagtctctatatagaaagaatcactgtgcacagaaagatacactggctggcaccatgaagagctctgtgaaaaagcagcctttatttttgttcagtgagattaatctgattaattctaacgctattatgtttaaaaacagctcatcaagaagacaagca

SEQ ID NO: 475071 - DNA, 613 bp, Homo sapiens
attaataaaaattttgtgtctgctcttttgttagtctgtcttttgttaggttaatttgcacgcccccagcaaaagaagagagtagaggaaaaatttttcctccccaacaacatacatcatctcactgaacccttatccctcttagtgcggaaggtacataccccattttttagatccaaaaacaaaactaagggatgttaaggggctggtccaaggtcacgtagctaacaggtggcagagctgggatttgtacccatgcctacacgaccacacagcctgaacatccagcaactatcctgcaattccagtgtgtaggaaacacagtctaacagagttagcagacagggattggagcagcgtaaaatccatattctaattctagccccattactatcaacaaaatattaatcatgtaaatatttgtgttgttctttatagttctgataataaagtcattgcwtcagtggtatgaccttgagtaaatcgtgtaacccatctgtgtcttaatgttttcccatgaatcagcacatggcttttaaattcttactatgttttaagtcctattctaattggaagactgtaatcttttattttgtttgaaataaaatagcaa

SEQ ID NO: 475072 - DNA, 521 bp, Homo sapiens
gcaattgggccactctccaggacaggggtcctcactttaggggccccactgtccaggctgttttgatcttacagctctgctctctcaacatgctgaggacgatggaagagataacttccggtcctgtctagttaggtggagtggtaaaaccaatcctggtcaatggactttgagtagcagtgatatgtctcacttcaggatcaaagcttagaaaagcaggtgtgaattttccctgtgatcttttcctttgttggtcaatttcggagcccatgacttgagatgacagaaccagcgacagaaatcttttcaataactgagccacttcatcacacagggcagttgcccagggaactcacctgactcacaycagacccacagctttattgtattaaggccactgagattccaggcgaaagttgctactgcaatgtgaaaaaacttatcctgactggaaaaaaaaaaaatgctgaggccagtagtggtaagctgttgaaaaaaaattaaaatactggcttagcagt

SEQ ID NO: 475073 - DNA, 589 bp, Homo sapiens
agtgagaacctgtctccaataactaataataataataattttaaaatataaaatgacacatagtttacatatttttcttaagttgtgatggagaaccttcataataatatgaaaaatccaatatattattccttagggtcttagttattaatctcattatgatgtcataacagatgttggcactcagctctaggtagagagaagaggtggcattgacaatttaaaaatgattttraaatcagtcattttctaattctatttagtagtaacagtagcactgtagtaattgctgcagtagtagcagttaacatttactgagttctaacacataaaaaactgtactaaacactacacatatatatcatttaatccccaaaatagctaatgttggaggtataattttacagatgaggaaatgaaatggcaagaggttacaaaatgtatccaaagttagaggactcaaaccaaatcagtctgatagcaaagtcactgcttttaactacaatgtcagtgatctcaaagtgtggtccccagaccagcagcatcaacatcacctgagaatgtgttaggaatgcagattctcaaccct

SEQ ID NO: 475074 - DNA, 636 bp, Homo sapiens
ccacaacccacataataccaattcaacctacaaacacaatcatgagatttctctttgctggtaaccagacaataggcccatccacactgcaattctgtccagttgagaaggtgaggcaacaaaaatctgcttagattgacagcaaacacataagtattgtgcctgagaagtttttaagcaggaaggcttgaatttacatgtttgtacaaaaccaaaaccccttccttactttgtctctctctactctctccatcttcccttttatttccttaatgatggtcttctagttctacctaccctaggttcatgttaggctcatagtacaggttctctcctttatcatttcattattctatggagttatagctgttcttgtgtccttatggtctgcaaatgccagaaattgttcaaatggtcacctcttgtatcatttagcttctgctgcataacaaattaccccraaacttagtggcttaatataacaaccttttttttttttttatctcatgattcttcagtccattaagttaggctgggttcatccaagcagttctggccaggttggctggggtttggctggttgaggggtctcaactgagatccctcatctgtactttatgtggtttctcaccttcc

SEQ ID NO: 475075 - DNA, 652 bp, Homo sapiens
aggttgacctacccagctttacctggtctgggtggagaggagggcatatttgtacattcccattacctttcagttaggtcacccagcctccagggagcatggctcgacagtgatcccaggctctgacccagcagattagcaccctcttctgtgggtggagacagaaggcctctctcatttggggcaatggagaaatccaaagagaggggcacagtggccccacattccaagtgtttagtcaacaccttctgtgtttccctacagcatgaattgggctgattctttgggttgtatgaccagtgatggaaatttgtcccatgttcttgctcattcctcaagtttacagcacacctttgagatagacattcagaattcatctgtagctggggtagatctaagtgtttattgctttgtttgttatagttaaaatcaggtgacccattgcatggccccagttgattgtatctatttggtattcatcatgcaatgtccctaatccattgtaatttgttatcagatgtaagtattgctttcactccctccttctctggatcttcaggactatgaaatcaacagggaagctaagtgttaagatggaaggtgaaaggagaaattaagaggagaactkgtctggcgggagctgagatcaggc

SEQ ID NO: 475076 - DNA, 555 bp, Homo sapiens
tcatttaatggagcttttttagtggtattctgtgcaacgtatctaagagtatattccttctagagatggtttacatttgtttctstcttgtgctcaaggcattactagaaggagctgcttttatgtggctttcttaattgtgaggctctgagacaatgcagatagtgtagagcaggcctgtggttataaattgttaagaagatgttcttggctacccagatccccagtctagatagacgggcttctgtgccacctccctttgacagtgcgcatatatatatatttactttgcctttgcacaaagaccataaaacttcaaggatcatgtttttttaaggtctgcctccccattttatccagtcccaaggctttgtgtctcatccctatatggctattcaaacccaagcttctttctttttaaaaactgctctgaacacagccattgcatcagcaccacttaccactctagttttcagcttccttttttttttccgtctctaagaattttcttatgagatcagccatgcatttaaaggatttttgttttactttatc

SEQ ID NO: 475077 - DNA, 555 bp, Homo sapiens
tcatttaatggagcttttttagtggtattctgtgcaacgtatctaagagtatattccttctagagatggtttacatttgtttctgtcttgtgctcaaggcattactagaaggagctgcttttatgtggctttcttaattgtgaggctctgagacaatgcagatagtgtagagcaggcctgtggttataaattgttaagaagatgttcttggctacccagatccccagtctagatagacgggcttctgtgccacctccctttgacagtgcgcatatatatatatttactttgcctttgcacaaagaccataaaacttcaaggatcatgtttttttaaggtctgcctccccattttatccagtcccaaggctttgtgtctcatccctatatggctattcaaacccaagcttctttctttttaaaaactgctctgaacacagccattgcmtcagcaccacttaccactctagttttcagcttccttttttttttccgtctctaagaattttcttatgagatcagccatgcatttaaaggatttttgttttactttatc

SEQ ID NO: 475078 - DNA, 544 bp, Homo sapiens
ccctttcctcccgacccctatagcagaagccctcctccattctctattctgccctatcgaaaggatttagtgttaggacctggatgctcccactttgcatggctacctgcaaatgactgtccatgcccaggcaattcctgagatgtgacacctaccatgcaggatccctttggctactgagtgatgaactgactgtaggggcaggggtgaatgcaaagagcccatttatgaggccatcacaatgatccaggtgagagaaggtggtaggttggttcaggatcacagtggtggggtggagctcactggctgcatactttttctttttcttttttttttttttttgagacagggtcttgcccttgctctgttgcccaggctagagtgcagtagtgcgatcacagcacactgcagcctccacctccttgcaggtgactggattctgaatatattctgtaggtagcatcaktgggatttattaacatcttggatataggatatgtgaaaagagaccagtcaagaatgacttcaagatttgagacctggg

SEQ ID NO: 475079 - DNA, 651 bp, Homo sapiens
acagacatttgtaacatttttcatagttctggagactggaagtctgagatcagggagtcagcagggcagggttctggtgagggccctcttctgggcagattgccagcttcttttattgtatcctccccaggagagagtggggagctgaggcaagctctcttgtgactccaagggcaccaaactcatgacctcttccaatcctaatcacctcccaaaggctcctgctcctaaaagcatcacatcaagggggtgggtagggtttccacatatgaactttgcaggggcacaaacattcagtccatagcaggcactcagccaggccagaatattgaaatattttagattcagtcactgtgtctgggagatggaaaacagctctttagtttagcctagagaaggaagaggagtcagggtctggtgctcctaatagccaatgatggctgagtgtaagagtctctgtgtttcattccttcctccatcgggaccaagatggtgtctggtttcactgttgctcagtgattggtctggagtcctttctcatgggtaggtctgtgacttccaattcttyggtatctctcttttcagggtaggctcttggttaagggcttgctgatatgggagaatgtagctctcagcaaatctacatgaaca

SEQ ID NO: 475080 - DNA, 582 bp, Homo sapiens
ttcttttattgtaattgcttttaactttattaaacaaggtatataactttattcagttaatattatgtagctaagattcatccagcttattgtatatcactgattcatttgttttgactgctacataatattctattgggtgaatacatcacaatttagtctgccattgagaggtgtttgacttatttctagccttttctcttgtaagcagtgcttgtataaacatttgtagtgtctcctcttgtaaatgtgcragcatgtgctgggtacttatttaggcatgcaattgccaagccataagatatataactagtctagtttagtacaaggtttctcaaacttggcactgctgaaatttggggcagataattctttgtcccgggggctgttgtgtgcagcatagggtgtttagctgaatggctggtctctatacacttggtgctgatagtaccacctccgagttgtgacaaccaaaaatgactccagacattgccaaatatcctgaggcagggggtacacaaatcacatctggctcagaaacactactttaaagaataaaactgaggcaattacaaagtgatt

SEQ ID NO: 475081 - DNA, 582 bp, Homo sapiens
ttcttttattgtaattgcttttaactttattaaacaaggtatataactttattcagttaatattatgtagctaagattcatccagcttattgtatatcactgattcatttgttttgactgctacataatattctattgggtgaatacatcacaatttagtctgccattgagaggtgtttgacttatttctagccttttctcttgtaagcagtgcttgtataaacatttgtagtgtctcctcttgtaaatgtgcgagcatgtgctgggtacttayttaggcatgcaattgccaagccataagatatataactagtctagtttagtacaaggtttctcaaacttggcactgctgaaatttggggcagataattctttgtcccgggggctgttgtgtgcagcatagggtgtttagctgaatggctggtctctatacacttggtgctgatagtaccacctccgagttgtgacaaccaaaaatgactccagacattgccaaatatcctgaggcagggggtacacaaatcacatctggctcagaaacactactttaaagaataaaactgaggcaattacaaagtgatt

SEQ ID NO: 475082 - DNA, 582 bp, Homo sapiens
ttcttttattgtaattgcttttaactttattaaacaaggtatataactttattcagttaatattatgtagctaagattcatccagcttattgtatatcactgattcatttgttttgactgctacataatattctattgggtgaatacatcacaatttagtctgccattgagaggtgtttgacttatttctagccttttctcttgtaagcagtgcttgtataaacatttgtagtgtctcctcttgtaaatgtgcgagcatgtgctgggtacttatttaggcatgcaattgccaagccataagatatataactagtctagtttagtacaaggtttctcaaacttggcactgctgaaatttggggcagataattctttgtcccgggggctgttgtgtgcagcatagggtgtttagctgaatggctggtctctatacacttggtgctgatagtaccacctccgagttgtgacaaccaraaatgactccagacattgccaaatatcctgaggcagggggtacacaaatcacatctggctcagaaacactactttaaagaataaaactgaggcaattacaaagtgatt

SEQ ID NO: 475083 - DNA, 504 bp, Homo sapiens
ctgctcaaagaagacataaatatgcatttgcctgcattccctgggaagtgaaatgaatgcctgcaagctctgaataaagaatgttgacattctctatccattcatgttaactcagatgtaatttaatgcttcacccctcatagtataaatctccccatctgtttatttactcactaatgttgatttcaaaataattccttcaaaaaataaataaaacaggacgcattctttatgttaatttagggggaaaatcttttcatgagtaaaatatataccagaaataacagatttttatgaatctctttgttgatgttgaactggcgttggggatctgtactgtagcatcttattaacatagtttttctacttgacattaatcactggggattggtgcacttccccaaactgaccttcctacccccagaracatgattatttcagagaagatactgatacctcacagattgactctgtgggtgataaggctaagatcattttgtgaaa

SEQ ID NO: 475084 - DNA, 572 bp, Homo sapiens
tgtgaccttagcattcctgattccccctcccttatagagatgcccacccagatatcaccctatgtgctacattagaaatccatttcttcttgtgtcatattccagatgttatctcttgatgtacagcttctcagaacacccccagattcttgagcaagtatcatctgtctcctaacggctatggtggaatatgacacttgatttggagttaggcagacctgattttgaagccccagctctgccatatccctaagcatggttttgaacctgtttcctagtttcttcatttataaggggaagaaatgataaccatgagagtgatcatagcagaagataccattcattaaatgattacttgatgcaaggaattgtattaagcagagtacagaggttttcatttacttcattaaaacaaaatctgtgtcacagtagatggcattacctgcattttgcagatggaaaaacttgmggtttactatacttaagtaatgtaagtattacttaaattaaactatttaggcagcctaaatagtggcaaagcaacaactgaaagccagtgccgtctgagtttg

SEQ ID NO: 475085 - DNA, 629 bp, Homo sapiens
gcacagggcctttgggcaggccaggggtatgcccctggtgggacagctgggtgacayagagctgtttctcaggggctggggggcacagaggctgtgcagtctggggcatatcagctgcttagtgactcaagaaacattcctgctttggggagagcacacagtggttcagctggctcaaggcaggttcacctgcacaactgtttccctggctggaagtgtgggtgacatagattagcttccctgctgtgcaaaatcagagtcacagctggtcgtgggtccaggtttcacacagctggggttgtggctttcatccacctgtgtaggattggtagaatgaagatggaggccgccttacgcacagtgttggagaggtgcagtggctacttgccccgcagaggagagtgcgttctagaagtggatctcatctcaaggtcacaccatattgtagcagcttggctcacaggggatgggtagggagtgggagtgcacaccttgtgctactaacccagagcaatacagctttgtgaattcctagcaactcccctaaactgggtccagagcgcatgaggactgtgtgattcttgtgcactataggaaccgtaagtgtttacagtgacaatgggggctgg

SEQ ID NO: 475086 - DNA, 629 bp, Homo sapiens
gcacagggcctttgggcaggccaggggtatgcccctggtgggacagctgggtgacacagagctgtttctcaggggctggggggcacagaggctgtgcagtctggggcatatcagctgcttagtgactcaagaaacattcctgctttggggagagcacacagtggttcagctggctcaaggcaggttcacctgcacaactgtttccctggctggaagtgtgggtgacatagattagcttccctgctgtgcaaaatcagagtcacagctggtcgtgggtccaggtttcacacagctggggttgtggctttcatccacctgtgtaggattggtagaatgaagatggaggccgccttacgcacagtgttggagaggtgcrgtggctacttgccccgcagaggagagtgcgttctagaagtggatctcatctcaaggtcacaccatattgtagcagcttggctcacaggggatgggtagggagtgggagtgcacaccttgtgctactaacccagagcaatacagctttgtgaattcctagcaactcccctaaactgggtccagagcgcatgaggactgtgtgattcttgtgcactataggaaccgtaagtgtttacagtgacaatgggggctgg

SEQ ID NO: 475087 - DNA, 338 bp, Homo sapiens
gctgttgtcacgtctgaacgcagacctggaattgccagatctatcagtttttcaagagcagccggaaatccggattttcatgtaactctcacaatttttaactgttggcttagtgtttttcacaaacactgcaaagggcaaacraaacacatctgtgggccagtactgtcccaggtctttcttcatatgactttcatttaaactttctccacctctgtttgtgcaagagagtctttgaaattgtcagaccgtgtgtgtctcagctttcgtttcatcccactagttctgctcgattgtttatcccatcaagatctttgggagccttgatgacctcccca

SEQ ID NO: 475088 - DNA, 474 bp, Homo sapiens
acacacctgtaatccttgctacctgggagactgaggcatgagaatcacttgaatgcagtaaatggaggtggcagtgagctgggattgtawcactgcagcactccagcctgggtgacagagtgattctgtcttgaaataaaagctctgaactatccagaggctatacacactgtattgggagtgggaaattcattcaacaaatgtttcctctgtgtctgctatatcattaaggtagatactaccctgtctctatggaactatctatctagcaagtcagaaaataaaaatgatgatgggatatatacacagcacactgatacatgcgataccgactaggggaaaacgtggggtagaggaatcactgtaggtcaatctggtgtataagccttgagttggtggagaaggtagagatggcttgaggcaagaactacaccacggaaagtcccagagcaaagatgggggcagagggagcag

SEQ ID NO: 475089 - DNA, 582 bp, Homo sapiens
acaaaaggcagaaagaggcctgaaagagtgtatgtgtttgcctgcagtcgaaggatgggtcagcaggacaggaccagcagttcagtaaggccagagaargggcacacgggggaaagggctaaagatggagagctgagcagaatcacattatgaaagccttacgtataactttaagatgcttggacattaatgttctcaagagtggtccctggtcttatttgcattggtgatagaacactgtcaatgccaaaaccaacatccctagcgaacacatttattaacgcaaggtggtagctcatgtggacacagccaaggagatactatgcagcaaattctcaataagtctcattaattactgacttggaaagtcaattctataatacataaagtcatagaaacgataggaagtcacttaatatttgcttttggaaggtgtttttttgtttttgtttttgttttttgagacggagtcttcctctattgcccgggttggagtgcagtggcgcaatctcggctcactgcaacctccaccttctgggttccagcgattctcctgcttcagcctcctgagtagctgggact

SEQ ID NO: 475090 - DNA, 582 bp, Homo sapiens
acaaaaggcagaaagaggcctgaaagagtgtatgtgtttgcctgcagtcgaaggatgggtcagcaggacaggaccagcagttcagtaaggccagagaaggggcacacrggggaaagggctaaagatggagagctgagcagaatcacattatgaaagccttacgtataactttaagatgcttggacattaatgttctcaagagtggtccctggtcttatttgcattggtgatagaacactgtcaatgccaaaaccaacatccctagcgaacacatttattaacgcaaggtggtagctcatgtggacacagccaaggagatactatgcagcaaattctcaataagtctcattaattactgacttggaaagtcaattctataatacataaagtcatagaaacgataggaagtcacttaatatttgcttttggaaggtgtttttttgtttttgtttttgttttttgagacggagtcttcctctattgcccgggttggagtgcagtggcgcaatctcggctcactgcaacctccaccttctgggttccagcgattctcctgcttcagcctcctgagtagctgggact

SEQ ID NO: 475091 - DNA, 582 bp, Homo sapiens
acaaaaggcagaaagaggcctgaaagagtgtatgtgtttgcctgcagtcgaaggatgggtcagcaggacaggaccagcagttcagtaaggccagagaaggggcacacgggggaaagggctaaagatggagagctgagcagaatcacattatgaaagccttacgtayaactttaagatgcttggacattaatgttctcaagagtggtccctggtcttatttgcattggtgatagaacactgtcaatgccaaaaccaacatccctagcgaacacatttattaacgcaaggtggtagctcatgtggacacagccaaggagatactatgcagcaaattctcaataagtctcattaattactgacttggaaagtcaattctataatacataaagtcatagaaacgataggaagtcacttaatatttgcttttggaaggtgtttttttgtttttgtttttgttttttgagacggagtcttcctctattgcccgggttggagtgcagtggcgcaatctcggctcactgcaacctccaccttctgggttccagcgattctcctgcttcagcctcctgagtagctgggact

SEQ ID NO: 475092 - DNA, 582 bp, Homo sapiens
acaaaaggcagaaagaggcctgaaagagtgtatgtgtttgcctgcagtcgaaggatgggtcagcaggacaggaccagcagttcagtaaggccagagaaggggcacacgggggaaagggctaaagatggagagctgagcagaatcacattatgaaagccttacgtataactttaagatgcttggacattaatgttctcaagagtggtccctggtcttatttgcattggtgatagaacactgtcaatgccaaaaccaacatccctagcgaacacatttattaacgcaaggtggtagctcatgtggacacagccaaggagatactatgcagcaaattctcaataagtctcattaattactgacttggaaagtcaattctataatacataaagtcatagaaacgataggaagtcacttaatatttgcttttggaaggtgtttttttgtttttgtttttgttttttgagacggagtcttcctctattgcccrggttggagtgcagtggcgcaatctcggctcactgcaacctccaccttctgggttccagcgattctcctgcttcagcctcctgagtagctgggact

SEQ ID NO: 475093 - DNA, 525 bp, Homo sapiens
gtaaatttcccatggcctacaggaaaagttctactcatttctttttttctttttcttttctttcttttttttttttgagacagagtcttgctctgtcactcaggctgcagtgcagtggtgcgatcttggctcactgcagcctctgcctccaaggttcaagtgattctcctgcctcagcctcctgagtagctgggaccataggcaygctccaccatgtccagctaatttttcatgtgtatttttagtagagacaggtttcaccatgttggccaggatggtctcaatctcctgaccttgtgatctgccctccttggcctcccaaaatgctgggattataggcataagccaccatgcccggcccgagatctactcatttctatagtattaaaaagtctgggcagggagtggtggctcacgtctgtaatcccagcacttgagaggccaaggtgggtggatcacttgaggtcaggagtttgagaccagcctgtcaaacatgccgaaaccctgtctctactgaaaatacaa

SEQ ID NO: 475094 - DNA, 509 bp, Homo sapiens
ttccttcaaatgaccctgggaagtcagaagacgaggctaactcatggtaagaacctttaaaaaaaaaaagagagagagagagagagagacagggtctcactctgtcacccaggctggaatgcagtgacacaatcatagctcactgcagcctcaaacttctakactcaagtgatcttcctgcatcaaccttccaaagtgttgacattacaggtgtgagctactgtgcccagccaagaacctttaaccagattaataagctcaccttattagttccctcactttctcctgcatgttgtaggaatttggcaggtcagaagagggaggatgtgggcccttagcctgtagggtggctgagtttccagtcttcccagttccacctctcagcccccggccaccacatccaagggcgctggcctctgctctccctcaacctaagcctctgctcttatcctctgcctctgttaccctcttgcttctaattctccaatatggaccttgatgacttacag

SEQ ID NO: 475095 - DNA, 509 bp, Homo sapiens
ttccttcaaatgaccctgggaagtcagaagacgaggctaactcatggtaagaacctttaaaaaaaaaaagagagagagagagagagagacagggtctcactctgtcacccaggctggaatgcagtgacacaatcatagctcactgcagcctcaaacttctatmctcaagtgatcttcctgcatcaaccttccaaagtgttgacattacaggtgtgagctactgtgcccagccaagaacctttaaccagattaataagctcaccttattagttccctcactttctcctgcatgttgtaggaatttggcaggtcagaagagggaggatgtgggcccttagcctgtagggtggctgagtttccagtcttcccagttccacctctcagcccccggccaccacatccaagggcgctggcctctgctctccctcaacctaagcctctgctcttatcctctgcctctgttaccctcttgcttctaattctccaatatggaccttgatgacttacag

SEQ ID NO: 475096 - DNA, 509 bp, Homo sapiens
ttccttcaaatgaccctgggaagtcagaagacgaggctaactcatggtaagaacctttaaaaaaaaaaagagagagagagagagagagacagggtctcactctgtcacccaggctggaatgcagtgacacaatcatagctcactgcagcctcaaacttctatactcaagtgatcttcctgcatcaaccttccaaagtgtkgacattacaggtgtgagctactgtgcccagccaagaacctttaaccagattaataagctcaccttattagttccctcactttctcctgcatgttgtaggaatttggcaggtcagaagagggaggatgtgggcccttagcctgtagggtggctgagtttccagtcttcccagttccacctctcagcccccggccaccacatccaagggcgctggcctctgctctccctcaacctaagcctctgctcttatcctctgcctctgttaccctcttgcttctaattctccaatatggaccttgatgacttacag

SEQ ID NO: 475097 - DNA, 540 bp, Homo sapiens
tgtgggaggaggatgagggatgagaaactacctactgaggtacaatgtgtactactcgggtgataggcacactaaaatcccagacttcaccaccatacaattcatccatttaaccraaaaccacttgtatacctaaagctatgaaattaaaaaaaagttttcaaaaagaataaaactgtataaattttttgaaaattactttgggtttagaaaagtgaccagttcatgctctgttgcttgaactataaattaacacaaacattcttgtgaaaaattaagaaatgttgatcagaggtctttttaaaaagttcctatatttcaaccaataattctatattggagaatttattcaaagcaaacagtttaggaatgtagaaaaacatttatataaaaaatgttctgggctgggcatgatggctcatgtctgtcatactaatgatttgggaggccaattttgcagaagtaatgcttgaggttgggaattggagatcatcctgagcaacatagtgataccccgtctctacaaaacacttaaaaagt

SEQ ID NO: 475098 - DNA, 540 bp, Homo sapiens
tgtgggaggaggatgagggatgagaaactacctactgaggtacaatgtgtactactcgggtgataggcacactaaaatcccagacttcaccaccatacaattcatccatttaaccaaaaaccacttgtatacctaaagctatgaaattaaaaaaaakttttcaaaaagaataaaactgtataaattttttgaaaattactttgggtttagaaaagtgaccagttcatgctctgttgcttgaactataaattaacacaaacattcttgtgaaaaattaagaaatgttgatcagaggtctttttaaaaagttcctatatttcaaccaataattctatattggagaatttattcaaagcaaacagtttaggaatgtagaaaaacatttatataaaaaatgttctgggctgggcatgatggctcatgtctgtcatactaatgatttgggaggccaattttgcagaagtaatgcttgaggttgggaattggagatcatcctgagcaacatagtgataccccgtctctacaaaacacttaaaaagt

SEQ ID NO: 475099 - DNA, 540 bp, Homo sapiens
tgtgggaggaggatgagggatgagaaactacctactgaggtacaatgtgtactactcgggtgataggcacactaaaatcccagacttcaccaccatacaattcatccatttaaccaaaaaccacttgtatacctaaagctatgaaattaaaaaaaagttttcaaaaagaataaaactgtataaattttttgaaaattactttgggtttagaaaagtgaccagttcatgctctgttgcttgaactataaattaacacaaacattcttgtgaaaaattaagaaatrttgatcagaggtctttttaaaaagttcctatatttcaaccaataattctatattggagaatttattcaaagcaaacagtttaggaatgtagaaaaacatttatataaaaaatgttctgggctgggcatgatggctcatgtctgtcatactaatgatttgggaggccaattttgcagaagtaatgcttgaggttgggaattggagatcatcctgagcaacatagtgataccccgtctctacaaaacacttaaaaagt

SEQ ID NO: 475100 - DNA, 540 bp, Homo sapiens
tgtgggaggaggatgagggatgagaaactacctactgaggtacaatgtgtactactcgggtgataggcacactaaaatcccagacttcaccaccatacaattcatccatttaaccaaaaaccacttgtatacctaaagctatgaaattaaaaaaaagttttcaaaaagaataaaactgtataaattttttgaaaattactttgggtttagaaaagtgaccagttcatgctctgttgcttgaactataaattaacacaaacattcttgtgaaaaattaagaaatgttgatcaraggtctttttaaaaagttcctatatttcaaccaataattctatattggagaatttattcaaagcaaacagtttaggaatgtagaaaaacatttatataaaaaatgttctgggctgggcatgatggctcatgtctgtcatactaatgatttgggaggccaattttgcagaagtaatgcttgaggttgggaattggagatcatcctgagcaacatagtgataccccgtctctacaaaacacttaaaaagt

SEQ ID NO: 475101 - DNA, 551 bp, Homo sapiens
tgtgttttttaacatatgtattgtctatggctggtctcatactacaatggcagagttgattggctgtgacagagaccatttyatcacaagtttaaaatatttactatgtttagtaagataacagtttgaaaatgaaaaggtttgactatctttggtgtatgtaaaaaagctgattgaatcgaatctcaattttaaatgttcataagctacccagattggaaaagacagttcacaggtggcaaataagcatatacaagatgctcaacattattagtccttagggtaatgcacattaaaaccataatgatatgcataatacacacccatcagaatggctaaaatttcaaaatttaaaaacagcaataataagagcttgtgatgatacagaacaacaagaaatgtcgtatacctctggttggaatgcaaaatcaatacaaatactttggaaaacaatttagcagtttcttaataaagaaagacaaagggacaagaagagacttttatggatgatgaacatgttaactctcctgattatggtggtttcaaatgtg

SEQ ID NO: 475102 - DNA, 551 bp, Homo sapiens
tgtgttttttaacatatgtattgtctatggctggtctcatactacaatggcagagttgattggctgtgacagagaccatttcrtcacaagtttaaaatatttactatgtttagtaagataacagtttgaaaatgaaaaggtttgactatctttggtgtatgtaaaaaagctgattgaatcgaatctcaattttaaatgttcataagctacccagattggaaaagacagttcacaggtggcaaataagcatatacaagatgctcaacattattagtccttagggtaatgcacattaaaaccataatgatatgcataatacacacccatcagaatggctaaaatttcaaaatttaaaaacagcaataataagagcttgtgatgatacagaacaacaagaaatgtcgtatacctctggttggaatgcaaaatcaatacaaatactttggaaaacaatttagcagtttcttaataaagaaagacaaagggacaagaagagacttttatggatgatgaacatgttaactctcctgattatggtggtttcaaatgtg

SEQ ID NO: 475103 - DNA, 551 bp, Homo sapiens
tgtgttttttaacatatgtattgtctatggctggtctcatactacaatggcagagttgattggctgtgacagagaccatttcatcacaagtttaaaatatttactatgtttagtaagataacagtttgaaaatgaaaaggtttgactatctttggtgtatgtaaaaaagctgattgaatcgaatctcaattttaaatgttcataagctacccagattggaaaagacagttcacaggtggcaaataagcatatacaagatgctcaacattattagtccttagggtaatgcacattaaaaccataatgatatgcataatacacayccatcagaatggctaaaatttcaaaatttaaaaacagcaataataagagcttgtgatgatacagaacaacaagaaatgtcgtatacctctggttggaatgcaaaatcaatacaaatactttggaaaacaatttagcagtttcttaataaagaaagacaaagggacaagaagagacttttatggatgatgaacatgttaactctcctgattatggtggtttcaaatgtg

SEQ ID NO: 475104 - DNA, 633 bp, Homo sapiens
gtagaccctggggccccaggaccaggaatgctgaatggtagaagtcacccctctgagctggaccggcaggcaagcagcctggctgtgcacatgaacagctcagccactccrcccatggtcttttgtcagattctgccatcataacagctaccacattcacattaactactgccctgtagtcaggatttctttttttattttttattgtatttttcccctgagatggagtcttgctctgttgcccgggctggagtgcagtggtgcaatcttggctcactgcaaactttgcctcccgggttcaagtgattctcctgccttagcctcccaggtagctgggattacaggcatgcaccaccacgcctggctaatttttgtatttttagtagagatggggtttcaccatgttggccaggctggtctcgaactcctgacctcaggtgatccacctgcctcagcctctcaaagcattgggattacaggcgtgagccaccaagcctggcccctagtcatgctttcaatcattcagaggttttactggtacctattgtgtgtcagggtttgtctcagttgctggaggtgaagagatgagcatgcctcagttttcttggcgggagttacaagtgtgaggcacca

SEQ ID NO: 475105 - DNA, 627 bp, Homo sapiens
caagatcagcctgggcaacatggcgagaccccatctctacaaaaaatttttaaaaagtagccaggcatggtggtggcatccagttacttgggatgctgaggtgggaagactgcttgagtctgggaagttgaggttgcaatgagccatgatcacaccactgtaagacactcctgaagaaaagaaacaaggtggggaaattaggctatcaggtatctagatttactgtaaagaaacagtagttgaagcactatggtattagtgaaggaacaacaaaaagatcaatgaaacagaatagagtgcccagaaataatcccacaatcatgcagaaacaatataagaaaaaggcagtatttcaataactgggaaaaaaaataaactatgaaatgcaaaaaaggaaagttggatycacacctcacaccatacataaaaatagtcttcatgtagcttaaatacttatatgtgaaaggcaaaattttagaatattggacaatatttttatgactctgaggtaagagtagatttctaaaaataagacattgaaaacaatgagaaatccaactatattaaaattaggaatttctattcatcaagagacaccaaaaagagactcaaaggacaagccaaagg

SEQ ID NO: 475106 - DNA, 610 bp, Homo sapiens
ctttattcataaaagctaaaagctgtaaagaacctatatgtccatcaacaggagaatggatatgcaaattatatcatgtttcaatgaaatacttggaaataaaaaagaatgaactactagctgggcgcagtggctcacacctctaattccagcacttcgggaggctgaggcaggtggatcacttgagcttgggaagttaaggctgcagtgagccatcactgtactccagccttggtgacacagcgaaacaccctacatcaaaaaaaaaaaraaagaaaaagataaaaagaaaaccaggcatggtggctcacttgagggcaggagttcaagaccagcctgggcaattggcaaaaccccgtctctactaaaataaaaaaattagctgagcatggtagtgcatgcctgtaatcccagttgcttagaaggctgaggcagaagaattccttcaacctgggaggtggaggttgcagtgaactcagatcacgccattgcatttcagcctgggcaacagagtgagactctatctcaaaaatttaaaaaaaaaaaagaagaaattacaaacttattgggaaaatgtgggtgctgatgaaaaagccaaacagttttcgac

SEQ ID NO: 475107 - DNA, 610 bp, Homo sapiens
ctttattcataaaagctaaaagctgtaaagaacctatatgtccatcaacaggagaatggatatgcaaattatatcatgtttcaatgaaatacttggaaataaaaaagaatgaactactagctgggcgcagtggctcacacctctaattccagcacttcgggaggctgaggcaggtggatcacttgagcttgggaagttaaggctgcagtgagccatcactgtactccagccttggtgacacagcgaaacaccctacatcaaaaaaaaaaagaaaraaaaagataaaaagaaaaccaggcatggtggctcacttgagggcaggagttcaagaccagcctgggcaattggcaaaaccccgtctctactaaaataaaaaaattagctgagcatggtagtgcatgcctgtaatcccagttgcttagaaggctgaggcagaagaattccttcaacctgggaggtggaggttgcagtgaactcagatcacgccattgcatttcagcctgggcaacagagtgagactctatctcaaaaatttaaaaaaaaaaaagaagaaattacaaacttattgggaaaatgtgggtgctgatgaaaaagccaaacagttttcgac

SEQ ID NO: 475108 - DNA, 610 bp, Homo sapiens
ctttattcataaaagctaaaagctgtaaagaacctatatgtccatcaacaggagaatggatatgcaaattatatcatgtttcaatgaaatacttggaaataaaaaagaatgaactactagctgggcgcagtggctcacacctctaattccagcacttcgggaggctgaggcaggtggatcacttgagcttgggaagttaaggctgcagtgagccatcactgtactccagccttggtgacacagcgaaacaccctacatcaaaaaaaaaaagaaagaaaaagataaaaagaaaaccaggcatggtggctcacttgagggcaggagttcaagaccagcctgggcaattggcaaaaccccgtctctactaaaataaaaaaattagctgagcatggtagtgcatgcctgtaatcccagttgcttagaaggctgaggcagaagaattccttcaacctgggaggtggaggttgcagtgaactcagatcacgccattgcatttcagcctgggcaacagagtgagactctatctcaaaaatttaaaaaaaaaaaagragaaattacaaacttattgggaaaatgtgggtgctgatgaaaaagccaaacagttttcgac

SEQ ID NO: 475109 - DNA, 631 bp, Homo sapiens
aagaaaaacagcaacagtaatagctgatattaagtgctttctatgttgccacacacacgattaacatgtgttaataacaaaattaaccttatttaattctgatgataatcctgtgagacagggayttttcttttctttctttcttttttctttttttttgagacagggtcttgatctgtcgctcagactggagtgcagtagtgcgaacacagctcactgaattcttgacttcctgagctcacacaatcctccagcctcagcctcccaagtagctgggaccacaggcgtgtgccaccaagcccagctaatttttttttctattttttgtacagacggggtctccctatgttgcccaggctggtctcgaactcctgggctcaagcaatccttccacctcagcctcccaaattgctggggttataagtatgagccaccacactcagcagggacaattattatgcccatttacagatgagaaaagttgaagcattatagaggttaaaaacttgtccagagtcactcaaatagtaaaatctgacctgactggctccagaacccacactcacagccactataccacacagcctctcgctgtctatgatggaaattgagcagtgttttgtaattccag

SEQ ID NO: 475110 - DNA, 568 bp, Homo sapiens
gtttcaattcatcctacatgttctctttctccttctgtggttggtgattgtcctgtcagtttagttttcaaagcctttgttgttcaggtcttccaggtacataagccacccagggtagtcagggactttggtcagtggtttatatagtagttaagtgtcaaagactttgctgtgcttatttggctctgttctgcatgtgcatagctcaggggcaatcctgagacttagagttcacatgtagcattaggagttaaacattttcaactcctttcctctctgagatgtcctccacattttctggctcccaggatcctctcttatccagcctccaatggcccctttttctggtcacctagccagacagtatttttctctcagcctctgctccaccacacagttctgtttgcccgtaagagcgaagcagataaagagakaacaaaaacaatctcctattactattcttcagatgacagaaagctcttttcctggttccactggctagagagacgggtcatctctcacatttgtaggtgcctatgttgccatagctgtcaccaggcagtaactg

SEQ ID NO: 475111 - DNA, 621 bp, Homo sapiens
tgtatcattgcaacaggttttcactgggattttgcctgttttaatctacttgtctgtcaaagtaatgtaaaaacagtttttaacttcgacactgaaaaggaatcatctttaaaattaaaatttaggctgatatgaatattgtatactgtattctttctttacatctaaagggaaaaaattcttagtccaagcttcaatcacgattacagtatagcctacattttaaaatatgagtcctttgggaaaatacattaaaattctctctctctctctctctctctctctctctctctctcwcacacacacacacacacacacacacacacataattttagacagttttgaaacaagacttttaaaaaacctattttaatcctaattgtatttctctattcctgaagagttctgtaacatgatgtgttgattggttgtgttaatgttggtccctggaataagattctcatcatctccttcaatcaagcagtcccactgatcaaaatctttatgaagtcctataaaatataaagtgttaatcaacatattaaacttttgagagcattaaacagtttggtgcccctaggtggcaataaagatttacaaattacacaagttccgttagg

SEQ ID NO: 475112 - DNA, 572 bp, Homo sapiens
gtctggacaagggctccttggtgggagggatatgagataccaaggcagtgatatagaacccttttgtaaacccatgcaacagtcgaagtctacagagtgagggagctacctaggcccaccttcagtttgtgcagcacacaggagagactgagaggagagccatagctgtgtctttgaagctggtatctgctagtaaaacaacaccttagaggaaatatggcccacttggaaatcctaactccrcagaacaaaattttacaagcttcctgatggattgacacacacttctagtttgggctgatcagcagcaatgctggaatcctagatccaacacatgctttttctccaggctcttcccacgggtggtccaagatgtcatctcaggttctactctttgactaggaggccctgtgaaagctccagcaaaatggatatagatagaagggaatgaataatccagaagcccagatggaacccaattctcaccctcctagtcccagatgcagggaactctagaacttgcctgaggtatgagctttggtagtagcgccatcaggcaccaagttttatca

SEQ ID NO: 475113 - DNA, 581 bp, Homo sapiens
aggtctaaatatttactttcattatgggcatttattacatttctaattagggagaaaagttatttccatctttggaaaaaaaatcctaaaaatactcaaaaagcaggagctctatattaatagttgacatcttagacttcgggactgtgaaattaaagacgaagtcttttgtcccagggactaaagaattaccttccctaaaatcccaattatattattaaaagctattggtctctgctagtaactttcagtttgtaagtttaatactgcttcaaacattgcttaaaccagtagttttcaaactaagttcttccagcaacttggcattcccgtaaggtttcctaagggataccaggagccagaagacttgtgatggggtagcttagggacatggggctctggcctttcatacccactccagataaaacagctttgtgcttgagtatcaagttctcaatagwtaaaatgatttgcaaactacagcatcgaaagcttttaaaagtgaatgtaccagataaccagacattatgaacctcctggtggaagttcacacacagtctatgaaatgggctgtggaaaaa

SEQ ID NO: 475114 - DNA, 540 bp, Homo sapiens
atttacagccaagactcaagtgttctgattttgtacaatgcttattctgttacactggtgccaaacatgcagataaatctggtagcattttggcatttactgtgctcagtgccacttttcttggtttattcaccaaaaagtaaaggcattctattccagcaaacyagtagaaaatccttaagtaaacagtgcctccgcccgacttccccatcctattaagttttttaaaaaacttactataagccattttttaaagtgagctacagttgttcccccaatatagatgctccacttgaaaatcattacagatttagtgaacgtttgatcacacatcactatttttaaagtaggattctgcttgtgctttataataaaatataccaaaatttaatatctaatgaaagggttggtattccagaatagggaagaagtgtaagttatctatcaatccataacaaatcactgtaaaatatagtgcttaaaataatggttctttgtcatgattcaggggttgactgggcagttctgctgggctcacca

SEQ ID NO: 475115 - DNA, 551 bp, Homo sapiens
caactactcaactcatttaatgagattaatattaccttaatacaagcttaatatgagaaaataaaattagagatcaatttaacttagaaacacagatgtaaagacctcaaaaatatatgaataatgcattttctggcaacatggtgaatgaggtgcccactaaagccaactgaaaacaactaaaatgttagataaaatataaaaatcaacatcttgaatctagccatgaactaacgaaaagtaagaaatatacaagccaggagctgagtgaatacagaagttaactgagtgaaggaaaaaacccctaaagctgcccctcaccctgtggggatttgytgaagtgtgtaactttgaatatagttattcaaggctgggtccttgaagtgaagcccagggcctgcccaaagtagggtatctaataaggaattctgtgcacacacacacacacaatggtgagtctttaaagggctacatgtagagtgaactagaagtaattccccattatcagtaaggaaaactgcctgtcttggtccttggcactcagccatggg

SEQ ID NO: 475116 - DNA, 656 bp, Homo sapiens
attacctagtgctccattaccagaagtagacgtccctggctcctcactttcacagagtccatagtgccttcagttcatgacttgtatccccacccagattataaatcttttgaatctagagaatgggttttgttaattttatgtattaatacctaataaggtactaaaacagattgtcagtaaattattaaatgaacttgaatttgctatgactatttgayagtgttcaaagcaagttaaatagaggtatatttagatagtgtagtctagctaatctatatactgattggtgtactttcacaaatggtgttttttttcccgtaaaatatatagggagagacaggtgaaaaagttcaagagaataagatcactattaacttttgcaatttaacctttataagacactctgaatttgccaaatttaggatttcttaggctgagtcagtctggatatttataaatgagagaggaggcagcatttataaattgagacagaatgctgattaaatatagagaaagtattcccactatattccttatccaaagacttttatatcactaaacaggatgaaagggcttccccccatttcttagttggttgttagtgtctcatccaatattgccacttcctatgcgtaatcactcagtactggtaa

SEQ ID NO: 475117 - DNA, 530 bp, Homo sapiens
aactggggcaactaatgactgagactagaattgttgggtggtatctttggcccctaggcttaggatgaccataggctcagctcattgaagtcactgaacaraacatccacaaacggcctctccacatagcctgaaatttctcatactatagaggcttcaaggcagccaaactttcttcatggtcttcctgggctacaaaagtgagtgtcccctctaaatattggtaaagataagaaccaaatgaagctctttgctgatggaacaactgctgtataaaactgtctggctttttttttagtaaacatacatatgtacagcaatatagataaacttcaaagacattatattaaatgaaagaagttaaagacaaaataatatatgcacacatgattccatttatatgaacaggcaaaaccaatctagtgtaatggaagtcagaagagcagtaccttatgttgtgcctcaaagacagcacaaaagaactttcaatattattaagtaaatagaaattattacaggtgtgatgatag

SEQ ID NO: 475118 - DNA, 530 bp, Homo sapiens
aactggggcaactaatgactgagactagaattgttgggtggtatctttggcccctaggcttaggatgaccataggctcagctcattgaagtcactgaacaaaacatccacaaayggcctctccacatagcctgaaatttctcatactatagaggcttcaaggcagccaaactttcttcatggtcttcctgggctacaaaagtgagtgtcccctctaaatattggtaaagataagaaccaaatgaagctctttgctgatggaacaactgctgtataaaactgtctggctttttttttagtaaacatacatatgtacagcaatatagataaacttcaaagacattatattaaatgaaagaagttaaagacaaaataatatatgcacacatgattccatttatatgaacaggcaaaaccaatctagtgtaatggaagtcagaagagcagtaccttatgttgtgcctcaaagacagcacaaaagaactttcaatattattaagtaaatagaaattattacaggtgtgatgatag

SEQ ID NO: 475119 - DNA, 632 bp, Homo sapiens
tgggaattacaatttgacatgagatttggctggggacacagagccaaaccatacaccagttaactaagaattaatgggagttgaattttactatttttttctgcaacaattgattgaccaaatgatttctctcctttatcacttaatgaggtgaactccaytgatttaccttgaactacattaattgtagcaaatcagaaactgttccctctttttctattctctgtaagagtttgtgtaagattgacactatttcttcctaaaatttttgtaagaactcaccaatgaagccacctatgcttttgtgagaatggttttaatttcaagttcaaattacctttgtcagcaaaggaatatttctagttctgtttcttactgtgctagctgtggtaagttgttttttttccctagaaagttgtccattgttattccaactgacaaatatattgacctaaagttaatagtattgtgttataaacatctgtaagatttataattatgtaactattttcaattctgaaagcggttcctttttttctccttttttctcatagaagtgttgtagacatagtttcatagaattgaaatgtggctcctatcaggtaggactttgtttacactgaagtttggaa

SEQ ID NO: 475120 - DNA, 412 bp, Homo sapiens
ctcaaaaaattttaaaataaaaatgaagtttagtttataaagatgaatacgtacttaaatatgtcaaaattcaagtaaagtgatatttttaactttccttcccatactgtaaacttgaaatcaatccctattttcaaactttgacataaccagaatcaatcaccaattttgtgtttcaaactcatttttatgttttaactgatgytgaacaattcaaatacgaatatgccctactgtagtatagattattggtttccagtcttttaaagaatgagacccttataactatgaacaactttttaagactcccccatgtgagatatgtatactctgtatagtactatgaattatataatgctttaaaaatatacacatatctcaaaaagattagcaagtaaactagacaaacaag

SEQ ID NO: 475121 - DNA, 644 bp, Homo sapiens
gtaaaggaaagtgaggtaatgttgtgaatttaaaagtaacataaagcttttcaatcacttgttaaaaatagcattgcagagaaacattgaaccctccttaaatgtaaatagcacgattcatygaacatctagtcaagatgactaatctttttttctagtaacgctcaacagtctagaaggtacagaaggcggtgggtatcaaggtttataaaaggtcaggaattggaactctggggacctggttgttctcatgagggcacataccaagatcagggtgagctaggaagtttaagtgataggaagataatagatttatttagagaggggaaattgagacagtttcaagcctcggagatggaacagaacaacagagctccaagcactgggatgcagggctggaggtgaccaagtccacgactttgtctttctaaagtgaagtggaggtgagtctgaagaaattatcactgtgattaaggttgttattgagggcaacagggcaagctagcttaggaagaaaaagtttggcctaggtgtaagatgtagttgtctaatattgaacagcacagattttagaacattagcatcaccacagaaaattcgattgaacagcactgtactagaggtacaggaaagtgagagggtag

SEQ ID NO: 475122 - DNA, 644 bp, Homo sapiens
gtaaaggaaagtgaggtaatgttgtgaatttaaaagtaacataaagcttttcaatcacttgttaaaaatagcattgcagagaaacattgaaccctccttaaatgtaaatagcacgattcattgaacatctagtcaagatgactaatctttttttctagtaacgctcaacagtctagaaggtacagaaggcggtgggtatcaaggtttataaaaggtcaggaattggaactctggggacctggttgttctcatgagggcacataccaagatcagggtgagctaggaagtttaagtgataggaagataatagatttatttagagaggggaaattgagacagtttcaagcctcggagatggaacagaacaacagagctccaagcactgggatgcagggctggaggtgaccaagtccacgactttgtctttctaaagtgaagtggaggtgagtctgaagaaattatcactgtgattaaggttgttattgagggcaacagggcaagctagcttaggaagaaaaagtttggcctaggtrtaagatgtagttgtctaatattgaacagcacagattttagaacattagcatcaccacagaaaattcgattgaacagcactgtactagaggtacaggaaagtgagagggtag

SEQ ID NO: 475123 - DNA, 550 bp, Homo sapiens
cagcccacacatagtgcttagagatattttttctatttatttatttatttgaggttgaaagatagcaagaacatgaagaaatggaatttgcgtgacagtcccaaagcaaatctattcaraagaaaaccataattacatatgcagctctcttgacagggatgacagcagtgaatcaacattctgcgctgaagacctaagtcaatatgcatttgattcaaaaaactaccttcattagcacagactatcattagtgatcacagatctatataaggctgaaaaacctaatctctgtgtctctgaaaactgcaaaaccaccttagcagttgcctaatttccctgagagtggaggtttcacttggccattgggctcaagaggccttaaagtgggcaattagcttgctggattatgcagtgtactttgtacctcttcattacattttccaccaggcttgagtcgaacagaagagcttacaatgtcaatgactttgaccatttgagattttgaagcagaatttcttaaccttttcatttctactgtttctcaattgat

SEQ ID NO: 475124 - DNA, 505 bp, Homo sapiens
aacaaatgtggtatattcatacaatggaatattattcaacaataaagaattcagtatcaatgcatgctattacatgtataaaccttgaaaacattatgctaaatgaaagaagccggaatgacataatttcatgattccatttaagtgaaatgtccactatagacaagtctatagtggattaatgattgcctagggttggagggggtatggggrattgaagattgagggtcaaagggtttggggggtgtactgaaaatattctaaattgtgttaatggaggcacaactctgtgaatgcactaatgtcactgaattgtacattttaaacaggcagattgtgtggtatttcagttgcatctctataaaggtgttaaaactaaatatagaacaattttcctaagtagtggcccctcctcatttattggaccaatagtttgggaggaaccagtcatgaccttcctgatacaaatcaacacctacagataggatgggaggcaattgtgcta

SEQ ID NO: 475125 - DNA, 588 bp, Homo sapiens
cgatcctctcccccttctctggcctgttgctttgtagctctgtgtgtggatctcaggagacacaggggagtgggacactgccaagtgtatgggttctatgagggatgtgcttgttctcctgctgctgccagccaaaatgccactgtaaaacagcatcactcgtgcctcctcgggtcagcgacagcaaaccttagcgcgccccctcccagggaatgttacctgccaacccccatcccttccttgtgacagcccaggatcggaatcctggcttaggtagaagcaaatgacrtcaccttctcccctcctcttctctctctctttttatttatttattttttcattgttgttttttggtttctggttgttgttttgtgtgtgtgtgttttattgttttattttattattttttttcttttggctcatagaagtcctttcctttcatgtccttggtgagggaagattatcaaatagaaccaaggtgatagagaagaaaaggaagctgtagctgagatttcacatccaactgagcacgacccaccattgtgttgtattttttgtgtttaccttatgctaacagatgcaaatact

SEQ ID NO: 475126 - DNA, 516 bp, Homo sapiens
aaccactgccctccagcctgggtgatatcgcgaggctctgtctctaaataaataaataaataaataaaactcttccatcctcaacaacatattaaacatttagtttatttccaatctcataggtgcaaaacagtatcccattgtaattgatatttgcatttcttttgttatactgtataatacatccatacattggaacrctgcttagaagagtgaggacagatgatattatacatctgaaagaataaagatgtatacataccatttaaggaaaaataaataaacactgatgtagtcaactcacagtttacgaaatggaacattagcagtgccttggaagtctccaatctcatctctctcctttcccgccagcggtcaccactatgctaaattttgtatagctcattacctgcctctctattatttatcatctatatataatatatttatcatctatatatatttttaagatatattttttaaaatctaccttttttgaatttgcacaaatacagt

SEQ ID NO: 475127 - DNA, 587 bp, Homo sapiens
tggagggccaacccaagagcctttctgtccccaaattaatctcctgtcatcccacaaatgtaaacacatttaaaactttagtcttagaaaactttattaaaatggaaatattctcagagggtgttaagagttataactttagatattattgaagacctcagctaggattagtaagcaggctcatgaaaaggaaacatcttaaagagcgaggagaggggatccctgaaaaaaggagaagggcctccatgaggaacagacccagggacttaacactggtacttyacactggtgatgttcctctaaccgtgttagcaattgagtatgcgatattcaactcaacctttgaaagagctgaaattagagagcatgttgtctgcaaccacttttcatgccattagcaaaaagtgctataccctactacaagaataactctagagtcctgctaaagagattaaaaagaaattggcaaaaaattgctgcttgaaattacagattcagtgcctccaacatttaaaacaatgaaaagagaaaagctattatacgtactccataaaatcctgcactttatccatgatggaaggtttcgt

SEQ ID NO: 475128 - DNA, 587 bp, Homo sapiens
tggagggccaacccaagagcctttctgtccccaaattaatctcctgtcatcccacaaatgtaaacacatttaaaactttagtcttagaaaactttattaaaatggaaatattctcagagggtgttaagagttataactttagatattattgaagacctcagctaggattagtaagcaggctcatgaaaaggaaacatcttaaagagcgaggagaggggatccctgaaaaaaggagaagggcctccatgaggaacagacccagggacttaacactggtactttacactggtgatgttcctctaaccgtgttagcaattgagtatgcgatattcaactcaacctttgaaagagctgaaattagagagcatgttgtctgcaaccacttttcatgccattascaaaaagtgctataccctactacaagaataactctagagtcctgctaaagagattaaaaagaaattggcaaaaaattgctgcttgaaattacagattcagtgcctccaacatttaaaacaatgaaaagagaaaagctattatacgtactccataaaatcctgcactttatccatgatggaaggtttcgt

SEQ ID NO: 475129 - DNA, 614 bp, Homo sapiens
ttcatatcatttataaaagtgaatggttgatgataaaccttttttycccccatactggaaaggatttcctgagatcattatttctttttttctctgcctcagcctcccgagtagctgggattacaggcgactgccaccacacctggctaatttttgtatttttagtagagacggagtttcaccatgttggccaggctggtcttaaactccttaactcgtgatccacccacctcggcctcccaaagtgctgggattataggcgtgagccactgtgcctggccaagatcactatttctttatgaatttttagttaacagtcattgtatttagctacaaataaatctttaagcatggaacagaatcagacttagaccagaagaaaaatattatcatgaaaggcctcccaattgtgattattgcaattatcatattgtgatagatggttcatgatttagaggatcagttaggtcctgcaagacagagagacaaagcaggggcaaatctccctggagttttctttgtggagggtacggtaggcaaaatgatggtcccccaaaatgttcacatcaaaattctcaaaacctgtcctatgttatgttacatggcaagagaga

SEQ ID NO: 475130 - DNA, 624 bp, Homo sapiens
cctatttttgtcttacttagctccttgtacaaagttctgttcttagcagtgaattataattattatcaaattgagttataatatggcacactgcttacgtatctttgttttctttttttttttttttttttttttttttttgagacggagtctggctttgtgccccaggctgctcggctcactgcaagctccgcctcccgggttcacgccgttctcctgcctcagcctcccggatagctgggactacaggcgcccaccaccatgcccggctaattttttgtatttttagttggacggagtttcactgtgttagccaggatggtctygatctcctgaccttgtgatccgcccgcctcggcctcccaaagtgctgggattacaggcgtgagccaccgcgctcggccgatctttgttttcttaatacctagcccagtttctcggcttattgaatgaatattcagaactgcagcgattttaggtggagtgagaacttatgccaccagcaggggaaatctagactcaggaactcctcgggctccctcgtcctgtttctgagcattgggatcctctgcttccaagtggttgggctggggaaatgggcagacagactcatgggtgtaaagc

SEQ ID NO: 475131 - DNA, 640 bp, Homo sapiens
tccagctgttttaatcagtgacatttattaacatgcttcaaaagtgaccaaagtgtccagccagcacaatagccgaggcaatcaacgttctcttagtgtgtgatctcctccaaaacaccaaataaataggtttaggaataacctcaaataaattgtaatttaacttcgcccaaaattatacatcctctactgctcttccctgctcctgtaaagatactagcgggaggggagaaagctcaaatgactctgtaatttagaattacaaccagagaagaaatacttcaagcacaataaagacgttccattgaagagcgacattcattctggaatgtttgttttgaaaacaactcttctgggggaattcaaaaggtactgaacaaagcaacrtaaagtaagttttgggttgttttgcaaaataaaaatatacaattgagtggaccagatggcaaaaacataccaattacaatctgaatgctatatttaaaacccttaaattctgaaggcctgaatatcaacaaacctatttatgtttatgatcctaaaaagacattaaatattattaaacccccaacttccaaaacatagagacccagcaaactgggctagtggtatctcagtacacagtcacacatgactagac

SEQ ID NO: 475132 - DNA, 483 bp, Homo sapiens
taatttgcagtgagaaattcacactgcaaaactatttttcaacaatgggtacggagagaaaaggaaagctgaaaagcagtatgctaaaatgttaatagaggatttctggattgtgggtgattttgttttgaatattttttatattttatagaatgtgcaagaatcatttctaaatttaaaattgtaatactgtggaatgataccagatgccttttaaacttacattacatttagtcttaggctagaaccttgacattattaaatggaaagataaccatcattttaatattgtttaggtcactgaaaataaagatgacartgagtttttagatcctatttccctaaatgcccgagaatatttcaacattcatctgtggttgaggtgccgcttagcattggtgactgcatttgttgcacagattcatggcattggaattgtgaaaggtacaaacatttgcttaatcaatgttttcataaaaatta

SEQ ID NO: 475133 - DNA, 522 bp, Homo sapiens
ggtttcttgataccttctaagccccactgtctcaatggctgggttaagatacttaaagtctgcctgcaggttccactaaaatcacaacctgataagatgatatgcaggtttaacgcagtataataaatatataattaatgttttagggtttaaacaaatacgttctgtgtgaccatatataatgcytataaaatatacaaatgcagtcgcttccaagatggctgaatcggaacagctccagtctacagctccaagcaagatcaacgcagatgacaggtgattgctgcatttccaactgaggtacctggtttatctcattggggctggttggacagtgggtgcagcccatggagggccagccaaagcagggcagggcgtcacctcacccagaaagcacaagggtttgggggatttacctttcctagaaaagggaagccatgagtgactatacctggaggaacggtacacttctgcccaaatactgcgcttttcccatggtctttgcaaccagcagaccaggag

SEQ ID NO: 475134 - DNA, 398 bp, Homo sapiens
ttggtttcttgataccttctaagccccactgtctcaatggctgggttaagatacttaaagtctgcctgcaggttccactaaaatcacaacctgataagatgatatgcaggtttaacgcagtataataaatatataattaatgttttagggtttaaacaaatacgttctgtgtgaccatatataatgcttataaaatatacaaatgcagtcgcttccaagatggctgaatcggaacagctccagtctacagctccaagcaagatcaacgcagatgacaggtgattgctgcatttccaactgaggtacctggtttatctcattgggrctggttggacagtgggtgcagcccatggagggccagccaaagcagggcagggcgtcacctcacccagaaagca

SEQ ID NO: 475135 - DNA, 650 bp, Homo sapiens
taatgccatgttattatcagcttgttattataagtcctagaatcaaattaatacatgacaatatccttaatagttcaagaatatcaaatgtcttaaaagcttgtaacataccttgaggattcttgcttctagatttcttgttatgtcttgacaaattccagaaacaaaatattgatacaatgcaaggagaggcagaacctatcaggagaaaaacactctttgtttcaaaatatattttatcaaactaataacctaataatcaaatttagccaaatattaaatataggatatgttatatactgatttgctttccatgctaggaaactatactgttgaaaataagtgaaataatctatctagcacatgcttcataagtttatcggaactttaagatgctatcagagacttacagttcccagtagatgccayttggtaccccaaacctaggttgcacatctctttaagcaggaagaggttaaaatctaatcaattatcttccttgaaaatgattaactcaacataaatatatgaatcactgtggcctgtggaaaaattctagcaaatgagctaccaaataaatggaaaatttaaagcaaaggaactcaatctctgctccctaactggatcctacttattcatttcaatgccag

SEQ ID NO: 475136 - DNA, 556 bp, Homo sapiens
tagcaacagctttttaaaaggattagaactggtcttaaatgatttcaaacataatacaatacatttttctataactatgccctacaaacataacacratacctttttccacaattaatgcagcacaaaacattaaaagttggcgattacctttgagatttagtttcttttctttagtaagaaataaaaacacaccattttattgctgccaattgctcaattattcagaaaaacattctcaatttcttcagctttagagaaaaaaaaaacctcatttcttttccagcacagtgatatgtattatatacgaatatgactaggcagctaaaggttacccaggggatagaactatttcttcaacccagaaatgaatccctttaacagtgagaggggcaccattttgttatttttaaaaaataaacaatatctcaccaagtctgccaagtgttaaatgcacttatcaatctctttaatacatggttttataagttaacaattcatatcagggggcaataaatattttcagtataaagagagagttgaattcagaagaacaa

SEQ ID NO: 475137 - DNA, 572 bp, Homo sapiens
tgtccactgcagaactgatttcctgcttagtggtggggagaaattcccacacatctggtgtcagaatcatgttgtgagggcacagtgggagacactgaatttatttcttcccctccaaagataaaatagccctgtctttacgagttttgctcccctgattgaatcctggctgatacaggcagttagatatatcaacacaaaatttaggaaaaagatctacagtggagatgtaattttaaaagtcatcatcatagagatgtacttagagccacagactgaattaacrcactaaggaagaggcggaggttgcagtgagctgagattataccactgcactccagcctgggtgacagagtgagacttcatctaaaacaaaaacaaaaacaaaaaaaaaaagtactctgggctctagacaccatccccattgtgctttatggctaagttagtcttggcctgatatgaacttcttgtggacagggacttagttcctgtttgccttgactgcaggctctcaataatgtttgttgatttgaatgataaatgccagtaagtggaaatactaaagcagaaat

SEQ ID NO: 475138 - DNA, 523 bp, Homo sapiens
tatttggcatctttaacccactaatagtaaatacagttattgacatcattgagttagagtgaatgttttctacttgttttctctttgtcccatgttttttgttcctttgttmcttcttccctgccttcttttgagttaactgagcattacttaatcttcccttttacttcgttgacttttcagctatgtctctttttcactagttactcaagggatcattaaatacattcttatcacttagagttaatattgtaccactttatataaagtgtaaaaaccttaataatttaccctctttgtcttttctgccattgccaaatattttcctctagaaatgttataagcctcatggcacaacatgtgtatgtgtttactaattttcaatgcgtttaggttatattctatttatattacttcaattttatttccatgctttaaaccacagtgtgataaattttaaatggctgtaaattctagcagaccagaataatagaacaggacagagaagcagtggaataaagac

SEQ ID NO: 475139 - DNA, 564 bp, Homo sapiens
tcagaactttacttatattagattttttttttttttttttgagacaggatctcactctctcacctagacgggcatgcrgtgttgcaatcaaagttcactgcagccttgacctcctgggctcaagcgaccctccctcgcatctcagcctcccgagtagctgggactacaggtgcgtgccaccaaacccggctttttatttttattttttatttttgtagacacaaggttttgctgtgttgcccaggctggcgttgaactcctagcctcaggcaatcctcccactttgacctccaaaagtgctgggatcacaggcgtgagccaccatgcctggccccttacatcattaatcctcgtaataggaggataaagcaggtcttgttattgtctccatttaagagaaggaacaaccgaggcacagagcagtggtgactcttgtatgaggacacagggcaaggagtttgcagagcttcatcactgcatccctgatggtgggccacgtcactcctcaggcaactgccttactgactctgatgatggccagatccctacattggggctttgagg

SEQ ID NO: 475140 - DNA, 629 bp, Homo sapiens
tttcatgagaaatattttttatgaaaaatgctgagcttcgtaacagagtctaataaataggcagcggggtttttgaaggtggttttatctaatttacatttgaggtacccamctggcaagaacttccatattgcagtttctcaccacaggttcttatatgaataaacttctagttacctctgacttcctgataaaactaaattatacacaactgtaagtgatactatttaagatggaatggaaaatcaaggaggaggaatcatgtccaacatttgggtttaacacagggttgaaataaagaaatagctctaagacagaaaacggaaacccggagttcaggagtctggatttcggagtaggaggcaaccaggaaaaattttagggtctgaattattagaaaaactgctgaaggtatcaatcttcccacagaaggagggatggagaggttggagctgaccttagcggacattgaaggacatgtgacatacagacatctcggttacatctggctgatgggggcctcatacacttccttctttgcctcttgaatcagataaaccttttaaatgcatttccactttgctgagaggcagtaaaacgcagaggttagcagcccaatgtatggcctc

SEQ ID NO: 475141 - DNA, 588 bp, Homo sapiens
gggacaggataacgtggacgctgcttggaatcatgctacttctcatcttttgtaaaagcctaagcttatttaagacattgttctggaaatattggatgaagaagagagagacaagatgctttggagggcaaaaagataagaaaatgaggatttttgaggatcgacgtaagaaagaacacggtctccagggcagagagtaaagaaatacacagtgtattgagcacaggctccccaagccccgtcaaaatgtcagtaaaggaattacaaaatgtgtaagcccataaggacaaagagaacagaagaggcgacaagagcagatcagagttatcaataaaagtttagagtttgaaaagtaagtaggtatgttgtaactaatttagcagatgagggataactgaaacctacctttctctagaggcrgataactaaaagaaatgggcagttcacatcatagaaccagggcaagtcttagaaccggaggcaccagataccatggaaatggaggtgaagggtaagactgaaccaggaggagtggtgaatgtttacctaagaagtaatgagacccctgttcctgttttctacctgggt

SEQ ID NO: 475142 - DNA, 588 bp, Homo sapiens
gggacaggataacgtggacgctgcttggaatcatgctacttctcatcttttgtaaaagcctaagcttatttaagacattgttctggaaatattggatgaagaagagagagacaagatgctttggagggcaaaaagataagaaaatgaggatttttgaggatcgacgtaagaaagaacacggtctccagggcagagagtaaagaaatacacagtgtattgagcacaggctccccaagccccgtcaaaatgtcagtaaaggaattacaaaatgtgtaagcccataaggacaaagagaacagaagaggcgacaagagcagatcagagttatcaataaaagtttagagtttgaaaagtaagtaggtatgttgtaactaatttagcagatgagggataactgaaacctacctttctctagaggcggataactaaaagaaatgggcagttcacatcatagaaccagggcaagtcttagaaccggmggcaccagataccatggaaatggaggtgaagggtaagactgaaccaggaggagtggtgaatgtttacctaagaagtaatgagacccctgttcctgttttctacctgggt

SEQ ID NO: 475143 - DNA, 583 bp, Homo sapiens
aatatctcaagaaaattatttcaaatttgtcctcgtagatttacaaggtagttagattcaatatttcagttgaaaaacatgatagataagcattcatttgagataagtaatgatcttagtattagctaaagatttagccatttattcatctcttcttagtatatttagataactctttagataactgtaaaattcttggagaaagaattttttctattcttaaggaagaataaaaaaagtgtctcctgtttcttattattgaagttatacgcatatctcagtgggaacgggaaatatgcaaagacagttttgtatccttttatataaaaaattactctttcacttgaatgtgatgactggagatattttatggtggcagggtgcatacatagtatatctaatatagcatagaaaagggkttttttttagcatcatcaatgaagactctaagctttcaaggccctagtaacatcagtaagaggctagggaaattaataagcaaaatattaacagtaaacagaaaaaagataagtatagggcagcagtgtacaacagtcaatgtggttactctttcaaatttcag

SEQ ID NO: 475144 - DNA, 607 bp, Homo sapiens
ccatggtatccaacaggtccccatatctcattactctgtaaatcagcttatttaagtatgatataatattttttctttcaatgcatggtattcttcttcaaacagtgctaaattgctaggacttacatattaaawagttttggagtgaatgacttcataaacagaattgttatggactttatgaaaaaagatactaagatactaaaatcaccctaaactgagaaagtctaggaacctctagtctagaagaaagacctattcgaactcggaagcaaacaaatgaattaacccagagaaaacctggaaggcaagcaaaatttgcacttctctggagtgttggggcggggagagacacgcaaaacacaaaacaaagctggtgtgcaggtccgttaaaaaaaaaatccactttgagcattgttactgcaaagctctttatctgaggagctcaaagagctttattacaggtaaatatccttgtctccagctgctaataggagaggccaggcccggggagattagcggagaatgcctatttaaggtcacataacagtcagtgacaaagtggagactcacagagtggtctgtaatgggatttgtctgctgtcta

SEQ ID NO: 475145 - DNA, 474 bp, Homo sapiens
aataataatttaaaatatgacagaattctaccctaaacttttcctacttcattttgctattctaatgaaatattgcgttgttagctgtgtttaggtstgcttttcattaaaaataagctttgattataaaccattattgtggcaaaagacttcttaggtctgttatttaatatttaataaggatttttaagtggaaaattactaaatttaaaaatatttgcctgaggagatgcaagtattatgtagacatgaatgtactagtcaacaagacctaacactaggcttcaaagttcaaaatgattttatgtatgaggcaaaaatctttcttttttgacctcttcttccattccatatagtaactactctacgtaattcctccatagctcattcctgctgtaattcagcctccaggagggttgagacctaaggcacccttgttctctgaactcttttgttcttactgggagtcaacca

SEQ ID NO: 475146 - DNA, 576 bp, Homo sapiens
aacattattttaagactcacccatccctaatttggttttctacttgaaggaatgctatctggatgccagaagaggatcatcaccttctagtctgaaacttatcttgcaatagaatgttacttgtttatgggattccaattgcaatttgagttattttttgacagagcactgcattaatgtcaacacaaaaggccacggtgaaaaatgtcttaatttaattttcttttgtgagttaattctgtaattgcctccgaaccactcagcttggtaaagtgagggacatgaagtacttgctgggggtgctggcagggaaggacattttgtaagcatttttaggcattgatggctgtacacggaacactgtattgccaacaggttatttaagacagcgcaattaaaaagtaattagagtaactaaagcatcgagggttttagatctgtgacaactgcaaaaaaacataaatgggatattataagataagaaaatgattgcamgattatgtgaatttttttctttttttctttttaaacacatctatgtatcaaaagaagtttctagcagggtttgcagccaag

SEQ ID NO: 475147 - DNA, 525 bp, Homo sapiens
ggccaagttacaggataaagattgcatgtttcttcctcccaggcaggccagtccctctggatgggtgtgacagggctgctggccagccaccttaggctgtggttccatgaagacaggtgaccagtgtgttgggctgcagtgcatgacatccacagggaacctggaatgctattaatataagaaagcaagttgtggtttaacaaagtaaggcccaacctcctatacttggggtgaggcataaagttaaacctcagcagatacagtggaacgctcaccccctttaaaaatctggtttttgaagaacgtgtaatggcatgcgaagaccaactatgagataatgttgcgcaaaaaaggaacttatgagactgcacataaartatgttatgattttagactcataaagtattctagtttttaaattcatatttaaatattcatataggaaatgaaagtatttgggtgtatatacaaatataaaaagaaaatgcaccaagatgttagcagtagccatatcccaacagtgga

SEQ ID NO: 475148 - DNA, 636 bp, Homo sapiens
gtgacaataatgcccccccccccatgacaacagaggaactgtgccaaagctcagcaaaacaaaatttacttggcaggggagagagtttagaggcttttcacagctctttggaaatgctaataaggtctcaaccttgaaccatgtttgctttttatctgggaaaccctttccagttacaatagcattgatatactaagagattccaagttaggagtttatacagtaggtttatgagacaggtaatccaaaagtcaggtgctccctcttcgcttggaagaacagtgcattttgggacattttaaagcacattgtcaacttctttggccttttttttttttttttttttttttttttgagttggagtctttactctgtcgcccaggctggagcgcaatggcrcgatctcggctcactactacaacctctgcttcctggattcaagtgattctcctgcctcaacttcctgagtagctgggattacaggtgcgtgccaccatgcccagctaatttttatatttttagtagagatggggttctaccgtgttggtcaggctggcctcgaactcctgacctcgtgatccacccacctcggcctctcaaagtgctgggattacaaacgtgagccaccgcatctgg

SEQ ID NO: 475149 - DNA, 558 bp, Homo sapiens
aaaataaataattcagaagactaggttgaatgtccctagatttccacacaatcaaagactacatgtttttttcaaaagatgtgataggattcaaagagcaagaatgagttctaaaccctctctaagaaaaataatatacatatatacataccatgctgtagagaatagcaaagagcatggcatggtagtatacctatatatacaccacattttctttattcattcatccgttgatggacacttaggttgagtctatawgctagctattgtgagtggtgctgcattcaaaatatgagtgcacatatctctcatcttagacctggggaagatatgtctcagcgaggttaggcaactggtaccagagctagtgagttttcgagccaagagtcaaactcaggaactcctgagaaactgtcctcatttatatttagtaaaaatactacttaaggaattccacttctgcttagaatgttagaagccccaagagaaccttgattccaccctaatgagagaaaaaaaaaccagattatttataaaatcatcacttttcttgaggcc

SEQ ID NO: 475150 - DNA, 277 bp, Homo sapiens
taaagcatcctcctctttttgttctccacacccccaccaatttttcccccatggctgtaaatggcagagatgtgggaggggaccaagagtcarggtgggtatctgcatgtgtatgtgaagatatgcatatgtgtggctatccatgtgtgcaccttagataaatctgtccttataaaggtagctcaagacaccatgtagtatcaagtcaactctcagcccaacctgattgatttaccttctgaatatttattgtctataccaccgtcagcacacagca

SEQ ID NO: 475151 - DNA, 658 bp, Homo sapiens
gaactctgactagccccctcactttcacacttgccccgtccaattcctccacaacacagccagaatcatcatcttgcagtgcaagtctgatcctgcagctcaccttctgaacatcctccaagggctccttgttgcccagaactctttaccatgctgcaagccctggcaggtctgcccaccttcctcacacctttctccttcttacattccttgaactaaaagcttgaacagccttggcagcaaagcaggcatgamggcacttgtcagcatagaagccaaatttgtcttgtacttgcattactgatttgtttttggggcaaagaatcaggcccaccaagagaggggcatcactactgaatgtgattcaatttaagcagatggctgatgtgaatggaggaattcttatcatcaacatgatcaccatcgccataatcatcatactcatcatcgccatcaccatcctccccattgtcaccaccaccatcaccatcatgtttgtatgctgctactctgcctggtgctctgctaagcactcctcatgctttctctcacttaattatcccaacagtcctgtgagataatattcttgttatttctgtctcacagatgagaaaactgaggcatagaaagagtaagtgacttgctttagatcatgcag

SEQ ID NO: 475152 - DNA, 520 bp, Homo sapiens
tggcaaagattttttgtgggaaaacctaatctggagacttagaattaggaataaactaagataaatttgaatttgatgtaagtagttgtttagagccgtttcagtaggtaaagcatctaattgtgtctaggtgtttgcatatctttcagtgttgctgtttgtgaggcagcctggaagacattaccttaaccagrtgatcaaggtaagcatccccagtaatgagacagattaacgtcatggaccccctgatgtgatgcagggagaaaagcacattccctctgtggtattctcaccaaaaggagtaacttcaaactaattgtgagaaagcattaggcaacccagattgagagacagtctaaaaactaactgacctgttgtgttcaaaagtggaaggtcatgacggacaagaaaaaattgaggacctgtcacaggccagaggagattaaggagagatgacaactaaatgctatgtggtttctgaagctgatcctaaaagaggaacagagcattctggaaaaac

SEQ ID NO: 475153 - DNA, 520 bp, Homo sapiens
tggcaaagattttttgtgggaaaacctaatctggagacttagaattaggaataaactaagataaatttgaatttgatgtaagtagttgtttagagccgtttcagtaggtaaagcatctaattgtgtctaggtgtttgcatatctttcagtgttgctgtttgtgaggcagcctggaagacattaccttaaccaggtgatcaaggtaagcatccccagtaatgagacagattaacgtcatggaccccctgatgtgatgcagggagaaaagcacattccctctgtggtattctcaccaaaaggagtaacttcaaactaattgtgagaaagcattaggcaacccagattgagagacagtctaaaaactaactgacctgttgtgttcaaaagtggaaggtcatgacggacaagaaaaaattgaggacctgtcacaggccagaggagattaaggagagatgacaactaaatgctaygtggtttctgaagctgatcctaaaagaggaacagagcattctggaaaaac

SEQ ID NO: 475154 - DNA, 594 bp, Homo sapiens
tagagactggtctggctccagtgtcttcttcactagggccccaggttttccttggttttaaataaattctttctagtttcccattaaaaagaagatattatgtgcaaatcacctatgtggaaaggacatcaaatgcccagcaaccaaccaggtaaaactatccaaaatgaaacacakgcaaaatagtggttcttttgtatctgatttttcgaaatgcaaagccaattcattcattggctcaggaatcatcatcctagctgaaccaataatgaatcattctgcttttatagattttgcaaataaaacacttaaaaaaaagaaaaaaaaaaaaagagtctcgctctgtagcccaggctggagtgcagtggggtgatcttgtctcactgcaacctctgcctcccaggttcaagcaattctcctgcctcagcctctcaagtagctgggatttcaggtgtgtgccactacacctggctaatttttgtatttttagtagaaacagggctttcaccatgttggccaggctggtttcaaactcctgacctcaagtgatctacctgccactgtctcccaaagtgctgggatttcaggcatgag

SEQ ID NO: 475155 - DNA, 594 bp, Homo sapiens
tagagactggtctggctccagtgtcttcttcactagggccccaggttttccttggttttaaataaattctttctagtttcccattaaaaagaagatattatgtgcaaatcacctatgtggaaaggacatcaaatgcccagcaaccaaccaggtaaaactatccaaaatgaaacacatgmaaaatagtggttcttttgtatctgatttttcgaaatgcaaagccaattcattcattggctcaggaatcatcatcctagctgaaccaataatgaatcattctgcttttatagattttgcaaataaaacacttaaaaaaaagaaaaaaaaaaaaagagtctcgctctgtagcccaggctggagtgcagtggggtgatcttgtctcactgcaacctctgcctcccaggttcaagcaattctcctgcctcagcctctcaagtagctgggatttcaggtgtgtgccactacacctggctaatttttgtatttttagtagaaacagggctttcaccatgttggccaggctggtttcaaactcctgacctcaagtgatctacctgccactgtctcccaaagtgctgggatttcaggcatgag

SEQ ID NO: 475156 - DNA, 685 bp, Homo sapiens
accatgtagattttgaaacttgcattggttgagaattttcatgactttctgctatatagacattcagccgcactgtagagataggttcaatccaacctgcaggaagcctggctctatctgaattagtggctgccttatcttaagggaacttcaaagtccaattgaaaaatgctgggctagattgaacttgagcactaatttagcttggactaagttgcttggcctttctgggcctatagacccctcatctacaaagcgaaagaaagaaaaaaaccaacactcagattctttgtgttgagaaatatcattacctgaaatgaaaatcccaacagcatttagagaacaaagagcatgggatccagggagagcctgggatctgagtcccagctctgccactcactaaatgtatgacctcatttaactcactatccagctctgaatctgtttcattatttctaaaatagagatcataaaacctatgttaaaattttagaaggattaaaaaagatgatataggcacaggcacagagtagttcatcaataacaattctataaatatttattgagcatatcctatatgcygtgtactatgctaacctccagaaagggagtggtgagtaaatgaggcatcacccctactctcatgggggtagacagacaaaaccttagagtcgcatttatgagt

SEQ ID NO: 475157 - DNA, 420 bp, Homo sapiens
ctgaaactcatctgaaggagcctgattccctccctgaccacagctaatgaaaatgtttggctcgcctggagaagaatctgtgttattctttaaaggaacaatgctaaccacagatgtacagcatctggcatgtggcagatgtttccctgagtgagaggaacagcaactggaccagccrgttcatgagatacctttgggtctaggcatgtattttcctgatttcagctctggattttgcttctcaaaagttcaggggaagtccaaatgcctcttcctatcacatgatattttcataatatgctccctggcctcttatcttctatgattctcaatgtatatgcttgagaaaaagacccatacccttgtccctaggtccttgctcttgctgttctccatgtttgttccgccatttctcttttt

SEQ ID NO: 475158 - DNA, 457 bp, Homo sapiens
taaaatgagactaataaaagtagtagtagccgtaataatcatcataataaaaagtgtctaacacttcctgagggcctaaacatgctaggactattctaagcacattctagatactattttattgagattccatctcagaacactctgcttgggtgggtcctagttttgtcccctttctaaagataacaggacttatcccagagagttggattgagttttaattcaatgagttaaaatttatcaatcttttcctggcatacagtaaggtacatagtaaatgacatatctgttaatattatttattttgccccccatggagagccaggatcccccagattcttccatgcattttgagatgagtttgagcccctctggaggctgctwcagatgctctgtgaatcacacagatcatttggtttacttcttagtgcccagcttagcagtgggcacacagtag

SEQ ID NO: 475159 - DNA, 287 bp, Homo sapiens
taatgtgggtacatgtgggggaattgggttttgaaaggcttgcagaagagatttctttaccactcagatgggtgaacaaaaagctaattaattaaaaacaaagaaaggccctaagcagtaggcttctttctgctcacttggtattgatgrgttgacatttgaccatgaggttgggtctctgagcaggaccccagattcttttttccagcaaccccaggcctgagctggccctggtgagctatggagctgaaagcagtattgttaatggcttttgtacaggaggtctt

SEQ ID NO: 475160 - DNA, 480 bp, Homo sapiens
aattaaaaccaacggtcccttttctgccctcatgtcccccggctttctctcagtttcttgtcattttcctgaaacctcaatggcctggaaaatgagaccacgaaggagatcagggtgaggaagagggagaggccacaaggaccccaagttggagggagaatgttaatagaaatggtctctgcaggttgagtccgtcaagctcggtgtgtttgtattaactccatgaatgcttctaagtcagcttgccatacaattgctagccygctctattagaagggggctttcctgatgttgacttcaattctctaggccatagaagtcaggaaagctaaaaatggaaactggccaatcattcatcccccagggctgggacctcagcgctttctcgtcggctcttcctctttcacagggaaccacaaggagaaaaatctaatcagattgctgcattccaaaatttgctcaggagcgataaaaataaac

SEQ ID NO: 475161 - DNA, 480 bp, Homo sapiens
aattaaaaccaacggtcccttttctgccctcatgtcccccggctttctctcagtttcttgtcattttcctgaaacctcaatggcctggaaaatgagaccacgaaggagatcagggtgaggaagagggagaggccacaaggaccccaagttggagggagaatgttaatagaaatggtctctgcaggttgagtccgtcaagctcggtgtgtttgtattaactccatgaatgcttctaagtcagcttgccatacaattgctagcctkctctattagaagggggctttcctgatgttgacttcaattctctaggccatagaagtcaggaaagctaaaaatggaaactggccaatcattcatcccccagggctgggacctcagcgctttctcgtcggctcttcctctttcacagggaaccacaaggagaaaaatctaatcagattgctgcattccaaaatttgctcaggagcgataaaaataaac

SEQ ID NO: 475162 - DNA, 606 bp, Homo sapiens
ctgcacaatcgcacaatctggctccaggctggtataattagatacctcccctcctgcacgcatctgggtrccttacaccccattcaccaccagaccattttgttctctcacttctttgctcttacttatgttggtttcagcttgggattccaaactctacttatttgctcatggaaatcctacattctgtctgccttcccttctcctttattgagcaaccacagtatgccagcactgtgctgggaggcagaaacgaagagaaacacgactgggcttgatctgagagacttttcaaagactagttttaatatgatcaagggaacaatgaaatctgctggaagaatgtggagggtatggagaacggacacaaaaaggaggtagcaattgagctgggctatgaaggttttgtagaagtcttttcagaagggagaaggcagaggggcagtggtagcaaagacaatgaaaatgacaatattttgagggagtgaaatcctaaattatgctctgtagctggaggaaaatcgagtggggaagaaccaacaggagggaatggctgggaggtggtacaggtggtgtgtgttagtccatttttgcattgccttatag

SEQ ID NO: 475163 - DNA, 478 bp, Homo sapiens
gcacaatcgcacaatctggctccaggctggtataattagatacctcccctcctgcacgcatctgggtaccttacaccccattcaccaccagaccattttgttctctcacttctttgctcttacttatgttggtttcagcttgggattccaaactctacttatttgctcatggaaatcctacattctgtctgccttcccttctcctttattgagcaaccacagtatgccagcactgtgctgggaggcagaaacgaagagaaacacsactgggcttgatctgagagacttttcaaagactagttttaatatgatcaagggaacaatgaaatctgctggaagaatgtggagggtatggagaacggacacaaaaaggaggtagcaattgagctgggctatgaaggttttgtagaagtcttttcagaagggagaaggcagaggggcagtggtagcaaagacaatgaaaatgacaatattttga

SEQ ID NO: 475164 - DNA, 529 bp, Homo sapiens
atcgcacaatctggctccaggctggtataattagatacctcccctcctgcacgcatctgggtaccttacaccccattcaccaccagaccattttgttctctcacttctttgctcttacttatgttggtttcagcttgggattccaaactctacttatttgctcatggaaatcctacattctgtctgccttcccttctcctttattgagcaaccacagtatgccagcactgtgctgggaggcagaaacgaagagaaacacgactgggcttgatytgagagacttttcaaagactagttttaatatgatcaagggaacaatgaaatctgctggaagaatgtggagggtatggagaacggacacaaaaaggaggtagcaattgagctgggctatgaaggttttgtagaagtcttttcagaagggagaaggcagaggggcagtggtagcaaagacaatgaaaatgacaatattttgagggagtgaaatcctaaattatgctctgtagctggaggaaaatcgagtggggaagaa

SEQ ID NO: 475165 - DNA, 584 bp, Homo sapiens
tttatccctgagcagttccttcacctttttatgcttcagtttgttcttctataaagtggaggtaaaactagctcctagmcatgagaacatgtgaggataagatgaggtgatccctgtaatattccttcccgcagaaactctgacaacataggaagtgctgagcacgcgttagtgattcattttttaaaaagtctaactaaaatgccagctcttctgttcaaatttccctgacatcctgagttaacactcactcctttgtcctttgtgctttcgtggcacttttgtaaacctctggttagcacttgttttacagccttttgcatcacagcgtatttgtttttctacttctctatctgacaaatgaaaccctgtgtcttattcattcatctgtggcattccctactttgaaagcacaatactttgactatggtggttaattactcaactattgttgaaggaatgaataaaccccttattaaacagtttatgatgatttaattttaagaaatattagagctaacaaaatatcctccaaaccagtatctttcaaactgttttatcaacccccagtaagacaggcattt

SEQ ID NO: 475166 - DNA, 584 bp, Homo sapiens
tttatccctgagcagttccttcacctttttatgcttcagtttgttcttctataaagtggaggtaaaactagctcctagccatgagaacatgtgaggataagatgaggtgatccctgtaatattccttcccgcagaaactctgacaacataggaagtgctgagcacgcgttagtgattcattttttwaaaagtctaactaaaatgccagctcttctgttcaaatttccctgacatcctgagttaacactcactcctttgtcctttgtgctttcgtggcacttttgtaaacctctggttagcacttgttttacagccttttgcatcacagcgtatttgtttttctacttctctatctgacaaatgaaaccctgtgtcttattcattcatctgtggcattccctactttgaaagcacaatactttgactatggtggttaattactcaactattgttgaaggaatgaataaaccccttattaaacagtttatgatgatttaattttaagaaatattagagctaacaaaatatcctccaaaccagtatctttcaaactgttttatcaacccccagtaagacaggcattt

SEQ ID NO: 475167 - DNA, 584 bp, Homo sapiens
tttatccctgagcagttccttcacctttttatgcttcagtttgttcttctataaagtggaggtaaaactagctcctagccatgagaacatgtgaggataagatgaggtgatccctgtaatattccttcccgcagaaactctgacaacataggaagtgctgagcacgcgttagtgattcattttttaaaaagtctaactaaaatgccagctcttctgttcaaatttccctgacatcctgagttaacactcactcctttgtcctttgtgctttcgtggcacttttgtaaacctctggttagcacttgttttacagycttttgcatcacagcgtatttgtttttctacttctctatctgacaaatgaaaccctgtgtcttattcattcatctgtggcattccctactttgaaagcacaatactttgactatggtggttaattactcaactattgttgaaggaatgaataaaccccttattaaacagtttatgatgatttaattttaagaaatattagagctaacaaaatatcctccaaaccagtatctttcaaactgttttatcaacccccagtaagacaggcattt

SEQ ID NO: 475168 - DNA, 584 bp, Homo sapiens
tttatccctgagcagttccttcacctttttatgcttcagtttgttcttctataaagtggaggtaaaactagctcctagccatgagaacatgtgaggataagatgaggtgatccctgtaatattccttcccgcagaaactctgacaacataggaagtgctgagcacgcgttagtgattcattttttaaaaagtctaactaaaatgccagctcttctgttcaaatttccctgacatcctgagttaacactcactcctttgtcctttgtgctttcgtggcacttttgtaaacctctggttagcacttgttttacagccttttgcatcacagcgtatttgtttttctacttctcyatctgacaaatgaaaccctgtgtcttattcattcatctgtggcattccctactttgaaagcacaatactttgactatggtggttaattactcaactattgttgaaggaatgaataaaccccttattaaacagtttatgatgatttaattttaagaaatattagagctaacaaaatatcctccaaaccagtatctttcaaactgttttatcaacccccagtaagacaggcattt

SEQ ID NO: 475169 - DNA, 535 bp, Homo sapiens
caggaagcatttaaaccagggctatggttaatgttatttgtagcctgagaatgtgactgagggagagggagcttacaggctgctttagctgggctcactctctcaacctcrtagggaagtcgtagtggggtcttactcagtgagagtgaagcctccggaagttctgttccattctctctactcattattcagaccttgtctgtgtcatttaatctttcagtttgttgctccataaaatgtgaaaaaaaaaagtagcaactggtctgatctttcataagcagctactctgaaagcatacttggaagtgcttgcagctctttggaggagggtgaagtatttactggtattatgcctgccttccgtaggcttaccttgacaatatctatgatgtgtccctagtgtgccctgatgaataaagatcccgaagtgaaaaatgtaaagcaatatggtctgtggtgaaaacacccatcacacatcagcccatcccatctgaggtccaaacttttcctggccctgactccttgctatcaagtag

SEQ ID NO: 475170 - DNA, 535 bp, Homo sapiens
caggaagcatttaaaccagggctatggttaatgttatttgtagcctgagaatgtgactgagggagagggagcttacaggctgctttagctgggctcactctctcaacctcgtagggargtcgtagtggggtcttactcagtgagagtgaagcctccggaagttctgttccattctctctactcattattcagaccttgtctgtgtcatttaatctttcagtttgttgctccataaaatgtgaaaaaaaaaagtagcaactggtctgatctttcataagcagctactctgaaagcatacttggaagtgcttgcagctctttggaggagggtgaagtatttactggtattatgcctgccttccgtaggcttaccttgacaatatctatgatgtgtccctagtgtgccctgatgaataaagatcccgaagtgaaaaatgtaaagcaatatggtctgtggtgaaaacacccatcacacatcagcccatcccatctgaggtccaaacttttcctggccctgactccttgctatcaagtag

SEQ ID NO: 475171 - DNA, 591 bp, Homo sapiens
tgggtcactttttcacgtgattcatttgtaccctcagagcctccttgcgatcactcacatatgtaccacttccctttggtgaattgccaacatttttagcaccaaggactggttgtgcggaagacagtttttccatggataggtggtggaggtggtttcaggatgaaactgttccacctcagatcatcaggcattagcttctcatcaggagtgcattaccgagatcccttgagtgtgcagttaacaatagggttcatgcttctgtgagaatctaatgccatccctgatctgatagaaggcggagctcaggcaataatgcttggttgcccgctgctcacttcccgctgtgcggcccagttcctaacgggttcggatatatggatatagtctgagccatgatatcaattggtttcctaggatttattgtatgggcccaccmcatatttacagtaggaatagacgtagatacacgagcctacttcacctccgctactataattatcgccattcccactggcgtcaaagtatttagttggctcgctacgctccacggaagtaacaccaatgatctgctgcagtactctgagccct

SEQ ID NO: 475172 - DNA, 394 bp, Homo sapiens
aaattacaaagagaacatttctggcaaaatagctgatgtacttactcatgaatgatgccttagcttgataacctgtgaagaatgcctattattcacggtttattgataggtattcattaattataatattttgtgaatccatggattcctttattcccagttttcacagtgttcacaactaataattaattcctccaacatcttaggggcaaatttaaagataactgcagtaaaacttgtactgatgttcagatcacggttttgttgcttgaagtcttggactaaggaacaactggttcccaagttatacscggggggaccccataaagggaacctcttcatatgctatcaaagaaagaaattcgcagtatgagagagtcataaatgatagtgg

SEQ ID NO: 475173 - DNA, 525 bp, Homo sapiens
aaattattcaggatttgctctgatagtttagcagtatttgatgacagtttttaaggtgtttcttaatgttggatcaatacaatatgtagccgatgcagaccttggtaacacatctgaggttggagattgaartaccattatgatctctccccatcatgaagatagaggtgaaggggacatttcaaagtgaaaaataaactatgtggtcagatgcatttgagtccaaatccaggctctgttaatatctataaggactgcaaggtcaaagttctcatcagtatccctggaggccatggtacctatctcacaaggctgttgtgaggatttgctaagatgctttatggaaagcacttagcatatggcctggcacacagtgagttctgatgttatttttgtaagattggattgtgcttgacaaacccaggaacagtgacattgacttctgttattcctgagaaccttttacatcatttcattggatgtttctggcctgagattctggcaaaaagaagtataaattttctt

SEQ ID NO: 475174 - DNA, 615 bp, Homo sapiens
tgtgaggtaagatgggttttcatgatatcgcaggttcagtgaagcacagcattactttcaatatatttcacctttaaaccactcaaacattaagaataacaaggcttggctgggcatggtggctcatgcctgtaatcccagcactttgggaggccaaggcaggtggattacctgaggtcaggagttcaagaccaacctggccaacctggtgaaaccccatctctactaaaaatacaaaaaattagccaggcatggtggtggacacctgtaatcccagctacttgggaggctgaggcaggagaatcacttgaacctgggaggcagaggttgcagcgagccaagatcacgccattgcactccagcctgggcaacaagagcgaaactccgccccacccccccaaaaaaaaaaaaaaaaaagaataacaacaaggctgggcgtggtagctcacgcctgtaatccagcactttgggaggcagaggcaggagggttgcttgaggccaggagtttgagaycagcctgggcaacatggtgagaccctgtctctgctttaaaaaaaaaaaaaaaaaattagccaggcatagtggtgatgcctgcagtcccagctactccggagg

SEQ ID NO: 475175 - DNA, 579 bp, Homo sapiens
ccaactttacaaacagttcatgaattcccagtcattaatacattaaccagtgtgtttcccattgcattagtttttctctccattggtttttagaaatattatagaacctatagctttaatgggctatgcttccctctggtgtcctaataaaatactttgtgtctcttataaattgttccacttgtgtgtcagttttgacttgtttaaaaatagtatgtctagttgattgaacaaatcaagattataagcagagsagaataaaaggggctttactgaaatgtctttcctaattcccaaagccaaatgctcttcctctccttgaaatttatcccctttagaatctgtcttgtgtttacttggcacttgaatcaaacttctttcttctgtgtgtgataacattttctcctaatccctgcactcccccccccgaccccttcccccatcccctgctcctaacattttttatgtgggtcgtgacttgtctaagccattctttgtaatccagacgtagctccacctatccttggtggctgctacatttagagcagccacacagtttgggaagggaatatcaagaga

SEQ ID NO: 475176 - DNA, 579 bp, Homo sapiens
ccaactttacaaacagttcatgaattcccagtcattaatacattaaccagtgtgtttcccattgcattagtttttctctccattggtttttagaaatattatagaacctatagctttaatgggctatgcttccctctggtgtcctaataaaatactttgtgtctcttataaattgttccacttgtgtgtcagttttgacttgtttaaaaatagtatgtctagttgattgaacaaatcaagattataagcagagcagaataaaaggggctttactgaaatgtctttcctaattcccaaagccaaatgctcttcctctccttgaaatttatcccctttagaatctgtcttgtgtttacttggcacttgaatcaaacttctttcttctgtgtgtgataacattttctcctaatccctgcactccccmccccgaccccttcccccatcccctgctcctaacattttttatgtgggtcgtgacttgtctaagccattctttgtaatccagacgtagctccacctatccttggtggctgctacatttagagcagccacacagtttgggaagggaatatcaagaga

SEQ ID NO: 475177 - DNA, 621 bp, Homo sapiens
catttttctccaattcagttttcgaggtagggtggtggaataaatataaaaggagaaaaaaaggaagcctgtaagaaatgtccgtggatggggtcggccaggggatctaatgggagcgatttcacggccattatgcagtcagtcctgacaagagaccaggtgcagcgtctcctgggccaccgcaggcccttagcaagtggcagagtttgtggggcctggccactcctgtctgcagtctccctcccctcccaggcagggccactggacttctgccccagagctttctctctacttgcagcaaagrggcctgattcactcactcaaaccacagagtcagggccctgccctctaaaggaaaattgtattttttaaaaagaacttcaggcagaagacaaggcttaaggaaaagaaaccattctaatggtaaaatttcagtcattagtggtggggaaaatagaaccacaaaatgtcagggtcaggggaaacctttgggctcacttaattcaatcttctgcagaaagaatgaggaattttacatatttaagatgcatatttaaaaatgacttttctaaggtcacatggctaatctgtagttgagtttcctattctccaccattcagt

SEQ ID NO: 475178 - DNA, 621 bp, Homo sapiens
catttttctccaattcagttttcgaggtagggtggtggaataaatataaaaggagaaaaaaaggaagcctgtaagaaatgtccgtggatggggtcggccaggggatctaatgggagcgatttcacggccattatgcagtcagtcctgacaagagaccaggtgcagcgtctcctgggccaccgcaggcccttagcaagtggcagagtttgtggggcctggccactcctgtctgcagtctccctcccctcccaggcagggccactggacttctgccccagagctttctctctacttgcagcaaagaggcctgattcactcactcaaaccacagagtcagggccctgccctctaaaggaaaattgtattttttaaaaagaacttcaggcagaagacaaggcttaaggaaaagaaaccattctaatggtaaaatttcagtcattagtggtggggaaaatagaaccacaraatgtcagggtcaggggaaacctttgggctcacttaattcaatcttctgcagaaagaatgaggaattttacatatttaagatgcatatttaaaaatgacttttctaaggtcacatggctaatctgtagttgagtttcctattctccaccattcagt

SEQ ID NO: 475179 - DNA, 478 bp, Homo sapiens
tgaaagtgtctggtcacagcagcaaaatccctctggcagttgttcagtcttggagtttaaaagrctttcaaatgtaaagtcctctgaagaaaaaaaaaaaaaaaagcaagaaaagcaacacctttagggattttcattacaccagaagctaggttcatggtgtccttggtatctcaggatacccttaggccaaaagaaatacctaacaattccatttatcaagtagttatgtataagcaacttaataaatgtgtccttattaacagaaaataatatacataagttaaaagaaaaatattattttatttcactcctaaagagacacaattacttcctaacaaaacatgtgtctctgttgggcactgcagaattctcaagccctgcaatcagattggacactgccaccctcaactcctgtcccacgctgattttcagtagtactttttttcatccttgtaatcactgaaaacctagcttt

SEQ ID NO: 475180 - DNA, 374 bp, Homo sapiens
gcttaaggtactgtttctcaagcttttaaaactatcatcttcctaagcagcctttttacacttttcccccaatcccatgaaattttaataccacaaatatgatgtctgtttgttcatgtgttgagatacacatacacgcacatgtataaagcatatatatataaaatatatatatatatatatatatctgtgttttatgcatayacacagtaacctttttacccacttcccacccccacgaaaaacaaaattccaccctttgggggtgatactgctcctactgaaaacccacgagctagggaaatgggagctgcggaggatcacgtagttctggggcctggcaggggtcacagagttggagaaagagtaaagta

SEQ ID NO: 475181 - DNA, 374 bp, Homo sapiens
gcttaaggtactgtttctcaagcttttaaaactatcatcttcctaagcagcctttttacacttttcccccaatcccatgaaattttaataccacaaatatgatgtctgtttgttcatgtgttgagatacacatacacgcacatgtataaagcatatatatataaaatatatatatatatatatatatctgtgttttatgcatacacacagtaacctttttacccacttcccacccccacgaaaaacaaaattccaccctttgggggtgatactgctcctactgaaaacccacgagctagggaaatgggagctgcggaggatcaygtagttctggggcctggcaggggtcacagagttggagaaagagtaaagta

SEQ ID NO: 475182 - DNA, 598 bp, Homo sapiens
ctgaaactctgggagattaatttaaaattccatgtgccaggcacctttccagagtcataaagccaatggctgagctgacctcccacaatgaaacaaggaagactgactgctaggtacatggatctcaaggagtcatacacatttcaaggacttgatgtcacagtatcttggacaaagatacattcccctaaaacaaatgttccattcatccaaaagatggtctgcctcatgcaccacacccagtttaagcgctttttttttttttttttttgagatggagtctcgctttgtcacccaggctggagtgcagtggcgcgatatcggctcacagcaacctccgcctcccacgttcargcaattctgctgcctcagcctcccgagtagctgggattacaggcacatgctactgcgcctggctaatttttatatttttagtaaaggccaggtttcaccatgtggccaggctggtcttcctgacttcaggtgatccacctgccttggcctcccaaagtgctgggattacaggtgtgagccactgtgtccggccgaagctctttcaaaaatggaaaagatactgaagaactgtttcatgttctca

SEQ ID NO: 475183 - DNA, 521 bp, Homo sapiens
caaaataccatggactgggtggcttataaacaacagaaatttatttcttacggttctggaggctgggaagtccaagatcaaggtgccagcagattgggttcatagacggattcacagatggtgtcctcctgttgtgtcccacatggcagaagaggcataggagctccctggggcctgatttataagggtgctaatctcattcatgagggcctagcccttgtgacctacttacctcccaaaggccccacttcctrttaccatcaccttgggagttagatttccaacatatgaattttggagacacaccaaaatttagaaccagagcactgatggagtaggtgggactgtagccggaactgcaactttttttttttttttgccttgcttctgtccagactgtgaaatggtgtggatttgaccacgtctccccttctctgaacctcagcatcctcagcctctgtctgaggaagcaaacctttgtcccttttctgattggaatattgagggatgggtgagccttt

SEQ ID NO: 475184 - DNA, 521 bp, Homo sapiens
caaaataccatggactgggtggcttataaacaacagaaatttatttcttacggttctggaggctgggaagtccaagatcaaggtgccagcagattgggttcatagacggattcacagatggtgtcctcctgttgtgtcccacatggcagaagaggcataggagctccctggggcctgatttataagggtgctaatctcattcatgagggcctagcccttgtgacctacttacctcccaaaggccccacttcctattaccatcaccttgggagttagatttccaacatatgaattttggagacacaccaaaatttagaaccagagcactgatggagtaggtgggactgtagccggaactgcaacttyttttttttttttgccttgcttctgtccagactgtgaaatggtgtggatttgaccacgtctccccttctctgaacctcagcatcctcagcctctgtctgaggaagcaaacctttgtcccttttctgattggaatattgagggatgggtgagccttt

SEQ ID NO: 475185 - DNA, 497 bp, Homo sapiens
atgtactggtatgtaaggttccagctaagtaaagaaaagggatgtgaaagtgcagccacttccgtgccctttgatcacacacagactacacaagagcacacasaagctacgcatattacagcaacagcgttcctcctattcaagattgtccagtgaaaggaaaactggacctctgaaatgattagcaaagagaggcatgtttccacacacaataaagcacatccaaccatcctcaatacccatcgagaatgctaagatacctcataggacaataacaactttcaattgtcgttgaggtttgacctgatttacacatcacacactatatatctccatctatgcattcccttgatgggtcgtgactcttaacagagtcatcgggcagaggggaatctcctggtggtgaagccttatcctcccacttgagacccacccttctgccctgtgagtgcccggctgggccaacagggacagccatggctcttgcggtgctgagc

SEQ ID NO: 475186 - DNA, 497 bp, Homo sapiens
atgtactggtatgtaaggttccagctaagtaaagaaaagggatgtgaaagtgcagccacttccgtgccctttgatcacacacagactacacaagagcacacagaagctacgcatattacagcaacagcgttcctcctattcaagattgtccagtgaaaggaaaactggacctctgaaatgattagcaaagasaggcatgtttccacacacaataaagcacatccaaccatcctcaatacccatcgagaatgctaagatacctcataggacaataacaactttcaattgtcgttgaggtttgacctgatttacacatcacacactatatatctccatctatgcattcccttgatgggtcgtgactcttaacagagtcatcgggcagaggggaatctcctggtggtgaagccttatcctcccacttgagacccacccttctgccctgtgagtgcccggctgggccaacagggacagccatggctcttgcggtgctgagc

SEQ ID NO: 475187 - DNA, 497 bp, Homo sapiens
atgtactggtatgtaaggttccagctaagtaaagaaaagggatgtgaaagtgcagccacttccgtgccctttgatcacacacagactacacaagagcacacagaagctacgcatattacagcaacagcgttcctcctattcaagattgtccagtgaaaggaaaactggacctctgaaatgattagcaaagagaggcatgtttccacacacaataaagcacatccaaccatcctcaatacccatcgagaatgctaagatacctcataggacaataacaactttcaattgtcgttgaggtttgacctgatttacacatcacacactatatatctccatctatgcattcccttgatgggtcgtgactcttawcagagtcatcgggcagaggggaatctcctggtggtgaagccttatcctcccacttgagacccacccttctgccctgtgagtgcccggctgggccaacagggacagccatggctcttgcggtgctgagc

SEQ ID NO: 475188 - DNA, 546 bp, Homo sapiens
ctgggattataggcacccatcatcatgcctggcttacttttgtatttttgtagagagggggtttcaccatgttggccaggctggtctcaaactcctgacctcaagtgatctgcccgcctcggcctcctaaagtgctgggattacaggcgtgagccaccacacccgccactatcaatcaatggactcctacacttccactcagagcacttcctcctgctgccctgtgccttactgacctactacaccactagcatctcttctgccctctacaaggagttccctgaatyggtctctgtctccagcttaccgcagaataaatccagcgaaaatcatattcaagtcaacacactgttagaagaaaagaatgaccattcctgtgccaaaagaacctgatgatgacataagggtgacggcacagtccaaaggatactgagtgatgatgttcatgaggaggtagaaccacatgatgggcagggtcactccgatgacgggaatttcatataactctgtagaggttacaagaggatatagccatattgctttttc

SEQ ID NO: 475189 - DNA, 546 bp, Homo sapiens
ctgggattataggcacccatcatcatgcctggcttacttttgtatttttgtagagagggggtttcaccatgttggccaggctggtctcaaactcctgacctcaagtgatctgcccgcctcggcctcctaaagtgctgggattacaggcgtgagccaccacacccgccactatcaatcaatggactcctacacttccactcagagcacttcctcctgctgccctgtgccttactgacctactacaccactagcatctcttctgccctctacaaggagttccctgaattggtctctgtctccagcttaccrcagaataaatccagcgaaaatcatattcaagtcaacacactgttagaagaaaagaatgaccattcctgtgccaaaagaacctgatgatgacataagggtgacggcacagtccaaaggatactgagtgatgatgttcatgaggaggtagaaccacatgatgggcagggtcactccgatgacgggaatttcatataactctgtagaggttacaagaggatatagccatattgctttttc

SEQ ID NO: 475190 - DNA, 546 bp, Homo sapiens
ctgggattataggcacccatcatcatgcctggcttacttttgtatttttgtagagagggggtttcaccatgttggccaggctggtctcaaactcctgacctcaagtgatctgcccgcctcggcctcctaaagtgctgggattacaggcgtgagccaccacacccgccactatcaatcaatggactcctacacttccactcagagcacttcctcctgctgccctgtgccttactgacctactacaccactagcatctcttctgccctctacaaggagttccctgaattggtctctgtctccagcttaccgcagaataaatccagcgaaaatcatattcaagtcaacacactgttagaagaaaagaatgaccattcctgtgccaaaagaacctgatgatgacataagggtgacggcacagtccaaaggatactgagtgatgatgttcatgaggaggtagaaccacatgatgggcagggtcactccgatgacgggaatttcatataactctgtagagrttacaagaggatatagccatattgctttttc

SEQ ID NO: 475191 - DNA, 642 bp, Homo sapiens
taattatactaaaataaaatggattttttttgtttttaataagtttttaagccatcatactttggaatttaaaaaattgtacatatttgtgttttgggggaagggagttaatatttatttaatcattttattaggctaaattaatattgatcccaaaacttggtaatgacaatacaggaaaggaaaaaaattataacaaatcttattttttaaaacgtttaattttgaaatagcataagaagtttcaaaggcatatacagggaagttctgtgcaccggtcacccaggatcttccaattataacatctgtcataactatagcacaatatcaaaaccagaaagttgacattggtactctgatgaaaaaatgtttgagataagaaaaaaacaaagtgggctgggtatggtggctcatgcctgtaatccaagcactttgtgaggccgaagtgggyggatcacctgaggttgggagttcgagaccagcctgaccaacatggagaaaccccatctctactaaaaatacagaaaattagccgggcgtggtggtgcatgcctgtaaacccagctacttgggaggctgaggaaggagaatcacttgaacccaggaagcagaggttgccgtgaactgagatcgtgccattgc

SEQ ID NO: 475192 - DNA, 608 bp, Homo sapiens
tctttgccgtactcaagagttgagttcggctctttactgagatctctcttccctactgcagtagcttgaataaaatctatcttaccgtttacaaatatttatttattttttgagacagggtcttgctctgttgcccaggctggaacgcaggggtacggtcatggctcactgcagcctcaacctcccaggctcaagtgatcaccccatctcagcctcctgagtagctgagacaacagacytgccaccatgcctggctatttttttttttatttttgtagagacaaaatcttgctatgttatcagggctggtctcgaactcttgggctcaagggatcctcctgtcctagcctcccaaagtgctggaattacaggcatgagccactgtgcctgggctgtatttccatttttacaagtgtccagtgcatactttttcttttacagtaggaactggggtcatcctgcagaaactgaagccacagcagccattttggagacacagaggaagtgaatccactgccagagtcactgtgggaggcagagggaacacaggggaaatactctagcttctccctccctcccagtttctgtcctccagtctcctgtcagta

SEQ ID NO: 475193 - DNA, 608 bp, Homo sapiens
tctttgccgtactcaagagttgagttcggctctttactgagatctctcttccctactgcagtagcttgaataaaatctatcttaccgtttacaaatatttatttattttttgagacagggtcttgctctgttgcccaggctggaacgcaggggtacggtcatggctcactgcagcctcaacctcccaggctcaagtgatcaccccatctcagcctcctgagtagctgagacaacagacctgccaccatgcctggctatttttttttttatttttgtagagacaaaatcttgctatgttatcagggctggtctcgaactcttgggctcaagggatcctcctgycctagcctcccaaagtgctggaattacaggcatgagccactgtgcctgggctgtatttccatttttacaagtgtccagtgcatactttttcttttacagtaggaactggggtcatcctgcagaaactgaagccacagcagccattttggagacacagaggaagtgaatccactgccagagtcactgtgggaggcagagggaacacaggggaaatactctagcttctccctccctcccagtttctgtcctccagtctcctgtcagta

SEQ ID NO: 475194 - DNA, 635 bp, Homo sapiens
aaactgttgacaaattattggttttctcagtctcttagcaactgctttcaccttgatttcttagcctcttggttctrcttctcttggagatctttttccttcaagccttggatctgtagttagttctctgaggatatcatgccttcatgcatagttttaaaaattatatttatcttgtatagtttatcttgagagaccagtttctctgctacaagctaatctgtcatagtttaaagaagatattttttagaatgtagtatttattcagaagagtctgcaatacctaaatagataacatctactaattttcaaacctgtgtattcagtacccagattaagaaatataacagcccccctgacacaagtttacctatggaacaaacctgcacttgtacccctgaacttaaaataaaagttaaaataaatataacatgactggaatgcagaaaccttctttgtgccttctgcatgtcacaacgtcccccaaaggacctttacactgacttctaacacctttgattcatttttcctgtttttgaaatttatgccaatgttattacagaatatccttttttgatctggcttctttcattcaatattagggatatgagattcactcgtgctttttgtaatat

SEQ ID NO: 475195 - DNA, 575 bp, Homo sapiens
gtttgtcattcccagtgggactttttgtgcctaatgccaacctcatttgcctacataatgattcctatattccactcattgccttggagaaagcctgacagaaactgcatagaaattgctaactttccatctttttagggcagttcattatgagtgtttaggcttctgttatcatatgggctcaccacaatcctggtagtttcttatttattttgaaataggctaatgatattaagamctgtgaaagttactctagaaactttcattttcttcttggctccaatgtgaggtttccacatgattatactgcctgtgatagtgtatttttgtaaatagaaaaaaatagcaacattcactggaattgactggaagctcttggaggacataatcttaatcaactttgcttattcctcaagcacccaacataaggttttgttagagcatgtaagaaatgaatgtttgttgaaaatgagtagaactgcatgcacagacaggtgacctgtctttgttttggctcttaaatgtcctaagctccaaagcaaccatgaaaggtcagcaaactagtgtgcttgagc

SEQ ID NO: 475196 - DNA, 575 bp, Homo sapiens
gtttgtcattcccagtgggactttttgtgcctaatgccaacctcatttgcctacataatgattcctatattccactcattgccttggagaaagcctgacagaaactgcatagaaattgctaactttccatctttttagggcagttcattatgagtgtttaggcttctgttatcatatgggctcaccacaatcctggtagtttcttatttattttgaaataggctaatgatattaagaactgtgaaagttactctagaaactttcattttcttcttggctccaatgtgaggtttccacwtgattatactgcctgtgatagtgtatttttgtaaatagaaaaaaatagcaacattcactggaattgactggaagctcttggaggacataatcttaatcaactttgcttattcctcaagcacccaacataaggttttgttagagcatgtaagaaatgaatgtttgttgaaaatgagtagaactgcatgcacagacaggtgacctgtctttgttttggctcttaaatgtcctaagctccaaagcaaccatgaaaggtcagcaaactagtgtgcttgagc

SEQ ID NO: 475197 - DNA, 629 bp, Homo sapiens
gtgtaaagatgatggtaacatggactttcatggaataatgataaagatggtgagaagtatttcaatttcctgatggaagaaatgagaaatattagagaaacaggcatgaagggtttggggtctgagtaactgaatattggaagtagaactaaaaatcagacctaggttcttgacttttcaactaaagtttttgctactactccataatggtagaagccataaaaattattgtcatttaactctagaggaaaataatgatggaaaagctgcagttaataatgacacttctgttttaaacaaaaaggtaataaaacattagagggattttacatttccctactttcctcactccactcccttcagaattcagggtaaagggaattataacttaaatgccatagagaggcaataacaattgcatacataaattggagactttggaatgtatgcttttggctaagcagtggctgccatttaaaatcccctcctctctagggtaagaatggcaatttttttgggrggtgggtgcagaaggggttggttgttgttttattatcctggcttggtaaactcaggttttggcagaaacgtaatgcatcagctgtagtctgagtgttaacagaacaatc

SEQ ID NO: 475198 - DNA, 588 bp, Homo sapiens
ttctgaatgcaggagttggggtaattcgcaaggcaaacactttccctgtcctcatataccatgcataccagtagcaacgatactccataagggtggtagagggattcagtttcttctctgtctctaggatttaggtttggagatgggttttrcaggatgcataggagtctttcaggagagaacagcatacacaaaagcataaaattttaaagccatgtggcttaattgggaaaatgcaaatagagttcaaagacaagagcagatgctggaatggccaggacccttttcatagagagcctcaaattcccactaagccagagcacttagaatcacagtaataacaggaatataaagttgttgtagcctttttcttctcctctgaattaaagcacaaaataaattttaaaataatcttattcttcttcaatgtccactctggcttcagaggtagcagatagtaggttgtatacgttgaaaaagcacagagatctcatagctcctcttttttctggatcactttccaggtctccttcagggtccagtacatagtaataaggtttttgccagattatctaaaagtagacacag

SEQ ID NO: 475199 - DNA, 496 bp, Homo sapiens
atcactggtttaggtgaaaataatgattttccaaatgacagctaatggaatgtaacactttttacacacacaaactgttttgttttcaacttactctcaacctcccaaacaccccagacatttaatgtagggtttgctttcagtgtattttggcactaacttctctttgtttctggatccatttattcaattgtttctgaaagcatttgttatgctcctgctccatgtatccttctttgcaaagctctgtcagagataaaaagaaagcakcgttcttgcttatcctagaagagctgttaaatattttcatgctgtgaatggctcagcattgctcattaaaaatggctgtatataccctcaccagtgagaagaagaaattacttgattcccctacctattttacccataatgaatgctttgctaactagcctgttaggtggcttgagttaataaacccccaaggagaaattagtaggctacctttccatttatggaa

SEQ ID NO: 475200 - DNA, 600 bp, Homo sapiens
gtaacacaatgaaacaaaggccacaggggccatcttaaaactcagcctatcacaccttctaaacacaaagctaaaagaagtgattctcctccaaggcctggtggtatgaagaggtatattaagatcagagtagagagttcaattaaaamatagaatcagagagccagatggagaagtcaatgtgtctccgaagagaagatccaaaagcagaggctgcaagaacgatgaacaagagccaggaattggagtccaataagtcaggataaaagggaaagaggtaagcttgaggtaagatggcgacttgaacaaagtatatcacctcctgcccggccccttgtgatagtgacacaatgattttgaaaatggtgaaaaagttctgtcaacacttgaacaacagaaaattcccccacatgtcataacttcaaagagttacagctgaggtggaacaagatgataataagtacaggaggtcttggggaaaccccagcaacatcctccaagttggaaggccacatatcaaagaaaaggacggatggtggagcaagcaggaagcatgtcccagggaagcacaattacttggaagcaactatgccatgaccc

SEQ ID NO: 475201 - DNA, 600 bp, Homo sapiens
gtaacacaatgaaacaaaggccacaggggccatcttaaaactcagcctatcacaccttctaaacacaaagctaaaagaagtgattctcctccaaggcctggtggtatgaagaggtatattaagatcagagtagagagttcaattaaaacatagaatcagagagccagatggagaagtcaatgtgtctccgaagagaagatccaaaagcagaggctgcaagaacgatgaacaagagccaggaatyggagtccaataagtcaggataaaagggaaagaggtaagcttgaggtaagatggcgacttgaacaaagtatatcacctcctgcccggccccttgtgatagtgacacaatgattttgaaaatggtgaaaaagttctgtcaacacttgaacaacagaaaattcccccacatgtcataacttcaaagagttacagctgaggtggaacaagatgataataagtacaggaggtcttggggaaaccccagcaacatcctccaagttggaaggccacatatcaaagaaaaggacggatggtggagcaagcaggaagcatgtcccagggaagcacaattacttggaagcaactatgccatgaccc

SEQ ID NO: 475202 - DNA, 542 bp, Homo sapiens
ggcagccaggctatcaagaattatttattaattttaaggcttcatgccttttttgtaaaccctagcccatcccaactgagattaagaaagatactacccagccatttaaactgctgaccgtaacccttcttgatccccccrctgccctatttctagtcaataagtaaatagcctgggataaaagtagtgtgacgaatggcattccttcctttaatacttatttactgagtacctgttctgtgaaaggcactagttacaaagaacagggagaaaaaacatgggtaggaccatagcccttcaaaatcttacagtccagtaaagaaaaatagccccataacacaattatgggtgcacataagaacaagaatacgttccataaaacaaataccagcaggatttgagcaggatattacaaggttacatgggcacgacagaggaagttttacaatgacgatcagcacacggggaagggacagggtatgtttgacaacccaggtaagtagctctgtcttacttgggtcagtccctgtgagaagctgtgc

SEQ ID NO: 475203 - DNA, 499 bp, Homo sapiens
tgtgttctagtcaggcaaccagaggtggcaagaagtcatcctgaggagcccacagtgcaccaaatgacaaaagtgccattagatgtgccaacccagtgagagtcatgcccgtggagcccagccaggcatgtgaagaggcacaggtgtttagaggtttgttatactttttcttttctcagcatatgaacctgtcactaaaatttgtgagcragcgattcctaaatcatccacagctccaggatccctcagtgttgggttaaagaacgggcactgttcttggcctcaaaacagtagggtacattggcttggcttgtgctatttaaaactaatgaggtggctttgaataaattctttaccctctctggataccatgttcctcatttatatggtgagggatactgctaccaaccttccagggctcttgcattgaattaagggcaacaagaaaatcttcctggcataggtcctagcaataccaggtgcttaggcaatgtgcctg

SEQ ID NO: 475204 - DNA, 499 bp, Homo sapiens
tgtgttctagtcaggcaaccagaggtggcaagaagtcatcctgaggagcccacagtgcaccaaatgacaaaagtgccattagatgtgccaacccagtgagagtcatgcccgtggagcccagccaggcatgtgaagaggcacaggtgtttagaggtttgttatactttttcttttctcagcatatgaacctgtcactaaaatttgtgagcgagcgattcctaaatcatccayagctccaggatccctcagtgttgggttaaagaacgggcactgttcttggcctcaaaacagtagggtacattggcttggcttgtgctatttaaaactaatgaggtggctttgaataaattctttaccctctctggataccatgttcctcatttatatggtgagggatactgctaccaaccttccagggctcttgcattgaattaagggcaacaagaaaatcttcctggcataggtcctagcaataccaggtgcttaggcaatgtgcctg

SEQ ID NO: 475205 - DNA, 499 bp, Homo sapiens
tgtgttctagtcaggcaaccagaggtggcaagaagtcatcctgaggagcccacagtgcaccaaatgacaaaagtgccattagatgtgccaacccagtgagagtcatgcccgtggagcccagccaggcatgtgaagaggcacaggtgtttagaggtttgttatactttttcttttctcagcatatgaacctgtcactaaaatttgtgagcgagcgattcctaaatcatccacagctccaggatccctcagtgttgggttaaagaacrggcactgttcttggcctcaaaacagtagggtacattggcttggcttgtgctatttaaaactaatgaggtggctttgaataaattctttaccctctctggataccatgttcctcatttatatggtgagggatactgctaccaaccttccagggctcttgcattgaattaagggcaacaagaaaatcttcctggcataggtcctagcaataccaggtgcttaggcaatgtgcctg

SEQ ID NO: 475206 - DNA, 594 bp, Homo sapiens
gtaaggggaccaagaaaagaagtagaaaggaggaggaattcatcttcatcatccagaaacgctgatttaacagcatggattacaccatagctctctggtggtaaaatgcagctttacagagacctgagtctgcttcttctaagtgaaaactgtatttcccctgctaccttccctttggaactcttggggtggaactcttggggtagaatatgtatatgtgtstgtgtatatatatatatatctatatatgcacacacacacagagggttttatgtacgtgtgtatgtacatatgcatgtacctacgtgtgtgtatatatgggtatatatgtgtgtatgtatatatgtgtacattatgtagaatttattctagaacctagctcagagcatggtgcagttgacctcctatcacccctgctggctgcaagatgaatggatgggctagacttaatctttcacctgcacacttccccagttgtgccaagatctctgcacttcgtggtactggatgttcacaagctccaggaggtagcctgggaccaggtacagaagatgagactgaagctcagggaggaaatggcttggccaaagccca

SEQ ID NO: 475207 - DNA, 594 bp, Homo sapiens
gtaaggggaccaagaaaagaagtagaaaggaggaggaattcatcttcatcatccagaaacgctgatttaacagcatggattacaccatagctctctggtggtaaaatgcagctttacagagacctgagtctgcttcttctaagtgaaaactgtatttcccctgctaccttccctttggaactcttggggtggaactcttggggtagaatatgtatatgtgtgtgtgtatatatatatatatctatatatgcacacacacacagagggttttatrtacgtgtgtatgtacatatgcatgtacctacgtgtgtgtatatatgggtatatatgtgtgtatgtatatatgtgtacattatgtagaatttattctagaacctagctcagagcatggtgcagttgacctcctatcacccctgctggctgcaagatgaatggatgggctagacttaatctttcacctgcacacttccccagttgtgccaagatctctgcacttcgtggtactggatgttcacaagctccaggaggtagcctgggaccaggtacagaagatgagactgaagctcagggaggaaatggcttggccaaagccca

SEQ ID NO: 475208 - DNA, 683 bp, Homo sapiens
gccatcctacatgagtgacactaatgagacaggtgaaatattcaagagcccaagactgtcttcaagaaactactgcagctctggcagggtcatagtgggcttgcctgtaggtttgtcttctgctctaaaaatagactgtgtaaatactattttttataatgatgatgactattatttagagcttgccccagcctccaggcaaatgtcccaggaagaacaaaaggacgcttagtataattaaaacaaagaaaatgtagaggtgttggcatgtgagaaaaggaagtgtttcaacatcagaagccaagaactatttgttggatttgattaataatcactaatgtggattttattttaagatcacacaacagtgtggagttttgctttattcatacacacacaaaagcagccaaacagctctatttatgaaaaagttattacattgcccttctgggcttgattgtacttttccagaaataatttgaaagggcaatttttctaatctctggatcttgaagattcaggatcggtgtaattcagatcaactcagcggatatgaattaagtttggattagatgtcaatattaagtttaaattaagtttatattagatatttagatgtcaaacattgagaacacaaacattgtgtgtttttgcgtgtatrtataatttataattttcaggag

SEQ ID NO: 475209 - DNA, 706 bp, Homo sapiens
gataaaatatctcaagttaaagagcagagagaaatgcagcagaaagaacaagtaaaagcagattataatttggccatatgagttctgcagagaatgtaagactctggtctagtgtaatggggagccactgaagagtttcaataaagggattccgtgatcatagttgtcttttggaaaggtcacttgggctgcaggatggacagcgaattagataggctagatatgaaggcagggagatcagccagaaacctgttgaaataactgtgctgaaaactgataaggggttgatctgggcagtggctgaaggggggataataaagaagatataataaatatgaattctaaagatagcaagtttcctccaagtatcactattctaaggcatttctcaagtagttacagggttaaaaggcraacacaataggctgcaaaccatgaatatagccatttatgtggctgtcgcatgtagtaatgagcatttaaacataaaatattaatataatattagcataacttacgaagaaactctacagagtcaaccattctgtttgatgataattttaacactgtgttattactgaaattgtatttttcagctgccaaagattaggatcaactgacctatgaaaaagtatcagtggatctggacttgaaacagaagtcacttgttgaaacttttcaaataagagagaaagaaagagagata

SEQ ID NO: 475210 - DNA, 409 bp, Homo sapiens
acaaattattgaatgactcaaggacrcaatacctcgaaagagtctgaaacatttctgtgatgaatttacttatgaatcccaatactcttgattctagatgatgtgttttgctcagcatctgtttcagtcatatcaagtaaaaccacttcccccaggtcatatagttttcctttttactttttcccttggcctcagcatttacagccccgtgcagactgttttaacaaacgcgttggtgaggtgtggtagaatcacaggcaaaggcgtgctttgctgtgctgtgtaggtacatatcaaacgctcaccaagaaattataaaatattattcatagcagttttttcttcagtattttatgggctaagtgcaatctggcttttgataacaacggctgaataataaatttgagtt

SEQ ID NO: 475211 - DNA, 409 bp, Homo sapiens
acaaattattgaatgactcaaggacgcaatacctcgaaagagtctgaaacatttctgtgatgaatttacttatgaatcccaatactcttgattctagatgatgtgttttgytcagcatctgtttcagtcatatcaagtaaaaccacttcccccaggtcatatagttttcctttttactttttcccttggcctcagcatttacagccccgtgcagactgttttaacaaacgcgttggtgaggtgtggtagaatcacaggcaaaggcgtgctttgctgtgctgtgtaggtacatatcaaacgctcaccaagaaattataaaatattattcatagcagttttttcttcagtattttatgggctaagtgcaatctggcttttgataacaacggctgaataataaatttgagtt

SEQ ID NO: 475212 - DNA, 409 bp, Homo sapiens
acaaattattgaatgactcaaggacgcaatacctcgaaagagtctgaaacatttctgtgatgaatttacttatgaatcccaatactcttgattctagatgatgtgttttgctcagcatctgtttcagtcatatcaagtaaaaccacttcccccaggtmatatagttttcctttttactttttcccttggcctcagcatttacagccccgtgcagactgttttaacaaacgcgttggtgaggtgtggtagaatcacaggcaaaggcgtgctttgctgtgctgtgtaggtacatatcaaacgctcaccaagaaattataaaatattattcatagcagttttttcttcagtattttatgggctaagtgcaatctggcttttgataacaacggctgaataataaatttgagtt

SEQ ID NO: 475213 - DNA, 552 bp, Homo sapiens
gtgaggttaaaacagaaagtctgggctgtggggaggctgagaattgagacgcatgtatgagatgagtcacgagggccaagtggtgtgtgtgagaaagcaggcacagcaccactaaacactaaggagatttcaggggagttacgggtggagggaggacatcagatctaccctggaagttaaacgtgtttcgagtgcattaaatactatgggccrcagacgccttgtctccatatctactcttttataaatgaagtaaagttcttgggaaatacttttctcactgtaaagctcacaatctatcttgcaaaaaatattttaaattccatctcaaataagccagggtgaaaagggagcctgtgcaccagacactgccagccttgcctggttctcgccttcttgctcttccttccccagctgctggggattttcttaacgatggagatgggtttgggtttgtcctgctgtgctctgctccccattcccggatccaaggtcatgcctctgtcctgtcccctgagccacctcagggatacagggtcccccacctggtca

SEQ ID NO: 475214 - DNA, 552 bp, Homo sapiens
gtgaggttaaaacagaaagtctgggctgtggggaggctgagaattgagacgcatgtatgagatgagtcacgagggccaagtggtgtgtgtgagaaagcaggcacagcaccactaaacactaaggagatttcaggggagttacgggtggagggaggacatcagatctaccctggaagttaaacgtgtttcgagtgcattaaatactatgggccgcagacgccttgtctccatatctactcttttataaatgaagtaaagttcttgggaaatacttttctcactstaaagctcacaatctatcttgcaaaaaatattttaaattccatctcaaataagccagggtgaaaagggagcctgtgcaccagacactgccagccttgcctggttctcgccttcttgctcttccttccccagctgctggggattttcttaacgatggagatgggtttgggtttgtcctgctgtgctctgctccccattcccggatccaaggtcatgcctctgtcctgtcccctgagccacctcagggatacagggtcccccacctggtca

SEQ ID NO: 475215 - DNA, 552 bp, Homo sapiens
gtgaggttaaaacagaaagtctgggctgtggggaggctgagaattgagacgcatgtatgagatgagtcacgagggccaagtggtgtgtgtgagaaagcaggcacagcaccactaaacactaaggagatttcaggggagttacgggtggagggaggacatcagatctaccctggaagttaaacgtgtttcgagtgcattaaatactatgggccgcagacgccttgtctccatatctactcttttataaatgaagtaaagttcttgggaaatacttttctcactgtaaagctcacaatctatcttgcaaaaaatattttaaattccatctcaaataagccagggtgaaaagggagcctgtgcaccagacactgccagccttgcctggytctcgccttcttgctcttccttccccagctgctggggattttcttaacgatggagatgggtttgggtttgtcctgctgtgctctgctccccattcccggatccaaggtcatgcctctgtcctgtcccctgagccacctcagggatacagggtcccccacctggtca

SEQ ID NO: 475216 - DNA, 129 bp, Homo sapiens
gtggccgaggcttcctccctggggctcagtggagcaggacagatgctgcatccaaactcttccattgggttccagtctgttccagtcatgcccttgagmctctaaagctcctaggtaagagacgtagca

SEQ ID NO: 475217 - DNA, 601 bp, Homo sapiens
gagcaaggctctgtctccaaaaagaaaatcataaattgccaaatcagtgaaacaagtacaaaacctaaacagatcatttacrtgtctaatatttgttattctgctctcttttattctcatgttataatatattgtggtgaatctaggtactgttccttcagccccttgtatatttgaatgctttgaaaataaaaatggttgaaaatcatacagcacatttgcacccaccagaatggctaaaattaaaaaccgatgataggtgttggtaaggacatggagagactggaactcacatgcattgctgatggaggaagggtgtaaactggtacaaccactttggaaaactggcattattttctgaagctggaagtaagcctatcccatgatctagcaattcgcaggtaaattgcggacatacattcaccaacaaatggctataagcagcgctattcagattaacccaaaacagcaaacccaaatgtcctcagtagtgaaatagataataaattgtggtatattcacatagtacactagtgacaggataggagatgccttccaattggagcataaacagagggaaagaatcagaaaggtcaaaaaa

SEQ ID NO: 475218 - DNA, 601 bp, Homo sapiens
gagcaaggctctgtctccaaaaagaaaatcataaattgccaaatcagtgaaacaagtacaaaacctaaacagatcatttacgtgtctaatatttgttattctgctctcttttattctcatgttataatatattgtggtgaatctaggtactgttccttcagccccttgtatatttgaatgctttgaaaataaaaatggttgaaaatcatacagcacatttgcacccaccagaatggctaaaattaaaaaccgatgataggtgttggtaaggacatggagagactggaactcacatgcattgctgatggaggaagggtgtaaactggtacaaccactttggaaaactggcattattttctgaagctggaagtaagcctatcccatgatctagcaattcgcaggtaaattgcggacatacattcaccaacaaatggctrtaagcagcgctattcagattaacccaaaacagcaaacccaaatgtcctcagtagtgaaatagataataaattgtggtatattcacatagtacactagtgacaggataggagatgccttccaattggagcataaacagagggaaagaatcagaaaggtcaaaaaa

SEQ ID NO: 475219 - DNA, 564 bp, Homo sapiens
acttgaacccaggagacggaggctgcggtgatccaagatctgacatcaagccaatgcactccagcctggttgacagagggagattccacctcaaaaaaaaaaaaaaagaaagaaagaaagaaagaaaaagaagaaaagagagttatcatgaaagtctccatatgttggtatggagttagtgatcaaaattgcttttagggcaatggtcctagcaacaacatggagtgagaaaaatacaaaactttgattatacttcctcaaattcccaaatataaaatcatctgttacatcttgcaaatgtgtcctttacaytgcctttaaaaatttttcccctactgtttatattccactcctcccattctggtttagtagctcattacctttcctttgaacatccagactacaaagagaacaattccaatcatgccattcacatagtcataagctgtccaggacacttcactgtctaccacactgaaggtcagttattcatcatgatgttgaaggcttttcacagtgacatagctatctaattatctgctaatatgaagtggacatggtcag

SEQ ID NO: 475220 - DNA, 445 bp, Homo sapiens
gtattcaaataaatactcagatgatttggcaccagagtcctctgtgactttatgctgggtctttctcaatgtacacactaacttgctgtatatacctgcataacaatgtactgagaagcattcaatcagtaatgtgtttacaaagctgttagaaccacgcctggcatatagtaaacacttattcagtgtatgcaattattgctataatgtttatttgttttaatgagatataatcttgctatacattagtctataacttgcttgtattacttagcataagtattggatattctctcttgttttctartttacttatgcatttaaatatgtctgtacacacatagaaatcattttacataaataggttcctgtatgcttagaatctcctgtttcctacaattcctatcttcttccctttatccactctaatgaacatattaacaac

SEQ ID NO: 475221 - DNA, 553 bp, Homo sapiens
cagaatcttgggctccatgcagtagtgtgtcagagttggttcacactgatttgtgaaagcagaatacgcacaactcttcccaaatcagagttcagtgacattgagttggtagcttgaaattgtccacggagggaatatttataccatggcagtttgcaaatgctacaaatgagagtgttttatttaagaaaacaaaaaaaccttgtttcttgcagagcattggcttaccccagacctactgaattggaatctgcattttaataagatctccagggcatttatattaatattaacattaaaatttgagaagcactgcagtagatcattttttcccaaagtacatgttagaatcacatggcatgstaattaaaatacaaagtcctgaaactcatgtgtacatagattcagaacctctttaagtggagcctcagaaatcctttttctgtaaaaatatgcgttataaacaagctttctgcttggttcttaggcaccctaaaatttgacaattattgttctacaatatctgtgcccagggcatgctttgttttctaat

SEQ ID NO: 475222 - DNA, 606 bp, Homo sapiens
gatgtaatgagtgttttcataatagcatatgccccaaatctgtctaatcagtgagtaagcacccagagagggactcagagaagttaaatgggagtttggagcttccagaaggcatctttctatcataaaaagaacgtccacctaaggttgaaataaagtaagagggaagcactgtraagagatagtgagcacatggctaagtctggtgacattatttgaaccactctatctcctggtttgacacttaaaccagagtttctatgataagacccttaataaattacctttctatgcctgggctagattgagtttctcttacttgcaatgaaaacaatattatcttttaattattactagtaaggtaacagtgttgattcagtttctgaataatttgctgaaaggcaaggtccttatatgtttattctatgaaagctgttagtctaatataagaacctctacatggtgtgctgctgaagggagctactatcatggctctgtgaaagaaaaataacaacttagaaggctgcatctttcacaggcaaggtagccagttatgatcaatacagaactgtcttacaatttaatgtttttgttttaccccaagag

SEQ ID NO: 475223 - DNA, 643 bp, Homo sapiens
gtaatgactactcaagttgtttttcacaaaattgagggaagctcttgtccagcttgaactggctgagaccactgacgcttcaactgggcctgtgcaaatgcctgagaggcaataagaaagcttttgacatcagagaaccaaaaatcctgcctcatatcatgctaacgctgccattgtctgaacatgtgttctaggaagacccctgaactctcactatgtttgcatgatcatcagttgcctgattttccacatrgccaattacctgtccccataccttagaccaccctgtttctctaccccataaatacccttaagccctatattctagaagctggatttgagagatgttctcctgtgtccttaatgggctgccctgtgaataaactttttctccactgcaaaactcatcttcttagtcattggctttctgcaccacaggaagaacaaacctggtccaatattaatataatgattaagagtagggcattggtttcagaccaggcttgggttccaattcaagatagccttcctacagatgtgcacaatttgtcacttcatccttctaatcctgctgcatataaatgttaacttctgtaatagagcaaaatgaacatctataataatgatactcagatgttatttt

SEQ ID NO: 475224 - DNA, 643 bp, Homo sapiens
gtaatgactactcaagttgtttttcacaaaattgagggaagctcttgtccagcttgaactggctgagaccactgacgcttcaactgggcctgtgcaaatgcctgagaggcaataagaaagcttttgacatcagagaaccaaaaatcctgcctcatatcatgctaacgctgccattgtctgaacatgtgttctaggaagacccctgaactctcactatgtttgcatgatcatcagttgcctgattttccacatggccaattacctgtccccataccttagaccaccctgtttctytaccccataaatacccttaagccctatattctagaagctggatttgagagatgttctcctgtgtccttaatgggctgccctgtgaataaactttttctccactgcaaaactcatcttcttagtcattggctttctgcaccacaggaagaacaaacctggtccaatattaatataatgattaagagtagggcattggtttcagaccaggcttgggttccaattcaagatagccttcctacagatgtgcacaatttgtcacttcatccttctaatcctgctgcatataaatgttaacttctgtaatagagcaaaatgaacatctataataatgatactcagatgttatttt

SEQ ID NO: 475225 - DNA, 383 bp, Homo sapiens
ataaaaatgcaaatactccctaagagagaaacatattttaagttctctattaagcaatgtaaatgtgtggaacacatacagtgtgtggcattgagaggtgacagtgtgctggcagcccttgctcgctctcagtgcctcctcggccttggtgcccactctggctgcacttgaggagcccttcagcctgccactgcactgtgggagcccctctctgggatggccgaggccagagccggctccctctgcttgtggggaggtgtggagggagaggcatgggcaggaacctgggccagcatgagttccgggtggatgcaggctcagcgggccccacacttggagcagccrgctggcccctggctgtgaggggcttagcacgcaggcca

SEQ ID NO: 475226 - DNA, 578 bp, Homo sapiens
aatttgcaaaaaccaaaaagagctccctttatctttcttgcttacacattctagacagactcccagggaatatttacttccaaaatgctttcttctctttttgtatcttactgtcacagcattctgttaattcctagaactataaatacttttccaggtggaaggcttttacaaattgataattattctaacattgctgawgttttataatgaaattgcagataaaagtattcatataaaaataaattgtataaatgatagaaaacatataaatgtataacatgtctatatacagatataatctctcttgtacagcacatgataactgacgtatatcttgaaggctacatttggctcaggctgaagacaaaatccagtcagtagaaaagtgtcttggagatactgccaagcctcatttggcgacaatagtgatgtgtgaccgcatttaatgaaatatcatatcttttcaattaaaattttatatactggacgtttacttaaattataccaaataatttttgagtctagagctcactgaggcatcagagaatgaactgtgtgctatatcgaagcattca

SEQ ID NO: 475227 - DNA, 554 bp, Homo sapiens
cgccacagggaataacatctcttccaccttaatgctaaactcagagctcatttggcaaataatgttgtgacagagtgtgagacagccagtgcagcatgaaaagcactgggaagccagatgacctgggttctgggtctagtactgtcactacagcctttgccctacaacatgccaaacacctgatctgtaaagaggcaaatatagagtcttcccctagtatccctggagaattggtttcagaacctctctgacttaaaatccatgaatgctcaagttccttatataaaatagtgtagtgtttgcatataatctatgtacaccttcccgtatactttaaattatctctagatcacatatagtacctagtacaatgccaggtaaatagttgttaaactatattgttcagggaataatgatgaaaaagtctatatgtgttcaatascagatgcaattttttttaaatattttcaatccagggttggttgaatacagggatgcagaacccatggatacggagggccaaatgcactgccttcttttgcctgctctacatg

SEQ ID NO: 475228 - DNA, 497 bp, Homo sapiens
tacacaaagtccctctctgaaaaagtagaaaaaagattcaattaaaacaatgaagaaatccacatgcatactcagcatttgcaggttaagtaaataactgatatagtttattttggtctaaaaaagcaaggactggtaggaaaaaagtccatgtggtccataaaaacccacaagcaaaacgtaagcacttttaatgcactggggattaagggagtgtttgggaatgaaggctctggaggtggaaaacagatacagtcttttgtatgtttattgtgaatatagattttcatcatctacatattccacattcatgaaggatatgtctaagatctttgtgaaccccgtatttgcaactatcattaaattattccaacattaaatgaagaaaaagataaatgaaaayattaagtgacatcaaactgctaataattccataattggaataccaaatcagaagtcttgattccctaatttatgtttctggcatttgacgccag

SEQ ID NO: 475229 - DNA, 515 bp, Homo sapiens
tcggctcctggcaggcaaaggctgggtttagctctccacaaggagccacagtcacatccatggagcaggggaagaggtttcagggaatactattcggtaatggtcaatagagaggatcgtttggcaagtcagagcgatgcaatctgaaacacctcgcaagcctttggaaatttactaagatattctccataataaaaaaggctggacattagacttagggtgccctgggtatcagaagagatcttagagataatggagtcttaacatcttcactttacagatgaaggaacagagyttagtgtagaaacgtcttaaaatttcaggaaaatatggggcatatataatttaaaacatatcatttactatggaaacaacactattggtaaagtttgttaataagacacagtaaaaatgagatgttactttaaagttagagaaaaacgatttataatggatatcatcaaatgaaatttcactttgtcaaaactcatgctttcagcctgcatcttcaggta

SEQ ID NO: 475230 - DNA, 620 bp, Homo sapiens
tgtgtcccagattcccaacctcaacatcttttttacaaggtatcatttctctctcattgggaacgatgtagccctagatctcaacctcttgcagactcagtcatctactcaacatttactaaaaagcactaagtgccagaaattttggtaagcattggggattctaaaactatatgagacagatatgttcactaccctcgtatataacacatgtatctctgtgttcttatagtaaatacctctggtaatctatttgaaagrctttctgtattttattatagttattatgaaatttttaaaataatttataaacaggcagataaaattatatgtatttatcatgtacaacatgatattttgtaatatatagtagaatagccaaacctagctaatgcatgtattacctcacaaagctatcattttgtggtgggaacatttcagatctactctcttaacatatttcaagaatataatatattgttattaatactgtcaacttgtacaatatttcttgaattttttccttctaatgagaattgtgcatcttttgaccagaatctccctaaccatatgtggaatctaaaaaagatgatctcatagaagtacagagcagaatgaca

SEQ ID NO: 475231 - DNA, 606 bp, Homo sapiens
gacaaaattttacctctaccctcctagggttttagacagaacctaataattaaattgacataagtcagattaaccagagaaaagcatagaaatttaatataaattttatgtaatacgggagccctaataaggaaaagaagacccaaaaattgacaaaacctaaaagctaatatattaggttgaaaacagagaggcaattgtggaaaagtaactaaattctgtggggaagctaaaagatgacaagaattattttgacaaggtctgtttgcacaaaattctctgggctatgactccccactgaagaatgtttacctcctcatggtgtaagggaactttcacaagggagtttttaatctcctgttttcagaaaaggggagattaggacgcctctcatgcatttgctgtttttcaagtgcatttagatcaaagttacctttacgccaaagtggcatatttcggggtggcatattttgccacacttacccttgttccctcagtcgggtggtattgagaaatrtgtaacatgtgtccagattttcaatatgcactattccacttaccgcagctactctgggagagcctgagggaacacatcagcagatgagt

SEQ ID NO: 475232 - DNA, 644 bp, Homo sapiens
gctagccacttctcgtagaaccaagtcaactatgttttctgaaaggattttgcatccactggttacacaattttgtataatctcttgtgatccaaactgtggcaagagattattataaacagactgaaccactaattgaataatttcatcatcatcagattgtaaggtttctacatactgtatagtcatatatttatcttgggagatctctgttgcaactgcacttactaacttcatttgaaggaaattcagttctgtggacaaattgtcctcaggttcttttgtttttgtgctggatattgttgagaaaattttggagaaaagagcagaaatcacattctccaaaaatttatgaggtaatattattgtatatggtgatgaagtttgacattctttgctggctgtttgggccaacttttggacctttttaacaacatccttagattccagaggcaaacatgctgaaactgaaacctcatcacaaaatatcaagttaacctgaygttggaaaatttcatttatcactgcactagttagtcttcttgctaaattttctccattactgtttatattcttccaaatagagtcttgagatccatagtcatttaaaatattacaaacagaggagtgaacaactttattga

SEQ ID NO: 475233 - DNA, 493 bp, Homo sapiens
taaaatgtcaaaatttaaactattggacaataataagtatgatataaagttatgattagaagtaaattatccaattttaacttttattttaaatatacttcaacrtaactagaagagtaaatttacagcgttcaacacaaagaaataacaaatgtttgagtgattgatagatctcccaattaaccagacttatcactatacattgtatgcttatatcaaaatacatatgtaccccagaaatatgtctgattttatgtatccataaaaatttaaacaaaaatgttagggtaaatgctaaaagaaatatacatatgttatgcaatttgtaaaacagtaaaaaaaaaactagataaaaactaaatttagcactctaagagaatgcaataaagaataaataaaaatatattaaaaagtaggacaaagaaaccacaaataaggcagtagaaaacttccgaagatttgtaatttacataaatacaaattgattgggttc

SEQ ID NO: 475234 - DNA, 524 bp, Homo sapiens
ctgcaaccggtttcttctgcagtcctgggtaatggcttgctgaccatctgcctcaatgtctagaaatcaggaagacaaaggcttggtttggttcactgttgtatgttcagccccaaggaaagtgcccagcagacagaggctctagatcaagtctcactgagtgctttccaaagcagatttactcgggaatcagcaaaacacaatttctcaaaatcccttgcctatttaagtaattctatgtgttcctcagtgccatgaatacacccaaaaaactgctaaccagacgttttggtaatgttttgaagaagatgtattttcaatatttgtggggaacaaagaggtggcttaacttgagaaattatctttcatatttgaggattaaacactttgatcccaaaagaaaggatcctggatgtttgctcagccctrgaacaaaagtgcaaagctccaacatctctcttcccatctccctccatctccagcaaggaaagttggtaatcttaaagaaggctggaataagaaag

SEQ ID NO: 475235 - DNA, 395 bp, Homo sapiens
aatcacagcatattcggagagactctggggatgctttgtggtcagaacaaattaatagacgaaaaaaggaaagtggctttcagaaattggcagcgaggtacagaaacagctatattggttacagattggtgtttgccttatttgaacacagtttgaacacttagcagtctgtaagtggttgaagtatggcggctgggattggcyaagactcagctattgttataggtccacactgctaagttacattttcagtctcgtctgcctgttaagctaggttgcagttcatccacaaggactcaaatatagaagtacggagtccttctcaggccatgtttaatttgctttagcagatgcaaggtgagtcgtggttttcacttgttatttcttgaagtaga

SEQ ID NO: 475236 - DNA, 517 bp, Homo sapiens
ttatcagtacaatcttctactctttaatttcttcttctcattgatctgggaaactgttaatcatgataataagataattaatttggccttagttgctacacattctagaatgtgtagcaggctacaggtagaattgcactttccttttccaaattatagcattcaaagaagatagaaaagtacttataaaattaaaaaataaaattagatttgatttaacttaaaataatgaattatgtttaaattggaatgrtgtataattataatgagattttcatcttggaattacgagtgcctctttctttggtacaagggctattctgtggatgttgacacagaagccaaggtgattgagagagcagccacctaccatagagcttggagagaagctgaaggagactcagggttactgccattgatattcctgtttttatgtaaggtaaagttcttatgctaatctcttgcagaaaccattttatcttgcagaaactattttatttaaaataaattttagctc

SEQ ID NO: 475237 - DNA, 638 bp, Homo sapiens
tgtgttaatgtgcatcattttacttcttggtcatggctctcagttaaataattaagtaatgtgctaaatgccaaaacctcatccttgccaatgtttycttttactggtttttgatggatttcagtggacgttgctttgggggcatacataaacgcacacacagacaccgagtatcaacacaaagcatctgcacctgtagcctaattgtttgatttggtaaacagtgacaatctgaactttgctgttttctttcttctccagattctaaatgacctcaacatggtcattaaaccaggggaaatgacagctctggtaggacccagtggagctggaaaaagtacagcactgcaactcattcagcgattctatgacccctgtgaaggaatggtgggtgtcttccagaaactcctcaatacatggggacagtaaagtgcaaatggcagtatattgatcaaacagaaaggtgtagcatacattgagactgtcctggcatgcatagttaacttaatgatttgttactgaattgatgggacacgcttcctacatggtaacagtgttcagtgaataaccagtcaattccattcactgtataatgtaactgaatgtgcagatacagtcagatgtggcatagcaacatt

SEQ ID NO: 475238 - DNA, 638 bp, Homo sapiens
tgtgttaatgtgcatcattttacttcttggtcatggctctcagttaaataattaagtaatgtgctaaatgccaaaacctcatccttgccaatgtttccttttactggtttttgatggatttcagtggacgttgctttgggggcatacataaacgcacacacagacaccgagtatcaacacaaagcatctgcacctgtagcctaattgtttgatttggtaaacagtgacaatctgaactttgctgttttctttcttctccagattctaaatgacctcaacatggycattaaaccaggggaaatgacagctctggtaggacccagtggagctggaaaaagtacagcactgcaactcattcagcgattctatgacccctgtgaaggaatggtgggtgtcttccagaaactcctcaatacatggggacagtaaagtgcaaatggcagtatattgatcaaacagaaaggtgtagcatacattgagactgtcctggcatgcatagttaacttaatgatttgttactgaattgatgggacacgcttcctacatggtaacagtgttcagtgaataaccagtcaattccattcactgtataatgtaactgaatgtgcagatacagtcagatgtggcatagcaacatt

SEQ ID NO: 475239 - DNA, 638 bp, Homo sapiens
tgtgttaatgtgcatcattttacttcttggtcatggctctcagttaaataattaagtaatgtgctaaatgccaaaacctcatccttgccaatgtttccttttactggtttttgatggatttcagtggacgttgctttgggggcatacataaacgcacacacagacaccgagtatcaacacaaagcatctgcacctgtagcctaattgtttgatttggtaaacagtgacaatctgaactttgctgttttctttcttctccagattctaaatgacctcaacatggtcattaaaccaggggaaatgacagctctggtaggacccagtggagctggaaaaagtacagcactgcaactcattcagcgattctatgacccctgtgaaggaatggtgggtgtcttccagaaactcctcaatacatggggacagtaaagtgcaaatggcagtatattgatcaaayagaaaggtgtagcatacattgagactgtcctggcatgcatagttaacttaatgatttgttactgaattgatgggacacgcttcctacatggtaacagtgttcagtgaataaccagtcaattccattcactgtataatgtaactgaatgtgcagatacagtcagatgtggcatagcaacatt

SEQ ID NO: 475240 - DNA, 598 bp, Homo sapiens
catctatgaaagcttctcagacaaaagggtgccattagaactttgagagagtctgtggatagaattcaggggtttctacatttggatgggaaaaagatcccatctttttttttttcctgaactgtaattgaagtttagcacaatcttcaattacggaagaaacaacaaaccgcagtagtatttgtattgcctgtgattttgttaccaatagaaataataaatattttcatgttacattgcatttgttggaattatctcaaaatatgattaatgctgattactacttcaaaattatggtggttattgttcctgccaccatgttaataaaataaacttataaatatttggatgtatttcaatacagtagttttcttttgtaatactatgtatttcacttcaagtgttaaaaaagttattctcacttctgaggtagctgtagtagtgacagtcatgtcaatccaaatttcctaggacgtactccaaaaactatgyacaattcaaagagaagaacaaatagaatcacataaaatccaagcctccaccagagctagaaaacagacaaccctattatttcaaattatttgattgagaaaataag

SEQ ID NO: 475241 - DNA, 637 bp, Homo sapiens
ctgctatctcccttttgctggctgctgtagagatacagtttcatttcatcttcacaccagtcctgcaaggtggattttaccaccatcaccaccacttcctgacatgaaagatggagaaatcaggacgtggagagagattttaaaataaatccaactacgtagagtgaagcaacaggtgtatcaggatctgagagactccaaatttcgtgggcaagacactacaccactgtcctctaaatactacgaggtatttgcacaccagtggaaagaaayctttttaaatggagagctaagccaagggaaaaaataaatggagactaaatttttttaatattgtattttaaaattaggaaatgcaataacacatctgtggttaaatgttgtttattattttctcattattaaagagtctctctgtttttttgaaaaaaaaatttggttaaaacttcaaaaattgtgtaaccggcaaatgttacagtctctgaatataatactgctatagtgagcaaattttgttcttgaataaaataactttgaatctggttcctttagtatattttaaaccagcctcataaactacttaattaaataatatttcttactctacttcttaatatgctattaagggacattctac

SEQ ID NO: 475242 - DNA, 499 bp, Homo sapiens
tggaattaggcacaggttctgagaatttataacaaccatcttcatgtaaggaaaaagaacatttacatcattttttaaacctacatgaaggataactttacagaaaatgcacaacacttcctgaattcatagccctatggtactgcatttcatttattaatgttagtctacaaatatataaattttggtgtaaatgtttcccttcaatactatgctttccaacatggyagccactaaccccctgtggctatctaaatgtatctttagattaattaaaataaaataaaattaataatttgctttcctagtcacttgccacatttcaagtgctcaatagccacatatgactagtggttacaatatgacagagtgaagatacacatttacatcactgcagaaagttctattggacagcactatttctgaataaagtaagacctgcctatagacagcccctcaggaagaaacaaatctatgactgcaataaagtacttggaaa

SEQ ID NO: 475243 - DNA, 499 bp, Homo sapiens
tggaattaggcacaggttctgagaatttataacaaccatcttcatgtaaggaaaaagaacatttacatcattttttaaacctacatgaaggataactttacagaaaatgcacaacacttcctgaattcatagccctatggtactgcatttcatttattaatgttagtctacaaatatataaattttggtgtaaatgtttcccttcaatactatgctttccaacatggcagccactaaccccctgtggctatctaaatgtatctttagattaattaaaataaaataaaaktaataatttgctttcctagtcacttgccacatttcaagtgctcaatagccacatatgactagtggttacaatatgacagagtgaagatacacatttacatcactgcagaaagttctattggacagcactatttctgaataaagtaagacctgcctatagacagcccctcaggaagaaacaaatctatgactgcaataaagtacttggaaa

SEQ ID NO: 475244 - DNA, 667 bp, Homo sapiens
ctgaaacaagtgtaactggtttcctaacgtcatgtatttaaagagttctctataaagagagaaaaatacagtcttctttgaaacaaatgtgaaataaatgttaacccagcctcaaaactcagaggcaaatgacacattcttgaaggacagcaaaggtcacagaaaaggtctctgcaggtggcaggaggcctcatattcacaaaggccctcaaatgtagacttttgagattatctccaaatgaggttgtctgtactaaagtcccagaaacgcgctggcgggaatgaaagaagatgtctgttgtggaacttaaaattagtgccccggtattagaacacactacttccaatgtgttattaattgtggtatcttctctgatcctgaaattatcctgtgcacacataatactgcaatattctgccttacattcactagtaggttaaatgcaaaattttataaaacaagaacattgttatgacagcctttcgctttgtgagaggctattgaaaattgaagtggcctgaatctctgacatttagaaaaccctagacatttggaaatacaacccaaggctcaccacagacttatatgttggaaaatatggaaaatgtgttatctgggctctagsgtggaacaaaaaactgagaacagcttgtggggcatcacaag

SEQ ID NO: 475245 - DNA, 565 bp, Homo sapiens
tgcagtgagctatgactgcaccactgcactctagcctgggtgacagaacaagaggctgccttgagtggaaacaaaagaaaaraaaaagctcctttttaaagttataactatgtgcaagtataagtcattaaaagtcttatttatgaaaaaaaaatcaggtcatgcatgggtctatctttgtgtctacatagtaaaaagggctaagaactcccaagtgactggagcaagaataagccctagaaatattaactgtggctggcttcaagagatgggatttcaggtgattatatttttttcttttggttaatttttattttccaactttcatactgtgactacatatctcttattaatttttaagcttttttaaatgggctcccaaatgaaatagagaaaaaaatgccatagaggtctctgcctgtttaaatattatgtacaatttttgtcaggaaacaaaaaataaccttggggttgcagttacatgggcacttctaggcaatcacaaatttagttagagtatattattgatgaaatcaaggttttaaatggcatttccttacaggac

SEQ ID NO: 475246 - DNA, 381 bp, Homo sapiens
accgaaaaaatagagtgatagttagaaggtaatgtggaacagaggatttcataaaagaaagaggggacaattgcagagaggtgagagggaatgagatctagaacatgaatgaaatggttggacttaagaactgggaaaattcttccagagtaataggaggaaagacagaagatataagmcgaagttcaaatgatgatggttgagttatagaagtttatggaattctcttctggttgcttccattttcacagttttaaaaagctcactctacatgtgagaaggtgatgtcagaggtttgaggaaagaggagaagatataaggaagcaagagaggcaatagacagactaggaagcaagtcctaagcttgagattggcttcatg

SEQ ID NO: 475247 - DNA, 566 bp, Homo sapiens
cttttccgctggcacttaactttgagtggcatattgcttgttttggtttatttgttcatttttagattcttgactgtactatcatactccttggaacttgtctaaaagaattcttcttcagaagagatttgcattcacttcagcagtggccagggagcacagtcattttaaatgatattcttggcttgaggatttgtggatcactgagacggtacaaaatcagtggtattaggtagcgtttttgttcattttgataggtggtattttcttctttttaaaaaagttctaagtattttctaattttcactatgatttcttcttcgattgatggattatttcaaagcttccagacttttgttattgttttttttttttttttttttttttgctaccctcaattacctttatgagcattctgcaagtgaactktcatcactactgttttattcaggccttggatacctcttgcttgtagtagaataaccactgcacactgtctatggcaccagtgttgtctctccgctcatgttctttgcttttttgttgctgttgttgttttaactgta

SEQ ID NO: 475248 - DNA, 566 bp, Homo sapiens
cttttccgctggcacttaactttgagtggcatattgcttgttttggtttatttgttcatttttagattcttgactgtactatcatactccttggaacttgtctaaaagaattcttcttcagaagagatttgcattcacttcagcagtggccagggagcacagtcattttaaatgatattcttggcttgaggatttgtggatcactgagacggtacaaaatcagtggtattaggtagcgtttttgttcattttgataggtggtattttcttctttttaaaaaagttctaagtattttctaattttcactatgatttcttcttcgattgatggattatttcaaagcttccagacttttgttattgttttttttttttttttttttttttgctaccctcaattacctttatgagcattctgcaagtgaactttcatcactactgttttattcaggccttggatacctcttgcttgtagtagaataaccactgcacactgtctatggcaccartgttgtctctccgctcatgttctttgcttttttgttgctgttgttgttttaactgta

SEQ ID NO: 475249 - DNA, 371 bp, Homo sapiens
gggcaatgaccactctagctacttccagtaagaatgtgatccagtaaaaattagtgcatgtgtgtgaaaatggttattgtaaattttaatcactatattaatgcaaggtaatattgtaagtagtacagtatacatattgtgacgttttctcgctgctaacttagacaaaaatatattgaattttagaaaaccagaaaagattcttcacctatrtctgtatctaaaataagcaggaaagatcattgaaaggtgtaaggtaaagagtctataaagttcacttatgtggatcgtttggaacaaagcttgagcagggaattagacaaacaatcaaaacaaacaaacatatgagcccagtgctatgacaatcttga

SEQ ID NO: 475250 - DNA, 415 bp, Homo sapiens
actttgataatgaatttttcaaatgtcaagatccacaatttgcatttttcagtgcaaatacactttttcagaagcacaactctatatacagtgctgataaggcttgaaggcactgattactccttccctttgatctggaatttcacctgcaaatttatagccttaagtgtcttataacctgacatgaatctctccatagttactactactaactgtatttttagttgcaaaattataattttaaggtgagaattatraaataaattgagcagcagaacattaagctattttaatcctgaaaaaacagttctcctaagggccatggatagtaattttatgtatgtcttcaaggtttacagaaacaatttcaattcagcctaaggaagaattctcagataggaagaattaccttcag

SEQ ID NO: 475251 - DNA, 415 bp, Homo sapiens
actttgataatgaatttttcaaatgtcaagatccacaatttgcatttttcagtgcaaatacactttttcagaagcacaactctatatacagtgctgataaggcttgaaggcactgattactccttccctttgatctggaatttcacctgcaaatttatagccttaagtgtcttataacctgacatgaatctctccatagttactactactaactgtatttttagttgcaaaattataattttaaggtgagaattatgaaataaattgagcagcagaacattaagctattttaatcctgaaaaaacagttctsctaagggccatggatagtaattttatgtatgtcttcaaggtttacagaaacaatttcaattcagcctaaggaagaattctcagataggaagaattaccttcag

SEQ ID NO: 475252 - DNA, 638 bp, Homo sapiens
tatgtgactatgatggttagttttgttaaaacttgactgcaccagatatttggcaaaccattatcctgggtgtgtgtgtgtgtgtgtgtgtgtgtgtctgtgtgtgtgcatgtgtgtttggatgagattaacatttgaatgagtaggctgagtaaagcagattttcctgcctaatgtatgtamccctcatgcaatcagttgaaaggctgaaaagaacaaaaagcctgacactgcaacaaatgaggcaatgcgacaagtaagagtcaggttgacactgcctcactgcttcgatctgggacgtcagtcttttccagctttgagaattgaactgaaacattggctcttcttgcttgagcctgatagctttaagactggatcatatacaccatcagctctctttgctttcaggcctttggacttggactggaactatatcacttctcctgggtctccaggtagcccactgcatatgttggaacttcacagcctcgttaattatgagtcaattcgttataataaatgtctctctctctctctcaatcccagtatacatacatatatatattgcttctctggagaacctaaacatcaggatatgtctattcattcttgtcccaccactgtagtttgaacatagg

SEQ ID NO: 475253 - DNA, 466 bp, Homo sapiens
tacagatgtgaattcagaaaagagaaaaaaaatcaatctgcgttattcccacaatattcttgggctatatttcatgctaggataatttgtcctgtttctcctaagtcacagagacaatgatttttaaggtattactgtcagtctttcccaggtaacaagcacaggatcaagggcttcatcgrtactggccttgtgatctcttttatgttgcagaaactcctgtgtaaagctcacaggaaaagtgaacacatttagcttcctctagaaccaggaccatgtttgtctgtgtccttctttgaggccatttcttaatctctactgaaaagtgaaagataaatgggaataaaataagctacatattacaagatcagtaaaaagagacaaaacaataaaaataagcacctacattgaaagcactgagtcaagcaaaatgaactacaacaaagcattaaggtgggtttgtcag

SEQ ID NO: 475254 - DNA, 466 bp, Homo sapiens
tacagatgtgaattcagaaaagagaaaaaaaatcaatctgcgttattcccacaatattcttgggctatatttcatgctaggataatttgtcctgtttctcctaagtcacagagacaatgatttttaaggtattactgtcagtctttcccaggtaacaagcacaggatcaagggcttcatcggtactggccttgtgatctcttytatgttgcagaaactcctgtgtaaagctcacaggaaaagtgaacacatttagcttcctctagaaccaggaccatgtttgtctgtgtccttctttgaggccatttcttaatctctactgaaaagtgaaagataaatgggaataaaataagctacatattacaagatcagtaaaaagagacaaaacaataaaaataagcacctacattgaaagcactgagtcaagcaaaatgaactacaacaaagcattaaggtgggtttgtcag

SEQ ID NO: 475255 - DNA, 466 bp, Homo sapiens
tacagatgtgaattcagaaaagagaaaaaaaatcaatctgcgttattcccacaatattcttgggctatatttcatgctaggataatttgtcctgtttctcctaagtcacagagacaatgatttttaaggtattactgtcagtctttcccaggtaacaagcacaggatcaagggcttcatcggtactggccttgtgatctcttttatgttgcagaaactcctgtgtaaagctcacaggaaaagtgaacacatttagcttcctctagaaccaggaccatgtttgtctgtgtccttctttgaggccatttcttaatctctactgaaaagtgaaagataaatgggaataaaataagctacatattacaagatcagtaaaaagagacaaaacaataaaaataagcacctacattgaaagcaytgagtcaagcaaaatgaactacaacaaagcattaaggtgggtttgtcag

SEQ ID NO: 475256 - DNA, 466 bp, Homo sapiens
tacagatgtgaattcagaaaagagaaaaaaaatcaatctgcgttattcccacaatattcttgggctatatttcatgctaggataatttgtcctgtttctcctaagtcacagagacaatgatttttaaggtattactgtcagtctttcccaggtaacaagcacaggatcaagggcttcatcggtactggccttgtgatctcttttatgttgcagaaactcctgtgtaaagctcacaggaaaagtgaacacatttagcttcctctagaaccaggaccatgtttgtctgtgtccttctttgaggccatttcttaatctctactgaaaagtgaaagataaatgggaataaaataagctacatattacaagatcagtaaaaagagacaaaacaataaaaataagcacctacattgaaagcactgagtmaagcaaaatgaactacaacaaagcattaaggtgggtttgtcag

SEQ ID NO: 475257 - DNA, 532 bp, Homo sapiens
ctgagatgatatttcaggaaagagttgtaccattttctaaaagagatataacctcaacacatcattatttaaaagtctgtaatttagttacattgataattatttttaggattttgagagtttcatgggtgtggcatatgatattcactgttactactaactctctaatcagtttattttctcttccctgagccaagaactaaacaggataggaaccattttggtaaatttagctcaaaaatttatattttcacttagcaggttgtataagtcatagaagaaatgttacaaattttctcttgttaagtataaggaatgctacaaatttataaatgttcgataactatgatataattaggatggctataaaatcacatctgaatataatgggatattggtgaaatatggctgtcttttcytagatcatactttttagtgcccaggatgaccagatgattcatatcaggatggaaaacaaggacagagataagtgagatgtatgatatctctaaatttgcactctatttacagc

SEQ ID NO: 475258 - DNA, 515 bp, Homo sapiens
ttctgccttagacttctgctaagagcattgtggaaccattcacaaatacggtatcagtagaggagtagaggagaagcatggggagaagtgaagcaggaaaataagctcaaatatgtaacgtgaggttctgtaggacatacaaatagaggtatatgtgtaaaagtgatctcctgtaaatcctatatgctcaagatgctctattttaataggaaattttgttaaccttatgccctttctactgatcctggctcctcactcctcctgctaccatcaagcagcattgctttctgaagttataaaatacaattaaaaatgaaacactttattcatcatgaaaatacaatatatttctattaatggaaaataataggtttacccaggacaaacrtctgccataaatttagatgtattttttttaatactatagctgaggtaaacatgaacactaatctcattggtcattaaggggattggagtctgtggcctctggttaccatttctgtttgtatctataa

SEQ ID NO: 475259 - DNA, 515 bp, Homo sapiens
ttctgccttagacttctgctaagagcattgtggaaccattcacaaatacggtatcagtagaggagtagaggagaagcatggggagaagtgaagcaggaaaataagctcaaatatgtaacgtgaggttctgtaggacatacaaatagaggtatatgtgtaaaagtgatctcctgtaaatcctatatgctcaagatgctctattttaataggaaattttgttaaccttatgccctttctactgatcctggctcctcactcctcctgctaccatcaagcagcattgctttctgaagttataaaatacaattaaaaatgaaacactttattcatcatgaaaatacaatatatttctattaatggaaaataataggtttacccaggacaaacatctgccataaatttagwtgtattttttttaatactatagctgaggtaaacatgaacactaatctcattggtcattaaggggattggagtctgtggcctctggttaccatttctgtttgtatctataa

SEQ ID NO: 475260 - DNA, 515 bp, Homo sapiens
ttctgccttagacttctgctaagagcattgtggaaccattcacaaatacggtatcagtagaggagtagaggagaagcatggggagaagtgaagcaggaaaataagctcaaatatgtaacgtgaggttctgtaggacatacaaatagaggtatatgtgtaaaagtgatctcctgtaaatcctatatgctcaagatgctctattttaataggaaattttgttaaccttatgccctttctactgatcctggctcctcactcctcctgctaccatcaagcagcattgctttctgaagttataaaatacaattaaaaatgaaacactttattcatcatgaaaatacaatatatttctattaatggaaaataataggtttacccaggacaaacatctgccataaatttagatgtattttttttaatactatagctgakgtaaacatgaacactaatctcattggtcattaaggggattggagtctgtggcctctggttaccatttctgtttgtatctataa

SEQ ID NO: 475261 - DNA, 628 bp, Homo sapiens
gttttactagttgtgggaccttgtgcaaataacctaatttctctatacttcagttctttacctgtgcaatgggatgacagcagttcatatatcattgggttgttaatgtgtgctctaggagtyaatattaagataatgttttccacacactaaacactttgtaaatgttaaagacagacatatataaaggctgagaagaaaaatgcttaactcatatccttaagtatagttatttcctttgcctttttacttatttctgctttgcttcatccttatagagatatctttcatggtggaaatatgaaataataaaggggttcataacagacaaatttctaggaggatactaatatcctctgcactcttaaattctgatctacttatgtgaaatttccaagttgatgagccatttacaataaaaagagaaactgtgacagctttcatatggtacaaaaacattttgatgttggttcctaatgtgtgtcttgtttattaggtaaatgagggagatatcatgctaggtattcaataggtacagttattcttaagctacttatctctaaaatatattttttaagtgagatacattgtgcttgtctggggagaattaagtctcttcaaattgaaa

SEQ ID NO: 475262 - DNA, 317 bp, Homo sapiens
ctgcagcttaccccagcctccgtgkgttcaggctccccggtggtgtgtgctcactctccctccttccctccctctttctctctctctgtcacacacgcccccatacacccctatgtaaaatgcctgtaccccaagagatcagaattagggtagggtgttcgctgcaccaccagttctgcttctgatctgagtgtccagggtcaggtttcttgtgaccacaataagtattgcttgaatttcacacaatttcctccctcagaggtccctgtgccttcagaggactatacaaaaaacaccctctggaagtgtgaggctcc

SEQ ID NO: 475263 - DNA, 593 bp, Homo sapiens
tcaaatctaccttcccatatgtggcattccttttatgtgatggagatcctaaggatgtagaaatctgtcagtcagaaactggagagytattgatacaaagatctgatcatactctatatgactacttgattaagttcttgtttaaggtgagtgattgtaaaaggcaagaatagaaagatagagtccatgttggggtgagtggtagcaataaacgttgagatgcttgtttccatctgaacaccccttcgccaatttctgctccagaggtacatcagagcaagaactgcattaaaaagtgagtcctacaagaaagctgccaaattatgttcctgagaagtgagagttacagctacagtcaccagtcaaccagacagtgcatgaactctttgtatcctttatggactaaattgtatcacccaaaatttatagactgaagccatgtgatagttaatactgagtgtcaacgtgattggatcaaagaatacaaagtgttgatcctaggtgtgtctgtgaggatgttggcaaaggagattaacatttgagtcagggctgagaaaggcagcccacccttaatctgggtgggcacaacctaa

SEQ ID NO: 475264 - DNA, 593 bp, Homo sapiens
tcaaatctaccttcccatatgtggcattccttttatgtgatggagatcctaaggatgtagaaatctgtcagtcagaaactggagagttattgatacaaagatctgatcatactctmtatgactacttgattaagttcttgtttaaggtgagtgattgtaaaaggcaagaatagaaagatagagtccatgttggggtgagtggtagcaataaacgttgagatgcttgtttccatctgaacaccccttcgccaatttctgctccagaggtacatcagagcaagaactgcattaaaaagtgagtcctacaagaaagctgccaaattatgttcctgagaagtgagagttacagctacagtcaccagtcaaccagacagtgcatgaactctttgtatcctttatggactaaattgtatcacccaaaatttatagactgaagccatgtgatagttaatactgagtgtcaacgtgattggatcaaagaatacaaagtgttgatcctaggtgtgtctgtgaggatgttggcaaaggagattaacatttgagtcagggctgagaaaggcagcccacccttaatctgggtgggcacaacctaa

SEQ ID NO: 475265 - DNA, 593 bp, Homo sapiens
tcaaatctaccttcccatatgtggcattccttttatgtgatggagatcctaaggatgtagaaatctgtcagtcagaaactggagagttattgatacaaagatctgatcatactctatatgactacttgattaagttcttgtttaaggtgagtgattgtaaaaggcaagaatagaaagatagagtccatgttggggtgagtggtagcaataaaygttgagatgcttgtttccatctgaacaccccttcgccaatttctgctccagaggtacatcagagcaagaactgcattaaaaagtgagtcctacaagaaagctgccaaattatgttcctgagaagtgagagttacagctacagtcaccagtcaaccagacagtgcatgaactctttgtatcctttatggactaaattgtatcacccaaaatttatagactgaagccatgtgatagttaatactgagtgtcaacgtgattggatcaaagaatacaaagtgttgatcctaggtgtgtctgtgaggatgttggcaaaggagattaacatttgagtcagggctgagaaaggcagcccacccttaatctgggtgggcacaacctaa

SEQ ID NO: 475266 - DNA, 612 bp, Homo sapiens
actaaatttagtatcatagattagaagagatgaaaaatacttttaaaacttcttattttgtagatgaggaaacaggggcttaacattaagaaatttactttaaattacactgcctgttagcagcaaaggtaggactaaagcctggtgccccgactctaattcccacatcctgtcttcatagccaagaaatataaaccctttaagcagaaaaagaaaagccatcattccttgcccaaacttgatttctttccacctctctgatgtaaatcytgcagctggcctgtgggtttatcagataaaattactactttaaagttagtggcaaaggggcaatgtttagcacagagtggctagtcaatagatttttttttgaataagtgaatcaatacaattggcttggcattggcattttaactaatattcacatcttatttctctgatgtagttgagcaacagatgattcaaaagtcaatgggaaaagatcagcaaaggatttatattttgctgacagtattttctggtctattatctcaactatgaagcttgccttctactgcctttatcttacaggcctggagaaagaggtagcacttttctcagtactttttagtt

SEQ ID NO: 475267 - DNA, 460 bp, Homo sapiens
actatttttatatcacattacatttgttgtaggcgtctcaagatattgtttatactaatcattattcagaaactatggtagttattggaccacacttactaattagtcagagctttgtttcattattttagtgaagatgtaaatatattaatatgtcacgaatttgtttgctttttttgccatcctataattttttttactaagcacttaaaaatattagtatgtgaagatgttcttagtccttgccagacttccagaggaatcaattgcaaaaagaaaaataattagaaatgcttgtctaattggagctccagaaatatacrctagaaagaacgtgaatatgcaatagtcaaagaggtaaagtttgataattttacagaagttttgaaacacaccaatactcacatagaggaatctgaatgaattccaagataaatcaaagcaaaaactataaaacact

SEQ ID NO: 475268 - DNA, 537 bp, Homo sapiens
gatttcaccatgttggccaggctggtctcaaactcctgacctcaagtgatctgcccaccttggcctcccaaagtgctgggattacaggcatgggccaccgtgcccagcctattacatgttttaaggtcataaaactgctacttctggaatatttcttaaacttgcttgatttgtctaaattgagctaaagctgtaaggtctggctgctgggctccctgaaaccttgcacatatcttactgtatgactgtatttcgttttgagtctctggattctggggtttggacagatgaccatagtgagkcctgcagaaatatgcatgtcctcagtgtttggactgccagctgcaaggcagagccaaacccaatatggccccatcatccctggctcagctgtgctacctggccatgctggaaggggtttgatcttccaggaatttgcttcacagctctttcctgtcccaagctctatgcctgatgtgtaaattcaggacccaaaagggcacaaaaaagcaataactactaaatataaggaaaaca

SEQ ID NO: 475269 - DNA, 537 bp, Homo sapiens
gatttcaccatgttggccaggctggtctcaaactcctgacctcaagtgatctgcccaccttggcctcccaaagtgctgggattacaggcatgggccaccgtgcccagcctattacatgttttaaggtcataaaactgctacttctggaatatttcttaaacttgcttgatttgtctaaattgagctaaagctgtaaggtctggctgctgggctccctgaaaccttgcacatatcttactgtatgactgtatttcgttttgagtctctggattctggggtttggacagatgaccatagtgagtcctgcagaaatatgcatgtcctcagtgtttggactgccagctgcaaggcagagccaaacccaatatggccccatcatccctggctcagctgtgctacctggccatgctggaaggggtttgatcttccaggaatttgcttcacagctctttcctgtcccaagmtctatgcctgatgtgtaaattcaggacccaaaagggcacaaaaaagcaataactactaaatataaggaaaaca

SEQ ID NO: 475270 - DNA, 472 bp, Homo sapiens
aagttaaatgggtaacacttcaagaaataacttaaaagtttattctataacaaaataagttatggaaaatgtgcattatttataaggcttaaatagaaacagtgccttaaagtttcaatgttcagagaagaaatatcaaatgatcttttccaaaatctgtataagaaagtgaaaatcaactatttatccttatacttaaactagatactagaagcgtctagttggagatatgaatagstttgattagtgcaattctaaagacatggaaaagaaagtgcatcttccagacatttgaatgattgcttccagcatgatgtttcttctagatatttgaatggtggtcaaagcacattgtggtaataaagtgattcagaaatatgttacataattggttaataaagagtaaattatacttatttagtttggcctacttagtagactcctcgtaagtagtttatggatacactggcta

SEQ ID NO: 475271 - DNA, 617 bp, Homo sapiens
gttagcactagaacccagtcattgtatgaaccaaaatttttatgaaagagaacagtgctatctatgttttagaagcttactaagcaattatttcctagctgatgaagacataaagaagaatactacttatctggtttgtctttgaaattaatatcagaaaccatttgggaaatgtgctctttaatatgtccagtgtttattgtatctsttacctgacgtgtatgcacattggttctatatttctacttcataattaatgaacattgtttgctatacttgcagtgtaaatgaatctgagccttcttttgaagcaaccagaaggtattatttctattttaacctgagtttaataagaataacttccttcctcagactttaatctctttaatctcattttgcttactctgataatgtatagttatttattaaagtgtgctagcatatttccaacagcagtggttcgcaaccttgacaagctgctaaaagaactaatttaccaaacaaagtggctccttgtgtcaactgttttcctctcactgagtcacacgtgtcccaactttggctgaaactcaaactatcctcagtaaactgggtttgggatttcataaaataaaaat

SEQ ID NO: 475272 - DNA, 632 bp, Homo sapiens
tgtttggagcagggttagcactagaacccagtcattgtatgaaccaaaatttttatgaaagagaacagtgctatctatgttttagaagcttactaagcaattatttcctagctgatgaagacataaagaagaatactacttatctggtttgtctttgaaattaatatcagaaaccatttgggaaatgtgctctttaatatgtccagtgtttattgtatctgttacctgacgtgtatgcacattggttctatatttctacttcataattaatgaacattgtttgcyatacttgcagtgtaaatgaatctgagccttcttttgaagcaaccagaaggtattatttctattttaacctgagtttaataagaataacttccttcctcagactttaatctctttaatctcattttgcttactctgataatgtatagttatttattaaagtgtgctagcatatttccaacagcagtggttcgcaaccttgacaagctgctaaaagaactaatttaccaaacaaagtggctccttgtgtcaactgttttcctctcactgagtcacacgtgtcccaactttggctgaaactcaaactatcctcagtaaactgggtttgggatttcataaaataaaaatgt

SEQ ID NO: 475273 - DNA, 540 bp, Homo sapiens
actcttaaagagtttgtaaatggagttggcaatagtctgaggcagcagtgagaggggaggggtgaaaatgcagtgmacattctttctgcgtgtttctatttggcaagaaaccttctgttttcctaatggaaactttgacacactcagcctgtatcttttcatccatatccagctcatcttctgaacattcttagacctttattctgtcagacaagaaaaaaataggaaaggtcactaaaatctcagtctaatttaactgtgatgctttcgtggtaaactacttgagggagttcattgcttcatgtgagtacaccacgaaccctcaatgcgggggaggaaaagcagcctcatcagtaaatattaactttccaaagagttcaagactctggggactccagttagcttgaaagaaaggaacagatggatggaaaaagacacaatcaattcctgaccacaagtaccaaatgtaaggattctagaattttatccatggcagcagggccatcccattttcaagacttcttttgggtttaaaaatgc

SEQ ID NO: 475274 - DNA, 627 bp, Homo sapiens
ttgagaaggcaaggacagatttggaaaccatcagcagtgatgaaataactctgaacatctttgccccaccagcaagtagaccagcaatagtatcaraagaaaagaaatgtgaagttgattactagcttctccattttgatcagaatttgctgcaagcaaagacgatgagtctagggatgaaaaacagactaaatgtggatccctgacatttaaaggatcctaattcatagctaagagggagaaacaactatttcttcaaattatgaaatgttatatgatacattcagaggttcccatctacaattcttttcttcttatctcctcctactttctttcaccttccttgcactcaagtcatattaacattttcaattttctgaataaactcaatacctaccttcttattctagcacttatccatgtattaggattactttgtatatgttttatcttccttagagactatacatttcttgagaacaggcccctgacatatcaatctcttcacctgtcatgtggcttaacacagctatttgtgacacaatgagtgcttagtatttgttgaaataacaaactttactatactgtatatagcggggtttcaaagttaaactggaaattttaaaa

SEQ ID NO: 475275 - DNA, 639 bp, Homo sapiens
actgatatcagtgttgagaaggcaaggacagatttggaaaccatcagcagtgatgaaataactctgaacatctttgccccaccagcaagtagaccagcaatagtatcagaagaaaagaaatgtgaagttgattactagcttctccattttgatcagaatttgctgcaagcaaagacgatgagtctagggatgaaaaacagactaaatgtggatccctgacatttaaaggatcctaattcatagctaagagggagaaacaactatttcttcaaattatgaaatgttatatgatacattcagaggttcccatctacaattcttttcttcttatctcctcctactttctttcaccttccttgcactcaagtcatattaacattttcaattttctgaataaactcaatacctaccttcttattctagcacttatccatgtattaggattactttgtatatgttttatcttccttagagactatacatttcttgagaacaggcccctgacatatcaatctcttcacctgtcatgtggcttaacacagctatttgtgacacaatgagtgcttagtatttgttgaaataacaaactttactatactrtatatagcggggtttcaaagttaaactggaaattttaaa

SEQ ID NO: 475276 - DNA, 549 bp, Homo sapiens
ctgtggcccaactgccgtagggcccatggtgcaggtggtgtttttaaagggggctgcaggtgagccaggtcttgcggtgtcaactacacgaaaaaagcgaccctttcagaagaattctaatgagagagccatgtcgtctacccgggacgtgtgattgaatttttgtggtgcgatggggtatgggataaaatctctcttgtgtcatcctgtggagacttggtgaaaggctcatcacccacacatcctcctggcattggacttgtgttttggagggagtttggctgtgctgactcaggcttcccgggaaggcacaggtttagaaaagaggctgctcctgggggccaagccaccactggttacctacagaaaaacttgaaatttggcagtgaatggaaagggaaagtgggctgactctattggagtaacaggagcatctgtgtacagacgcagagagacctgtgcggatggagagacaaacacgccaacacatgcctagacaaacagtgyggggcagagagagaggctctgagagccacagagagccacatg

SEQ ID NO: 475277 - DNA, 575 bp, Homo sapiens
gttatctttacagtgctatgacactggtcagagcctggagaaatggccagtctaatcagggcccacattgtacagagagatggctattgtctgtctgtggtttgcactgtgtagcyacccacaggagggttgagccgcaaaggaattggatacttactgtgttccagccatagccaggcctcaggggcagggccactacctgaacagctgaagaagaaaatggatgagttgtcctgcagtaagatgtggagctctgggaggctgaggtgggagaattgcttgagcctgggaagtggaggctgcagtgagctaagattgtgacactgcactccagcctgggtgacagagcaagaaaaaaaaaaaaagtggagctcacacttgagccttaggctgccatgtctggaaggaatcttagaagttttccagtccaaccttttccttttttgctggagaaagctgaagctgagaggctaagtgattcccctgaggtcctgcagtaagttaatgatgccctggcagattcatttactaaaggctggtgcccctcaacctaggccagcttttccccttggagg

SEQ ID NO: 475278 - DNA, 378 bp, Homo sapiens
tatcagctctcaaatgtcttgtgctctggcctgctctgagctgcagatggtctcaggcctgtggtatctgggctcacactcgggagccctcccgtagaagacagctcagacaccacgggcttggctttagcaccaccttytttgagacgtctccctgacccttgctggtggtcttgcagaatataacctgctgaatgtagcagtgggccccttgggccaggggctggcttcagcctgggtgcttctatcccagcctggtgcctgcatctgtgaccttgacaacaccaacctcccttcttcccacctggagagacagaaaacctgatagtttgagaagcattttggagatctggaacgttctatagttgccacctgggt

SEQ ID NO: 475279 - DNA, 606 bp, Homo sapiens
gtgaaattgtgagtatcagccagctggtgagagtattatttctctagtgccctcaagtgtcttcccagtcctgggcgtttacactggcgtgggccctgatgctgatggwgtgtagccccctattcaaactacctggctcacatggccacatctgcgtaggtctgggagcagatggacttggtcatctcagagggtggagaataggacacagagcggacaaaagaggatgtgccagagaggcctgggggacctgctgtggggtttggggtcctggatgaacctgctgactgggataccctgctgtgggccctgcaggcagctcagggtgagcacttccaggagacagagcctcactcccccaaagcccccttatcaccatcacagggagagcaccagagccgtgagagcaggtaccaccaccccaggccacattcctctcataagtggaataacacaatggcccttttaacttaaacttccttcttaattgactgctgcggagagagcagtccatcatccccccacctccacccccacctctcctgctctgggccctgtttatggtgctgatgagcagggcgggggagcttcctggctgggctgaca

SEQ ID NO: 475280 - DNA, 476 bp, Homo sapiens
ctaaatacaaatgattttgtttctgtcttccattgcatcatgtcactttgctttacatgtgattatagctattctagatattcattagtcatattcatagtagtatctgtgtatgctcaatccagaaaactaaaaaatacagtagcataagtaatcttcaaatgtaaagtagcataaataaatgtcaatcagatgggatattcctatgacataaaatgatgataataggacatgagagttaaagggattctaatccaaaggacaagtttaagaggctgctttatacctccrtatgatcaattagttttcagtacgtttatgtttatttagtctgcttctgtcacagaaacatagtaggaagaagttaaactagagatggagtccaacatttagacatcctaaatgttgatactgggcatgcatgggttagggtaggaaatgtggtatgagaatagggtgctgctgggggcatttgg

SEQ ID NO: 475281 - DNA, 476 bp, Homo sapiens
ctaaatacaaatgattttgtttctgtcttccattgcatcatgtcactttgctttacatgtgattatagctattctagatattcattagtcatattcatagtagtatctgtgtatgctcaatccagaaaactaaaaaatacagtagcataagtaatcttcaaatgtaaagtagcataaataaatgtcaatcagatgggatattcctatgacataaaatgatgataataggacatgagagttaaagggattctaatccaaaggacaagtttaagaggctgctttatacctccgtatgatcaattagttttcagtacgtttatgtttatttagtctgcttctgtcacagaaacatagtaggaagaagttaaactagagatggagtccaacatttagacatcctaaatgttgatactgggcatgcatgggttrgggtaggaaatgtggtatgagaatagggtgctgctgggggcatttgg

SEQ ID NO: 475282 - DNA, 569 bp, Homo sapiens
tgcttggggaacctgcatccactgccatcttttactcacgatggttgtttaattaatttttcttcatactctgaaagtttcgttacttcttagtcttcttattgattctggatttatagaaaaaaagaacagaagtcttataatatccatrcggattacagactcaggcagaggccaaggcagggcctacaccaagggcagaaaggtcatttcagtcagacctgaaggttttgggggcgcagttgccttttgcagttgtttgggtctaaatgtggacaggagagccaggtttattctggcggtgaagaatcatgccccgcccccctccatgttttgctatgacttctgttagcatcaactagagagagttttgctggcctgtcatggtggcttgtaaatgataggctggttttgtgaacttgtctagcccatggtttaagcatagtgtggccatgctaaaaacttttcctgtgagctttctatctccttgagatgccctcttttttctgggaaagcatctggagtttccagttctgaatgacaagagtagcttatatcagaataacctt

SEQ ID NO: 475283 - DNA, 612 bp, Homo sapiens
tgtaaacaaatattattttagagagacagttttacaaccgcctgaccatcacctgatggtcrcttgacagtcctggtgtatggggtaggggagggctctctcctgtcctgctcatgtctgactagctacatgctctaacaataggagactctgtctctacaagaaataaaatgataaaaaactttagctgttcatggtggtgcatgcctgtggtaccagctacttgggaggctgaggattgcttgagctcaggagtttcaaaaccagcctgggcaacatggtgaaactccatttatacaaaatatacaaaaattggccgggtgtggcgatgcacgtctgtagtcccagctactcgggaggctgaggcgtgagtattgcctgagcccagaaggttgaggctgcagtgggctgtgattgcaccactgcactctacccttggtggcagagaacaccctgtctcaagggaggggggggaaaaagcagagttaattaggtttgaagaagacagccaaagaaaacaaagcagcacctcacacaggaatgactctgaaattacctgctctcttggttcacctgttagtggcttcctccacaaggagacagtcaagaaat

SEQ ID NO: 475284 - DNA, 555 bp, Homo sapiens
ggcattccagcctggcaacagaggagactgtcttaaaaaaaaaagagagagacaggtggaaagcccacaggtgaagaggtgaagcccagggagaaacttactaaaggaggtgattggttgcaccagcctctgctgggcagtcagtcctaacgcctgagactagatggaggggctaagcaacaggttgcagtgcgatggttcaaagcagttttgggggaagtggtggggaccagagtggaatagtgggctcaggagagaatgagaaaggcaagtgattgaatctgccaaagacagatcaccttttagagggcaggagagaatgagcaagagtggagagtggaatggatgcagagagggctttatttttttggtggagggaggggacagagtcttgctctatcacctaggctggastgcagtggcgcaatctcggctcactgcaacctccgcctcccgggttcaagtgattctcctgcctcagcctcccaaagtgctgggattacatatgtcacccaccacacccagccaagagagggttttagaggcaggaacagc

SEQ ID NO: 475285 - DNA, 637 bp, Homo sapiens
tcaggaaattttcaaccaccaagaaataactcttaacattaggtggtatggtcaggcatgatagctcatgcctgtaattttagcactttgggaggccgaggcaggcggatcacttgaggtcaggagttcaagaccagcctggcaaacatgctgaaaccccatctctactaaaaatacaaaaattagctggcgtggtaggtgcctttaatcccaactactcgagaggctgaggcacgagaatcgcttgaacctggaaggcagaggttgcaatgacccaagatcacaccattccactctagcctggaaaacagactctgtctcaaaaaaaaaaaaaaaagtgatagttcacacctctttttgtgcaaataggtacttagataagtagatagattaatggattaaaaataactgacgggcgctatggctcacacctgtaatcccagcactttgggaggctgaagtgggcagatcacgaggtcaggagatggagacagttctggccaayatggtgaaaccctgtctctactgaaaatacaaagattagctgggtatggtggcatgcacctgtaatcccagctagctcagagggtgagggaggagaatctcttgaacctgggaggcagaggttgcggtgagt

SEQ ID NO: 475286 - DNA, 637 bp, Homo sapiens
tcaggaaattttcaaccaccaagaaataactcttaacattaggtggtatggtcaggcatgatagctcatgcctgtaattttagcactttgggaggccgaggcaggcggatcacttgaggtcaggagttcaagaccagcctggcaaacatgctgaaaccccatctctactaaaaatacaaaaattagctggcgtggtaggtgcctttaatcccaactactcgagaggctgaggcacgagaatcgcttgaacctggaaggcagaggttgcaatgacccaagatcacaccattccactctagcctggaaaacagactctgtctcaaaaaaaaaaaaaaaagtgatagttcacacctctttttgtgcaaataggtacttagataagtagatagattaatggattaaaaataactgacgggcgctatggctcacacctgtaatcccagcactttgggaggctgaagtgggcagatcacgaggtcaggagatggagacagttctggccaacatggtgaaaccctgtctctactgaaaatacaaagattagctgggtatggtggcatgcacctgtaatcccagctagctcagagggtgagggaggagaatckcttgaacctgggaggcagaggttgcggtgagt

SEQ ID NO: 475287 - DNA, 589 bp, Homo sapiens
gcttcacggagccaggagccctgttccgggagggcagtaggacccctcttctcccagagccctggccttctcttggatggctctcctstcctggagccatcccaccccctgcagctaagcttccacccccagtctctgagagggggcagtgccccctgtaggcaggtgtctttgggagaagggaggggacccagtgcctcagcctactccggactttctcctgtgggccctgacgtggtgtcatgtgggggagaagtgccgtggaagctagctgctgagcaaaaggtctttatcactgcagaaaatgtgcctgagatttgcccgccttctgcctccatccactggctctgcccctcctctgctgctggagccccctttccccaccattagccccagacctgcaggcctggatggttgaaggggaggggtccacactggcccctcatgggatcttccggaacctggctcctactggagggcagggtatccagggtggcccctccctaagtaaatcttcccatcctgggaagacctattctctgtctggcgatgcctgcattttatggggaccccaaggctttcccctgcc

SEQ ID NO: 475288 - DNA, 589 bp, Homo sapiens
gcttcacggagccaggagccctgttccgggagggcagtaggacccctcttctcccagagccctggccttctcttggatggctctcctgtcctggagccatcccrccccctgcagctaagcttccacccccagtctctgagagggggcagtgccccctgtaggcaggtgtctttgggagaagggaggggacccagtgcctcagcctactccggactttctcctgtgggccctgacgtggtgtcatgtgggggagaagtgccgtggaagctagctgctgagcaaaaggtctttatcactgcagaaaatgtgcctgagatttgcccgccttctgcctccatccactggctctgcccctcctctgctgctggagccccctttccccaccattagccccagacctgcaggcctggatggttgaaggggaggggtccacactggcccctcatgggatcttccggaacctggctcctactggagggcagggtatccagggtggcccctccctaagtaaatcttcccatcctgggaagacctattctctgtctggcgatgcctgcattttatggggaccccaaggctttcccctgcc

SEQ ID NO: 475289 - DNA, 395 bp, Homo sapiens
ctgctggagccccctttccccaccattagccccagacctgcaggcctggatggttgaaggggaggggtccacactggcccctcatgggatcttccggaacctggctsctactggagggcagggtatccagggtggcccctccctaagtaaatcttcccatcctgggaagacctattctctgtctggcgatgcctgcattttatggggaccccaaggctttcccctgccatggggtagtgtcttggaggtggggcctgctgtctgtaagggctggtgagccccggcccaagcagggctaggcagtgccctgtggctcaggcctcagtggcatgggcgtagcccgtgctgggagggaggaatgagactccctgtgtcccaaggctctcccttggagc

SEQ ID NO: 475290 - DNA, 395 bp, Homo sapiens
ctgctggagccccctttccccaccattagccccagacctgcaggcctggatggttgaaggggaggggtccacactggcccctcatgggatcttccggaacctggctcctactggagggcagggtatccagggtggcccctccctaagtaaatcttcccatcctgggaagacctattctctgtctggcgatgcctgcattttatggggaccccaaggctttcccctgccatggggtagtgtcttggaggyggggcctgctgtctgtaagggctggtgagccccggcccaagcagggctaggcagtgccctgtggctcaggcctcagtggcatgggcgtagcccgtgctgggagggaggaatgagactccctgtgtcccaaggctctcccttggagc

SEQ ID NO: 475291 - DNA, 232 bp, Homo sapiens
tgtgcaactttcaccacaatcaggattagttcatttctattacttccctgtgtccycaggaacaaataatgttcccattgtttcaatccacttcctgccatctgttgtcccatacagccactagtctgctttctgtcactacagtttttcattttctagaatttcatataaatagaatctaacagtatacagttttttatgtctggctcttttacttagcatgatgcctttg

SEQ ID NO: 475292 - DNA, 232 bp, Homo sapiens
tgtgcaactttcaccacaatcaggattagttcatttctattacttccctgtgtcctcrggaacaaataatgttcccattgtttcaatccacttcctgccatctgttgtcccatacagccactagtctgctttctgtcactacagtttttcattttctagaatttcatataaatagaatctaacagtatacagttttttatgtctggctcttttacttagcatgatgcctttg

SEQ ID NO: 475293 - DNA, 232 bp, Homo sapiens
tgtgcaactttcaccacaatcaggattagttcatttctattacttccctgtgtcctcaggaacaaataatgttcccattgtttcaatccacttcctgccatctgttgtcccatacagccactagtctgctttctgtcactacagtttttcattttctagaatttcwtataaatagaatctaacagtatacagttttttatgtctggctcttttacttagcatgatgcctttg

SEQ ID NO: 475294 - DNA, 629 bp, Homo sapiens
attttcggatacataaaatcacacaacgtcctgaggtttgggaggtaagaagcctttatagtttgttgaactcactcatgcacaaaatgtgttttaatttgrttaaatattaactggtgtattagactggcttctaggaatgactgttcatgtgctagtgatatttgaatactagtaaaacaagtccctacttaccagtctcaaaataatatttatgttttttccctaatacctagtagaacaaatgagaccctaatcaataagtagaataagtttgactgcaccccctgaagaatccaggtagcttacactgcacttgttaacttttcattctccttggtattgatttccaatgacttatttgggatacccttctttgggactctgtttccccagaaacagactttgagatgtagattttggtgaaggggctttactgggaagtggtcttgggaacagcatcctgaaacggaatgagggtggcaggattgggtaaagggagaagttgaagtttgacatagctgcaacagagggctcagcggatcccacagtgaactcttgatggcctttcagaattattccaaactgaggcaaggtagctgagcttttgtgctccctcctcaaccagc

SEQ ID NO: 475295 - DNA, 629 bp, Homo sapiens
attttcggatacataaaatcacacaacgtcctgaggtttgggaggtaagaagcctttatagtttgttgaactcactcatgcacaaaatgtgttttaatttgattaaatattaactggtgtattagactggcttctaggaatgactgttcatgtgctagtgatatttgaatactagtaaaacaagtccctacttaccagtctcaaaataatatttatgttttttccctaatacctagtagaacaaatgagaccctaatcaataagtagaataagtttgactgcaccccctgaagaatccaggtagcttacactgcacttgttaacttttcattctccttggtattgatttccaatgacttatttgggatacccttctttgggactctgtttccccagaaacagactttgagatgtagattttggtgaaggggctttactgggaagtggtcttgggaacagcatcctgaaacggaatgagggyggcaggattgggtaaagggagaagttgaagtttgacatagctgcaacagagggctcagcggatcccacagtgaactcttgatggcctttcagaattattccaaactgaggcaaggtagctgagcttttgtgctccctcctcaaccagc

SEQ ID NO: 475296 - DNA, 633 bp, Homo sapiens
actttaaacaaaaactttccattatagccaatttcaactagttatctattctctgatattgactttttctctcccaatatttagctttaytatgatgtcacctctagcatgacgactgaactgatgatggtaattgctcaagagaacctgggggcacatatagaaaaagagcaggaggaagaagccctgaaaacttgcatcaaccccttgcaggtctggatcaccaggtgggacagtcaaatcccaggattcatgagatttactttttatatttagaaaggacaatgagatgggattaatttcatgatggaagaatacctgaatgtcaggtttgaaatttgtgtgtatgtatacttatatgtatacacatatacatatgcatctctgtgtgtgtgtgtttgtatcctccatataactcataaatgagttttatgttttatagacacaaacacagtcacttggtctaaaaacaactctatagcatggctgctttgcagaagctcaccctctctgactgttgctctctccctctttcccacgtgctagagctttctttgccttttctctatgcacccactccctctctgtaaccccactcccctcgccttgctcccctttgcttttctccttctc

SEQ ID NO: 475297 - DNA, 541 bp, Homo sapiens
tacaccttacatagcctatgttgatcccaccatctttgtaaggatttttctgtgtaagaatttggaaaagatagccctttccaaaaaaaaaaaaaaagtcattattgtgtagatgaggttgtattttttaaaaaagagctatggctaactgaaacttacatctttatctttttaggaggaaatataaacacataattacagtaatataatagttttttwattttgatttctgcatagggggaattctgttttctttgaaaaacctaataaacaggtatatttcttatttggggactgatttcagatggccagagcaagggattggtagtgagaagtttttgttctacttttgacttctagccttagaatgtcagggcagctatgtgtgtgcttatttaaatattaaaccaccctattgatgcacatgcagaaatatctattaagaataaaggcttaaaagggacaaaggatataactattcacaatgcggctttgcatttttatcagtgcctctgctcctgcctgctacaacctaattccc

SEQ ID NO: 475298 - DNA, 595 bp, Homo sapiens
aatacattaacaaaaaattgttaaatgaattaacgaatgttagccaggcaaagaaggagggaagagagagatttccagacagaagtgtcatgttgagatgagagacaatggtatattcaagaaactgaaaggagatcaatttgggtgtggcctagattgctgcggtggtggtggggaaaggggttatagataaggcaggagagataatcaatggtcagattatgaacaactctatgccaggtaaaagtttaaactccctggagaaggaaaaggggacatctttttaaaaatttaagcaggaaagaaaatgataaaatttgcatttagaaaggtcattctggctgcaatgcaaagatctgggctgggagagaagatgaactgaaaatagggaaaccagtcggaatctgttgaagtaatgtagacaatagactttggtggctagcctagggcagcattaatgtgctgcagtgttttgagaagaagttttaaaagggaaaatcatggtgatggggaacttgcaggtagggatgatgtcctcatttctagcttgtctgccagacgcyattcactaaactagggaacgtgggggaataag

SEQ ID NO: 475299 - DNA, 484 bp, Homo sapiens
aggtgcatccaaggcttggcctgtggcctggatgacgtggaacccccgttacaatagcctgcaacagcacaggagyagtggctgtcgggggagcttcatctgaacccaagctggtgaacggggctttgcccctctgttttatttatctttaattgattttctttaacactaggttttcttcaggcctcacatttaataagatggagtatttttctgatgagtgtaagcagcatctgagcacttcaaaggttctcgaatagaatagcattggctctttgtctaatttaacttaaaagttatgacgaggtgaaagctcatttatatatttaatatatttcatgtctttcttatttatttattttttgagacagaatctcactctgtcgtccaggctagagtgcagtggcatgatctcgactcactgcaagctccacctcccaggttcacaccattctcctgcctcagcctcccaagtagctgggac

SEQ ID NO: 475300 - DNA, 484 bp, Homo sapiens
aggtgcatccaaggcttggcctgtggcctggatgacgtggaacccccgttacaatagcctgcaacagcacaggagtagtggctgtcgggggagcttcatctgaacccaagctggtgaacggggctttgcccctctgttttatttatctttaattgattttctttaacactaggttttcttcaggcctcacatttaataagatggagtatttttctgatgagtgtaagcagcatctgagcacttcaaaggttctcgaatagaatagcattggctctttgtctaatttaacttaaaagttatgacgaggtgaaagctcatttatatatttaatatatttcatgtctttcttatttatttattttttgagacrgaatctcactctgtcgtccaggctagagtgcagtggcatgatctcgactcactgcaagctccacctcccaggttcacaccattctcctgcctcagcctcccaagtagctgggac

SEQ ID NO: 475301 - DNA, 484 bp, Homo sapiens
aggtgcatccaaggcttggcctgtggcctggatgacgtggaacccccgttacaatagcctgcaacagcacaggagtagtggctgtcgggggagcttcatctgaacccaagctggtgaacggggctttgcccctctgttttatttatctttaattgattttctttaacactaggttttcttcaggcctcacatttaataagatggagtatttttctgatgagtgtaagcagcatctgagcacttcaaaggttctcgaatagaatagcattggctctttgtctaatttaacttaaaagttatgacgaggtgaaagctcatttatatatttaatatatttcatgtctttcttatttatttattttttgagacagartctcactctgtcgtccaggctagagtgcagtggcatgatctcgactcactgcaagctccacctcccaggttcacaccattctcctgcctcagcctcccaagtagctgggac

SEQ ID NO: 475302 - DNA, 611 bp, Homo sapiens
ggctatctttaagaattacatgattggttttttgccttaaaagatttaggtaaagccttatctaatggcaggggctgggattagacaacctcttttccttccaattctgattctggtatgtgtgattagaaatcacagcctttaatatgcaatttgcaatttctactgctgaatctaaactgcctcagttggaaactgatagctaytgttgtatgtgaactgtagcagagagtgcactgggaggttttaatggataacgtagaatcatcaaagtaagcatttcccccctcctaggttttaagtacttactattactttgatagaacccaaactacataaaataaatggataaatgagtatataaataaatgcataaatattctgagaatgaattttgtagtcttttctccaaagagtaacacatcaaatgtgttataaaattaatgtttttacacaaaaacacatgcctacacatgcctacttttcctgggcactaaaccataatatcatgacatcgaaaactcctcctgtcactgaacccacagtggtcatagccatttgcttttaataagattcccccccaaaatacacactttatacatgtggacatg

SEQ ID NO: 475303 - DNA, 611 bp, Homo sapiens
ggctatctttaagaattacatgattggttttttgccttaaaagatttaggtaaagccttatctaatggcaggggctgggattagacaacctcttttccttccaattctgattctggtatgtgtgattagaaatcacagcctttaatatgcaatttgcaatttctactgctgaatctaaactgcctcagttggaaactgatagctattgttgtatgtgaactgtagcagagagtgcactgggaggttttaatggataacgtagaatcatcaaagtaagcatttcccccctcctaggttttaagtacttactattactttgatagaacccaaactacataaaataaatggataaatgagtatataaataaatgcataaatattctgagaatgaattttgtagtcttttctccaaagagtaacacatcaaatgtgttataaaattaatgttttyacacaaaaacacatgcctacacatgcctacttttcctgggcactaaaccataatatcatgacatcgaaaactcctcctgtcactgaacccacagtggtcatagccatttgcttttaataagattcccccccaaaatacacactttatacatgtggacatg

SEQ ID NO: 475304 - DNA, 652 bp, Homo sapiens
tctggtagtcagacaaactccacgagttaggaacttaataaaaataacttaaaaataaaaaaatatgaggctcggtaatgttgaatagcctcctgtaataaagtgcatgcaatatattaatatctcaaatcatcccttgattctcagtgtctttgttatgcacatggccattgcaatgaggaagacttgcattaacatttacattgagggtatattgacacggataggtttaagtttatcatctcactaattgttttctattggtttagctctccttttctccatgtttcctctttttctgmctttttgggattaattacaaattggatatttcattttctttgttgacattgatgtaaaaactggcgaaatccaaataaaatctggagattagttaatagtaatgtaccaattttgatttcttatttttgataaacatagtgaggcaatagaagatgttaacattatagaaactgggtaaggagtaagggatatatggaaactctctgtattacctttaaaacatttttataaacttataaagtttttctaaaatttaagatatttgaaagggtaaagatattgccagtgaaaacaaaagctgaacaaattaattgccagcatgcctgcaccaatggaaatgctaaagacc

SEQ ID NO: 475305 - DNA, 652 bp, Homo sapiens
tctggtagtcagacaaactccacgagttaggaacttaataaaaataacttaaaaataaaaaaatatgaggctcggtaatgttgaatagcctcctgtaataaagtgcatgcaatatattaatatctcaaatcatcccttgattctcagtgtctttgttatgcacatggccattgcaatgaggaagacttgcattaacatttacattgagggtatattgacacggataggtttaagtttatcatctcactaattgttttctattggtttagctctccttttctccatgtttcctctttttctgactttttgggattaattacaaattggatatttcattttctttgttgacattgatgtaaaaactggcgaaatccaaataaaatctggagattagttaatagtaatgtaccaattttgatttcttatttttgataaacatagtgaggcaatagaagatgttaacattatagaaactgggtaaggagtaagggatatatggaaactctctgtattacctttaaaacatttttataaacttataaagttwttctaaaatttaagatatttgaaagggtaaagatattgccagtgaaaacaaaagctgaacaaattaattgccagcatgcctgcaccaatggaaatgctaaagacc

SEQ ID NO: 475306 - DNA, 177 bp, Homo sapiens
gtaaataagctttcttcctcatgttgggtgtcatagctgtatgtcaattaatacaatagaatgmagaccagaaaaacctgaactctcctaaagtaagtgaataaagaataaaattataatttaagtatgctttatgttcttatttgattaccccaaatattttggggtatactcaat

SEQ ID NO: 475307 - DNA, 593 bp, Homo sapiens
aggcttctcaggtccccaaaagcaaagttcctcgttatgaggggtgtatttttttccaaagaccaaaaatagttcaacatagccatttctgaatacagaattgctcaaagtacagaacaacaaatgagacacaaagaataaagagacaaaagagacaaagccaaatgatactgggctccctgggtaccggtttctggtgctctgtgctggcaccccaagagtgcatcccagcacgaggacagacaccctcgtgcatttgcagccaggagctccattcatcacgctcattcccttcttggttcattgtgattttagccaaaagcacctgttgaggatgcatttttttcttctcaaaagaagaatccgaactggagtgtgagagaagttagacatgctcattttttaaaaagcctcaataattacaaagtggtwcaattaaagtaacaaaaaggagattgcaattgatttctagaaagtcagagtttattgttaacattctgctttgaatttgagattgaaaagcttcaagaggaaaaactataatgaatatagcctttaaaggatttcttcatttttaaagaaatagcgtagcc

SEQ ID NO: 475308 - DNA, 584 bp, Homo sapiens
gtctgatgggcctggagcacagggycccaagacaggtctcctggagcaatgcttcaggtagacaagcatcatccatgctccctcttcttatttccctgtttggattttgattacagcagtactcttgttttcttcctttttctttttttctaattagaaattcacttacttttctttttaaaaaaaataatgtttatgtttctttagattataatagcaacacattttaaagtgttgaaaatgtaggaaacaggtgaaaaacaaaataagaaaatgttttaactatccaaatttctatcattcagagataattattatggctttttcttttcatgtctttattctatgcaagtgacaagcttatgtacatttttctcttttatataattttgatcttatgatagggggatggtttatatgacatgttacaagcattttgtttgttcactttttcattgctttgggagcaaattctacaaaagccaaataaaatagcagaatgcaatgattaaaagcaaggacgtttcaggaccatttaggtatgagtcctggctctggcacttgttagctgtgtgaccttggac

SEQ ID NO: 475309 - DNA, 510 bp, Homo sapiens
tatctcctaaatattccttgaattcctccctcatgacctgacacctgggctattgcaacagtccctaatttctctccccagagtctagtcttccctctctgagttcattctctgtagagttgtcagtgtgcacttcacagaccataaggttgacatgtctcattcatgcttaaaacwactttgcggcttccactgcctgagaagcgaggcatccacggactttggtggcccggcccctaccctcctccctaactcacctccacgtctcatgtcttgggtgtgggtcttactgcttcaccttcaagactcactgccaatgcggtttccatgaagccttcccaaatcctgccagattatgccagagcaaaagcccaaagaaggagaagtatgacttgagactaaagacaagcaaatgttccagggtggccagagtgtagggatggggatggtcacagtgggacataacaatggaaataaaggaaatctgaggcataagagcatcaaagtcag

SEQ ID NO: 475310 - DNA, 550 bp, Homo sapiens
gggagccagggagatgggagcacagcactgaggacaacctggggtgcagcgcttctggaaacaggaggargtgcagcccacactccaaagatgagcagggcacaggaggtggtgtgggattccagagaaggtcacctgccctcttgtcaccaccctcatttctcctcagctacttcttttataaaagcccccaaccccttttttgagacagggtctcgctctgttgcccaggctggagcacaatggtgccatctcagctcacagcaacctctgccaccggggtttaagcaatcctcccacctcagcctcccgggtagctgggactacaggtgcatgccaccgtgcccggctaaaaagccctttcctagtgtgttcaacgctgccctgaaaacttcccccagcacttccctgtgccaggccacacaatcctgcggaggtccctgcagggcacgtggtgacacaggctctctcagaagcactgtggagtctgtggaggtggctcagttcctgggccagggaagggtgtctctccccagaaggagaaacagac

SEQ ID NO: 475311 - DNA, 550 bp, Homo sapiens
gggagccagggagatgggagcacagcactgaggacaacctggggtgcagcgcttctggaaacaggaggaggtgcagcccacactccaaagatgagcagggcacaggaggtggtgtgggattccagagaaggtcacctgccctcttgtcaccrccctcatttctcctcagctacttcttttataaaagcccccaaccccttttttgagacagggtctcgctctgttgcccaggctggagcacaatggtgccatctcagctcacagcaacctctgccaccggggtttaagcaatcctcccacctcagcctcccgggtagctgggactacaggtgcatgccaccgtgcccggctaaaaagccctttcctagtgtgttcaacgctgccctgaaaacttcccccagcacttccctgtgccaggccacacaatcctgcggaggtccctgcagggcacgtggtgacacaggctctctcagaagcactgtggagtctgtggaggtggctcagttcctgggccagggaagggtgtctctccccagaaggagaaacagac

SEQ ID NO: 475312 - DNA, 592 bp, Homo sapiens
agctggggacattctcctctgcattaaaacaacaaacacacagcctcacccagctacttcataagaaaccccagctcagcctcagactagttgtgtgactttgtgtgagtccaagtctccctcggcctcagtttcttcatccctcagatggggagaaatacctgcttttgggggactgccaagaggattcagtgagaaatgcgagtagctgtcttggcttaaaggaaggcactccgggggcctagcccagggcaggtgaaataccacagactatagttttctcctccaatttgcaaaagctttctttgtgaaaagtattaaaagacatgaaaatgaagttgcatataataataaacaaggtgtcttgtggaaaagaaccaccgcagaactccatgctgtcttgggaactccaaggctcctggcggccttgtctggacagcacttcagagacccttgtgaaggctcagcaggcagcggacaagagcaagagtgggcaggggaggtcgagccagsgggcagccaagaggaggagcatggggagaaactgctccagccttacagcagccaggagggggcgctgttattaacccgt

SEQ ID NO: 475313 - DNA, 657 bp, Homo sapiens
acgacagagaaaggaacacacataaaattctgcaaaactcaaatgcaagaataagtgtgaaatgcattataaaccgtaaggagctgtagaactgtgagaaattgtcaccaataacgaytgcgtttctatccaactgctttgcaggggctggcactccagagatgaggaacagccctgtcctcagggaacccagaagagtcaaccagggatcccggggctgcctggccaatgctctgacaagatgaaaggttcttggaagaggtgaaacctgtgctaactccaagggcccacaggagtcaggcaggtgaggaactggggtatggtgtcccagactgggaacaatcccagcaggtaacagaaggctgatggcccaagaaggacatgggtaagacaggctggaggggcatccaccagaggtgatagcctgaggggcatcacttggatttcagtctcaaggcaagctcaagtgctgggagagaacatggccacttttgtgttttgcagcagagcttatctagggggacacacgtatgccatgaaattaatcccttcagcccttgaggcagtgggagagttgggcagctcctacagttgctgctgggttgcttcccccagaccaccttggagaagcatgggatcagggcaatccctccagca

SEQ ID NO: 475314 - DNA, 472 bp, Homo sapiens
actgccctccatccatggagcagaggtctcagagcccacagtcagtgatcttgtacagacactcctccacagagaactcatcattctgtctggaagagcagtggccatcagcctcctggagctagaacagggctcctaagcactctccttccctttaaatggattttaaatggcctttacaagtcaagtctttcaggaaagtaagtccagagaacagacttcagctcttacttagcatgaagatgagggttagaaatttgggtgcctacttcccttcaggttcccaaagcctctggtcaattgtgcaggggattctaatcagctctccatagggcrtctgggtttaggcatcaactatttgaaagaatcaaattcacaaccagaagtcccttcctcctcaacattccacaatgattcaatggtgtaggaggccttttgagcaagggacattgttgccttagtttttgccact

SEQ ID NO: 475315 - DNA, 574 bp, Homo sapiens
ctggactaggttgctgcaggggctaaaagtagtgcatgctccttgctgagtgtttcttcagtataatcagggagatgccccaatgcccaaattcaaaaagaagggagggactcctctcccactcctatccccaccaactagcttcctgctttacacggctgtcttttaatgcaggttttaatattattcaggtacagggatgatatggtttggctgtgccctcacccaaatctcaacttgaattgtatctcccagaattcccatgtgttgtgtgggagggacccagagagaggtaactgaatcacggggggccagtctttcctgtgctattctagtgatagtgaataagtctcacaagatctgatgggtttatcaggggtttctgcttttgcttctccctcattttctcttgctgccaccatgtaggaagtcccttttgcctcccgccatgattctgaggcctccccagacatgtggaactataagtccaattaagcctctttttcctcccaatcttcggtatgtctttrtcagtagtgtggaaaaagactaatacaagggaagactatggaac

SEQ ID NO: 475316 - DNA, 390 bp, Homo sapiens
acctgagcaaattggggttctgtgtaagggagactgatgggcaactgctattgacctaaggcctcactttggagagtagtcacatgggctccagcgccggttctaacagtctctcattgtgtgactttaggcagtcacatccccatctaagcgctctctctgccttaatcaggaactctactacgtgagggccttgttcaagtgagccaggaggtgcagaagcacgggaagtacaataaaatgaagtcatagcaggracctcatccctcaagtccataatttgtcatcatttcattgctcttcatctgccccacattgcagagggcatggggcctctggtccttctagagctccacctccacactccagagacacctgcttcttgcagag

SEQ ID NO: 475317 - DNA, 596 bp, Homo sapiens
agaaagcctgtttgcattctcggcagggagggcagagctagcacagtgatgctgggtcttgcttagagctgtccgtgtttctctatccttagctcttggcaattattattattattattattattattattattattattattattattattttaagacagaatctcgctctgtcgcccaggctggagtgcagtggcggaatctcagctcactgcaagctccgcctcccaggttcatgccattctgcctctgcctctgcctcaccctccctccygagtagctgcgactacaggcacctgccactaggcccggctaattttgttttgtatttttagtagagagggggtttcaccgtgttagccaggatggtgtgatctcctgaccttgtgatccgcccgcctcagcctcccaaagtgctgggattacaggcatgagccaccgcgcctggccactcttggccattattttaagcctttagaaggcctggctgctctaacttgtggaagccccacccctttcaaaagaaattccttgatttttttcacagtaaggaaactgtagctctatagactatcaggcttcccaaattatgtatg

SEQ ID NO: 475318 - DNA, 613 bp, Homo sapiens
atgtgaattaagtgttttattaaataaataatgccatattcatatgatagaagcaatcattaataattctttagaataatacttaaaaatatagaacatgtagagcacactgttcagttaaagacactcattacaaaagcgaatacacagtcagatccgattttggttttctaaaaagggcattaataaagtgacctcaaagatgttcacctaaaatgtaaaatgatttttctcctggggttggaattcgaggcattgtttttcctttgagcacatttgagcataaatttctttggtcatcagggaaaaaaaatcaygaaaatgatttaaagtgcggtgtcaagtcttggactgtcacggaaaagaggaccctggtcaaatgcaatgatggtggccagtagtgaacagaaagtcccttgtgagtgtcctgggtcgcagcggccaagggcattgctaagggtaggctatttgggagtagaaagtgaggaagggactctaaacatgacaacttcttcatagaaattataattaaatgtaattaggccaattttaaagaagagcagtgggaaaatgtctttaaaaatgggctaaatgaactgaggagaggcgtcag

SEQ ID NO: 475319 - DNA, 550 bp, Homo sapiens
agagtggctaagtttgcctgtgaatctcagaacagcataccatctgagtgatatcttttgatttccaacataacaaaaaatccccccaccaacccatatatcattatcgacaccaccatttcccttcaaatgaagaaaaccttccagaggtcaatggtaaattacatgaggtgtaagcgaagttagctaaatgagtcagattatgaagaagaagggcgatcaatcagttgtgggcatttttaaaaaaacattctccttccctgcacagttgtttttgtgtatgatgtttacttcatgatttctctactgaaataataaaaaaaaaaattctcctgtgttgctttggctctctaaggcagagtctaawtgtttctttggagagctgttctgaaggctcccatggtggcaattgcgacgagagctatttttaacgctcctggtcttttaatagtctggcctgtgcagtgaggtgaggctgctgaatttgggctgaatgctgatgctaccaagagaacccaccagtctcagctctcaccctggggggatctga

SEQ ID NO: 475320 - DNA, 505 bp, Homo sapiens
ttcaaatgacaatgtcaatgggcttggaagaatctttggcttccctgttgaagtacggttaccttatgtccagtctatggtttcaggtaaaaaaataaagcaaatcctagagaattaatgttgcatcagggtatctttccttccatccactggtcctcagccagataattccaagggggcagaattgcaaagcttcggtgacaagagtggtcccaaagtaagacagtaactgaagggtggacaggacctaggccaggacagtgggccttatggagagaactgtgtagaaggaatgaaatgcttgaagagcagggaggctctctgttcagatgactggagraagcgtattttcagccagaagcctaggttcagcaagagaggacagagtcccccacataccacaccctatactttatctgatggcctaagaaagccagtttaatatggtaaatatgacattggattgagtatctaattatatagcaatgatttgcccgattcactc

SEQ ID NO: 475321 - DNA, 529 bp, Homo sapiens
atgcctgagctggaaatgaggctggaaaaataggctatatagagagacaagaatcttcctgctctctctggtcttaaaatacatggcttttggactgtctggctcttccttcaggtttgtgttctggagcccagaaaggatagaggcrttgcctcttgaccggagaatggtgtttggtgttggcgctttccctcttgcatctgtgtgtgcccttgctccacagcatgcttcttcaacccacagcccagcccaggacagctttgaatgcgacccaaaacaaattcgtcaaatttcttaaaatattatgagatttttctgtgtgtgatttttttttttttttttttagctcatcagctatcgttagtgttagtgtattttatgtgtggcccaagacaattctttttccagtgtgtcccagggaagccaaaagattggacacccctgctctatggagatggtgtatttctatggcctgaagtggtgggaggggggagttacactctctttgaaagagtctcttcccacttag

SEQ ID NO: 475322 - DNA, 581 bp, Homo sapiens
tcttactttttttttttttaacctgaaaagatgagaataaagcaagcatttacttcagagtgtcatatgaggattaacctttctgttcttatctctctgacatacctgaagtggaaaggacacaggttttgaagtgtggcaggtgtgggcttgtcacttaatctctctgaacatcagtttctttggctgcagaatggggataacgatatccacattgtaggtttgttgtggggtttaaatgcaataaagaatttaccaaccaataccctggcgtggaacaggcactcaggaattaaaataraagaagaaatgtgtttattgtttaggcacctgctaagctgccgtgctttcctataactatgtccagacaggttttaagaggtacacattggagatctgcctgctgacagcccaccctcccacacttcctgttttaaggctcaacttgtgctgccaggggcctcacatttggtttggaatatttttggccatcagaactaggaacaggtgtgcccgtccacctgccggggtcactggtagaggcagagactgcagtgggcttgggagacacagactccctg

SEQ ID NO: 475323 - DNA, 596 bp, Homo sapiens
ccaccacttcacatgttgaggccctgcctcccagtatgactatatttggatatrggacctttaaaaaggtaattaaggtcaaataaggtcataagggggatccctaatccgatagggttgatgtccttataagaagaggaaaagacaccagagctctattactctctctctctctctctctctctgccatgtggggatgcagtgagaaggtggctgtctgcaggccaggaagagagctcagctgccaccttgatcttggacttcccagccttgggaactgtaagaaataaatttttatggtttttaaactgcacagtcttttgtatttttatggtagtcgaagctaagataccttttcaagataaaatttccttttgaactcttgctggggtcaatatccccatcaacgaagagcaaaccttcattccagcagactccaaaaaacccagaggaagctgattgctgttttagataccaaggagaattgagttggttacacaccagcccctccttgcaactctcttgtggctgttatcctcccagcctctggttgcagccacttggcttgttttctgcagatatatgatgttgcatga

SEQ ID NO: 475324 - DNA, 596 bp, Homo sapiens
ccaccacttcacatgttgaggccctgcctcccagtatgactatatttggatatgggacctttaaaaaggtaattaaggtcaaataaggtcataagggggatccctaatccgayagggttgatgtccttataagaagaggaaaagacaccagagctctattactctctctctctctctctctctctgccatgtggggatgcagtgagaaggtggctgtctgcaggccaggaagagagctcagctgccaccttgatcttggacttcccagccttgggaactgtaagaaataaatttttatggtttttaaactgcacagtcttttgtatttttatggtagtcgaagctaagataccttttcaagataaaatttccttttgaactcttgctggggtcaatatccccatcaacgaagagcaaaccttcattccagcagactccaaaaaacccagaggaagctgattgctgttttagataccaaggagaattgagttggttacacaccagcccctccttgcaactctcttgtggctgttatcctcccagcctctggttgcagccacttggcttgttttctgcagatatatgatgttgcatga

SEQ ID NO: 475325 - DNA, 524 bp, Homo sapiens
tgatcatgtatatgcatggcaatatattctaatgatgctaattctgtgatggttgtgtggggtcctgaggacaagtgcacaccctggtgtgagaagagatggaattttccatggaagggaataggccccctagtgtgagggggcatggagtttttcatggaagggaatgagtgttgctaggggagagtgttagctgtagggcaggaaacttgcctttggcctggccgagaccaakgggtaggacttagggacacagaggagccatggagtgttctgctcttgttggtgagccactcctgagaaatggaggcagatatggggccaacaacaccccagttactttgattttcactgggaagagcagcaagcagccaacagcaggggcaggagctgtggggtcctgcagcctccatgtgggtgtatttgagttttattcttgttacaagagggaccagggtggaccctgtgtatacaaaaagagctgtggtctatcctcaaggccacattaggggcatcagcattag

SEQ ID NO: 475326 - DNA, 524 bp, Homo sapiens
tgatcatgtatatgcatggcaatatattctaatgatgctaattctgtgatggttgtgtggggtcctgaggacaagtgcacaccctggtgtgagaagagatggaattttccatggaagggaataggccccctagtgtgagggggcatggagtttttcatggaagggaatgagtgttgctaggggagagtgttagctgtagggcaggaaacttgcctttggcctggccgagaccaaggggtaggacttagggrcacagaggagccatggagtgttctgctcttgttggtgagccactcctgagaaatggaggcagatatggggccaacaacaccccagttactttgattttcactgggaagagcagcaagcagccaacagcaggggcaggagctgtggggtcctgcagcctccatgtgggtgtatttgagttttattcttgttacaagagggaccagggtggaccctgtgtatacaaaaagagctgtggtctatcctcaaggccacattaggggcatcagcattag

SEQ ID NO: 475327 - DNA, 643 bp, Homo sapiens
ccaacaagccatagctagatgcatctgtcaggcacagagttggctacagagggcactgcatgggcttataaccttgggcttattcccaggattcctgaatctctcctccttgcctaagactagtgtccctctcctgattgcattgttttgattgactgcttagtttccttctgccatgtagcttacatattgttcacatttcaagttccatgtggcaggttcttgtctttcggattttactatttgcaatgttcagtctacatgtgtgatgtcctttgtaaaccatgaatgttaatcagagtttaggtgtcagccacaacaaattttgagatgacaatgtctaaatcctaaaaamgtttgaaaccagaatgcaaaaccattgtcctcaccactctctataatttccattaattgctctaatatgctggttcctctttttgattgcatgccctttagaagaaaatcattgatacattgattacagctttcatctggaggttcgagcatttctaaacatttatttggatttcatgccaaactgggggataattgcacataaaaggatcatgctgggttagatactgacatggggttttaaaatatccttcctctagtataaatagcccaattggcagctcaggca

SEQ ID NO: 475328 - DNA, 643 bp, Homo sapiens
ccaacaagccatagctagatgcatctgtcaggcacagagttggctacagagggcactgcatgggcttataaccttgggcttattcccaggattcctgaatctctcctccttgcctaagactagtgtccctctcctgattgcattgttttgattgactgcttagtttccttctgccatgtagcttacatattgttcacatttcaagttccatgtggcaggttcttgtctttcggattttactatttgcaatgttcagtctacatgtgtgatgtcctttgtaaaccatgaatgttaatcagagtttaggtgtcagccacaacaaattttgagatgacaatgtctaaatcctaaaaaagtttgaaaccagaatgcaaaaccattgtcctcaccactctctataatttccattaattgctctaatatgctggttcctctttttgattgcatgcccyttagaagaaaatcattgatacattgattacagctttcatctggaggttcgagcatttctaaacatttatttggatttcatgccaaactgggggataattgcacataaaaggatcatgctgggttagatactgacatggggttttaaaatatccttcctctagtataaatagcccaattggcagctcaggca

SEQ ID NO: 475329 - DNA, 590 bp, Homo sapiens
gcttatctgtggagcctggagtccttaagatcaaagaagcaatttttcttccaaccttttttttgtgttttgttttgttttgttttgttttgtttrggagggatgcagtgtatctgtgaccagaatagctctttgatttttttttctcttttccagaagacacgggactatttatttccaccttccttctctgatacgtgattattcaaattcaatggagagtctgtactgtattttattaggtcacaaatcaaaacttaccactaacaaagctatcatctccacaggtgatttttcaaaactccttatatatcttcatctaattattaggctaagtaatatcagtcaatttctaacacagatggtggtataagagcaacaaattccatctggacaaaccagatgggcaaatgggagtaaagctatacagacagaaattatgggcttcagaaaaaattctgactctttaaaatgtattttgtttcttaatgacagcctagccacttatcaatgatgatatctgccttctaatataagaacattatagtaggaaaacccagttcttgccacttgtttgcaattttagagtt

SEQ ID NO: 475330 - DNA, 483 bp, Homo sapiens
cttgttaaagggggaaagtaaaaatctttttcatatatcatgaatattaataatgacaaagttaaaatgaattttataatacagctatgaataattcattgatctacaactgagtttgtacaatcacttatttgttctatacgatgtgaaaatgaggaaatggcctaagttcctgtgaaagggaccctacrgtcccaaactgaagagcagggagtgtcacccctgaagctgcagtccttccttgctgccacgctatctgatgtgcccaggtgttgtggctggccatgagatgacagatagaagtttgttagtttagttcgtctttggttcactcatgaaattgagcaaacttcagttccacacatgctctatgtctgcagtgggcccagttctggggtttagaatctaatgggctctgtcccctgccctgacgagctcgtggtggggttggggtgccgcttaggagatctacagttacagcat

SEQ ID NO: 475331 - DNA, 483 bp, Homo sapiens
cttgttaaagggggaaagtaaaaatctttttcatatatcatgaatattaataatgacaaagttaaaatgaattttataatacagctatgaataattcattgatctacaactgagtttgtacaatcacttatttgttctatacgatgtgaaaatgaggaaatggcctaagttcctgtgaaagggaccctacagtcccaaactgaagagcagggagtgtcacccctgaagctgcagtccttccttgctgccacgctatctgatgtgcccaggtgttgtggctggccatgagatgacagatagaagtttgttagtttagttcgtctttggttcactcatgaaattgagcaaacttcagttccacacatgctctatgtctgcagtgggyccagttctggggtttagaatctaatgggctctgtcccctgccctgacgagctcgtggtggggttggggtgccgcttaggagatctacagttacagcat

SEQ ID NO: 475332 - DNA, 384 bp, Homo sapiens
gctgcccaatgaggcagaacccaggtgcagatgccatctctgtcagtcacagacatgcagcccacgtgaccctgagcaatgacttaagctgcctggccccctctttggaggcaggacattcccaatccaggggcttagggacttaagtggtttatgtaaaggggyctggcacccactgagtgctccaggcgaggcatccctggcattctgaagggaggcttcctctcactgaggttctgtgggattttggataaagaggccatgagaggaaagtctattcaattatgcattttaagcaacttaaaacacttacaaaaactgctttttgttaggaaagagaatgatgtctggcacttcaggatacaaaatcacatccctcatact

SEQ ID NO: 475333 - DNA, 384 bp, Homo sapiens
gctgcccaatgaggcagaacccaggtgcagatgccatctctgtcagtcacagacatgcagcccacgtgaccctgagcaatgacttaagctgcctggccccctctttggaggcaggacattcccaatccaggggcttagggacttaagtggtttatgtaaaggggcctggcacccactgagtgctccaggcgaggcatccctggcattctgaagggaggcttcctctcactgaggttctgtgggattttggataaagaggccatgaraggaaagtctattcaattatgcattttaagcaacttaaaacacttacaaaaactgctttttgttaggaaagagaatgatgtctggcacttcaggatacaaaatcacatccctcatact

SEQ ID NO: 475334 - DNA, 583 bp, Homo sapiens
ctgaggtccattttcacaggmaagcctcctgtgtttgcatagcttttgcttaaaacttcttagttacttttagaagaaaaagtttaaaacattccaaaatgaaaatggaaacataaaatatgctgggtagatatttttcctgtctgaatgctaatgatgaaatagacttgggcattcaacttctagttatctttttgaatccaatcttgtaaagacaaaaattggcctataaagtcttgtaaaaaaatatgagggcaaatggtcaaatatatggagaaaattattcaaaaattaaatttccctgcaatgtgacaaatcagctattttcggaagtgcctaataccacgtcagtacagaaccaatcaagaattacattttagctttaaaacaacaaaatgttggacagtttttataaaaaagaaagattaagaagtctataaatctgacttcatttttgaccagttcaattctagaataaatcaatgcacttcagttactttttcaaatactctttaatagagaagcttcatctatgatgagcctagcaaagatactctctctttagtgtgaaaaaatattaagg

SEQ ID NO: 475335 - DNA, 386 bp, Homo sapiens
tcacaggaaagcctcctgtgtttgcatagcttttgcttaaaacttcttagttacttttagaagaaaaagtttaaaacattccaaaatgaaaatggaaacataaaatatgctgggtagatatttttcctgtctgaatgctaatgatgaaatagacttgggcattcaacttctagttatctttttgaatccaatcttgtaaagacaaaaattggcctataaagtcttgtaaaaaaatatgagrgcaaatggtcaaatatatggagaaaattattcaaaaattaaatttccctgcaatgtgacaaatcagctattttcggaagtgcctaataccacgtcagtacagaaccaatcaagaattacattttagctttaaaacaacaaaatgt

SEQ ID NO: 475336 - DNA, 653 bp, Homo sapiens
tggcatttttcacataaatagaaaaaatatcctaaaattaatatgtaaccacaaaagacctagaatagcctaaattttgtgaagcaaaaagaacaaaactggaggaatcacattacctgacttcagagtatactacagaactatacagaatcaaaacagcatggaactggcataaaaacagacacatggatgcatggaacagaataaagaatccagaagcaaatccttatacctacagtgaactcatttttgacaaaggagccaaggatagacactgggaaaagacagtctcttcaacaaatggtgctgggaaaactggacaaacttgacccttatctcttgctttatacaaaaatcaaattaaagtgaattaaaaacttaaatttaaacatctcaaactatgaaatagctacaagaaagcattgggraaatgctctaggatattggtctgggcaaagtttcttgagtaataccccataagcacaggcaaccaaagcagaaatcgacaaatgggatcatatcaagttaaaaaagcctctgcgcagcaaaggaaaaagtcaacctatctgacaagggatcaataatcagactatagaaggagatcagacaaatctatagaaaataatctaaaatgtcaattaaaaatggacaaa

SEQ ID NO: 475337 - DNA, 405 bp, Homo sapiens
tgtaggaataacgttgcattaatttcctagtacaatggcaaatcatgacctcttgagcagcccccaccaagtacctaaatttatttgtcatgaaacctgcaaatcatggacctctcgagcagcctacaccaaaaattcacttgtcacgaaacctgcctcagcttcctatagtgccacggtgggaagcatgtgacgtatttatagacatgcattttgtaaaccgtaaggcccagcgtgtgtatgagggcacagcctaacgaggcttacstggaggaaggaatggcactgcacgctgcttccttggctcaatctgagtgctgtgtgttcaaatcctggatgaaatgttggagcactctgagctgcattttattttcagaagttcctccccagaggtgtccgtgctgc

SEQ ID NO: 475338 - DNA, 602 bp, Homo sapiens
cttcttgagcagccagacaagtgtcagtttcctggagtgacagacactctactgcttctgaaaaaaggagcaggacaagtctccccactggcctctcaaagtggscatgtacacacagcccaaagcttccaaacggcagcaaggtggtcccagcagaggaatgtcgcacctttctccccatcctgtatgtaacacttctaaaggaatatagctatacattttatatctcaatatcatacaaaagctcttggtattaacaagtttctgtcgtgttctaaagggagataaaatatgaataactacaggccaggtgcagtggctcactcttataatcccagcattttgggaggttgcttgagcccaggagctcaagaccagcctgggcaacatagcaagacctcatctttacaaataacttaaaacttggtcagaaaaaggggcttgtgcctgtggtcccagctacttaggaggctaaggtgggaagatcacttgagccccaggagtcaaggctgcagcgagccatgaccacaccactgcacttcagcctgggggacagagtgagaacccatctcaaaaatatatatatatatgaataatagcta

SEQ ID NO: 475339 - DNA, 510 bp, Homo sapiens
ctcactctatcccccagactggaagtggaatggggwgatctctgcccactgcaacctcagcctcctgggttcaagagattctcctgtctcagcctcctgagtagctgggattacaggtgcgtgccaccatgcctggctaatttttttctatttttagtagagatggggtttcaccacgttggccaggctggtcttgaactcctgacctcaggtgatccacccagcttggcctcccaaagtgctgggattacaggcgtgagccaccgcacctggcctccatttcaatttttatcctaagtacatattcataaatatggaaaaagatttatgtacataacgtggtaatatattgaggctaaaagaaaaagatttaggtacaaagatatttaatccagcattatctacactaagatcaaaattgttgaaaccatccagcaacagggaaaatgttaaataatttatggtatgtttatatgtagaccattatgtagaaaaaaaagctaatgaaat

SEQ ID NO: 475340 - DNA, 593 bp, Homo sapiens
ctgacttaatgggcatttacactgaccaatcttcctaatttttcacttctctgactctgctcaagctctagcagtccccccaccacctcccaagttgagtttagttcatgctggacattcttccctattgcaatagtatattactgattaaaatctgtccttaccactttaacattcatctctttaacagatcaagaagtaggaaataaaatgacatctaagaataaagccatgaaatccaaatgaccatgttggtgaaccttaaaacaataatattctaaaataagctttccacatgtgtcatccaaggaaacccacctgcattagaatcacccacctagggaatttgtttaaatgtccactcctgggctccacctcggacaggggagaccaaaattcctgagtgctagaccttgaaatatgcattggggaaagaactccctggagtaattytttttttttttttttttttaagagagagtctcgcttgttgccggggctggagtgcagtggcgcaatcttggcttgctgcaccctccacctcccaggtcaaagcaatcctcctgcctcagcctcctgagtagctggaacta

SEQ ID NO: 475341 - DNA, 555 bp, Homo sapiens
ctcttccccagtggagtgaacagatctccctcggccaaggagaccccagaaaatctttaaaaactttcctggccaggcacagtggctcatrcctgtaaccccagcactttgggaggccgaggcaggtggatcacctgaggtcaggagttcgagaccagcctggccaacatggcgaaaccccatctctactaaatatacaaaaattagctgggcgtggtggcaggtgcctgtaatcccagctactagggaggctgaggcagggagaactgcttgaacccaggaggtggaggttgtggtgagctgagagcacgacactgcactccagcctgggtgacagagcgagactccatctcaaaaacaaaacaaaacaaaactgtttcctggccgagacaagatgggaggttggtcatgcctcagtgtgtccccttcctcactaaccactacttaagagttaaacagaaaccagccctggaaagcaaagaacagaaaacttctccactgacatcaacttcaaccagttgcttggtgtctcagccagactctcctcccttttca

SEQ ID NO: 475342 - DNA, 555 bp, Homo sapiens
ctcttccccagtggagtgaacagatctccctcggccaaggagaccccagaaaatctttaaaaactttcctggccaggcacagtggctcatacctgtaaccccagcactttgggaggccgaggcaggtggatcacctgaggtcaggagttcgagaccagcctggccaacatggcgaaaccccatctctactaaatatacaaaaattagctgggsgtggtggcaggtgcctgtaatcccagctactagggaggctgaggcagggagaactgcttgaacccaggaggtggaggttgtggtgagctgagagcacgacactgcactccagcctgggtgacagagcgagactccatctcaaaaacaaaacaaaacaaaactgtttcctggccgagacaagatgggaggttggtcatgcctcagtgtgtccccttcctcactaaccactacttaagagttaaacagaaaccagccctggaaagcaaagaacagaaaacttctccactgacatcaacttcaaccagttgcttggtgtctcagccagactctcctcccttttca

SEQ ID NO: 475343 - DNA, 555 bp, Homo sapiens
ctcttccccagtggagtgaacagatctccctcggccaaggagaccccagaaaatctttaaaaactttcctggccaggcacagtggctcatacctgtaaccccagcactttgggaggccgaggcaggtggatcacctgaggtcaggagttcgagaccagcctggccaacatggcgaaaccccatctctactaaatatacaaaaattagctgggcgtggtggcaggtgcctgtaatcccagctactagggaggctgaggcagggagaactgcttgaacccaggaggtggaggttgtrgtgagctgagagcacgacactgcactccagcctgggtgacagagcgagactccatctcaaaaacaaaacaaaacaaaactgtttcctggccgagacaagatgggaggttggtcatgcctcagtgtgtccccttcctcactaaccactacttaagagttaaacagaaaccagccctggaaagcaaagaacagaaaacttctccactgacatcaacttcaaccagttgcttggtgtctcagccagactctcctcccttttca

SEQ ID NO: 475344 - DNA, 555 bp, Homo sapiens
ctcttccccagtggagtgaacagatctccctcggccaaggagaccccagaaaatctttaaaaactttcctggccaggcacagtggctcatacctgtaaccccagcactttgggaggccgaggcaggtggatcacctgaggtcaggagttcgagaccagcctggccaacatggcgaaaccccatctctactaaatatacaaaaattagctgggcgtggtggcaggtgcctgtaatcccagctactagggaggctgaggcagggagaactgcttgaacccaggaggtggaggttgtggtgagctgagagcacgacactgcactccagcctgrgtgacagagcgagactccatctcaaaaacaaaacaaaacaaaactgtttcctggccgagacaagatgggaggttggtcatgcctcagtgtgtccccttcctcactaaccactacttaagagttaaacagaaaccagccctggaaagcaaagaacagaaaacttctccactgacatcaacttcaaccagttgcttggtgtctcagccagactctcctcccttttca

SEQ ID NO: 475345 - DNA, 521 bp, Homo sapiens
ggggagggagaaggtactgctttttttttttttaatataagctttgtagtactatttaatattgtatatagctttgtactactttgataaaacaaactgataaccctgcccccaaaaagaaccaatgagaataagtccagagcttattcacattttagcttgtatcatgcgttaacaccaacactccatttaatgtgaattatcttcaaagacccaatatttactaaatttaggaagagaycaatcattgcttcatatgccctacctccctcagggaccaatacttgaattttcaaagcattattcacaaagggaaaaatattttctcctattttctatgtgtgataagtgaatatcccaaagcatgaaatatgaatttaaaatatttgttttccaaatgttcattgattctttacatttactacaccacatctgtttggcatttaataaccaaatcaaaagcctctcttcctctgctctgccttagccactcaatcccctctcaaatggtgacctcatta

SEQ ID NO: 475346 - DNA, 475 bp, Homo sapiens
aaacaccttttttcttcaatgcctctctccagcaccctctactgatgaaacattgtgccagctagtaaaagkaaaaactaattacagggcccagatatgttttaatagatgagtcagtgaagggagctgagaggcaataaattgataactggcacattctccctctggggaaagcactccatacaatcagacctccccagttagttgctttctttcctgttcactagagtgtatcttgtcctcatgggccacctacttccatcaacttcccaatgactgatttttctaacagagcccttccagccattttcaattggaaacctcagaaatctattgcctttcttgaaggtggcacagatgtaagtgaagtcctctggtggcagatagagtattgcacagctctttttttttgtttaaggacaatactcatttttaaaattgtatttacttaaaagcattcagactgtcaacagaa

SEQ ID NO: 475347 - DNA, 593 bp, Homo sapiens
caaatgctacagcaggctataagcagataaaactagtgcttgctttagaaatcattttgttcaatcatcccaagttactgatgaagaaacaggtacagaaatataatatgacttaaaagtacaaagtgacggtgatgacagcttttataagaacctagaactcctcatagtctacctgccttccaagaaggagaggagaaagaggaagaagaaagagggtggagaaagaggaaaaaaagaaaaaagaagaagtgagaagaaaaaggacagacaccaatgattttcwtagcttatttccatatacatcaatgaaattataaagcaggttcatgttcagtccaaggacagacattaagagtttaaatctccattaattacggaactactgttttgagtcagcactgcataggtacctttatattacgctagctctagagatctcactggaagtcagtgtttctatgtattttaaataatctgataaatgaaaatcatgagagtactctaactttcccctacatctgggcaatatgctccaaacagatttaatgcttcttattctcttaacaattataccatctaagcattgttat

SEQ ID NO: 475348 - DNA, 593 bp, Homo sapiens
caaatgctacagcaggctataagcagataaaactagtgcttgctttagaaatcattttgttcaatcatcccaagttactgatgaagaaacaggtacagaaatataatatgacttaaaagtacaaagtgacggtgatgacagcttttataagaacctagaactcctcatagtctacctgccttccaagaaggagaggagaaagaggaagaagaaagagggtggagaaagaggaaaaaaagaaaaaagaagaagtgagaagaaaaaggacagacaccaatgattttcttagcttatttccatatacatcaatgaaattataaagcaggttcatgttcagtccaaggacagacattaagagtttaaatctccattaattacggaactactgttttgagtcagcactgcataggtacctttatattacgctagctctagagatctcactggaagtcagtgtttctatgtattttaaataatctgataaatgaaaatcatgagagtactctaactttcccctacatctgggcaatatgctccaaacagatttaatgcttcttattctcttaacaattmtaccatctaagcattgttat

SEQ ID NO: 475349 - DNA, 559 bp, Homo sapiens
tggggaccagggtgggtgggtgttgtgaggaaccggggagggcaacactgagggccccatagtgggtagtggccacctggatgtttttcttcttcttttaaaarttttttaaaataaatagagatgggggtctcattttgctgaccaggctggtctcgaactcctggcctcaagcagtcctcctatcttggcttcccaaagtgcttggattacaggcatgagccccggcctggatgtttttcttctcacttacaaggaatgtgtaatggtgtggatgggcagcagagtgtagagaaagacagatgttttgcaattagagggcaatgtttcaaaccctgaatctactatttactggctgagtaagcttggtaagacctctaactttttggagcccaagttcttgcatccgtgcaatgaggagaatgatagtacctatctcaagggcttttacctgggtcaggtgagataatgtgtgtgaaagacttcatgcattttattttatttatttatttacttaagatggagttttgctgtgtggcccagactggagtacagtggt

SEQ ID NO: 475350 - DNA, 538 bp, Homo sapiens
gtcagggctgtgtagtgggtaggaggtctcctttcctgcccactgcttgcttgtagtgggtgggyggtatccttccctgtccactgcttgctttctcttgctaaaagtaagcatgtacacatcagcatctacagacctctgttaatggatggtgaactcaaggacccagcccttaattacgaccccacactgcctgtctctgaggcagcatagggttgtaattaagggctgggcccttgagttggcctaagctcaaatccttttgccctcagggttctgtgtgatcttaggcaagtaatccaacctctctgggcctcaattcccaaatttgaatggtggagataatagtacctgcctcatagggtacattgggaggatcaagttagataatagatactgtgtacttggagaagtgtttggagaagtatttggagaagataaaccatagtaagtcctccataaatatgttttatttttattattagctcctgtggcagactatttccaacccccttagctcttgctttcccagcctccc

SEQ ID NO: 475351 - DNA, 538 bp, Homo sapiens
gtcagggctgtgtagtgggtaggaggtctcctttcctgcccactgcttgcttgtagtgggtgggtggtatccttccctgtccactgcttgctttctcttgctaaaagtaagcatgtacacatcagcatctacagacctctgttaatggatggtgaactcaaggacccagcccttaattacgaccccacactgcctgtctctgaggcagcatagggttgtaattaagggctgggcccttgagttggcctaagctcaaatccttttgccctcagggttctgtgtgatcttaggcaagtaayccaacctctctgggcctcaattcccaaatttgaatggtggagataatagtacctgcctcatagggtacattgggaggatcaagttagataatagatactgtgtacttggagaagtgtttggagaagtatttggagaagataaaccatagtaagtcctccataaatatgttttatttttattattagctcctgtggcagactatttccaacccccttagctcttgctttcccagcctccc

SEQ ID NO: 475352 - DNA, 298 bp, Homo sapiens
ttagctatcaacaaatgacacagtaataataataataatcatgacagctaatacttactgagcactgaccacatgctagcttctttgcatggattcaatttcaactcatgtgaaactctgtgaagtcaagagaccaccattgtcctctttgtacaggtgagtaaattgttttcaggaggcaacacaggcaatgaatggcgggctcaggctttgaacygaggcagtctgtagccaaagcttggcctctcaccctctgaccacatgcgatgtgtccttgactttctattttcctttgctg

SEQ ID NO: 475353 - DNA, 632 bp, Homo sapiens
tctttgcgggccatcaggcagcctctcccacttgtttccaagtctaacactcttcagatcatcagagaagatgaggttggggtaagcggtttctgcatccagaatcacattaactgcaaagaaaatttgaatacctaggtaggggtccatgggcaacatccctacagggttctccccacctgcaggaaacagggacagggtagttcttctggaacgtggtaggggagagcacagggatccagcaggccagggccacttgccttgatctgggcacttaccagcatgtgcctgagcgccaatcagctcyggaactacggagaaaaatcagatagggaaaaaaatcctgagcattagcattaagaggggctaaattacactgtcctgacaacaaggaaagacaaggaaccccctgcttagggccctgcatgctatgttgggtataatcccgttcctcccaggaacccaggccatgttggggactgtggtctaatgagtcaactcagtcaatgagtcacgcacagagcctggggggcctgccatgacctttctcctacctttgctccaggtgtttggtttttttttgtcttctaaatagggcccctcaagtcaacagcacaagggaacactgcaac

SEQ ID NO: 475354 - DNA, 632 bp, Homo sapiens
tctttgcgggccatcaggcagcctctcccacttgtttccaagtctaacactcttcagatcatcagagaagatgaggttggggtaagcggtttctgcatccagaatcacattaactgcaaagaaaatttgaatacctaggtaggggtccatgggcaacatccctacagggttctccccacctgcaggaaacagggacagggtagttcttctggaacgtggtaggggagagcacagggatccagcaggccagggccacttgccttgatctgggcacttaccagcatgtgcctgagcgccaatcagctccggaactacggagaaaaatcagatagggaaaaaawtcctgagcattagcattaagaggggctaaattacactgtcctgacaacaaggaaagacaaggaaccccctgcttagggccctgcatgctatgttgggtataatcccgttcctcccaggaacccaggccatgttggggactgtggtctaatgagtcaactcagtcaatgagtcacgcacagagcctggggggcctgccatgacctttctcctacctttgctccaggtgtttggtttttttttgtcttctaaatagggcccctcaagtcaacagcacaagggaacactgcaac

SEQ ID NO: 475355 - DNA, 638 bp, Homo sapiens
tgctgggttttggcgatgtttccagaaaacctggctttcttctgttcatggctggtttaagttcttccctttccaagtacgttcgactgaagtcagtggttgactgtctcttgcagggcaaactcccaactcgaacgctaaacaaagagtaactttttcattccaaatttggaattgttaccrgtaaacctctgaaccctacctttgttacatctcctctccaaatgtgatttagtttctcgacatgtacccttctccttaaccctgtccatgacttaccacagccctgtaggaagcttacataatgacaaggtacacacaaaaatcagtgtgtattgtaaagataatggcagacattgtcttggattctctaatgtagccatcctaactggtctaaaaattatccatccgcattttaaaatattttatgcaacccatgctctctaaccgaaagcatcagtgtaacatataataaagccaccaatcttttctatcttcatttcctcaataggataagtaatctgaatgggtaaactaagaaagcaatgccaagtgttcaattaacacatcaccagattctgatcttagaatcagctcagatatgtcttccttacttattgtctataatacataacctt

SEQ ID NO: 475356 - DNA, 625 bp, Homo sapiens
agtcattcatactagccaggatttgctcatttttgtggtttgggcaatgttcattattttgtctagattctgacatgattacaacrtggtcttgtcactctcttggttcatcatggtgacagagtggccttgtctaatttcgatgttgttggtgctcagtagaaaaccagattccgcctctgagtagcaggctaacttccggaaaagcaaggcattctcatgttgccagcctagtttctaactgtcaggggctgcttttcttttttccagttcccttcttggggggtttcagggctgcttttgggtgggcatgagtttatagatgtgaccttctcatttcaagagttttaattttagccacattggttctgtgccatagtgaaacattttgggctttgagacactgaataataataaaacatgatctatttctcttaacacattttttcaaatagagaacaatgttttaatgattaagactaaatgctaaattactgttaaaatttttaaaatcagatgctatgctgcttctttgagattcaaaatttacattagcatatttcagtgttcttagtaatactgctataaggaaacccaatttatttgatatagacacttatttcca

SEQ ID NO: 475357 - DNA, 610 bp, Homo sapiens
atctagaagaaaaggtgcaaaagcagcccatggttccaggaaatggcagaggagcgagtccttcatgtcaagttttggaaaaatgagatttatcaaatgtttaatagaagrcagtttgagacagtggaaagaactctatgttgagaggcagactgacttgggttcacatatggccccatgagtgtttttgtttgtttcattcactctatgcccaatacagtgcccggtacataatatgccctcagtattttctgaacgaatgactaaatgggtgaattaataacttactgaaccctcaattttctcatcgaagtaatgggtgttcctcagaaaatgtcagctttaaagtttcaaatacacaaaaaaacttttacaaaactgtttctctggcttcatcccatctcacgaatgatttctagaggtcttgagtttgttccacctgactcataaacacaccatctaccatctatcacctaccacctgccagttttctccccatttataccagacacctgcggagatactgcctgaagcggccttggatctcaatacccaggtgataagcaaactaccccaggcgatggtgatgccaccagcctttactctacca

SEQ ID NO: 475358 - DNA, 610 bp, Homo sapiens
atctagaagaaaaggtgcaaaagcagcccatggttccaggaaatggcagaggagcgagtccttcatgtcaagttttggaaaaatgagatttatcaaatgtttaatagaaggcagtttgagacagtggaaagaactctatgttgagaggcagactgacttgggttcacatatgrccccatgagtgtttttgtttgtttcattcactctatgcccaatacagtgcccggtacataatatgccctcagtattttctgaacgaatgactaaatgggtgaattaataacttactgaaccctcaattttctcatcgaagtaatgggtgttcctcagaaaatgtcagctttaaagtttcaaatacacaaaaaaacttttacaaaactgtttctctggcttcatcccatctcacgaatgatttctagaggtcttgagtttgttccacctgactcataaacacaccatctaccatctatcacctaccacctgccagttttctccccatttataccagacacctgcggagatactgcctgaagcggccttggatctcaatacccaggtgataagcaaactaccccaggcgatggtgatgccaccagcctttactctacca

SEQ ID NO: 475359 - DNA, 561 bp, Homo sapiens
tgctatagcacctctaggaaattaatacagagctattttttaacagctttattgaaatatagttcaatccctacacttcttccatttaaattatacaattcaatgrttttggttatattatgtaattaggtttctttataatgtggtgaaatacatattaaaaagcttgtcatgtttgccatctaaaaatatacaattcaatgtcattaattacagcacaatgttgtacaaccataactctttccttatattccaaacttttcatcacccaaacagaaactccaaacccattaaataatactctccatttccctctcctcccaaccgctagtagtctctaatctactttctataacacagagctttttactattccaagttctactacttttaccataccaacaacatttggagctgtgatagcactatctctgttactagacaggtgatttttacaaaatgtaatttctagacaatgacctaaaattaaaatatttgccaattccccagttgtgtgctataggaggtacccatccaccaagcaactgatttggactttgc

SEQ ID NO: 475360 - DNA, 281 bp, Homo sapiens
aaaagaacacagccttttgaattcccgtttaaaattatctccactgaagtacagattcttttctacaattgactgcagcgaaaaggaaagaaaaggactgttttgtttgtctggcaatattggctatgaagctgggagttttaaaggaaaggaagtaacagaccctcagcagratttttactgctagaggatgccccaatagagtgtttcttctttctttttaagcacaaaaagctgagatttaactgcattataaacgtttcattaacatatctactaag

SEQ ID NO: 475361 - DNA, 663 bp, Homo sapiens
tgcaaaaattaaatgaaaacacaactctaatatcaaggatgaaaatatctccaaagagctttaaaatcggaatgtccttcttttgtcaatgttacacgatttctcgtaatgctgaagtgtcattctagttcaaatctcactctcgttctttatatttgatggaaagtcatacatctgttaggctcaataactgctatttcattaattcccagatcacsccatttcatgtgatgctgaacttaatggaagtatgtggtaacaaagaaatgcactaatagagagcatcttgagaaactatgagatttttttttttttttttttcaaaataacaggattagagcagagcaataagaacacgatgatagcaaaaatcaaggttcactgattagggtacattctgaaaagataaatttctatcttttctcctctcaacagagaatgtaaactaatgaacaaaaatcaagtggtataggtgtctttactcagttgtcaatcccgtattgtccatctctacattcattgcttcttttcaatcctctatgtcaatgccctggattaggtcctgaaaattgttttttgccgtagatttctaactactttccttgtatataatcatttctagtctcatttattgcatttccctcttccttaccatcattttct

SEQ ID NO: 475362 - DNA, 572 bp, Homo sapiens
ctgaatcctgagctgccaaagtttcttacaaacattctctcatattgccttttttatattttgggtatgtaatatcttaatccactatttcaaggtaactgttctcccattctttttcctttttccttcaattagccttaaaatttgattaaactatcttctcaaagttycaagtttttttatatatatatatttttattatactttaagttttagggtacatatgcacaacgtgcaggttagttacatatgtatacatgtgccatgttggtgtgctgcacccatcaactcatcttttttttttttcagaatgtcattcttcaggacatgtaatcagaacccctaccttcatctggaattatctctgcaaaccatcacttctttctatctcactaatctctcaatcactcattctctaatacctccacttaccagtcctttattaatatctctacaacttacttatggttcaatttctctgtttcagtgcagactggagaaggctttcgtatttctggttgtatttacctcataagaataaaatctacccatttattttaacattggaaata

SEQ ID NO: 475363 - DNA, 599 bp, Homo sapiens
gatgagaaaataaaaatggcgatcaattaaccatgtgatctcccttcacagacctccttatctctcaacacatccagaaggaatgaagtcaagagatcaaggatgaatttagagtggagttaaaggtcaaagaaaagtatggccccaagctccaaaatggttcccatggacccaagctagccccagcagaacctggttacaggtctaccccagcaccaagccagcagctgcagacctaggctcrgggcccacccatccctggagtcctggactccaggctcacacccacagtcctagttgacaggcctgccccaagagacccccatgccacgctggtgcctgtggagtcaggaccaagtccactcccacagatacaggtgccaggtaagttctcgtggattcagactcaaagcccaccccactgccggttcagctcctatggacccaggtttcagactgaccccaaatgatccaggctccaggcctgcttccacagtaccaggcaccaggatgacctctacagacccaagcctcagacccacctggctgctgactccagcaataggccagcctacccaaggactccaggagcaaacttg

SEQ ID NO: 475364 - DNA, 633 bp, Homo sapiens
acactggacaaggtggagttgktgcagcccctcagaaaacacttacatgaggggaggcaggacagtgtagtgctgtggctctcaatctcagacgattttgtccccagtggacttctggaaatgtttagagacattttggtttgcatatctggagagggaggtgctattggcatctactgggtaaacacgagggatgctgctaattatgctacaatgcacaggacagccacccgcaacgctgaattatctggcccaaaacgtcaatagtggttgagagggcatggggcctcagaatccaacaggggcatcaccaacagggcttaatctcctgctccccctctgtaaaactggggataccaaatttctgcctcacagagctgacctattgcctgttaagtgctttctgcaggcaggctcatagtaatgctccaccattgttgccatgttcattaccaaggatgtgcactctgcagaagagcactgaccaggtagacccagagaagggccatgagagaaactgatccaacgcttgagagggcggaagatgccagaagaggccgtgattacccattctggcattcagcgctttccctggtcttgtttcagcctactttgcttgcctggcctccggct

SEQ ID NO: 475365 - DNA, 623 bp, Homo sapiens
ttgcttggattattctctagtctagtgcttctcagctcctaatgtgtacatgattcctgtaaagtgtagattctgacgtggcacgatggctcacacctgtaatcccagcactttgggaggccaaggcaggakaattgcttgagcccaggaaatttgagaccagcctgggcaacatggtgagatccctatctctacaaaaaaattaaaaattagttgggcgtggtggcctgtgccagctacttgggaggcttaggcaggaggatcccttgaactcaggaggtggggactatagtaagctgtgtttgtgcccctatactctagcctgggcaacacagtgagaccctttcacacacacacacaaaaaaattgtagattctgattcagtagggctggatggaacgaacccaagatcctgcatttctgacaaacttccaggtgatgccagtgttgcaggcccctagaccctcctgcctttgagtagcaagggtgtgcactccttgcgcttccggtctattcatgggtaccattgctgcatgacggccaagagaaggggtttgaagtcccacagtggacttcacagtggatcccagcctaccccttaacagtcagctaaccttaggcca

SEQ ID NO: 475366 - DNA, 623 bp, Homo sapiens
ttgcttggattattctctagtctagtgcttctcagctcctaatgtgtacatgattcctgtaaagtgtagattctgacgtggcacgatggctcacacctgtaatcccagcactttgggaggccaaggcaggataattgcttgagcccaggaaatttgagaccagcctgggcaacatggtgagatccctrtctctacaaaaaaattaaaaattagttgggcgtggtggcctgtgccagctacttgggaggcttaggcaggaggatcccttgaactcaggaggtggggactatagtaagctgtgtttgtgcccctatactctagcctgggcaacacagtgagaccctttcacacacacacacaaaaaaattgtagattctgattcagtagggctggatggaacgaacccaagatcctgcatttctgacaaacttccaggtgatgccagtgttgcaggcccctagaccctcctgcctttgagtagcaagggtgtgcactccttgcgcttccggtctattcatgggtaccattgctgcatgacggccaagagaaggggtttgaagtcccacagtggacttcacagtggatcccagcctaccccttaacagtcagctaaccttaggcca

SEQ ID NO: 475367 - DNA, 515 bp, Homo sapiens
agtttgctaaagttgttgtaacaaatatctcagactgggtggcttaaacagcagaaattatctcacagtttttagcgggaggttttaatcctaatcctaccctcygctctcaccccctgccaccaccaagagtggatgttggctcctcttgaaaatccctcttaaagatttggcaccctggacctgtatccttcaaggccctggtcagttacagtcacgtttaggtggagtctacacatgccaggcccctccttcacctccatggctggttgtgttttttccatcctgttacttgcctggctcctgacccactagatactcagactcagggattcagctttgcagggacaccaatccccactgtgctatgggggtgggtggaggggcctccatggcggaagaagcagcccgttagttcctcctcatcctgtctgcatcccctgcaccaggacctgagctccccaaagactgggatgctatctcattcatctctgtaatatcctagagtgacttaa

SEQ ID NO: 475368 - DNA, 613 bp, Homo sapiens
agtttgctaaagttgttgtaacaaatatctcagactgggtggcttaaacagcagaaattatctcacagtttttagcgggaggttttaatcctaatcctaccctccgctctcaccccctgccaccaccaagagtggatgttggctccycttgaaaatccctcttaaagatttggcaccctggacctgtatccttcaaggccctggtcagttacagtcacgtttaggtggagtctacacatgccaggcccctccttcacctccatggctggttgtgttttttccatcctgttacttgcctggctcctgacccactagatactcagactcagggattcagctttgcagggacaccaatccccactgtgctatgggggtgggtggaggggcctccatggcggaagaagcagcccgttagttcctcctcatcctgtctgcatcccctgcaccaggacctgagctccccaaagactgggatgctatctcattcatctctgtaatatcctagagtgacttaattggagtctcctaattttaaaattacattctactttattctagaatagaatagaaagtctattctacttttcctgccatatgtagcctaagatgtttt

SEQ ID NO: 475369 - DNA, 613 bp, Homo sapiens
agtttgctaaagttgttgtaacaaatatctcagactgggtggcttaaacagcagaaattatctcacagtttttagcgggaggttttaatcctaatcctaccctccgctctcaccccctgccaccaccaagagtggatgttggctcctcttgaaaatccctcttaaagatttggcaccctggacctgtatccttcaaggccctggtcagttacagtcacgtttaggtggagtctacacatgccaggcccctccttcacctccatggctggttgtgttttttccatcctgttacttgcctggctcctgacccactagatactcagactcagggattcagctttgcagggacaccaatccccactgtgctatgggggtgggtggaggggcctccatggcggaagaagcagcccgttagttcctcctcatcctgtctgcatcccctgcaccaggacctgagctccccaaagactgggatgctatctcattcatctctrtaatatcctagagtgacttaattggagtctcctaattttaaaattacattctactttattctagaatagaatagaaagtctattctacttttcctgccatatgtagcctaagatgtttt

SEQ ID NO: 475370 - DNA, 547 bp, Homo sapiens
ctgggacttgtgtcaaacttatgagctttcaatagcctcacatgagagtagaaatccttaactgatccacatggccctttttgactcgatcattgcctcatcttatattgcaagagcytttaccctctgccctcaaatcgtactggccttctctgagtttattagacatggcctaccggctcccatgacgagcttcggcctgtgttgttctctctgctgcagacactgttctcaagtctctccctctggcttcctcttcatatcttagccagattacttcctttcctgatttgccaactagatcgacagttcacttataagttcttaccatcatctttgcagtgagtgaatgtgtgtgtgtgtgtgtgtgtgtgtgtacagagagagagagagagattatttcattagtgtgtttccccaggaatctgtaagctcaggagtgaagatgccatgtagtatttgctctcaaatatgcctctagtgcctaccaggtgcccagagcagagtaggtactcaagaaacaaactgaatgcatggactaggctac

SEQ ID NO: 475371 - DNA, 609 bp, Homo sapiens
gctgagatgcccaccatctccaaaaccsttaaccctactcctgatcctcatcaagaatatctggaccctaggattaccattgcttattcgaaattggatcaacattccccttctcctggggctctctccctttcctaaagaatagcagccatcaagttacagaacaacagactgcacagaagtttaacaatctcttaaaagaaattaaagatattcttaaaaatatggcaggttttgaagagaagatcacagaagcaaaagaactttttgaggaaaccaatattactgaggatgtgtcagcccacaaagaaaatatcagaggacttgacaaaatcaatgaaatgttatcaacaaacctgcctgttagtttagccccagagaaagaagacaatgaaaagaaacaggagatgatattggaaaccaatattactgaggatgtgtcagcccacaaagaaaatatcagaggacttgacaaaatcaatgaaatgttatcaacaaacctgcctgttagtttagccccagagaaagaagacaatgaaaagaaacagcagatgataatggaaaaccagaactctgagaacaccgcacaagtttttgcaagagatttgg

SEQ ID NO: 475372 - DNA, 555 bp, Homo sapiens
taaatttttttttaaacaggagggtttgggcatggagctggttgatcttaaaaatcctaacccagctgggcgtggtagcccacgcctataatcccagcactttgagaggccgagacagatggatcacctgaggtcaggagttcgagaccagcctggccaacatggtgaaatccccgtctctactaaatatacaaaaaattagctgggcatggtggcaggcgcctgtaatcccagctacttgagaggctgaggcaggagaatcactaaacccgggagccggaagttgcagtagccaagatcgcaccattgcactccagcctgggcaacaagagcgaactccgtctcaaaaaaaaaaaaaaaaaattcctaacccattcattcccgtcaagctgtccaaaactagtaactggaaaggtcccgtgatgctggtctctaaacatcgaacacaaagactagaataatagaattatctggtattttccctttccagaaaattccatacttcaattggggtctatgggttcaasagccatatttatgaaccaaaagttagga

SEQ ID NO: 475373 - DNA, 533 bp, Homo sapiens
aaaaaaaaaagaccgaaccccccaatgtttagtgagcactttcttggtgtgaagttctgggcttacacttgaaatgcactatcccatttcatcctcacaaagagtccctgaggtgcatgcagcatcacatagaggacatgcacatcgcctagggtcacacacctggtaagtgacagagccaatatttcaatcaggagtggctgactcctgaggctcagctcctaaacacctgcaatgctgaatagaaagcaccgagaagcattctacaacttcctcgagcatcaggagactgctctttagaagtccagggcagctagatctggagttgatgtggactgtaggacctgtgtttccatggttgcaggyctgccaagatttctgagtaagataaagcacagagatgagagcctgagcttttttgtcaaatgataaatcctgagatagttacatttgtattcactagcctcttttccaaaaggttcaaagagagctcgatgtccagcagcaagaaaacacacacataaagcaacaac

SEQ ID NO: 475374 - DNA, 619 bp, Homo sapiens
caagcaatgttccttcttgctggtcccttaaaactcactgcttgtccaatgcacaggggcaatcatgaaagagctttgtaactattctggttttattcatgaacctagtggctattaaatatttctcagcttgtcaagtgtgggaaaggcaagagatgaatatggtgaagaaacagtagcattgttcaggctctagaatgcacaaacttctatttgctgtaactggtaacctggtttgaactggtaacttttaattagaacaaaaccttggggaaaaaaaaatccctcccacatgcaaatgcttccatctgtgatcctattaaacatttgctagttcagcaaaaacttgccaaactgccacattatctcttcttcttgataattaacatttgatccagcaatgaggaatggtggaacaaacayagactatgggactcattttaaacaaactgagtattaaataaaacaagcctgcaacttcattaaagtcctgaataacttgccagaaattgctttctcctctagtgtgatgaatcactagactaggcgatttccatcaggacaggaaagaaaagtgtattggaagagtgaagagatttagattctatctctaattttg

SEQ ID NO: 475375 - DNA, 619 bp, Homo sapiens
caagcaatgttccttcttgctggtcccttaaaactcactgcttgtccaatgcacaggggcaatcatgaaagagctttgtaactattctggttttattcatgaacctagtggctattaaatatttctcagcttgtcaagtgtgggaaaggcaagagatgaatatggtgaagaaacagtagcattgttcaggctctagaatgcacaaacttctatttgctgtaactggtaacctggtttgaactggtaacttttaattagaacaaaaccttggggaaaaaaaaatccctcccacatgcaaatgcttccatctgtgatcctattaaacatttgctagttcagcaaaaacttgccaaactgccacattatctcttcttcttgataattaacatttgatccagcaatgaggaatggtggaacaaacacagactatgggactcattttaaacaaactgagtattaaataaaacaagcctgcaacttcattaaagtcctgaataacttgccagaaattgctttctcctctagtgtgatgaatcactagactaggygatttccatcaggacaggaaagaaaagtgtattggaagagtgaagagatttagattctatctctaattttg

SEQ ID NO: 475376 - DNA, 594 bp, Homo sapiens
aggaaagaaaagtgtattggaagagtgaagagatttagattctatctctaattttgcttttgggtaaggctttgggcaaggcagtgaacctacttagacattagtttctcctataaattaggggattgaactaggttatcctaggacttttctaggtctaaaaaactatctttagttcatttatacatataataaatatttattgagcatccactctgtggtaggcrtggttctggtctttgcgggtagtcagtagcaagatagatgaggtctctgctctactgagactgggtgatgaagataagccttaagcaagtgattatgcatgattggacaaataattatttaagcgtggttgcactaagcatgttgaaaagggcagagtagcatgaccatacatggtcaggagacctagagtagccccagaggtcagagaatgcttccctgaggaagtgagatttgacagctactatctgaaagatgggtaggggtggcccagggcaagaacagggagaagactgatccaagtagaggaaagaaactgggtgtttgaagaactaagagtaaccagtgaggggctgggaagtcacatga

SEQ ID NO: 475377 - DNA, 509 bp, Homo sapiens
caaactataataggctctggttggcagatcttaaattggattcttctggattcactattgcagaagaaatattgtaatctgaggcttctttagggttcttgagtaattctacatggcttccggacctctaacccttgcaaataatcatgtgcttattttgcacattactgcaatattccaggaaagaatatgctggtagaaccttaagcagaccttcactgatgggttcccacacaaatgctctaggcaggaaatagcacctttgtaagaaccatcatggacaatgttttgaaggaagtcagcatattttttgccttttgaactctataaagctcactttccccatttctcttcttctctttgtaaaagatctaatagcttccatttagaagttgaggtgaattaaagtcatgtgctctccttttttcaaggacactagcattctagatttaactcctattgcagatggaaaggctttgtactytattttaagactcttagaaatcagc

SEQ ID NO: 475378 - DNA, 611 bp, Homo sapiens
cactcactgctcctttgttccagactgtcttttgatgaacatctgtgcagtgaacagccttgtaagatagagatgktgtctccctctggagcacggaccaggcatgcttactgactatcctagaagatctgggttccctaaaataaggctgtttttctgtaacacacccactgcatgtgatcatctggccttcttaatgatggaaaagaatgctagggtagctgtcttttatctcttacccaagagcctcatgtcatctgtcaacatccatgaaactctggcagatttacttcttagctcgtaagtaggaaaatatctcaaccctttcacatgtttggtagtgatagaaataacaatgagggactagttaaagcaagacagctagaacactgtttaaaaatttacctttaaaaacacgtttaggaacatctttaaatggtatgatacactgaaacaggaaagaaggtggaacgacatggtaaacagtgacctatttagcctgcgtgggtgatttgggtgaaagtatcacatcgccaaggtccccctcacatctaatttggccatttacctactaaaattgtacacattgttcaaagggcttctcaaatacc

SEQ ID NO: 475379 - DNA, 612 bp, Homo sapiens
ggaatgacatcagataggttacagaaccacctagtggtgaaagagcatctatgctggtattatagtatagacttgtgaggtctgtgtgtataatgagcttaatctgccatcctgggtgtgggggaatgttgtgcctcagtcactgaagggtctaggtgccctccttggcttctgcctcttctcctacttctgggaatgctactgagagcagggatttgggataaaatgtgtcacctatattggcttttcatctctactttgttacaggagatgttggggaaaagagatgttgacatgacaaaggaggctgaaaacgttagtgaaaatctcagtccaacatgttcttctcacatctatcaactcctactttccttagaatctgtgagggtggggaacacatgagggacttccaatttctacttcaaatacttttgtactgtaggaatcaatttacaatatgcatgcattgcttctgtgataacaaaaaagaggaaccatttgaaacaaagaaatggatgtcacttcctcaggagctttccctgatatttgaagagcagagtgcagaaaacctgcaytgatctatctacaaatctcccacatgcatttttgagg

SEQ ID NO: 475380 - DNA, 545 bp, Homo sapiens
taaaggacatgttcacatattgttttaggcagaaccaaatattctaaatatgtgttttcactgcaatgtagactaaattaattgccaaagatgaaaagttacttgctatagggtcctccacttcctccataatcataggactgctgtgactgatcatcgatgctgtaacttgtctggtagaaatccgtgtttaagttttcaaagcctgacattgcaaataatctgtaataaaagagaaatggcaaatattccttatgcccaaggttctactgaattcgttcctggcagtctgcttaagcaaatagaaacacaacaaatattttttcagtaattcggagaggggatgggggcggaaagtacgcagcatttgaacgacggtagcggagagagagtaagaaaatgtmtattcttttaagttgcggcccagtaagacaactccaccttaaagagctgatatgccttccattaggggcgaggtcgtgggagttgtggttccataagcggtctaaaatatcaataacaacaaagatgatttttcaccttag

SEQ ID NO: 475381 - DNA, 405 bp, Homo sapiens
agcctaagggaattggtttaaagtttaaataaaaaattgtacatgctgccagtcagaactattcatcatcataagcatkgcatttattttatttatatgtgctttaacaaatattctagatttgtagttttaaaaaatagctgaaaagtctgtctcaaagctctctcacctcttaaaagaaagcagaaggactttaaaaaaccagtttgtttaaacaaggccaaactgttttccaggtatccacattttctcctcaacacatgcccaatccaaagacagagcatcaagggcaatatactctatgtatgttaaagttttaatattaccaaactgatcaaggtaaaggattattaacttttttaaccactagaaatgtaacattagctgtgtagcttttctggcctc

SEQ ID NO: 475382 - DNA, 613 bp, Homo sapiens
gaatagaaatttcatccatgtgtagcctcgaaaagaccttaaagaataccttttaaaagcttakgattaaatagcttcttttcatcaaagtcaatgtaaaccaaagggtatctgagtcaagtctcagtcaatttaggaattttattttgccaaggtcaaagacacacccatggcacagctttaggaggtcctgaggacatgtgccgaggtggatgggacacaacctggcttcatacattttagggagacataggacatcaatcaatatatgtaagatgtacgttcgttcagttcagaaaggcaggacaactcaaagtggggacgtggctttcaggttgtaggtagataaaaaacaaatgcttgcattcttttgagtttctgattagcctttcactgaatatgcaatttacaggaatagttacctccaccttaggctggcttagtgaaacaataaagcagaggaagaactcagataagcatttgtctcctgtgagcagagagacgactttgagttctgtctgtcctttgtccacaagaaatttccttgtgggcaacttgtgagggaggtacgtagcttcttatctttgtagctatcttatttaggaataaaatg

SEQ ID NO: 475383 - DNA, 596 bp, Homo sapiens
ccttctgtatcaaaactgcttagggtgctcaraatacagacatttaaatctgaggtcagatatatggactcaaaaaggacactggcttaattttagcagaactacagatgatttgaatggacacgcccatttgaaagccattacaataaaattgggctctaagtatgagattgataggggcttcctttttctcctttctgtagctttttctccctttgatatgcattgccccccatcatagtcatgaaatagctgtgcagggaagtctttctaaagtgatatggtctaatctcctcattcctgagggggaaactgaggttcagggagataaaaagattctgctggcttggacccagtgtactttatgccctctctgttttcctctgtcttgatcctttctttggaaatattctggtgaactcagttgcattgataggtatgaacaacagacaaaagataactttattaatgccagtagcatttaatgttttgacacagtcaatgacatcagctaaagaaaagaccatatatttgtagaatgttaacatgtgagagaaaagaggaagcagaataggaggagcatatgttaaaggata

SEQ ID NO: 475384 - DNA, 596 bp, Homo sapiens
ccttctgtatcaaaactgcttagggtgctcaaaatacagacatttaaatctgaggtcagatatatggactcaaaaaggacactggcttaattttagcagaactacagatgatttgaatggacacgcccatttgaaagccattacaataaaattgggctctaagtatgagattgataggggcttcctttttctcctttctgtagctttttctccctttgatatgcattgccccccatcatagtcatgaaatagctgtgcagggaagtctttctaaagtgatatggtctaatctcctcattcctgagggggaaactgaggttcagggagataaaaagattctgctggcttggacccagtgtactttatgccctctctgttttcctctgtcttgatcctttctttggaaatattctggtgaactcagttgcattrataggtatgaacaacagacaaaagataactttattaatgccagtagcatttaatgttttgacacagtcaatgacatcagctaaagaaaagaccatatatttgtagaatgttaacatgtgagagaaaagaggaagcagaataggaggagcatatgttaaaggata

SEQ ID NO: 475385 - DNA, 548 bp, Homo sapiens
ctggatcatgcaggaccttgtgggttgtggtgaggaatactgatatgttctcaggtcaatttggagcaggaggaggtttcaggaaggggagttgcatcatcatttgctcttgtgaggaaatagattttaaacagggaagtggagaggccaggaaactagttaggaagctagttttccaagtgagggatgatgctggcttggatgagaatggaggtggtgaggatgaaggattgctctgaatactgtataacataaaatgcttaataaatggtagctctcgttacagtatgatgatgatgatgataactgtcattatcattattagcttttgctgaaaaaagaaacggataaatgaaactcagttgggtcataagagttgacacctgcaacaagtgagagaccccattcccgttcaccagaagaagccacttgctgatgccactgaccgctcctcatccscaattcactctccccagcaagttcagaaacctaaaaatgtgtcagagcctatacctacacacatgaatatgtgattaggccacttaggg

SEQ ID NO: 475386 - DNA, 574 bp, Homo sapiens
agtgcctacctcatgtaacacacctcatctagagcttggcacatagaatagactcaatacatgtgagtcgctattatcattattatttagatgggggtagaaggagtcacattcatcagccacagactatgaggaggtacccggggccgggggagggtggtggtggtggtggtggtggtgaggatagggtgatgaattttcatccaggtaggggtttcattttgtctctgaagtctctgacttctagcccaaaggagtaccagtgatcatttctaccagattatacgacctcaggcaaatatttcccagctctctgccttggttctctaatctattaaaaaagaagcaattattyccactccatagaacagtggactcaaacttcagctagtatcagaatcacctgatgaacttggcaaaataacatggcacagattctatcctacttcaacaagtctgagtctctgttctttattatctcttcagatgctttgatacacaccacgttttaaaagtgccataagccatgaaaggaacaaggctctgtgtttactctaaaggatcataggagatt

SEQ ID NO: 475387 - DNA, 338 bp, Homo sapiens
tctttcgaggagctggactctacattcctgggtgcctctgcctaccactygtagctttccaagacagcttggaagacagttcatcttctccaagtgctcctgagccaaaagagccttgaggaaggaagaggaggaatggggtgaactggagggctgcgtccagccttgcccagcttccaagccctgcctgaacttagggtcccccagaaatccaggttcccaaggttccgtccctcctctgcagctgcttctttaagaagcaccatgggggctggtccttgctactgtccttggaccctgtccagggccctgatttaaaaggtatcgcaacgttttta

SEQ ID NO: 475388 - DNA, 364 bp, Homo sapiens
ggtccaaactcgctgtttgcccctccctgctccctcagaaatgttcaggcagggaaataaacagcagcccacgtgtgactactcatctggggttttaagaacaaattagaatcagtagttattttttccatcataaatgtaatacttgttccacaggaaaataaataacactgagaagggagaaagcagcattagctctggtctgatggatcggccgagcgctctccttggcattttggtgaatttctttcctctgtgttttgtttttcgaccctttctattttgtrtagttgcttttttgaccctagtggacaagaagcagttttgggggctgggggacagcggcgtcacggaattgaggaag

SEQ ID NO: 475389 - DNA, 364 bp, Homo sapiens
ggtccaaactcgctgtttgcccctccctgctccctcagaaatgttcaggcagggaaataaacagcagcccacgtgtgactactcatctggggttttaagaacaaattagaatcagtagttattttttccatcataaatgtaatacttgttccacaggaaaataaataacactgagaagggagaaagcagcattagctctggtctgatggatcggccgagcgctctccttggcattttggtgaatttctttcctctgtgttttgtttttcgaccctttctattttgtayagttgcttttttgaccctagtggacaagaagcagttttgggggctgggggacagcggcgtcacggaattgaggaag

SEQ ID NO: 475390 - DNA, 632 bp, Homo sapiens
tttcatgcagtcacccgagactgtagataattgttctagatattctattttattctgttctcaatattccaggtgtgtgttttgtgtgttttcattttatagattggtaactagaagtttattgaggtaaagacactctcaccttgatgcacaatttgaaagatatggaggtggtatgcaaatttcagtgttcttacttgtccagtgttctttactctataatagtggatatattctaagaagttcttactttgtgtataatgaattaaaaatcttgaatttattttccaataattcaaagatatgtaaaacaaaataggagtgaggcytaccctgttttcacagaaattcaaatgaaactagaaaactgaggacaatgaatgagagaagcctgttttatccatgaggtttagtgacggtcatctacaacagtctaaaagaataaggttagatatttattgaagtattatttgaagggaatgcaaagtttagtgaatgctatggcttttcctctcttcacctcttggtgccttctcacccttacccagaatacaaatgagggtaagctaccttctcctccctgcaaaataaagcagtcatagagactatgaagatcttcaagtgaaaagcct

SEQ ID NO: 475391 - DNA, 632 bp, Homo sapiens
tttagaatttatttggtttgggagagatgcagtaagttttattaaagaagaaatagactgagcatcgtggtgtacacctgtagtcccagccacttgggaggctgaagcgggaggatagcttgagcccagaagtttgaggctgcagtgagctgtgattgcaccactgtactccagcctgggtgacagagtgagaccctgtttctaaaaaataaataaaagaataaataaagaagaataattaattagctacrtagaagaaaaagttaatatcatagactcaattattagttctgatttaagtatccttcacaaaatattaaaattactttaaatgattatatgtctaattctagtaaaacttcttacagcagcattaaattacttgagtcttgctcaccgtgaaaaactctgaatcaccttttcattttgcagaatggaggaacacctctgctttatgctgtacatggaaatcatgtgaaatgtgtaaagatgctcttaggtaagcagataaaaatttagaaaatgccatgtgaggacttgattttattttttcgacctggcctcccctggtactactcaggagaatcattaactattgttaaatacatgaatcttgctgctcttcaccctta

SEQ ID NO: 475392 - DNA, 632 bp, Homo sapiens
tttagaatttatttggtttgggagagatgcagtaagttttattaaagaagaaatagactgagcatcgtggtgtacacctgtagtcccagccacttgggaggctgaagcgggaggatagcttgagcccagaagtttgaggctgcagtgagctgtgattgcaccactgtactccagcctgggtgacagagtgagaccctgtttctaaaaaataaataaaagaataaataaagaagaataattaattagctacatagaagaaaaagttaatatcatagactcaattattagttctgatttaagtatccttcacaaaatattaaaattactttaaatgattatatgtctaattctagtaaaacttctyacagcagcattaaattacttgagtcttgctcaccgtgaaaaactctgaatcaccttttcattttgcagaatggaggaacacctctgctttatgctgtacatggaaatcatgtgaaatgtgtaaagatgctcttaggtaagcagataaaaatttagaaaatgccatgtgaggacttgattttattttttcgacctggcctcccctggtactactcaggagaatcattaactattgttaaatacatgaatcttgctgctcttcaccctta

SEQ ID NO: 475393 - DNA, 458 bp, Homo sapiens
gtgaactcaaggcctggcctcaggcgctgccacaaaaaaaaaaaaagaaraaaaaaatatatatatatatcctgcccagtgtcaaggtacacaagataaaaataaaagcaataatattcttttcaaaaatagaaaaaattttgagcagggcgtggtggctcacacctgtaatcccagcactttgggaggctgaggcgggtggatcacctgaggtcaggagctcgagaccagcctggacaacatggtgaaaccccgtctccacaaaaacacacaatttagctgggtgtgttggtgcgtgcctgtaatcccagctactcgagaggctgaggcaggagaatcacttgaactgaagattaactgaatcaacatgccagacaaaaatggtttccaaactctggtgaataaacatggtgatgtgttagaagcctttgttgttattgtcctttttcatatcacta

SEQ ID NO: 475394 - DNA, 611 bp, Homo sapiens
atttttaatcaactgatatttattgagcaccaactatgcaaaaaattaatattttgcaatctttgaagaaaataataggttgtttttagccagttttcagtatgaggtcttccctaaaggggcaacttacctgtcaggtatagcaagctcagtgcctagggtctataatacttataggggccaaaaaatattttaatttcttttaaaatcagaagagaaaaatgaacttttaggtcaaagaaaatgttttagcatataatattaatatatttgtatctataacaatgcaatagtgaaatataatttttctttttatctacatttttatttttctggaggaaggtgcgtatgaaggcaaaagtgcccagatcctacaaaagtcataatgcagctatgttcttgaagtccatattagtctcaggtatttttaggaaagcacatggaactcattgtggctgatattttcatgttggtatttacatgagcaaaaggaagatattggggaaattataaataygccttttgagtggagccagcccaataattatgaagagttcaacactttccacgtgtgcaatttggaaacactggggatgctccattgacaaaac

SEQ ID NO: 475395 - DNA, 550 bp, Homo sapiens
aagattatgtttctaaaaaggaactaatagaaacaaaagaatctcacagttgtgattttcaagtactccattttgaatgttttagtgagagagaggggaaaatacgtgatcttttatacataggtgagatggtttggtttaaagtcagtgtcacatgtatgtagatgaacccaccacctgcatagttggatttaaggggtgccaaaaggtctcctactctgcaaaacctgaatgcccgaactgactgtcacagagtaggggtggtctgaaaggttcccatgaatgagctctttgggttaggtcatgaaacaccttatcaaggagcaaatgaaatacaagaaggtgtcacaggagccacttttgactgttccgtagaagttagttttaattttagacagggcctatgacactgaaattctcaggctrtaattccagaaaagcggatgaggtgagcaaggaacaacagggcagcctaatagaaaagagatttggacccgggtcaccgggctaattctttactctctctgggatttagctttcttgtccataa

SEQ ID NO: 475396 - DNA, 582 bp, Homo sapiens
atattcaaatgtcttttgattcccataaaaactatttctaaatatttaacaaatataaacttctaaggttggaaataaaataatttctctctctctctctctctaaatatatatatatatatatatatatayatacatacatacatacatacatatatttagtttgataaacaaaaagagtacgattatagaggtaatatttttcatttaaaaatagttctggagtttaaattcaaaccaaagcattcattattctaatatgaaacagtcagcaaatcccaccctttaaacgtactctgtccagaagtttgcgtaatgacttacatgttttcacatgaagaagttggagaaaataacacagagctgactttagaggtctccagttttctttcttctcttccccttgtttctccttctactcttcctgacatcacatgattgatgtgttttccattctcgtttataaaatgaactatttgcttgactggacaggtattttttcaggtgattggttcagaattcatttttggtacaatccttgtccctttacaaataaaaatgtaagtattttgtaatgtgtaa

SEQ ID NO: 475397 - DNA, 524 bp, Homo sapiens
tgtgattatgtgactggaccaaatggcactaactgtcgaaaccttttaggctgaaggggaagcactaactgttgaaaccttttaggctgaaggggaagcattctgaaataggacaaggggcacctcgtgttgaaacctggagctggtcaaccctctgaggccaatgccgacctttgcatctgcctcccacgccctgcttgttttagctggaccaggagaaactaatgtcaagacaaaaaaaaaaaaaaacctgaaatccataacattttgataggtagctttatgaacagttacaaatcagatgtttgccccccaaattttaactttattctctgaaacagatctaaaattcctatctacctcacagtttcacagataacccagtctcttccagtttataactgcctctttggggtaagtattcagttaagtatttcaatatcagggcyatatctgtgttctcaaagaaaatcctttctaccttctcctccccgaaatggcttctgggaggggaaagcttactc

SEQ ID NO: 475398 - DNA, 589 bp, Homo sapiens
ggagtgtgcctttgatacgcaaactgcccaacctagagccatctctcctctatgtggcccctgcacctcaggaggcaacatttttcctctgccttagtcaaccaaaggccaggaaccaggcaactaaagaccacccgtatagttaagtgcctgctgaaatgattcaaactagccagtcctaaactgcccttgccctgctgggaaaccccaataaaggctgtagcctcggctttccctgtacccctgctttctgcctcctgaccaccctgaggctaccccacgtggccctgcctggtgtggtttgtctcctgtctctaggacctgtgagtgttgttttcctgagcttctcctctgtctcctcttgtggctgcacttgactgagcatttcatgaaagaatacagaatgcacttctcagactactcttggtaagttttttacaaagaaataacacaattctcaacatttctaatctgtaaaattacagtatgctaaataaatatttgttttaccatttttttcatttctttatacatttataacygataatgagagagtttttaatgttttgacaaatatttctaaaggtta

SEQ ID NO: 475399 - DNA, 649 bp, Homo sapiens
gccagatcctgggcatttatggagcattgccttcaggggctgtgtactctggactttgtccaggatgccaagctcgtcctagatgactccccctgacaaaagaaccaggctcggctcatccacaaagattgttcagatcattatgcacctcaccagtttatttgacaggttttgacctgaggacaatctggaagccccccaaacatttaggagacgtgaatatcttgttctttctgcaccaaggggaaggtttgtaagcagcttctaaaraagcaaggagaaatgcatggctggggccactgtatcttgaagttcccacaaagttcagtaagttatttgctccttcctgcaacctgtgcagccacaattttaattaactgcagagctgcctgccacccagtagtttaaaggaaggcaacttcagccatcccagggaactttctaacaagaagggtttttttttcttctttaggagagcgagagaatatggcaacaagccaaaatatcaaatatatagttggctctatttacatgacagactttgattgtgccttatttaaccaatagtcgttatctccccaacatttggtttgcagaactctgaagcaagggtgcttaaggagggcctcctggatactcatttcagggc

SEQ ID NO: 475400 - DNA, 637 bp, Homo sapiens
gctggcggtggggaccatgttaggttcaggagaggtcaagcgtgcgcagcctgggtccctggaggcggaaggaaggaagatcaaggcagagcccgcsgttaaggttttattttttggaggacgcgcggcgaggggggccgggaaggggcgggggcagccgagcgaggcggggcgctcactcccgcttccgtaggtggatgtagatgatgccgctgaccagggcgagggggaaggccacccaggccagggcgaagcagtatccgaagctgccccctcgcgggtgcttctccaggatctcctcggcgtgaatggcatagatcaaggcgccagtaaacaccgccacgcctgcggaagatgaaaaccacacgtcatgcagtgccccctcaagactacatttcccaatatcccatgggggcaaagaagcgccggagggcccgtgggcagcgccgctgcctgctgggagttgtggttctttcccccccgcccagcgccgtgcaactgtagcgcggccttaggtaactgatttaatctctctaggtccaataatatctctctatccatccaaggaatatttttgagtgtgtttctataagccaaacatgcagtagtaaattcataaaccaagagagaagctttg

SEQ ID NO: 475401 - DNA, 637 bp, Homo sapiens
gctggcggtggggaccatgttaggttcaggagaggtcaagcgtgcgcagcctgggtccctggaggcggaaggaaggaagatcaaggcagagcccgcggttaargttttattttttggaggacgcgcggcgaggggggccgggaaggggcgggggcagccgagcgaggcggggcgctcactcccgcttccgtaggtggatgtagatgatgccgctgaccagggcgagggggaaggccacccaggccagggcgaagcagtatccgaagctgccccctcgcgggtgcttctccaggatctcctcggcgtgaatggcatagatcaaggcgccagtaaacaccgccacgcctgcggaagatgaaaaccacacgtcatgcagtgccccctcaagactacatttcccaatatcccatgggggcaaagaagcgccggagggcccgtgggcagcgccgctgcctgctgggagttgtggttctttcccccccgcccagcgccgtgcaactgtagcgcggccttaggtaactgatttaatctctctaggtccaataatatctctctatccatccaaggaatatttttgagtgtgtttctataagccaaacatgcagtagtaaattcataaaccaagagagaagctttg

SEQ ID NO: 475402 - DNA, 638 bp, Homo sapiens
gagtcaaaagtcttgaaggccgaagttgggttcaggaggctaaagactggaaggcgtccaatgggttgagaaattaggaggttattagtgattttgacaggagcagattcagtgaattgaagggaggcgaaacatttccatttcaggagtaaataggasgtgaagaggataatgaatgtcacttgatcctttcacaaagcttggctatggtgggatgaagagaaatagggaaatgtagaattaagaaagattttaacataattatcagactaagaaacagcttatagacaggctgcatttaaattcagtaaatgaagtgataatttatgggaaggcttcctcaaggaattcagagaaaagtaggatctagagagtgtgtaggaggaattagcctgcatttgggtaagtcttcactgaatcctgagagaagatggagttcctggattcaggtacaagtctttctgggagagagcaagagttgaaagaacacttacctaataccctctatttttctgtgaaggggggcctaagagtctttgagggtttaggattaagatcttcaagagaatggtgaaggtttaaaaggctgttacatggcatcggagatggagttgcttaggagctcaccaaaagattgc

SEQ ID NO: 475403 - DNA, 638 bp, Homo sapiens
gagtcaaaagtcttgaaggccgaagttgggttcaggaggctaaagactggaaggcgtccaatgggttgagaaattaggaggttattagtgattttgacaggagcagattcagtgaattgaagggaggcgaaacatttccatttcaggagtaaataggaggtgaagaggataatgaatgtcacttgatcctttcacaaagcttggctatggtgggatgaagagaaatagggaaatgtagaattaagaaagattttaacataattatcagactaagaaacagcttatagacaggctgcatttaaattcagtaaatgaagtgataatttatgggaaggcttcctcaaggaattcagagaaaagtaggatctagagagtgtgtaggaggaattagcctgcattygggtaagtcttcactgaatcctgagagaagatggagttcctggattcaggtacaagtctttctgggagagagcaagagttgaaagaacacttacctaataccctctatttttctgtgaaggggggcctaagagtctttgagggtttaggattaagatcttcaagagaatggtgaaggtttaaaaggctgttacatggcatcggagatggagttgcttaggagctcaccaaaagattgc

SEQ ID NO: 475404 - DNA, 630 bp, Homo sapiens
taaatggttgctaattgtcttaactcgtggtagacagaagacagtttaagattaagcttgccataggttgagaatttggagccaatcaccagaacttragaatgtgagccttcttttttaagaagagagatttttttttaaaaaatcatacaaatttgaccctaaacaatatattgatttttatagagctagtaatgaaagagaaaaaaaacttgaattatacatagtctgtattaacattaaaacatctaaaaaagttattttcaaaaacagtcttgtagcccacttgttaaattaggaattagagaatggatataatttttataaaattcaatcaatgagtcactcatttttcattcagacttttatataccagacactgtccaattttattgctgttattaccaatcccctcaccctctctctctgatttaatttcttggttatatccaaacccttcccttttatagaatctcaaggaactatgaggatgactaatcactttttctaactcatcatacatgcactaaggaaaggatttaaaatttacacacagaggcaagtgactaaaaatgctctatccttcagagtagtgtccttttaataaccttaacctaaaagaatgaatag

SEQ ID NO: 475405 - DNA, 316 bp, Homo sapiens
acacccaaccatccatccattcctgtgttcatccattcactcaacatttttggagcacttaccgtgtactgacatccttctgggcacatggtggttgccactgtcgatgcaggcagggtctcagccgtctggggtgccgggacttgggtgaggaccagggctccttggctacttggagccaggccttgcgatgctgcggscctatctcttccttgttctcctagtcttgctccctctctcttcctgcatctctcaatctctctgttttcccatctgagtccatcttagatccttccccatatccccaggcccccca

SEQ ID NO: 475406 - DNA, 542 bp, Homo sapiens
gctgacactacccagaccagtaatctggctcaaccagtcctgcgatcccacccaggaacagaagacagcaagaaaacctcacttcaacactcccgtcgatgactccatcgacctcaggaagctccaaccaatcagcactccccacttcctgagcccctacccgccaaattatctttcaaaactcggatcccctaatgctcagcggagactgatttgagcaataataaaactctggtctcctgcatagctggctctgtgtgaaatactctttctccactgcaattcccctgtcttgataaatctgtctaggaagacaggcaaggtgaacccattgggtggttacacactgaccagccggatttaggragagttctcactaatccacagttctgatgcagccacccctgggggaccctcctggttactgaatctcccactgtctcacagagtctggaagtcacatccccaacaagggccttggtttctctcattgaaaaaagaaggaccagaagctgatgggccaggaaactcccagctctgaa

SEQ ID NO: 475407 - DNA, 516 bp, Homo sapiens
aatgattgcaatgctaatttggatattcttctactcttctaaagattgctatttttaagacatagcagtatctttgggccctgtgtatgaaatttatccaccattgtggctctgcctataagccttccctcctttgaccttccccctgtgtctgataacctcacttgagcctcgctgcagaccctcttaagcactcaggatctacaactgccttcacaccacccccacatactccaaaacgtaagtgctgatgtggaccaggcctgaggasgctttggaggaagtctctgaagtcgtggaaggggagatttgaaacctggagcatggctactactctaggtaaagagggagagaattcaaacttgctaacaacctagaacccccactcagaagtggttttcctgaaagctcaactcagaaaaggaaaccctgcaggaaggcacagaagcccagtgggagagctacctgagtgtctgcggtgaggaggactgacattccaaaaggcaacagagccag

SEQ ID NO: 475408 - DNA, 516 bp, Homo sapiens
aatgattgcaatgctaatttggatattcttctactcttctaaagattgctatttttaagacatagcagtatctttgggccctgtgtatgaaatttatccaccattgtggctctgcctataagccttccctcctttgaccttccccctgtgtctgataacctcacttgagcctcgctgcagaccctcttaagcactcaggatctacaactgccttcacaccacccccacatactccaaaacgtaagtgctgatgtggaccaggcctgaggaggctttggaggaagtctctgaagtcgtggaaggggagatttgaaacctggagcayggctactactctaggtaaagagggagagaattcaaacttgctaacaacctagaacccccactcagaagtggttttcctgaaagctcaactcagaaaaggaaaccctgcaggaaggcacagaagcccagtgggagagctacctgagtgtctgcggtgaggaggactgacattccaaaaggcaacagagccag

SEQ ID NO: 475409 - DNA, 588 bp, Homo sapiens
taaagaagtactaacttgagttgatgaatatgttaattaacttgcatgcatcaaaacatcaagrtggggctagccatggtggcttacacgtataatcccagaactttggatggctgaggtgggaggattgcttgagcccaggagttcaagaccagcctaaacaacatagtgagacgctgtctctacaaaaaaatgtttaaaacttagccaggcatgatgccacatgcctataatcccaggtacttgagaggctgaggctggaggattgcttgagcccaggaggttgaggctgcagtgagctgtgatcgtatcactgcactccagcttgggggacagagcgagattttgtctaaaaaataaacaagaaaacccatcaaggtatacacctgaattaaatacaatttttatttgtcaattttgcctcagtaaagctcaaaacaattactagtaacagaggattggatactaaggggtaaattcatctctgagatgcttctggctgagactgaaaacagaaaacagcctcctgggtgttaaagaaactcctagaaagcttccaataaggggtgctgtcgaacccactgggaa

SEQ ID NO: 475410 - DNA, 521 bp, Homo sapiens
aactacattgtgaccatttgtctcctaatgaatatttttattgtttctcacttctcaccattacaaactgcatccttgcctaagcatctgtgtgtgcatgtgtgagtgtgtgtaggtgcrtctgtgtgtgtactttcttaagacgaatttctagaagttaatagcttcatttctgtccatttttcaaatcgatatgtttttaaaataaaactccacctaatttcatgttttcttcaagtatttcaccataagaaatctataggttctttacgttgctatttattttcaaatgtaatacacattcatgctcttcagaggcaagctttctgatcttaacaattgagtacagtgataacaattctactttcccatcacagtatgcaaattagaaaattatgtaaactattgatctgttatcttttgattatgttaaccataattattaaatacatgtgaaatccatcttcttcatattcctcaaaggaaaattaattttcaaaagcagttatttagatctggaa

SEQ ID NO: 475411 - DNA, 623 bp, Homo sapiens
ctggcgaggaattcctgcattaggcagggctttgcctacatgacctataaggtcacttttgactctacaattctattatccttgttaatttctacaatttaatttgcagtacaggataaacaaaccaatctaatttgatctggaacttctgcaggctatcacaggtcatttaatctaaaacatatggctctagccattactatgttttctgaaatactcgaacagaccttgttcttaacaaggtcttcatgttattagtttcactcatggatttttccagcctcctgcttattctacaactgcctttcattctcgtttagactggggtggaaggagcatgaaagagttcccttctttctgactttctcttcttaaatctttgcaggcttaagaatctatgagaaatgagaaagaggaccacagataatcacagctctggataaagtctattaagacaaatgttcaaagcagaatgagatttttaatttttatattaaaaattaatttatagagtaaatttgaaatactgctatattgttttaattagggtaccaaaaccacttcttgagccttaytcattaagaaatatacacatttgcatttgtaaataacaggttcaattt

SEQ ID NO: 475412 - DNA, 570 bp, Homo sapiens
ttttaaaagtatcatcttaaactgcaaggatgtctgtcaagtatcacaattaaacatgccaaaggagaagccatgttgtcaaaatgcccacttaaccacccaaacatctcaaacccaccctttgccraccttctataaccccattttttaaagttttttattcttttttttttaaacaaaagaaagcagacagatacatgttggtaaatgcccaactgtccatattcacatagagacacagtgtactctcttgagcccaatatacagagaaaagaggaaaaaagctagaattctatgcactactacacagggcctagcaccttccagcttccagcagtgcgaagggaacaggtttttctttttttcccacagagcacagtggtgtcgagtccatacagtttttgttcagacaggaagggataacaatgaatttcgaacagaaaggggtagagactcttttcccattgtattatgctcaagttatttcccccaaaataagttgagagccatggtttagagaacagagacctcaagtaacagggtgaatgagcacaagagggggggaaaaaa

SEQ ID NO: 475413 - DNA, 544 bp, Homo sapiens
gatttgatgattccatctgactctaattcatactcagtggtgaagtccatgtctataagacttcatggtcagaggttagacactgctttcccttgctttaaaatagatttatagaatctgaaatgccttggccaggtgtgatggctaatrcctgtaatccctgcaattggggaggccaaggcaggcagatcacttgaggtcagaagttcgaaaccagtctggtcaacatgacgaaacccagtctctaccaaaaaatacaaaaatttgctgggcgtggcggtgggcgcccatagtcacagagtgagactctgtcaaaaaaaaaaagagagaatctgaaatgccatcttatcaaaactccccacaatgtaggacactgggtaagacactgaggcatgcacagcatagtgatagaaggcaaaatctggagatagaccgcagagatttaaattgtgactcaccatgtcactttgggcaagatacttaaaacttttctgtgtctcagtatttgcacctaaaaataggatttataatacttctctttcat

SEQ ID NO: 475414 - DNA, 628 bp, Homo sapiens
tgtagctccccagaaacctcactattattttatttagtaactcagtgtttccttataggaggttaaggatagagattagctacattggtcatatgaatacatttggaggaaagagtagatacttctagggagcttgagcttatcaaatcaaatttagaaaggatgcacaaaaccaaatcctgctggacaagcaggagacttctgtatgaaggcacagcatttatttctggccagtgggataatgttatatgtatctaatatgtatattagatatatacctctgtgcattatggtaatctatgtgtatatggtaatttactatggtattctaaagatacactggcttggaccagattaccctactatgcctctaaattcctcaattaaataaagccataatttgatatttgccaaagaacatatgattaaaaagaagaaatgtaagaggaacagcattcattgctccttagttgcctcgtatgcagttggatcccagaaaaagtgtattattaactcaggcaagcataagaaacaggtctggcaagactgaaaatgttactgctcttctgcrcgtgcttttcttaatcccagaaactgtggctataaatgtccccgactccccagtttt

SEQ ID NO: 475415 - DNA, 500 bp, Homo sapiens
tgtctttggagggttctctaggtgggagggaataggtgggcttggggcagaggtcacagcagggggcagaggtcacagcagggggcagaggtcacagccgggggcagaggtcacagtggggggcagaggtcacatccgggggcagaggtcagtgcatcaccttacctggaatcaccctccttcaggttagagacaggcattggctggtctacatctcaaacctgctcctcccccaggcccccattgcaggatggccccaccatccacccaggagcctggcctccctctctgggtacccctcacccccaaaacctgtccrtcatgagccctgtccctccccacctgcctccccttgccatatcccctcctctgtgtccctgtagcctagaactgcttaggcctcatcctccccttcctggatccatgcctcagcagccggctgctccacagccttcctgcctccagtctccatccccctccagctcatcccccacacccca

SEQ ID NO: 475416 - DNA, 500 bp, Homo sapiens
tgtctttggagggttctctaggtgggagggaataggtgggcttggggcagaggtcacagcagggggcagaggtcacagcagggggcagaggtcacagccgggggcagaggtcacagtggggggcagaggtcacatccgggggcagaggtcagtgcatcaccttacctggaatcaccctccttcaggttagagacaggcattggctggtctacatctcaaacctgctcctcccccaggcccccattgcaggatggccccaccatccacccaggagcctggcctccctctctgggtacccctcacccccaaaacctgtccatcatgagccctgtccctccccacctgcctccccttgccatatcccctcctctgtgtccctgtagcctagaactgcttaggcctcatcctccccttcctggatccatgccycagcagccggctgctccacagccttcctgcctccagtctccatccccctccagctcatcccccacacccca

SEQ ID NO: 475417 - DNA, 582 bp, Homo sapiens
ggcccacccccatgccctccgctgggggctcctcggctagggctgaggggaagcctctgtgggtgctgaggggctgtagtctgtccttggtcccaggggccgtgtgacgggcacccgacctcggagtccacagatggatcagaggctggatggaggggggccgggggtggggctagctcagagccgcagagggggagccagggaggccagccaggcagagcggctgggccacagcccaggcaggctggacaggagacrgcggcggaggagcgagacagcgactagggggcagggagactggcagtgggggacgggagactctgaaagagggggacacagagaagaaagaaagaaacgtgataaaggggagatggacggagggagaaatggggggtccagagttccctgagatgaagccttcataagctggtgggggtcagggatgaggcccctttcactaagccagagtgagttccagatggaaggacacttagagaaggcagaacgcggcggcacccagtgggcggaaggttgggttgcactggactcccagtggcctcccccagcctagcggcctggggg

SEQ ID NO: 475418 - DNA, 350 bp, Homo sapiens
aggttgcagtgagccaagatcgcaccactgcactccagcctggacaacagagcgagactccatctcaaaaaaaaaaaaaaaaaaaawgggccaggcacggtggctcacgcttgtaatcccagcactttgggaggcagaggttgcagtgagccgaggctgcgccactgcactccagcctgggtgacagagcgagactacgtctcaaaaaaaaaaaaaaaaaaaagaacatgaggaggtgttgggagttatggacacaggggatgggtcagatgtgtttcagagtatgcagagcaggctcctgggaccatacttacccgaactcggttgatgccaccatagtggggcaccat

SEQ ID NO: 475419 - DNA, 594 bp, Homo sapiens
acagtggctcatgcttgtaatcccaacactttgggaggctgagatcggccgatcacttgagcctgggagtttgataccagcctaggcaacatggctaaaccccatctctacaagaaatacaaaaattagccaggcrtgatggttcatgcctatttttccagctactcgggaggctgaggcatgagaatcgcttgagccttggaggcagaagttgcagggagccgaaatctcaccactgcactccagcctgggtgatagagcaagactctgtctcaaaaaaaaaaaaattccctatcctcattctttcctaaagtggcaagaatagaggtgggacaccccagtccctgcctacagacttcctcagtgtagcagattcttcacagcatgtctgtggagccatgaacagaagacgcagactcctctctttgtgtgtcccttcgggcccaggtgtcaaggactcccttccatcctagataaatctctccacctgggttctgattccacttcctcccgcctttttgaggacctggcttcttctattttctcttctgttatcttaaatcctgtttctgctacattttctgcctaagaata

SEQ ID NO: 475420 - DNA, 594 bp, Homo sapiens
acagtggctcatgcttgtaatcccaacactttgggaggctgagatcggccgatcacttgagcctgggagtttgataccagcctaggcaacatggctaaaccccatctctacaagaaatacaaaaattagccaggcgtgatggttcatgcctatttttccagctactcgggaggctgaggcatgagaatcgcttgagccttggaggcagaagttgcagggagccgaaatctcaccactgcactccagcctgggtgatagagcaagactctgtctcaaaaaaaaaaaaattccctatcctcattctttcctaaagtggcaagaatagaggtgggacaccccagtccctgcctacagacttcctcagtgtagcagattcttcacagcatgtctgtggagccatgaacagaagacgcagactcctctctttstgtgtcccttcgggcccaggtgtcaaggactcccttccatcctagataaatctctccacctgggttctgattccacttcctcccgcctttttgaggacctggcttcttctattttctcttctgttatcttaaatcctgtttctgctacattttctgcctaagaata

SEQ ID NO: 475421 - DNA, 406 bp, Homo sapiens
agtaaaagtgggatgatgaactgcaaaagacaattacagttaagaaagttgcggtaatggcattctgagattttcttatcccataagttgtgtatctatgttgtagtctaggtgaaataaagtgacagggaaaggtgtggttcrataaatactatttcctttaaattagtaattcttgaattttaatgcgcccataaattactttggaatctggacaaaatgcagattatgattcaacagatctgggaaacggccccaaattctgttcccaggtgattccagtacttcaggtttggggaccacactttgaaaagcaattctttccactctgtggagaagtgactggcaggatgtcattgtcgacagggatgttttgaggcagaatcatctttgtttactctcagta

SEQ ID NO: 475422 - DNA, 406 bp, Homo sapiens
agtaaaagtgggatgatgaactgcaaaagacaattacagttaagaaagttgcggtaatggcattctgagattttcttatcccataagttgtgtatctatgttgtagtctaggtgaaataaagtgacagggaaaggtgtggttcaataaatactatttcctttaaattagtaattcttgaattttaatgcgcccataaattactttggaatctggacaaaatgcagattatgattcaacagatctgggmaacggccccaaattctgttcccaggtgattccagtacttcaggtttggggaccacactttgaaaagcaattctttccactctgtggagaagtgactggcaggatgtcattgtcgacagggatgttttgaggcagaatcatctttgtttactctcagta

SEQ ID NO: 475423 - DNA, 406 bp, Homo sapiens
agtaaaagtgggatgatgaactgcaaaagacaattacagttaagaaagttgcggtaatggcattctgagattttcttatcccataagttgtgtatctatgttgtagtctaggtgaaataaagtgacagggaaaggtgtggttcaataaatactatttcctttaaattagtaattcttgaattttaatgcgcccataaattactttggaatctggacaaaatgcagattatgattcaacagatctgggaaacggccccaaattctgttcccaggtgattccagtacttcaggtttggggaccacacttygaaaagcaattctttccactctgtggagaagtgactggcaggatgtcattgtcgacagggatgttttgaggcagaatcatctttgtttactctcagta

SEQ ID NO: 475424 - DNA, 601 bp, Homo sapiens
ttccccattgcttgtttttgtcaggtttgtagaagatcagatagttgtagatgtgtggtcttatttctgggtcctctattctgctccmttggtatatgtgtctgttcttgtaccagtaccatgctgttttgattactgtagccctacagcataatttgaagtcgggtagagtgatgcctccagctttgtcctttttgcttatgattgccttggctatttgggctcctttttggtactttaggaatttggttctatatggatagttttttctagttctgagaagaatatccatgatagtttaatatgcatagtattgaatctgtaagttgcttatgggcagtatggccattttaatgatattgattcttcctatccattagcatggaatgtttttctcttttcatttcattggctcaattgatgtagtccttcccattcctgaaccaatctttggcaagggaggggaggtaccaagactgacttaaaacaatcaggcctacacctaaacagggggtcagtctcaactattgtcacaatggatgggattgatttaactacaacatccactgtgagaagctagagagaaaatataaagaattag

SEQ ID NO: 475425 - DNA, 547 bp, Homo sapiens
agctccccaaagccctaaatatagtgaatttcaggtgtgagtttgagagttacaagttctgaaacctgttctgatgccaggacatagcctaatagattcagacacattgaattattcagttggtgcaaaagtaattgcagtttttgatggttacttttaatggcaaaaaccacaataacttttgcacsaacctagtatgtttctattatcatttttctttcttaaagacacagactgagagtacaaagacatgtttcattgtccctagagcctccattctcagtgtcaaagccagaagatgatcaggatgaaaaagacactattcatttcccttgtattaagaaaaagagagagatagccttatgcctcacaatggtaattactgcctgccacactaaaaaagctttaacaatcagtaggaacttcattgagccttctctgggctgctggcagtaagactgtaccacatgaccccgtgcagctgggaacagcacaggagagtaaatacagctgcctgtgagtcgtcctatttcaactcaccttgagc

SEQ ID NO: 475426 - DNA, 516 bp, Homo sapiens
actccaggcagtagcttctcctcacccagcctttggtctccttgccccttcctgtcgctcagcacatgtcactgagtgcatgtgtactggtgagagccctctggagagtgccgacctgccttgcaagccagtcacacagcactccttctgaacccgcctcggggacggcacatgtgttcaccacgcaagctgcaccgagccacrcacaaccaaatcaatgcaaaacaaaaccacaatgagataccatttgtcatctatcagattggcaaagatccacgagtctgatagcactttgtgtaggtgaagatatgaggaaacaagccactcgtacctcgttggtgagggaggaaatcacctcagtctcctggcagggcaataggatagaatcaaaccaatttaaatgtgcatatacactttgaccagcatttccacctctaggaatctctcccaggtgcatatggttactgagacatttgctgcagcaagcagcattatttattatagcaaaagacagaa

SEQ ID NO: 475427 - DNA, 582 bp, Homo sapiens
gctaatgcaacacagcccggtatgctctgccctttgctggggccttgaaggggattggcagtacagaggctgagtgcaggacagagacaaaggagacagaggagacacaggggatagaggggacagggctacccctcagccctgccctaacacctccccgagaggaggtctcgccaccacatgccctgccctctggctgtttccatggcatcaggaaatgatyctatggataagccaagcatagtttttatttctcttgaaggacacctaaaatgagctgcctctgcctgtcctctgtccgggtgatttttcaagccttgaaggccagtcaccacatcacccaagctgacctttccacctccacagctgagacacgggtgtcacatcacacacaagggcacccactacatccgtcatcagcaccaactggcaaccgacggaaacaaataatgggagcttttgccagatactcctttttccttctctattgcctcctggctcagaaatcacacaggggtcccctcaagtcattccctgggtaccagatggctaccagacatgtgacacgtccctgtgctattc

SEQ ID NO: 475428 - DNA, 503 bp, Homo sapiens
gggagggctgtggactgcagggtcgtccctgacacctggatgccagtgatcagcctgcctgagatatgccagctttagaatcctgatggagggagggaggaggagggcagcaaagagacccagcagttattttatgcctatctgtsacaggcacagtgccaaacaccatatgtaacttttcacattttccccactttacagatgaggaaacaagctcagagaagttctgtggcagtgaatgagtggtggtgctgtgagttaaacccaggctctgcctaactccaaagttcgtgctcttaacctccatgatcttgtctctggccctcatttccccaccacacccggaggtaggctgggctgggtgggctgaggcagggtcttcctaggccttgctggccagagcaggaggctggtgaaagcccaggacttaagggacttcagagggggacgtggttccctctcacccaagggggagctcttgacctgctggaggatctggggca

SEQ ID NO: 475429 - DNA, 552 bp, Homo sapiens
tgattggaattatctaaaaattatttttggttgctctaccttttaaaaatgaagccctatggatagattagaccaggtggagtctgggttatattcaggttatataaaagatcaccctgcataayagagacctactgggttaacagtgggaaatgctaagagggctttccatggactgagcccttagctgggatcaggggcctccaggtgaagcataccagagggtggtggcaccaggtatgactgtcttcttgcaagatgaaactaaagtatcagaagggaagtgtggaagaaaccagaaggtgatgaagagcctgtttcaaaactcttgggaaactacagagtgactgggacctgtgtgaactggtgatgggaccatggtggtgttctcgcagcagcggaacctcgctgccctccaacttggcatttggggaacactgcccctgacttcttctctctccagtgctacttcgatccctgggatcagggcctgagataaaaagaactcttcaaaacttgacgttggagctgggcatggtggctcacacctgt

SEQ ID NO: 475430 - DNA, 552 bp, Homo sapiens
tgattggaattatctaaaaattatttttggttgctctaccttttaaaaatgaagccctatggatagattagaccaggtggagtctgggttatattcaggttatataaaagatcaccctgcataatagagacctactgggttaacagtgggaaatgctaagagggctttccatggactgagcccttagctgggatcaggggcctccaggtgaagcataccagagggtggtggcaccaggtatgactgtcttcttgcaagatgaaactaaagtatcagaagggaagtgtggaagaaaccagaaggtgatgaagagcctgtttcaaaactcttgggaaactacagagtgactgggacctgtgtgaactggtgatgggaccatggtggtgttctcgcagcagcggaacctcgctgccctccaacttggcatttggggaacactgcccctgacttcytctctctccagtgctacttcgatccctgggatcagggcctgagataaaaagaactcttcaaaacttgacgttggagctgggcatggtggctcacacctgt

SEQ ID NO: 475431 - DNA, 640 bp, Homo sapiens
ccatccttctttttattagggacagtgacagactcattttttttttccttttgatcattttgcaaagcttcagtggttaacatacttcaagcccttcctggttcagatatataggtgttcacttcaattgtttcccttttccaaggatcaaaaccttgtgttgccagtttctcaatgtctgaaaccatttttttcataaatttagttgaggaggtaggagaacaagtctgacaccagttaccacctcacagcaagatacattactaagattttcaagtgtcttattcggatatcagagtaatgcaaaatactcaatttatgaaaaaaatagatttttaaaacttatggtctaaaagcagttttaatagaaacagaacgactagtttctttgggagttgaaaattatcatgtgaaatcctctggtccttttcttagtcatagtttttccctaatattctcatagtttttatttttacaagtttattagacttcttaactcaaaattcttcttgtatcaattttggtgatttgtgtttccttggaagtagtatccatttcacctggwtttaatttgttagttcacaaagacttactattttaatttactctttaattatgatttcttcccctttcttagtca

SEQ ID NO: 475432 - DNA, 572 bp, Homo sapiens
acaagggatctagctgaatgaaggaacatcaaagctaaccctcttattcacttaatatttattaagggtgaaaagaaatggaaggagggctaaataagaktactattattaagttagttgatattagttacttaacatatattatgttccttaattctcacaacgacctagagataggtacaattatcatcctagatgagaaaactaaagcatagcaaggttagatcatgagcctgaggttacacttccaggacatgacaaagggggcacttaaatccaggtgtgtcagactctgaaacttcatggtgtacttccagatccattgtttcatccaataaacatttactgagtcagtcctatatgcctatgtggttctaaggtctgggtacacacgctttgtcctgccccagagcttaaaatctaattaaggaggaccattaaatatataagtgatgactgttatgaactggggagtgcagggggtaaaggaagattttggcagaaggaaccaactataggtgggagggactgaaggggaaggccgaccatgcctcccaagggatatctagtgg

SEQ ID NO: 475433 - DNA, 602 bp, Homo sapiens
tgggtatcccaaaggcatgttcaccatggacactgtcatctccttccatccccaacctggtccccatctcagagaatagctctgagcaagggctcatgcttccctccttttcacttgacactcatgrtgtgcaatcaatcgctgtatgccatgaggtatgcatctttaaatatgtctccaaacaatccccttctcctaactgtatggccgttcccctggtccaggctgccatcttccctccgcattactgaaaggggcacctccttgcctccagtctcgctcctcacccttccacttaagccttaaatccacctttattgcagaaagaatgatctccctataatacaaacttaattatgttgttttcctgctggaaatccttcagtagctccccattgccctcaggaaatcatcgaaatgttttaatcctacctggaaagctttgtgtcatctgtcctctgccccccagccatgacgaacttcctttagttcttgaacgtaactcgcactctctcacctctgggcctttgctgatgttgttctatctggaatactttttccttctcctctactttattaactccagttcagcctctaggtct

SEQ ID NO: 475434 - DNA, 602 bp, Homo sapiens
tgggtatcccaaaggcatgttcaccatggacactgtcatctccttccatccccaacctggtccccatctcagagaatagctctgagcaagggctcatgcttccctccttttcacttgacactcatgatgtgcaatcaatcgctgtatgccatgaggtmtgcatctttaaatatgtctccaaacaatccccttctcctaactgtatggccgttcccctggtccaggctgccatcttccctccgcattactgaaaggggcacctccttgcctccagtctcgctcctcacccttccacttaagccttaaatccacctttattgcagaaagaatgatctccctataatacaaacttaattatgttgttttcctgctggaaatccttcagtagctccccattgccctcaggaaatcatcgaaatgttttaatcctacctggaaagctttgtgtcatctgtcctctgccccccagccatgacgaacttcctttagttcttgaacgtaactcgcactctctcacctctgggcctttgctgatgttgttctatctggaatactttttccttctcctctactttattaactccagttcagcctctaggtct

SEQ ID NO: 475435 - DNA, 602 bp, Homo sapiens
tgggtatcccaaaggcatgttcaccatggacactgtcatctccttccatccccaacctggtccccatctcagagaatagctctgagcaagggctcatgcttccctccttttcacttgacactcatgatgtgcaatcaatcgctgtatgccatgaggtatgcatctttaaatatgtctccaaacaatccccttctcctaactgtatggccgttcccctggtccaggctgccatcttccctccgcattactgaaaggggcacctccttgcctccagtctcgctcctcacccttccacttaagccttaaatccacctttattgcagaaagaatgatctcccwataatacaaacttaattatgttgttttcctgctggaaatccttcagtagctccccattgccctcaggaaatcatcgaaatgttttaatcctacctggaaagctttgtgtcatctgtcctctgccccccagccatgacgaacttcctttagttcttgaacgtaactcgcactctctcacctctgggcctttgctgatgttgttctatctggaatactttttccttctcctctactttattaactccagttcagcctctaggtct

SEQ ID NO: 475436 - DNA, 602 bp, Homo sapiens
tgggtatcccaaaggcatgttcaccatggacactgtcatctccttccatccccaacctggtccccatctcagagaatagctctgagcaagggctcatgcttccctccttttcacttgacactcatgatgtgcaatcaatcgctgtatgccatgaggtatgcatctttaaatatgtctccaaacaatccccttctcctaactgtatggccgttcccctggtccaggctgccatcttccctccgcattactgaaaggggcacctccttgcctccagtctcgctcctcacccttccacttaagccttaaatccacctttattgcagaaagaatgatctccctataatacaaacttaattatgttgttttcctgctggaaatccttcagtagctccccattgccctcaggaaatcatcgaaatgttttaatcctacctggaaagctttgtgtcrtctgtcctctgccccccagccatgacgaacttcctttagttcttgaacgtaactcgcactctctcacctctgggcctttgctgatgttgttctatctggaatactttttccttctcctctactttattaactccagttcagcctctaggtct

SEQ ID NO: 475437 - DNA, 503 bp, Homo sapiens
ctgccatgctgaaactatttgctcccctcccaccctgtccatcactgccccttccttgggccgagcctctgtacccgcccactggctagactcctgaggccctccatgggggagctgcaaatctctcttcacttttattactgacccgcatcctgccgcctccactccttcagcctgaaggcctctttaaagcaccgtcctcttgagcaatgataaayctcggtgccagagatgtttaaagagaaacagtcactcccggctgaccatactgatatcagaagggaggccaaccatgtggtttcaaagctgtggtcataaaacagtcttttttttttttttttcatgtatggttaatctgcctatgaactagaaaaataatctctgcccttttgtagggcccattcttagtgtaacctgggaatggggaagagacaggccaggtactgtccactgtggtagctgagggtggggcctcaggagccaggctgtctggattatagccc

SEQ ID NO: 475438 - DNA, 503 bp, Homo sapiens
ctgccatgctgaaactatttgctcccctcccaccctgtccatcactgccccttccttgggccgagcctctgtacccgcccactggctagactcctgaggccctccatgggggagctgcaaatctctcttcacttttattactgacccgcatcctgccgcctccactccttcagcctgaaggcctctttaaagcaccgtcctcttgagcaatgataaacctcggtgccagagatgtttaaagagaaacagtcactcccggctgaccataytgatatcagaagggaggccaaccatgtggtttcaaagctgtggtcataaaacagtcttttttttttttttttcatgtatggttaatctgcctatgaactagaaaaataatctctgcccttttgtagggcccattcttagtgtaacctgggaatggggaagagacaggccaggtactgtccactgtggtagctgagggtggggcctcaggagccaggctgtctggattatagccc

SEQ ID NO: 475439 - DNA, 543 bp, Homo sapiens
gcacccccactagaatgggagtcccattagaatatgagccctctaaggagaggcattttgctctttcattcccagctatgtccccagcacctagaatgaaatagtttctgagtgcctagctctgaatgagtgcttagcagatatttgttgatgggatgaaacctaagaggtaggcactattcatatcatcatgcctatcttacacataaagaaacagaaacagggaggttaaataacttgcccaaggtcacacagtaaagatcaaagccaggatttgactccagaaaccaagcactacattctttcacctttccatctaagactaacgctactaatttttttctcctyctcctcttctggggtcactgcctttgttttttagccgtctttgccatggagaccaaagactccccccaaagttcttgttcatgctgggctagagaatcgtttgctgacacatgttcttaatgagaaaagggctgcctggtgaattattctctcaacgtgttcatgctcagatgcttcatttagcagcgggcacat

SEQ ID NO: 475440 - DNA, 543 bp, Homo sapiens
gcacccccactagaatgggagtcccattagaatatgagccctctaaggagaggcattttgctctttcattcccagctatgtccccagcacctagaatgaaatagtttctgagtgcctagctctgaatgagtgcttagcagatatttgttgatgggatgaaacctaagaggtaggcactattcatatcatcatgcctatcttacacataaagaaacagaaacagggaggttaaataacttgcccaaggtcacacagtaaagatcaaagccaggatttgactccagaaaccaagcactacattctttcacctttccatctaagactaacgctactaatttttttctcctcctcctcttctggggtcactgcctttgttttttagccgtctttgccatggagaccaaagactccccccaaagttcttgttcatgctgggctagagaatcgtttgctgacacatgttcttaatgagaaaagkgctgcctggtgaattattctctcaacgtgttcatgctcagatgcttcatttagcagcgggcacat

SEQ ID NO: 475441 - DNA, 668 bp, Homo sapiens
atacttactctaaatcttctgttctctgggttacctagttccactaaggattcctctttttccttaagcagttatttattgagtactatgttggtttgctaggacagccataacaaaacaccacagatgggtggtttaggcagcaaaaatttattttcgcacagctttagaggctgaaaatccaagatctaggcaccagaggatcgctttctcttgaggcctctctcatgggcttacacataactgccttcttcttgtgtcctcacatggccttttctctgtgcctgcacatttccagtgtctctttctctacttgtaaggacactagtcctgttggattagggccccactcttatgactctatttaatttaactttacctccttaaaggccctatctccaaataggaatttgagctttaacatgaatttagagggatgcaaatcagtccataacagattcatatgcaaaaacagcagggaaaaaatagaacacccttggcccagtggacaaatgacacccaaggtaatactagttagtggcagagccaggkgcagaactctggatggagtaagacttatttcctctctctttatggaatttatatccctatttattttgcccaatataacatttactcttgtggaagatctgttgacataaaagaga

SEQ ID NO: 475442 - DNA, 532 bp, Homo sapiens
tcgtcctagacccagcaaaggggcacatgctgttgcttctgatctctttactcctcttagcaatttccaccagctaattccgacatagcctttcagccacagtttacatgtcctttccccggaaatgcattccttgaccctcaggcttcgttccttagtggattatcagtaccctgtaactttcccttcacagtacttatttaaagattatttgagtgattatttgaaatgtctgtcttatgtacttaaaaactatttgtggttatttttgtaaagtctarcttgtcactgctgtttcctcagaacctagcatggtgcctggcacagaattgatcctcaataaatatttgatgaatgagtgaataatgaatggatactatctttgggacctatgttgtccatatcctaagaaatgatcctcagcccccagcagctatcttccttcctaatcttgcagagcctaccagccaatatgtaggtgtaattgccctatgatgccagggaactaggagaccaggctcactggggtgca

SEQ ID NO: 475443 - DNA, 581 bp, Homo sapiens
caagcttgaggtcagccaggcctgcagcacaaaagacacagcacctctaggactggcctagcctgggccctctccctctggcctggacagaactcaggctcacacagtctcagcttctcactagcttctccctccttggttatacttagctctggacatcagagagaaaggcatgtgccagcccgaatcactgcacacccccaggcctggccaggctgctgtggtagagaatggcatygcagccttttcagatgttggtgtgagccacttccaacaagggctgttttctgttctgtttctgtttctttgttttttttttttaaatacagacagggtcttgctatgttgtctagctggtcttgaactcctgggctcaagtgatcatcctgcctcagcctcccaaaatgctgggattagaggtatcagccaccacacctggttgaacaggggctgttggaccctccttcctgatagtctgtgagattttatttccgtgtctccttctgttcctccttgagggaggaaccatgtctggttcaccaatgtatttgtcatgttcagcagcgtctataacaccctgt

SEQ ID NO: 475444 - DNA, 581 bp, Homo sapiens
caagcttgaggtcagccaggcctgcagcacaaaagacacagcacctctaggactggcctagcctgggccctctccctctggcctggacagaactcaggctcacacagtctcagcttctcactagcttctccctccttggttatacttagctctggacatcagagagaaaggcatgtgccagcccgaatcactgcacacccccaggcctggccaggctgctgtggtagagaatggcatcgcagccttttcagatgttggtgtgagccacttccaacaagggctgttttctgttctgtttctgtttytttgttttttttttttaaatacagacagggtcttgctatgttgtctagctggtcttgaactcctgggctcaagtgatcatcctgcctcagcctcccaaaatgctgggattagaggtatcagccaccacacctggttgaacaggggctgttggaccctccttcctgatagtctgtgagattttatttccgtgtctccttctgttcctccttgagggaggaaccatgtctggttcaccaatgtatttgtcatgttcagcagcgtctataacaccctgt

SEQ ID NO: 475445 - DNA, 623 bp, Homo sapiens
agacagagcaggcagcccggagctgggcctgcccaggcacctgccctcatccttccctccaacccctagggggcctcccttcagtctgtacccgctactcctgggcacctgcaatgcaagctcaccagcccctgtggctcttgcccaaaccagacagcataatgcctggcggctggctactgtcctccacatccaggcagcaagcagctctttcttgatggcactcaggaccccgcctagatcagggcataccaccaaggctcacggtgctcctgaggccgctggggcaccacagggtgcttctcaggtcctgtcactcaactgggcctccccaaagtgggctcacagcccaggggctccagttgccccaggctctgctaggctgcccagaggactcaaggtgtggatatctcaggcacacctgagtgttgagctcagcacacgtgtatgctgggcacggcatgagtgtaaggaagcgctggcatasagaataaaatcccctggctaggaagcaagctactgctgactccaccgaagcccctgcacgcccctcccagtaccatctcccctcgcccctgcagaggcagacaccatcctgactttggtgtctattcttttcattc

SEQ ID NO: 475446 - DNA, 639 bp, Homo sapiens
ggttcacccatgttgtaggatgtatcagaacttccttccttttgaaggctgaatgatattccactgtgtggatagaccacactttgttcatgcattccttcctccgttgatggacatgtgggtttcttccagcttttggcggctgtgaataatgctgctatgaacatgggtgtgcaaacatgtgtttgagtctctgcttgcaatgctttggggtatgtacccaggagtggaattgctggactgtgtggtaattctatgttttttgaggaacccccatwccgtcttccctagcaaatccccttttctcgctttatgaaatgggcttcctttctcagcctcctcctcactcaggctcccttctgctcaactcatgagactttttgacagaacggtccacactgacaggcttcacagacacatgtcccttttcgagctgtcctctgccctccccatgcaccgaaactgctctgggcaccccagagggcacccccagagattgatagcacagcctctcctcagacctcagcctcctgggccttccctcgcccctgacatccagacactcccctcctcctctccgcttgcctgcagggccacctggctccccgccccctccagggttcctctgcaccttccagg

SEQ ID NO: 475447 - DNA, 639 bp, Homo sapiens
ggttcacccatgttgtaggatgtatcagaacttccttccttttgaaggctgaatgatattccactgtgtggatagaccacactttgttcatgcattccttcctccgttgatggacatgtgggtttcttccagcttttggcggctgtgaataatgctgctatgaacatgggtgtgcaaacatgtgtttgagtctctgcttgcaatgctttggggtatgtacccaggagtggaattgctggactgtgtggtaattctatgttttttgaggaacccccataccgtcttccctagcaaatccccttttctcgctttatkaaatgggcttcctttctcagcctcctcctcactcaggctcccttctgctcaactcatgagactttttgacagaacggtccacactgacaggcttcacagacacatgtcccttttcgagctgtcctctgccctccccatgcaccgaaactgctctgggcaccccagagggcacccccagagattgatagcacagcctctcctcagacctcagcctcctgggccttccctcgcccctgacatccagacactcccctcctcctctccgcttgcctgcagggccacctggctccccgccccctccagggttcctctgcaccttccagg

SEQ ID NO: 475448 - DNA, 639 bp, Homo sapiens
ggttcacccatgttgtaggatgtatcagaacttccttccttttgaaggctgaatgatattccactgtgtggatagaccacactttgttcatgcattccttcctccgttgatggacatgtgggtttcttccagcttttggcggctgtgaataatgctgctatgaacatgggtgtgcaaacatgtgtttgagtctctgcttgcaatgctttggggtatgtacccaggagtggaattgctggactgtgtggtaattctatgttttttgaggaacccccataccgtcttccctagcaaatccccttttctcgctttatgaaatgkgcttcctttctcagcctcctcctcactcaggctcccttctgctcaactcatgagactttttgacagaacggtccacactgacaggcttcacagacacatgtcccttttcgagctgtcctctgccctccccatgcaccgaaactgctctgggcaccccagagggcacccccagagattgatagcacagcctctcctcagacctcagcctcctgggccttccctcgcccctgacatccagacactcccctcctcctctccgcttgcctgcagggccacctggctccccgccccctccagggttcctctgcaccttccagg

SEQ ID NO: 475449 - DNA, 613 bp, Homo sapiens
acttgtatcctcactttgcagaggttcccagaagttaaacgccatgcccagtaggcgtctgtcagatttgggatcgaaattcagatcttactgactgtgcttttaacgttgttcctttcatcaaaacagccttgccctaccttgcagcttgagagccacctattccttgtaatggaacaaaaattatgaacacaccaatgttctcagtgttccccctcttcctcctgctgctaaagagggtggagtattctccctgcttccacctttgcctggtggcttgtttaacttctattatacatgacgggaacagggaaaggaaaacatatgtggatggggasgaaaggaggcaagggagagagggaggaacagcggaaaaggcagaaggaggttcgttttaaagaatgtgggactagaaaggagagcttcagaagactgaaaaggagggcttcactgcactggagagacaaaggaaagaatttgggttctattgaaaataatttttggtggctggactttgtctcgtggagtgacacctgctctgaggccatacactggggtcacggtgtcataaacatttcatcagcaaaacacagaatgtggggtccgataatca

SEQ ID NO: 475450 - DNA, 614 bp, Homo sapiens
tgtgcggctcactgggggaccccaatgtaccacactataacaaagtttttatcaatgtcatcttgatccagtttcgaggacctggctggaagacaatcagtttcccctcttaaacaactggttatgtccataccccaaccacttcccttaacaggctttaggacaatgtgcacctgctctgatcttccccggtccaggtaccagacaaccaggcacagccactctgtcccaaagcccactgaaaattgctcacactagccaattctgagcctacttaccatgcctcacgggttcctttctgagggtaaaggtacttgyccacagatcccctctctttgcctgctttgtgaccgactctggtgcttcccccagcagcgctgcatggtgagatgtgttcctcctagggaattgtgagtaagaaacctgtaaaactctctctggtttttctcctttgatctttggcctcttcacaccttacccaaggtaatatggttaaaacacacacgttgtctatgttctctgaatgtgtgcattagatagggtaatgataactgctgtcaccaatcaaccacaatctcagtggcttgatacaacagaaagttacttcttcctcc

SEQ ID NO: 475451 - DNA, 614 bp, Homo sapiens
tgtgcggctcactgggggaccccaatgtaccacactataacaaagtttttatcaatgtcatcttgatccagtttcgaggacctggctggaagacaatcagtttcccctcttaaacaactggttatgtccataccccaaccacttcccttaacaggctttaggacaatgtgcacctgctctgatcttccccggtccaggtaccagacaaccaggcacagccactctgtcccaaagcccactgaaaattgctcacactagccaattctgagcctacttaccatgcctcacgggttcctttctgagggtaaaggtacttgtccacagatcccctctctttgcctgctttgtgaccgactctggtgcttcccccagcagcgctgcatggtgagatgygttcctcctagggaattgtgagtaagaaacctgtaaaactctctctggtttttctcctttgatctttggcctcttcacaccttacccaaggtaatatggttaaaacacacacgttgtctatgttctctgaatgtgtgcattagatagggtaatgataactgctgtcaccaatcaaccacaatctcagtggcttgatacaacagaaagttacttcttcctcc

SEQ ID NO: 475452 - DNA, 635 bp, Homo sapiens
agttaagacttagggggactgttggaagggcatgattgtgttttgaaacaygaggacatgagatttgggaggggccagggcagaacaatacggtttgactctgtccccacccaaatctcgtcttgaattgggtttcccataacctgtgtcatgggagggacctgggacaaaaacaaaagttttcagttaaatgataagaactaagaaataaaggtaatggaaaagattccatctaggagcttaaagtgaataaagctgttgagcataaaacatagctctgagttccctggcagccaaggagaagagggaaacatactgggccacacagttctcacggtttagtagtgggaagggcctagctgagtactttaagataataaaggaaggaaacagagtccaggacactactagcctgtgattttctggagttttttgatgggagcaaatcatgcgcattaggggtagaaaaatgaataagatcataaaaagagagaggtcagtctaaggaaccatgttccagagaagcagactgagtgataaaccagccagcaaaccaggcagaggacagaaagctcaaaaagacaagtgtaggcaccactgcaggactggcctgccctggatcccagcataagggc

SEQ ID NO: 475453 - DNA, 633 bp, Homo sapiens
gggcaggaagcatctaagtgaccatgaaacaatgggaccttccttgttgaataaatggccttgcttccttgatggaagctgttgtcctgtcctgcaggcctcttggcagagctgcatccagcctcacccttttggcagacaccctagttcatgggccagtatratgcctgctcaacaccagtagccattgttaaggtctcagggaccaagctgtaccataggagggtccttggcccactgactgaaattagcccattttttcagtaagtaaacacaaatttgctgggtcagtagctttgctaagctactgaaagaaggaagggaatacatgcctcaggttatctgagtttgccttttctcttgtactaccataccattttaacaatttatgcatcttaaagaacatttcatttagctcatatattattatctcattgtttgtcaaagctacattatagacttttgaatagatgtaagctaatttatttaatctttaaaattaataaacataaatactgatgagcatttagaatgtttctaatttattgctattacaaccaatgcctcagttaacatattgagcctacactttaatgtgaataattaggggcttttttggttattgcttttaat

SEQ ID NO: 475454 - DNA, 633 bp, Homo sapiens
gggcaggaagcatctaagtgaccatgaaacaatgggaccttccttgttgaataaatggccttgcttccttgatggaagctgttgtcctgtcctgcaggcctcttggcagagctgcatccagcctcacccttttggcagacaccctagttcatgggccagtatgatgcctgctcaacaccagtagccattgttaaggtctcagggaccaagctgtaccataggagggtcyttggcccactgactgaaattagcccattttttcagtaagtaaacacaaatttgctgggtcagtagctttgctaagctactgaaagaaggaagggaatacatgcctcaggttatctgagtttgccttttctcttgtactaccataccattttaacaatttatgcatcttaaagaacatttcatttagctcatatattattatctcattgtttgtcaaagctacattatagacttttgaatagatgtaagctaatttatttaatctttaaaattaataaacataaatactgatgagcatttagaatgtttctaatttattgctattacaaccaatgcctcagttaacatattgagcctacactttaatgtgaataattaggggcttttttggttattgcttttaat

SEQ ID NO: 475455 - DNA, 538 bp, Homo sapiens
tttaaaattagatgttgattcttaaccttctcaactctctgagctcccctgagctggtattggctttgagtgggtgatcactggctttgtagaaattttcagggccaagcaggttccctgtcatcagcctgtctatataaagccacaagataacagctggctactgttggttttactgagaaaaacaaataaggacctgagctgacattactgagtactacaggaaccatattttaatgaccttgcctatctgaccaaggctttgggcagcttagaaaggtgaaattaacttaatttgaatagcgataataatgcttatttactgaatgtagtaggcagaacaatggctcaccaaaratgcccaggacataatcctcagaatttgtgaatatgtttggtgacatggcaaaagggaattaaggttgctagtcatctgactttaaaacaaggagattgtcctggattatccaaatgcgcccaatgtaatcagaggggtccttaaagtgaaagatggaggcagaagatatcagagtcagat

SEQ ID NO: 475456 - DNA, 538 bp, Homo sapiens
tttaaaattagatgttgattcttaaccttctcaactctctgagctcccctgagctggtattggctttgagtgggtgatcactggctttgtagaaattttcagggccaagcaggttccctgtcatcagcctgtctatataaagccacaagataacagctggctactgttggttttactgagaaaaacaaataaggacctgagctgacattactgagtactacaggaaccatattttaatgaccttgcctatctgaccaaggctttgggcagcttagaaaggtgaaattaacttaatttgaatagcgataataatgcttatttactgaatgtagtaggcagaacaatggctcaccaaagatgcccaggacataatcctcagaatttgtgaatatgtttggtgacatggcaaaagggaattaaggttgctagtcatctgactttaaaacaaggagattgtcctggattatccaaatgcrcccaatgtaatcagaggggtccttaaagtgaaagatggaggcagaagatatcagagtcagat

SEQ ID NO: 475457 - DNA, 577 bp, Homo sapiens
ctgaaaagaataaagcagatgtgtgagttactattycttacagcaaaagaacctcatcagaaccgcaggctggaaagaggtgattacttttaaagggcagttcattcctcctgcatgttggaaactgtggctcttaactggctaaaattttaactttcagtgtagccctcacttggcttgtgcttcttaatgttgtagataacattatagatttatataatattcaacttttatatatatattacttatatataaatgtttatgtataaatatatatttgtatataatatgtattcgtatatgatatgtagtaaatgttatatttaaaccatcatatagaaaagccattattgggtacactgtacaaatctgcctttataattgagtgtactgttctactaaaagcagctttagagaaaggattgaaagccagctctttctacttcactagccttcattgtttggattggcattatgtgtacagttatattgtaactgtcacttgtggtctaatcttccccttaggggaaacttgagaaacctggtcagctttaacatttagaggaagtttaaacat

SEQ ID NO: 475458 - DNA, 599 bp, Homo sapiens
tgtggcgggtgtaacagcccagagtgccagtccatgcatttgggaaccgtcggtgcaaaccagtctggctgttggatcttctgtggcaaactaactcagggagaaggcagggagacaggtgattttcccatggtctctccaagccctggcctggcaccaacttccaaccaagcacgttgtaattagtaccttcttactgaaattccaacctaaacccyatctttcccagccactgtccccctcgaggacagggggagtgtctcccctaatctcccatctgtcctccccaggcagcgcttacaggggcgcacgcacacacacgtactccaagacaaactacagaaaggcaccgctcagataaggaacagagaagtgcacaaattcaaggcaacttactttgcaggttatgcatttcaacggtttccctttgaaatgcctgtatccgacaatgaaaaaaaaaaaatccccaaagctgttcttccaccaagtgggccaagcccccgcacctccccccagcctgttcccggcaggcagtgctcgtgtccggcgccgagagtgcgcgcaggagcgggggcgccgccaggaccctccgggcgtgc

SEQ ID NO: 475459 - DNA, 629 bp, Homo sapiens
cattgaatgcatactctgaatcaggcaatgtagtacacacaggctgtatggtggttaagatatgacaaggttcctactgtcatgacagttacattgtaatgggagagagtgacaataaatatgtcaaaaagcaatttgattaaatgtaagaaaaatgaatatgaatttcattcattgtaaacagctgtaaagaaaataaaacatggaaatgggaaaagagttcctggatgtaagttagaaaaggttattaaggaaagtctattraggagtgaatgcttgagctgagacaaataatgagaaggctgagagcagatgaaaatataagaagagtttttcaggcagaagaaaagcctgaaaaactttcctgaggcaaaagtgagcttcatgggtttgagagacaggaagaaggtacacttggagcttagtgaacaagggagagatactcagcaagagctgtaaagtcaatgtgtttctacatgatcaactgaatttgaaaacctaggagtattgcttaaactaacaaaatgctgttgctagtcatatgtaaaggtgctactgctgagttggataggcattcttaattacttttgcagtagagggataagcacagcctgctgccacaacacaca

SEQ ID NO: 475460 - DNA, 511 bp, Homo sapiens
taccccagcacattctacttcatccacactgattttgtttctcatcattgaataatacaaaatagaccttgcagagttgtttttccttccgcttggaatacactcctttcatagtaaatgcctaataagtatttattgaatgaatgaatgtttcatacctctcacttacctctgttgccatttgtaagggctaaggatgaaagccagtgttctattatgtgacttacaaggccatctcatctaaatgctatgtctattcccagttactcattggtggttatccactgaactacttccctccaaaaataaatgcataactatgtatcaagtgaatattttcataaacctaaaaggtcagtatgtaataatatattttacaatattttagaatagatcacgtgaacttaaaatatgcatgttttgtacctaatctgttttccagctatacaaatcataaaaagaaattattatgttaatarcattaaaaatctgtaaccaacttattttgcta

SEQ ID NO: 475461 - DNA, 573 bp, Homo sapiens
tctcctaatggggctcctattttgggctatcttctggaccctggtgacttttgctgaactcatgtgatatgcaggctggagaaagccaagatagtgagcctcaaaggtgacccagcttacaactgtgtccccaaaggctatgccatcagactaagtgtaagctaggaatgggacaaacactcagaagggaacttttaaaaaaaagtctatctctgtttgcctagagagaaagmaaaaatctctctaccatttaaaaccaaaagttagtccttctatgggtttgtagcacaaagcctcactacacagaaaccagagaaatccaaatgaaaaggagataatatttcccagacattaaattggcaaaatttaaatctgttggcaacaggcactgccataaacatgatgaaatagagctgctatggaatggtggtaatactgaaaactgggatacccacttcagagagcataaagttagtacttgttaaaattgaagatgcctatattccatgatggaaattctgtatctagagatatatccttgaaaagaacttcacatatgtgaataaggtaact

SEQ ID NO: 475462 - DNA, 593 bp, Homo sapiens
catgaaagtctacaggtcagtctgttatttcatctcctagtatacaagagggaagtgtcccaaatccttttctagtcaaatccaagttaataacccagttgcacaagctgtgccaatttggcaggcccagcaagccctggccatgctatcccactgaagtactatgacttgttagttgccgtattcagagtaagagataatatggtcattcacagtaattcccattgcttatctgtttgtacaaaacacctgtgagccgggcacagtggctcatgcctgtaatcccagcactttgggaggccgaggcaggcagatcacttgaggtcaggagtttgagacaagcctggacaacatggtgaaaccccgtttcaactaaaaatacaaaaattagccgagcgtggtggcacgcttctgtaatcctagcttacttgggaggctgaggcaggagaatcacttgaacccggaaggcggaggtkgcagcgagccaagatccagcctgggcaacatagtgggactctgtctcaaaaaaaaaaaaaaaaacacaaaaaaaaacaccttagtcagcccaggccttgggttggcagtctagggtt

SEQ ID NO: 475463 - DNA, 504 bp, Homo sapiens
agcaaaaagattccttacatttgtacagcacatcatgcttcccaaagcattttaacttatattaatttaatttgatgtggaacaagcatgtaaaagcagagctaatgcttcaggatgtagtaacaaagtggaacaaacacatctgggtcatctgagccttccaaggccccttggcttttacaattcaacagaccttccattttgataaytgtaaggttaaattacaggacacctttatggattaggcatctggcttggcacattataaataaaaattttttaaatgcacctgtgattatttacctccttctggttgacaaacaactttaaaaatgtgttaatactatttgttataatattacaattaaagtaccactctatgtaccccagtcttggtatctattatttaataattattagcaattggctttatgatctcagtctcactacagaacaggtaaaacagtacagttattgtcatttacactaaattaaaattggcat

SEQ ID NO: 475464 - DNA, 660 bp, Homo sapiens
tggcaactctactcataactgatatttttcttcctaaacatgcgtattctctgcttgattctttttgtgacaaacagcaattagttgatttgatgttaaaggtgaagtctatgacattcagataagataaaaatgagaatacttaacgagtgttgtattatttaatctttataactatgaaagatgggtacagttatctttattttattattgaagaagtaaagcacaaagaggttaaaatacagctgaaaacaatactgtattattagcagacgttttttctcctgttatttccaccttaattttccaaaccaagcagtatattcatcactgttttaggatgagattttagtaaagaaatagccagtctctggcttttgcatgccccatgcctaaatttattaatacagtgtttgaggcaaatattacaatagaaatagtgacttttagggagagaaaaaatatcaaaatttaaaagaaggaaaatgccttcccatctcccaccttctaaccccaacccctggctaaaggaaaattctcccactttagatatctgtgcttacrtgatgagtaagaaataaagctaaaggggaaaaaagatgaaagtggtcctgagttgagactattgcttcctcagaaaaatgaaagcgataattaatt

SEQ ID NO: 475465 - DNA, 548 bp, Homo sapiens
tgggattgatgaaattaaaatcttacattataaagtgatggcaagtatgtgaatctatggaaacaatgtgcttcaggagtgaatttaaattggtgtaatcattttggagaactttgggyggtatttagtaaaactggcatttgtacaacttgacgtcattaattacattcttacacatacaccttagagaatcctatatgcattaaagacatgtttatgatagaaatgcaaacatatatccaagtccaaagtttatcttttcttttctctcaggaatataaagctcttaaaacattctacatcccctgtccttattgtaggctgttaccattttttaaaacaacttatttgatttttaaaacacacaagatgttatgtttttctacagtcagtgctcaattagatttattcacatatttattattttattagtttttattagttcttcattctttcttacaaaccagttctctatcctaatcttactttcctcctattgaagcaatatttattagaatttcccttagtaaaagtctactggggacaca

SEQ ID NO: 475466 - DNA, 485 bp, Homo sapiens
aaaaactcctaaaactaataaatgaggttagcagaatcaaagaatataagattaacccacaaaaatctaatgtatttttatgtactagaattggatactcagaaaccaaatttttaaatatgtacatgtatatgtgtgtgcatatatgggtgtttatgtgtatatgtgtatgtatatatatgtatatgtataaacattaggacatgatatatatgtgtttctgtgtgagtatatgtgtgtgtgtaatcagagctccaaaatgaaaaaatgaaatatgwaggtataaatttaaccaaacaggtacaaaatctgtatactaggatctacaaaatgccgatgggagcaataaaagatctaaataaatggagagaaataccatatttatggagtggaagacagcatggtatggatataccacttctcagactgatctatacatttaacataatgcaaataaaaatttaagtgcttttttgtagatatag

SEQ ID NO: 475467 - DNA, 531 bp, Homo sapiens
tatggtttaaaaggtctccaaagcatttgcctatagttagctctgttgtagtattttagtaagtgttctaataacttggctgctcttgcctttggctgtgaagtcttcacaagtgcacagtgtccaatttttgggtccttggtcacatggtcttacatgttcacgttctgaacctattaataactcagcataggattgtaagaaaatacatcagactctataytggaactgcataatcaactgtctacttaatccttctctcatttctttccattacctctcactgtagaagatacacattcaaccatgtgttcagtgcctgtttccccttctattctcagtattcttaaattgatttccataaattagccttagagagttaaaaaaattcaatataagtgaaagagaaagcggagaaccatcacaataatataaatggttataaccatgatgataacataggtttttaaagtatattataaactgtatttacaaattcttatggctgtagtaaggttacatactttgtag

SEQ ID NO: 475468 - DNA, 631 bp, Homo sapiens
agagttgttaagaaatttaaatgaattaatatacacaaacagggacagctctcccacagaacagctgctcaataaatgccagtcatctcattatggtatcatcatggtcgtaaagtcccggctctggaggcaagaagactgggtttgaatccagttcarcttctgactaggttaattgccctaggcacatgacttaacttttccaagcctcattttccttatctgtaaaatgggaaaatactggaccctgtcttgcagggtggggacgaagactggatgagataatgtagggaacagaggacttggacctctgtggcacacgaaggggcttggttctgctcgggaggcctagagagcagttcatctcacccttactttctggaggtgacacagcaagggccaggtgaggcatgtgcgctgcgccagatcaggggcccatccagcacgagaaaccggggcccaacagctttggtgggtgaggggatttctctgcatgagcaagtgcaggagaaggcagagcagggcagagccgggattttgaggagagagaggcctggcagggtgggaggaggggagactggaaagggcatacctggaagagctcggagtcatcggggctgtactggttggg

SEQ ID NO: 475469 - DNA, 614 bp, Homo sapiens
tgaccagtgctgtgttctacataagctaaataagacaaggaagcttaactaactgactcactgctatatgccaagcattgtgccagcaacttaaaaaaggctcaacaaatatttattgaaaaaaacgagcaaaagaagctaaagcagagaccaagaatgaattttttacctagtattaggaataaaggagctgactcttacttgtcttatgttagaatyagaaaatatggactcagtgcacttgatttgctttcttcgttattacaaaattaatcaattaattaaattcattgccgtgtgcaagtttagtacattggtgggttctaaaatcttcactccccaatctgaagcgttggcttgattctaggcaactattataccctctaaaattaaaactggttattacattggagattttgtgtttcttttaataattgagctccactggctattcaagaaatcagcacttatgcttcagttttttctggtttggttacagagaaacagcatgtcgattctcaggacaatgactaaaacggcatttccccctcacctctactatttttctatgtaagtggatcagagctgacaggccattatagcagtacagtacc

SEQ ID NO: 475470 - DNA, 532 bp, Homo sapiens
cagagctagaaaatcttgaactttttaattgatttgtctccaccagtgaacttggaaccatgcatctgtctttcaggagtcagtttccatccattgctctgaaacaccaccctagtgggtattcccagaaaagcacctttgtgagaaagaccaggtgtggaggtcacaatatttacatcaatgcacaacagccagactccatttcagatgctattttattcaccacaagatcattcttactcaattacttttcccaaactctcaactgctgccaaggttaatgcaggctctgactctgcctgttgattcatattaattaagccaatccatgatcttgtatcacagtgtctgtttttaatataacctatttgatgaggctgtattaatttaggagaaatgtgcactggcattctggcctgcactcttcytaattatcttacagtccccattcagcagcattgaaattagactgtggttatcatagttaatggaagcccttagctcctagctaagtgatctccatcagtcacct

SEQ ID NO: 475471 - DNA, 523 bp, Homo sapiens
cacatttaactgaaagttcttattcagtttccttaagccaatggctatgtgcctttctaagagacaagttgtatgtctgtactgaaaaaagaaaatttatactatccttaaatctcttcttaaaggactktttatttagaaatcgtgtgtctgcttcttgggattttataaaacaacagtgatacaaatgaggaaaaggaatgtgatgagtgagtgtcaccaaaggcccaaaatttctgttttcaggaaaataatgaaggaaacggaaaattccctccccataacatacacacatgcctccaagatagccctctttccaaaactgtagcagatttggtgtagtgctggaaatccatcatcctttgtttgttgatgtccatgacttggtgccacatcagctaaggggcagagacttttcaaaaagttgaagactcccaacttgcagatggcatgtgggtaatatctgggaggtgacttggcactgttgcagacaggaagtagatggaaaatgaagccatctgac

SEQ ID NO: 475472 - DNA, 486 bp, Homo sapiens
ggtttcaccttgtgatcgtgtaagtcaattctcctaataaactccccttcatatatacatctatcctattagttctgtccctctagaaaaccctgactaatacccaggtctccctatttctagcttgacttcctgatgtaaagacctcaggacgtttctgtgcactgatatatcwgatggctcaccctgccctcactggctttcttccctctcttttttctgattcatacctaagaagtgtttgcctgctgccagccatatgtatgacagtgtcactcatgctcctacttaaatcccttagtaatcatagttaaaattcatttttatgttcccactgccctaaaaaaatttaaaaatctcattgtagtcagcatgcaacataaagccactcacaaaccatctttacctaaaaagtacccaaatgatggtactgtagcaggacgagccacagacaaaacctctcagacactgagttgtagaaggaag

SEQ ID NO: 475473 - DNA, 486 bp, Homo sapiens
ggtttcaccttgtgatcgtgtaagtcaattctcctaataaactccccttcatatatacatctatcctattagttctgtccctctagaaaaccctgactaatacccaggtctccctatttctagcttgacttcctgatgtaaagacctcaggacgtttctgtgcactgatatatctgatggctcaccctgccctcactggctttcttccctctcttttttctgattcatacctaagaagtgtttgcctgctgccagccatatgtatgacagtgtcactcatgctcctacttaaatcccttagtaatcatagttaaaattcatttttatgttcccactgccctaaaaaaatttaaaaatctcattgtagtcagcatgcaacataaagccactcacaaaccatctttacctaaaaagtacccaaatgatggtactgtagcaggacragccacagacaaaacctctcagacactgagttgtagaaggaag

SEQ ID NO: 475474 - DNA, 623 bp, Homo sapiens
aaaatgtatgtgttttattttggtaagaggtggaaaccactgaagttttgaaaacagacaataatctaagaatggagaaaatctacagttcaattttttaaaaaatctacagttcaattaaaaaaattcaccttgcattgtaatttaccttgaattattttgaatgtcctaataacataatcagggtattttgttagcagaaattttacataattttaaaaatcatatgagtcttaggatttgggatttataatttgtaactgtaaatgtgtgaaacatacaaacatgtgggttagaacatgctcctttagctaagaggagtttgttattacctaccttctgaagccttcttctgtcaattcgtyaatctcattctctgtccagttttgcacccttgctggagagttgttgtgatcatttagaggagaagaggcattctggcttttgaaattttcagcatttttgcgctgatttttccttatcttcatggagttatctacctttgatctttgaggctgatgacctttggctggagtttttgtgtgggggtcttttttgttgatgttgttgttgttgttttctgtttgttagtttctcttctgccaagcccttcttctgcaggt

SEQ ID NO: 475475 - DNA, 623 bp, Homo sapiens
aaataaatgagtctggggcctttcagtgtggaccctgggaaatgctcacattgggttatcattaatggtaaatggccctggaaagatatggcatatgagtggcatatgaccaacaaaaaataaaacaacacggtgtgtgggctgtggaagatacagccagtatgacccccatgattgaacgcctgctatgttktctaatttaatcttcatattagtcccaatgtattatattatccctattttatagattaaaaaaagaaaacacttagaatagtccaaaaaactttaaagaggcaaccttgcaagccaggggcaaggcctcaatttgaatccaggcccttttcactccaaaagaaaggctgtgcagaagtcacacctttgtgtaatgaacaccaactccctgccttctcaccatcttgaatcccttatctgtaaaatcaggggtgagtttgggggaaaaggtaggcagggactaagtctgtctacttcacaggtccattttgaagctcaaatgtggaagcacctttcaattctgaagcaagaactttactaacgtgcatgttttgagggaggtatggggtgctgtgggagctgagcaaagtgggggctcttccaaaaagcag

SEQ ID NO: 475476 - DNA, 606 bp, Homo sapiens
tgtattgtgtctgtaccaatgagaatccctcttgggaaccttattagtcccctgttggtctctactgggaccttataaggcccgtagctttcttatatcttgggagaatcatgatccaaaaatagttactaacttgtgctccaggaagataaacctcctccattcttcctttctgagaagcagaaccctatgctcccagacagccatgagctgcttttgcctgcctggaacattaactgcaggcaggttctatggcatgactcccaaattggtgtttagcttttcagaaattggcagcattttctccctgactcttgcaaggacacttgacctcacccttcctggcctttcttcctcataaagccagcttctaaaagagtggaaacagatactcrgttaccccctgaggtaggggccttctggggacagagtgcaacctagaaggaggctcaggaggctctttgcattctgaggcctgggaattggaggagacgctgcctagcctcaggaaaagaatgtaacagcttgcacagagctgagtgtgctacataatcctgtcttaaaagaatgaatacctcctggaggtaaacaagaactatcagaagg

SEQ ID NO: 475477 - DNA, 606 bp, Homo sapiens
tgtattgtgtctgtaccaatgagaatccctcttgggaaccttattagtcccctgttggtctctactgggaccttataaggcccgtagctttcttatatcttgggagaatcatgatccaaaaatagttactaacttgtgctccaggaagataaacctcctccattcttcctttctgagaagcagaaccctatgctcccagacagccatgagctgcttttgcctgcctggaacattaactgcaggcaggttctatggcatgactcccaaattggtgtttagcttttcagaaattggcagcattttctccctgactcttgcaaggacacttgacctcacccttcctggcctttcttcctcataaagccagcttctaaaagagtggaaacagatactcggttaccccctgaggtaggggccttctggggacagagtgcaacctagaaggaggctcaggaggctctttgcattctgaggcctgggaattggaggagacgctgcctagcctcrggaaaagaatgtaacagcttgcacagagctgagtgtgctacataatcctgtcttaaaagaatgaatacctcctggaggtaaacaagaactatcagaagg

SEQ ID NO: 475478 - DNA, 331 bp, Homo sapiens
tctggccatatctctgtgaagtaccagagacatccactgttttcctcatttcattgtatggactgaaactgaggaaggaaaagtttgaaactgctcagagcccccacctgccttcaggcttaggatttgtatcttgggggtctcatcttaatatcacttcacgctgccccctctatccccccagactctgcagacattytttttctgtcctgtggcaaaatgagactttcttttctcctcttctccttctttccttcttctattcatcccttcacaggaagttagagcaaatattcaaagccttcattatcatagtagccttttaaagttt

SEQ ID NO: 475479 - DNA, 397 bp, Homo sapiens
agctgggtttcagtacaacttggccggcctaggcttgtggcatttgttacctgagggaaacaatagcagctctgtaggcatttctgtctgaaagggcaggagctgcatgcctgcttctcaggttcaggccaacaagaaaggggcatcaggagacttttcatcaaggctgcaaggaagtttcacatcgtcccagcacccagtctcccaccgtgtgtgtctgtgcrcacggacatacatgatgaagacatattgttttgattccagagcagggcttgacagggtatttctctttcattcaattctgaaattgctagattgtccatggccttgtcctggaattgaaaatgtatgctggaccatcggagttatttatgtatgttggagtgttatttttctc

SEQ ID NO: 475480 - DNA, 653 bp, Homo sapiens
gctgatcaatatgcactcagcatgcgccagctcttcgcctctcacgggaataaaataaattgtcagtcagcagcacaattttgtggtgacggtggtggtaatttttttcttttgctaaattattcacctcctcgaaaaacaatttgataaatgtttatttcttcataatacattccaacaaccgctgatttgtgatccttgatgtggactgaatttaaattgtgacgaggtaagggcttcatgaaaatacctagacagagccacagaaaagctctggtttttgtttttgttgtttttaccctgctctctgagagcgccctggcctcccacagcatgagggcactaattgaatttcagagatgtaataagtgagaagcacacgtaagcacaacctgcggtgggaatgccaacagcgcaggtttggcaggagacttggcggtacagcayaagggaacagccccacagccaaaccagaaagaccgggactcagagttgtgccaatgagtggtctacacaagaagacaggtgagagagaggctgggggcaggtggaactgtgagtgctctctggcattacaaaagctttctgaccaggacgttctacctaaaacatgatagaacacacacagggctattttcttctgtctgcccttc

SEQ ID NO: 475481 - DNA, 177 bp, Homo sapiens
  misc_feature (1)...(177): n = A,T,C or G
tctccaaatatgtatataaatcaatacatatatatgarttatgcatatgtatatatatacatacacacacacatatatatataattacnttgtcattgtaaagatgtagcactagacaagctcccagttcagacagctctctcattaaatattctacaatcccaattggagaaagga

SEQ ID NO: 475482 - DNA, 677 bp, Homo sapiens
agatacttgggagagtagaactactctgtatatttatgggtaaaattacgctgggagtctggggacctcagagaaatggattagcaaggtggggtactgcataagcagagagaggtggtaagaactttaaattctgagcttatccattcctaagtgaaataagtcattctgcaaagggtacagaccatatgattccaacaacatgttttagaaaaaggtaaaactttcagaatcaattaaggttcagtggttacttggggttatgggaagggagaaatgaataggtggagtagasggggggtttagggcattgaaactactctacagaggccagattatatggagaaactggagtaaaagagaataaagccctgggaattaatcaaaaatcatgggaaaacaagaaactctcagaacttggaactggtgactacaaaggaaggaatgccaatgggtacagttggaccaagttcatatctggagacatattgaaagaaaattgtacaaaggtaaagagcatgggtccactttcccctcctgagggttcttcaggaccgtcgcctggcttagtgatgctgcatctctgggcaaaagctcacaggctcagtgtccagagcccagtgctgcctgaggatagagtacgccatggaagacagggatggatccctacctcctga

SEQ ID NO: 475483 - DNA, 677 bp, Homo sapiens
agatacttgggagagtagaactactctgtatatttatgggtaaaattacgctgggagtctggggacctcagagaaatggattagcaaggtggggtactgcataagcagagagaggtggtaagaactttaaattctgagcttatccattcctaagtgaaataagtcattctgcaaagggtacagaccatatgattccaacaacatgttttagaaaaaggtaaaactttcagaatcaattaaggttcagtggttacttggggttatgggaagggagaaatgaataggtggagtagacggggggtttagggcattgaaactactctacagaggccagattatatggagaaactggagtaaaagagaataaagccctgggaattaatcaaaaatcatgggaaaacaagaaactctcagaacttrgaactggtgactacaaaggaaggaatgccaatgggtacagttggaccaagttcatatctggagacatattgaaagaaaattgtacaaaggtaaagagcatgggtccactttcccctcctgagggttcttcaggaccgtcgcctggcttagtgatgctgcatctctgggcaaaagctcacaggctcagtgtccagagcccagtgctgcctgaggatagagtacgccatggaagacagggatggatccctacctcctga

SEQ ID NO: 475484 - DNA, 553 bp, Homo sapiens
tgcctcactcatagccaatgattgatggagaaaagggaatatacctggccatttgggcccaacatgggataactctgaccacacgttaatttcagagctcctcatgggatgagctgaggctgaaaagtctgcatcacagctcctcttccccttctattgcataaaatgtcaaagctagtctatggcattagtagtcaagtatagttatccttggattgaaggtagagaggattacatctagaaagaggcagggtagtctgtggyggcgggggcgcggaggagagcagggcttctgcggtgctggtgatgttctatttatgagatctgtttcactttgtgaaattccatccagttgtataattatggtatatgcatttttctatatatattatactttaacaaaatgttcaccaacaaatgtttataactccaaaataaatgaattaattaaaattttaaataaaaaatactgaattagagatagaaaagttaatcattcactcattcaccaactcactgtgtgactagggcaaatcttttaaactgtctgagc

SEQ ID NO: 475485 - DNA, 622 bp, Homo sapiens
ctgtcaaattcttcagaaagcacttcagtggcagagagctgcctcactcatagccaatgattgatggagaaaagggaatatacctggccatttgggcccaacatgggataactctgaccacacgttaatttcagagctcctcatgggatgagctgaggctgaaaagtctgcatcacagctcctcttccccttctattgcataaaatgtcaaagctagtctatggcattagtagtcaagtatagttatccttggattgaaggtagagaggattacatctagaaagaggcagggtagtctgtggtggcgggggcgcggaggagagcaggrcttctgcggtgctggtgatgttctatttatgagatctgtttcactttgtgaaattccatccagttgtataattatggtatatgcatttttctatatatattatactttaacaaaatgttcaccaacaaatgtttataactccaaaataaatgaattaattaaaattttaaataaaaaatactgaattagagatagaaaagttaatcattcactcattcaccaactcactgtgtgactagggcaaatcttttaaactgtctgagcccacaactcctcaactatgaggctgaaaac

SEQ ID NO: 475486 - DNA, 628 bp, Homo sapiens
gaagaaatggtacagaaaacataaatcatcgaggtggataccatggtggaagttcccgttctcgtagcagtattttccatgcaggaaaaagccaaggactacatgaaaacaacatacctgacaatgaaaccgggrggaaagaagacaagagagaacgcaaacagtttgaagctcgagggattttcgtaacgttttcttattgaacgttttatacacaatgaagtttctgtaagtgctattttaagtgattctcctgcctcagcctctccagtatctgggattacaggcatccaccaccaggcccgcctaatttttatatttttgtagagacagggtttcaccagtttggccaggctggtcttgaactcttgacctcaggtgatccacttacctcagcctcccaaagtgctgggattacagccactgtgccactgcgcactgagccactgtacactgagctactgcacccggccaaaatactgtatttcttaaattacagaaaaattgacccagtgtacagtcatatttatctagttcttgcgattcattcttgataatttaaaagctagatagaatttgcactctttttatatattcattgtcaattcttattcagtatatatgagtg

SEQ ID NO: 475487 - DNA, 628 bp, Homo sapiens
gaagaaatggtacagaaaacataaatcatcgaggtggataccatggtggaagttcccgttctcgtagcagtattttccatgcaggaaaaagccaaggactacatgaaaacaacatacctgacaatgaaaccggggggaaagaagacaagagagaacgcaaacagtttgaagctcgagggattttcgtaacgttttcttattgaacgttttatacacaatgaagtttctgtaagtgctattttaagtgattctcctgcctcagcctcyccagtatctgggattacaggcatccaccaccaggcccgcctaatttttatatttttgtagagacagggtttcaccagtttggccaggctggtcttgaactcttgacctcaggtgatccacttacctcagcctcccaaagtgctgggattacagccactgtgccactgcgcactgagccactgtacactgagctactgcacccggccaaaatactgtatttcttaaattacagaaaaattgacccagtgtacagtcatatttatctagttcttgcgattcattcttgataatttaaaagctagatagaatttgcactctttttatatattcattgtcaattcttattcagtatatatgagtg

SEQ ID NO: 475488 - DNA, 628 bp, Homo sapiens
gaagaaatggtacagaaaacataaatcatcgaggtggataccatggtggaagttcccgttctcgtagcagtattttccatgcaggaaaaagccaaggactacatgaaaacaacatacctgacaatgaaaccggggggaaagaagacaagagagaacgcaaacagtttgaagctcgagggattttcgtaacgttttcttattgaacgttttatacacaatgaagtttctgtaagtgctattttaagtgattctcctgcctcagcctctccagtatctgggattacaggcayccaccaccaggcccgcctaatttttatatttttgtagagacagggtttcaccagtttggccaggctggtcttgaactcttgacctcaggtgatccacttacctcagcctcccaaagtgctgggattacagccactgtgccactgcgcactgagccactgtacactgagctactgcacccggccaaaatactgtatttcttaaattacagaaaaattgacccagtgtacagtcatatttatctagttcttgcgattcattcttgataatttaaaagctagatagaatttgcactctttttatatattcattgtcaattcttattcagtatatatgagtg

SEQ ID NO: 475489 - DNA, 628 bp, Homo sapiens
gaagaaatggtacagaaaacataaatcatcgaggtggataccatggtggaagttcccgttctcgtagcagtattttccatgcaggaaaaagccaaggactacatgaaaacaacatacctgacaatgaaaccggggggaaagaagacaagagagaacgcaaacagtttgaagctcgagggattttcgtaacgttttcttattgaacgttttatacacaatgaagtttctgtaagtgctattttaagtgattctcctgcctcagcctctccagtatctgggattacaggcatccaccaccaggcccgcctaatttttatatttttgtagagacagggtttcaccagtttggccaggctggtcttgaactcttgacctcaggtgatccacttacctcagcctcccaaagtgctgggattacagccactgtgccactgcgcactgagccactgtacactgagctactgcacccggccaaaatactgtatttcttaaattacagaaaaattgacycagtgtacagtcatatttatctagttcttgcgattcattcttgataatttaaaagctagatagaatttgcactctttttatatattcattgtcaattcttattcagtatatatgagtg

SEQ ID NO: 475490 - DNA, 590 bp, Homo sapiens
tgggaaatctgtaaaaatatagggaagggtagtaagactggagtattgatccagtttatttagatagtaaagaaaaggcagttccagaagactggcaagttagggtaacttcagggcagacattttaaatatgccttcttacatacacgtcctgtcaaaatgggtcacagatctgtgaatctcagaaagtctgctcctagaaaagcccatccagaatgcagaggtctggcctatctgagctcagaaggggaaatccagaggtagtccaagggtagtggctcatctattgtccttaggttcttcctccctttcattaattttagcacaaaaagctagagatttggtcctgctayccaagatcaagagtttgagaattaaacacagtacagagttaattcaaatatgtatgtaatgaatattagctaaatacttacactcttagaaaaggattgaggaattaagtggaaaatcagtttaagatatttgggtttcagctttatataggcaattgttttttctttctggcataatttttcaaaaacactttagtcctttgtttcttgcatataaaactacttagactctaaaaa

SEQ ID NO: 475491 - DNA, 666 bp, Homo sapiens
tgtttcactaacctttctatctaacccactaacctgggtctctttctctaacccttgagatattatctcttcttcctgtcccagtggtttgcagccctctgagtgctctgttatctgaatgccttcagtatgttgcatacattagaatcttaaatatagaatttcttagttgaagcagcaatgtcactgttttgtgcatccaggggataggtgtgggcgagagaagagacaggtgtatttgtttcttcatttcggtttatagtctccttgcgagcaaagaccatggttttaaccttttatgttctccacaatgtaggcagagggctatgcatctttaaaatgtgcagtatcttcacaaaaatatgtaagcacttactttgtgccaagtagtattctaggtactgagatttcaatggtaaataagacagatgaagactctactctcaaaggagattacaaccaggttattaagaactagaagtcagtctgctacttattttattttgacatttgatttgtcattatctagaaatagcaataccatattcataaagaaactctaatagtcaactgttacatcttccttacataatgaagctatgctataggcaataaattggctactgaaatctcagcgaccraacacaatagtatagtttgtcaccc

SEQ ID NO: 475492 - DNA, 609 bp, Homo sapiens
  misc_feature (1)...(609): n = A,T,C or G
taaatgttattagattttaggtaatgcatgcacacataacttttaagtcaataaaaaatagaactagaatgtataacttccaaagcagtagacatataaaactgaaaaagtactaagtatgacttaaaaaattatattgtacatcaagttataatgaacatgaagctacaaataaagccagtaatattttcctcattcatactcaaaatctgatctctattttaatacttcttactacatagagttttatagcatataattttcttatttgctttttgaattttatgatgtcaatttttaaatatacaacaaagctattataacaaattaatgtcaagcaattttttattgtttgtgttaactaaacaaattctcacatmttttttggtgagttgcatttgattaaatatgattatatttgtgtcttctgaatgctgccatctatataacatcattatactaaaatatccatagctttaccattctcatctatttgtgccaaatagtatatgtgtttgtttctcttggtattcaattantaaagaaatcatgtgttgttattctaaaatttttagttgttgtggatatatagtaggtgtacatatttat

SEQ ID NO: 475493 - DNA, 616 bp, Homo sapiens
ccccagatccaccactttaaaatattgtgtgtgtcactggggcctgtcgggcagtggggggctaggggagggatagcattaggagaaatacctaatgtagatgatgggttgatgggcgcagcagaccaccatggcacatgtatacctatgtaacaaacctgcacattctgcacatgtatcccagaacttaaagtataacaaaaaaaatttwaaaaaaaatatatgtgtgtatgtggtgatgaggtctctctatgttgtccaggagatgaggtctctctgtgttgaccaggctggtcttgaacttctggcctcaagtgatcctcccaccttggtctcccaaagtgctgggattacaggcataagctaccacacacggcctcatcatttttattttgcaatggattgctacatggtgcatcttacagaccaatcttatgtcatctactagacagtatttttatattgtcaaaaggtattacatttacgtttggttctataatggtaactacccgttgtttaaccttggtttcaatttaaacagatttcagtgtttatggcagagatggccagcgggcctcctatatctactcttcactccttgtctgttagaagtaac

SEQ ID NO: 475494 - DNA, 472 bp, Homo sapiens
attctctatgtagtaacaaagcctcccgtttcattttctctgttctcttacttacttatctaagcaacacattggagtagaataaaagcttaaaagtcctaaaggtaaaataattaaagaaatgcctcttttgaaaaaaaaaatgaagttcaaataacctggaaaacgttctgatattataaaacctaattatgctgggtaaaacgtaataaaaatatttgtttttttaaattgtagtaacatgtacacaacataaaattaaccattcttaagtgtgcagttcagtgctattaaatacattcatattagcatgaaaccatgaccactgttcagctccagaacttttccagcttccaaagcagaaacttcacacccaataaacaaaaacttccacctctttcctctccctagcccctgacaacacmattcaactttctgtctctatgaattgaattactctaatacttcacat

SEQ ID NO: 475495 - DNA, 526 bp, Homo sapiens
ctggattagattagaattcaggcctgccctttggagcccccgtgtaccttcttatgctggctgggcacctggaagtagcgtgcttcatgcatattcagggatgaacaggctctgctgtctgattgtttggggctaggatctatttgaataggatgaaggataggaatggatgagatagggrgaggcttttggaggtgagggggtttcaggaatccctgtcatctccagaagatgttgaggaaggaatatttataatgtgctggatcccaaaccatccttctctatttctggtcccatttttgtgactttgaatgattaacatctccagaccaaggactttgcccctacagccatcccctctgtgttggccagcacagagagaaagtgattcctccctcattacacacccatctctctcttcaagcctcagattcctcaagtgaaaaatgagaacttgaaacaattaccctgcattcaggcaccggccagtatgtccatcatgaattatttgctgtcatgttgctgt

SEQ ID NO: 475496 - DNA, 487 bp, Homo sapiens
catacccagctagttattttgtattttttgtagagatgatggcccggccgcctctgagaccttctaatctcctttagttcaaatgctccacctgacaaacgtcatccttacttcgggggtattgttttctgagccccaacaatacattgtttcataggatgatgtgattccagtcatttgtctttgtgaggtctgtaattccttctcccacttctgatcaatctatgttatatctctgccttcccctccctccagtctctccccacccagarctgaagcctgaactggccgtgggggaaccactcggagtgtggtcagggagggtttgggggaaaattgccatctcccttttctcttgagtctctggctttgaaccttccctgccctgaccccgggtaagaaagagttttcagaatgatgaccccactggacaaagagccattcccaccaggtgcggtggttcatgtacctgggaggccgaggcagg

SEQ ID NO: 475497 - DNA, 623 bp, Homo sapiens
cataattctctacttttttaagactagaaaaatgaaacatttgcattggttagctyagaagacataggagggttatctaaaggtttagaaattttccttaataaaattactagcatcaaagcaaaaaaattgttgtgacttactggaatgttctgtatcgggggtcaaagtacaggtctgactactgacactatgtgtctcttcttcatcataatgtttgtagaaacaagtaaatgtacttaaatgcatttttatagttgacaaagcctttctcattcatcaattcctttttgttctttatgaggaaagacaggtatttttagccccattttcaggtgtaaaaatgaggtgtagaaagaagtgaagcggttcacttatggtcatttaagccatctagtgatgggtctgatatcagatctgtatcctccaactagttgattatacctttcaatatcttagatttttatacctaccaaatggacttatcccagttttattccactttttagttttctatgaacataattcactagttagactgggggcttctagaacctcaagctgcctccccagcattgacactttgagtacatgtagttcttttattgacagcgctatcacca

SEQ ID NO: 475498 - DNA, 586 bp, Homo sapiens
cctcacggcattgttgtcaggtgttaatgagataatktatgccaagaggcatccctggcatctagcaagactccagtaaatgggggccactaatccctgcactgtgggtgttccccattttacagatgagaagttagagtccccagagatctgagtgacttgctacgacatcacagctagcacgcgggaaaactaccattcattcaaactcaggccctcagggtcggtagcctcactgccgtcactatgttgagttcccacttctcctgccttgaggtgtctcctctgcagacacctgacacctggcccccatccttatgtagattctcaccagctttctctcatttccctactgagaaggcttggcctggggaccttctcagggccaatgtcttttctccaagagccagcccctcttttagagaaaataaagcagtttgggaaaagtaacaaaggctgcatttgtgtattttgctttatggagctgaaaatatctggtaaattgatccagtgggagtaataaatacacattactttatcttgttcttcatgtcctatacccctgagccttgatagaacaccacca

SEQ ID NO: 475499 - DNA, 579 bp, Homo sapiens
cgcaatcctttgttccgtaaaatgtggcatggttgtgggagtgacatgccatcacgttcactcataggcaggtggtctacagggcgtgtgcgccgggtgggaatcttrggggccaccttcgagttctctctatgacagtttcaggccagagaaccaaatacggtagagcctcccagcagaaacgcctttccaagttccttacctgtctttgtatttgtaacttgttgaaagaagcccctgggaggggatgaggggtcctgtgcttcctcattgctgtgtggccacgctggcttcctgtgtccacttggcatcctcaggctaggtgggcatcccgttgtgttgcagagtgatcgggagacagaggccgcctctaccagcgctcagcccccgaggcgctcctggagcacgtgccaggctctgttcggtcccctccagcctgttctttcagttccggaggatttcctatttctacgtttagacactaaacctttttcattaacatgtgctcactgtggaataattagacacacctaagaagaaaaagtagagtaaatgagcttaaagaacataaaaagcgtc

SEQ ID NO: 475500 - DNA, 579 bp, Homo sapiens
cgcaatcctttgttccgtaaaatgtggcatggttgtgggagtgacatgccatcacgttcactcataggcaggtggtctacagggcgtgtgcgccgggtgggaatcttaggggccaccttcgagttctctctatgacagtttcaggccagagaaccaaatacggtagagcctcccagcagaaamgcctttccaagttccttacctgtctttgtatttgtaacttgttgaaagaagcccctgggaggggatgaggggtcctgtgcttcctcattgctgtgtggccacgctggcttcctgtgtccacttggcatcctcaggctaggtgggcatcccgttgtgttgcagagtgatcgggagacagaggccgcctctaccagcgctcagcccccgaggcgctcctggagcacgtgccaggctctgttcggtcccctccagcctgttctttcagttccggaggatttcctatttctacgtttagacactaaacctttttcattaacatgtgctcactgtggaataattagacacacctaagaagaaaaagtagagtaaatgagcttaaagaacataaaaagcgtc

SEQ ID NO: 475501 - DNA, 579 bp, Homo sapiens
cgcaatcctttgttccgtaaaatgtggcatggttgtgggagtgacatgccatcacgttcactcataggcaggtggtctacagggcgtgtgcgccgggtgggaatcttaggggccaccttcgagttctctctatgacagtttcaggccagagaaccaaatacggtagagcctcccagcagaaacgcctttccaagttccttacctgtctttgtatttgtaacttgttgaaagaagcccctgggaggggatgaggggtcctgtgcttcctcattgctgtgtggccacgctggcttcctgtgtccacttggcatcctcaggctaggtgggcatcccgttgtgttgcagagtgatcgggagacagaggccgcctctaccagcgctcagcccccgaggcgctcctggagcacgtgccaggctctgttcggtcccctccagcctgttctttcagttccggaggatttcctatttctaygtttagacactaaacctttttcattaacatgtgctcactgtggaataattagacacacctaagaagaaaaagtagagtaaatgagcttaaagaacataaaaagcgtc

SEQ ID NO: 475502 - DNA, 602 bp, Homo sapiens
tgagtcacactgccaggacaattaccataatttttaagtactaatgagcataagtgatatttcaaagtgcctacaagaactatgatttgacatgtgatatgaaaggacctgtgatttctttgtgttttgctggtgtatgagacagagtctgcctctgctgcccaggctggagtgcagtggcacaaccttggctcgctgcagcctccacctctggggctcctgcgatcctcccgcctcagccgcatctgtgatttccattagcaataaaggtcgtgttaattctactgtggattgcagcctcctttctgaatggaaaaccctctttcagttcgtgattaggaaaaacatgagttctgctattgttcccacccagattcacagatcccctgttatccccgcctcctaggaaagggaatctttcggccttctcggggccaggccttcacctccgcctacaggcaggagatggcgccaacagcaagaggttccttctgactgtggcctataattaggtcaagtggcagcataggtagacgtgcaakcagggactaagtctgcagatgtgacttgcatgaggtgggcatgactgtgctacgagcata

SEQ ID NO: 475503 - DNA, 149 bp, Homo sapiens
tgacctactaaacaccattcagaagatgctaagacccatgaattgcaacaggaaagaaaagacagagaattagtcagrcaggtacatgctgtgccaaaaatgcactacagcccccacccaattctgcctaatcctagctgggctgacac

SEQ ID NO: 475504 - DNA, 149 bp, Homo sapiens
tgacctactaaacaccattcagaagatgctaagacccatgaattgcaacaggaaagaaaagacagagaattagtcagacaggtacatgctgtgccaaaaatgcactacarcccccacccaattctgcctaatcctagctgggctgacac

SEQ ID NO: 475505 - DNA, 598 bp, Homo sapiens
acggaatccctgtccggtgaaccagagaagagaaaatcgctcggggccacctgggtagagaccggaggggtgactgccttgactgggaggcgtggaggagcgagcggggtctgcggctccggccgggaggtatgcgcttccctctctcacccatgcctgctccggtccaaagagccgagaccgtgggtcaagaccgggatggattcgctcgggagaggccaggagcctgccagcacgttcgggcactagcgctcccggggctcctcggactcgtggaccccgaaacgcctgccccacaggaagatcaccccactgtagaagtcgggtcacggggaccagtggcgagctacctgacggcttaactacagataccctcccgacgaaagccgtggactcccagggtgcgtgcgtctgcttgtgtgtgggggtgttggcaggcggtccccataatcatcgaagagacaggtggatgaacctyaggcctcgcactcgggggctctcagagtctgggcgttacagccgctcccgtacactcacgggtcacctggctgaatcaggtgggatctgggtgaggtgccgggaggtctcccaggctggc

SEQ ID NO: 475506 - DNA, 624 bp, Homo sapiens
tactgttggatactgtataatggaggagagattttttccttaagcactttgaatatatcatactagtctctcccaggctgtcaaatttctgttagtctgttgccagggaatattggaattcccttrtattctttttttttttagatggagtctcgctctgttgcccagcctggagtgcagtggtatgatcttggctcactgcaagcagaattcccttatattctattataagggaatgcttcttttctcttgctgctttcaggatcctctctttatctttgatttttgacagtttgattataatacgtcttgaggtagccctgttttaattggatctgattagagacttttgacctttatgtacttggatatttatatttttctccaggtttggaatgttttattctattatttctttaaataagctttccatgcctgtatttttctcttctccatcttgactcctgtgacttgaaaatgtgcttttttgcattatgctaaacaaaattctggaaaagggaaaactctaattactgaaactgaccagcagttgctagggcccaagaatgagaaagggcattgacctaaaaaaaaccatgaacaaattttttgcagtggtagaaa

SEQ ID NO: 475507 - DNA, 545 bp, Homo sapiens
tcaagtacctttgctgcttgctgtccctgtgccaggaacttggttcccattgtatccatttggccttctccctcatcaccatcaggtttctgctcaaatgtcaaactcactgaggctttcccagtgtgctctattttaaacaagctccctctccttggccccacattttctagactcactttctctttcatttgttgtctagatcactaattgtttcctattttgctttacttagagtactataaactttccttttaagatataaaaaataaacttcatgatagtataatttctatttgattcattatccctacattccatgaaaatgcctccccatgatcggtacacaatgagtagtttttaaattaataaatgaatgaatggatgaaaaattttctacctrcttggttatttcttctaggtatcatacacgccctctcccatcatggcatccttctgctaatctttttttttttgccattccctgggattctaaatcttggccttgtcttctcacttcatacatgtcccttggttgttttcac

SEQ ID NO: 475508 - DNA, 629 bp, Homo sapiens
tgctcagcatttttgcatataaggtatgtttggtgagtttggggatatgtaaagttattatcaccaagcataaattgtatatagtgttttgttttgttttaaataccatacagattcttattcttaaaaagtctgttcaatttaattggatgaacgtaaactcattaagtgtgcttttacatcctcatctcacctttctctcctcaatttctgtttgcataaccacttttttatttcttcagttctggagagttttgcgtgttccttacctctgttaactctccatcccagcctttgaactgagtcttcccttcctcaagcattcagaagtccaatttgtctctctgtattgtcaacttattctctcacacatatgtttttttcaggcattacaggtctttttaaccttgataaatccaaactgaattcaagacattgaattgctgcttgcaactcaccactagccattcaccttrtattaccttaatatctggattctgttctcaccgtacttaagcaaaagatgctgtacttttaagaaatatcattgtattgcctgtataaaagatgtaacccattccaacaacctacctttagaaatggaaaaatttgacagtggtgtatgtggt

SEQ ID NO: 475509 - DNA, 453 bp, Homo sapiens
tcagtattaaggttaattttcagttttcccattggcttagtggataagaatatttagaaggtagtaaaaatattgtttyttgtaggaatattacatctgatttcatatgcttccatgaacaaataaatcatgagacgtaatgcttcagttcatgcaaattatggtagctgcacattctttttctcactaaatcctaaacataaaaaagtgaaactcctttcctaaagggaattttctagaatactatcaccacactgcttttagctactcagtcagtattggtcaaaggcttttccagtacttttatttagtgatagttttaagtaagtgtgactgtgacccctttgatctgactcctcacaatactgtagccactacagcacaagcagagttatagaaaaaggaggcaacaattaggagtactcctggatatcttaggaatttactatcaaa

SEQ ID NO: 475510 - DNA, 552 bp, Homo sapiens
ttcattgcagcactattcacaatagcaaagacatggaatcaacctaggtgcccatcaatggtgggttggataaagaaaatgtggtataaatgcaccatggaattactatgcagtcacaataaagaaggaaatcacgtcctttgcagcaatatggatgtaactggaagcgattatcgtgagtgaattaactcaggaagataaaaccagtactacatgttttcacttttcagtgagagctaaacactgggtagtcatggacataacaatggcaatgacagaaactggagactaataaagggggaagagagagagggccactttttgaaaaaccagctattgggtattatacacactacctgactgacaggatcatttgtacctcaaacctcatcatcatgcaatatacccgtgtaacaaacttgtacaagtatccactgaatctaaaaaaaaaaagttgctattatttaaaaaaaataaagaatatagtgaaataaaccctccctcttctacttgkggccccacatctaaagaaaaaaaaatctgggtactccc

SEQ ID NO: 475511 - DNA, 593 bp, Homo sapiens
taagatatattttatagagtgattcattgtaaatttggaccagtccttaattagaaagtttctttaaattctgatcttaattttgctttcatgtaatcaccaccaactagttctagttctgctctctcaagccaccaaatggctctagcctttctattgtgttagaatattttcaaacctgaatggatctaaccttcatttaacatcacaatttttaaacatgtttgaaaaaaaatctatgttcctctccagactcctccagagtatcttagcctagcctagaaatcttctctaagcaaaatgtatctagtttctattattatctttgatataactttgatttctgtaaacctcattctctgaaatccagaaaaaaaggaagaaaactawgaaattgatgataacagtttattacttgtgggcttgccctatgctaggcattgaccaatggagatatccctagtgttgtgatccccattttataaaggagaaaattgagtttaagagaattcttctaatatatttagtaaatgttcaattcaaacatttaaacagttaaatatttaactaagatgacattagaataatgtggg

SEQ ID NO: 475512 - DNA, 616 bp, Homo sapiens
taacataactaaaagaatataaccgcattgactgtaacacaaaggatggttgcttgaggacatggataccccattttccatgctgtgattacgcagtccatgcctgtawcaaaacatctcacgtaccccataaatacatacacctactatgtacctacaaaaattaaaaattaaaaaaaagaaaaggagggaaaaaagaatcccttccagagtgaaggaatagggtaaatgacaaagaaagaagaaagagcatgaaggtttggtgggagagtgagagtctggctgtgctagaatgtaaactgcaggcagaaaacagttggaaatgtggttggagaggaaaattaagctgagtttggatttcaggccaaaggcaaggtaataaatagagggcaaagatgactttagcatgctaggttgcttgcagaaactgtgctgaaattaaactttattttccaacccagactgttaaaccaattgtgtttatctctaagacaaaactgatctgaaaacctccctgagaaaatgtccattctagaactcttagatcatttgctggaagcttccttgctgcagtctttggctgctgcccctcagattgtacatggcaggtgaggca

SEQ ID NO: 475513 - DNA, 620 bp, Homo sapiens
tgctgatcaaatgcatccttaaaaacagggcgcctcctccctcacttaactcatttcacttaaggatttacatttataccaggagagcaaatcaaagttatagttccctcagcaactgtaacctggaccaaacatagctatatttatctgctgctgagagggcttttaactcatgtctcccaacttcgaaggggagatttaattcaaacactatgcaagaaatgctttttggaaaccaagtggctgccccagtgaaggtttagagtgtaaatggctgttcctttcaactagtgcttttatgcaagggttcccagcagacagaaatcttccgcagcccctctacagtcttggagggtgaatagaagggtaccttctccattcctccaagccgccacgccatttatgggtcagagcccagctttgttactgcaggcagccagtgttgataagaggactgtgcaggggccaggactagggggaaggagtgatacaagttagacactaacctaggggsaaaaattgaagggggtcccaaaaaactcagtaatcaagaaaattaacacttaatgcaatttttttgtttaaaaaattaatgcaaaaactcatggtaaacaaaataa

SEQ ID NO: 475514 - DNA, 620 bp, Homo sapiens
tgctgatcaaatgcatccttaaaaacagggcgcctcctccctcacttaactcatttcacttaaggatttacatttataccaggagagcaaatcaaagttatagttccctcagcaactgtaacctggaccaaacatagctatatttatctgctgctgagagggcttttaactcatgtctcccaacttcgaaggggagatttaattcaaacactatgcaagaaatgctttttggaaaccaagtggctgccccagtgaaggtttagagtgtaaatggctgttcctttcaactagtgcttttatgcaagggttcccagcagacagaaatcttccgcagcccctctacagtcttggagggtgaatagaagggtaccttctccattcctccaagccgccacgccatttatgggtcagagcccagctttgttactgcaggcagccagtgttgataagaggactgtgcaggggccaggactagggggaaggagtgatacaagttagacactaacctaggggcmaaaattgaagggggtcccaaaaaactcagtaatcaagaaaattaacacttaatgcaatttttttgtttaaaaaattaatgcaaaaactcatggtaaacaaaataa

SEQ ID NO: 475515 - DNA, 515 bp, Homo sapiens
taacagtttctttcttgattcttatacagggtagctagctccaaagaatgtctgattccaacatctttgctttttccaataccacatgccaagagagaaaaagacatacctaattttttaattctcaccataaatcaatgagacataaacattttggctctcactgtcaacaaaactcctgtgtgtgatttttttttttttttttggaaagcaatctaatgttaaatcatgcttcctggttccaaaacactagaagtgccagcttgactggatattacacctaattggcaggacaaacattcaatgcaccaaacaaatggaaygttcttgtccctcatccaaagtaataaagtgcagagaagctcgcttttgtgcgcgctgtctctctctccctccctctctcactttctcgctttctttcctccacccctccaccgctctctccaagggtcttggtctcagatctcagttgcttctgccccttgatgtttgggattttctccttgcctcacatt

SEQ ID NO: 475516 - DNA, 642 bp, Homo sapiens
tcatttgccctctttttctaagtgamtacaggacacgtattagttgttcttaatttttttcccagtaaaatatggatcttttaagaagaatttgagaagcaaacaattacatgtcatgtcaagggggtagcagattccattcgttttcaatattgccacaatacccagggattaatgctgccacaggggggcaatctttatttgtcttacttcctaccccttccctgttctgcctctttaactcagttaagttgttctgtttgggacctggaaaagaacccaaagaaaacctgagtggacaggttcatttctggaatgcagaaaacattttaaaggctagatttttagaatattctcaactagcattctttccattgatttgaaggggaaattaactattataatctcttgaatccaaaactggatattaagaactttcccccttactaagtttaagacttttgtcatgtggtgagtcaaataagaccattttgattgtaaaccataaaatagttcagcaagtagcccacagttctggcctaacagcagacttgctgttttcacttggtatcctggagttgggttgctaaccttaatttctatgatgttttctaaaatgaaacttgataaagtagaccacca

SEQ ID NO: 475517 - DNA, 673 bp, Homo sapiens
gccacccagagtcccatggactgctccatgcttggggagaagggaaggacatcagacacagctgaaaatgacacaggaggcagaagaatgcaggaagcatttattgagggccagagctgcattctacaagaggcaagaggcaggacacaggcaatctctagtgggttagaggagaggttggggagagggcagtgacaatgagagaacagccaggcgctggcttgggaactgccggtttctcaaggctgcctcctgctagtcctctgggaaatgcaggtagaaatggatcctctatgctactgcctcagccagaggcctgatggtgtcccttccctgggaggggcccttagccccagtctcctgtgctacaagggacccagcagcaggtaggggctttggtaaatatagtcactcatcattaactgagtaagagcaccttctcatcttcacagcagcaggagcattcctgaggcccaaggagccctctaaggtcactctttcattccaaagcaccctgtcccaaccctatcttccatactgaccttaactccctccagcctcacttgggggttccagatctaacatcacccyggtaagtcccaaacccaaactgtccctcacctttagcaacatcctggtatcctttcacctacatacgtttgatcctcagcca

SEQ ID NO: 475518 - DNA, 400 bp, Homo sapiens
atagccattccagcttgctatggttgctgttttcacggtatgtctttttcccatctttttactttcagcctgtttgtatctttgaatctaaagtgtrtttcctgtagacagcatatagtttgttttttaaccaagcctgacatctctgccttctaattggattgtttaatctgttcacatttaaggattttgttatatggttggatctgtgtctgtcattcatgttttctatgtctcatgtctttctttgttctctcctaccttatttactacattcttttgcattcagtaaatattttccagtgtcacattttggttactttaatgattctttaactatatttttcaattcttttctttgtggttcctcaagagaggggatgagaaatgctggcagccc

SEQ ID NO: 475519 - DNA, 400 bp, Homo sapiens
atagccattccagcttgctatggttgctgttttcacggtatgtctttttcccatctttttactttcagcctgtttgtatctttgaatctaaagtgtgtttcctgtagacagcatatagtttgttttttaaccaagcctgacatctctgccttctaattggattgtttaatctgttcacatttaaggattttgttatatggttggatctgtgtctgtcattcatgttttctatgtctcatgtctttctttgttctctcctaccttatttactacattcttttgcattcagtaaatattttccagtgtcacattttggttactttaatrattctttaactatatttttcaattcttttctttgtggttcctcaagagaggggatgagaaatgctggcagccc

SEQ ID NO: 475520 - DNA, 469 bp, Homo sapiens
agtcagcgtatgaaataaagtccaatcrgagaaggtctagaggttttctctcatccaatcagaacatgtagttcagaatccttgtgcataaccccatgtgcatgctgaggaggcctcacgccatcctaggctttcctaaatcggccggcggagctactctgttcctagtttagcagatcaagagaagggggagctggatgctggagcctgcaacactgtggctcgcctcgctacagttggcggtggtgacagagacagcaggcagcacggccagagcggtagaagggaggatggcagcgggagctgctcttgactggctagcagtctagaagaaggggggccccctgctccacgctggaggctggagccttggccaccgaggctcctctggctgcggttggtggtggcgaccgagactgcaggtctgttagagtggtagaaagtttgccgggtaggtgcactctttgcg

SEQ ID NO: 475521 - DNA, 469 bp, Homo sapiens
agtcagcgtatgaaataaagtccaatcggagaaggtctagaggttttctctcatccaatcagaacatgtagttcagaatccttgtgcataaccccatgtgcatgctgaggaggcctcacgccatcctaggctttcctaaatcggccggyggagctactctgttcctagtttagcagatcaagagaagggggagctggatgctggagcctgcaacactgtggctcgcctcgctacagttggcggtggtgacagagacagcaggcagcacggccagagcggtagaagggaggatggcagcgggagctgctcttgactggctagcagtctagaagaaggggggccccctgctccacgctggaggctggagccttggccaccgaggctcctctggctgcggttggtggtggcgaccgagactgcaggtctgttagagtggtagaaagtttgccgggtaggtgcactctttgcg

SEQ ID NO: 475522 - DNA, 469 bp, Homo sapiens
agtcagcgtatgaaataaagtccaatcggagaaggtctagaggttttctctcatccaatcagaacatgtagttcagaatccttgtgcataaccccatgtgcatgctgaggaggcctcacgccatcctaggctttcctaaatcggccggcggagctactctgttcctagyttagcagatcaagagaagggggagctggatgctggagcctgcaacactgtggctcgcctcgctacagttggcggtggtgacagagacagcaggcagcacggccagagcggtagaagggaggatggcagcgggagctgctcttgactggctagcagtctagaagaaggggggccccctgctccacgctggaggctggagccttggccaccgaggctcctctggctgcggttggtggtggcgaccgagactgcaggtctgttagagtggtagaaagtttgccgggtaggtgcactctttgcg

SEQ ID NO: 475523 - DNA, 469 bp, Homo sapiens
agtcagcgtatgaaataaagtccaatcggagaaggtctagaggttttctctcatccaatcagaacatgtagttcagaatccttgtgcataaccccatgtgcatgctgaggaggcctcacgccatcctaggctttcctaaatcggccggcggagctactctgttcctagtttagcagatcaagagaagggggagctggatgctggagcctgcaacactgtggctcgcctcgctacagttggcggtggtgacagagacagcaggcagcacggccagagcggtagaagggaggatggcagcgggagctgctcttgactggctagcrgtctagaagaaggggggccccctgctccacgctggaggctggagccttggccaccgaggctcctctggctgcggttggtggtggcgaccgagactgcaggtctgttagagtggtagaaagtttgccgggtaggtgcactctttgcg

SEQ ID NO: 475524 - DNA, 551 bp, Homo sapiens
ttttctgttttggaaggttattaattctggttaaattttgttaaagatacaggcctatcagattgtctattgctctttttgtgagttttggtagattgtgtccttcaagtaattggtcaatttcaattaagttattaaattttggacatagagttgttgatgctctttttatttttttcttttttcttctgtgtaattatgggtaatttctatgtcttcaagttcactcatctttttttctgcgatgtctcatctgcttttaatcttagacatatttttcctcttaaacattataaattttatctctagaagtttgatttgggtattttgtatatcttccatatctctacctaatgttgaatttatagagtataattttcataactgttttaatgttcctttgatgattttttttttttttgaaatggagtcttgttytgttgcccaggctggagtgcagtggcacatcttggctcactgcacctttgcctcatgggttcaagccattctcctacctcagcctcatgagtacctgggattacaggtgcctg

SEQ ID NO: 475525 - DNA, 589 bp, Homo sapiens
tctgggacctgttgtccacccggggcctggtgtccaacgtccaccttgagtccagtgtgcacttggggcccgacgttttcctggggcctttgtgtccgctggggccttatgcccacctggagggggtgtgtcccacgcacccgcccttgtcctggggagagtgtgtagagagttgctctggccctgccccttgtcatctgggaattgcccctcctgccaacgcggtggggaaggtgtcatcttgactcaggtgggtgctgggtttcaaactggggccttatatttacctggggactgctgtccatgtggggcctggtgtccacgtaggtgctgggtattcacctggagcctcacgtccacctggggtcaaaagtgttcacctgkggcccgatgttacctagcacaggcgttgcacagaatacacacagactggaaaggaagaaggaatggaaacgtgggacctacgtattcagtataagaaaagtgaaaatagcaaccaggaaagaacaaaaagaaagtacgagaaggatggtatgaagaagacacaaaccaacctaggcccagtttcctaagaaacactggaaaccac

SEQ ID NO: 475526 - DNA, 589 bp, Homo sapiens
tctgggacctgttgtccacccggggcctggtgtccaacgtccaccttgagtccagtgtgcacttggggcccgacgttttcctggggcctttgtgtccgctggggccttatgcccacctggagggggtgtgtcccacgcacccgcccttgtcctggggagagtgtgtagagagttgctctggccctgccccttgtcatctgggaattgcccctcctgccaacgcggtggggaaggtgtcatcttgactcaggtgggtgctgggtttcaaactggggccttatatttacctggggactgctgtccatgtggggcctggtgtccacgtaggtgctgggtattcacctggagcctcacgtccacctggggtcaaaagtgttcacctggggcccgatgttacctagcacaggcgttgcacagaatacacacagactggaaaggaagaaggaatggaaacgtgggacctacgtattcagtataagaaaagtgaaaatagcaaccaggaaagaacamaaagaaagtacgagaaggatggtatgaagaagacacaaaccaacctaggcccagtttcctaagaaacactggaaaccac

SEQ ID NO: 475527 - DNA, 523 bp, Homo sapiens
ctcactttgtttgttttctgtctcacagggattattgtcatttgttgcctgatgaccactggcctgaaaactgttgtctcgtgtatttttttttctggctttttggttgtgtcaggtaagagtaaatccataccctgtgacaccatcttgctagaagtagaagtgttacctttttaatatattatttttccttcaaaacccacattagaaggaactttcctctgtaacaacaaccgacarcttgacaaagtgtgttcccattgtcctgtgattgctctgcttttcaaagtaagcctgcgaggtgggtgtcatgtcattcccattttacagataaggggacagaacctcagagaggtgaagagacttgttcaaggtcacacagtctataacggcagagccaggattgaacccatgtccccattatacttgtagttcccacaggggagacagaaccacatgaagggttggcatcactatatttttttttgggagaggtcaataaaggtgggctcagagagtaata

SEQ ID NO: 475528 - DNA, 523 bp, Homo sapiens
ctcactttgtttgttttctgtctcacagggattattgtcatttgttgcctgatgaccactggcctgaaaactgttgtctcgtgtatttttttttctggctttttggttgtgtcaggtaagagtaaatccataccctgtgacaccatcttgctagaagtagaagtgttacctttttaatatattatttttccttcaaaacccacattagaaggaactttcctctgtaacaacaaccgacagcttgacaaagtgtgttcccattgtcctgtgattgctctgcttttcaaagtaagcctgcgaggtgggtgtcatgtcatycccattttacagataaggggacagaacctcagagaggtgaagagacttgttcaaggtcacacagtctataacggcagagccaggattgaacccatgtccccattatacttgtagttcccacaggggagacagaaccacatgaagggttggcatcactatatttttttttgggagaggtcaataaaggtgggctcagagagtaata

SEQ ID NO: 475529 - DNA, 523 bp, Homo sapiens
ctcactttgtttgttttctgtctcacagggattattgtcatttgttgcctgatgaccactggcctgaaaactgttgtctcgtgtatttttttttctggctttttggttgtgtcaggtaagagtaaatccataccctgtgacaccatcttgctagaagtagaagtgttacctttttaatatattatttttccttcaaaacccacattagaaggaactttcctctgtaacaacaaccgacagcttgacaaagtgtgttcccattgtcctgtgattgctctgcttttcaaagtaagcctgcgaggtgggtgtcatgtcattcccattttacagataaggggacagaacctcagagaggtgaagagacttgttcaaggtcacacrgtctataacggcagagccaggattgaacccatgtccccattatacttgtagttcccacaggggagacagaaccacatgaagggttggcatcactatatttttttttgggagaggtcaataaaggtgggctcagagagtaata

SEQ ID NO: 475530 - DNA, 613 bp, Homo sapiens
tctggaacttggcctggctttgtgggctttcatggaaagtggagaagagggattagggaagaggcaatggataaraagtactggttgctcaggttggggtggtcagggaggtgaggggagggagaagggagtaccagaaggccagtgggtaggcttgcaggagctgtgggtggatggcgtggccccaggggacaggagctaggtccagccggctcccactgtcttctggcttgtaggattatctctgctcctccccctttctctgagtgagaaaggtgggaaataaaataatgaagccgtgagtaggtgaggtgttagggagacagcttgccagggtgggcagcacagatgactggtgggtggggagggaggtggtgggaggttaatgtgcagatcttcagatctccgagaaacagggtggaagggagtcagtctggtgtgcagagttgcaggtggggacaatagtgggtgatacccaaggcacaggtggtttcctgggaagaaggtgatgtggtcttttcttggctatggaggagattttgaaatgtacttgggtaatttgtttttagtcaaatttccttctgactgggttatttaaagtgtagaatagatt

SEQ ID NO: 475531 - DNA, 624 bp, Homo sapiens
caatgatgctaacattggaaattctctaacagaatttttcattcaagattctgaaagtttctcttacttcataaagtttatgttaaaataaaatttaaatattatttataaatgccaactacatcctgtcactctccttcttggatacttacaaaaatatgtacrtttggaacattttgtctcattttgcattagcttcccctatctttattaattatcagctctgtaatcttaggttaattacttaacatttctgagtcacactcctctcatttgtaaagggggtaataattttgcaaagctcctagagtaattatgggtattacatgtttggcaaggaaagagtactcaataaataccaggtggtgttattatcaaagtatcacgtgacataatctttgatgtctgttatagaattaaacttttttttttatttaaagttctcctataggcacatctgtggatgacaatgctatattcataacacatgtagagctttattaaagtttttctcaattaaaaagttaaaactataagctcatatataggtggattttttttatttttattttttgctatgacacttgttctttctatttctcctctctctttaaggaaaaagaa

SEQ ID NO: 475532 - DNA, 545 bp, Homo sapiens
tataataactgatatcaaaatgggcatgggcagttcaaggaaagaaaattacagaccaatctcactaacattagatgtagaaaaaaaattttttttgagatagaatctcactcttgtcacccaggcttcagtgcagtggcgcaatctgggctcactgcaacctccgcctccgggttcaagtgattctcctgcctcaccctcccaagcagctgggattatacacacacaccaccaagcccagctaatattttgtatttgtagtagagacaaggtttcatcatgtttcccaggcttgtcttgaactcctcctgacctcaagtgatccacccaccatggcctcccaaagtgctgggattacaggcgtgagccaccgcacccagccagatgtagaaaattctaaataaaatagggacaagtcattttgggagtgtgttaaagatgttaaagcataaccaaggaacttccctatcctgttagtagatcataaactctgaagagttatttgaaaacagctagaggaatktaaagtactcatttttttggca

SEQ ID NO: 475533 - DNA, 504 bp, Homo sapiens
gctatctgaacatcaaaatacagtcataagcctatctttgccctaaaagtatattctggggttgctgcctgcaggtattaaatgagttactgcatgtaaaatgcttagctttgtgcctgtggcactcataaaatgttagcttaaatattgctaaggagagttcggtagccttgataggcagaagtcatcaygagcttaacccaaggggagtaagaaagaatgaccacaggctcgagtttggaactgcatgaaagaagacaaaaaaatctttaaccatagaactcgactccaagctctaataatataacaaaatgggcctcggggaggactctgaaaaatgcagacaacagaaaaacatccattatcattcctggctatgaaaagtgcagttggctggacttacagaccagcagaccattgcatccagccttcaggcctttgctctacacttggcaccaacaaaccaggctcctttctgaagcatccattttgcaggtgcccatg

SEQ ID NO: 475534 - DNA, 623 bp, Homo sapiens
gaaggatgtgcgcgtgggagacttcatccaaatgaaatgcaatgagattgtcccagcagacatactcctccttttttcctctgaccccaatgggatatgccatctggaaactgccagcttggatggagagacaaacctcaagcaaagatgtgtcgtgaagggcttctcacagcaggtagggctctttctaakatcttcaatggtaaagtcatagaaaggatgcaagcctaccctactggaaaattgaactaaacctactgggtagaggggaaagtagtagatgcctccttttccctagcactttagatacactaaatcctaccagcagccctctgagatggatattatctgcatatcacagatgaggaaactgaggcttagtaaagttaaataacttgctgaaggcctcagagtttctaaatggggatccactctgttcaactgaggaaactatactctctgctctgaactgaggagtctaatgtctgttccatcatcactaggaccaactcctcttctgtgctcatccaatcccaactcactctgcccagctcagtcctagcaatctctcctgccacgaatcctaatattccttctgcccctcctaaactgcagcaaggtat

SEQ ID NO: 475535 - DNA, 623 bp, Homo sapiens
gaaggatgtgcgcgtgggagacttcatccaaatgaaatgcaatgagattgtcccagcagacatactcctccttttttcctctgaccccaatgggatatgccatctggaaactgccagcttggatggagagacaaacctcaagcaaagatgtgtcgtgaagggcttctcacagcaggtagggctctttctaatatcttcaatggtaaagtcatagaaaggatgcaagcctaccctactggaaaattgaactaaacctactgggtagaggggaaagtagtagatgcctccttttccctagcactttagatacactaaatcctaccagcagccctctgagatggatattatctgcatatcacagatgaggaaactgaggcttagtaaagttaaataacttgctgaaggcctcagagtttctaaatggggatccactctgttcaactgaggaaactatactctctgctctgaactgaggagtctaawgtctgttccatcatcactaggaccaactcctcttctgtgctcatccaatcccaactcactctgcccagctcagtcctagcaatctctcctgccacgaatcctaatattccttctgcccctcctaaactgcagcaaggtat

SEQ ID NO: 475536 - DNA, 666 bp, Homo sapiens
tttgtctggtgccagacaaagcactttatgagacgagttttttatctgtcagcaatggattggagacatttcccaattgtgtgccagtcacacaaccaaggcttaggaatttctcaggccaccttacctgacatgtcagggcaggtctgtgtctaggtgcatggtcagatttaatacatccagaagatgtcttctattctaacagatctcttagcttgtcactgaggcaaagttttgatttaggagatagggctataaaatgcctggactgttaccttgcatggactgaatatgactcataaaactgatctgattccttcagccatcatctgcccaacttcgttcccctccccacccccccacaacacacacacacactttctaagaaaagaaaagaaattcttttttttcaatactttaagttctgggatacatgtgcagaatgtgcaggtttgttacataggtatacatgtgtcatggtggtttgcagcacccaccaacccatcatctaccttaggtatttctcctaatgctatccctcccctagcccccaaccccccgatgggctccagtgtgtgatgttcccctccatgtccatgtgttctcattgttcaattcccacttatgagtgagaacawgcagtatttggttttctgttcttgtgtt

SEQ ID NO: 475537 - DNA, 295 bp, Homo sapiens
agtcaatcagtgtcagttatatattttttaagggtcatatattaacactgaagagtactgtattttgttartacagagaacagaatgagtctcctataatttgtgtcattattcttgcttaatactataccaaggatctatcagagcagatattattcctcacagctttagagttgggcacacactgagtgaagatattctaaattctaaattcttataaaataaaagagtgtagagtttaatgtattgatattcatcttcacgaatggcagaaatggcagatttagcttcactg

SEQ ID NO: 475538 - DNA, 295 bp, Homo sapiens
agtcaatcagtgtcagttatatattttttaagggtcatatattaacactgaagagtactgtattttgttaatacagagaacagaatgagtctcctataatttgtgtcattattcttgcttaatactataccaaggatctatcagagcagatattattcctcacagctttagagttgggcacacactgagtgaagatattctraattctaaattcttataaaataaaagagtgtagagtttaatgtattgatattcatcttcacgaatggcagaaatggcagatttagcttcactg

SEQ ID NO: 475539 - DNA, 566 bp, Homo sapiens
tttaaacataagctatcaagaacccaggtctccaacacacttccttattaacatactagggaactccagccatctaagtaaggtatggttttatgtctcctcactagtaggtcacgttgctttgcacactctctaatttkttcctgtccatatgtttgacctagaacactcctccacacaccatcccagggttttggccagtacagagtagctgctccagcctacaattcagtcacagcaactgctggaattcttcctcaaaaagcccaggtgaagggaccttgagtaaataaataagaaacttgaaataaaatgattgattttctttactatatttttagatccccagccctaatcttgtctcaggtcttcctcctttctctgtagaaccatgagaataccttcttaccagtgttgttaggaaaaccaaatactagtataattgccatttattaagtgtctttttctggtatcaggtgctttaatttattattttatgaaatcttataataaccaggcaagttgggttattagtgttttttatccccattttccacaggaggaaa

SEQ ID NO: 475540 - DNA, 532 bp, Homo sapiens
cattcacatttcgttaaatagtctgtatcttccttaaaaacaaacaaacaaaccctcgagtttgttcaaggcttttttttttttttcttggagattttatccaagtctcttaagcctaaaaccttgcttgttgttgcttctcccaggtatctcacttctcccatcagcactatcaacagtcatggagggcttaccatctttgggacattcatttaggatctgaagataaaaaggctgcttgttagaggcgttggctttcaaagaaaagatgaagttgatcttaccggttcaagctaaaagttaattacctgcagaaataagcactttgaaatagaccataattaaggctcattgcccattgttgattttcttctattagacgagctgtgyttttctcccaaagctttatgtatctttttattatttgtatttatgaccaggcatgtgccacactccaggttgtgaattaaactgatgtggaaggagctcttttttggacaaattcgggagagtttgaagattgcttatgtga

SEQ ID NO: 475541 - DNA, 585 bp, Homo sapiens
gaggtggttgtactctcctttgtacgtttttttgtttgtttttttttkatacagcgtcttagtctgtcacccaggctggagtgcagtggcacgatcgtggctcactgcagccttgacctccccaggctcagaggatcctcccacctcagcctccctagtcactgggactacaggcatgtgccactacatctggctaatattcgtatttttttaaatagagacagggtttctccatgttgcccaagctggtcttgaactcctgggctcaagtgatccactcacctcagcctttcaaggtgttaggattacaggcctgagccagccacagtgccacgcctcctctgcacttttaatgtaccctgtttatgtttcttctataccaacttttgcactgtgttttggccagtgaacaggtctttccctccgctggtctgtgaagtctgactgacctgcaaatcatgctttatgcatctaattatctcctgtggactgggcacctgcacactgctcagctcatctttgttgcgtgaatgaagacccatgttgaatggagttttaaaatctgggaagtttttggccatgtgc

SEQ ID NO: 475542 - DNA, 585 bp, Homo sapiens
gaggtggttgtactctcctttgtacgtttttttgtttgtttttttttgatacagcgtcttagtctgtcacccaggctggagtgcagtggcacgatcrtggctcactgcagccttgacctccccaggctcagaggatcctcccacctcagcctccctagtcactgggactacaggcatgtgccactacatctggctaatattcgtatttttttaaatagagacagggtttctccatgttgcccaagctggtcttgaactcctgggctcaagtgatccactcacctcagcctttcaaggtgttaggattacaggcctgagccagccacagtgccacgcctcctctgcacttttaatgtaccctgtttatgtttcttctataccaacttttgcactgtgttttggccagtgaacaggtctttccctccgctggtctgtgaagtctgactgacctgcaaatcatgctttatgcatctaattatctcctgtggactgggcacctgcacactgctcagctcatctttgttgcgtgaatgaagacccatgttgaatggagttttaaaatctgggaagtttttggccatgtgc

SEQ ID NO: 475543 - DNA, 455 bp, Homo sapiens
gctgtaaacaaacagatttagctgaatgctcaaaaaataacaaaggcaacatatttcaagtgagattttcatataattttttgaaaataaccaygtcagagttaaatatttatgttacttgtaaaataagatagaatgtaagcaatccataacttaaaacagtactgtataaacatttttaaccttctaatttacccccgtttcaaccaactcacattacaagccctccaaggtatgtatattccttaacagttcaaaattacatatctattactccagtatatatatttttaaagacagggtctcactgtgtcgcccaggctagagtgcagtggctcaatcatggctcactgcagcctcaacctcctgggctaaagagatcctcttacctcagcctcctgagtagctgggagtacaggtgtgtgccaccacacctggctactttttaaattttg

SEQ ID NO: 475544 - DNA, 455 bp, Homo sapiens
gctgtaaacaaacagatttagctgaatgctcaaaaaataacaaaggcaacatatttcaagtgagattttcatataattttttgaaaataaccacgtcagagttaaatatttatgttacttgtaaaataagatagaatgtaagcaatccataacttaaaacagtactgtataaacatttttaaccttctaatttacccccgtttcaaccaactcayattacaagccctccaaggtatgtatattccttaacagttcaaaattacatatctattactccagtatatatatttttaaagacagggtctcactgtgtcgcccaggctagagtgcagtggctcaatcatggctcactgcagcctcaacctcctgggctaaagagatcctcttacctcagcctcctgagtagctgggagtacaggtgtgtgccaccacacctggctactttttaaattttg

SEQ ID NO: 475545 - DNA, 577 bp, Homo sapiens
cagcaatggcagacactactcccccagccakgcttgccaccttgcagtttgatcttggacaagcagtgagcaaggctctatgggcatgggacccgctgagccaagcatgggatataatctcttggtgttccatttgctcagttggaaatgcagaaatcacccatcttctgcatcgatcacactgggagctgcagaccggagctgttcctatttggccatcttggaatggacccatcaaataaattttgcttctaagagaagttactatttattcctaattagatagggaggaaagtctttgaagaggaacctctatgtcaccttttccacaaggtgattatctaatatttgcaggctgaagtacctatacagcaaaaggaagaacagttcagtgcataaactgaacagtggagtctgtagttttatcttgctttgtatttattacttcagaacaattagcatagttatgtgtagtgtttgtagacaacctgcattcatataaattaaacagtattttccccctttttgagacagtctcactctcttgcacaggctggagtgcagttttgtgatctca

SEQ ID NO: 475546 - DNA, 593 bp, Homo sapiens
tattaagtgcagcaggatgtatatcaragcattcctctatttctgtactattctagaaatagtattctacagggaaaatattttatgcatgtatgaaaggttttgtattactgtttgtagcaatacctatcaatacttccacagtcaacatctttattctgtatgaatataaatacaaagattgttacagcttcagatattatatatatatatttatatatacttaggtatatatatgaatatatgtacacacctggtagatacataaacgcaaacttatatgaatgtgtatatgtaaatattaatgtatacataaaatattttcccactttttaaaatatagagcatatactaaggatgcagatgtagaattaattgccttctgtttttttcaatagcataacagaataaaacatagccatacaatgtggtttatataaacaaaaaccttcagcttcaggtttcaggtcttgtaaataagctgacagtaaagctgtgtggtacatactgtccagcttagcatatagggccctgcatttcttcttggtgtgcctgggctatttacatttaccattttgggcatgccttaatga

SEQ ID NO: 475547 - DNA, 598 bp, Homo sapiens
ctgcacaccaccatgcctggctattattaattttttttatagaggagagtctccatatgctgcccaggctggtctcaaacttttgggctccaggtatcctcctgtcttggcctcccaaaatcctgggattacagatcagagccaccaccacgcctggccctgaaatgtacacttcaatagatttaagatggtaaattttacrttatgtgtttttaaaacaatttttttttaaagaaaaactgaaaaaaaaattacatatttttttgaaaattaccttcaaatcacaaaaatgtttctctcatgaaaggaaatacatattaatcactaaacacatggtaaaataagactatccccatgagtacttacttagacaagataaaactaccatggaaaataagctaagaaagagtataagataagccataactaaaattggtgtcatatttataaacagacatacatatgtaacctgattgtgacagacatgcataatttatctcttaaacctaaaattgacttaaagtatacaagcagaattgcaaattgtctaaaattataatacataagtaaaaccaaaacacccaataaactaatggta

SEQ ID NO: 475548 - DNA, 622 bp, Homo sapiens
cacaccaccatgcctggctattattaattttttttatagaggagagtctccatatgctgcccaggctggtctcaaacttttgggctccaggtatcctcctgtcttggcctcccaaaatcctgggattacagatcagagccaccaccacgcctggccctgaaatgtacacttcaatagatttaagatggtaaattttacattatgtgtttttaaaacaatttttttttaaagaaaaactgaaaaaaaaattacatatttttttgaaaattaccttcaaatcacaaaaatgtttctctcatgaaaggaaatacatattaatyactaaacacatggtaaaataagactatccccatgagtacttacttagacaagataaaactaccatggaaaataagctaagaaagagtataagataagccataactaaaattggtgtcatatttataaacagacatacatatgtaacctgattgtgacagacatgcataatttatctcttaaacctaaaattgacttaaagtatacaagcagaattgcaaattgtctaaaattataatacataagtaaaaccaaaacacccaataaactaatggtaagaaacctacactgaggccaggtgcag

SEQ ID NO: 475549 - DNA, 459 bp, Homo sapiens
atacaaaattcaatatgccggtgtctctctgcacttcacctttgagaccagcatgctcacacatgtagcaatgggcaaatgccttccactgaaggaggcccaaatcctgttaagataagcaaaacctcttaagtaacttcaaccttctacagatgtatcttgaaaataccatgccacaaaatgacaaatgcatttcaccytgatgctccccacaccaccttcccccagcccttgtttcagcattgtcattttggtggagaatcaagaatgtcactcatgaaacaccacacattcagacaccacggagtttccttaccactgctggaggcttgctggggccctgagcatgctctgagcaggtatgaattgggggagaattcctcatcagggttggtgtccatgatttgatgggaggtgttgctgtctagcaatggcatctggcagctaactggtggagga

SEQ ID NO: 475550 - DNA, 531 bp, Homo sapiens
aacaaagggtactcctgctgaatcttatttctttagctacctcgagcaaacgattctccctaaaacctaaaagcctacgaattatatattttcctctttcytcttctctagcaagatccttcatatccataggcagaaaacagaattgttcaagatagtttgtgtaaagaacaatctatttcatgtctgtttctctctctctctctcttttgtcctagcaataggaatagctcttgcaataaagagaggtagtaaatggccaaaataggttcagagatgcaaaccctggggctgatattttcaaatgtactcgagatcttaggcttccatgaactaaccccctaaatgtataaaaggcaaatgttgtgatctcacagtctcaactagaaatatttacagaataatggttatcagaggaagcaaaagattgtaaatgggtaaataaaatttctgtatatattattatatcttttccttgtttacacacacaaaaatttgaaaaaatatttaagaaactatagaacagtggaa

SEQ ID NO: 475551 - DNA, 532 bp, Homo sapiens
attctggatagacctaattcattttattgctgaatacatgagtgaaaactagagctcaattatctgattacaagatgaaagcaaccacatstgtatttccataaagaataagagcctggcaattcattctttacaatatagttatcggtggcagctaaggtcatcttctctgaaaaaaaaaaaaaaaatctgatatttttctttcaagttctgtcatgtacatttccagctctattaatcatactgcaatgggtcttttaggatgacgtaaattttgtgatagcttatcttatatttggatttgcagtccaaggacttgtcctgagtcatttttgactcttggtttatctgctaacttgcttgtggccgcaagttacagaaactcggatgtcaactgactcaagcaacaggggatttacctcacacttaataggaaacctaaagatagagctttagagctctctcgttcatccaccaagggaatgctatgttgcttccttctttcaccctgcacccccaccacacacatacc

SEQ ID NO: 475552 - DNA, 603 bp, Homo sapiens
tgttcagcctcgggcaagtaagttgctatcctcagttttttcttctgtaaaacaaggattgtatgggtaactatctcacagaattggtaagaggattaaatgaatagatgtggtgtacctgaaacatgggagcaytgtgtaagtgatacaaatcatcagcatcaacaacagcatcattatcattatttgattaaacctgttaagagaggaagattaggcctgattatgcccatcttatagatggaaggactgaggcccaaaggcttaaagatgtgaagtctttaactcagggacccaaagtcggcaattaacacagccagaagttaaacacaggtgtcctgactccaagcctaaggtgttttccaccccagttatatagttctatagaaggaagaaggttcttttatctgcattatttaaattataaaaaatcatacagaatgtgccgcctcccagataatttaaccagcctcctctatggaccatctcctccttatgggcaggataagtcatccccatcccgaaatgaaaactccctagggatcatttccaatgaaattgctttcaaagtcaggggtatgaggggaagaggatgggtcactg

SEQ ID NO: 475553 - DNA, 559 bp, Homo sapiens
atataaactataaataagttacattatatatgcaacagaggaccaaactccttgtccagtgtaatgcaaacaaggaacaaggtaactcrctgtaagatgcctcagaggccatgggagttggggttcctgcctggactccacataaatcatccaaggcagccgtacaaagggagcccaagcccaaaatctgtgcttgaaagtatggaagaggagagaaaaaagcccatatggaaaccatgctttatagtctcgtttaaaccttgcttataatctttatactattgtttaatatagtgatattagagttatagttagatgaaatgccttagcttccccatctgaaagtggaaacaataactataagataaatgcaaccataataaagggctatttacaaaaaaaaaaatcagatggctatttccttgctgtaaaagtctgcattataccacaaaatagaggcaaatatgaggacaacagataaaagaactgtatgtcatggaattttcagattttacctttttaaatcagtcctactgacctgagaagatgaccctaaaaa

SEQ ID NO: 475554 - DNA, 559 bp, Homo sapiens
atataaactataaataagttacattatatatgcaacagaggaccaaactccttgtccagtgtaatgcaaacaaggaacaaggtaactcgctgtaagatgcctcagaggccatgggagtyggggttcctgcctggactccacataaatcatccaaggcagccgtacaaagggagcccaagcccaaaatctgtgcttgaaagtatggaagaggagagaaaaaagcccatatggaaaccatgctttatagtctcgtttaaaccttgcttataatctttatactattgtttaatatagtgatattagagttatagttagatgaaatgccttagcttccccatctgaaagtggaaacaataactataagataaatgcaaccataataaagggctatttacaaaaaaaaaaatcagatggctatttccttgctgtaaaagtctgcattataccacaaaatagaggcaaatatgaggacaacagataaaagaactgtatgtcatggaattttcagattttacctttttaaatcagtcctactgacctgagaagatgaccctaaaaa

SEQ ID NO: 475555 - DNA, 559 bp, Homo sapiens
atataaactataaataagttacattatatatgcaacagaggaccaaactccttgtccagtgtaatgcaaacaaggaacaaggtaactcgctgtaagatgcctcagaggccatgggagttggggttcctgcctggactccacataaatcatccaaggcagccgtacaaagggagcccaagcccaaaatctgtgcttgaaagtatggaagaggagagaaaaaagcccatatggaaaccatgctttatagtctygtttaaaccttgcttataatctttatactattgtttaatatagtgatattagagttatagttagatgaaatgccttagcttccccatctgaaagtggaaacaataactataagataaatgcaaccataataaagggctatttacaaaaaaaaaaatcagatggctatttccttgctgtaaaagtctgcattataccacaaaatagaggcaaatatgaggacaacagataaaagaactgtatgtcatggaattttcagattttacctttttaaatcagtcctactgacctgagaagatgaccctaaaaa

SEQ ID NO: 475556 - DNA, 594 bp, Homo sapiens
gtgttgagaaactaagctgatgcaccacctctgttgttccaaggctagaccaacagtgggcattctctagatctattgtctcctttacgtattagggggaaaaccacttctactgtgcagggatctgcccctttaaacacataaataccacttaatccactgccctcaacagaggaaatgaccactggcctggaggcctccaaaattccttctctttttctttctttcaagtcaaaggtcatggttcatttcgagttccaatgctattttctaaattttgttttaatccagatctcatgacttmtttctcattctctttccttcctgaacaattcagtgctaaaaccattaggtagggcagagcgaagactgtatgggcgccagggtgaaggaaaccacagtggcacagagtgcagtgcctgcatcaggacagggtcaggaggcagtcctgcagaggggcagctcagcatggtgtgttcaagtcctacagagtattggagcccaagtaagtatggacagtgtccctgaagagaatggcccagcacagagaatcgaaccccaagctgaggatgccaggcagtgggagggagaggg

SEQ ID NO: 475557 - DNA, 598 bp, Homo sapiens
tgtaagtttgtgattatttcaaaataaaacaattaacttagaagcacattacacttgttcccatcctacattgagccattttgaacctgggccatgtygataactaggagaggaaatgttacctgctcatagaagtcatctgccagaattttcttattattgacttgtgtaaaattaggttgacaacttaatctgggaaaaaacatcacagccaccttttcttgtaatgctttcctgagtgttggctaaatacaatgaagttaatacaacttagaaaagcaaaacccccttctaagaaggactcaagggataaattttcaccacgatgttcagcatgagattatcttccataagcgtgcatccctcccctaattagcttcctgaccttctttctagttccctcaaaaccctggcaatggcaactaaaaagatggcttttgtgagaagagcgattggtgtccacacctgctggtgctgagcacaagacaatgcacatgtgttctcttgaaggaagaaactttagaaacgtcatcttcaaggtgtcaatgacttgtctactatagctgctgcctcagcgtccacttttagacccggcatc

SEQ ID NO: 475558 - DNA, 598 bp, Homo sapiens
tgtaagtttgtgattatttcaaaataaaacaattaacttagaagcacattacacttgttcccatcctacattgagccattttgaacctgggccatgtcgataactaggagaggaaatgttacctgctcatagaagtcatctgccagaattttcttattattgacttgtgtaaaattaggttgacaacttaatctgggaaaaaacatcacagccaccttttcttgtaatgctttcctgagtgttggctaaatacaatgaagttaatacaacttagaaaagcaaaacccccttcwaagaaggactcaagggataaattttcaccacgatgttcagcatgagattatcttccataagcgtgcatccctcccctaattagcttcctgaccttctttctagttccctcaaaaccctggcaatggcaactaaaaagatggcttttgtgagaagagcgattggtgtccacacctgctggtgctgagcacaagacaatgcacatgtgttctcttgaaggaagaaactttagaaacgtcatcttcaaggtgtcaatgacttgtctactatagctgctgcctcagcgtccacttttagacccggcatc

SEQ ID NO: 475559 - DNA, 643 bp, Homo sapiens
tgtcaaatgtgctcattatccctgttcattctgaggctcctcattcacttgcagaaaattctcagcttcttcagttcagtgttcatgatgacagaatctctgctagactgtgaagagtactctgctttccatcactgtgccctacaactcactggctgctggttacagccgggaacagcatatctactgcaccgtgggacagattggccctatgtctgtgtcctcatgaagccacccatgctgccatcatgagacagttttactttaaaattatccatactcactttcaggtgagaggtgagtagtattcaaagctcacaaatttaaagaaaagctactggaatatgaaatctgggactaattacagtctcaattttggatggctcagtgattcttttccatcgcactatctgcgggattctcgttggcaatgaawtcattaatgttgagataactaaataacagtgctgaccagtgtatctctttggcccaggtctttgtcagggctgagccctcttgaaatcttgagttctgagtttgggtcaaactaatttgtgcctctgtaaagatcttgctttgagatgatgcttgtttttaaaacaattaaaggcagagctaatgtaatagatcttcataaaaaaaa

SEQ ID NO: 475560 - DNA, 627 bp, Homo sapiens
cagtacaggaggtttgtgcagaacaataacaggaatagggccttataagcagttgtaaagactccagggtttgtctttttaaaataagaacaatggaaaggagaaagaaaggggtgttttgaggtggctgccctaaatggagacatggaatcagtcttcactcactctagagagtgccatgtaaaacataccatgctctcacagaacgcacaggtatttttttggtaatcctagaaagcagactcggggaaaaaaatgcaagttattggagtggggacaggtttgggattcaaataaaatatttactaagcaccacagtgtacaagaagggctttctagcagagaagactgttcgataatagtgggctgggcagtagaaggagaataggcattaggaaagaaggcaaattgcaaaaatgactacctatgtgcttaggagaaaatgagaaggtcacacagaatgatgctcatggtctcatataactacaygccagaagctgtctagggaaacaaagcacactgtaaagcgagcaaattgatgactgcaattctataggtgccacagaatgctagctggattagaggccatggctatagcatggtgcagacaaatacgttggcaagggt

SEQ ID NO: 475561 - DNA, 500 bp, Homo sapiens
tgttcccagagtgaggctcctgtggaccatcctgtcactctagcctgctccagacctctccacccttgctcagtgcagggcatcaggccatggcrgatgggcgacctgatgcctcgttctgccccttccttttatgtttagacacagccagtgtccagcatacatgttccaatagaggtcacaagatggacagaacagattctgtggcagtaaggtaccaacgtgtaaacagcacctgcagccatgccaggcaggggttgagtcacacacccctaaacaaggaataaactgttccgactgccacagggtttcttttcctctagcagctaaataagcactattaacagttatagcacaccaccagacactgagtaactggcccccaagccctgttccaccagccataactagagctccaactggacgggagaccgatttcagtaactctctcgcgggaagagatcactcgccatgggctggctctggccggtttacagagg

SEQ ID NO: 475562 - DNA, 458 bp, Homo sapiens
tcaaagtccacatagaacctcttattgccttttgtatttttagtagagacagggtttcaccatgttggccaggctggtctcaaactcctgaccktgtgatccatctgcctcagcctcccaaagtgctgagattacaggcgtgagccaccgcacccggccatctctatttcttatacacaataatattataacaagaaagatataaatttgcttaatatgcagcttctgtttctgagttctgtagctgtcactcaataagataagaaagctactgatctcaccaaatcaaggacacaatactgttccctcaggtagcacaaattgcatgggctcaaaatatgggaaagacaatcaatattttatgaaatggtgtattttaaggctgacctacagataggaattttttttccaatccaagcaataaagctttgatgtggatgttcactccacatcctgtc

SEQ ID NO: 475563 - DNA, 458 bp, Homo sapiens
tcaaagtccacatagaacctcttattgccttttgtatttttagtagagacagggtttcaccatgttggccaggctggtctcaaactcctgaccgtgtgatccrtctgcctcagcctcccaaagtgctgagattacaggcgtgagccaccgcacccggccatctctatttcttatacacaataatattataacaagaaagatataaatttgcttaatatgcagcttctgtttctgagttctgtagctgtcactcaataagataagaaagctactgatctcaccaaatcaaggacacaatactgttccctcaggtagcacaaattgcatgggctcaaaatatgggaaagacaatcaatattttatgaaatggtgtattttaaggctgacctacagataggaattttttttccaatccaagcaataaagctttgatgtggatgttcactccacatcctgtc

SEQ ID NO: 475564 - DNA, 458 bp, Homo sapiens
tcaaagtccacatagaacctcttattgccttttgtatttttagtagagacagggtttcaccatgttggccaggctggtctcaaactcctgaccgtgtgatccatctgcctcagcctcccaaagtgctgagattacaggcgtgagccaccgcacccggccatctctatttcttatacacaataatattataacaagaaagatrtaaatttgcttaatatgcagcttctgtttctgagttctgtagctgtcactcaataagataagaaagctactgatctcaccaaatcaaggacacaatactgttccctcaggtagcacaaattgcatgggctcaaaatatgggaaagacaatcaatattttatgaaatggtgtattttaaggctgacctacagataggaattttttttccaatccaagcaataaagctttgatgtggatgttcactccacatcctgtc

SEQ ID NO: 475565 - DNA, 458 bp, Homo sapiens
tcaaagtccacatagaacctcttattgccttttgtatttttagtagagacagggtttcaccatgttggccaggctggtctcaaactcctgaccgtgtgatccatctgcctcagcctcccaaagtgctgagattacaggcgtgagccaccgcacccggccatctctatttcttatacacaataatattataacaagaaagatataaatttgcttaatatgcagcttctgtttctgagttctgtagctgtcactcaataagataagaaagctactgatctcaccaaatcaaggacacaatactgttccctcaggtagcacaaattgcatgggctcaaaatatgggaaagacaatcaatattttatgaaatggtgtattttaaggctgacctacagataggaattttttttccaatccaagcaataaagctttgatgtggakgttcactccacatcctgtc

SEQ ID NO: 475566 - DNA, 589 bp, Homo sapiens
cagaggagactcactcagctcctgccgtgctggggttttcgccctgtggggaacacagaacctaaacacccaatcacagcttcctgttcatctccaagcccaggcatcagtgctggggaggaggtggcaccagggctgtgagcagatgctgcctccccacaggaaccccaggagggaggatgtggccatcctgtcctgtcctttcaagagcttcactctgaggcctgacaggctggacaactgcccaggtcttacagctaggacatggcagggcaaggtccctttgctcagcagagctgccccccggacacctgagacttagggatcccccctaaaaagatctcacaagggcacccgggtgctgcctctttccaatggcacggagcggcaaggcctttgctttctcctccagcccggccaacgggggccgcacctgctcgggccttgcctacgacttccagctctgcagccgccaggactgccccgactccctggctgacttccgcgaggagcagtgccgccagtgggacctgtacttcgagcayggcgacgcccagcaccactggctgccccacgagcaccgggatgg

SEQ ID NO: 475567 - DNA, 589 bp, Homo sapiens
ctggaggctacagcaagcgtagggctgctttccctgcccacgttccatgttcaggccccaggtgaggaaaccctgggctggtgggtggggttgctcaggaaggggctacagtgatcccagcaggtggtggtggcagcctggagaggcagagggcagggggcaatgagggaggggtcacaaggtggctcctagttgatggtgacgcctgggtggaaagcatgggaagaagaaggagcaggtgggggtcatcccattggcagagccagagccagtcctagggcctgtggttcccgctgatgcctccctgtttctttcaggtcaatgaaatctaccatgacgagtccttgggtgcccacatcaacgtggtcctggtgcggatcatcctcctgagctatggaaaggtgagtgcactgtggccagccgggcctgcctccaccccctcggagtgaggggcctgggagtgaggcatgggcctccttggagagtgtgtgcgtttgccagaaccaccctgcctctccctggctcccctgaggttcctataagaaacaagawccctgctccctttcaccccttgttttaaaatgtggcc

SEQ ID NO: 475568 - DNA, 614 bp, Homo sapiens
ttttttttttttttttttttttgagatagagtcttactctgccacccaggctggagtgcagtggcgggatcacagctcacttaagtgatcctaagcacaagcaatcctcccacctcagcctcctgagtagctgggatcacaggcacatgccaccatacccagcttacccagctagttttttgtagagcccaggttttgccatattgcccaggccgatctggaactcctggagtcaagtgctgcacccaccttggcctcccaaagtgctgggtttatgagcatgagccaccgcacctggccctattttttctatttttaaagtgaaaggaatgatagcagtttgaagccatttctatagaacaatagaaatagaaaaataggatacaaaccaaaaatacaaataraggcaccctctttcacacactcagctcagtccagattgcaaagtgcttctccagccacaatcctacttgccttaaacatttttgtgaataagaaagggcagagttttttttttttctttaatcccaagcacagcctacaacagagcccttctttcagagacatgaatgtcgcctcattagcttgtacagtactggctgtacagcgcaatt

SEQ ID NO: 475569 - DNA, 628 bp, Homo sapiens
agaaactgctcattcagtcctcacatcagcctgcgtatcccacttcacaggtgtgaaaaccgaggcttggaggggcatgctgccctcagtagcacagtggttgggaggagctatgaatcgctgccaagaggtcgagccctagcacccacacacctaaccattaggcgtggttgcctggggtttccaaactgcctctggccacgcaaccttttcttcaggagacatcttatgtggatgccaatgcagatgttcaaagaggaggtttctgctgggggtgccccatatgcccctagcaccccagaggccactccctcactatggtgcctgcccggtcaytgccatcagtggtgaagtctctgcctcccttctctcaaggcatgtggctgctcagctccctggaagtctgaagacagtgtgccccagtcccctcttccttaggctcacagcccctgttccttcatgaccttcctcaccctctcagccacctgcccctgaatatggtacaatttgtccttgttcctgtgccaattccattccgtcttcttggcctgacaaactcctgctcataattcacacccaatgcatataccctcttctctgcactggcctccctgagaccatgttaaag

SEQ ID NO: 475570 - DNA, 628 bp, Homo sapiens
agaaactgctcattcagtcctcacatcagcctgcgtatcccacttcacaggtgtgaaaaccgaggcttggaggggcatgctgccctcagtagcacagtggttgggaggagctatgaatcgctgccaagaggtcgagccctagcacccacacacctaaccattaggcgtggttgcctggggtttccaaactgcctctggccacgcaaccttttcttcaggagacatcttatgtggatgccaatgcagatgttcaaagaggaggtttctgctgggggtgccccatatgcccctagcaccccagaggccactccctcactatggtgcctgcccggtcactgccatcagtggtgaagtctctgcctcccttctctcaaggcatgtggctgctcagctccctggaagtctgaagacagtgtgccccagtcccctcttccttaggctcacagcccctgttccttcatgaccttcctcaccctctcagccacctgcccctgaatatggtacaatktgtccttgttcctgtgccaattccattccgtcttcttggcctgacaaactcctgctcataattcacacccaatgcatataccctcttctctgcactggcctccctgagaccatgttaaag

SEQ ID NO: 475571 - DNA, 580 bp, Homo sapiens
tgggcaaaggaaaagtgtagttagcctgtgtggttaacccaaatcccmgtcctggcatcacaaatagagtataaaggggtgtgtttggagctgagagacaacaccttaataaccaggacactccctgcgagggatgcaaaagacatgaaagacactcttgacctgcaggaatgtgtgctctactgcacaagctaggaaatgaaaattaaaacaaacaaacaaaaaatcacctcacttcagctcctgccctgccagcccttttctatacctcagtgttttgtgtgtgatcttccctttgccagccacgcatctttctactttcaggctagtcccaacctcctcctgcccgttgctttcacagcaccataatgtgtaaacacgggtgggtttctaggtttattggcttaatgtctgctttccacactagactgcaagggatgtgcttgtttccttctgaattctagagtgtgctccagggcacacacagatcagcatgccagggcatacagtagcagatgctcattgaatatctgtatgataaatgaatgggggaggaagcctgctgtgtacagacagcaaa

SEQ ID NO: 475572 - DNA, 580 bp, Homo sapiens
tgggcaaaggaaaagtgtagttagcctgtgtggttaacccaaatccccgtcctggcatcacaaatagagtataaaggggtgtgtttggagctgagagacaacaccttaataaccaggacactccctgcgagggatgcaaaagacatgaaagacactcttgacctgcaggaatgtgtgctctactgcacaagctaggaaatgaaaattaaaacaaacaaacaaaaaatcacctcacttcagctcctgccctgccagcccttttctatacctcartgttttgtgtgtgatcttccctttgccagccacgcatctttctactttcaggctagtcccaacctcctcctgcccgttgctttcacagcaccataatgtgtaaacacgggtgggtttctaggtttattggcttaatgtctgctttccacactagactgcaagggatgtgcttgtttccttctgaattctagagtgtgctccagggcacacacagatcagcatgccagggcatacagtagcagatgctcattgaatatctgtatgataaatgaatgggggaggaagcctgctgtgtacagacagcaaa

SEQ ID NO: 475573 - DNA, 580 bp, Homo sapiens
tgggcaaaggaaaagtgtagttagcctgtgtggttaacccaaatccccgtcctggcatcacaaatagagtataaaggggtgtgtttggagctgagagacaacaccttaataaccaggacactccctgcgagggatgcaaaagacatgaaagacactcttgacctgcaggaatgtgtgctctactgcacaagctaggaaatgaaaattaaaacaaacaaacaaaaaatcacctcacttcagctcctgccctgccagcccttttctatacctcagtgttttgtgtgtgatcttccctttgccagccacgcatctttctactttcaggctagtcccaacctcctcctgcccgttgctttcacrgcaccataatgtgtaaacacgggtgggtttctaggtttattggcttaatgtctgctttccacactagactgcaagggatgtgcttgtttccttctgaattctagagtgtgctccagggcacacacagatcagcatgccagggcatacagtagcagatgctcattgaatatctgtatgataaatgaatgggggaggaagcctgctgtgtacagacagcaaa

SEQ ID NO: 475574 - DNA, 584 bp, Homo sapiens
agaaagggtaaccttccatcacagggatttactcataatcaagatctaaaagactttctttttaaaatgcatatatttttgggagaagaataaatctcagacaactcagtgtgaattagtttatcacagtacttgggcccaacagagagggaaacctggaaactcacattagtgatcaatgcctaacaattcgcagctatgaagaagaagaagaggaagaagaagaagaagaagaggaagaggaagaggaagaggagaaagaggaataggaagaagaagaagaagaagaggaggaggaagaagaggagkaagaggaggatgaggaggaggaagaggaacttgctggattaatgaaccgtgagcacctatcacatgtcatgtgtgatagtaagtgctttacaaacattttatcttattctaataacactctaagtcagggcactattgacatttgggctgaatcattccttgtggggccatcctctgcactgtaggatgtatggcaacatctgtggcctctatccatttattgccattagtacctcccctcctcagttgaggctactaaaaatgtctccagatat

SEQ ID NO: 475575 - DNA, 638 bp, Homo sapiens
ttacaaagtaaatgttagacttatgaaatagattttccttacatgttgttatttttcrgccaaatagccaggcaagcaggttacaagataacctatatagtgctgacatagtgtagtatatagcttaaaattagcaacctacgtctaaaatactcatttctctgaatgagtatcagagatacagaccattctctttaaaaggatataaagctactgacaacagttctctatgaagaagagagaaatttggtggaattaggccacgaaccatggttgtaagaacagtgtcagcacataattttgaggacgagttgatgccttttgaaaatgtgcccattaaaacctatctataatttttatgggaaattattgccactgataaacaaagctttctaatggaattgttgatgagcttaacaaccatatgtgggcacaaactctactactttaatggaaatagtcaatggcatgaccaggacagaaccacttagtagggaaattggaaatttaattttgatcagatgaacaaaaaatgaagaaaaatgcttgaagtggtagcagaaaaaacaccagcgattaaaaacatttggaacctttgcttacccttcaaaggcatttgttgccatggtttttcaaga

SEQ ID NO: 475576 - DNA, 638 bp, Homo sapiens
ttacaaagtaaatgttagacttatgaaatagattttccttacatgttgttatttttcggccaaatagccaggcaagcaggttacaagataacctatatagtgctgacatagtgtagtatatagcttaaaattagcaacctacgtctaaaatactcatttctctgaatgagtatcagagatacagaccattctctttaaaaggatataaagctactgacaacagttctctatgaaraagagagaaatttggtggaattaggccacgaaccatggttgtaagaacagtgtcagcacataattttgaggacgagttgatgccttttgaaaatgtgcccattaaaacctatctataatttttatgggaaattattgccactgataaacaaagctttctaatggaattgttgatgagcttaacaaccatatgtgggcacaaactctactactttaatggaaatagtcaatggcatgaccaggacagaaccacttagtagggaaattggaaatttaattttgatcagatgaacaaaaaatgaagaaaaatgcttgaagtggtagcagaaaaaacaccagcgattaaaaacatttggaacctttgcttacccttcaaaggcatttgttgccatggtttttcaaga

SEQ ID NO: 475577 - DNA, 287 bp, Homo sapiens
gtgcggctctgctgatgaccccttgaaggtccaagctgccgctaaaggttgacatccttacagtggggccatgcagagtgactgtctgcttgcagtcctgaaaggaaacccacatttaaaattcagatttgagaggatctcagatggaaaatgctsgtgcagtgagtggtgtgatcaggaaaacaggaggccaggaggcctgggagctgtggattgaatgctgcctgtggttgctgtatcagtcttgcttctggcaccactacagggagccgacctgtcatctccac

SEQ ID NO: 475578 - DNA, 556 bp, Homo sapiens
gactcctgggccacgagagggggcctgaggcttgaggctctgaggagtcataagcaggtatctggataaagatggagccrccagccctgggctggcacctggagagaatgtcgtggcttgaaggaaggcgtctttcctaaccattaggtacatctgacagtgaaatgagtggacattggagacagccttccttagattctgacggacaggttcccctggcttgcctttggccctttgaaaggactgtgtcttccacttttttttttttttttttttgagacggagtcttgcgctgtcatccaggagtgcagtggcatgatctcagctcactgcaacctccacctcctgggttcaagcaattctcctgcttcagcctcctgagaaggtgggactacaggcatgcgccaccacacccagctaatttttgtatttttagcagagacggggtttcaccatgttggccaggctgggcttgaactcctgacctcaggtgatctgcctgcttaggcctccccaaatgctgggattacaggcgtgagccaccatgcctgcccgt

SEQ ID NO: 475579 - DNA, 556 bp, Homo sapiens
gactcctgggccacgagagggggcctgaggcttgaggctctgaggagtcataagcaggtatctggataaagatggagccgccagccctgggctggcacctggagagaatgtcgtggcttgaaggaaggcgtctttcctaaccattaggtacatctgacagtgaaatgagtggacattggagacagccttccttagattctgacggacaggttcccctggcttgcctttggccctttgaaaggactgtgtcttccacttttttttttttttttttttgagacggagtcttgcgctgtcatccaggagtgcagtggcatgatctcagctcactgcaacctccacctcctgggttcaagcaattctcctgcttcagcctcctgagaaggtgggactacaggcatgcgccaccacacccagctaatttttgtatttttagcagagacggggtttcaccatgttggccaggctgggctygaactcctgacctcaggtgatctgcctgcttaggcctccccaaatgctgggattacaggcgtgagccaccatgcctgcccgt

SEQ ID NO: 475580 - DNA, 480 bp, Homo sapiens
tgtaaactcagctcaggggacactttttcagccttccctggccctctcatctttcttttattattatcttctttcttttaatattatcttctaagtatttcttgtgttacttatctccatttgtaatgatatgttcattcgtgggaattgttggttaatatctttttggcccacccaaccttgagctccatgagagcagagactgtgtccctctttmttcaccattgaatccccaggcctagcacagtaacctggcacattgttactattcagtaaatatttgtggaaagaatcaatgaagtccttttgcttcttagaattaacccaaaatgttgccttttttgcataattggcttactagtacatttctttaaatttgcagaagcagtgtattttcatgaacataaaaagttattttttgaggggtttctaggctttttctggagttactggagaacaaattgctgttggggtttttct

SEQ ID NO: 475581 - DNA, 515 bp, Homo sapiens
catatatatatgaaaactcaaaaggaggctttaattgacagaataaaatgtctgtaaactttgaaatagattgatggagattatgcaagaatcttcataagatcttcattctgttttctctatgaagaaaacataaattatatttttatgaaattatgttttcataaatttctacgaagaaaatagaatgaagaaaaataaaagaacctcagagaaatatacagtatctttaagctcaccacatttgtgtaatggtagtaccaagagtgagacaaagagaaaggagcagaaaaatatattaaagaaataaagctgaaaacgtctgaaatttgttgagaagcagtaatctaaacatttaagaaactctataagctccaagtaggataaatacaaagagatccacacccagacrcagcacactaaaaatcctgaaagccaataataaaaagtaagtattgaacacagcaagagaagatgccttgtcacatgtaagaggggcccaaaaagatcagcag

SEQ ID NO: 475582 - DNA, 459 bp, Homo sapiens
aaaatgctattttacaaagcaggcaggaatccttggattcattagcttgtgcacatagaaataactctaaaaatggtttaggtaaactcccgaataaaaatcaatatgtttgggatataaagctcgcatcaagaacatacacgtctactttggccccagcgagtcttgcccctgccagcctgtcctataactatggagaacagaaaatggggaagccagcttcagaaaatcccgtaggataaggctgtgtctttaatttaggacatttataaacaccttttaaaaatttrtgtttaactgacaaacaataactgtacatatttatggggcacatgtgatatttgatacatgtatatgacgtgtaatgatgaaatcaattttatcatttctttgtgttgggcacattcaaaattctcccttctaattactatgaagtaaacaataaattattgttaacta

SEQ ID NO: 475583 - DNA, 447 bp, Homo sapiens
tacagctggagacagacagtgccttggtaaagagagccaagccctcactccttgtactcacaggaacacatagtgagactgtagaagaagagtcatttttatatgaaacatagctcttattctgtatatattttgtgagcgaaatatagcatttattaacaccatacaagcagagcagtggggagtgcttgagtcacaagcttcagaaggcctcttccttctagcaccttctccttagaccagctaacctgccatgagactgttgtgtagccatcttcacctcctcatcttcagggaaggggatgaaaatatctgtgcactgcaaatgttaactatayatacacacacacacacacacacacacacgtacagtaggccctccataacctgaggttccacatctgcatattttaccaactctggtccctgctactcacgaggctactt

SEQ ID NO: 475584 - DNA, 447 bp, Homo sapiens
tacagctggagacagacagtgccttggtaaagagagccaagccctcactccttgtactcacaggaacacatagtgagactgtagaagaagagtcatttttatatgaaacatagctcttattctgtatatattttgtgagcgaaatatagcatttattaacaccatacaagcagagcagtggggagtgcttgagtcacaagcttcagaaggcctcttccttctagcaccttctccttagaccagctaacctgccatgagactgttgtgtagccatcttcacctcctcatcttcagggaaggggatgaaaatatctgtgcactgcaaatgttaactatatayacacacacacacacacacacacacacgtacagtaggccctccataacctgaggttccacatctgcatattttaccaactctggtccctgctactcacgaggctactt

SEQ ID NO: 475585 - DNA, 304 bp, Homo sapiens
gacctccagcaagtcgcttcacttctctgagctgttttcagacgaccccttggaagatcgtggacttaagtaaagaatatgagtagagtgctcagctcagtgcaaaaattaaaaaaaaaaaagtgtcaggagccttatccgtccttggatcttaacagtgaatgagtttcagtgtttytttccaggggccctgctggccgagcccctttccttccctggttccttctctctccctcctctactgcctcctccctccaggctctcggtcgctccagcaaagttcccaacttagtcgacatgacgc

SEQ ID NO: 475586 - DNA, 400 bp, Homo sapiens
taatttgtggtattctttctgcaggaagagaatgaaaagtattttttccttcctctataccaagtctttgtattcagagtctggcctcctgggccttgaagggtatttaatgcgttttggtcccaggaaagggaatggatgttgggaagcatgctaaaagcaagtcccaacccaggctctttcctgagacactcccacagggagtgcaatgggtaagcttctcaagcctagaggggtctgctttcctgagactggggtagggaatgagggaggcagtggtgtctggcctccccatagcatttacattgtattaggtgttataagtaccctagayacgatttaaatgcagtagtgtctgatcatgtagctaaccatgtgagtaacaaaaacctgttactcc

SEQ ID NO: 475587 - DNA, 566 bp, Homo sapiens
tgtgtgcaggattgattaaaataacagagatgctgaaaggatttaccaaggaattgtttagtgatgtccagaagcaatagactgagaataaaggaacctgggttgtttgtgccagacagccttggataatgttgacattgtttgttatggaaataatactttcacagaaatcatcccaaaggtcacacagctcagaaaaaggaaaatagtaaacaataataatgagaaaaactcaacccagagtgaatacacttaattaaattatgtatataaagaaaaacacagataaaggcatttgtgactctctgtaacgggttctctgctaaaataaaatyacctacaaatgttttaaaattattggctgtggttaaagttttgttttgaacctgctaggaagtttttattgttgttggtagggcttcctgtttaagaaaagggaaaagtctgggaccctctaccaatatgtttcattttatctggaggcacagccatgaaaatccatatactaaagaggagcgaaaaggcatctttagccatgagaaagaactaattttcagtggggaaaa

SEQ ID NO: 475588 - DNA, 624 bp, Homo sapiens
tgcctcagcccctccagatgtggggcctggagtttatcttggctgcccacagacttggtatctgttgtgcctcgcataagccctgggtgccaacttagcctccaggtcacaccacttgtaatctttttctcatttcccccttcctcataccctcagacatactgacccatggacaggtctgagctgctgccacagattacctgtctgctcttacattcatgctttgaaaatcacctatttattggggctcccaggattttaagaactggcagactccttattcctggcccaggatgggttctggccatatatgagcgcattgcccataatgatgttgaagattatgtgaatcttctactactgggccacatccattaaactaatctccttcatacttctagcatagcctggtctctgcatgaaactgccatgccacatgctctggacactgtgtgtaggaccactcagctctgcctagagaaaccaactatttccctactcccctggctcagattccttcctttccccagcagacccagcatatcctgtgcttgagctgacaattgtaaawgtatcatttactgagcacttgctatgtgccagacccttgaataagtgctttgt

SEQ ID NO: 475589 - DNA, 656 bp, Homo sapiens
ttgagaaccagtagggggactagaatacacaggagatggagatgcttttacttctctataatttacatctttagtgttaccttttgaaaactgtacttttctcatccctaatctatgactcacttccatttactcaaagccataatatagggcaggtaattctctcactggatttaaatactggatatcagtttcctctcagtaaacaagcctcctaatcttctgacttagtgcttgcaagtattaaccatttactgatagagatttatgatagcatgtttgtcttacttggctttctggttacaacctaattccaatttctattaaattagtctaagtggcaagattgwatggtggcaatctgtgaaagtgattttacttacagtgttgaattcttctctaacctgagcaaaatgctgcccttaactccttgccattcaaggaggaaaatgtgtatgctgatgaggttggctgggggaggaaagggaaaggagtactagagagcatagatagatgaagattaatcattatctctggcatttatcattatttgtcattaataattatctctgacattaagcaaatatctaacaaagaaatagaggtattttcagagctggcccttggattctgtagtggtacatcattctggcttt

SEQ ID NO: 475590 - DNA, 405 bp, Homo sapiens
tcctctaatatgatcctctttatcctacaggcagttttctgttttctaacttttaacttaaggacttccacattcaccaaccttcatgctagtcagctctgcctatttttgatacagagtatttgaatttctccatggttattttagtctcaggcattaaatgttgtttttcttactctgtataatatatggcatttatggttattatttttaaaatttactgggctgtaatgagcccatctttttgtgataagctcaaaatcagtaagaaagtccaaagaactagtaaaagatattgaatgacaaaaatggaaataggcaaatttaatttactgaaagastcatacatttccatcatgagtctgtactgacactattaacctctgcagtcccctttgctaagct

SEQ ID NO: 475591 - DNA, 630 bp, Homo sapiens
ggaatggggaaggaattctgcatttcttccaaatatttttaggaaattctacatgaggaaagggaaatagccaagtagctattgtgtgggaccagctccttctttttcctctatgttttggcctgaattaaactcttactttgtccttctagtatttgtcttgagtttcaggaaactgaagtactgagatttttttaattaatgttattttttaaaatgtcatgtaacatttaatcagttgtaaagattaaagttatacttggtacaaacgtacttctaattttgtrtgtttcatactgtactataattccttatttctgagattatctttctttttttttttgttttgagatgaggtctcactctgttgtctaggctggagtgtggtgatgcaatcctatctcactgtagccacaacatcctgggctcaggtgatcctctcacctcagcctcctgagtagctgagactataggcatccaccaccatactcggttaattttttaaactttttgtagagatggggctttgccacgttgcccaggctggtcttgaactcctgagctcaagtattctgcctgcctcagcctcccaaagtgctgggattacaggccgagccactgaacccagcc

SEQ ID NO: 475592 - DNA, 630 bp, Homo sapiens
ggaatggggaaggaattctgcatttcttccaaatatttttaggaaattctacatgaggaaagggaaatagccaagtagctattgtgtgggaccagctccttctttttcctctatgttttggcctgaattaaactcttactttgtccttctagtatttgtcttgagtttcaggaaactgaagtactgagatttttttaattaatgttattttttaaaatgtcatgtaacatttaatcagttgtaaagattaaagttatacttggtacaaacgtacttctaattttgtgtgtttcatactgtactataattccttatttctgagattatctttctttttttttttgttttgagatgaggtctcactctgttgtctaggctggagtgtggtgatgcaatcctatctcactgtagccacaacatcctgggctcaggtgatcctctcacctcagcctcctgagtagctgrgactataggcatccaccaccatactcggttaattttttaaactttttgtagagatggggctttgccacgttgcccaggctggtcttgaactcctgagctcaagtattctgcctgcctcagcctcccaaagtgctgggattacaggccgagccactgaacccagcc

SEQ ID NO: 475593 - DNA, 496 bp, Homo sapiens
aagataatgtattgaaaacattgaatactaactagtttctaactagaaaaatttttttattgttaagatttcttttttgtcattaattaggcttatagtgttctgtgaagtctttaggaaaattgagttgcctcctggaactctaacttgacctaaagagatgacttgaaaatatagtgtatcttcagagtacttgccagcaggataagggggattttaaagtgtttcgatggaacctttatggagggcctggagtgtttatttctgctggatgagggatagatacatcagctctctaagccatgcatgtttgatggagtttataatctagttggcacaataacaatgacayttgcaattcaattatattgtgatccagggtaaggttactggcactggggagtttgtgggcttttgatcaaaggagtgacagactcatgatggtatttaagaaaaattagtttgtcaagagcaagattaggaaaggaacagagga

SEQ ID NO: 475594 - DNA, 546 bp, Homo sapiens
tgaaatgggaagagagtgggcttcaggagagatgtctctgggaaaattaaaatgacagagtattgatgtttttggwagaccctatggaaaacagcattcagtggggttttgtaatccttggagagtttggaaataattcactatagttggatagaaaaccgaagataaaaatgaagcaattaattctaagaacaaaacattataccagaaaggaaatgtagtcatagtacacattcatggcttagctatattagtaatcataaatgatttaatctgaaatgggaatatctataacatacagggaggataaggaaagtgaagagagagagaaggaataaggtggcatcaggaggccaagtcctcttatctgtaataagttaacagataatgtttgaaataataaatgtagaaataatgcatataaacatactatttaggaaaaatggaaacagaagaaacagctaacagagttagggagaggaatttagaagactgtttctcactatagtccttgtaaaaatgatttggctttttaaaccataaact

SEQ ID NO: 475595 - DNA, 546 bp, Homo sapiens
tgaaatgggaagagagtgggcttcaggagagatgtctctgggaaaattaaaatgacagagtattgatgtttttggaagaccctatggaaaacagcattcagtggggttttgtaatccttggagagtttggaaataattcactatagttggatagaaaaccraagataaaaatgaagcaattaattctaagaacaaaacattataccagaaaggaaatgtagtcatagtacacattcatggcttagctatattagtaatcataaatgatttaatctgaaatgggaatatctataacatacagggaggataaggaaagtgaagagagagagaaggaataaggtggcatcaggaggccaagtcctcttatctgtaataagttaacagataatgtttgaaataataaatgtagaaataatgcatataaacatactatttaggaaaaatggaaacagaagaaacagctaacagagttagggagaggaatttagaagactgtttctcactatagtccttgtaaaaatgatttggctttttaaaccataaact

SEQ ID NO: 475596 - DNA, 573 bp, Homo sapiens
tcttaaatttggaaggctcatatcttctataggtcaagcctatgaaatttttcagacttcaaaattaaagttatttctttgcttctcgattatcaattaatttttacttgacatattttcaaccagagtatagctaacttctgccataaaagcctgctagtattattaaccaacatgaattaaacacatatttgttgaacatctactcactactcagtaggctgctcgtggtaggtggtgcaaagaacaagacaactacaattaaatttcaggccaaatctagcagaggattatttcagcctggtccccctaggaaactctgaagttattcttaagcccagtgttacaccmatctggattaagggtgctggccttttataatcttccaggccacacacgttgacaaacaatttcccttggaggaaaataattcccaagaacttctgattggggtgcagagtgactccaataacttgagggctgaccactaaagaaaagtcacaggtgaaggttattgaagacaaatccacattaaactggccaaaaaaaaaaaaaaaaaaaaaaaaaaaggtg

SEQ ID NO: 475597 - DNA, 558 bp, Homo sapiens
cataatagtggaggattatcaaacaacagcagcgttaatttaaaatgttgatattttgtccatcatattgcattaatgtttatcttaaaaaatattgtactaaattattatcttgacttttcagtgttttggtacccccttaaattttgtgcttctggttaaatcttttgagagagtgcatggagttgtttcattttagtatctacttaatgtttttatgtctaagtcacctatgtattcaggttcaccagcgattcaaaatcttgaggaccyattgagttctttcttttataaatgaagaaactgaccacaatgggaaggttgagaccacaatttcttacttgctgtgatttctgctgaccatttaggctttcctgtggaagaaggaatcatttaactcaagcattcttgttgcctttgatatcaaagttcttaagaataaagaatgtcattggagcatattgtgttcattattagaaccattaatgcgtgtcgatcatccctagatcacttcctttgaatgtctgccaggtttttcgcagaggtaaaaatgtaaat

SEQ ID NO: 475598 - DNA, 575 bp, Homo sapiens
cacgcctgtaatcccagcgctttggaaggccaaggcaggcggatcacgaggtcaggagatcaagaccatcctggctaacacagtgaaaccccctctctactaaaaatacaaaaaaattagccaggcgtggtggcgggtgcctgtagtcccagctactyaggaggctgaggcaggagaatggcgtgacccctggagacggagcttgcagtgagccgagaccgtgccactgcactccagcctgggtgagagcgagactctgtctcaaaaaaaaaaaaattgtaaatatatttttgtatcaattagatttatgtagcattttccttccatataataaacatttatattgaaaatatgcatggactcattctgtataacttagaaagattttcctccttgctttacatttttgtcaagactttgtgtgtagagcatataaatgtgtgcttcctatttgttgtcatttatgtattccattgccaaaaaacattaacaagattttctttcttttttttttgagatggagtcttgctctgttgccaatctggagggcagtggcatgatctctgctcactgca

SEQ ID NO: 475599 - DNA, 426 bp, Homo sapiens
ctaacttgaatcataatggttcatattttgactagttcataccctatcaattagckacttatgacttgaacataccttttctcagctgcatgtgacagcctaaaaccccactgagcatgctgcttggcatgccttactcctctgaaatcatctactttctaaaaaccagaaaatgagtttgcttgtgatttaaatttcaaaaaatagtttgtagaaaacacaaaaagaatcaactgtttaaagtcttatccttttcttcactctacaacagctacttctacaaaaaagagtatgtggacactttctaagaactcagaaacaagaaaaccataatcagaggttgcatgaatatatgtgcacacatatgtacagacttaatctctacatcccccaagacagatttaaacaggtaatcccaaaattcta

SEQ ID NO: 475600 - DNA, 562 bp, Homo sapiens
gtgacattacttttcaaagcatctttttctcatttcagtctcacaatatccagtgaacaaggcagaacaaatattaatccrtaaagttaacaacaaatatttattctgaaaggtagcaagtgagagacaacaaaagttcccaagatcctcaagtaacaaaacctaattaagaaaaagagatacatgtatttgacaaaaaaaaaaaaaaaaaagtaacaatacagtccataaatgatacggccaaagaagaaaaatttcaaaggaaacactaaacaaaatctcaacatatataatagagaaagcagcctggaggttggatggggagggagtggagctcttggtcttccctacgctcacttagtacggctgaagcacagcttcaaacccccaggcttccttagacccacactgaaaaccccggtacagtttagcaagtgtcacagagtcaggggcaaaacaaggatcactggagaaggagtggaagaggaggcttcatgaacaggagggaatgaagtccaatttttaagtaagggtgagatttgaataagaggaaagaaagaag

SEQ ID NO: 475601 - DNA, 635 bp, Homo sapiens
catttattcttacacacaaaattgtcttttttccccctattcttttttcatccctgcaagaagcatacattttaaggattgatgtttatgtgtttgcaggtcttgatttaaactcaggaccaaataataatccattaaaaaaaatttactaagttaaccggtttgttcactcagatactacagcaggaaataaaatgttccctcaatagagctatctgttggccaatggccagtctctggcaagactaaaacatgctgtgtttataaataatatttattatagagttattaaaaaaactaaagcctttccttataatgataataatgtttgtcaggcattattttttaaaatctctgtgttctgaatatataattaaaaggataggaacaaatagtgacttttttaattagaaaaatatttgctgtgaaaaagcaattgttctttgggtttcactgtaaatattttgttaattgaaaaaatctaatatacataaggaaaacaaataacatttactagaataaataaaaattatagatggactagaaagtcatcatwtaaactaaaaaagtttcatctctttattttaacaaacttattcaaattatcccagtgaaattattttcattaatttgaa

SEQ ID NO: 475602 - DNA, 555 bp, Homo sapiens
ctggcagtggtacgaaggaaaacactggattttaagttagaagaccttcaagctatttgatgagaagaaaatcatttaacttctctgtgcttgtatttgtatctaattgataggattcttttgaggagtcagtgtgacactgcatgtgacagtgtgttgctggtgaaagtctccttctttaattattattaaagacaatgtttattagcataagagaaaaaatagtggcagagctaagattgaaatgtaatattcttcagtgtcatttctgtcaagcaataagctataattcctttttcaataaacacaaaatggtccttatgataaaggaaagtaaaggtcagtcaygcaagctcatggggagatttttttctctccttcaaggagagaagtggaaagaactagcatggaaacttttttgaatgtgatcttaattataatcagtatccttaacaaataacttttaaaaacaaatccataaactgagattagaattgtctttaaaatatcagttatttaataaactgcatgtctgaaagtggatttcaagtgata

SEQ ID NO: 475603 - DNA, 555 bp, Homo sapiens
ctggcagtggtacgaaggaaaacactggattttaagttagaagaccttcaagctatttgatgagaagaaaatcatttaacttctctgtgcttgtatttgtatctaattgataggattcttttgaggagtcagtgtgacactgcatgtgacagtgtgttgctggtgaaagtctccttctttaattattattaaagacaatgtttattagcataagagaaaaaatagtggcagagctaagattgaaatgtaatattcttcagtgtcatttctgtcaagcaataagctataattcctttttcaataaacacaaaatggtccttatgataaaggaaagtaaaggtcagtcacgcaagctcatggggagatttttttctctccttcaaggagagargtggaaagaactagcatggaaacttttttgaatgtgatcttaattataatcagtatccttaacaaataacttttaaaaacaaatccataaactgagattagaattgtctttaaaatatcagttatttaataaactgcatgtctgaaagtggatttcaagtgata

SEQ ID NO: 475604 - DNA, 443 bp, Homo sapiens
tgctggctttgaaggtggaaaagagccatgaaccaaggaatgtgggctgcctttacaaactggaaaagtcaaaaaacaaaaaccaaattggattttcccctagagctccagaaggaacatggtcatgctgacgccttgaaaaataataataaatttgcactgttttaagccactaagtttgtggtaatgtgttacatcagtgactggaaactaataaaggtaactgcggtgcctagttgaaaaccmctgttctgaattcttatgttgtgaaacctatcttcagagtttatagtatagtttgtatgcatgcaactttttcaatggctgatctgtgatctgagaagcaacaaactcagctttctccgcagtattttctcattgaacttaaactccaactattatagacactaataaatttgaggtggtctctcaaattgtcagaa

SEQ ID NO: 475605 - DNA, 622 bp, Homo sapiens
agcaaaggatagttctggctaagactaagctttccttactaatgccaataaaaagatgagagaaatagtctcaccaaagataacataatcttccagtttgcktgtcaggactctctactaactcctgctagaataggctgtcaatattcgactttcagattttacttatttttcttttaagtcaaccaatccctttcttataaagatactgcttctttaaataaaatcatattaaattttaatggccaaggagtcaatctgcactttaagattatttctttattgtgttctgatacacaatttaccaaaaagcaatcttaatgctcttatttacaaattgttggcggaagagatgagacatacactataatacagccctcatgtaccagcaaaaacaacctaaatagtcaattttatcaacagaactcaccatactccttctaatataggtgatggcttttttcatatccatgcctgaccagttgttgagcatatagcaaatacaggaagcacagtacacaaatcgcatgtcattttcactgccttcaggtactgcacaaaaactgaaaataataacaacaatatgattttctattaacactggactctgatttttttgcat

SEQ ID NO: 475606 - DNA, 469 bp, Homo sapiens
ttaaatcaaacatagatataaagataaaacacgtaatacaatactacatggsgttaagatcttttaaaattatataattagcatttatagttacttttatacaccatatccaaagacatttaaaagaacagtctttgctgactgacaggaaatgaatcgatacataaaagagcaggggtccctagcacaaagcccatgaagaggcccaggcagatccatgaactatttgaaattgtgcacaaaatattccacctatatacatatacatatttactggtaaaaacccacagcttttatcagattttcaaaagaatatgtgatgtgaccacaaaatttttaacaacactacaatagaagctttcccacgtagtattgttttatctggaaaaattcagtagggaagatcattagttaattgagtgcaatctatagaagagtgaaaaattcattcatagacctataatttagt

SEQ ID NO: 475607 - DNA, 616 bp, Homo sapiens
ctgggatctataaaatataagagaaaggaaatgtctagtgatgggtgtaatctggagcacagaaacattttatagcttgttcatgttggaaggaaaatcaactaacattaggctgttactaggcattaagactgcagataccaaaccagtttgcctactacagagaaataccaggaagtggatgtcccaccctgatttgggcatggaagcaggccatgttgagagactgcttagggtattacaggtcagtctgaggaaagtgcctggtggaaaccttggtggaatcagaagagaaagcaaaaaagtgcatgtagttggggaggtttgtttttgtatacatatgcaaataaatatgcaaatgtgcatataaatatgcaagcctgtgcttgacctggctgccagtcagtgtaaatgaatgagaggtaataacttcttgattttttttttctcttcctatcaatatttctgcaaggtttggttgttaatawtggacgcaggagtattcactcccttggcagaggttggagctatagctgttagacacctgtcacagaattgctgatcttcttaaaggctgctgtggggagactacctgaagaagggtataaagagtggg

SEQ ID NO: 475608 - DNA, 402 bp, Homo sapiens
cgaacctttaaagtcattcacattctataaaaatctttaggcgctctatatgtagtatcagtggtttttaacttgggaagggagggggcgatgmctgggcataaggagcttttagcgtgggaggaaaagctattcatgtggttctaatatatggcttccatccctattatctgagaagtgcctagttagataaaaaaatccagacaaatcagaattaggttaaatcaaaattatattttaggatattagaccaataaattttaaaaattatgttttagagatttccataaaccaaaaatacagaattatatatttaaaacttttaaaatagcatttatgctatttaaatcccaacttactagctctgctcacccaaatttcttccttccatgtttttctcta

SEQ ID NO: 475609 - DNA, 388 bp, Homo sapiens
gatatcattactatataacccaggaatcataaaagttgccacctggatcagtagaaacaataaaaacatatatccctgtctataaagtgccctaagctcttcagaggagagaacgatgggtttggttcaaggtttctataaagaagatggtatattagccagcacagtagaatcccacaaatacgacaggactttactacatggtgtatactttttttaaaaaaataagctttttaatttagaaaagttttagatttacagaaaaattgcaaatatagtacagagttcccaactattctgcacccgtttcccctttcattgacatcttacattagcatggtaaatttgccacaatkaatgagccaatactgatgcattattattaact

SEQ ID NO: 475610 - DNA, 629 bp, Homo sapiens
gggcatcataggatgggtttcagagtttcccaactaagtactaagaaggaggtcaaactgcagtgtgttatgcaccataagaggtctttagtatcattcattatgcaagaacgaaactaagatacaccacattactcatctaagatttagatttgagacattttctagtgcttctatatttctttacttacattttcaacaaagaacactgaacctcatctatactttttcaagacagttggcatgtgtgaagttttatgtatccacttgactgggccatgggtgcccagatatttgctcaagcactactctgggtgtttttgtgagggtgcttttagatgagattcagtttcaatctgtaggctcagtaaagcagagtttcctctgtaatgtgggcggacttctttcaatcacagttgaagaaccgagtaggaaaaagaaaaggtcaaaccctttgcgaagtaagaagattcttcctgcctgccttcagacagagacattrccttctttccctgccattgaacaattagaacactggttctccacagtctctagcctactggccttcagaccagaaccatagtatcggctctcctgggtctccaaggttttttctcacccggcagatc

SEQ ID NO: 475611 - DNA, 598 bp, Homo sapiens
gggtagccaaaataaactgcttgtttccatggtttcttcttcagccctgtgacctggcctcatgggagtgggagactgggagtggataattgagcatgtcatgattggagagagaggaaattgaaaggactccatggagaaaacagaccctatggagggcttgacggagggtcaggaggactcctctacacccttaatgtagaagaaacatgcctgcttggtaaggggtggaacaaatgtggccaaagaatcatactgggggaaaaaaaagtacaagcagaattttacttttaaaaacatcttaaaaattgtaagttgacaagttatatttatagggtacaaagygatatcatgatttacaaacacaatcagaattaaatcaagcttaacatatcacctcaaatactttgagcacatttgaaatttacttagcagttttgaaacatactcttttcaccacgttgcacaatatatcccaaagaaaaacttgtttctcttgcgaatagaggctttgtaccctttgaccatcatcttcccatttccacacccctgcccccaaaagatgtttgatgactccaacccactttctgtccctaca

SEQ ID NO: 475612 - DNA, 500 bp, Homo sapiens
ccgtcttgatgctgtctgctgcacatcaggcactgctggaagtactcaggggcactatacatagcccagtgagcagggcctcaggacccccaggtttatcccagcctggtcagactcagtgcaggtggccctgcacatccagaagtgtaggatgcagcaaaagctgggatttgagggcaaatcatagccttgaaaaacactagaatagagaaaggtgtcctttcytccaggaagccttccctgatgccatccccacagtggcacagagtgaagggctacttccctgggccctatagtgggcacctgttgagtgctgtgtcatgcagaggcttggcatgccccagctcttggctgagcgttccttctcccactggattgtgagcttgctcaacagtgggtcatgctcatcacactggctgcaagggccagcagccagctaataaatcttggaatgaatgaatgggaccaaatggtttctgcagcccctttcagctccagcc

SEQ ID NO: 475613 - DNA, 453 bp, Homo sapiens
atccaaggatgtgcacacccagaggccctgggctgaatgatcgctagactgtgttgacttcttgttagaaaaatctgaccagtctgggtttcccttgtaacaagaagtgggtgtcagcaggcccggctggcagggctcctgggggaagtcatcgcagacctgggcctgtgcagttcccacacccccgtgctcagggagtgcctttcacctgccattccgcatcctgccttctcggcaagaggaggggagagcagaggcaggtgccagctgggcctgcacctgtgcgtcagggacacaggcgctctccgggaacccacctggcatcacttccataggctgtcattggctggaagtgggtcacgtggccactcctggtatttttagctgggcccgttgttgttttaaataaaactggggttctcttastgaggaagaagggaaggggctgagggg

SEQ ID NO: 475614 - DNA, 507 bp, Homo sapiens
gtctctggagaggaaacaggactggagacccagttcttggccccaagcctgctgtagacagagaggctcccccacgggggctgtgtctggacagggtgggccgaccctgtcccacaaccatgtccctctgctacaggctcccctgggggcagcctcaggcgaggggccgttgccatgggaattgtgtattggagtctattttgagaccatcttgtagtgtgatttttaatatggcctggtgttggctgttggtttttctacatttgcccaagtgaatggattttgactgaccagaagggttgagctgattttgtcttcagatgtggwgttacccagaacattgtctgagcagttaattacaggttacaggggccccagagcaccctcttaaagactgggcttagcctgccaccacgaagtgtggatgggaggcaactagacacagtccaaggaaggaatcgttgtgccagccccgaggccctcccctggtcctgctcctgcctctgg

SEQ ID NO: 475615 - DNA, 612 bp, Homo sapiens
tggaacccacgcaggtgccccggggcttgggaccccttctgcctgtggcccttccccgcccgcacaccctaggatgtaagtgacccccaaacactccactcctcaagctccttcccatgcggctcctgtctctggagaggaaacaggactggagacccagttcttggccccaagcctgctgtagacagagaggctcccccacgggggctgtgtctggacagggtgggccgaccctgtcccacaaccatgtccctctgctacaggctcccctgggggcagcctcaggcgaggggccgttgccatgggaattgtgtattggagtctattttgagaccatcttgtagtgtgatttttaatatggcctggtgttggctgttggtttttctacatttgcccaagtgaatggattttgactgaccagaagggttgagctgattttgtcttcagatgtggtgttacccagaacattgtctgagcagttaattacaggtkacaggggccccagagcaccctcttaaagactgggcttagcctgccaccacgaagtgtggatgggaggcaactagacacagtccaaggaaggaatcgttgtgccagccccgaggccctccc

SEQ ID NO: 475616 - DNA, 558 bp, Homo sapiens
cggaggtggccctgaagcccggtcagtgcctgagtgggcactgctgcaaggcatgctgggattgtagcagccagagggcagtgggaggctctggggrggggggacagggcaggagcaccccagggagcaggctgtctggtctggtcccatgctcctgagtggccctggttgcaaaaccacctgtgctacccaggtccaccgcgtgggctcctagaacctcactttcctcatctctgaattggaagaagtgacacccaccttagggtgtgaatctgagcctcagaacccactcagtgttcccagcctatgcagcgggagcccaccctgaaccacctctggctgaaaaaccctaccctggaatatggtttcagccgtgggctgtgatcccattaatgggtcatgaaatcaagttagtgggtcacagctagaatattaaaaaatgaaacagaacagaatggaatcagataatagaagaggaaaaatgggagcccgctggaaggagaaatgttctgaggacgttggttgaatatccatggctgccgagacaggatgctaagg

SEQ ID NO: 475617 - DNA, 467 bp, Homo sapiens
tgttctttctattaaaccatactgtgagcatattcagatcataatatacctgcctgatcgctctgagactaacacaggctaacggctttttcacatcaaccaaccaaacaatacaggtaatatagaacagagattggcaaactttttctgtaaagggacagatgtaaatatcctaggatttgacagacatctgtcacctctgccactgtagtgtaatacaatacataaacaaaagagcatgactgtgtttctgcaawtttatttacacagacaggcagcgggttctatgtggcctatgggctatagtttgccaacccccgatatggaccaatgtggagggaggtgttggagatccacttcttcctcactcctgttgattccttctctgtggagggactccttttagcattacccttgtggtctctctccaccctgtggtgagttcagaaggaaaaactgtgatgcaa

SEQ ID NO: 475618 - DNA, 498 bp, Homo sapiens
ccacagcgtagcacaactacaataacaaatacaaatatgatgggttacaatacatcatccatagtgcctgtgactgaccaaaacttggaaagaggttgcttacatctcagaaggactactggtgttgtttctcaaaagaggcaaggatactgtgggaaggcagataggcaagtgccccttacttaaaatggatctcaggactctattgcccccacccccgccaccattatgaagacagtgcaagcttttcycttcttattatgggattggagaaggtgggattaagaggataacctaggatataaagtgatacagtagcaggaatttggaaaatgtgaccttgtggccaactagaagtacagcagtcagataaaccacaaacactacagcagcaataacaataaaatccacttcaggcaatgtgaatagcactaacaagcagttactactcgaaacaactatactgagaagggagtagaattcccaagcagagcagca

SEQ ID NO: 475619 - DNA, 588 bp, Homo sapiens
agttattttcagctgtgctctataatattggagcaaaattatgacaaactgaatattctctggataattcaggttgacagtcccttagggatttcatttacttaaaacccactttggattttatttttcatatgaatgggacataaacatgataacaacagttatcctacttttgctaactatagaaacccaaacctggtaattatctacaattattttttcatacaaaatatccttacagttatttatactccagtctctctctaatatgcatacttaataaaaactaacgtgttctcatgaagaatatatttgtgaatcttaaaaaataagactatcccacagttatatgctaataaatacttgtggggttctraaatcaggtatagaatgagtgtgacacagttctcctctcaagtacttcatagcttagtaaatgatagaaatttgtacaaaaaaaaaggcaaaaaaatatatatttatgggagaatgttcaggaatactgactattttggtttcctagggctgccataacaaagaatcacaaattgtgtgacttaacagaaattcattgtctctgttctggag

SEQ ID NO: 475620 - DNA, 599 bp, Homo sapiens
acctataatgttccaggttcacaggttcattaaattaatggatctgtgggcttttggctcttattaaatgctgatctggattgatagatgtttttcaagcttctattgttctccttgaagccactgggctacttcgyccagctttgatgtctttcgtttattataatatctctagggtgccattagttctttttcttatcttctatcaactagaattttttcccatcttttccttttagattgaagtacataacctatttctgagtctgtgtcttctttctatgtaataatgcctcctttaccaacctgcaataaatagagagaactttaacctccaacgagttaataaaattattgccaattgtgttcaggctaaaaatggatcatcctccccactccaattggacagtgccatgattcttcctgtgtcatagacctgataatagtgattcagacatattataattaatcactttatccattaacataattattacttactagcacccactgtgtagcaagcactgtactaggaattttcatatgtgtcagaattgttttctggaggcatagtgtctggattacagccatgccagtta

SEQ ID NO: 475621 - DNA, 474 bp, Homo sapiens
gactaaaggggtacaaacaaccagatggattgaatgattatctctggcatgaaaatctagcttgtgtgacctcttatccaatatcatccttaaaagtcacatgtgatgtgattgcatatggtcattctggttttatattttctggattgtttaacctatctaaaaaagataacctgaaacaaaatcaaactttatggtaatttttgttttgcacacaagttgtttgttcactaaaattcctacatttagcaagttagtgtgacagatctcatttcagaagtcatacaaattttagccatttccagagcatggaggaggacctcaaggggagagggagagagagagagrgagcgagcaagagcacaagcaagcctttggaactgtgaggttacagatctactactcattttactccaagacccagggaatctatctgtgctcagagttccaaccaacttcaaagggagactggtg

SEQ ID NO: 475622 - DNA, 549 bp, Homo sapiens
gctgccacctcatggagaagtaaatagagtcagttttcattgttttcagtaagctgacctccaaaggcatagatgtgagctttcttttgaaaggaaatgaagtattcaccgttaaggataaggatgtttgtaatgtgacagtgttaatgctagctaaatgagaaagccatatatgaatacttagactgttgctacctgggagcattatttattgacctgtgccttcgtcagagcttcagatgtgaggggaatgatgctaatagaatcatgtaaagatgtttgtcattaaaaagtcacatcgcaattaatagattcagaattcatcgagtcctcttgctctgtgtcacaccygctgcctctgtgacaaccttcatttcctacttagcaaatccaagcctggtagctggagccccaggaagttgttaaagcaattaaaggcttctgtctcccagcacattgcttggttaccatagtatcctctgcctccaagtctctcctgatgatgtcagtatgcatacaggggttgttcagatcatctacgtggggatg

SEQ ID NO: 475623 - DNA, 597 bp, Homo sapiens
ctgcaaacctttccttgggtaatgggattagcactctgttgtaactgcaatccttaaggatacaaatttgtttctgaatgttgtagctagtaatcttatgctccttgacaggtcttacagtgtaactgccactcttggaatggaaaatgcagacctcagacctctctctgtctgctaggttaggaagttcaaagactttaacaggaartattcagtcttgaggaagtaaaaattagctgctccccacctttatttttcaatgatattattgaaggaatgtgatgagtcacctaaatttagaatacatatagatgcttttataagagaatttttccttgtagtacccttaatttttagtacttttaaagaaaagaatgctaagaaatattttctgtctaagtatatttgttgatatttaaaaaccttctgaaccagttagtttgtttggaattcagtattaaaggaataaaagtcaagaactgtttgtggttcttctctttgctatcctctttctatgagacagctcttatttccctggatggacaatatgcattgagcattcttaatccagaaatctgaaatcttccaaaatgttaa

SEQ ID NO: 475624 - DNA, 613 bp, Homo sapiens
ttgtcctacaaaaattactctctggcagtggtggcattagtctagcccacgagacactggcccacatctaggactcacgtgaccctgagagtcctatagccagccttggtgaagcctcttggcatttaccagatgctcggaagaaacttgcgaccgccctccaaattcccacstggcttcagttggctcctaaaggtttgctgtactttagggtgctcagtggaatcacatcgtgtataaccacaaaatgtacctggagttttggattttctgttcatcctgaaattgctcaaagcaactgctttctagagtgtgtgcactgagtcatgcaaattatatgtgcagttgataaggtcatttgcatagcattccaggttaagcgaaaacataaagtatgccactgaaacagttctctgaatttgggtaaagtgctacctgccattgttgtactttggattaatagtgattatatatttttttctcaagagaatccacagatcaagggaaaacaagttgcaaatttagaagttacattatccttatttttatgctgtcattttgctttttacaataggttttgctattttaagactagatctaattcatacaaagt

SEQ ID NO: 475625 - DNA, 479 bp, Homo sapiens
aactttgccatttggaggcctcacgcctgtaatcctagcactttgggaggctgaggtgggcggatcacttgaggtcagtagttcaagaccatcctggccaacatggcgaaaccctggcctctactaaaaatacaaaaaaattaccaggcgtggtggcaggtgcctgtagtcccagctacttggaaggctgaggcaggagaattgcttgaacccaggaagcagaggttgcastgagccaagatcacgccactacactccagcctgggtgacagaatgagactccatctcaaaaaacaaacaaacaaacaaacaaacaaacaaactttgccatttggtattcatccatggaactgtgcttggaaatcttgctccaattcttatttcaccatgctaccagaattatcttttgaaaacactgtattaattacatcatccagttgcttaaaaactatatatttccctgattcatcaactccagc

SEQ ID NO: 475626 - DNA, 479 bp, Homo sapiens
aactttgccatttggaggcctcacgcctgtaatcctagcactttgggaggctgaggtgggcggatcacttgaggtcagtagttcaagaccatcctggccaacatggcgaaaccctggcctctactaaaaatacaaaaaaattaccaggcgtggtggcaggtgcctgtagtcccagctacttggaaggctgaggcaggagaattgcttgaacccaggaagcagaggttgcagtgagccaagatcacgccactacactccagcctgggtgacagaatgagactccatctcaaaaaacaaacaaacaaacaaacaaacaaacaaactttgccatttggyattcatccatggaactgtgcttggaaatcttgctccaattcttatttcaccatgctaccagaattatcttttgaaaacactgtattaattacatcatccagttgcttaaaaactatatatttccctgattcatcaactccagc

SEQ ID NO: 475627 - DNA, 577 bp, Homo sapiens
ttatatgtgcatttttttcaaccaagcagatcaaaaagacagtatttgcaggatgcaaaacccaactttttctataggcagtttccacagacaaactgccggacttcaagcaaattttggtacccttgggcagtcatagaaccaatcctccaggtataccaagagactactggagttttatttgtaatagccctaaactggaaacatcccaaatatttatcaatgagtgagtacacaaacaaattgtagtatatccatacaatggaatactacctgctataaaagggaattattattatttttttgaggcagagccttgctcagttgcccctggctggagtgcagtggcacaaacatgactcactgcagccttgacctcccaggctcaagcagtcctccttcctcagcctctcaagtagctaggactacaggcatgtgtcaccatgcccggctaattttttgtggagayggaagtctcactatgttgcccagtctggtttcaaacctgggttgaggcaacccttccacctccacctcccaaagtgctgggattacaggtatgagatgccactgggaa

SEQ ID NO: 475628 - DNA, 618 bp, Homo sapiens
gatagcagggcatggtgaggatgaaggtgaggaacggttccaggtcaggcttgagggcaactttttcctgttcgattatttcagggttttctttcactactccttagaagtctggctttgacagcgaaggacagaaaggtctgcctgaagctggcagcagattctcccaatactcccttcgagccctgtgtttcaatatatacataattaattaattaaaagtcttacctataagtccaatatgtcatatatgtatatatgtatgtatatgtatataaccacacacacacacacacacacacacacacacacacacacagtcaaaacttggtggataatcaggctaaagcagaacttttgttttaacatacagacggaaaactgtgtccatatccattaatgccaggggcctttcttacatttcaataacaatcattaggtttcataccacctttcagaaaaagacaacgtatttcaatttcatatactttttattttgagacagggtcttrctctgttgcccaggctggagtgcagtggcacaatcttggctcactgcagcctagacctcctggattcaagcaatcctcctgcctcagccccccaggtagctgggac

SEQ ID NO: 475629 - DNA, 421 bp, Homo sapiens
cagattaaagtgataaactactcagaatagtggatacaaatactacaaactcagagacactaagcagaaccctttataactagattctgagcactaagagtagatttccactattcatacccatttcttgggacaattttgacttcacagtagcatgaacaactggaaatagtttcttttatatatatatattttttattatactttaagttctagggtacatatgcacaacatgcaggtttgttacatatgtatacatgtgccatgtaggtgtgctgcacccattaactcatcatttgcattaggtatatctcctaatgctatccctcccccttsccccaaccccacaacaggccccggtgtgtgatgttccccttcctatgtccaagtgttctccttgttcaattcccacctatgagtg

SEQ ID NO: 475630 - DNA, 602 bp, Homo sapiens
ttcgccttggaggctgtattagtctgttctcacactgctgtaaagatgctacctgagatcgggtaatttataaacaaaagaggtttagttgattcacatttaaaagttaccaaaacaaacaatatattggaatagaaaataagatataaaatgtcagaggacaaaaataaaaatgttttaatttgagattctctttcacactgcgtggctggagaagcctcaggaaacttacaatcaggagaaggggaaacaaggcatgtcttacatggaggcaggagagagaccaagagctgccacacccttttaaaccatcagatctcgtgagaactcactatcatgagaacaacaggggggaaaccgccccaatcatacaatcacctcccaccaggtccccgccttgacatgtggggattacaattcaggatgagatttgggtggggtcacagaaccaaaccacatcaggggctatcacatttggatccagacagaattaggtagggctcctgtcaggttggtgtccttacctatttgtgtctcccmtttcctagtctgtctcatgaggtcagcacttcacagggtgattatgaagatgaatgaaggtc

SEQ ID NO: 475631 - DNA, 617 bp, Homo sapiens
ttccttgtcatctcttaccatggataattgggttggcttcatttccctatgttcatatagttaattctcagaagttgggctttttattactttggagcagtcacttaattggcacttaaggcatttcaggaagctatggggataagcttacatttttcaagtaaggaaactgagacacacagtcttgaaactgaggaagggtacttggaggaatcatgggtaacagtgacttttttcactctttggtatgcgttcacagatacatagatatgatagtaacatctaatggtaattcatcttatccagtggtttctcacagtggtgtctgaatcaccactacagccatgcagagttgtgatttcagacttggcttggggtttgtttctcagttgtgctatttcttccagatgattaaacttcagctagaagaatgtatggaatayagtaaacactcaaaaaagagtcagtttaattcaaattgtagtaataatagttgtagtggtggtagtactaatagtcataaagtttctgagttatttcaaaagaaatttctatttcaaaaaaaagttatttctatttcaaaaagaataaatgaaatcatactggtggcaaggcca

SEQ ID NO: 475632 - DNA, 498 bp, Homo sapiens
attcccactttgagctttacctttttgtctttgaacaataacttcacctttccctgtctctaaccggacatgatttttatattccacaaacagaaatttgaattaaaatgcacgtctcaggaaaaatcagtttttgacttagaatcatttgtgttgggagtcaaaaattgctctaagcctttaactttaaaacaaagaggagagtttgaagtatatgtgttgagggtgggggcagtgagggattggaggtttggaagtgggataaattcacaactcaggaagattagagaccacagaaaaaagctgggtgtaaatttcctacttcatctttctgcccaaagccagctctgttcctcttcarctatgtgagtgcaaataaaaaagagaggcattgaaaatacgctactgacacaatccgtttttccgtgttcctttttacagaatttgcttttgcaactagggaatacgtaccaacattttggaatgatcttgctgaca

SEQ ID NO: 475633 - DNA, 510 bp, Homo sapiens
tgcccaaatgttgcactgtccttgtcaatctgggaaggcaaaaatttctgccatctttcagacagcagttacaaagacatgcacctatagtgagcatgaaagagataaaagttgtgactgctagagctagcaacatgttgaatcattagattctggtgtccatgggagatgagattgcaaagaatgtatcatttgttaaaaagaatggaaacatctgggccattttgcaacccaactcattctgtagactatcatgctaaccttargttcattctgagatttttgcaatgggttttggctgccatgaggagggctctcctgaaaagattttccttaaatagaaaaattcctgtggaaaaccacagatagaggcactaactagttttcaagttcttattgtctagattgagtttacagtgccaatgaaggtgacctgctagatcaggagtcagcaaatatttttgaaagggcaataaagtaaatattttaggtttttagactaatagcttc

SEQ ID NO: 475634 - DNA, 565 bp, Homo sapiens
gcccaaatgttgcactgtccttgtcaatctgggaaggcaaaaatttctgccatctttcagacagcagttacaaagacatgcacctatagtgagcatgaaagagataaaagttgtgactgctagagctagcaacatgttgaatcattagattctggtgtccatgggagatgagattgcaaagaatgtatcatttgttaaaaagaatggaaacatctgggccattttgcaacccaactcattctgtagactatcatgctaaccttaggttcattctgagatttttgcaatgggttttggctgccatgaggagggctctcctgaaaagattttccttaaatagaaaaattcctgtggaaaaccacagatagaggcactaactagttttcaagttcttattgtctagattgagtttacagtgccaatgaaggtgacctgctagatcaggagtcagcaaatatttttgaaagggcaataaagtaaatattttaggtttttagactaatagcttcccttacaactatttaactgtayctttgtcgtacaaaaactgccacagacaattcac

SEQ ID NO: 475635 - DNA, 623 bp, Homo sapiens
tggtttacatgaaactgaccctcaccaactaccaatcagatttagttaggacctattataatgctttmtcaaattggccagataatttggttttaggtagggaaatgtaaatgtatttactacttcttcccaggttttagtgaaactattaaaaagaagcattacctttccactagtgtaatcatcaaatatggtaatataactctagaacttatggaaaatattaagggccaataaataaaatataatttcttccctcatagtacataactaaatgagaaacaagacataggagacattgaagtagagatctatatttcaaatttattactgatatacctatttggagaatgtaacttttgtattgcagccaaataggcttgctaggattgtctcacaacaagacggatttacctgtttaggcattggcacccgtgtacaactaaactgcaggcctcttgtacgagagctggctctgtgacaaaatgaccaaacaagaaagaaaactagaatgaaccttttctgtggcaggcagatatgaaagagagaggttactgagttaggcatgtataatttcttcttcctgagggatttatcaggtaagtcccttcttctcaggggaa

SEQ ID NO: 475636 - DNA, 623 bp, Homo sapiens
tggtttacatgaaactgaccctcaccaactaccaatcagatttagttaggacctattataatgctttatcaaattggccagataatttggttttaggtagggaaatgtaaatgtatttactacttcttcccaggttttagtgaaactattaaaaagaagcattacctttccactagtgtaatcatcaaatatggtaatataactctagaacttatggaaaatattaagggccaataaataaaatataatttcttccctcatagtacataactaaatgagaaacaagacataggagacattgaagtagagatctatatttcaaatttattactgatatacctatttggagaatgtaacttttgtattgcagccaaataggcttgctaggattgtctcacaacargacggatttacctgtttaggcattggcacccgtgtacaactaaactgcaggcctcttgtacgagagctggctctgtgacaaaatgaccaaacaagaaagaaaactagaatgaaccttttctgtggcaggcagatatgaaagagagaggttactgagttaggcatgtataatttcttcttcctgagggatttatcaggtaagtcccttcttctcaggggaa

SEQ ID NO: 475637 - DNA, 611 bp, Homo sapiens
ctgaagaagtgaggaggagccggtaggaccatgccttttgctatctagagtaagattttaaaccataaggaacacaactattcttgcttctgtttcataggaatgaagaaggaaaagactaatttgttaaattaaacaatcatgattcaaaatacttttgacaggttgtcatactaaataagatgaatgacagaatgttagagaaatacatgtaagttctgcatttaaattaaagcagtgttgattaaattctcactatttaattttgttactgtactactttgataaaaagagtgatccaaaatcagattatacaccattggttacagataaacagaagataatactagtgttgttttcaaatatttaaaaaactatcataagtaataagaatgtatttgttgctctatatcacctagatattaaaaataaggkcacttacaaatgatagagaatcaagaatcaaatttgggttctgtatacaacttgtttaaagtatcacaataaaattacacagtaagctttcaatcgctatgtgcatgtaagctaatactccttttccagaggtatgctgttaacattatataagaaaattcattttcgcaaatatt

SEQ ID NO: 475638 - DNA, 339 bp, Homo sapiens
gctggtgactggtcagagattgtacttaggcatcttgttttggtaagactttcatcctttgtcaaagtctctgttttgtttgaggaacacactgaaaatttatgcagtttacgagtcttccctgggggtatgtatatagttagagccttctctggtctctcagcatgttcataccctaatatgcccattacctttcaaaatgtaagcttatcaaggactatgattgtctcacttcctgattgtttctgttaaatctccaggcagaaaatttttttcttctgatctcttktttggcccagctatagtatttcagcttcaggtcatctatgatgtatgtgg

SEQ ID NO: 475639 - DNA, 339 bp, Homo sapiens
gctggtgactggtcagagattgtacttaggcatcttgttttggtaagactttcatcctttgtcaaagtctctgttttgtttgaggaacacactgaaaatttatgcagtttacgagtcttccctgggggtatgtatatagttagagccttctctggtctctcagcatgttcataccctaatatgcccattacctttcaaaatgtaagcttatcaaggactatgattgtctcacttcctgattgtttctgttaaatctccaggcagaaaatttttttcttctgatctctttkttggcccagctatagtatttcagcttcaggtcatctatgatgtatgtgg

SEQ ID NO: 475640 - DNA, 531 bp, Homo sapiens
ggcagctgccttacaaaaggttatcttgcctgtgctccttgggaggactgtcaatcccatgcccatgggggaatttctcttccttccttccttcctttcttttctttcctcctttctttttccttccttcctccctcctttccttccttctttccttctttcttcccttccttcccttccttccttccttcctcctttcttctttccttcccttcctccctccctccttccctccctcgatccctccctccctttctttcttttttggagacagagtctccttatgttgttcaggctggagcacagtggcacgatcacggcttactgcagcctcaaactcctgggctcaggtgatcctctggcctcagactcctgagtagctgggaccacaggtgcacgccaccacatcaggctaactttttttttttaatcttttggtagaaatgggatcacactgtgttgctggcctcaractcctgggcttaaccaattctcctgcctcagcctcccaaagtgctgggatcatggggg

SEQ ID NO: 475641 - DNA, 623 bp, Homo sapiens
ccccgcgtggcctaggcccagctgccygggcccccggagggaacggggataaacttttgtcacgtgcttctgttgtctttgtctgcagccctttgacttcgcagcggagtgaggggtgtgcagcccgttcgcctgcccaggaaagggggcttctgagctgaaggcgtgcggcagcgcgtgggaatttgggggcgggggcagcacgctgtcaacggaagcgttcgccttaatatttgtagcttgtaatgacctaaacattgcttaaaatgtgtactgtttgttgctctttgattgcacggaaaagttttaccgcgtttgtcatgataatgcttcctgtgcaatatttggttatttaatatttgtcacaatataatgccatttaaacattaaaaaaaaaagagagtctcactatgttgcccaggctaatctcgaacttctggcctcaagcgatcctccccctcctacccttccccacctcgcctcccaaagtgttgggattataggcctgagtcaccgcacccggctcatttttacaaattttaatttcatcgtataataaatgagttttaaactactggtgaaaagggtacaaagttttgtgtttcctagtgggactttatata

SEQ ID NO: 475642 - DNA, 623 bp, Homo sapiens
ccccgcgtggcctaggcccagctgcccgggcccccggagggaacggggataaacttttgtcacgtgcttctgttgtctttgtctgcagccctttgacttcgcagcggagtgaggggtgtgcagcccgttcgcctgcccaggaaagggggcttctgagctgaaggcgtgcggcagcgcgtgggaatttgggggcgggggcagcacgctgtcaacggaagcgttcgccttaatatttgtagcttgtaatgacctaaacattgcttaaaatgtgtactgtttgttgctctttgattgcacggaaaagttttaccgcgtttgtcatgataatgcttcctgtgcaatatttggttatttaatatttgtcacaatataatgccatttaaacattaaaaaaaaaagagagtctcactatgttgcccagsctaatctcgaacttctggcctcaagcgatcctccccctcctacccttccccacctcgcctcccaaagtgttgggattataggcctgagtcaccgcacccggctcatttttacaaattttaatttcatcgtataataaatgagttttaaactactggtgaaaagggtacaaagttttgtgtttcctagtgggactttatata

SEQ ID NO: 475643 - DNA, 611 bp, Homo sapiens
ctggtatataacacctcctggaagcacatcctttgttcagagaaactcactggggatcagagtcagagtagaataggctttgcctagagtcctgagggaagaacagctttgtccctgtgctgaccrgggaagcaatatcataacatggagagatactgagagccacagaccaacctctagtgtggtgcttctcaaccttaaaactctatacctacctgccttcataccataaggatgccttcctcaaacaagattcggatctcccaccccacgccagagggctatcctctgtaaaaatcactcttctgcaaattcctaccagccaagaacttctgtccccactcccacccttgtatatgaaaagacaagaaacaattatgctattttcctaatataaatttaatatacaggatgtgctttttcaaaatatagtcctctcccccagtattgtggtattactccctgggacagaagtgagttctttaattggtgaatcaaagttctaggagaataaaggaccagggatgggaaggagacaggagagagactgaaggaccaaacaggattagtggagaaatttgtaggctttcagaagggaggcctggagcttt

SEQ ID NO: 475644 - DNA, 238 bp, Homo sapiens
caactcaggcaggcaactcacaaggctaagcagatgcaccattctgtaaatactggcactggagatgttgaaaactaccaggaaattctctactaagagttttccattcctgaggctttttatagaactagccacaattctatcactgcagtctcattcctgcagaacctggaggggtttgaggaataattttattcagcatscatagagccaagtacaaaagaaccctcttctaaca

SEQ ID NO: 475645 - DNA, 684 bp, Homo sapiens
tagaaatatttggtcctgatatctttttagaagctagtatcaccaagtttcaaattttcacatgtggcaatttgtacattaaaattttcttatttggggaccggttttggtgatttatgtcttactaagaaatactcatgcaaaaatttcaaatatgttgccacagaactgcatttaatttttagtcttctggatctatattatttctaatcttgtatattttttcctttttctttaatctatgctcaggaagaatttaaggttaagtacaaagtttcctkacttttagtttttcttctttaataatgaaagtactctaaatatgcctttcactatatcccatttatttttgaaagaagagttcttttcaatgcttcctttgatttctttttgctccaaggactatcttaattacattttataacttcccagtaattaaggtttaatattatattattatttctttctacttgattgacttttagatcagagaatatggtctataaaatctccactttttctgatttcaaggttttctttgtagccaactacataccaatttttttcacaaatgttctaaatcatacaaaggagacatattactctagtcaaataatgcaagaatacgatacattgaatttattgactgtattattcaattcttttatagcccactaatttttg

SEQ ID NO: 475646 - DNA, 686 bp, Homo sapiens
cctggcagcctgagccagcaggccctgaaagttctctttcatttccatctaccagttggaaagaataatttttcttcctctgtgtgtgctttggcaaaattttatatcctcctaatcttgttgtggctcaaacagattcagaggaactacttatataaatagctgcttgttggatatgtgggagcaaatttgcttgcttggttgccgtggcgcatattrggttctgcagtcattttgatgctgatgttaacacatagcacctcccatatagtattaggactgtaatgtccttggagaatactgtggagttgtatcatttaagaatttgctgacatagaaactacatttccaaacctctaagaagcaactcctctcaacagacaaatctgatatacacggatgagaagttaaaagcaaagaaaacctactttaagcaggagcactttggcatccgccatcggttccctagctcttcaccaagtactctttccaatacgccccaatattcattatgtaaattcatgttaaaatgttgaggttccacagatgactacagaaataccatttgtgtaaatgggtaaaataaagaccaaatataaatgctgccaatttccatcaaatataaatggcttttattcacccaataatataaagaaacattaatattacaatgttaaagaagatat

SEQ ID NO: 475647 - DNA, 508 bp, Homo sapiens
tctagtccacaaagctgttttgtttggcatatacagtatttaaaaattttgaattagttgccagcactttaaaaattggtatagttcacataaatattctgaattcaggcttttggaaaagttgtggacccaagaatactaggcccgcattttcttaygtcaacattctttccaggatgatgaatggactgttctctttggccccctttccatttatccactcttcccaccaaactgaattatccttccttaaaattgagatgcagagaattttagatatttcatatttaaatcatatggttctttttaaattgagtctggtaaaatatattaaaaaataatagttcattagtctacctaaattagttatttactatttcaggcactggcatgttagtcaacaggtggaagttatagacggagacagaatgcagcttaaaataagttaaaaccttgattttcattgtctgccttccaaaatagagaatgcactctttgttagtgttca

SEQ ID NO: 475648 - DNA, 646 bp, Homo sapiens
ggcataaagtgtttattgcaagatggattccttaaggaattcttatttttattttttgttctaaatcataatttattctaggactaatttatatctgaactctgatggcattttaggcgtttacagaaaatcagtttatggactaggagctagagaaattaggaaggcacacttgtaagttcatcagaaatcaaaataaattcttactaagcattccagggatctgctagtcaaaatgttgctcattgttcaaagttcagagagttttacccctcctagctacttgggggttaattgtagagcccacaactaaaatttttctttttttttgagacggagtcttgctctgtcacccaggctggagtgcagtggtgcgatctcgtctcactacaacctccacctcctgggttccagtgattctcctgcctcagcctcctgagtagctgggattacaggcacgtgccaccacgcccggctaatttttgtatttttagtagagayggagtttcaccatgttgctcaggctggtcttaaactccagacctcgtgatctgcccacctcaacctcccaaagtactgggattacagacgtgaggcaccgcgcccagcctaaaatttgtattaatctctcatcggaaaccacaaa

SEQ ID NO: 475649 - DNA, 542 bp, Homo sapiens
tagttatggtgaaggaatatcctgaagttattagattgattgctaattttaccattactagcctacaggtaggtaaaaatatgtaattatgttaaactgtagccagttttaaaacagcttcttggtaagggttggtgggggtatttgaaaaatatctattaatttgattactttgctggaaatgttcattrcagggttttaggtaaaaaaattcattgaaatgtatataataaaaattgagaagctatttaaatatctaataattgaataatggcttgagaaactataataaaatctatgtgaagaaataaaatttttacagattatattatagaaaagtttttaaaataattttaagggagagattataaaaccatgtttttcacaggatgtcaactctgaaaaatattcatggaatgattagagggaagtagagtaatattttaatgttactctgggtggtaaaataatagagatgttggtttctttatacttttttgcatttataaatttgctatattatgtgttcattagttttatag

SEQ ID NO: 475650 - DNA, 542 bp, Homo sapiens
tagttatggtgaaggaatatcctgaagttattagattgattgctaattttaccattactagcctacaggtaggtaaaaatatgtaattatgttaaactgtagccagttttaaaacagcttcttggtaagggttggtgggggtatttgaaaaatatctattaatttgattactttgctggaaatgttcattacagggttttaggtwaaaaaattcattgaaatgtatataataaaaattgagaagctatttaaatatctaataattgaataatggcttgagaaactataataaaatctatgtgaagaaataaaatttttacagattatattatagaaaagtttttaaaataattttaagggagagattataaaaccatgtttttcacaggatgtcaactctgaaaaatattcatggaatgattagagggaagtagagtaatattttaatgttactctgggtggtaaaataatagagatgttggtttctttatacttttttgcatttataaatttgctatattatgtgttcattagttttatag

SEQ ID NO: 475651 - DNA, 542 bp, Homo sapiens
tagttatggtgaaggaatatcctgaagttattagattgattgctaattttaccattactagcctacaggtaggtaaaaatatgtaattatgttaaactgtagccagttttaaaacagcttcttggtaagggttggtgggggtatttgaaaaatatctattaatttgattactttgctggaaatgttcattacagggttttaggtaaaaaaattcattgaaatgtatataataaaaattgagaagctatttaaatatctaataattgaataatggcttgagaaactataataaaatctatgtgaagaaataaaatttttacagattatattatagaaaagtttttaaaataattttaagggagagattataaaaccrtgtttttcacaggatgtcaactctgaaaaatattcatggaatgattagagggaagtagagtaatattttaatgttactctgggtggtaaaataatagagatgttggtttctttatacttttttgcatttataaatttgctatattatgtgttcattagttttatag

SEQ ID NO: 475652 - DNA, 506 bp, Homo sapiens
gaggagctagggcttaagggtgagcagcaagtcagcaggtggctaaggttgagcagaggaacccaagggtgtgcctcggctgaaatgctttcttggatgagggcttcagcatcaggattcaggggtagtaacaagggcagactgcaagagagcattgttgggggtrcaggcacactgaacccagcacaaggaggccttgaaccctgacccagaaccaccccttacttagagcagtgacacctcagccacatatgccgagcatctgaactgtggcagctagtacaaaatgcattccgtaaacattcgtggaatgaatgagcagacgaatgaatgaacgtttccgtgtatcaaatgggagtgatattatttactccagctctgccaggggattattgatagggtgaattgagacgatagagatggaaaaaccctctaaactgtaaaatactatgcagatgtaaggattataatgtgaatggatacagttgattgccagagataaaaat

SEQ ID NO: 475653 - DNA, 609 bp, Homo sapiens
ccccaaactgccatctggatgcctcctgggtcattgccctgttggaacacctgtatgtgtcccagcatgctcgcgtagagtccaggcacactaggcccttcccagcccagcctttatctgtctgccattctcatccacccaagtccccgctccttcccctcctacaatgctccccagtgtactcagaatgctcyctgacatccctggcctctcctgcctctatgcctttacagaggctttcttcctggaattgcttctttaaacttgactccctagaaaatatcaattttccatcatgtctcagagcaaacgctgccttctctgagaagcctcccctgattcctccaggccccatcccctttcttcacacttccttgtgaacatgcctcaaaatcatagccgttcccattatgctataactgatttcatgtctgtcccggctccaggctgcagccctagaaggagtctgacttcatttccctcactatcccccatagaagctcagtgcgtgacatataacaaattgctgattaatatctgttgaaagaataaagcaaggagggagggagtgaggccaactgcacagctcttcatagcagaaaacaacag

SEQ ID NO: 475654 - DNA, 630 bp, Homo sapiens
tgtggagttcacctggctgagagggaacgactctgtgcgtggactggaacacctgcggcttgctcagtacaccatagagcggtatttcaccttagtcaccagatcgcagcaggagacaggtaactcatgtgacaaactgtatgaaataaaaataagtgaactgaggtgtagggttgctctctgagtcagaaatatcgtcttctcactttacctccttgggatgcagtggagcgggacagtagggtttgtgctgagcaattccacctcctccacacccagtattaaaatggtccactgaggaacagacctctggaccagctctgaagccttgcaccatgtacctccagatacttgctaatgagtgctcaaattccgtgcctccatcatgcataaaatttattcatatttctcactggaacactagttctctgacactgaagaataaaaataagaatacagctcaaagatgaagaagacagcagcaatgcccaacaagagcatgaacactctaattattgcaaacrtggcaggaagtattacttattcatttcatttaccagaaatgcatctcttggtctttggcgattttacatagacatgtttggaaagatgtgatgttatataaaagca

SEQ ID NO: 475655 - DNA, 523 bp, Homo sapiens
aaaaaagtaaacaaacaaaaaacatcactataactgcttaaaaaaaaacactttaccttgaataaaatgaaaactagcctgtgttcatttggaaaatttattttgaagtcatctttcatatataaaagcaacagcaaacatattttagtgttagggctcagaaaaaaaaatcctctttagccttctttaaaaaaaaaccaaaaacggctgggcgcagtggctcatgcctgtaatcccagcattttgggaggccgaggcgggcggaccacaaggtcaggagattaagaccatcctggctaacacggtgaaaccccatctctactaaaaatacaaaaaattagctgggtgcggtggtgggcgcctgtastcccagctacttggaaggctgaggcaggagatagcgccactgcagtcctgcctgggcgaaagagcgagactccgtctcaagaaaaaagaaaacaaaaaacaaaaaacaaacaaaaaaaaccaacaaaaaactccaaaaacaacaacatatctacca

SEQ ID NO: 475656 - DNA, 523 bp, Homo sapiens
aaaaaagtaaacaaacaaaaaacatcactataactgcttaaaaaaaaacactttaccttgaataaaatgaaaactagcctgtgttcatttggaaaatttattttgaagtcatctttcatatataaaagcaacagcaaacatattttagtgttagggctcagaaaaaaaaatcctctttagccttctttaaaaaaaaaccaaaaacggctgggcgcagtggctcatgcctgtaatcccagcattttgggaggccgaggcgggcggaccacaaggtcaggagattaagaccatcctggctaacacggtgaaaccccatctctactaaaaatacaaaaaattagctgggtgcggtggtgggcgcctgtactcccagctacttggaaggctgaggcaggagatagcgccactgcagtcctgcctgggcgaaagagcgagactccgtctcaagaaaaaagaaaacaaaaaacaaaaaacaaacaaaaaaaaccaacaaaaaacyccaaaaacaacaacatatctacca

SEQ ID NO: 475657 - DNA, 557 bp, Homo sapiens
accatctgtacacaaaggcctgacaacccatgtgctgcatggacagaaaattaaaggagacaaatagtttgacaacaggaaattaaaaacctgtctatgggagaagaaaggattataaacaaatggatatccccaaaggtcaagagtcatgcaaatataaattgaaaacaatgtaaactaatttgtatgaatgtttttcttttcctgagtcaaaggatttacatttccaaggaactgatttcatgacctggaatcaaacctgggttgcagtggtgaaagtgcccaatcctagccatgaggctacagagtgcagtgcctttcttgcaaatcccacagaaaatccaaaacaggaagtttgagctttcaaaggattttaacttttgttctgggtcagatttatgctctttagttttgtatcttttatctaatttgatctttctttccataaataaaaataaggtaattgtttagaaagagacatctgtaatatatatatttttcccacatargagtctttttaacttaaagatccattgtctggccactaatgactaatg

SEQ ID NO: 475658 - DNA, 627 bp, Homo sapiens
gcttcatgctccatatttagacaattttaaattgcttagaattagtggaatatacagcattgctcttgtttctgtgccagtgtactataaaagttgcaattgctctttgagtaattatcactattgttactttaatactttaccttactgcaaatgtaaaattttacctatcttaaatactattaagwaagtcctttccccaaaattatttagatataattaatattccaccacaagaagaaacgataatctttgatattatcatccagtgaattcaaacctatatgctttctgcatgttttagaatcctggcctgatagttagtgaatgaatatggtgataatgtaatgtcaataaactaataacttagtaatagctctaaatttgaaattaatttgttataataattaatatttaaatttcttattaaattaaaaacgtctttccttttaccttttctgttttacttttcttatttggaagaaagcctaagaaattatttgtgatctcagcttataaacttcacattttaatgggaaagtaaatgacaaaataaaattgtgcctgaaataagtggttcagtctaacgtatcttctatcataacgtaaagaaattttttaggcacc

SEQ ID NO: 475659 - DNA, 614 bp, Homo sapiens
cttcactgagacagcaaataaagacattcctgactaaaatatatttcataatattaaacatattaaaagtatgttttttaaatcacaatattttattggtgctttagttttcaccacaggttgctaattccttgataatatagactattttccctcatattaaacaatttccttatatctttttttctttcgtctacatggcaaaaaggaaaatkaaagatcttaatattcagatatcaaagtcacacagttctaatccccagcctggatgtttcctccatgtgctggattgcagagccgtggttgggaggctggctgctttagcaaccatgcatgcgacctaccatgagtgctttcatccttgtacccaacaccttgtaatgagtccctggtgctgcttggttaggaactgggctgccatcctcctgttggcatgcgctgctttgagcagggttgcttctgaggatgtgtttgttagggggaacatttgctaatacctgatgaagtatcaccaacattaagcttcttgaaaatgagcttgctttgttagtctaagggctgtggaacctctgggattagggtgcatagtaatgactaagtttggttccaaacca

SEQ ID NO: 475660 - DNA, 561 bp, Homo sapiens
tagaaggagcaacaaaagatgaataaaaggacacagccagtcttctgaatcagaatcagcaatgtaatcatgtctccaggggattcacaagcacactaaagtttgagamgcatgggcttggatgactcctttatagtaaggtgagtcgcctcttaaaaagtcctgtgcattttttacggcccaagtcagtagtttcttggctaaatatgacggtaataactgattctacagagggcctaagagttaatgtgtcttctatagcacctgcctttctatcatgcacaactaaggaaaatactgagaatgaagacagactccatgcccaacacaacttgcttctgagccctggttgtacaacttttcattttgtctaacagcaatattcttttctctttgtcatttgcctattgaaatttgttctgttgcaagggtgcagggtttttataacctagactttagatattgttgcggtgtgagtttttggattcttttgctggcataatctcagctccttagaatttttctagaattttgaccttgcttatagatactagattttga

SEQ ID NO: 475661 - DNA, 655 bp, Homo sapiens
gtcattgtcaaaataatgcatacttctgaaattgaatgaaaagcctaaaaatcaggtacttgtatatgtgcatttttttctcagtcctcatagaggctccattatgttttctgtggccacttgtttctttcagccagccatgcttcaaaagcaccagctctcagaagcagtagctctgggagtagcaccattggtggcatttggttcatcactgacctgggaactctgctctggacagcagcccatccacacagacatgcctgtgattgacccataaaatgccctcattccatgagggccaatactaatcagattgaatgagttgaacaggccaccaggggtagtaatgtgtgtgcagaaatcaccatatttttcgttttctaaactataaactccacttgtcagaataaaggattttctttccatttgcaagatttctcactcagtctctgatttctccrtggttcctctctgctacattagccctgaatgagctgtaaatgagataatgttgagcacaggaagataggatgttcaagcggacaaagcagggagggcgatccttttcacagcagatgttctaatggctgattcagtcttccgggtggtcagctcagacatcagtactagcactatagacagtgtacccttccag

SEQ ID NO: 475662 - DNA, 655 bp, Homo sapiens
gtcattgtcaaaataatgcatacttctgaaattgaatgaaaagcctaaaaatcaggtacttgtatatgtgcatttttttctcagtcctcatagaggctccattatgttttctgtggccacttgtttctttcagccagccatgcttcaaaagcaccagctctcagaagcagtagctctgggagtagcaccattggtggcatttggttcatcactgacctgggaactctgctctggacagcagcccatccacacagacatgcctgtgattgacccataaaatgccctcattccatgagggccaatactaatcagattgaatgagttgaacaggccaccaggggtagtaatgtgtgtgcagaaatcaccatatttttcgttttctaaactataaactccacttgtcagaataaaggattttctttccatttgcaagatttctcactcagtctctgatttctccatggttcctctctgctacattagccctgaatgagctgtaaatgagataatgttgagcacaggaagataggatgttcaagcggacaaagcagggagggcgatccttttcacagcrgatgttctaatggctgattcagtcttccgggtggtcagctcagacatcagtactagcactatagacagtgtacccttccag

SEQ ID NO: 475663 - DNA, 523 bp, Homo sapiens
actgaagctctgagaggtgactaacttggcttccattatacagtaagtggtagaaactgrtaccatgctaggactcttggggacaaatgaaatataaaatctggtttctggcttcctgcagtaatcctccatctttcataaaaatggtattcctagtccctgcaaataacctcagactttactacaaagaaagacaagtacaaggttgcagcaatagtaacagaaaaagctacttaatgctgtgcgtacaaacgacttctttttggaggacttctagttctggttcagcaagttagaagccaccacctcatcccaagaagttaaaagctgaaaaacttaaaaatcaatagctctttttagatccatcagggaagtgacgtgccaaggaaaaactgctgtgccccaaatctgagaggcaaacaggcagatacagacaatcaaaacttacctgaggagaacctactaatagaaatatcagagggaacaatgcctggatagaaaaatcagaactgtaattgacaaa

SEQ ID NO: 475664 - DNA, 604 bp, Homo sapiens
gctgccagctttccccaaggggatcaagttctccttatctagcgtggacacttgattaaggaccamctctctttattggctgcctttccttccctgtttccctgccattcctcatttcttcacttctctaccatttttttcttcctagataaccaatttcatgtgaatccctttcccaggatctgcttcttggaaaacctaaactaaaacaaggaaattttccctcctttcaattcatactctcgattatgtggtgatttgcctcccctgcatagctggggagaatcattaacccagtgattaagtaaatatatccctattatcagttattctagaacacacatccttttgtctttatcagaacagtgttgttacaaatcagtgcatgaaattttgattgtcctttagatgaataatttggagttcaaattttaaaccacttttttttttcttgcctatagtgtcagtttacaaaatggcttatccttcactattactagccctctaagaccacatggacctcttattatttagttttagctgcttggaaagttacttggtttcttttttgggtgccctgcaaaggaacgcatagactattaag

SEQ ID NO: 475665 - DNA, 604 bp, Homo sapiens
gctgccagctttccccaaggggatcaagttctccttatctagcgtggacacttgattaaggaccacctctctttattggctgcctttccttccctgtttccctgccattcctcatttcttcacttctctaccatttttttcttcctagataaccaatttcatgtgaatccctttcccaggatctgcttcttggaaaacctaaactaaaacaaggaaattttccctcctttcaattcatactctcgattatgtggtgatttgccwcccctgcatagctggggagaatcattaacccagtgattaagtaaatatatccctattatcagttattctagaacacacatccttttgtctttatcagaacagtgttgttacaaatcagtgcatgaaattttgattgtcctttagatgaataatttggagttcaaattttaaaccacttttttttttcttgcctatagtgtcagtttacaaaatggcttatccttcactattactagccctctaagaccacatggacctcttattatttagttttagctgcttggaaagttacttggtttcttttttgggtgccctgcaaaggaacgcatagactattaag

SEQ ID NO: 475666 - DNA, 604 bp, Homo sapiens
gctgccagctttccccaaggggatcaagttctccttatctagcgtggacacttgattaaggaccacctctctttattggctgcctttccttccctgtttccctgccattcctcatttcttcacttctctaccatttttttcttcctagataaccaatttcatgtgaatccctttcccaggatctgcttcttggaaaacctaaactaaaacaaggaaattttccctcctttcaattcatactctcgattatgtggtgatttgcctcccctgcatagctggggagaatcattaacccagtgattaagtaaatatatccctattatcagttattctagaacacacatccttttgtctttatcagaacagtgttgttacaaatcagtgcatgaaattttgattgtcctttagatgaataatttggagttcaaattttaaaccacttttttttttcttgcctatagtgtcagtttacaaaatggcttatccttcactattactagcyctctaagaccacatggacctcttattatttagttttagctgcttggaaagttacttggtttcttttttgggtgccctgcaaaggaacgcatagactattaag

SEQ ID NO: 475667 - DNA, 509 bp, Homo sapiens
ttttagtcttcaattttttccttaggrtatttttgaccccagatactttttcctttaaatttgactgagctgtgatcatgactctgacctctagccttgaaagaagaggagttatacctctcaggagcgatgcctcaggcactttgcaagtcggctggcagggattatttcctaggctgtgaagtgatgaccttctatggagagtgaaagtctgcaatgcaggtaaattccttcagccaggattgagagccttaggtttgctacctgctctatgaatcagagttttccttctctatggaggacatgtaatttagcagtatatttaaagccacatgttatgtgctcacatgttggttaatttactgttggaggtgaatatattctgattttgagttccataaaggattggttcagaaggaaatctggaaatttggactaaaaagcaaggatgactttactgtgattaaaggacaccttacctgttatttctaaacaaagtgccctgacag

SEQ ID NO: 475668 - DNA, 641 bp, Homo sapiens
cttgtttgcacttttcttaccagaccagggtcatctaagaaattaatactcagcaagttttatgacttttcagcaactcataaatttagaggttgctgcttaagtggacagtgaatgtgaatggattattttatgaagactttgaggcctctaataactttctgtaaagatgatttgatatattaagagagctttcgcacagctgatttatttattgaatattttttaccatctgcaccataggcattaaaaaaattatttgagtcctaaacatagaagtagcgcccaggcgtggtggctcacacctgtaatcccagcactttgggaggctgaggtgggcggatcacttgaggtcaggagttcaataccagcctggccaatatggtgaaaccccgtctctactaaaaatacaaaaattagccrggcatagtggctgctgcctgtaattcaagctactcgggaggctgaggcaggagaatcgcttaaatccaggaagtggaagttgcagtgagctgagttcacgccactgcactctggcctgggggcaacagagcaagactccgtctcaaaaggaaaaaaaaaaaagaaatagctgtgttgtgtatggtattaaaaaaaagctgaattggatacacatatat

SEQ ID NO: 475669 - DNA, 627 bp, Homo sapiens
tggttcgtagacagctgtcgtgattgccctcacaacgcggcctcacatacttttaaatgaaacatggggcaggttatgaaagagtaggtatagtatgatcccatttttaaaagagtttttctacacagygacagttctggaagaatttactccagaatctttagttttgttgctgggtagtgagattatgagtgttcttattttcttctttttgattacccatatcgtctaacgtcaaaattcaatagttctgtgtaatttagaaagatgttttttaaaagcaagactaggccacttacaattcctacatacccagtcctcccggcccttttgctcggagatagaatgttctcggtaataatccaatagcttagaaatatatactccccaaccccaaatagtttcattccaattcctcactagggttttcctcctcaccgagaaaatgaaaaactaccacaaaaggctatgatgtgacaaggatccaagatttcccccttttcctcttcccctccctccattctcaaggggagtacctctgtcctggcaaaatggggaagggctatgccttggaggcagcagggtaccccaaaaggcacaagccacaccagtcactttgagccaggg

SEQ ID NO: 475670 - DNA, 615 bp, Homo sapiens
tgccatattaaatagacgctaatgacaccaagtgtgagccgccagagctgtggttgtgatggtgtgtttaagatttaatccctttgagggactgaacctggagttcagaggtggtttcactgaggtttataagaaatttggctaagattatacttaatggattttcaagtactgaaaggtatttgtgtttaaagtgaatatgttaataaaactttccaaacacagtcacaaaaaatagatctgatacaaaattatgtaacgtattattcaaagtaatatagttgtctaataataatatattgtatgtgcatatgtgctgtatgtactcattttccctctatagttttctaagcggtttgcttttttctaaatggagaagtgtcctttggtgactcacaaagattcacaatgagcgaatkctccctagagcagggccaactcctcttgggcccttgtcttgctagaagatgcttttctcctggagacaggatcgccatcattagtaacttatccctacacccaatccacaaaagattttactctttaaaattttccagcatattttggcaatggtggaatgacaacgtattcatttttgtcccatctggcaacatt

SEQ ID NO: 475671 - DNA, 430 bp, Homo sapiens
aaatctaaaagtgcactccctgcctttttcctcctattctctaaaccttttgaacttctgcaaaaatcaggctgggtctttgtataattatctgtacctgatagctgtttaacttcccaggagctgctgctgtgaagtctaagatttgatgactgcttcaagggttagttttcacttcttggaaagaggaagtcaccatggcttttgcctctggacctttccaacctcacaaaccgaaacatttgtacttcactacttcttgcctttgaccagctataggtatagccactttttttttttttttaggttagttacattataaagaaaaccatataccccttgtctattgtttcctcmttgctaggattagagcgtgcacagcttaggataagggcatttccgttgcatcactgtgtgctaagcatcattt

SEQ ID NO: 475672 - DNA, 569 bp, Homo sapiens
tcaccatcccccaaaatgctggcactcaggacaataccctctgctggcgaaaatctatacaggatacacaggtcaggctcttattagacaraactttccaatatagtatgaaattggccactgaaatttaagctcaaaaagagtatgaatatttagatatgttttcagtgcgatttcttcagaatgtagacaaggaagagtgacgcagtggaaatgatgtgcaaacaggatttatctcattgttcttggtctgaaatacacaatcactatattaaacaaagctactaagcccataaacagaatattctgaactctttatatgagaagttgaaatggagctgttccatttacatttctcaaggtacccccaaatatttattagggtaaactatccatgtgtttttttaaagtatgatatgaaaaacatccatgtgatggcaaatttaagcctctgcattataatgcaagctgtgagtttcatgtatacacagccattttatagtttgtgtgtttaagatatataatcaagcaacagatccaggacagtctttaagtacagaaataggtaa

SEQ ID NO: 475673 - DNA, 569 bp, Homo sapiens
tcaccatcccccaaaatgctggcactcaggacaataccctctgctggcgaaaatctatacaggatacacaggtcaggctcttattagacaaaactttccaatatagtatgaaattggccactgaaatttaagctcaaaaagagtatgaatatttagayatgttttcagtgcgatttcttcagaatgtagacaaggaagagtgacgcagtggaaatgatgtgcaaacaggatttatctcattgttcttggtctgaaatacacaatcactatattaaacaaagctactaagcccataaacagaatattctgaactctttatatgagaagttgaaatggagctgttccatttacatttctcaaggtacccccaaatatttattagggtaaactatccatgtgtttttttaaagtatgatatgaaaaacatccatgtgatggcaaatttaagcctctgcattataatgcaagctgtgagtttcatgtatacacagccattttatagtttgtgtgtttaagatatataatcaagcaacagatccaggacagtctttaagtacagaaataggtaa

SEQ ID NO: 475674 - DNA, 627 bp, Homo sapiens
atttatgggaacatctttagaagcaaaatatatttgaggcacactgtataaagcagatttgttcttcatatcccattcatttacctgtctcattttatgcatgaataaacaggctgaatatataacaaataactacagattaagtctgtcaattggattatgaataaaattatccccagttcctggggcaagaaaaacaaaaataaagcaaagtggacayccccaaaacgtgtgttaagtgacaggactcacttaagaaatgttggttgaatctgaatatcaattcccttcgtattagaaagacttctggaatattagccaaattctctaaagctagatgaatatgacaaagccccaaattttctttacagtaaattcgaacagtattccatggcaaaagctgttacataaaacaatgcatttacttcctctcactagaagaaaaaaacaaacaaaagagagtatgttcacttaaaaaaaaaaagcttgacaaaatggagtgcttagaggagttttatatttaatatgtcatcctgaatcattattgtgaatatgttatgaacttagtttgaattaatagattctacgggataaaaagagaataagaacatcaaggtcaattctgct

SEQ ID NO: 475675 - DNA, 620 bp, Homo sapiens
atttatgggaacatctttagaagcaaaatatatttgaggcacactgtataaagcagatttgttcttcatatcccattcatttacctgtctcattttatgcatgaataaacaggctgaatatataacaaataactacagattaagtctgtcaattggattatgaataaaattatccccagttcctggggcaagaaaaacaaaaataaagcaaagtggacacccccaaaacgtgtgttaagtgacaggactcacttaagaaatgttggttgaatctgaatatcaattcccttcgtattagaaagacttctggaatattagccaaattctctaaagctagatraatatgacaaagccccaaattttctttacagtaaattcgaacagtattccatggcaaaagctgttacataaaacaatgcatttacttcctctcactagaagaaaaaaacaaacaaaagagagtatgttcacttaaaaaaaaaaagcttgacaaaatggagtgcttagaggagttttatatttaatatgtcatcctgaatcattattgtgaatatgttatgaacttagtttgaattaatagattctacgggataaaaagagaataagaacatcaaggtcaa

SEQ ID NO: 475676 - DNA, 620 bp, Homo sapiens
atttatgggaacatctttagaagcaaaatatatttgaggcacactgtataaagcagatttgttcttcatatcccattcatttacctgtctcattttatgcatgaataaacaggctgaatatataacaaataactacagattaagtctgtcaattggattatgaataaaattatccccagttcctggggcaagaaaaacaaaaataaagcaaagtggacacccccaaaacgtgtgttaagtgacaggactcacttaagaaatgttggttgaatctgaatatcaattcccttcgtattagaaagacttctggaatattagccaaattctctaaagctagatgaatatgacaaasccccaaattttctttacagtaaattcgaacagtattccatggcaaaagctgttacataaaacaatgcatttacttcctctcactagaagaaaaaaacaaacaaaagagagtatgttcacttaaaaaaaaaaagcttgacaaaatggagtgcttagaggagttttatatttaatatgtcatcctgaatcattattgtgaatatgttatgaacttagtttgaattaatagattctacgggataaaaagagaataagaacatcaaggtcaa

SEQ ID NO: 475677 - DNA, 592 bp, Homo sapiens
atgaagagaggacacaactagggacaggacagtcaaggttgtcctaagccagaggtgatgtgcaagtttgagggacatgttgtaaggtcaacttgggcatagtaaatagtagttctggttcagaagacactgaattctcataaagaggcacagaatggtgatgttcaaaccatatttctggtctctttctggataaataaatatttacaagtaggaaatactgagtttagctacactgaacaccagagtagctgtttaacttttagtgtgctattttgagtggatgattaaatatgcttttaaaagtagattttgtaatattttagtcaataatcttctcccctgtaatatacttaaatggtaaygatgcttacttacttactgtcaatttaagagaccagcttctatcagaaacacccaatgttacagtgaaatgtccagtattttttagtatctgcgattagttgttacccgggaaataacttctaatatataaatgtataaaaataattttgtttagtaatttgttaatagtatctgattttgagggatttgaagcaaattgacacaggaaaacattaagctgaacaca

SEQ ID NO: 475678 - DNA, 592 bp, Homo sapiens
atgaagagaggacacaactagggacaggacagtcaaggttgtcctaagccagaggtgatgtgcaagtttgagggacatgttgtaaggtcaacttgggcatagtaaatagtagttctggttcagaagacactgaattctcataaagaggcacagaatggtgatgttcaaaccatatttctggtctctttctggataaataaatatttacaagtaggaaatactgagtttagctacactgaacaccagagtagctgtttaacttttagtgtgctattttgagtggatgattaaatatgcttttaaaagtagattttgtaatattttagtcaataatcttctcccctgtaatatacttaaatggtaatgatgcttacttacttactgtcaatttaagagaccagcttctatcagaaacacccaatgttacagtgaaatgtccagtattttttagtatctgcgattagttgttacccgggaaataacttctaatatataaatgtataaaaataattttgtttagtaatttgttaatagtatctgattttgagggatttgaagcaaattgmcacaggaaaacattaagctgaacaca

SEQ ID NO: 475679 - DNA, 645 bp, Homo sapiens
tctctctctctcctgctatcatgtgaatattgtgcttgcttccactttgctcttttaccatgattgtaagtttcccraggcccccccacccatgcttcctatacagcctgcagaactgtgagtcagtttaacctcttttctctataaattacccagtctcaggtagttctttataacaatgttagaattaactaatatactgaacttccttaaaaacgctgtttagaattcatcaggcagttctttcatctccacactgtagtgtcattcactggcactttattttgtctttctggtatcttcatgtttcccttggtttttgtggctgtgcacaaatgtctgcacattgatataggtatttaatccagtcctcacagcctgatttggttctttcagtagtgagcctgtccagagattaagggcagattgactggtgaggaccctaagctctctgcttagggcgggttaattggtgaggaccctaagccccagtcccactgctttagctgttgcagtgctagggagcaccctaaactcaggaccactgtggctgaaatcctttggctcctgaggttgacacaagtgctaggtcccattcaaagctcacagctgccaataccagcacagactgaggtgtgccagagg

SEQ ID NO: 475680 - DNA, 548 bp, Homo sapiens
cactgctgttgtggccagagataaggcatgacaactgagactgtacactggcttaaaggagcagcccctggttcagtggcatgtacctgtagtcccarcacttagggatgccaaggtgggaggattacttgaggccaggaggtcaagaccaccctttgtaacatagtgaggccccgtgttcacagctactcaggaggttgaggcaggaggatcacttgaggccaggagttcaagggaaccctgggcaatatagcaagacttcatatatttaaaaaaaaaaaaaaaaggagcaaaagctgcttctcactgacaccacttgctcaccacagactgcagccaactctgtgctttattatccccactctgggtcccaggctgatagaagccactatctgggttctactgttctaattttactgttcactgaggcagaaggcaagagttccaaagggtctcagttattgaacagtcttgaactgttcaattcagttattgaacactctgagccagaaataacaccatcactttcactcacagtccattagtca

SEQ ID NO: 475681 - DNA, 447 bp, Homo sapiens
caacggtggtccatccactagggggcagtagattgaagcatggtcaatcagaacttgaggccgatttactatttataggcaacgttctggattttatttccaaaccaagtaaccatcatgatttttggaagaggaaaaagaggaaactctagcaaaccttcaggcacacaaacaactaaaacctgaggtgatggtatgatttcggcggctcgagtgatttgagtatgcttcagtttcatgaaatctgacccctcaaaaaaataaggtctccaggttgcaaaccctgaagaagctggttataatcaagttggagattttrctctattatttttttcaaaagtggcgtgctgatcataagcaaagttgctttgattctctggcctcctcctcgatttctccatgttttgcagaccttaggacactaggctgctcaggaattttgggggg

SEQ ID NO: 475682 - DNA, 609 bp, Homo sapiens
tcaaggaactgaaacttaccagatcaccgcacttggacattgagacgccagacctcttacctgtccttattgcctaactaaccacctgcttcctattgatcaactccccttccttacccttctctaattcatgttttcccacacatggttacgtttgttccctgctatataattaagcttctaattttagtcagttgaggagatgggtttaagactgatctcctgtctctttggatgtagcacccgaataaagtctttttccctggtaatacttgctgtcttggtgattggctttctgtgtggtaagcaacaggacctagatcaaatccctggtattttggtaacacagtaacattcgatgtagaaatatatgtttacctgttttccttacttatgctattaacctcagtgatattccttcttactctttgccatccagattgaaccaccctgatcttattaaagtgaccatttcagacaacagttyttaatagctccatgagattctaggactgtgtctaccactacaaaatcaagtccacccactgttcttccttatgccccacagtcagccaggagtttgcaggctgcaggcaagcacacagcata

SEQ ID NO: 475683 - DNA, 384 bp, Homo sapiens
tcacagcaagccaaagaagagaacgccctgcggagagccctgggggtrtgcaagcccgcagaaggggtgccccacctgtaggccctgggcgctgccttggcctggggccgactgctctttctccttctgcggctgctggcctcagctttgtgctgggacaggaactccccaaaagtagggggcttcgggggccgggcccaggcctggtcatctgcaacagaacccaggtgtcattgggaagggaaggtgtggcacacaccacccctgactcccagaccgagcctcagctcatccaagggcacccactcaccatagcggtgggatggttcatgggcagggactgggccatccttgaacctgggggaaagataacgggtgagcggg

SEQ ID NO: 475684 - DNA, 594 bp, Homo sapiens
ttttcaactggaccttctaatagttactaatacatacacaaaactgccatctagaggttgaatgttgaaacaaagtctgttacataagatgatcctttttggaaaacacataatctcagtcacacaatttcacaaaaacacacaaatgcatacacacacacctcttagcaagctagaagaaacaatattattttaatttaaaattaatacagtttcttcttgaggccataaattggaaagagagggcataacactttatctttatttgaagcatgtatcaayaacaggttatcacatacacagtttgaaaatggaatcttaccctagcaggccctttgcacatataacccgaatgcacctgtatttcctctcagcttatagataacttgaaaactcatgacactacaggaaaaggagcaccattaagacaaaaagcaggctcacaggaatatccaccaaagctaaggttcaccatcacaacaataaagccccaggttttagggtatagaaaaaaattcaacagccatgttttcagacataggactccatcagaggggaatattagtgtgttccaccttcagaaaaaatcctgca

SEQ ID NO: 475685 - DNA, 611 bp, Homo sapiens
atcataggatttagaagatcactaatatctctaaacttttgttatagggctgggcatggtgactcacatctgtaatctcagcactttgggaggctgagrcgagataattgcttgagcccaggagttggagaccagcttgggtgacatagtgggaccctgtctctatgaaaaatataaaaattagcctggcatggtggcacatgcctgtcgtcccagcttttgggaggctgaggcaggaggatcacttgagcctggggagctcaaggctgcagcgagctgtgatcgtgccactgcactcagcctgggtgacagagtgatactgtctcaaaaaaaaaaaaacaattttgttgtagaaactgtaggtagctcagttaggagccatttcctatatgcctggagctaatgtttctctgctgtacataggtagcatatgtgggtgttaaaatcaatgtttggcatgttatgtgcataaatgctatttctttgttctggagtcttagccaagtatcctgatcagcaatgatttgggaagaggacagcatctgtattctctttgtgattctacacttaaatattttagagacatagaaggcaatatgataaacgaatat

SEQ ID NO: 475686 - DNA, 608 bp, Homo sapiens
ctttaatggaaaaaattatatcctaagaacttttccaatcgaaatgccaatcttcatgattgaccataaatttgtgactgaagttacctttgctatccttgtatccgagattgtcaacataagtactttcttggcaacaccattgttttattttcagtggcacctttctgtcctggggatatgcctttctattcctgtttccgttccctgggtggactgggctggcaaccctagaagtacaagggaagggcacacctactcgtcacctttaagcctcggtcacatgccaagcagccagctctatgcttttctatctcctttggcaccccagtgtcaaagatgctgcccacattgagtacttactctgtgccaagtatttagctgctctatatgaaatggccaagtggccactaagggtggtatgttccatcaacaatttcccttcctcaccttccccccaccccaaaatccacctcaaataaacctagctgctcagcaaaaacagcttgcttagtatccagatgcagcttcaaaacaaatctcttatattccagatagcaayaccacctttatagaaattaggagatattgttgtctagactatattg

SEQ ID NO: 475687 - DNA, 527 bp, Homo sapiens
gcagattccaggccctactgccagagattctaattatgtctgatgggggccaggtgtgatggatgaatttaaaatttttcaaaatctgtaagaattacaccaagatgtttaaatggtcctttttacttacttttgtatgtgtatctgtggaaggccaaatcatactttcagacatgtctgcttcaggggctaaaakaattcaatcagaccttagtttcttgccatatcttggcttggttttcctctgcgttagcattcatcttagacaggatttcccgtaagtggccataaatatcttcaggtttaccttcttctagcttttgttcaggggaaaaaagattcttttttgctgtaatcccaaagacccacagttgagtctcactgttctgatttgcccatccttgaaccgattagtataaccaggagcagctgatactctttttgaccaggtctgggtcaaatgtccaccacgcagagccaggggtggaaccggcaccaccagaaaccatcaactaaaagtgggggag

SEQ ID NO: 475688 - DNA, 485 bp, Homo sapiens
cagtattttccaaacaaaattagccatggaatttatttgagcaacacaatatccactggaatacttcaggaaatactgctctaagactgggctcaggactcttctctataaaaaacggaggacctcagagagcttttgttcctgtaagttgtatttattgatacttctcatgttagaactaaaaccaagataaattatttaaagtttttattatttcatttacaaaaaaaaaaatggcatttttatgaaaaactattttccaagaaataattagaaaagtggcactggtcttacaattctgcaaatctttaatgtctggcttaatagaagacagctaggttctcacatttgcttctgyagtcaacattatgtggatgtatattgagaacacctggcatcatccagctctatagttggaaataaaagctcaagacctcacagacctcctgaatgggttttacaaatctctggggtgagtcctcaga

SEQ ID NO: 475689 - DNA, 569 bp, Homo sapiens
cacttatggaaaatagaaagaacctatgttgaaatattgagggtgggttctcccaataataatacagacatgaaaaacatttgatggaaatccaacatccattcctgattaaaaattatcagcaagctagaaataaacagaatttcttaccctgactaaaggcatctacaaaaatatctgcagccaacatcatacttaaaggtgaaagacttgatgctttccctctaagattgggagcaagtaaagaatggcggttcttaccactctgattcaaaatcgcrctggaggttctatctattattccactctctaggtccatgtgtacacattgtgtagcacccacttacgaatgagaacatgtgatactttctgtgcctggcttatttcacttaagataatcacctccagttgtatccatgtggctataaaagacaagactttattcctttttatggctaaatagtattcaatggtgtatatataccacattttatttaaccattcatctgttgattccctatctttgctattgtaaataggatttggaccacatttcaagtacttaatta

SEQ ID NO: 475690 - DNA, 569 bp, Homo sapiens
cacttatggaaaatagaaagaacctatgttgaaatattgagggtgggttctcccaataataatacagacatgaaaaacatttgatggaaatccaacatccattcctgattaaaaattatcagcaagctagaaataaacagaatttcttaccctgactaaaggcatctacaaaaatatctgcagccaacatcatacttaaaggtgaaagacttgatgctttccctctaagattgggagcaagtaaagaatggcggttcttaccactctgattcaaaatcgcgctggaggttctatctattattccactctctaggtccatgtgtacacattgtgtagcacccacttacgaatgagaacatgtgatactttctgtgcctggcttatttcacttaagataatcacctccagttgtatccatgtggctataaaagacaagactttattcctttttatggctaaatagtattcaatggtgtatatataccacattttatttaaccattcatctgttgattccctatctttgctattgtaaatagsatttggaccacatttcaagtacttaatta

SEQ ID NO: 475691 - DNA, 483 bp, Homo sapiens
aggaaagggttttgaggtcaggacatgggtatstggtgtacatgggagtttggtggcctctattgtaggaggctttggaaatgtgtattgttgggaggtcctgagggaggaagtttgggatgaacatggagattctaggctgtggaggaagatgtaacatggctattggaggattctgggaccttaccttggtaccttggtaccttggtaatgaggacatcttcagctttatttttatgtatttacttttttttgagatggagtctcactctgtcacccaggttcgagtgcagtggcgtgatctcaaaatactaaaaattagctggctgtgttggtgggcacctgtagtcccagctacttgggaagctgaggcaggagaatcgcttgaacctgggaggcagtggttgcagtgagctgagatcacgtggctgcacctcagcctgggtgacagagtgagactctgtctcaaaaaaaaaaaaaatg

SEQ ID NO: 475692 - DNA, 644 bp, Homo sapiens
ttgtgtattttgaatgtaagtcccttatcaggtatgtcccctgcaaatatgttctcctagtctgtagcttgtattgtcattctcttgacaattcttttgcagagcagaagcttctaattttaatgacacagaacttatcaattgcttctttcaaggattgtgcttttggtgttgtatctaataagccatcaccaaacttaaggtcatctagattttctcctacrttatcttctagaagttttgtactcactattcatttaggtctacaataaacttggagttaattttcgtgaaagccgtaagggagcttctaagggggacacacactaacttctttgagagtgggcagtgattgtgaaactctcagctgggtcttacaacagaccccagatccatcaggagagcccagccttcagaacccatagtggaatatgtttcatgcatacacggaggagaatatgcagtcatatgctcacatgcatgtctgaacatgatcacacacatgaatatggctatgtcctgatccagagttctctcattctctgtaagtgattctttccttcaacttcttcattaagggatatattgacagaatgtcattaaaattaaaaacttctgctctgcaaaaaattgttaatggactg

SEQ ID NO: 475693 - DNA, 404 bp, Homo sapiens
aatagatctagctttgatcaaacacacaagatctgtctctcaattgatgacctgcctgtatctagtgtggtggcaatgcttgagagcagggacactgcaagataggtcttaaaggttagacaaggctagtttactgaatccattaaccctatttytaagagctgctaattgctggaactattggccctgtcttacctcccttttccttagcttcctctgaagctcacatgatattattatgtatgcacactgaggaagagatggacagaggggttagagaacgcatgcaaaacagaatgaacagttgtaaaagcaaaaagaaactagaatattaatcatttttagtgtgagcaggaaaagacttagcagaggtaaatattcagggaagagatacttaatccttc

SEQ ID NO: 475694 - DNA, 617 bp, Homo sapiens
ctccaatgcatccctaaacgctggactcaagaactatagccaaatttgaaggtaggggtggtggagtttcaaaacccccaggaagggctgaggttcaggtctgggagaatgactcagagtgagaaactggcttaatgaacaatgaaactgtgtttactgctctcctgagttgtggattaatatcatacttgtattactttcctattgctgctgttccaaataacaataaagaccttgaaatgttgcaagtctattatctyacagttctgtaggtctaaaagtctgacagaagcttcactgggcaaacatcagtgtgtccttagcagggccaagttcctttctggaggctctaggagaaaatctgtttctttgcaatttccagcatctagaagcttcacaaatttcttacctctgggttcccttctatcttcaaagccagcaatggctggcttcctcgtattgcagcactctgaaactgattattctacatcatttcccctgcttcacggacccttgtgatcatattagatttacctgaataatccagggtaatctattttgaagtcagttgatctattttgaagtcagctgattagcaactgtaattccatctgcaa

SEQ ID NO: 475695 - DNA, 651 bp, Homo sapiens
gaacagagacacagtgtcaagtcctatgaacaagaacacgatgtggtagtgtaaagcaaagagacagtgtggagtggaggaaaggaggaaacagtgaggaaaattttgaaggagaagcagcagggtgggggtatcaggaaggagagagattgagggttctgtgaatgtcatggtccaggacttgggacttggctcatttttttttggtagttctcagtagattccttgatctctatgagactcrttgcacaatttgaactacatcttctctagagcccctttcatctctaggatgctaggcttctcttaagcttaattgtgaatactctgaaaggagaatctttgctttcactgaagacataatatttggagcgcttcaatctcaatttttttgaggtagacaattctgttatagtacaagcctgtgtctttatctagaacatggtaattctgtagatcaagggccttcaccttatggtttttccacatggaatgatacatttcagttctttatagtctcatagcatgctgtttatctgaccaaaggcagttttgttgttgttgttgtttaacatattttctgtagctttctccctgaaaatgatgtcttcatatatctttgctgtatttgaatgcttttaacctcaaatt

SEQ ID NO: 475696 - DNA, 621 bp, Homo sapiens
ttataggggcaggaaaatgcttgtttaccatgaaacaatttaagtcagccaacatttaagtcaaaaacaataacttctcaaggttcctggtttgcttaggaaatcttaaaaacaatgttgtttgtggataaaggggaaggaaagaagaagggagaatgtttgatgtttaatacctcagtgcattctcaggtcacgactggccatgtgcccaaaactgcctgtaggataagcaccttcatgggatccaagcttattagtgcatttactttaaaagtatttgatccagagcaagtactatatggaaaatacttggtctttgctccctcggtgcaaagtgagacaactacttaaaatacaaataatggttttctgtgtcatgtccccttcagcagaaacacaaattacttacctagaatatatcctaataaaagattataattctttggaagaaaatacaatctatttttggtttaccagktacagaggaaaagctttctgttctaaatgatacacacatgttgtctttattcctgcacttcagatattcattattttgaatgattgaaatgtcaatttaaattttctcaccatacatgaataagaaaataaacgttttactca

SEQ ID NO: 475697 - DNA, 638 bp, Homo sapiens
aataataacagtaatagcccagtaattagtatacaactgctcaacctctctctcttgcctggagctggcaagaaaaataaccaatcgtactgaagaaaggaccaaggacttagggagaaattgaaagaaaaagcagcctagaaatcatgcattggagaaaaacagaatctgaaggttgtggcaaagcgaagagaccctgagattaggagggaaagtggatatgctttttcttaaaaaaagatatttctaaaggagtttctgatgttaaatgggatctcggcagaatgaaataacaaggcttttaactctaaagccctatccaycttcccagggaatgttcctgacccttcagcaccaaaagcaaacccttcgtacctgtgcttttccctccagttttggtacattgtggacataggtgttcgtttatccaaccaccctctctggtcccatttgtagcagagataatgctatggatctggcaaatcccattttcttttccttcctgggatacgtacagcaaagggacatattccagctctcactgaagttcgttgggccctgggactacattctggctaatggcatttaggtaaaagtgatgtgaaccacttctaagcctaacccatacaaaatgtcca

SEQ ID NO: 475698 - DNA, 638 bp, Homo sapiens
aataataacagtaatagcccagtaattagtatacaactgctcaacctctctctcttgcctggagctggcaagaaaaataaccaatcgtactgaagaaaggaccaaggacttagggagaaattgaaagaaaaagcagcctagaaatcatgcattggagaaaaacagaatctgaaggttgtggcaaagcgaagagaccctgagattaggagggaaagtggatatgctttttcttaaaaaaagatatttctaaaggagtttctgatgttaaatgggatctcggcagaatgaaataacaaggcttttaactctaaagccctatccatcttcccagggaatgttcctgacccttcagcaccaaaagcaaacccttygtacctgtgcttttccctccagttttggtacattgtggacataggtgttcgtttatccaaccaccctctctggtcccatttgtagcagagataatgctatggatctggcaaatcccattttcttttccttcctgggatacgtacagcaaagggacatattccagctctcactgaagttcgttgggccctgggactacattctggctaatggcatttaggtaaaagtgatgtgaaccacttctaagcctaacccatacaaaatgtcca

SEQ ID NO: 475699 - DNA, 619 bp, Homo sapiens
tatgttataggtgaagacactgaagcacagagaggatcagtgacttgcccaagatcacacagcctggaagcagcaaatcaggtcagtgaggggagctggtcccttgaggggctggaagcaggcacaatgatgtagctataaaaggaagaagcccaagagagctgtttgggccaggcgtggtgactcatacctgtaatctcagcactttgggaggccaaggcaggcaaattgcttggggtcagaagttcgagaccagcctgaccaacatggcgaaaccttgtctctaccaaaagtacaaaaattagctgaggagggtgggtggtgtgtgcctgtagtcccagctactcgggaggctgaggcaggaggatcgcttgaactcaggaggtggaggttacagtgagccgagatggcaacactgcattccaccctgggcgacagagggagactctgtctccaaaaaagaaaaaaaaaaaaaaaagctgtttgatgcacaaggatgataaatgacagtgggycgggccataggatgctgtagggtcaccttctgctcacacacaggttcccaggaagataatggtgggtgggatggaagagggagcctcagtttctctgtcttcct

SEQ ID NO: 475700 - DNA, 567 bp, Homo sapiens
gtaagcagtgcctgtgtaataagcatgaattttaaaaaatgaggtcagcagccttagagctaatggttaatgggtttgggtgtgggatttttttttttttaatttttaaaacattgagataaaattcccataacataaaattgaccattaaccattttaaagtgtacagtttggtggcatttaatacactcagtgttgtgcamccatcacctctctgtagttcaaagaccccaaaaaggagaccccgtactcactgagcgctcactccctgtctctccccgctcccccagcccctggcaactactaatcttctgtctgtatagattgacctattctgattttgggggtttttgaactcgccttccctggctgacaacctctcgccatccaggtgagactgtgtgaaagcccagctccctgcatttctgggtcttcctctccccactgggggctgcccccacctgtttccccctctgggcaccctggttctactcatcagcctggcttaatcccagcagcaggtccatgttctgctctcctgtggctgccacaaatgagaggtttcat

SEQ ID NO: 475701 - DNA, 567 bp, Homo sapiens
gtaagcagtgcctgtgtaataagcatgaattttaaaaaatgaggtcagcagccttagagctaatggttaatgggtttgggtgtgggatttttttttttttaatttttaaaacattgagataaaattcccataacataaaattgaccattaaccattttaaagtgtacagtttggtggcatttaatacactcagtgttgtgcaaccatcacstctctgtagttcaaagaccccaaaaaggagaccccgtactcactgagcgctcactccctgtctctccccgctcccccagcccctggcaactactaatcttctgtctgtatagattgacctattctgattttgggggtttttgaactcgccttccctggctgacaacctctcgccatccaggtgagactgtgtgaaagcccagctccctgcatttctgggtcttcctctccccactgggggctgcccccacctgtttccccctctgggcaccctggttctactcatcagcctggcttaatcccagcagcaggtccatgttctgctctcctgtggctgccacaaatgagaggtttcat

SEQ ID NO: 475702 - DNA, 567 bp, Homo sapiens
gtaagcagtgcctgtgtaataagcatgaattttaaaaaatgaggtcagcagccttagagctaatggttaatgggtttgggtgtgggatttttttttttttaatttttaaaacattgagataaaattcccataacataaaattgaccattaaccattttaaagtgtacagtttggtggcatttaatacactcagtgttgtgcaaccatcacctctctgtagttcmaagaccccaaaaaggagaccccgtactcactgagcgctcactccctgtctctccccgctcccccagcccctggcaactactaatcttctgtctgtatagattgacctattctgattttgggggtttttgaactcgccttccctggctgacaacctctcgccatccaggtgagactgtgtgaaagcccagctccctgcatttctgggtcttcctctccccactgggggctgcccccacctgtttccccctctgggcaccctggttctactcatcagcctggcttaatcccagcagcaggtccatgttctgctctcctgtggctgccacaaatgagaggtttcat

SEQ ID NO: 475703 - DNA, 557 bp, Homo sapiens
gaccagcaggtccctgccttctgcccactcccaggtctaggacaatgaggtgagaggtagacaggaccaagttccccagtgctgtcttctaggtccacctatcatgagagccrtgattcctagtttttatcaccctctccccaactttgccagctctccacttctggcagtggtggctgcccatgacttcaccttcccgtgcctcagtttcctcatctgtaaaataaggacagccatggtaatgagagttctggtcaatatgccaggcacctcgcttgcatcaatttagctcatcctttcagtgccctgaggggtgggtactgttatcatcccgtgtaacaaaaagagaaaaccgaaacagagagagagactcactatctgaggtcttgcacccctcaagcaacaaaagtgggatttcagcctaggctatctagattcggagtccacggtctcaatgaataataacaacaataataatattgtcctaatctgatgagtttttgatcagattcaatacaagagcataggcagaaaagcttagcccagtgcccagcaca

SEQ ID NO: 475704 - DNA, 557 bp, Homo sapiens
gaccagcaggtccctgccttctgcccactcccaggtctaggacaatgaggtgagaggtagacaggaccaagttccccagtgctgtcttctaggtccacctatcatgagagccgtgattcctagtttttatcaccctctccccaactttgccagctctccacttctggcagtggtggctgcccatgacttcaccttcccgtgcctcagtttcctcatctgtaaaataaggacagccatggtaatgagagttctggtcaatatgccargcacctcgcttgcatcaatttagctcatcctttcagtgccctgaggggtgggtactgttatcatcccgtgtaacaaaaagagaaaaccgaaacagagagagagactcactatctgaggtcttgcacccctcaagcaacaaaagtgggatttcagcctaggctatctagattcggagtccacggtctcaatgaataataacaacaataataatattgtcctaatctgatgagtttttgatcagattcaatacaagagcataggcagaaaagcttagcccagtgcccagcaca

SEQ ID NO: 475705 - DNA, 656 bp, Homo sapiens
ctgaccagcaggtccctgccttctgcccactcccaggtctaggacaatgaggtgagaggtagacaggaccaagttccccagtgctgtcttctaggtccacctatcatgagagccgtgattcctagtttttatcaccctctccccaactttgccagctctccacttctggcagtggtggctgcccatgacttcaccttcccgtgcctcagtttcctcatctgtaaaataaggacagccatggtaatgagagttctggtcaatatgccaggcacctcgcttgcatcaatttagctcatcctttcagtgccctgaggggtgggtactgttatcatcccgtgtaacaaaaagagaaaaccgaaacagagagagagactcactatctgaggtcttgcacccctcaagcaacaaaagtgggatttcagcctaggctatctagattcggagkccacggtctcaatgaataataacaacaataataatattgtcctaatctgatgagtttttgatcagattcaatacaagagcataggcagaaaagcttagcccagtgcccagcacatggtaagaactcagcatgttatttataatagtaataaaccattttatgttatgtaattatatattcatagataaatatagttgactcttgaacaaca

SEQ ID NO: 475706 - DNA, 351 bp, Homo sapiens
tggagatcccaagggttttaggagctgtacaccaggaaacagtgtcaaagaccaaacatayatttcacaatgtcacagtcttctaaaaactataactagcctagcaaacctatgatttctagatctttgcattttcacttaaaataaagctaaataaaaagcgtccattgaaagactggtaagcaagtagaagtaccagtggcaagctaatgtggaaaaaaaaaatcattcaggcagagtgaaaatgattgtagctcgagaaacgttgctgtaacagatgggaaaacattcacattggggctctgatggagaagagcttgtagcttaatttcaaatatgatagattagcag

SEQ ID NO: 475707 - DNA, 351 bp, Homo sapiens
tggagatcccaagggttttaggagctgtacaccaggaaacagtgtcaaagaccaaacatacatttcacaatgtcacagtcttctaaaaactataactagcctagcaaacctatgatttctagatctttgcattttcacttaaaataaagctaaataaaaagmgtccattgaaagactggtaagcaagtagaagtaccagtggcaagctaatgtggaaaaaaaaaatcattcaggcagagtgaaaatgattgtagctcgagaaacgttgctgtaacagatgggaaaacattcacattggggctctgatggagaagagcttgtagcttaatttcaaatatgatagattagcag

SEQ ID NO: 475708 - DNA, 351 bp, Homo sapiens
tggagatcccaagggttttaggagctgtacaccaggaaacagtgtcaaagaccaaacatacatttcacaatgtcacagtcttctaaaaactataactagcctagcaaacctatgatttctagatctttgcattttcacttaaaataaagctaaataaaaagcgtccattgaaagactggtaagcaagtagaagtaccagtggcaagctaatgtggaaaaaaaaaatcattcaggcagagtgaaaatgattgtagctcgagaaacrttgctgtaacagatgggaaaacattcacattggggctctgatggagaagagcttgtagcttaatttcaaatatgatagattagcag

SEQ ID NO: 475709 - DNA, 585 bp, Homo sapiens
gcagctgcctatagggtgaagaagctgaagagggaagaagtaatgcgttgttccrggcactgccctgacagtaatagccactggtgtccttctcctgatgactctgtacttccttggttcctgagacaaccctgacaaagggaaaattaagacattaacaatcccagatctatttgttgataagacctggaattagcagtgctacccacaggttaaggataagcccaaggtattctggtagacttcatcacagaaacaccctcctactaccccagcttatattatttgactggaccatacccatcaaattctgggtctttcataaaacatctgctgaatgaataaatgctttgtcttttagaagcagagtcaggctttttaacttgcctaattatttggggtcccattactgtgcctctgtcttcacatggctttctcctctggtctctctcttttttttttctgtctgtcaaaagggcactgtcattggatttaaggttcacctggttaatcaggaagatctcatcttaagatccttaattatatccacaaagaccctcttttcaaacaagatcacattcacaa

SEQ ID NO: 475710 - DNA, 541 bp, Homo sapiens
tggtttagcattgtggttgttttttcatatgttgtggtttaggcttatgtttttttcttagcatattaatgatatattgttattaacaaaccaaacttagacttaaataaaccagtttattacttctcctaattctattcattgattgggcagttctgctggtttcacctgggttcacttatgtgtctgtagttagctggtggmtcaactgggatggctgaaaaagatgaaatgtctggcctgtttgtctccacatggtttttcatcctgggtgtcttcacagcatggagatctctgtgtaccatgagggtgagaagctgcagacctctaatggcggctgaggctagaaagacacatagcatcagttcttctgcattctattggtcaaagtaagtcaggggaccaaaccagtttcaaggggtggcaaagtcacattcaaaatgcgtgtgcatccactggtaggaggattattatgcctttctttgggcacttaatctaccatcaggtttatctattgatttgttttttgaccttattatta

SEQ ID NO: 475711 - DNA, 622 bp, Homo sapiens
tgcagctcaaactctctctctcctaaatcctgctttcttttccctcccaggtgttggtcttaagaacgcaccctaacaaaccccctaactgctaatctcttctgattggcttctagagaaacccaatctgtgaccgtctctaacacctgaatctaatgtacaggatcctctcttgtaatagcctattgttatccctcatcacaatttgtgaataatagcaataataataataattttgtatttaatatctccttaacyagactatgagttagctacagactctgtttttatttaaaattctcatattttatcatagaacttttaattaattttgacctttaaaaatattgcataaaagtatttatcatgattactaagcttttttgtgcctccttaaattttgtgcctaaggtaaatgactcattcacttcatcctggtcccaactctagcagtaaccacatatttttgttatcgttggtttgttggttggttggctgtgtgtgtgttttttgttcatttttgacacacctaaggcaatgcctgatatatagtagtcactcaataaacatctatcaactgaataaataaatgaattaactgcaagaattttcattacaatgc

SEQ ID NO: 475712 - DNA, 450 bp, Homo sapiens
atctagagatgatttaaagtatgtgggaaggccaagcacagtgtctcccacctgtaatmccagcactttggaaggccaaggtgggaggatcacttgagctcaggagttcaagaccagcctgggcaatatagtgagaccctatctcttatttaaaaaaaaaatagtaattttaaaaaaaagtatatgggaagagcagtgcaggttttatgcaaatactacaccatttttatataagggatttgtgcatctgcagagtttggtatctgggtaactaatccccagcagattcagagggacgactgtacttaagggaatgacggaagccagcctagcagagctagagaatcgaacaccagatgaggaggaactggaatcccaaggcagtttcactgtcttcatacatagttccctgggcccaatccagaagcccccaagccagcaaagctccta

SEQ ID NO: 475713 - DNA, 450 bp, Homo sapiens
atctagagatgatttaaagtatgtgggaaggccaagcacagtgtctcccacctgtaatcccagcactttggaaggccaaggtgggaggatcacttgagctcaggagttcaagaccagcctgggcaatatagtgagaccctatctcttatttaaaaaaaaaatagtaattttaaaaaaaagtatatgggaagagcagtgcaggttttatgcaaatactacaccatttttatataagggatttgtgcatctgcagagtttggtatctgggtaactaatccccagcagattcagagggacgactgtacttaagggaatgayggaagccagcctagcagagctagagaatcgaacaccagatgaggaggaactggaatcccaaggcagtttcactgtcttcatacatagttccctgggcccaatccagaagcccccaagccagcaaagctccta

SEQ ID NO: 475714 - DNA, 450 bp, Homo sapiens
atctagagatgatttaaagtatgtgggaaggccaagcacagtgtctcccacctgtaatcccagcactttggaaggccaaggtgggaggatcacttgagctcaggagttcaagaccagcctgggcaatatagtgagaccctatctcttatttaaaaaaaaaatagtaattttaaaaaaaagtatatgggaagagcagtgcaggttttatgcaaatactacaccatttttatataagggatttgtgcatctgcagagtttggtatctgggtaactaatccccagcagattcagagggacgactgtacttaagggaatgacggaagccagcctagcagagctagagaatcraacaccagatgaggaggaactggaatcccaaggcagtttcactgtcttcatacatagttccctgggcccaatccagaagcccccaagccagcaaagctccta

SEQ ID NO: 475715 - DNA, 614 bp, Homo sapiens
ctgtacccgatgctgttctcccaagctcctgtggccacctctgagggctggagggaggctcattgtgcaggatgggagcctaacatttcaggaggtatctaaacttgaggtggcaatgcttggagccaggccccaggcaggacactgtgactataggatttcacttcagcctcactgccgcccagggaatagcaatcctcatcccgtttttccagatgagagaagaactcatggagaggtggcggggctcgctcatcgagtccatggtgaagcagggattggaattgaggcacagcatggcgtacattttttgtgggtagaaggggtctctccccagcctatgtaaggacccacatccactgttcccattcaggatgtggtggcctttgaccccaagcagaagtgtacgacagggctccattctaggggcttacttcagcttccaagagcctgccctggtgtgggtggagctggaggctggctcctccctgtagcagggggattgccttataagcccaagaatgcagccccacgctgggatggccaacagtggctgcggtctgyagagctgaaaagggctggcctaggcctggccccctgaaccccactggtgg

SEQ ID NO: 475716 - DNA, 613 bp, Homo sapiens
gttccttctttattcctttattccttttttaaaccaaatataaaattctaagccccccagtcattttgaacagawccctcctcccggcgaaggcactacaaaattaacctgaaaaacttgttcaggccatcatggaagggtggtctgtgtattcgtctgttctcacactgctggaaagatactacctgagactgggtaatttatttttaaaaaaagtttttaattgactcactgttccacatggccttaggaaacttacaatcatggcagaaggggaagcaaggcacgtcttacggggtggcaggagggagagagagaagggaggagagggagagagagaagggaggagcccagacacttatccagtaaccagatctcgtgagaacactgtatcaggagaacagcatgggggaaaccacccccatgatccaatcacctcccagcaggtccctccctcaacatatggggattacaaataggattacaattcctgcaagcaggctctgtggcgcaatagcctaaatcgaaaggattacaataccagatgcaatttagatggggacacagtcaaactgtatcagctggacgtgccccattatatttgcctcccttt

SEQ ID NO: 475717 - DNA, 447 bp, Homo sapiens
agccacttgggaggcggagcttgcagtgagctgagatcacgccactgcactccagcctgggcaacagagcaagactccgactcaaaaaaaaaaaaaaaaaaaaaaaaaaaaaggagttccctggtatcaagatcacattttagaaggcgttatttctacatagttctggggaaaaggcataaggagtttgcaacctaaacattatttgttccagagaacaarggaaagcttaggttttatagcaaaagttcccatctgggttcctagtcaagtgcttttatgcaaatgaagatctgaaacttgaaactcagttctgattggttgatacagctgagctctgattgactagctcaggtgagcccccaaagttaaaaaggtgttggttttcaggaaactcacagtgcttgtgacccctagttaacaagtggcggcttagctctttttaaa

SEQ ID NO: 475718 - DNA, 586 bp, Homo sapiens
tcttcattggagggttgagctttgaaacaactgatgagagcctgaggagccattttgagcaatggggaacgctcacggactgtgtggtaatgagagatccaaacacsaagcgctccaggggctttgggtttgtcacgtatgccactgtggaggaggtggatgcagctatgaatgcaaggccacacaaggtggatggaagagttgtggaaccaaagagagctgtctccagagaagattctcaaagaccaggtgcccacttaactgtgaaaaagatatttgttggtggcattaaagaagacactgaagaacatcacctaagagattattttgaacagtatggaaaaattgaagtgattgaaatcatgactgaccgaggcagtggcaagaaaaggggctttgcctttgtaacctttgacgaccatgactccgtggataagactgtcattcagaaataccatactgtgaatggccacaactgtgaagttagaaaagccctgtcaaagcaagagatggctagtgcttcatccagccaaagaggtcgaagtggttctggaaactttggtggtggtcgtggaggtggtttcgg

SEQ ID NO: 475719 - DNA, 586 bp, Homo sapiens
tcttcattggagggttgagctttgaaacaactgatgagagcctgaggagccattttgagcaatggggaacgctcacggactgtgtggtaatgagagatccaaacaccaagcgctccaggggctttgggtttgtcacrtatgccactgtggaggaggtggatgcagctatgaatgcaaggccacacaaggtggatggaagagttgtggaaccaaagagagctgtctccagagaagattctcaaagaccaggtgcccacttaactgtgaaaaagatatttgttggtggcattaaagaagacactgaagaacatcacctaagagattattttgaacagtatggaaaaattgaagtgattgaaatcatgactgaccgaggcagtggcaagaaaaggggctttgcctttgtaacctttgacgaccatgactccgtggataagactgtcattcagaaataccatactgtgaatggccacaactgtgaagttagaaaagccctgtcaaagcaagagatggctagtgcttcatccagccaaagaggtcgaagtggttctggaaactttggtggtggtcgtggaggtggtttcgg

SEQ ID NO: 475720 - DNA, 586 bp, Homo sapiens
tcttcattggagggttgagctttgaaacaactgatgagagcctgaggagccattttgagcaatggggaacgctcacggactgtgtggtaatgagagatccaaacaccaagcgctccaggggctttgggtttgtcacgtatgccactgtggaggaggtggatgcagctatgaatgcaaggccacacaaggtggatggaagagttgtggaaccaaagagagctgtctccagagaagattctcaaagaccagrtgcccacttaactgtgaaaaagatatttgttggtggcattaaagaagacactgaagaacatcacctaagagattattttgaacagtatggaaaaattgaagtgattgaaatcatgactgaccgaggcagtggcaagaaaaggggctttgcctttgtaacctttgacgaccatgactccgtggataagactgtcattcagaaataccatactgtgaatggccacaactgtgaagttagaaaagccctgtcaaagcaagagatggctagtgcttcatccagccaaagaggtcgaagtggttctggaaactttggtggtggtcgtggaggtggtttcgg

SEQ ID NO: 475721 - DNA, 586 bp, Homo sapiens
tcttcattggagggttgagctttgaaacaactgatgagagcctgaggagccattttgagcaatggggaacgctcacggactgtgtggtaatgagagatccaaacaccaagcgctccaggggctttgggtttgtcacgtatgccactgtggaggaggtggatgcagctatgaatgcaaggccacacaaggtggatggaagagttgtggaaccaaagagagctgtctccagagaagattctcaaagaccaggtgcccacttaactgtgaaaaagatatttgttggtggcattaaagaagacactgaagaacatcacctaagagattattttgaacagtatggaaaaattgaagtgattgaaatcatgactgacmgaggcagtggcaagaaaaggggctttgcctttgtaacctttgacgaccatgactccgtggataagactgtcattcagaaataccatactgtgaatggccacaactgtgaagttagaaaagccctgtcaaagcaagagatggctagtgcttcatccagccaaagaggtcgaagtggttctggaaactttggtggtggtcgtggaggtggtttcgg

SEQ ID NO: 475722 - DNA, 518 bp, Homo sapiens
tcttcccaggcaccaccctcctgacccacagcacgcagcagcctctctctgcccgccgcctctccctcctgccctctgcccaggccgcccctggggaccttacccactgagcccatctccacctgcctygcggtccttccttatccgagtcggatgccactggtcctctttgctgtacttgctccctgcctgtaccactgtctcccgcctcctgctttccttgctgaattgctgggtccagccccatccctcctcccttactttcctgcctccgagcaggggccccagcctcgctgaaggatctacttcgacattcctgactgctggcctctgcaggcagcatccccccttgggaccttcccgctccctgctcacccacctccttgctcacccacctccccctcctccgagcacagacaggccccggcattgcccctgcccgtcccttgagctccggctgctcccgggtcccatcattgtcagcattctcagaagcacagcccctgccgccacctcct

SEQ ID NO: 475723 - DNA, 596 bp, Homo sapiens
tttggatggcaaaactgacctcaactcacttaagcagaagacaattcaaggcaggctattggggggctggggctggaggcctggaaatggggtaccttggagggccccagccaggacctcaggaagccgtctgggcagtggtctgcactccagggtggggtgggagcttggattggccctgcttacaatgggcttctctctcagatgtatcttgcaaggagagagagtcaccttgggcragctgactcccacccacccaggccccttcctgacagtccttctaggctgttcccaaaggcatggctggctgtccctaggatacatggggccctgggcatatatttcctgcaggactcctgtctatatagacaatttgattaaaaaatttataacaagattcatgagcccacatggggaatagcaagatgtatcaaggaagatttaggggacggggaggagaagcacgaacacatttgctcactgtctgctcagtgcttgcagagaccctcgttactgctcaggctcaggagctatctcttcctgttctttatggtcgagtgtgctgtcccagctaatttcatatttatatctcccac

SEQ ID NO: 475724 - DNA, 596 bp, Homo sapiens
tttggatggcaaaactgacctcaactcacttaagcagaagacaattcaaggcaggctattggggggctggggctggaggcctggaaatggggtaccttggagggccccagccaggacctcaggaagccgtctgggcagtggtctgcactccagggtggggtgggagcttggattggccctgcttacaatgggcttctctctcagatgtatcttgcaaggagagagagtcaccttgggcaagctgactcccacccacccaggccccttcctgacagtccttctaggctgttcccaaaggcatggctggctgtccctaggatacatggggccctgggcatatatttcctgcaggactcctgtctatatagacaatttgattaaaaaatttataacaagattcatgagcccacatggggaatagcaagatgtatcaaggaagatttaggggacggggaggagaagcacgaacacatttgctcactgtctgctcagtgcwtgcagagaccctcgttactgctcaggctcaggagctatctcttcctgttctttatggtcgagtgtgctgtcccagctaatttcatatttatatctcccac

SEQ ID NO: 475725 - DNA, 610 bp, Homo sapiens
gcttgctgccccctcccccacaccgttcctgtcccctgatgccacagctctctcctcccatagcggcattttccttccctctttccttaggtcacactggtgacagagcagcggcagaatatgatgtgtgggggaataaaaatgcattgttctcaaattacatggtggtgctcaaacggacccaggtgaccgagctcagtcacgggatgggccgggccacacagcctctgagacgggcgtgtggggggatgccagggccgggggtggcacgagccctggccacttagggcccctctttgaaaggaaactcctcactgagccccccagggctctgtggccagggacagccgacaagctcagcagagttccagggaggcagggccgtcctgcagccactgctagcaagaatyagaatccctgacttttctcggcctttccctgtcagtggctcgcagtggccgagaggcccctgggggacactgggctctgggcctgaggcctcggccgtgtccttctgcgtcctgcagcctcagcagcactggtccttccccgttctgcagcatttccctttctgatgaggcatccggtcagcgggtgggaaggtcagtcc

SEQ ID NO: 475726 - DNA, 641 bp, Homo sapiens
tcagtacataaataacacagtttcaatgagtaagagatgtaaagaaaataaaatagaaatggatagagcttgagggaggcctattttaggggatgatcagggaggcttctttgagaggtgacatcttggctgagccttcagtgargaggaggaagcaatgtgaagatctggttgcagagcttgccagccagagggaagagcgaaggtacagaccctgagccaggactgggcttggcatattttaagaatggaaagaaggccagtgttctccaatgtgcctggagtataagggaggaggagaaggttggcgggagaaggatggaatctcagagaagatgttttctgtcccttggtttattatctgtcctctcccacaagaatggaatcttctcaaagacaagaaccttgttggtcatgttcgttcctgtgttcacagagtctagttcatgttagatgctcaataaatatttgttgagtgaatgaatcactgagtggttgtttctaaccactgagtttcaaccatactcctgtggaactctgactgacctgagatgttctaatgttgaataattactctttttttttcactttgcaggaagaaaagaagtaagcgaaaaagaaatatgacaataatttcctcc

SEQ ID NO: 475727 - DNA, 546 bp, Homo sapiens
ggagatgcccctttccatggctcagcacaattgtaagcacctctcattctatctgcctttatacctgggtgggaaataggatcctggacggctcaaagacagatgttggcatggtagagaaaatgtccctggctagctaaggtgggggactaaagagggagtggatgaagccagtcaaaatgtccctctgaccagggacagtggtgagatcatccctcatcctctaccttccccattaaagaactaaggatgagaattttgctttaaagcaagaaaaatctcagccatatgactggaccagcagtgtgaatgagtgacgagacaggcatgaggcacctggtggtatcagaatgtttacagcatctcccagtaccaatcttcatcagcaccctgtccacctggtataaagccaggttctgtgcttgaatagcaccaaagccatggataaaagtggaggcaggacctggaggttagaaggtgacctgagagcacttyggttttctcagagttcttgttttctatcatagactgtcttagaagctgtgg

SEQ ID NO: 475728 - DNA, 372 bp, Homo sapiens
gggaatatgcctacaatatcaaagtcctcttgtctcagaagatggatttaatacactggtagtatgggaaaaaccatttgctattctaaagaaccctatatgtagaacaactatgagcctgcctccttcgttctttttctttcattcttttttaggatcgtatataccccaagatttcattagttcagacattccttgtatatttacacaggaaatacagacttcggtatmagtacttagcataaaagtcagagaagccagagcagaatatacttttccttgtaagcatttgccacctcactcaaataagttacagaattccattatccaaattgttacacatgtgtgacagaggttgacctttcgtcatgt

SEQ ID NO: 475729 - DNA, 609 bp, Homo sapiens
tctgataatttttacaagggtgattatagaaattaaatagagaaaagtataagccatgtgcaatttatcatgattatacttccttggttttataaacccagttttgagaaattatatcccaactcaacattattttataaaataaatatatcaaattctgattgttttgaggatatgggagtaatattatttcctccctttaaaatattattttaacttaaaaagaaatatgatgtgmtgcaatgagatagatctgaaatgatttagaaattttgaagaaaattttcaagtttgaatttgcctgaattaacatattaaacattatttaatatcttggcatttatgtaattaattcattatataattaaagcaattgtataggaatttttcagaattttttatgatttgtgaaaggggatcactgagctacagaaaaaaaggtttttatttttctagaaattctcttttgtaattgtatgtcaggcactatttgcagcccttgatatgtcatatttcttttattttttgcttactctatagagttattattctcttcttatacacaagaatgagcttggagaaattaagtaacttatctgaagtcaccca

SEQ ID NO: 475730 - DNA, 579 bp, Homo sapiens
cctctcagggcttgttctagtggctccgaaagccagtgggagcragcgcgctttgcaaagccttgggcgccgggccttggcgcgcctttgccggatccttccggccacgggcggggcgagcccagaggagaagagccgaggggcggtgcccgggccagggggcggaggcaggcggctctggctccctctcgggacgctctttccttcttcctcttgttcctcctcctgcctctcttcgcttcgcctgcaaacgcggtgggggctgctcggcggtcaggagcaggtgagagctcggagcttgggggtgggggtccgggtgccccgggtggctagacccctctcgccgggcggggacagaggaggagcgcgggggcgacggcgtgagcgcgctatcggggtcccacgcccgtagctttctgccccggggttagtgtaaggggcgtctcctgcttatgagtcgccgggacggggctgggagcgcacgaggagacacgattcctccccacccctaaatgcacactcaccccgccaccccccaacacacacacacatacacacacacactaccactagattagg

SEQ ID NO: 475731 - DNA, 575 bp, Homo sapiens
tcagggcttgttctagtggctccgaaagccagtgggagcgagcgcgctttgcaaagccttgggcgccgggccttggcgcgcctttgccggatccttccggccacgggcggggcgagcccagaggagaagagccgaggggcggtgcccgggccagggggcggaggcaggcggctctggctccctctcgggacgctctttccttcttcctcttgttcctcctcctgcctctcttcgcttcgcctgcaaacgcggtgggggctgctcggcggtcaggagcaggtgagagctcggagcttgggggtgggggtccgggtgccccgggtggctagacccctctcgccgggcggggacagaggaggagcgcgggggcgacggcgtgagcgcgctatcggggtcccacgcccgtagctttctgccccggggttagtgtaaggggcgtctcctgcttrtgagtcgccgggacggggctgggagcgcacgaggagacacgattcctccccacccctaaatgcacactcaccccgccaccccccaacacacacacacatacacacacacactaccactagattagg

SEQ ID NO: 475732 - DNA, 541 bp, Homo sapiens
gctgcctgggtgactcatgtcttgggagaagtcttgttgtagtgactttttttttttttttgagacggagtttcgctcttgttattcttattatcatttttgagatggagtcttgctctgtctcccaggctggcgtgcaatggtgtgaccttggctcactgcaacctctgcctcccaggctggagtgcaatggkgcaaccttggctcactgcaacctctgtctcccaggttcaagcaattctcctgcctcagcctccccagtagctaggattacaggcacacaccaccgtgcctggctaattttgtatttttagtagagacgggggtttcatcatgttggtcaggctggtctcaagctcccaacctcaggtgatccgctcgccttggcctcccaaagtgttgggattacagacatgagccactgcacccggcctgtagtgacttgttaatgcataagccttctggctttacgacttctgccttgtaattcccacagcttgggcagattcattcaacctggggttccgatgtgttacttatc

SEQ ID NO: 475733 - DNA, 559 bp, Homo sapiens
agtcccttaggcttggaagcagacagacataggcgattctgttgcttactattatagctgtatgcctctcagcaagttagttacctctctaagccccaggttctgaatctgtgaaatatctatgaaaatgagataatgtatgtcaatcacttagcacaaagcctggcacctagcaagcattcaaaaatattatctacggctagccaaggaaatgattccacgttggtgaagctcagaaatgactttggccrtcattgtctcagtacaagccctgcttggagggtccctggaaatcaggttgcggatgggagaggaaacacaggtggagggatgcagagccctttggctctcatcttactctcagttggagaaagctctccctaatgaggaaggaaaccctgaattattccgtccaggagaactgagatgagcaagactagactgcttctcctggatagtcagtaatgacaggggaagccccctggcttaccgtggacatcgatgaccgtgagggccccgagagtgagtcgagctccactgctcagcttccctcgcacca

SEQ ID NO: 475734 - DNA, 478 bp, Homo sapiens
tgtccattcttcatcaaacctaagccccaaaacacagttttccctgggtcttcactttcgatggttccaaagtcatgtaaaactttgattaaataaaattttaatgcttttctcttgttaatctgtcttttattataggagtattggcggtgaatgaccttcatgctaggtgaagaaagggatcacaccttttcacccctacagctcttccttgagtgaaatcaagacactccaaccatttaaactgaatagggaaagaagtcacaagtagataacatgcagcctggggaaggagggaggcttgggagcttttggttctcaatctacattgcacatgagaaaaaccaggggtgcctgaaaaatacagatgcccaggcattctgggaggggaggagccaggaagaatccattgggagattttaaagcatyccagatgattctacaatgcaggtttggaagcactgctttaggaatcaat

SEQ ID NO: 475735 - DNA, 535 bp, Homo sapiens
cagataatttgaatatgctctaatttatgcaaaagcaaatgactgacggtcttggcatcttaactacaattagaagcaaatcatccgcaatacgtccactcctagcacagagtggccctcaacaaatgttagcaatgataccatagttttgttattattacttgatcgtgacatktttttttttttcttttttgagatggagtcttgctctgtcacccaggctggtgcacagtggtgtgatctcagcttacggcaacctccgcctcctcccaggttcaagcaattctctgcctcagcctccctagtagctgggattacaggcaccgcccccacccaccaccacacccggctaatttttgtatttttagtagagatggggtttcaccatcttgaccaggctggtcttgaactcctgacctcatgatccacccgcctcggcctcccaaagtgctgggattacaggcgtaagccactgcgcccagccctgttgatgttatttttaaggcagacagaaacttcagaagtcagccaccaa

SEQ ID NO: 475736 - DNA, 582 bp, Homo sapiens
ccggttgagaagcactcatctccatccagtcatcttttgttaattcctctggcatggtgtctatttgctcttgaatttctccaagatccatatcttgaaacccttcactccccatcttttttgtcacatccacaatctctttttttatttccttgattggctctgttgtattaggttggtgcaaaagtaatcatggttttggccattaaagtaatgttatgtacaacatctaggcacagttttcttctgcagaaatttattgtttcaggcttttatggttttttctataaccacaatggcatcttcaatggtgtaatcttttcacattttgatgatattctatcagcactctcttccatagcrctgacaatactttccatagagtactatgtgtagtgagccttaaagttcgttgagacccctggtgtagaggctgaattcattttcacaatgatataattggacaatatgatgaaagttactaactgtaattagcatttaacttattagcaacattgtattctttattgagctgaacaaacaactcgaaacatcttatattgctttaaaaataatatattt

SEQ ID NO: 475737 - DNA, 648 bp, Homo sapiens
gctggaaattactttttatctcactattcatagcatttcatatcaatacaaagattgacacatctagatataaatatacatagggagataaatactcacatagagaattctataaatatttctatctaaacatttatgtatacaaaacatgttccccaaaagacatttttaatcttttagcatgcactraagatgctgatgtagaattacttcttttttcttttgctaaataacatgtcagaatggaacatagttatacaattttgtttatgtaaatatcaacaaagctctatcttcaaaggcaggccacagaaataagctgaaaagaaagtcatgtaacacatctgtccaggacagtatttcagcactctgcatgtctcctcattctgtgcatgttgtgttcacacctaccatttggggcctgtctcgacaaagccacagtcaccatttagataatttgataattgtatacacctgggctgagctacttggctggttgggatcacctgggctgtgcaaactggctgattgcaatcacctggtttctgctaatttgcttaatttatctcagcttcaggggtagaatacggagatgtcatctgacctactttatttctgaggttttttttaagggtcatatgcagaaat

SEQ ID NO: 475738 - DNA, 360 bp, Homo sapiens
atacatttttagtgtataatttagtgagaaggattgcctggtgtcaggatttcaagaccattttgcccaacatggtgaaatcccrtctgtactaaacataaaaaatttagttgagcatggtggcacacgcctagaggctgagtcaggaaaatcacttttaactccagaggtggaggttgcagtaaggcaagatcatgccattgcactccagcctggttgacagagcgagacttcatctcaaaaaaagagaaagaaatataaataaaatccttacatttctgagtcctgaaaaattattaaatatttgttatatagttttcttttaacatttggtctctctgcctgcgaacatatagactt

SEQ ID NO: 475739 - DNA, 360 bp, Homo sapiens
atacatttttagtgtataatttagtgagaaggattgcctggtgtcaggatttcaagaccattttgcccaacatggtgaaatcccatctgtactaaacataaaaaatttagttgagcatggtggcacacgcctagaggctgagtcaggamaatcacttttaactccagaggtggaggttgcagtaaggcaagatcatgccattgcactccagcctggttgacagagcgagacttcatctcaaaaaaagagaaagaaatataaataaaatccttacatttctgagtcctgaaaaattattaaatatttgttatatagttttcttttaacatttggtctctctgcctgcgaacatatagactt

SEQ ID NO: 475740 - DNA, 543 bp, Homo sapiens
gtgaggatgtgcggatagaaaggtagtggtgaatcaagcgtagctgtgatggttgagcatatgctctgctacttgagataaaggagaacaggttcttctaattcaagacacaatcaatttatggtctcaggagagcaagaagcaatgggccaacgagtctggatacattccagaggctacaaggggttttatgycctgagcctgggttctgtccaagccacaaggggttttatgccctgggcttagactgtagtgtggcagggcagccttccaccctttggcacagagcttggtgttccacaggccacaaggggttttagaccctggaaccaggacatgttccaagactcttttatattatgtcagacaagcaagccctgcctcagctcttctgccaacaccaaggaattttacagtttgtgcaggtcctttgaattttactaaggttaatttcccatccttgagataagagttgggctcttacccgctccaagccccagctaactagttcctcagtttcaccctgaccaggccatttagaca

SEQ ID NO: 475741 - DNA, 543 bp, Homo sapiens
gtgaggatgtgcggatagaaaggtagtggtgaatcaagcgtagctgtgatggttgagcatatgctctgctacttgagataaaggagaacaggttcttctaattcaagacacaatcaatttatggtctcaggagagcaagaagcaatgggccaacgagtctggatacattccagaggctacaaggggttttatgccctgagcctgggttctgtccaagccacaaggggttttatgccctgggcttagactgtagtgtggcagggcagccttccaccctttggcacagagcttggtgttccacaggccacaaggggttttagaccctggaaccaggacatgttccaagactcttttatattatgtcagacaagcaagccctgcctcagctcttctgccaacaccaaggaattttacagtttgtgcaggtcctttgaattttactaaggttaatttcccatccttgagataagagttgggctcttacccgctccaagccccagctaactagttcctcagtttcaycctgaccaggccatttagaca

SEQ ID NO: 475742 - DNA, 651 bp, Homo sapiens
gtggtggaattggtgagttgtgctccaggaaagaaggtgcctggaagacagagatcagcgatgttaggaggcactctaaaaaaatatattctttcctatttatatagagcttcatggttcccaaagcactcttaggtgcactgttgcatttttgtaacacccatctgcattagattagagtttatctgtacagatgaggaaaactgagtgacagaggcgtaaatagatatgcgggaatttgcatgagtcaggcagaattagaacaagaaatcgccttcctaaatttcctaatttcctatatgctgtttccaggatgtagcaatacccagcttctgacttctctttcctcaccgttgagaccatttctgggggattttgtcttcattctttctttttgttctcctccccaaaattgtgggtttgtttagtcattctggaattctctgttaatctcccaccaaatgtccattgacrtacttgatttctcatttttgaaggaagattcaccaggtgtaaattcttaatatatgctagcaaagacaatgatttcatcacattataaacttctcgaatgcaagaaacttatttcccattttatctctagcacctttgacaaatatttgtggaatgaatgaataatgaatgaagggg

SEQ ID NO: 475743 - DNA, 557 bp, Homo sapiens
agtggcactcatagctcaccataaactcgacctattgagctcaagcgatcatcccgcctcagcttccccattagctgagaccacaggtgcccwccactatgtccggctaattttttttcttttcttttttgctagtgacggggtcttgctatgttgcccaggctggtcttgaactcctggcctcaagtgagcctcccgtctcagcctcccaaagtgctgggattacaggcgtgagccacaatgccaagccatacaaaggaatgtcttaattcagcaagcttttatggcatcaatgctatgtgattaattccaagtacttttccctggggaactcttattctaccaggagattccaaatggtggtaaacactttattatgattcaaagcgttaattactataatggaaaaaacctatctcattgggaaccaaggagagaaagaattcttggagagaattattgctgaagtatttacaatggaagttgctgctaaactgggtgttaaaacacagttgatgttcgctaggtgcaccaaaggtctgcatgaagcagaagtg

SEQ ID NO: 475744 - DNA, 557 bp, Homo sapiens
agtggcactcatagctcaccataaactcgacctattgagctcaagcgatcatcccgcctcagcttccccattagctgagaccacaggtgccctccactatgtccggctaattttttttcttttcttttttgctagtgacrgggtcttgctatgttgcccaggctggtcttgaactcctggcctcaagtgagcctcccgtctcagcctcccaaagtgctgggattacaggcgtgagccacaatgccaagccatacaaaggaatgtcttaattcagcaagcttttatggcatcaatgctatgtgattaattccaagtacttttccctggggaactcttattctaccaggagattccaaatggtggtaaacactttattatgattcaaagcgttaattactataatggaaaaaacctatctcattgggaaccaaggagagaaagaattcttggagagaattattgctgaagtatttacaatggaagttgctgctaaactgggtgttaaaacacagttgatgttcgctaggtgcaccaaaggtctgcatgaagcagaagtg

SEQ ID NO: 475745 - DNA, 649 bp, Homo sapiens
cttgggaggctgagacaggagactcgcttgaacccgagaagtggaggttgcagtgagccgagatcgcaccacagcactccagcatgggcaataaatagagtgagactgtctctcaaaaaaaaaaaaaaagtacaaagatcgaaaaagatctgccatgccaacaatgacaaaagaaatatttgagtggcagaaggatggatctttctaatgtgaccacatgaattggccactatcagtggtggttagtagaaacgtgttcttctgacttgcattaaatcatatcaactaggtcctggatacttgtgaagccactcattttcatatatcagctcaaagacagggtcacactcttcttgtccactgagccatctatactaacagaagctggtggagttcacagctccagagagaggcagacatgcacagagaggacyccaaatcaatgagcatgcactgtccccaagacccaggaacctgaccactgagcgacttgctcttcctggagagtctgtttgctccttcctgttggccttcctcaaatatgtattgggcacctactctgtgccaggtgttgtttgaggcacagtgggttctatgctgaagaagacaaaaccatggagctcaccttctggtgctggtgacatttcag

SEQ ID NO: 475746 - DNA, 529 bp, Homo sapiens
gagacagggtttcatcatgttggccaggctggtcttgaactcctgacctcaagtgatcctcctgcctcagcctcctaaagtgctgggattacaggygtgagccaccactcccggcctgaactatgcattttaatgccaagaaagtccagaagtttcactactgtgggctaggttttgaatctccttaccttggggcttatataatgtgcgtagtattaatttggatccagtacctacacatatatattcttggtttttattttctcatgagaggttgtggggggtttgttcttttgtttgtttttcttttcttttctttttttttttaaccatctagaggtccaggcaaagacagacgttcttgttgtctccctccagtggtatttctctagtttcttctcacattagggaacagcctttccagagccccagctttacacacatactgtggttccagctccccacctggggttgtctgtgtccttgtcctttatttcggcagatgttaccccccagccctggccctggc

SEQ ID NO: 475747 - DNA, 529 bp, Homo sapiens
gagacagggtttcatcatgttggccaggctggtcttgaactcctgacctcaagtgatcctcctgcctcagcctcctaaagtgctgggattacaggcgtgagccaccactcccggcctgaactatgcattttaatgccaagaaagtccagaagtttcactactgtgggctaggttttgaatctccttaccttggggcttatataatgtgcgtagtattaatttggatccagtacctacacatatatattcttggtttttattttctcatgagaggttgtggggggtttgttcttttgtttgtttttcttttcttttctttttttttttaaccatctagaggtccaggcaaagacagacgttcttgttgtctccctccagtggtatttctctagtttcttctcacattagggaacagcctttccagagccccagctttacacacatactgtggttccagctccccacctggggttgtctgtgtccttgtcctttatttyggcagatgttaccccccagccctggccctggc

SEQ ID NO: 475748 - DNA, 544 bp, Homo sapiens
aaatacctcccttgtttgccatttgccaatcttaaggcagaggatgaaggcaccttttaccaaattttgcttwaaaatccttaatgcttttgcatttgcattggattcaacacaattttaggccttgaaactctgacatcaacgtattgaggacacgtgttcatggctcctcataattattttgaagtttctgtggaagaacatttggtttgcttgatagatattttatacatgtgtatttgttagatgagagaatatgacaggggtgggcctgaagctctgaacacattaatggttaatgggtttaatttcccattatcaatcatactacttctttatgaaaactgataaataaataacctacttccctagaggattcagtttgaaggagaaaatgatgtttgtccctaggatggattaattgagctactaaaatgctacaagctttacggaaaatgctaactctcctttagcatgcaagttgccttcctattttgattaagcaggcacacaaatgatgtcatgtgagcacccagtgagctgg

SEQ ID NO: 475749 - DNA, 544 bp, Homo sapiens
aaatacctcccttgtttgccatttgccaatcttaaggcagaggatgaaggcaccttttaccaaattttgctttaaaatccttaatgcttttgcatttgcattggattcaacacaattttaggccttgaaactctgacatcaacgtattgaggacasgtgttcatggctcctcataattattttgaagtttctgtggaagaacatttggtttgcttgatagatattttatacatgtgtatttgttagatgagagaatatgacaggggtgggcctgaagctctgaacacattaatggttaatgggtttaatttcccattatcaatcatactacttctttatgaaaactgataaataaataacctacttccctagaggattcagtttgaaggagaaaatgatgtttgtccctaggatggattaattgagctactaaaatgctacaagctttacggaaaatgctaactctcctttagcatgcaagttgccttcctattttgattaagcaggcacacaaatgatgtcatgtgagcacccagtgagctgg

SEQ ID NO: 475750 - DNA, 544 bp, Homo sapiens
aaatacctcccttgtttgccatttgccaatcttaaggcagaggatgaaggcaccttttaccaaattttgctttaaaatccttaatgcttttgcatttgcattggattcaacacaattttaggccttgaaactctgacatcaacgtattgaggacacgtgttcatggctcctcataattattttgaagtttctgtggaagaacatttggtttgcttgatagatattttatacatgtgtatttgttagatgagagaatatgacaggggtgggcctgaagctctgaacacattaatggttaatgggtttaatttcccattatcaatcatactacttctttatgaaaactgataaataaataacctacttccctagaggattcagtttgaaggagaaaatgatgtttgtccctaggatggattaattgagctactaaaatgctacargctttacggaaaatgctaactctcctttagcatgcaagttgccttcctattttgattaagcaggcacacaaatgatgtcatgtgagcacccagtgagctgg

SEQ ID NO: 475751 - DNA, 606 bp, Homo sapiens
ttggtcccatttttctttctgctctaacagggcagcactgagttcaattcctcccaaytgctctgttctccctcccccagtactcagagatgctctccacaccctgaagctgctgctgggctgggggtgagctggcgggggaggagtgttgtcagcaattcaggactttttttttctatgtcttcagtgcctctttcagggatataaagttaaaaccaagtactatgagtgctcacctgacttttgttcttatgaaggtgtttttgtttgtttttcggtatagattgttgttaacttggtgtccttgcaggggggactatcagtggagctttgaattctgcctccagatccagctttacatctggtgtcatttcccttctgcttgtaaaacttctttaaaattttttgtagtagcatgtctatgacaaattctttcaggtattgaatactgaattccttgagttctcatatatctgaaaaactactttgcctttatctgttacagacatttccatagataaaagtgttctagaattacagggttcacccctttcttcctttcagtactttaatgatgtggctctatgtttctctttgccactagtt

SEQ ID NO: 475752 - DNA, 606 bp, Homo sapiens
ttggtcccatttttctttctgctctaacagggcagcactgagttcaattcctcccaattgctctgttctccctcccccagtactcagagatgctctccacaccctgaagctgctgctgggctgggggtgagctggcgggggaggagtgttgtcagcaattcaggactttttttttctatgtcttcagtgcctctttcagggatataaagttaaaaccaagtactatgagtgctcacctgacttttgttcttatgaaggtgtttttgtttgtttttcggtatagattgttgttaacttggtgtccttgcaggggggactmtcagtggagctttgaattctgcctccagatccagctttacatctggtgtcatttcccttctgcttgtaaaacttctttaaaattttttgtagtagcatgtctatgacaaattctttcaggtattgaatactgaattccttgagttctcatatatctgaaaaactactttgcctttatctgttacagacatttccatagataaaagtgttctagaattacagggttcacccctttcttcctttcagtactttaatgatgtggctctatgtttctctttgccactagtt

SEQ ID NO: 475753 - DNA, 230 bp, Homo sapiens
taattcagggagacctctgagttctctgtgggttgcccttctctgttgtatgactggaattttcttcaggtagtaaattgatgcaatattagtttgktttttttttaatacaagattattttttaggtcgaagggtaaattcagcttacgtcatcttccaaaggttgtgaaacttgattcatatcaaaataagtcaaaaatgaggaatgcctgtctctcccttaagagtc

SEQ ID NO: 475754 - DNA, 592 bp, Homo sapiens
ataaattctgtgagtacagaaacaaaaamttattgagcatttatgttttacaataaatatttagttattaaaaacctaatgcctgcaaggtatcattatggtaagtggggatcctcagatgactaaataacgtgttttattctcaataagcttttgatttggtgatcaactattttttgttgataatcaaatatcaactattttttcttgataattcttcttgcaatctaagttgtatagaacacattgttggcagtagttaatgaatagttgtttaaaagataatttcctccaggaaaaatatttccccaaaacttatagtctcttttttctctaattgaaggggagttccttgcaaattttactagtagaaaaccagacatttgtcatgaagtaaaactcactgaaatgaaattgctctttgtgaaaaactgctctgcaataaggtaattagttccattggctttgttttgatgaaagattcatgcattgaaatctgcttagttgtatgtgaaacagtttccacccataaaaaatcacagagttcacagcattttctctctctaaattgggattttaaatttactttcca

SEQ ID NO: 475755 - DNA, 655 bp, Homo sapiens
ctggattataaattctgtgagtacagaaacaaaaaattattgagcatttatgttttacaataaatatttagttattaaaaacctaatgcctgcaaggtatcattatggtaagtggggatcctcagatgactaaataacgtgttttattctcaataagcttttgatttggtgatcaactattttttgttgataatcaaatatcaactattttttcttgataattcttcttgcaatctaagttgtatagaacacattgttggcagtagttaatgaatagttgtttaaaagataatttcctccaggaaaaatatttccccaaaacttatagtctcttttttctctaattgaaggggagttccttgcaaattttactagtagaaaaccagacatttgtcatgaagtaaaactcactgaaatgaaattgctctttgtgaaaaactgctctgcaataaggtaattagttccattggctttgttttgatgaaagattcatgcattgaaatctgcttagttgtatgtgaaacagtttccacccataaaaaatcacagagttyacagcattttctctctctaaattgggattttaaatttactttccaccttggtcctttccgtcaaaaaaagtaacttttcttgcaagagcaaattgttttat

SEQ ID NO: 475756 - DNA, 655 bp, Homo sapiens
ctggattataaattctgtgagtacagaaacaaaaaattattgagcatttatgttttacaataaatatttagttattaaaaacctaatgcctgcaaggtatcattatggtaagtggggatcctcagatgactaaataacgtgttttattctcaataagcttttgatttggtgatcaactattttttgttgataatcaaatatcaactattttttcttgataattcttcttgcaatctaagttgtatagaacacattgttggcagtagttaatgaatagttgtttaaaagataatttcctccaggaaaaatatttccccaaaacttatagtctcttttttctctaattgaaggggagttccttgcaaattttactagtagaaaaccagacatttgtcatgaagtaaaactcactgaaatgaaattgctctttgtgaaaaactgctctgcaataaggtaattagttccattggctttgttttgatgaaagattcatgcattgaaatctgcttagttgtatgtgaaacagtttccacccataaaaaatcacagagttcacagcattttctctctctaaattgggwttttaaatttactttccaccttggtcctttccgtcaaaaaaagtaacttttcttgcaagagcaaattgttttat

SEQ ID NO: 475757 - DNA, 596 bp, Homo sapiens
tcagctgcagcattagattctcataggagcaagaaccctattgtgaactgcgcatgtgaaggacctaggttgagtgctcctcaagagaatctaacgctcctctccccatcctgcccctaccccctacacccgstatggtccatggaaaaactgtcttccatgaaaccagtccctgttacaaaaaggttggggaccgctgtcctatagggctattttttttttttgagatgaagtttcactctgtcacccaggctggagtgcaatggcatgacctcagctcactgcaacctctgcctcccggagtcaagtgattctcctgcctcagccacccaagtagctgggattacaggcatgcaccaccatgcccagctaatttttgtatttttagtagagacggggtttcgccaggttggccaggctggtctggaactcctgacctcaagtgctccgcccatcttagcctcccaaagtgctgggattacaggtgtgagccagcacaccaaggcctatagtgcttctttatcctgtagtacttccagtcctcttccctcagcttgctgattaagagttgtggccctccaggttgagggttaaat

SEQ ID NO: 475758 - DNA, 596 bp, Homo sapiens
tcagctgcagcattagattctcataggagcaagaaccctattgtgaactgcgcatgtgaaggacctaggttgagtgctcctcaagagaatctaacgctcctctccccatcctgcccctaccccctacacccggtatggtccatggaaaaactgtcttccatgaaaccagtccctgttacaaaaaggttggggaccgctgtcctatagggctattttttttttttgagatgaagtttcactctgtcacccaggctggagtgcaatggcatgacctcagctcactgcaacctctgcctcccggagtcaagtgattctcctgcctcagccacccaagtagctgggattacaggcatgcaccaccatgcccagctaatttttgtatttttagtagagayggggtttcgccaggttggccaggctggtctggaactcctgacctcaagtgctccgcccatcttagcctcccaaagtgctgggattacaggtgtgagccagcacaccaaggcctatagtgcttctttatcctgtagtacttccagtcctcttccctcagcttgctgattaagagttgtggccctccaggttgagggttaaat

SEQ ID NO: 475759 - DNA, 496 bp, Homo sapiens
gtaacactgtgttacttaagttacttatcagtcttcttcgtattcagatctcttatgtgttcatatgcatacacaggagtttctggtgagcattaactaccttatttctattttgtatactcccaggtacccagcacagcattttcacatagattgtactcaaaatacacagaagaaactataaatatctattgaactgattgtcttctgaaatatttccagttgccttttgacatgcacaaaactactaaaataaatattccaatataaaaatgcattacctgtttgttagcaaaaatcaggagcagagcatctcggagttctttttccgttaacaactttgcaagttcgctgtgtgcttcactaattctgtctctatgactgctatctacaacaaacacaacagctacccmaaaaaaaataaaaaaaacaaaaatagtcacttgctaaagttcagtaaatgaaccaaatatttaatgatatcattattatgtta

SEQ ID NO: 475760 - DNA, 626 bp, Homo sapiens
acatttctgatgatatatcaggccctgggcctgggagctctcatacatcaccttatttaatctttaggacaacttttttgagaatgttgaagaggtacggaaatggaggtacagagattttaagtgaaatttccaatatcacctagttaataaatggcaaagctaaaaatcaaacatgtgtgtttaactattacactgatatgtatgtcagttgggtgtgttattgtaaaatgttaaagaatccataagtatagtctgttcacaacattattaaataacatacatttagctatacatcaaaggccrtacaggtagaaatatactttgtatcattctaaaaaacaattttaagtagttaatttaaaaatagcattaagcaatgcaagaaagctaaactaaaagtaatattaatttagttaactgtacaaattagtgtccaaacctatctaaacttatgtaattacaaatccctgaaaactgaaaattataataaaaatgctaatacgtgtttaatagggccaatgataaaaattatagaattaatttatgaatcagttatataatgaaaatgccatccaactcctaaaattgtgtgggttatgtaatataattaaaatatcacttgt

SEQ ID NO: 475761 - DNA, 625 bp, Homo sapiens
tgcaggttactgttacttctaatcctttcaggtagttctttccctagccttaggcactttactcacacaatgtgctgcagtacttgggtgaatttacaaaggcaactctatgcagttctttggggttctctgtgtgcagccctgttctctccattattctgccttgtcaactgtaccttcgttggtttctctgaactcttagttccacttcctcaacataaggagtgtgccaggctctgcagggttctcccttcctgctccatggcctggaaattctatcaaggtagtaatctggggataatcatagtgctcacctcttttttttctccatccttcagggaccacggtccttcatttcttgatgtccagtattttgaaaatcattgtttcaaatattttgtctgtttttattcatttcaggagttagggtaaatccatcatggccagaaaataaatgccaaaaaacttaytctgaaatgtatatggaaaaaccaggagctaagaagactcatcctataagatggtgattctctgttatcctcaaaccataagcatcagcattacctgagaacttgctagaaatgtaaattcttgggttccaactcatacttagttaattaaaagc

SEQ ID NO: 475762 - DNA, 601 bp, Homo sapiens
  misc_feature (1)...(601): n = A,T,C or G
cctcatctgcattcctaggtgtcaaacacaacagcaaacactccccaggtatgggacaacagatcacttgtctttgtcttcttttcatatcctacctgagggcattctattctgggaaagaaaggataagtcctaacaccaaccctctacagtactaaaaataaaacattgagaaaagatttggaaaaggttatgttttctttaagttactaaatataataaataaagcaaccaagatacaccatccagcatataactcatctgacaaggagtagaatcctctctctgcttctttaatctttcccttgctrctggttctttccccagcatgcgcagagctcgtgtctctcccactctgggtcttctggcatgtttgtctgcctaactctatttgcttgtactctgtgcattttcttctaggtttcttgaaatgataagtccagcganttgtccaacagttgtatttctcctttaatcgtctcttcatttggttgaaaacccactataatctggcaccttcacctttcctgagttgctcttctagaccatggtcgtcacagacctcaatattatcaaatctgacaaatattttctgaatttt

SEQ ID NO: 475763 - DNA, 601 bp, Homo sapiens
  misc_feature (1)...(601): n = A,T,C or G
cctcatctgcattcctaggtgtcaaacacaacagcaaacactccccaggtatgggacaacagatcacttgtctttgtcttcttttcatatcctacctgagggcattctattctgggaaagaaaggataagtcctaacaccaaccctctacagtactaaaaataaaacattgagaaaagatttggaaaaggttatgttttctttaagttactaaatataataaataaagcaaccaagatacaccatccagcatataactcatctgacaaggagtagaatcctctctctgcttctttaatctttcccttgctactggttctttccccagcatgcgcagagctcgtgtctctcccactctgggtcttctggcatgtttgtctgcctaactctatttgcttgtactctgtgcrttttcttctaggtttcttgaaatgataagtccagcganttgtccaacagttgtatttctcctttaatcgtctcttcatttggttgaaaacccactataatctggcaccttcacctttcctgagttgctcttctagaccatggtcgtcacagacctcaatattatcaaatctgacaaatattttctgaatttt

SEQ ID NO: 475764 - DNA, 540 bp, Homo sapiens
ttgcttaaataataatttccagaactaccccactcaactagaaaaattaaaaatatattcagaatcaagagggaagtgccaaaaatcttttctgctgcagagcaggaactagggcaacataagtaggcacgyaccttggctgtaaaatttaagggaatgccaaaaactttgttaattaagataaattatattttaggataatatgtttagaaatcaacactggtgcaaaaatccatgggaaacaaaataccaaattttaaataaagatggatcactaatagtgccctataaagctgtattagaccatgagccacaagaaaaaaaaaatcagtactatttgtcctgttttgaattaattttgatttttggtgtccgcttaaattttgcatctagaggtaagtgtgtctctcccctcattctagactcacccctgttcttcatccaattatctaaatgtttatcaaatggtaagtaagttgataggctgctttgtgagtagttgagaacttttggcaattttgctaaccaatagctctacag

SEQ ID NO: 475765 - DNA, 540 bp, Homo sapiens
ttgcttaaataataatttccagaactaccccactcaactagaaaaattaaaaatatattcagaatcaagagggaagtgccaaaaatcttttctgctgcagagcaggaactagggcaacataagtaggcacgcaccttggctgtaaaatttaagggaatgccaaaaactttgttaattaagataaattatattttaggataatatgtttagaaatcaacactggtgcaaaaatccatgggaaacaaaataccaaattttaaataaagatggatcactaatagtgccctataaagctgtattagaccatgagccacaagaaaaaaaaaatcagtactatttgtcctgttttgaattaattttgatttttggtgtccgcttaaattttgcatctagaggtaagtgtgtctctcccctcattctagactcacccctgttcttcatccaattatctaaatgtttatcaaatggtaagtaagttgataggctgctttgtgagtagttgagaacttttggcaatttkgctaaccaatagctctacag

SEQ ID NO: 475766 - DNA, 445 bp, Homo sapiens
gggttaataccaaagtatataaataactcaagcaactcaatagcaggaaaaaatataacctgattaaaaaataagacagctgtgttttatctttggtcttctcttctgtttaccttataatctaaactatgtttaaatgtctttctcgctctctctctctttttttttttttttttttttgagacagaggctcactctgtccccaggctggagtgcagtggcgcaatctcggctcactgyaaccttcacgtcccgcgttcaagtgaatattgttttactgaaatttattaaaattttccaccttcatctttctaacagaaaaataggtattttttcagctgacaggtataacctgggcttgaccctgctaacctatattctcatgcagaacaaagggaataaatgagacttatgatttttcactctttctataaatgtttgattt

SEQ ID NO: 475767 - DNA, 576 bp, Homo sapiens
ttaaaaatgagcaagaatccctttagaggactggggaaaaaaaaatcaaagccatagtctcagagctgaaccaatctggtcaggctgtccctgctgagattgatgaacttgaaccatttctttccttagtcttcacatgatgctctcaagatcaaagtcacaggagagagcattcatttgactgaacttaggttttgcacttcctcctgactattctgagaaaacaggaaggctttggcccttcaaacttccatagtgagacaggtgcctgatacaccatccttccagaagcacagaaaagtggggagaggggatgttgtcccaaaaagaaaagaggataccactgggaaaagaaactattagattggtacaaaaataattccaggttttgccattaaaagtaattagaagtaatggcaaagcctgcaattacttttgcaccaatgcaatagattctaagtcatcaataaactatactggacacagcgctgygaattggtcaggcctttattacaagtatagcagtaaagtaaatgggatttcaattttggggaaccatgggcatagtctcagaga

SEQ ID NO: 475768 - DNA, 518 bp, Homo sapiens
ggaatccttaaggcattagcatgacttctctgttcactgagcaaggctrgttattctaataacatattatccaggtatgactattcatttcaaacagtacaagtgctatatttactttgttttgagggcttcatgtcattttgctaacatcaaacccacaacaagcatattctaaatcaaattaaatcacataatggcaggaacagagtattcatttaagttaaatgagtgtgcctaccagcattaataaaagaaaggccaggtgcggtggctcactcccataatcctaatactttgggaagccgaggtaggaggatgacttgagcccaggagtttgcgactagcctcagcaacatagcaagaccacatccttatttaaaaaaaaaaattagccaggcttggtggcatgcacctgtagtcccagctactgagaggggtggagtatagggtgaggtaggaggatcgcttgagcctcgaaggtcaaggctacagtgagctgtgattgtggcactgcattc

SEQ ID NO: 475769 - DNA, 518 bp, Homo sapiens
ggaatccttaaggcattagcatgacttctctgttcactgagcaaggctagttattctaataacatattatccaggtatgactattcatttcaaacagtacaagtgctatatttactttgttttgagggcttcatgtcattttgctaacatcaaacccacaacaagcatattctaaatcaaattaaatcacataatggcaggaacagagtattcatttaagttaaatgagtgtgcctaccagcattaataaaagaaaggccaggtgcggtggctcactcccataatcctaatactttgggaagccgaggtaggaggatgacttgagcccaggagtttgcgactagcctcagcaacatagcaagaccacatccttatttaaaaaaaaaaawtagccaggcttggtggcatgcacctgtagtcccagctactgagaggggtggagtatagggtgaggtaggaggatcgcttgagcctcgaaggtcaaggctacagtgagctgtgattgtggcactgcattc

SEQ ID NO: 475770 - DNA, 635 bp, Homo sapiens
aataatttgtcccaaatgaaggtaccttccttctgatttcttccctaaacaatatgctgacgattttgaaatccttctcaaattgaatcaatttgcagttgtatcatcagacctgttgtaggttcagttgttaggaatttgtgctcaggaaaactagagtttattccagtgctggttaacattttgatgttttagtccattaaggtcatgttacttacgttacttaaatctgactcaacctatagagacacactgtgagagttgtggccagaatagataatgcctatgtaagtgtggaattaagctaaaaactctttctgttttcaaataaatgaataggattatgtgccccacagatggtatttcaatcccttgtgtgggatccattacaacagactatttcaacacaagctgttttgttttttttttttkctgtatgagtcaattactttgtagaggaaaagcttagtagaacatcacattgtcattttttagtattagcagttccccaaataaatatttattgggagggtctaaagccaataccttcataggcatttaaagagctctaccctccagtgatgacagactcttagttaaattgaatagtatgtacatagaggatttgagtgtta

SEQ ID NO: 475771 - DNA, 592 bp, Homo sapiens
gaataccatgcctgcaagaatcatcaccaatgcagccatgtttgagcaggtccaattattgacaatacaggaaggctaatgagtagaaagccttaagctttaaatgaatttacagaatgattaactattaattaagccattgaaagtgcccatacgttcttttcagagactacatattttttatctctaattaaaacaaatatcccccaaacaaaactttcagtgttttttcatatttgtaatcactggtattgcaatcattttgtttcaactctaggattttccactgcagttgtatattagcaattaaatgataatcttgaccttccatttctgccttttaaatattaagaataatgatttcagggttccagaacaagtgatttgcatattctgagctttatttttcctgtgggccatacattcattcaagaataccragaacatgtagagatgaacagtgtaccattctgacattaaggagtctggtagctagtggagagatgagcggtgtggtgtgtgttactactctgacgaagaacacatcagctactcttgggatgtttcagggtgttacaggagcaaagaagaa

SEQ ID NO: 475772 - DNA, 480 bp, Homo sapiens
caaagtgctgggattacaggcgtgagccaccacgcctgccctctttttcttttctctggccatgatgatagtctggaaggtaaggctgtggcccctcacaacaacctctgtcccccactggctgggcaatgcctcataatcgcggatgtcccctgcgctgccctcaagcctctgtaccgtcacaagtctccgtcggggtggtgatgatctcagaaaaagagctgaaccctggattgcagcgacaggcggtggcattgacacacgaggagttctgagggcaccaccgggcacagcctgcaagagcagggagcacggtcagaaggtgaggggtaagggaatacacaaaaagggggcactgggggagatggggcagggcgctgagtttctcgtgcgcgagscctctctttccctgggctgaagggggctgggcgggggtccaggaccctccccaggctctggctgtggactgtgctttctgct

SEQ ID NO: 475773 - DNA, 480 bp, Homo sapiens
caaagtgctgggattacaggcgtgagccaccacgcctgccctctttttcttttctctggccatgatgatagtctggaaggtaaggctgtggcccctcacaacaacctctgtcccccactggctgggcaatgcctcataatcgcggatgtcccctgcgctgccctcaagcctctgtaccgtcacaagtctccgtcggggtggtgatgatctcagaaaaagagctgaaccctggattgcagcgacaggcggtggcattgacacacgaggagttctgagggcaccaccgggcacagcctgcaagagcagggagcacggtcagaaggtgaggggtaagggaatacacaaaaagggggcactgggggagatggggcagggcgctgagtttctcgtgcgcgagccctctctttccctgggctgaagggggctgggcgggggtccaggaccctccccwggctctggctgtggactgtgctttctgct

SEQ ID NO: 475774 - DNA, 452 bp, Homo sapiens
agaaataaagaaaacagccaggcacggtggctcacacctgtaatcccagcattttgggaggccgagactggcagatcacctgaggtcgggagttcaagaccagacttaccaacatggagaaaccctgactctactaaaaatacaaaattagccgggtgtggtggcgtgtgcctgtaatcccagctactctgggggctgaggcaggagaatcgcttgaacccaggaggcaaaggttgaggtgagccaagattgcgccattgcacttcagcctggggaagaagagtgaaactctgtctcaaaaatwaataaataaataaatagaaaacaacagcagggagagggtagggggaaaagcaagagacaggggctgccatttcagattgaggggcagggaaaacccctctccccgcattgtgcagaccccagtatcttcctgcccccttcctgccccc

SEQ ID NO: 475775 - DNA, 367 bp, Homo sapiens
gaagttctttctgcccaggtttgcwctctctctaagctcccacaggagctgtggcttgggttgttcaagaccccaaattcccgactggacttcctttcttcagctctgcattggggtgtgaccaggactgaagtattttattgaaatcattggctctcctgatagcagagagttggtgtcagtaaggcagaggagaggttagtctgtagtgtgctatggagtaagggagcaatggaaatcgggagcttagtttgaacacactcagtgtccccttgtgcagtgtccaacctgcccaaccgtaccagcccaccctgattgagggactaaagagtggaggaaaggaaggggaaagggatttcactgacag

SEQ ID NO: 475776 - DNA, 509 bp, Homo sapiens
ttaattatttttaactgtagaggtgaatgatgaaatccttgtctggtatggctttaggccttgtttataattccatactttattaccataaagagttcattcwgtcagtcttacgatctctattttaacattaatgttaatctacaaaacggaagggatataatgagatgtatttgacctcctgtcccatcatggctagaaactccaattttaagttttcttttctggggtcccctcggccaagagggtgtctgttcagtcaggtagggggcttaggattttatttttagtttacagtacttaaaatctccttggctggttttcaagtgcagccatgcttgagactcctgcttaaaggtacagcaaagaggaaggaggttgccacatagagtgtatgaggatgctcattccaagccatctttacctagctgcccttgagcccaatttcccaactgatcctcagtctcctacctgttagaaacagttctccttatcttacactcttccca

SEQ ID NO: 475777 - DNA, 577 bp, Homo sapiens
atccatggaaaaattagtgatatctaaataaaggctagagttaatggtaatgtgtcagtattggtttcttagttttgacaaacgtaygcaataatagaaagtgatgacattagtggaaactgaaacaggtgatacaaacttaagtgaggggatatggggaatccctgtaccagttttataacttttcagcaaatctaaaattattccaaaacaaagagcttgttatttttaaagttatattcttatttttttcaactcaatatttacatttaaatttaatataacgtttaaatttcacttcaaactctcaaatgccaggatggaaactgtcacattttgcaccgcctccctgaaatcacctatttattgaggggatggcagggaatgggggacttacataataccagaaaaatagaggggatatcaggaggcttccatctattacaactgccatgacgccgcagattgtccaagttcatctgatctatttgaagatgggcactcactccattgtcccagtatcaaatgtgagtgcagcttgaggtgatcattagaagtcccacacccttgcccagac

SEQ ID NO: 475778 - DNA, 577 bp, Homo sapiens
atccatggaaaaattagtgatatctaaataaaggctagagttaatggtaatgtgtcagtattggtttcttagttttgacaaacgtatgcaataatagaaagtgatgacattagtggaaactgaaacaggtgatacaaacttaagtgaggggatatggggaatccctgtaccagttttataacttttcagcaaatctaaaattattccaaaacaaagagcttgttatttttaaagttatattcttatttttttcaactcaatatttacatttaaatttaatataacgtttaaatttcacttcaaactctcaaatgccaggatggaaactgtcacattttgcaccrcctccctgaaatcacctatttattgaggggatggcagggaatgggggacttacataataccagaaaaatagaggggatatcaggaggcttccatctattacaactgccatgacgccgcagattgtccaagttcatctgatctatttgaagatgggcactcactccattgtcccagtatcaaatgtgagtgcagcttgaggtgatcattagaagtcccacacccttgcccagac

SEQ ID NO: 475779 - DNA, 577 bp, Homo sapiens
atccatggaaaaattagtgatatctaaataaaggctagagttaatggtaatgtgtcagtattggtttcttagttttgacaaacgtatgcaataatagaaagtgatgacattagtggaaactgaaacaggtgatacaaacttaagtgaggggatatggggaatccctgtaccagttttataacttttcagcaaatctaaaattattccaaaacaaagagcttgttatttttaaagttatattcttatttttttcaactcaatatttacatttaaatttaatataacgtttaaatttcacttcaaactctcaaatgccaggatggaaactgtcacattttgcaccgcctccctgaaatcacctatttattgaggggatggcagggaatgggggacttacataataccagaaaaatagaggggatatcaggaggcttccatctattacractgccatgacgccgcagattgtccaagttcatctgatctatttgaagatgggcactcactccattgtcccagtatcaaatgtgagtgcagcttgaggtgatcattagaagtcccacacccttgcccagac

SEQ ID NO: 475780 - DNA, 577 bp, Homo sapiens
atccatggaaaaattagtgatatctaaataaaggctagagttaatggtaatgtgtcagtattggtttcttagttttgacaaacgtatgcaataatagaaagtgatgacattagtggaaactgaaacaggtgatacaaacttaagtgaggggatatggggaatccctgtaccagttttataacttttcagcaaatctaaaattattccaaaacaaagagcttgttatttttaaagttatattcttatttttttcaactcaatatttacatttaaatttaatataacgtttaaatttcacttcaaactctcaaatgccaggatggaaactgtcacattttgcaccgcctccctgaaatcacctatttattgaggggatggcagggaatgggggacttacataataccagaaaaatagaggggatatcaggaggcttccatctattacaactgccatgacgccgcagattgtccaagttcatctgatctatttgaagatgggcactcactccwttgtcccagtatcaaatgtgagtgcagcttgaggtgatcattagaagtcccacacccttgcccagac

SEQ ID NO: 475781 - DNA, 608 bp, Homo sapiens
agttaaaaatccaggatctctggagaacatccaagatgttctttatagcagaaaatagaacagtattctctctgtcacatccatatgaggatcctctcattccagagacctataaactaaaagggcaagttattagtttcccacatggacacttccagcttctaataatacttttttatttgcccattatctggcccctagacaaatgccatatactttagagttctatagcaatgctccactttcagatccagttttgagtcagwaacttggactagattttgctgaggtaacaaccccaaactctcagtgactttaaacaacaaaggctttttttcacctgtgtcgattgtggctgggaagggaaacttttgtgttacactgtcttcatctgggataatatggaaaattccaccacctgaaggggagtaaaaaaaactcctgggaagatgtgaccatgggggtgttggcttctcaatcctatctttccaagggacttctccttgtgctttagcatctagcactgttctgggtaatgaggatttactcagtaaagggaatataaacgaaaaggccttgtagcaactagattggatataaggcaacca

SEQ ID NO: 475782 - DNA, 637 bp, Homo sapiens
taccgtagcacctttatataatctattaaagtaaatttcagataaatcacttgttagtgatgattttttctcctataacagttcatcgatcattgtaatagtgtctcttgtttacttgtttcttttgtcttctccgaaagaatgtaacctctgtgagaacagaaaccttgatgaggaggatgataatagtcagtgttaattaagtactttcttttctggaaaacaggtagagttgtctctcttggaggattgtgaatatcaaatggcttattagcaaaaagagctgggaggtaggaactagttgagttagtggaaaaggaaagtgagggcagagctgaggtgaagagcaattgggtttctcagagtctgagytggtaatggagacagggtgggttagaaccatattaatcatgtgaaagtatttagtgttaccattctctgcacttgttccttgcttgctaacttttgcttttgctggttaatgttttcttccttgaaatgtaatttttctgagtttattactgaaataactcttgaaatcttgtctttggtacagtgtctttcctgacactgcattacacacagacacaggtgtttttccctatattctacttccaaagaaaccctgtggtgagga

SEQ ID NO: 475783 - DNA, 476 bp, Homo sapiens
tctgagtcacctagcttgactgagtcagagatttctccagggagtggtggaaagggtggctcttggcagaagagatcctcatctcaatggtgtggtacttgcctgagatttcccagaaagcacgaagaacatcagggtggagagtttcactctcagcgacaaatagaaataatccacttgattccacatgaactaagtgttgaagaaaaacataatctcacattagcttatctctttaccctttaccagaactcaaagatggaaattaccattctcatcctgctgggaaatgacartcatgcagcaaatacaccatactttgtgtcacttgaaaccagttttatctattaaaaaaatactaatccttaaaatattattcctttatgaaacacaaggcctttttttttcatagcctttgttgcagcaaaactcctcaataaatagcactgcccagagacagttagggtaaacttaga

SEQ ID NO: 475784 - DNA, 476 bp, Homo sapiens
tctgagtcacctagcttgactgagtcagagatttctccagggagtggtggaaagggtggctcttggcagaagagatcctcatctcaatggtgtggtacttgcctgagatttcccagaaagcacgaagaacatcagggtggagagtttcactctcagcgacaaatagaaataatccacttgattccacatgaactaagtgttgaagaaaaacataatctcacattagcttatctctttaccctttaccagaactcaaagatggaaattaccattctcatcctgctgggaaatgacaatcatgcagcaaatacaccatactttgtgtcacttgaaaccagttttrtctattaaaaaaatactaatccttaaaatattattcctttatgaaacacaaggcctttttttttcatagcctttgttgcagcaaaactcctcaataaatagcactgcccagagacagttagggtaaacttaga

SEQ ID NO: 475785 - DNA, 554 bp, Homo sapiens
gctgccttcagccaaatcttttactgaagctatgcaaacctcctggccttccaagaaggttcgtgtctatttcctataactttatctttataattactcccaccaccttgatcgatcccctacatctgctcatgagtattgtcttgtagctgttttccagatgtcttggaatggggagaatattcagttaaaatgttctatataataaaccaaccccaratatgtatgtgtagctggaagatctccttccaattaagtaccaacgattttagtaaccatctttctctttctcccttcctcaaatatttatgaaatatctatgttgtggtagacatagtatcttgttaataccttgataataagacagttcctgctcacatagagcttacgatcttatagaagaaacatccattacattaaaaaatatgcaaattgttaccaattacaattgtgataactgaatcagaggagtacagagaattgtaggaatgaattgtatgataagaagtcccaacccaatcttgagagagggaggatcagatcaggtttccctg

SEQ ID NO: 475786 - DNA, 622 bp, Homo sapiens
atgtgcgcatgtgcatatcaggagatattttaactgtactcaaattttagctacctgaacccaacaggaattacttattatactatttcaagctttttggcaacttgaagcctagtgatttaaatgctgtttcttcaatttgtacctttgtaatatgtattataaactcatctacctgcaaatatcttttttttcgaaattttgaacattatgaacattatgaacattactgtgatatgttaatgatacagctattgatactgaaatacatatatatattaaactttagtggaacagcatgtggaatttaaatataaatctgtagttgaataaagtgactgaataaagcactttattctatatatatgtatatatgcatttggggcatgaatttgaatgactactggcattgacaattgctctaaaatatgttttttaattaagaacaagctttcacactacattttgattatccagtaactttttgaaaaagaagatctggaacacaccactgaaaaattcctatgaatagtggacttattgcaaaagaattgaatccaataatggaacagcctccacatgtatgaattttttaggttccaraaattaactgtttattttt

SEQ ID NO: 475787 - DNA, 460 bp, Homo sapiens
ggtttcatttctgaactctgatgggtggtgtcaggcaaagtgttttgtagtgtggtgacagtgggacccatcctcatttgcatgttccagcagcagcagcagcgtggtagggtgcacacttgttatctgtgtcaattaagagtaatacaaataaaatatttattttactttctttagtccttctctgacacttttcctttatttagatagatctgagtttctcaccaccattttttctactctctgaagagtatcttataacatttattacaggaaggactactggagataaattcattattgcttgagaaaatctttatttttctttcacttttgaagaataattttggtgaatacagaatttgaggttcrtgtttttctttttttcttcattcaacacttcaaatattggagaaccttggatttaaattttaaaaattagacaacatccaaatgaaac

SEQ ID NO: 475788 - DNA, 475 bp, Homo sapiens
acagcataaatttctgactcagccactggytattaaaatatttgctgtttaagacactgcattttggggggatttgttacatagcaaagactaactaaatatagcattaagcttttcagcagccaacacaataaaagaaatctagtcccttacacaactcaaagtgttaatgtgataaagcaatacaattgttggtgagaacttcaagtgtgatttcttgcctcaagctaaaccctgtggtccaaatgagtaaccttgtttataaatcctggtgcccattccattttgcatcggtctttgccatgtctatgtatcaaatatggaacaacaactctctgcttatttctaagcagatagaacttagaactgaatgaggcctctaagaacattcagtccaaaattcaaggggtggtcctgactcctctcttctcacactctacatcaacttctgtaagcactacctttattatatata

SEQ ID NO: 475789 - DNA, 475 bp, Homo sapiens
acagcataaatttctgactcagccactggctattaaaatatttgctgtttaagacactgcattttggggggatttgttacatagcaaagactaactaaatatagcattaagcttttcagcagccaacacaataaaagaaatctagtcccttacacaactcaaagtgttaatgtgataaagcaatrcaattgttggtgagaacttcaagtgtgatttcttgcctcaagctaaaccctgtggtccaaatgagtaaccttgtttataaatcctggtgcccattccattttgcatcggtctttgccatgtctatgtatcaaatatggaacaacaactctctgcttatttctaagcagatagaacttagaactgaatgaggcctctaagaacattcagtccaaaattcaaggggtggtcctgactcctctcttctcacactctacatcaacttctgtaagcactacctttattatatata

SEQ ID NO: 475790 - DNA, 634 bp, Homo sapiens
gttatggttcattttcagcctgcctataataattaayagcagattagagaaacacaactgtgaaaaatgaagaaatcttaataaaaatcagatacatgtaacatttatttttttctgttttagatcgcaatgaatgtttagaaattcctaacgtttgcagtcatggcttgtgtgttgatctgcaaggaagttaccagtgcatctgccacaatggctttaaggcttctcaggaccagaccatgtgcatgggtaagaagggcatgtggctccagggagtgaagtggggctggggttccagaacagatcacagttccatcaagtgccatgagtaactactatgtctctgtcagaaacaatcttgcaaaaaattaactaggtcaaactatttaagtcttgattcaatataaaatttgcaagcagggacatactgcaatatataaaatttgcaagcagggacatactgcgatatgttcgtcagttcagtgattcacagctttttctccagaagatgttcacatggcttgacaagaaaaaaccctctgagccacttgggcttgtgtggaacttaccatagcacccgctgccctttactttcatgtttctactcaagacaccattttggaatgcaagagag

SEQ ID NO: 475791 - DNA, 634 bp, Homo sapiens
gttatggttcattttcagcctgcctataataattaatagcagattagagaaacacaactgtgaaaaatgaagaaatcttaataaaaatcagatacatgtaacatttatttttttytgttttagatcgcaatgaatgtttagaaattcctaacgtttgcagtcatggcttgtgtgttgatctgcaaggaagttaccagtgcatctgccacaatggctttaaggcttctcaggaccagaccatgtgcatgggtaagaagggcatgtggctccagggagtgaagtggggctggggttccagaacagatcacagttccatcaagtgccatgagtaactactatgtctctgtcagaaacaatcttgcaaaaaattaactaggtcaaactatttaagtcttgattcaatataaaatttgcaagcagggacatactgcaatatataaaatttgcaagcagggacatactgcgatatgttcgtcagttcagtgattcacagctttttctccagaagatgttcacatggcttgacaagaaaaaaccctctgagccacttgggcttgtgtggaacttaccatagcacccgctgccctttactttcatgtttctactcaagacaccattttggaatgcaagagag

SEQ ID NO: 475792 - DNA, 598 bp, Homo sapiens
cttaattgatcacaggttcatattgttactgacaggcttcaattatgcctaatcataagaaacatttgtgcggcctccaacacacatacrctgcatctttaataattgatttttatcattcctttttctctttaaattcacatttccattttaccccctccaagaattttatcctaatgtaatatatttttaaacttgaaagtctcttattggtcaccccattatacttctctttcacaaagtatatataaattgaaatttgaaatgttgaaaaaaagttttttttttgagacagagttttctcttgttgcccaggctggagtacagtggtgcaatcttggctcactgcaacctccacctcccaggttcaagcaattctgctgcctcagcctcctgagttgctgggattacaggtgcccaccatgatgcccggctaattttttgtatttttagtagagatgggatttcaccgtgttggccaggctggtctcaaactgctgatctcaggtgatctttccacactggcatcccaaagtgctgggagaaaaatttttttacatgatcgtaaatctacatgtaattttaaaatactggtaag

SEQ ID NO: 475793 - DNA, 598 bp, Homo sapiens
aatggaagggtagagaggttaaacaaagaggctgacaccagatatctagtagtgatgatgcaagaattggaacccaggccatctgcctctggagcccacatgttcagccaccacaggatacaggaggtcaagattatgtctcaagtaataccggaaggagaatattgccacatttcaatgccactgttaaggcagtggatacgatctttccttggacattacacttgctggtcttgctctattatattaaaaaggccgtgttccaggcagctactgcccttgcttctaagttccctttctgtctcagatttgttttggcgtaaacacctaccggtttcagtattccttccacsattcctttaggcttctgctcagacccgattcccatcatgtaattctggtaaaactgccaattgtcatattgttcccatagataggagtatgacttaagcctggccaatcatagtgtcctatcagttattgactatggtgattggaccagtaagacagcatatgagctacattggcccaatagagtccttccctgggatttagaaatactgtataaggcataagcccaggtgagtggccaggtgcc

SEQ ID NO: 475794 - DNA, 604 bp, Homo sapiens
tgtggctgactacgtaaagcactgatatgctcacaaamaaaaacttgcacatatttccttcatttcatttttcttaaacaatacctgacaggcttatatctgaatgaatggaaaccttttcttcttcctgcctcaaacttcacattacacttatgtgacagaatgaacaaggtcactttaacaattaatggtacacacatgaaaaatcttttacgatgcataaatattttgttgccatgttgcccaggctggtcttgaattcccagcctggagcaatcctcccaccttggtgtctcaaagtgctgggattacaagtgtgagccactgtgcctggcccattcagaattgttttaaagactttctatatatctattatgtatctaaattcaaatttgctcttttgttaatatgatgaattactttacattgattgttttaatttaacacatactacatttattatttaggggttttgtttggtcttgaataacagaaaactcccaagatatgctccacaaatcaacaaggtgctgatttttctcctaggagagtccagaaataggtagggcaaggatggtgtagctactgaacaatacagtagggg

SEQ ID NO: 475795 - DNA, 604 bp, Homo sapiens
tgtggctgactacgtaaagcactgatatgctcacaaacaaaaacttgcacatatttccttcatttcatttttcttaaacaatacctgacaggcttatatctgaatgaatggaaaccttttcttcttcctgcctcaaacttmacattacacttatgtgacagaatgaacaaggtcactttaacaattaatggtacacacatgaaaaatcttttacgatgcataaatattttgttgccatgttgcccaggctggtcttgaattcccagcctggagcaatcctcccaccttggtgtctcaaagtgctgggattacaagtgtgagccactgtgcctggcccattcagaattgttttaaagactttctatatatctattatgtatctaaattcaaatttgctcttttgttaatatgatgaattactttacattgattgttttaatttaacacatactacatttattatttaggggttttgtttggtcttgaataacagaaaactcccaagatatgctccacaaatcaacaaggtgctgatttttctcctaggagagtccagaaataggtagggcaaggatggtgtagctactgaacaatacagtagggg

SEQ ID NO: 475796 - DNA, 604 bp, Homo sapiens
tgtggctgactacgtaaagcactgatatgctcacaaacaaaaacttgcacatatttccttcatttcatttttcttaaacaatacctgacaggcttatatctgaatgaatggaaaccttttcttcttcctgcctcaaacttcacattamacttatgtgacagaatgaacaaggtcactttaacaattaatggtacacacatgaaaaatcttttacgatgcataaatattttgttgccatgttgcccaggctggtcttgaattcccagcctggagcaatcctcccaccttggtgtctcaaagtgctgggattacaagtgtgagccactgtgcctggcccattcagaattgttttaaagactttctatatatctattatgtatctaaattcaaatttgctcttttgttaatatgatgaattactttacattgattgttttaatttaacacatactacatttattatttaggggttttgtttggtcttgaataacagaaaactcccaagatatgctccacaaatcaacaaggtgctgatttttctcctaggagagtccagaaataggtagggcaaggatggtgtagctactgaacaatacagtagggg

SEQ ID NO: 475797 - DNA, 574 bp, Homo sapiens
tgctcatgcctgtaatcccagtgctttgagaggccgagctgggaggatcacttgaggccaggaattcaagatcagcctgggcaacacagtgggactcccatctctaaaaaaaaaaaaaaaaaaaaatagctggatgtggcggygcatgtctgtagttccaactacttgggaggctgaggtgggaggattgcttgagcccaggagtttgacgctgcagtgagctatgatcatgccactgcattccagcctgggtgatagagcgagaccctggttcttaaaaaaaaaaggggggaagaatcgcaggtcctatctcacagggccatcatcttgattaaatgagatgacaagtataaaacactagtgaatacagcccatactcagtaactgtcagctttaccagagtcttactgaatcctgacaatagtcatacaaagaatgacctatgattatccccaatttatcgatgagaagctggcaattgaccgaggcaagatttggacctggtctatctggcttaaggctccatgatctcaaccactaatcataacaggaacatgcctcactgtccatgagc

SEQ ID NO: 475798 - DNA, 551 bp, Homo sapiens
gctgcacccagatggaaactgaccacccctcggtcatcgcagaaagacccaagcacaaattatgttctgaaaactcaatctgtatatgcttggccataaagcgccgaggttttatgtggggcataaaaatgttctttaatgggacagaaactgcaaaccacagttttatgacrtcccataaaagctgaaagggttatgatcttataggcagtgcagatggtaggttgctgctagatttctctgtgctgttgttaatcaaggagtgactcaaaggtattctactgaacagataatgataccacaattaaggcaataatcgaagttgggaagaaatatgtgctgtgccagacaggcgacagcactgacattcgctttcctgggaagtctcaatgtgtcctgcaccttttatacccagctccaatgttttcctgcgctgacatgcccctggctcccatgaggttctgtttgcaaaagggaatgatgacaatcatttggattcttggcaggaacctctgcttacctgtccattctcacttgcttgactctctgac

SEQ ID NO: 475799 - DNA, 511 bp, Homo sapiens
caaattatgttctgaaaactcaatctgtatatgcttggccataaagcgccgaggttttatgtggggcataaaaatgttctttaatgggacagaaactgcaaaccacagttttatgacatcccataaaagctgaaagggttatgatcttataggcagtgcagatggtaggttgctgctagatttctctgtgctgttgttaatcaaggagtgactcaaaggtattctactgaacagataatgataccacaattaaggcaataatcgaagttgggaagaaatatgtgctgtgccagacaggcgacagcactgacattcgctttcctgggaagtctcaatgtgtcctgcaccttttatacccagctccartgttttcctgcgctgacatgcccctggctcccatgaggttctgtttgcaaaagggaatgatgacaatcatttggattcttggcaggaacctctgcttacctgtccattctcacttgcttgactctctgacaattcatagggagga

SEQ ID NO: 475800 - DNA, 494 bp, Homo sapiens
aaaagaagagaatttcttcaaaaagaaatttacttatgagaatataacacatcagaaaacataaaaaacatttgcaggttaagatgttaagacataaaattaatagacattacatggtataaacgatagataatacataaatatttagaaggttttggtaatatcttctattttcacaacctcaataataatgaagttatccttcatgcctaggcttatctttcttattctaacctttacattgatagaaaatgtattaggtaaaagtcttatgaataatttgaaaaataaagaaatagttatttaaggtacctcaaaatttcaaatagactattcaaaagaaggatttgaaaatrtctttacattcactgaagactgtggggatgagagtcaatttaggtcagatgcttcctgagaatggatcgttttatttttatctacacattattctttcttaatggctggaaaacagatgaacataacacattattaat

SEQ ID NO: 475801 - DNA, 379 bp, Homo sapiens
catggtataaacgatagataatacataaatatttagaaggttttggtaatatcttctattttcacaacctcaataataatgaagttatccttcatgcctaggcttatctttcttattctaacctttacattgatagaaaatgtattaggtaaaagtcttatgaataatttgaaaaataaagaaatagttatttaaggtacctcaaaatttcaaatagactattcaaaagaaggatttgaaaatatctttacattcactgaagactgtggggatgagagtcaatttaggtcagatgcttcctgagaatggatcgttttatttttatctacacattattctttcttaatggctggmaaacagatgaacataacacattatt

SEQ ID NO: 475802 - DNA, 603 bp, Homo sapiens
gtctgagtaaaatttatgttcttattttcttgtctgttcaactctaagctgactgtatgttgtgtgtgggggagaatgctcataactttctaatccggtaatagtaagatcctatgctacactctgagtttatagctactattattgctggaggagaaacgtggatgttttgaaatggttgaaygattcaggctcctgcttcatcagagataaaagaagcaagccaactggtcaagtagggacttatcacagtgtaaatctctgggggatagctaactcagctcaattaataatcaaactcttttcttttacatattgctaagaaaccacagacggtagaaagtttggattttttcccagaaatcagtctgagagcaaaggcagaagaggcaactgtggtttttgttctactttttagcacaaccatctcgtttttataaataatgaagtactgagccgagtcagaaaatcctgtgctatttaaatcatttaccaatgattcacaaatgcttgctgagggatttttcttttttctttttttttttaaccaaacctggccactgtccataacccagaggaaatagttagagaggctgtttcctt

SEQ ID NO: 475803 - DNA, 603 bp, Homo sapiens
gtctgagtaaaatttatgttcttattttcttgtctgttcaactctaagctgactgtatgttgtgtgtgggggagaatgctcataactttctaatccggtaatagtaagatcctatgctacactctgagtttatagctactattattgctggaggagaaacgtggatgttttgaaatggttgaacgattcaggctcctgcttcatcagagataaaagaagcaagccaactggtcaagtagggacttatcacagtgtaaatctctgggggatagctaactcagctcaattaataatcaaactcttttcttttacatattgctaagaaaccacagacrgtagaaagtttggattttttcccagaaatcagtctgagagcaaaggcagaagaggcaactgtggtttttgttctactttttagcacaaccatctcgtttttataaataatgaagtactgagccgagtcagaaaatcctgtgctatttaaatcatttaccaatgattcacaaatgcttgctgagggatttttcttttttctttttttttttaaccaaacctggccactgtccataacccagaggaaatagttagagaggctgtttcctt

SEQ ID NO: 475804 - DNA, 542 bp, Homo sapiens
gggcatacccaaaatatgggctttggcacagataaaacttgagactcctatttcttgcagggctgagttcagattcccagatgtcacataccagtgtgtgaccatgagcatgttacttcacctcattgagctttagtcaycttatccataaaataaggacaataagaatattctccctccttctatcaggtgagataatacagggaaagctgatgagtatcagatttaaaaaactaggtacttaaatgcagtaacgcatatggcataagtagtcagttaacattatctgcaatcatatcatcattattgcttatcattatcattagcacaaggtcttgggcaatttcaggcgtcactagctgcaatccactccattgtctcctactcagaaagcaatgattcacaatgcaaagaagtgaaagtgtgcttggtctgaataaccttgtttctggcccagtttattttttccaatagaagcctttatatacattgatgccgtaagtaaaatttgtaatgcatttcttttgctgatctttacacag

SEQ ID NO: 475805 - DNA, 542 bp, Homo sapiens
gggcatacccaaaatatgggctttggcacagataaaacttgagactcctatttcttgcagggctgagttcagattcccagatgtcacataccagtgtgtgaccatgagcatgttacttcacctcattgagctttagtcatcttatccataaaataaggacaataagaatattctccctccttctatcaggtgagataatacagggaaagctgatgagtatcagatttaaaaaactaggtacttaaatgcagtaacgcatatggcataagtagtcagttaacattatctgcaatcatatcatcattattgcttatcattatcattagcacaaggtcttgggcaatttcaggcgtcactagctgcaatccactccattgtmtcctactcagaaagcaatgattcacaatgcaaagaagtgaaagtgtgcttggtctgaataaccttgtttctggcccagtttattttttccaatagaagcctttatatacattgatgccgtaagtaaaatttgtaatgcatttcttttgctgatctttacacag

SEQ ID NO: 475806 - DNA, 519 bp, Homo sapiens
tgaaattcatagccagccagaactgactttagtgttacactttcttcattatacagttttctcttcctctcaagaagtataactggttggctggcctctgggattggatgagaatattcttggctgaggaagtcctctaaaccttttcaagtctatcattcaggtaattcttggagcccctgctcttccatggtccctagaccctattatattaagataagaaacccattttttcccaagctttcccagaattgcacaagagatttttagctgctatgaaaatttgtcaggtagcactgaggaggattagttggggttttcctggaattggtaggggtaatcttgggcttggacaggaggagaaaaaagaagatcctagaaaagaaactgaactctggacacagggaagatagaacaaattcaagtcaagtacacaaatatcktgatgtttcatttgagatgttatatagtgaggactctggactctggagagggagtgttggtttgggagtagatgct

SEQ ID NO: 475807 - DNA, 498 bp, Homo sapiens
aaaaagaccacctctcatatgtgtttccttcccaataaaactgcatcttttttttctatgtgggagctccccatacctttttaagtgacatgctacaaagtgacaagatcgagaagaatcaaggaagaaggccaatccacaggatccttctagagaaagtgaagggccatttccttccaagctttcttccttcctagttctcctcttaggctgccacagacagtctggactacactgaaactgttgagatctaaataggcaacttcataaccaacacaatgctgggttctgacccggcaggtaagcaagataaaatataaaaatggggaaaaggaacaggtaaggatrccaggtattagcatttagaatgcctttaataaagaacctgaacaatctagtaggatccaataaaaactgtagactaactattaagtaaattgccaaaagatacatcttcccctagaaaaagtaagtgtgctgcaagcatgattatgtaga

SEQ ID NO: 475808 - DNA, 498 bp, Homo sapiens
aaaaagaccacctctcatatgtgtttccttcccaataaaactgcatcttttttttctatgtgggagctccccatacctttttaagtgacatgctacaaagtgacaagatcgagaagaatcaaggaagaaggccaatccacaggatccttctagagaaagtgaagggccatttccttccaagctttcttccttcctagttctcctcttaggctgccacagacagtctggactacactgaaactgttgagatctaaataggcaacttcataaccaacacaatgctgggttctgacccggcaggtaagcaagataaaatataaaaatggggaaaaggaacaggtaaggatgccaggtattagcatttagaatgcctttaataaagaacctgaacaatctagtaggatccaataaaaactgtagactaactattaagtaaattgccaaaagatacatcttcccctagaaaaagtargtgtgctgcaagcatgattatgtaga

SEQ ID NO: 475809 - DNA, 537 bp, Homo sapiens
ccacaagctgtaccagtcagaaggcaataaagggcagaaaataataaacacaagagcaagagagagtgaaattctccctaaagtctagagcatgtggggtctgccacccactccctatgtcctgatacctggaccccgtgttggacccactgggctctctacagggagaatgagagagaagcaattgtcttcacacattggaagaggtctggctactctcatcataccagttttgtgagaggggacaagagggactgagggagagagacaggtgcctacagagaaaatccaaagagactatttgtgtagacagatgagctttgaactttgttgtctgcttatgtcccagtggtacttgggacctaagggactatcagtacctgtggtctcaatyaacatcgctacttgtcttcttcctcctcgaagctcctcctggacttgggcagtttataaaccctaatgcctatgtgatccagggcagtaacctcaatgtgtgaagggggccaaatagggacaatggggatagctactgaaata

SEQ ID NO: 475810 - DNA, 537 bp, Homo sapiens
ccacaagctgtaccagtcagaaggcaataaagggcagaaaataataaacacaagagcaagagagagtgaaattctccctaaagtctagagcatgtggggtctgccacccactccctatgtcctgatacctggaccccgtgttggacccactgggctctctacagggagaatgagagagaagcaattgtcttcacacattggaagaggtctggctactctcatcataccagttttgtgagaggggacaagagggactgagggagagagacaggtgcctacagagaaaatccaaagagactatttgtgtagacagatgagctttgaactttgttgtctgcttatgtcccagtggtacttgggacctaagggactatcagtacctgtggtctcaatcaacatcgctacttgtcttcttcctcctcgaagctcctcctggacttgggcagtttayaaaccctaatgcctatgtgatccagggcagtaacctcaatgtgtgaagggggccaaatagggacaatggggatagctactgaaata

SEQ ID NO: 475811 - DNA, 572 bp, Homo sapiens
ctagctgtgtgaccttgtccaaattatttaacatttctgtgtctttagttgcttcctctgtaaagcagggatgataaaatggttgctttctgtgtaaagcagagatgataaaaacagcctcaaagggctattgtagttatgaggatttaatgagatagtgcatgtaaagatacgtagaagaatgtctggcatacggtaagcacgtagcaattattagtttgtgtaattacagtgatgaaagcagtacttaagaccagatttattctaaacttgaagaaacagaaggctagctatattactgtgtgtgtatgtgtatgcatgcacacatacacatacatatacatatcagcgattctcaaatctcatccctgcttcccgttcacacagccatttacttcatgtgctgttggctcagacggaccatattatactgaagacaaaggcctggattctgtgttccttctctcttccgttggatgtagctccattgtcaatggcatccatctttgctttaggttatcctgatgytgatgatagagtagagagaaagaaagaacttcagtgcttgatga

SEQ ID NO: 475812 - DNA, 478 bp, Homo sapiens
tgaacctgtgacatcaaacatgtaatatgcttccaaaatacgatggtgagacaggtataggattaacattcctattacaaaagggagaaataaggtcttgagcaaggctgaaacccaaaagggcaaatcctttagatcttaaagctcaagaataatcctctttggctcaatgctgtgccctccaggcccacagtggcagaggtcccgccttttgaacccactgggatgatagttctgccccctaaaactttgctgggcaagaattgggccctygcagctccaggcagccctgtccccaaagctatgctgggtgctgaccatgctgcgctgaggccactggttctgcacctggggcagccaaggagcatggtgctggagtgtagggaacagagcctgtgatgtgagacagcatggacagcactcatagaggtcctgtgggttcagggggcctctcctttgcaggtggcccctcttagac

SEQ ID NO: 475813 - DNA, 588 bp, Homo sapiens
catgtaaactctgatacaagtacatatgtaattttagcatcctgcacatttaactgactctcaaaatggcttttgggaaaatggctttttttctgaaggtaaattgyagaagaagaaaggaaggggcaatgacccagaggaaaatacactctgtattaaccactggctacaaacagaccctctgtcacaagttcatcaggtgatgagaaatatattatagctcaaatagaacatgaatatattagttgatataaatattgtcttgaagatatgaaattaaataccagaattttctttcctgtatcaattcattttattaaacagacaccatatttgtgagcttggtggctttggttggaagcataatgaaaaaagattagtacattctcagtttaatttgataaagatcacataataatggtgacaggtggagccacgtgggggtggaggcaaattggtcttctgtcccagatgtcaaagacgtgctgcagatatcagggaaatgtctcatggttgggaaaggtaagggaactcagcaggctggtctttgatacctagggctttcatttttaattaaagaacataact

SEQ ID NO: 475814 - DNA, 588 bp, Homo sapiens
catgtaaactctgatacaagtacatatgtaattttagcatcctgcacatttaactgactctcaaaatggcttttgggaaaatggctttttttctgaaggtaaattgtagaagaagaaaggaaggggcaatgacccagaggaaaatacactctgtattaaccactggctacaaacagaccctctgtcacaagttcatcaggtgatgagaaatatattatagctcaaatagaacatgaatatattagttgatataaatattgtcttgaagatatgaaattaaataccagaattttctttcctgtatcaattcattttattaaacagayaccatatttgtgagcttggtggctttggttggaagcataatgaaaaaagattagtacattctcagtttaatttgataaagatcacataataatggtgacaggtggagccacgtgggggtggaggcaaattggtcttctgtcccagatgtcaaagacgtgctgcagatatcagggaaatgtctcatggttgggaaaggtaagggaactcagcaggctggtctttgatacctagggctttcatttttaattaaagaacataact

SEQ ID NO: 475815 - DNA, 633 bp, Homo sapiens
ggctgggttcagtggctcggcctgtaatcccagcactttgggaggctgaggcaggcagaatacttgagctcaggagttcaagaccagcctgggcaacgtggcaaagccccatctctacaaaaagtttaaaaaattaaccgagtatggtggtggatgcctatagtcccagctactcaggaggctgaggtgagaggatcacctgagcccaggatgttgtggctacagtgagataggattgcatcaccacactccagcctagacaacagagtgagacctcatctcaaaacaaaaaaaaaaagaaagataatctcagaaataaggaattatagtacagtatgaaacatacaaaattagaagtaygtttgtaccaagtataactttaatctttacaactgattaaatgttacatgacattttaaaaaataacattaattaaaaaaatctcagtacttcagtttcctgaaactcaagacaaatactagaaggacaaagtaagagtttaattcaggccaaaacatagaggaaaaagaaggagctggtcccacacaatagctacttggctatttccctttcctcatgtagaatttcctaaaaatatttggaagaaatgcagaattccttccccattcccta

SEQ ID NO: 475816 - DNA, 549 bp, Homo sapiens
  misc_feature (1)...(549): n = A,T,C or G
agaagaggaaactgaggccttttggggttgacaggtcattgggctccctccaatgttcccactcccacrgaactttttcaaaccatgaccactctcaagttctcctagtcttgccagctctcactcaaagaaaatggcctctcctgttgcttccttgggaacagttttgttggcatgaactccctcaagttgtctcctttcccgctacaaacttaaccttatgttttctaagtctcatctcctttttcaaaaggaggcctgcctccaccatttctctagtctctcagtatgtgatcttcatcccatcctcttctatccattactccttcagaaccttgtttcatcaattattatcctactttcccttaacaccagatcatattcanaattttttgcttcaaacaaatccccaaactttccttggtcacccatatcttaaatgcatcaacataacatcttactctttaaaaatcttcttgagtaagtagcctacatttccattctgttatcttgacttcaatctaccaccaccagctatgatcttattac

SEQ ID NO: 475817 - DNA, 583 bp, Homo sapiens
tacagattcagccaactgtgaattgaaaacatttgaaacaaaaaataatacaacaataaaaataatatatggaagcttgatgagaacacctggacacaaaggagaatgacagaaactggggcctacttgagggtggaagctgggaggagggagaggatcagaaaaatatctattgggtactaggcctagtacctgggtgatgaaataatctgtacrataaactcctgtaacatgagttaatctgtataacctgcacatgcaccctggaacctaaaataaaagtttaaaaaataatgcaagtaaaaaatacagtataacagctatttgcaatgtattaggtattaaaaataaggataatttaaagtatataggagttccctagcaagcagactcagaaggggaaaaaaaccatataggaggatgtgtaggttatatacaaatactacgcactttatataatggacttgagcattcatgaattttggtatctgcagaagttcctggaaccaatcttccatggatagagagacaattgcacgtcatatagcagcttttttagttgtctcattttgacagtttgaat

SEQ ID NO: 475818 - DNA, 506 bp, Homo sapiens
aggttttggggagctgcttgatcaacgaaactttggggttcagggtttttagaccagtttgctgccttatgtgcggtgtacccctcttctcaggatcttcaagagactgttagtaaagacctaatttgcttttcaataatttgtattttcgctccccttctacaccattccctgcccaccttctatagttgagagcctgggactggcctggaagcagggcacccagttccgttctgggtgcacctggagcaggtggggcacagggcacggtcctcctccagggataagtggtgtcccttctggggctgccctcggcacagagctttccctggcctccctacatctgaaccacccattaacaacaccctcttctgggcccgtgctagtctctgcaggtggactctgggtaaagtcttgggaatcttaggattgaacgagcagttttggtagctttttttacacttaaccccttgagaactatcagygcaggggctgcatttcaggcc

SEQ ID NO: 475819 - DNA, 500 bp, Homo sapiens
cattagagattacagaggcaggaagattgacattgtttcaatatacacagattctgaagaccaggacattgtctataacaatagtgttagtacttcttttctcacagtgaggaataagaaactyggtaaggatagtgcatttgacaataaaaaatgcaagatgtggttcttggacataaacaggtagaaattgtgtctggacaccatgaagaattttcatgtgcactaattaaacaataattattaattatgtgcctcttctctcctcattacacttaaccattaataaatcaataaacttcacacgcaaataaattgtataataatcgttttaaatcaaattgtttatatacacagtgggtggctccatacaaaatgtttgtctgggaccacccacatccatgggccgccctggccatagatattattgaccaagcattgaggatccacagcacataaagtacttcacagccagtacatatgttaactctaatctataa

SEQ ID NO: 475820 - DNA, 584 bp, Homo sapiens
tatcatgaaatcataaaattatagggcttagttccatgcttagatggtcataatgctttagatgagacataataaatcctctctccttccccttttattgtataaaagagaaaagaaagtgatggctgctggggtatggagaggagtataatagtttttcataaataaccctaaagggctttctrggagaaatattttcaatatagaaaatactgtgattatcccactttcacagtgttgccccaaagcaatccatggcatttgaaatataagctattttctcatgattatgtatgccttttgtctctaagaaaagtttgcatattaatattgcatctgagttatcagtaaactagactctctttctactacttacaacattcaaaattcacatttgaactctaaaaggatgcttttgtaaacaacataaatcgatccctaactacagcagtgagaaatattcagctcaatccatgggaattttgactggtgaatcacataaggaaacttcacacttcagaataaaaaactttgaggcagcacagaattctaaattaactacaactaatttattttatgttcaa

SEQ ID NO: 475821 - DNA, 584 bp, Homo sapiens
atttgataaatacatgttaacagtgctccccatcaccctgtttgttattaatggatttttgtaaagaattacgaaaatttgaatatttgggatgataagctttgttaccattagtaaaaaactgtatataggccagacgtggtggctcacgcctgtaatcccagcactctgggagtccaaggtgggtggatcgcaaggtcaggagttcgagaccagcctgaccaacaygctgaaactccgtctctactaaaaacaaaacaaaaaaattagctgggcatggtgacgcatgcctgtaatcccagctactcaggaggctgaggcaggagaattgcttgaacccatagtagtcggaggttgcagtgagcagagatcaagccactgcactcccagcctgggtgacagagggagactctgtctcaaaaaaaaaaaaaacaaaaaaaaaaactggatataagtgggttagaatttgaagagaaaaaatcaggatgatggaattctgtccaggctggtggcaggtccatgtgccccttttgaccttgattatggcagtgcgtgctaatggcacatgagccaaatgactgact

SEQ ID NO: 475822 - DNA, 397 bp, Homo sapiens
agtgaaaaaattagcagagtgtggtaatgygtgcctatagtcccagctacccagtaggctgcagtgagctatgattgagccactgcactccaacataggtgacagagtaagggatggttaaatttaagggaccacaaagtatcaaagaattggtaaaatattattttccaagcttaaataagtgtgagtactattaaagtgatactgcctgcaacataaataactcaattctacaagttcagtttttggtgggaaacaaaaaagcaaagccaattagtgacaaattttatcgacaaacagataatgtcaggaatacaaatgggctattttaccttgtctacacagtgtctacctgtctatcatggtgcctggtacacatcgcgcactgacaaatatt

SEQ ID NO: 475823 - DNA, 403 bp, Homo sapiens
tattacacaatttacccaaaacatttaaagtaacagtaagacaaacttaaaaaaaaaaaagtcatacagacaaaacatctctaggtgaggcaatatgtaaatttcattgtcaaatcatgattttgttactctgctatacaacttggtaccatatcaatgmtactaaatgactcaagagtaagacattatgcattccgtttatatgagaaaaagagattatttacaactacttgaaagagaaacagaaatgccaacaacagtatcattcaaattctagtgcaatgtcaattgttaccaagagatcttatttgcttatataaattttgcaaataattcaaacctggctatcttattagaagctgacaaagtatgcttttctgttgcaaaagatcagtggacaaaa

SEQ ID NO: 475824 - DNA, 616 bp, Homo sapiens
ggtgatgttcacagtttattgggaaaaggatggccagggcacctgtgttcttgatcgtttcctttagtcaaaagagaaagtgagggcactgacacccrcctgtgtggggcccccatggctttcaacagattcccagatcagcgagtgcccaaaccagcttttgggagatgagccccaatgttgtctttttgttaatgtctaaaaaagcttattgttttaaattacatagtctattcccatttatagctgatgctcaaacacagttgcaaataatagggcttctattctttctaaatttttatttctcaaaatcttttagccattctcctgtcagctctcattttccttacctattgtcagtacagatggtccctaacttatgatggttcgacttatgatttttctactataggagaaaaatgatatgcattgagtagaaaccttactttgagtgctcatacatacagccattctgttgttcactttcagtacagtatttaataaattacatgaaatattcaacacttaattataaaataggttttgtgttagaaaattttgcccaattgtaggctaatgtaagtgttctgagcatgtttaaggtaggtcaggctga

SEQ ID NO: 475825 - DNA, 646 bp, Homo sapiens
ttgcttcaattcagctatagtcgccacctttcactttgtaaagcaaagctgcttccatgtgggcattaggagaggtgtaggttaaaaggataaagaggttggagaaggggaggttttttttttttctcttcacaccttgagaattatcatgatctggttcagagaaggattttgcctatctgtgtaaaatgtttagatgaaactcacacaataacatatactttcaattttccttgtaagataactaaaaacattcacttgcatgaatatgtaaacgcttttttaaacatgtgcattgcacttcttcagcacactacatctctgaacatgcttcacatagtatgagagacacagccgggcattctgggmaattcttttaaatgttccgtgatgactttttaggctgtagattttggagaatgagaatttatccagtgccaagcagcgtgtctattatgcgtcattgatccctgtaaatgtagtttttgacttgagatggatggctgtaaacttctccacagtcatctaagtaacaaggaaaatcattagcatctcaaacaggctgttcagaccaaaatgttttgcattacttctgtccacatttgccagccccactgttttattgctcgatgcacagaaatagctg

SEQ ID NO: 475826 - DNA, 352 bp, Homo sapiens
gtcttcagctggttctaatttgtatcatttttctgtaataaacctgactgtgcatatatttgagcaacagggatttctattgcgagtccatttacatgagggtttttttcaacaaatgctcggcccctcctatccaacaggttctgcatccataacccagtgcagatgaagaatacagtattcccaggataagaaacccacagatacagagggctgactttttgtatgtgcaagttctgcgggagcactgtggggacttgagtatgagtggattttggtgtcttcaggcatcctggaaccaatsccccatggatactgagggtcaactgtaatagcttctggtgagttctgt

SEQ ID NO: 475827 - DNA, 504 bp, Homo sapiens
tggggggcgctggggtgaggggggtatcctgactgccagcakggtccctgtccggaacctcacctctctggtccccgtatcggaagcgctccagcgcgatattgactgcgatcttcacctcctcatcaatgcgaatgtccttcagccccttggcccggccgccgcccccagggccacaaggcgaggggccgccgcctccgccaccgccaggagccggctgccgcggggagacgctgctcggcctggacattgccctgaagagatggtctctccgcacgggagcggccaggcctgctagctgacagccaatgacaaagaccgtgggaatccggggccactaccgggaagctccggagacggcctgtgttgggctgaggtcaccagaaaggcctcagtcaccgccacagcagaagtgaagcctgcgccattgatatcacggccaggcgaggagcgcgggcgtaatgacgtcaccagggccggcgcccgtgacctcagcgcggccgc

SEQ ID NO: 475828 - DNA, 489 bp, Homo sapiens
ggcatggagtccctgctgttcctgtccaggaggaaaaaacatatgtcacagtccaggaactattgtgttctctcttttctcaaatgggagttgatactgaagctatcctgttctcttgccagtattttatatgaagttgtatgacttggttaaatgggaagagcaacatttggagggggactgaatattacccagacaacctacacttggagctggttgaatacatagaagatacttagattaactctctttgaggagttttctaggatctagctaattaatatccactgccactgtcatgggagaccactgagattygactgatgttctggccacagatgctgactcttgacaccaccccaaagctgcacacactagcgtgctgccctcttctgagttcttagtgttctgaagctatgctgtgccctatgcctaactggacagaagacccctcctcctcaccctgcctgcatcctcatgtctcacagt

SEQ ID NO: 475829 - DNA, 511 bp, Homo sapiens
ttccaaacattggagtcatacacagtgtgctctcctccagagtgaaattagtgggagatcaataacaaaaagctatctttgataatatagcttacacttctaaataattcatgggtcaaagaagaaataaaagcaaaatttggaaaacatttaaactaaatcataaaaataccatttactcaaacatgtggggtgtggctacagtcataattacagggaaatgtaytgccttaaaatgtgtatattaaaaaagaaaaagacctaaaaaggcaatgattttattatccaatttaatagcaaaactagagaaacaacaaatgatgtgtgttacacagaaaacaaaatgttgtgagaaattaaagacttcaataaatggagggttataccatattgatggaataaaagacagtattgcaaaaatgtcaatttctatcaaaataatttaggagtgcaatgcaatttcagtgaaaatatccataagttatattttcttgtggaaattgataagtga

SEQ ID NO: 475830 - DNA, 498 bp, Homo sapiens
tacagtctttaaaataatataaagccattaagccatggggtttcaagccttacttaccactggaagtgagcttaagtcctgtttggaagactgtaaaaacatttttacaaagaaaaattaataacctcaagcatttggataagggcaaaataatccacatgctctaatgttttgctttgcttggaaagccttcaaaatgccaaaaaaggaaacaataagtatcccaaagatacawtgaaagaaaaattctagaaataaaatcttttcccttgattaacttatatattcatttacagtaaaaataatttccaaagaatcagattcagcatggactgtctgagcacaggattccagagaaaacttcttgatttgataattataggagcagaagctacaaaatatacactatgataatcttattaagatatttcaactaaagtttgagggaagtaataatcacaaagcttctagaatagaggcagaagtcagcaaactaca

SEQ ID NO: 475831 - DNA, 570 bp, Homo sapiens
cacagagctgtttgcatcctgtctgggcttgagattagggaggagggttatataaatgatgagatagggaggagggcttgagatagggaggagggttatataaatgatgaacattttcatttgaggtacagaaaggaacacacacacacacactcacatgcacatgcacacacacacacatgcacacacacacgcacatgcacacacacatgcacacgcacatgcacatgcacccatacagacctggaagtgctgtgttaccttcaattctcaagcatgcataaggagagaaggggaaggggtgagctgctgtccatttcattaggactaaatgaagacgtgagggcagtgtccatctccccagccttcatcaggaagggaaaagtctgggtgaaggtaatagctctgaccaagagactgagggatatagatttctccccacccttctaaactcagagcctagctaccacaggcttcaaatctcaaattagtgwtgtgtgaagtttcttgtcttttattctacatgggggatttctgccctcttaggcccacgtagcttcatggacccta

SEQ ID NO: 475832 - DNA, 634 bp, Homo sapiens
gtttctcagaaaattaagtcctgtctgtgttcctccatgggagacacttggaagcctgcacctggtttcttgccatgccatctacctttgctgattttaatctgtattctttagatataataaactgtaataatgactgtggcagcctttctgtgtcctgagagccctctagggaatcgcgaaaactgaggttgggtatcacatcaaacctccaacctgtttgtaatttaatcttcataaggtcagagagcgtatttctttttctgcttgttttctgcctagaatgtgtggatattccagaaatatttgctgataaaaatgaattgcttccataattagggaagaaattctttacctggcgaatcttcaagttatgcaccatcatcatsgtcctgtctgtgtcccacccttccttgtaatatcttgggttattcatctttcccattcatgaactttaagcttttgtcagcaccaactcacctctgtcccctctcaagatctgagagaaatgtaaagtggactttcttttacagaaattcaatgacctataaataatggaatttcttcctaaaccatgtgtcacagaagaagtatggagtacataacaaagggtcatctatggtagaaaaggtca

SEQ ID NO: 475833 - DNA, 568 bp, Homo sapiens
tattattacttaactgacacatataaactaggaacagataggtaggatcttctaaacggtggctttgatagtaagtgctgcagaaggtcagaagatgtaaagattgtgtttgtcttaatttgagtcatagaatagctgtttatgtttgtgggataatctgcctaaaaatgtgttgcaaatatttatatcatcctggtgtmttctgaaaggagcatctaaaactaaagcttaaaagcaagttgttcactaagagacaagaccatgaacagggaaaggataaaccagtaagagaaagttattgagcaggccaccagtgaaagagactggttatgggatcagaccttatgaactgctcccagaaccatttgcctgataaataaaagggaaagcatttatatctacacattgttcctgtactcccatcaatcagaggtgacgtcttatggttatcagcactgtacttctgggttgcacatgtgtgtgtggcaagtaggggcctagggattcagcggcatcagagaagccccagcacaagatgtgagagacacagcacaaacttaaggagcgg

SEQ ID NO: 475834 - DNA, 568 bp, Homo sapiens
tattattacttaactgacacatataaactaggaacagataggtaggatcttctaaacggtggctttgatagtaagtgctgcagaaggtcagaagatgtaaagattgtgtttgtcttaatttgagtcatagaatagctgtttatgtttgtgggataatctgcctaaaaatgtgttgcaaatatttatatcatcctggtgtattctgaaaggagcatctaaaactaaagcttaaaagcmagttgttcactaagagacaagaccatgaacagggaaaggataaaccagtaagagaaagttattgagcaggccaccagtgaaagagactggttatgggatcagaccttatgaactgctcccagaaccatttgcctgataaataaaagggaaagcatttatatctacacattgttcctgtactcccatcaatcagaggtgacgtcttatggttatcagcactgtacttctgggttgcacatgtgtgtgtggcaagtaggggcctagggattcagcggcatcagagaagccccagcacaagatgtgagagacacagcacaaacttaaggagcgg

SEQ ID NO: 475835 - DNA, 568 bp, Homo sapiens
tattattacttaactgacacatataaactaggaacagataggtaggatcttctaaacggtggctttgatagtaagtgctgcagaaggtcagaagatgtaaagattgtgtttgtcttaatttgagtcatagaatagctgtttatgtttgtgggataatctgcctaaaaatgtgttgcaaatatttatatcatcctggtgtattctgaaaggagcatctaaaactaaagcttaaaagcaagttgttcactaagagacaagaccatgaacagggaaaggataaaccagtaagagaaagttattgagcaggccaccagtgaaagagactggttatgggatcagaccttatgaactgctcccagaaccatttgcctgataaataaaagggaaagcatttatatctacacattgttcctgtactcccatcaatcagaggtgacgtcttatggttatcagcmctgtacttctgggttgcacatgtgtgtgtggcaagtaggggcctagggattcagcggcatcagagaagccccagcacaagatgtgagagacacagcacaaacttaaggagcgg

SEQ ID NO: 475836 - DNA, 559 bp, Homo sapiens
tagatatttggtttaaaacttctggttattgaatcaacttttcatattacagataggaaaactaaagctagaaagattgtgtcatatccaaagccacacagacatgtagctggagaatctatttcagtaaatatttattgagcatctattatgtatgagtttggctaacaaaaatgttatagcaagcctcttaatataggtagaaaaaaaagtcacattttttgtttacaatagccaagtcttccatttcattcatgtccatttctaaataataataaatggttaaagtcttggtttccacagtggatctaaaagttaaatttaactgagttcaaagccatgttaggtcctagttcacagtcagagcctcttgtgaaggtgtgtggcagctctgtcttgtgtaccttgaattcctataactctcactctcatcaaaacacaggagaaaatgtcrgtttcttagatgagctcactctctcactccttctgctggaaattcatttctatttcatgcaaattgggattcattgcataaaaaaaattacaaaggataaggtaa

SEQ ID NO: 475837 - DNA, 608 bp, Homo sapiens
tctagtcccaagagtaggcctccagatacctctatgaagtgctagatatttggtttaaaacttctggttattgaatcaacttttcatattacagataggaaaactaaagctagaaagattgtgtcatatccaaagccacacagacatgtagctggagaatctatttcagtaaatatttattgagcatctattatgtatgagtttggctaacaaaaatgttatagcaagcctcttaatataggtagaaaaaaaagtcacattttttgtttacaatagccaagtcttccatttcattcatgtccatttctaaataataataaatggttaaagtcttggtttccacagtggatctaaaagttaaatttaactgagttcaaagccatgttaggtcctagttcacagtcagagcctcttgtgaaggtgtgtggcagctctgtcttgtgtaccttgaattcctataactctcactctcatcaaaacacaggagaaaatgtcggtttcttagatgagctcactctytcactccttctgctggaaattcatttctatttcatgcaaattgggattcattgcataaaaaaaattacaaaggataaggtaatattaat

SEQ ID NO: 475838 - DNA, 635 bp, Homo sapiens
ctcacaaaaaaagtaaatctgaccaaatcacttgatgcataaagctccccaaagtctttccactgtcygaactagaggacctggcatgatcttttgtgcctcaaatcttttccctctgtcttcctctctgtctttcatttcctttaaagtgctcctcttcttttcctctaggttatagagcacctatttctttgcctgtaaacttagctttggccccatcctacatttctcattcttttcatcctaataatgcctcttgatccttcagattccagcttaaacatcacttcctcagagaggactaagtcttaacatactactctgtattttctccttcctaatgcttctcatacttgtaattattagattaatatctatcttccttgatgaactgtcaactttatgtagatggtgactgtttctgtctaggtcagtgccatcctcaggaattagtaggagctcaataaatatttgttgaattaaccaaaaaataaacacagtcctggactatgtaggacacagagtagaacaagaaatattcaataaatgtttgttgaattaaccaaaaaataaacacagtcctggactgtgtaggacacagagcagaacaagaaatatgcttaattccccaccca

SEQ ID NO: 475839 - DNA, 593 bp, Homo sapiens
ctcacaaaaaaagtaaatctgaccaaatcacttgatgcataaagctccccaaagtctttccactgtccgaactagaggacctggcatgatcttttgtgcctcaaatcttttccctctgtcttcctctctgtctttcatttcctttaaagtgctcctcttcttttcctctaggttatagagcacctatttctttgcctgtaaacttagctttggccccatcctacatttctcattcttttcatcctaataatgcctcttgatccttcagattccagcttaaacatcacttcctcagagaggactwagtcttaacatactactctgtattttctccttcctaatgcttctcatacttgtaattattagattaatatctatcttccttgatgaactgtcaactttatgtagatggtgactgtttctgtctaggtcagtgccatcctcaggaattagtaggagctcaataaatatttgttgaattaaccaaaaaataaacacagtcctggactatgtaggacacagagtagaacaagaaatattcaataaatgtttgttgaattaaccaaaaaataaacacagtcctggactgtgta

SEQ ID NO: 475840 - DNA, 593 bp, Homo sapiens
ctcacaaaaaaagtaaatctgaccaaatcacttgatgcataaagctccccaaagtctttccactgtccgaactagaggacctggcatgatcttttgtgcctcaaatcttttccctctgtcttcctctctgtctttcatttcctttaaagtgctcctcttcttttcctctaggttatagagcacctatttctttgcctgtaaacttagctttggccccatcctacatttctcattcttttcatcctaataatgcctcttgatccttcagattccagcttaaacatcacttcctcagagaggactaagtcttaacatactactctgtattttctccttcctaatgcttctcatacttgtaattaytagattaatatctatcttccttgatgaactgtcaactttatgtagatggtgactgtttctgtctaggtcagtgccatcctcaggaattagtaggagctcaataaatatttgttgaattaaccaaaaaataaacacagtcctggactatgtaggacacagagtagaacaagaaatattcaataaatgtttgttgaattaaccaaaaaataaacacagtcctggactgtgta

SEQ ID NO: 475841 - DNA, 415 bp, Homo sapiens
tttgttttttattttacattttaatctttctgaaactggcaagtgtcttgcaattaatggtgacttacgattataatggtgaaattaatggaatgttacatttgatgaaactgagtaaatatttatctgtaaaaacatcagcttaataactgtctttcccactagagtttatgtgccagagggcagtgactttggttttcctgatccccctatatccatggtgcctagcacagggtcaggcatgtaatagatgctcagcaactatttgtggactgaatgaatgaacgaggaaggggtaaactgaacttwgttttatagatcctgaatttgcctctctcaatattttaactgtccaaatttcatgcgttcatgttcttccttgactgtatcctttaaggctttgagagtttgccct

SEQ ID NO: 475842 - DNA, 662 bp, Homo sapiens
atatattggtttccaaatccgcttttccacaaacttttctctctctaacgaaagaaaatgtatgctctattaaaagaaaacaaatcttacaaaatacctaaaataacctacagattattaaataataacaattaactgcctatttttcctaattgatctgtgccatgttaaccaacaaaaattctacacattagagaaatcccttattttatgaagcttttttgtttgtttgtttttgagacagaatcttgctctgtcacccagactcgagtgcagtggtgtggtctcggcccactgcaacctccacctctggggttcaagcagttctcctgtctcagcctcctgagtagctgggactacaggtgcgtgccgccacacctggctaatttttgtattttagtasagatgggggtttcactatgtgggccaggctggtctcgaactcctgatctcatgatccacccacctcagcctcccaaagtgctgagattacaggcatgagcgacctgtgcccagcctaatttatgagttttttaagtcagtaaattgtatgtaacattgcacaatgaatttactttccaattaatctttctattctaattggtctgataggggaactaaagcatttaacactacaggcagatgcttacaaagtctttagg

SEQ ID NO: 475843 - DNA, 469 bp, Homo sapiens
gcctggctaacttttgtatttttagtagagatagggtttcgccatgttgcccaggctggtctcgaactcctactcctgggctcaagtaatccacccgcctcagcctcccaaagtgctgggattacaagcatgagccaccgtgcttggcctgactttttaaatgtatagaaacttcattactactcataagagaaatacttattaaagaaaactgggccataakgaaacaccacccaatgccctcattattcaaagacaatccagatcatatagtatcttgatctatgtcctcctagctcttatcccccgctggacatctttcctctagtccttatcccccgccgggcattttttttttaaacatatctgtgctcacactgcatgcataccttctgtgttttcatttggcattaatttatttactactgcagctccagtatgtagagcagtacttggcacaaatggtacc

SEQ ID NO: 475844 - DNA, 482 bp, Homo sapiens
aggctggtctccaattcctgggctcaatagatcctcctgccttagcctcccaaagtgctggaattacagacatgagccactgcacccagccaaggtttaaaaggctgaaaaaaataaaaagaagaatacaatttcttggcctgacgcggtggctcatgcctgtaattccaacactttgggagactgagrtgggtggatcacctgaggtcaggagtttgagaccagcctggccaacatggtgaaaccccatctctactaaaaatacacaaaattagccgggtgtggtggtgggcgcctgtaatcccagctactagggaggctgaggcaggagaatcacttgaacctgggaagtggaggttgcagtgaaccgatatcctgccattgcactccagcctgggcaacaagagtgaaactcttgtctcagaaaaaaaataaataataagtaaaatacgatttcttgacctgtgagaatccaaatgtca

SEQ ID NO: 475845 - DNA, 482 bp, Homo sapiens
aggctggtctccaattcctgggctcaatagatcctcctgccttagcctcccaaagtgctggaattacagacatgagccactgcacccagccaaggtttaaaaggctgaaaaaaataaaaagaagaatacaatttcttggcctgacgcggtggctcatgcctgtaattccaacactttgggagactgaggtggrtggatcacctgaggtcaggagtttgagaccagcctggccaacatggtgaaaccccatctctactaaaaatacacaaaattagccgggtgtggtggtgggcgcctgtaatcccagctactagggaggctgaggcaggagaatcacttgaacctgggaagtggaggttgcagtgaaccgatatcctgccattgcactccagcctgggcaacaagagtgaaactcttgtctcagaaaaaaaataaataataagtaaaatacgatttcttgacctgtgagaatccaaatgtca

SEQ ID NO: 475846 - DNA, 477 bp, Homo sapiens
gcatggcggtgcatacctgtagtaacagctacatgggacgctgaggcaggaggattgcttgagcccagaagttcaaggctgcagtgagctatgctcacaccactgcactccagcctcggcaacagagtgagactgtgtccttcaccccaacccccagaaaaaagccaaaaggggaaaaaaaaaaaggtcacactctcaataatggcccagcaaggagtggaacctggggttgcctggctccacaaagcacctacttttacacatggtcatttactgtcctcataggctctgcagagctgaaggacatgcatgggaaaaaggggtatctaggaggaattggggagcgggagargagaatgaagatttttgcaaagtatcgctgggccctgcctttagtggcctacagtaatttccaatagggaaaggtccaagtgcccactgtgggcatggagctcaccaatacgtatgctcagaggc

SEQ ID NO: 475847 - DNA, 477 bp, Homo sapiens
gcatggcggtgcatacctgtagtaacagctacatgggacgctgaggcaggaggattgcttgagcccagaagttcaaggctgcagtgagctatgctcacaccactgcactccagcctcggcaacagagtgagactgtgtccttcaccccaacccccagaaaaaagccaaaaggggaaaaaaaaaaaggtcacactctcaataatggcccagcaaggagtggaacctggggttgcctggctccacaaagcacctacttttacacatggtcatttactgtcctcataggctctgcagagctgaaggacatgcatgggaaaaaggggtatctaggaggaattggggagcgggagaagagaatgaagatytttgcaaagtatcgctgggccctgcctttagtggcctacagtaatttccaatagggaaaggtccaagtgcccactgtgggcatggagctcaccaatacgtatgctcagaggc

SEQ ID NO: 475848 - DNA, 484 bp, Homo sapiens
acacataatattgagctcctgccatgtgccaggcccctgattacaagaccaatgtagcttaccttccacttgggggacaggacagacagacaagcaattccagcatggtacaggtgaacattgaatgttatggcatgatctagacatatggggcagagaaggccaagttgagtcttgcaggacaaataagtgttgtccaggcaaagagaggagccaggaccagcacatacagaggccagaggcatacaagagcacccaagcagcaccacagggaaggggggatgagaggtggaactgcarattccagaagtggctggagtttggggtttagccaggagacaaatgggagccactgcgtggtatgaggcatggtagcatggatttgtacatagaaagcttggggtctggaggaaggatgcagtggggtaagaggtagatgcctagaggctggtttggtggagtttccagagataaggaaggtctt

SEQ ID NO: 475849 - DNA, 657 bp, Homo sapiens
ttatcacaggtgctgctggcttcccccttcctgatgaactctgtcagatgcccatttctcctagcaaccttgttttctgaaaggctgactccaaccctgctccaggagagggaccttcattagtctaagccaaccctggtggtcttagtccctctgatggagattggtttacctttgggctatgtgaccacgttctagccaatgacatttggaaagaagttggcttggggcttctgtgaaattttccttattcttaagaaagtcatctcagaagtgaagactcatttacctgtcattggattytgtaatgtgagagtgtggggtatggaaatgctgcagccatttcgtgaccttgaggatgcagaattaagcagagtggagaagtggaaatgacccagggcctctaatgccgttactgatccacacaatcagtcaacttgagagtcctcccttcccatctctggaattctagtcatgagagatattaacttgatttattgttcaaggtctcttttcttttttcttttcttttctttcttttctttttctttccttgtagcctaaggcagcaaaccgataccctccttccataaacacattatctcacatatacatatccatatatctgtatataaacaactagagccatatatagaa

SEQ ID NO: 475850 - DNA, 603 bp, Homo sapiens
gcctgtaattcatgatgtggattttaaagtaaagactcttatgaccatgataccagtatcacagcaaacaaaactcataataccttaatagtatctaacactcacttcctattcctacttcctcgattgtctcaaaaacatctttttacagcttgttggttcaaatcagtgtacaaacagtatccacacatggctagtgtgtttctaagacttgtaaaatacgkaatccatgagaactttcacaacttccccatgccattcgctctcccatcttggggtggtctgagagtagcaagtgtttttacagcctgcaaaccctctgtaactgtgctcccgtgaatgtccatttcctgcctggcccggagcaggcactgagactgtgtgggcaccacgtgctgctggaaaagcagcagccccagggcccggagcccagagtggccggagatgtgaagacaagggagggatgtgtagaaatgccggtgcccacaagaggcggctgcagggtgtggacagtcctggctccatagttgggctggccagggccgagccttgactccctgcggcttcgagcctctggcattctcctcttgcatcagacggagg

SEQ ID NO: 475851 - DNA, 603 bp, Homo sapiens
gcctgtaattcatgatgtggattttaaagtaaagactcttatgaccatgataccagtatcacagcaaacaaaactcataataccttaatagtatctaacactcacttcctattcctacttcctcgattgtctcaaaaacatctttttacagcttgttggttcaaatcagtgtacaaacagtatccacacatggctagtgtgtttctaagacttgtaaaatacggaatccatgagaactttcacaacttccccatgccattcgctctcccatcttggggtggtctgagagtagcaagtgtttttacagcctgcaaaccctctgtaactgtgctcccgtgaatgtccatttcctgcctggcccggagcaggcactgagactgtgtgggcaccacgtgctgctggaaaagcagcagccccagggcccggagcccagagtggccggagatgtgaagacaagggagggatgtgtagaaatgccggtgcccacaagaggcggctgcagggtgkggacagtcctggctccatagttgggctggccagggccgagccttgactccctgcggcttcgagcctctggcattctcctcttgcatcagacggagg

SEQ ID NO: 475852 - DNA, 475 bp, Homo sapiens
attttggtagtaagacaattggtgtcagttgctggtaggatccagggtgagaaactgagttagcagggatattatttcatctatgcagaatactggcttcgtggtttgtaatgttcttcagattcctaacatttcccaagagttgcgtgaatgaatttttcttctcttgccaaatgccaaatggtcagtgtctcatgtggaactaaaaataattgagtaaattacactcagattgttttgcccatctcttaactcagaagttgttctaggtgttgttgtggttgttgtttttccctccaacaatggatagaaaaacaattgctaaagttttgtttttgttttctgaaacagaatctcaacatgttgcccaggctggagtgcagtggcccaatctcggctcacttcgacctgcacttctggggttcaagccattctcgtgcctcaaycccacgagctgggattacaggcatgcacc

SEQ ID NO: 475853 - DNA, 516 bp, Homo sapiens
atagaggacagcttttatcactggagagtccccttatgtcctttcccaatgaatatcatccccagtgtacatccccactccagagacaaccaagcattcgttcagtctgttggacttcatacaaatggattcatgtagtatgtattcttttgtggttggctacgtccccttygcataatagttttgagatttatccatgttgttggttgtattagtaattgattcctttttatccataggctacatgacgtgagatatcacaaatatttgatttttactcttaacagttttggaaggaacttcaatgatccagccacagagccctgtgattaacccccctgcagtattccaccaagtattcatgaatggaaacacttcccttgatggaggggttagggtctcccaaggccattcatcctgctctctttgcttaactcttaaaatgaggtcaatgcatattccagtgcctctaggacacaaaataattggccctgcatatctgtgggttctgcatcc

SEQ ID NO: 475854 - DNA, 625 bp, Homo sapiens
tattagaaaaaggcagttggttttggtcatctcattatgcatttatggaaactcacaatatgttgaaatggtaaataacatttagaaatgacttgtatttcccaayagatgttgagaagactcaactcattctagaaaatgtctggctttgcctcttatgttgttttaattccagttaaatggcaggttggggcttgtggtctgggaatcaagctcaggagggaattttctcactctcttctgtgctcagctatgtcagaaatcattttgttcagaaatcttgttggcttgacttcttaggctacgtatccatgtgtctagaacatctcctctttgaccacaagtactggctcaactgcatattggtggaggatacagagatccaagtgtctgtagatgataaacacctggaaacaatatacctgggactcctgatacaggaaggtgagtgtggcataggggtagagatgggatcttattcagatatttgctaccagaggccatgaaataagcaggatgcaaagggagggaaaaatcattcaaacatggaatattcacaaatgaacccacctgttataatagtactttgaacattcctctgagttcaacactgacattacacgaa

SEQ ID NO: 475855 - DNA, 619 bp, Homo sapiens
tctctctctctcctgctaccatrtgaatattgtgcttgcttccactttgctcttttaccatgattgtaagtttcccgaggcccccccacccatgcttcctatacagcctgcagaactgtgagtcagtttaacctcttttctctataaattacccagtctcaggtagttctttataacaatgttagaattaactaatatactgaacttccttaaaaacgctgtttagaattcatcaggcagttctttcatctccacactgtagtgtcattcactggcactttattttgtctttctggtatcttcatgtttcccttggtttttgtggctgtgcacaaatgtctgcacattgatataggtatttaatccagtcctcacagcctgatttggttctttcagtagtgggcctgtccagagattaagggcagattgactggtgaggaccctaagctctctgcttagggcgggttaattggtgaggaccctaagccccagtcccactgctttagctgttgcagtgctagggagcaccctaaactcaggaccactgtggctgaaatcctttggctcctgaggttgacacaagtgctaggtcccattcaaagctcacagctgccaatac

SEQ ID NO: 475856 - DNA, 619 bp, Homo sapiens
tctctctctctcctgctaccatatgaatattgtgcttgcttccactttgctcttttaccatgattgtaagtttcccgaggcccccccacccatgcttcctatacagcctgcagaactgtgagtcagtttaacctcttttctctataaattacccagtctcaggtagttctttataacaatgttagaattaactaatatactgaacttccttaaaaacgctgtttagaattcatcaggcagttctttcatctccacactgtagtgtcattcactggcactttattttgtctttctggtatcttcatgtttcccttggtttttgtggctgtgcacaaatgtctgcacattgatataggtatttaatccagtcctcacagcctgatttggttctttcagtagtgrgcctgtccagagattaagggcagattgactggtgaggaccctaagctctctgcttagggcgggttaattggtgaggaccctaagccccagtcccactgctttagctgttgcagtgctagggagcaccctaaactcaggaccactgtggctgaaatcctttggctcctgaggttgacacaagtgctaggtcccattcaaagctcacagctgccaatac

SEQ ID NO: 475857 - DNA, 643 bp, Homo sapiens
acagccctgccaataccttaacttcagcccagtgacactgatttcagacttctggcctccaaaaccatgaaaggataaatctcttgttttaagccaccaagtttgtgttcatctgttacagcagccacgtgaaactaacacacccagctagccagactctaacctgggtcctatgactccaggccagcactcttgagccctgtgccttgctccttttctatacacagcctccccaagccagacttgtccactatctgatgggtgaccctgccaagaattgaagcaatcagcactgacagctcctctgctgcaaagccttctcatgagcctctcctttctcccaccaacatcactgcaaaagcttatcagagactgaattatcytcttgatgttctaattatcaggtgtggagagaaatagtccagaatctatcatccacaagaggaagtaaatcaaactgtctaacaaaggttttcatctaattttttgtttgtacttgtttttccaatcactgagaagctcctaacctttgttggtctgctccatcctgcccacaatttctcctttcccacagagacatgtttggaaggtatcagaccacgagtaattcagtttcctctctgccccctgagaaggactgcta

SEQ ID NO: 475858 - DNA, 643 bp, Homo sapiens
acagccctgccaataccttaacttcagcccagtgacactgatttcagacttctggcctccaaaaccatgaaaggataaatctcttgttttaagccaccaagtttgtgttcatctgttacagcagccacgtgaaactaacacacccagctagccagactctaacctgggtcctatgactccaggccagcactcttgagccctgtgccttgctccttttctatacacagcctccccaagccagacttgtccactatctgatgggtgaccctgccaagaattgaagcaatcagcactgacagctcctctgctgcaaagccttctcatgagcctctcctttctcccaccaacatcactgcaaaagcttatcagagactgaattatcttcttgatgttctaattatcaggtgtggagagaaatagtccagaatctatcatccrcaagaggaagtaaatcaaactgtctaacaaaggttttcatctaattttttgtttgtacttgtttttccaatcactgagaagctcctaacctttgttggtctgctccatcctgcccacaatttctcctttcccacagagacatgtttggaaggtatcagaccacgagtaattcagtttcctctctgccccctgagaaggactgcta

SEQ ID NO: 475859 - DNA, 533 bp, Homo sapiens
agtcataaacagcttggtgaaggaggcatgagaaagataaagggtggtggcctgattacctctagccatcctcatgcacaaacacacacctacctgtcatgtatggaaatgtctcagaatgtgggcccagcccagatctcaacaaaagcataggtttcaaagattgagggaacataaaagcaacctcagaaatcacctcttcagtcwtcacagaatgccagtgccagaagaaactctagtcatcatcccatccaaatttatcattggaaaatgaagaaacttggacgtagcaagggggaaaagaggtattcaagattacgcagaacgttcactgcagagatggcatgtaaacataactaccgcttcacatgtagtctaatcactaccaccaccatcaacaaggctattataaatatgttttttcctttattagggtataatttacacatagctaaacatcaaggtatattttacatacagtttaaatttaccctttaaagtaagttctgtgagttttgtcaaacacaaacaat

SEQ ID NO: 475860 - DNA, 533 bp, Homo sapiens
agtcataaacagcttggtgaaggaggcatgagaaagataaagggtggtggcctgattacctctagccatcctcatgcacaaacacacacctacctgtcatgtatggaaatgtctcagaatgtgggcccagcccagatctcaacaaaagcataggtttcaaagattgagggaacataaaagcaacctcagaaatcacctcttcagtcttcacagaatgccagtgcyagaagaaactctagtcatcatcccatccaaatttatcattggaaaatgaagaaacttggacgtagcaagggggaaaagaggtattcaagattacgcagaacgttcactgcagagatggcatgtaaacataactaccgcttcacatgtagtctaatcactaccaccaccatcaacaaggctattataaatatgttttttcctttattagggtataatttacacatagctaaacatcaaggtatattttacatacagtttaaatttaccctttaaagtaagttctgtgagttttgtcaaacacaaacaat

SEQ ID NO: 475861 - DNA, 480 bp, Homo sapiens
ggctgagcatcaaaggggtctaaatactcagtgtcggcttccagctgcggagagaaggaaggggagaagacaaggactcagaggggcttccctgctaattgacgctgcacctcttgcctgcccacagggccatctgacacctctccaagagtttttatttttttattatttatttatttatttttatttttattttttgagatggagtctcgctctgtcacccaggctggagtgcagtggcgggatctgggctcactgcaagctctgcctcctgggttcacgtcattctcctgcctcagcctcccgagtagctgggactacaggcgcccgccaccatgcctggctaactttttgtagagatggggtttcaccgtgttagccgggatggtctcgatctcctgacctcgtgatctgcccgcctcrggctcccaacgtgctgggattacaggcgtgagcaaccgcgcccagctgagttttatt

SEQ ID NO: 475862 - DNA, 596 bp, Homo sapiens
actacttctaaagcctcttagaccctggtaatcttcctcctaacaccatcgggtgactgcaaagcactgcaggccagacttcagttctgctgtgtaatttgcaagctgggtgaccttccttatctatagaatgggctctyctgcatggctggcatgaggaataaacaaaatggttgtgtccagtgcctggggcatagcacagctcaaaaaacttagttcatcctcctgagggatcaagaagatacttggaaacaaatgtccaagggcgtaatcttgaaggggcttgtgccaggcatatatggagagaagggttttgtgggatgtcagacttaatagtgccctttactccccacccccgtctctctgttcatagacaggaaatctgtggcctattctgggacctcaaagtgccacagggttaaagataccaagtcagaaatctaaggttctaaatggactttagaccatttttcatttgggaaggaagaattctttaaggggttgtgctggcgctgtctctgtatgcatgtgcagaatgtgcttccagatggggtaatggtctgagtttgaggacagaagtccactccactgcattc

SEQ ID NO: 475863 - DNA, 596 bp, Homo sapiens
actacttctaaagcctcttagaccctggtaatcttcctcctaacaccatcgggtgactgcaaagcactgcaggccagacttcagttctgctgtgtaatttgcaagctgggtgaccttccttatctatagaatgggctctcctgcatggctggcatgaggaataaacaaaatggttgtgtccagtgcctggggcatagcacagctcaaaaaacttagttcatcctcctgagggatcaagaagatacttggaamcaaatgtccaagggcgtaatcttgaaggggcttgtgccaggcatatatggagagaagggttttgtgggatgtcagacttaatagtgccctttactccccacccccgtctctctgttcatagacaggaaatctgtggcctattctgggacctcaaagtgccacagggttaaagataccaagtcagaaatctaaggttctaaatggactttagaccatttttcatttgggaaggaagaattctttaaggggttgtgctggcgctgtctctgtatgcatgtgcagaatgtgcttccagatggggtaatggtctgagtttgaggacagaagtccactccactgcattc

SEQ ID NO: 475864 - DNA, 602 bp, Homo sapiens
gccctatcaattctttatttttaaagtgagttgtctgtcaatctcttctttttaatagaagtgtttattctgtttgtagtcattatagctatctctctggtaagatttaaatctaacmtttgctttttgttttctacgtatctgtacccttttcaaaaaacacaattcctcctatttgcatcctattggactaatcaaaattgtttggtattttattttatcacctctattgattttttcagtataaatcttcatcttttggcattttattttattgtttttttcttaactttagaattcacactatgcagtctccatatacttcagtctacctggatttgttgtaacaatttacagatgacatagaaaattgaaaatgttacatatctttttgtggaaaggtcccactttcaggccagggagggccttgaaggctgggctgccagtcctgcggacctgagtggggactcgtggtgcctcttctggacccgcctatggccacccatggaccaatcggcatgcacttcctcccctctaaggcctataaaagtcccgagaccagccagagcaggccagagaaggaccacaaaacaaagagggca

SEQ ID NO: 475865 - DNA, 626 bp, Homo sapiens
ttggaccctcccacccccttttttttttaagtccccrgagggtatttattttctcttttcaacatcctgttctgcagcttgcatcagctctccatatgccgaagagccaggtgttggcacaggccatgtggagactagcaaaggctttggggcaaaggctttgaagttctcctcctcggtgatgatttaggctttctccttcctgtagacatacctgatgggcataacgggtctggtcaatctggtggccaatttcagttctgctgaactgtctctcttcttgggggccaagggcttcctggggagaggatgagtttggtcccatgcacctttaggtgccgtgcattggcctgcgggactcagtggacttgttctgtcatcttggctccacagagatgccaatggtttggcccagcttcttgtgaatgccagctacccttagctcctccaagctgcagaccctgcctactttggtatgatgccttaccacgagacaccttactatgggctggatgggcccaggaacgggggtcggggtgacgggatctttggctggctggttgagccacatggttgtgtgccgctgtcagcccttgtgagagaggggtttgaacttaatgccactc

SEQ ID NO: 475866 - DNA, 558 bp, Homo sapiens
tgtgcttgaggaagaaaaagcaatctcagtttaatcctatggttgccccaggaggcactaatttatcccttctgcttttcaagtgaggaagctgcagcttggcgtagttctggggggagtatgaagctgccttggtttaggtgatggagcacaggtccacagacatgtgtgggtgcatctgtggcaggggagaaaagagcatgtgtccagactacagcttgttcrgagctgggacactgacaatagagcacgcactgcgtgcgtaggtgggtgtgtctccgatcctccagcagtgacagggacgaagccttgccctgtgggatgactcaggccactggccaaatgttatgtctccatgttcaagtccctctccaacttctcctcctgggacagaaacagatggcagcggagcaggagaaggtgggggcagagttccaggcactgagggctttcctggtggagcaggagggtcggctgctaggccgcctggaggaactgtcccgggaggtggcacagaagcagaatgagaacctggcccagctcggggctgagatcacc

SEQ ID NO: 475867 - DNA, 484 bp, Homo sapiens
gggcctcgatggagggctgctgcgtagagacagagagccctacccaaccagccagcccaagggtgtgggcccgaaggggtgcaaacaccacggatgattcctgatggaatgggtggaggggtggaaaaggactagaaattctcagaggggtgggaaggaccaagcgtctggaccaggggccagcatttgagaccctggactcagccctcctgctcttcctctaggcctcctgcagtgctgcggctccgtgcacaccactctacttggggtgcgactctgtgctgagccacactgrggatactggagatgcagtggaggcccacacaggcccagtccctcccagggagaggtcaggaggaatacagaccagacagggaggaccccagagtggccagggccagggaagggagcccagggtgagtcagagaaggcttcctggaggagggggtgtctgagctgagtctaaaggaggaaagaaagggga

SEQ ID NO: 475868 - DNA, 455 bp, Homo sapiens
gctcaggaggctgaggcaggagaatcacttgaacatgggaggcagacattgcagtgagctgagactgtgccactgcacctccagcctgggcgacagagcaagactctgtctctaaataaataaataaataaaataaatacaaattttagaaagaccatggcctgggtcttaataacaactcccaggtatgaagcatttgcgatgtgctctgcccttgaacatgatgttgaatcttcccagcaacccccggaggggaggtcctatgagtcagattgcagattacacaasacccaatagattcctcacgggaatgctgggaggatgcaatgagatgccagttgaaaggagctaaagctttttacagacaataagtgatctgtaaacttcaggtgggtttattatcaccctctcctgctgtgaagatcccagggatggctccaagccaagaggactcc

SEQ ID NO: 475869 - DNA, 519 bp, Homo sapiens
tttacaaggctacccttactcttgtgtgacagtgtctgccttaagatgaaaatagtagctaaggccaaggcgccatggctcttgcctggaatcccagcactttgggaggccaaggcagacagatcgcttgagccaggagttgaagaccaacctgggcaacatgacgaaaccgtgtctctacaaaaaatacaaaaattagccaggcatggtggcatgtgcctgtagttccagctactctggaggctgaggtgggaggatcactcaagcccgaggaggttgaggctgcagtgaaccaagatcaagccactgcattccagcctgggaccgagtgagactctctcaaaaaatatayatagcagctaagccatctacagcacctaccgtgtggcaggcaggcattttggcctgtgcttgacacaaattaacccatttcatcctcacgacagccttggggataatcactattaccccattttacagaaaaggaagctgaggcccagaagggtaaagaaaattgcc

SEQ ID NO: 475870 - DNA, 545 bp, Homo sapiens
gggtgaaggtcaagagggagatccccgatagtaaggttggaactgaggatgaggataatggtgaggcagggggctatgagaattggcactggtcatacaggtggtgaccaagaaaaaggacagagaaggccatagagatggaagaattgaaataaaacgagcgtgggggccaggcacggtggctcgcctgtaatgccagcactttgggaggccgaggcaggtggatcacctgaggtcgggagttcgagaccagcctggccaacgtggcaaaamcccatctctactaaaaatacaaaaattagccgggcgtggtggtgggtgcctgtagtcccagctactcgggaggctgaggcaggagaatcgcggaggttgcactgagccgagatcgcgccattgcaccccagtctgggcgacagagcgagactctgtctcaaactaaacaaaaacaaaaacaaattctggagagtgaaaaagatgggggggaaaatcaaaccaaggagacagaacacacacgaagacagcaagtgagattatacatgcacgta

SEQ ID NO: 475871 - DNA, 545 bp, Homo sapiens
gggtgaaggtcaagagggagatccccgatagtaaggttggaactgaggatgaggataatggtgaggcagggggctatgagaattggcactggtcatacaggtggtgaccaagaaaaaggacagagaaggccatagagatggaagaattgaaataaaacgagcgtgggggccaggcacggtggctcgcctgtaatgccagcactttgggaggccgaggcaggtggatcacctgaggtcgggagttcgagaccagcctggccaacgtggcaaaacmccatctctactaaaaatacaaaaattagccgggcgtggtggtgggtgcctgtagtcccagctactcgggaggctgaggcaggagaatcgcggaggttgcactgagccgagatcgcgccattgcaccccagtctgggcgacagagcgagactctgtctcaaactaaacaaaaacaaaaacaaattctggagagtgaaaaagatgggggggaaaatcaaaccaaggagacagaacacacacgaagacagcaagtgagattatacatgcacgta

SEQ ID NO: 475872 - DNA, 649 bp, Homo sapiens
cctactgggtgctgaagagaagggtgcaaggaggccactcagagactctgagatcggattggctaatagggagacggggaaaaaaaaagagatgatgggtttttcaataatcctcatccctgaccccacatctgtgtcccctctggacaaactgcagcacaaaagattgaggtcagattgcagaagggactttcaagagatggcaaagatggtggagtgagtttcccarggtaaaatggggaaaggtgtggctctctgctcaccaacatggtgagtgaactagctcactgagctagcaaagtatacctttcagatcaccctggctggctgggtagggggtccccaagaaatatgaatagggaggggttgttacacagacaccccaagcaaacacttttcaggaggcccagcctccggagatgtgtctgtgtgagaggagtcctggacccggctgattgggacccagactccagtgaatgagtttgtagaaagcggctgccaagcggaggatgcaaatgatatgcaaatgagttcattcagatcccacctccccagtcccagaccttacttcactctccctggctccttcccttcctcatagggtcctggggggctgtagggggatattccagctagatactgtaatact

SEQ ID NO: 475873 - DNA, 656 bp, Homo sapiens
ccaagagacctcatttgagttgggtccaagtacataagtcacaatcttaatggtggactcaatccctgcaagagagccccaattccaaatgcaactatttctgaatctaagagtcacagcctcacaggtgttctgaatcctagtctttgagtcaccattctacctgttaagcagatccaagtatgagagtcataattccaactttcaactgcctccatgtgtgagatccacagcctcaacagtggacggtttccatgtgtgacagtgccaatgtttactgttggctgagtgtgcataggagagtcacaatttcacctgtgttcttggttgtgttatgatactatctgtattacccatgggctttttatggtataagtggcagttgaaatctgctttgagaccttcatgctggtatgaaccaatgattgtacccattgccctatgcccaggtatgagagtcacatctctcttgttggccagatataggtatgacagtcatcaaagtgtctgtaagctggctccaaaaataggtcagcataccaactgtcccaggacmcacatatgactgtcacacatctaattttggagtttgcccatgagattcaggacctcaccagtgggctcttcttatgtgtgagggtgacaatcctaactgt

SEQ ID NO: 475874 - DNA, 577 bp, Homo sapiens
ttttcatatgagggtcacaatcccacctatcttctgggccstgtgaaaacattctctgtaccaactgatggcattatacattgtgcattagtgtcaccattcactccgagacattcatgctggtatggaccaatgattgtacctgtggccctaagccaagatatgacagtcaacatcactctagttggctcggtccagataggagagtcccgcctatgagtggatttagaaatgagttaccattccaagtgtggccaaatcttcacgtatgaaagtcgtaattccaagtgtaagctgcattcctgtgtgagatttaaaacttcatcagtgggctttgtcatgtatgaatgtgattaatgaaatggttggcagggtgtgtgtatgtaacacacaatttcacatgtgtgccgggctttgtgttgacactctctgtaccacccaaggtctttatatgatatgcaacaaagtggtaacccattacctttgaacaaagggaaggcccacaatattacccatattggctggttcgaggtataaaagtcatcatcacacctgtaaactaagcaaagataaatgt

SEQ ID NO: 475875 - DNA, 510 bp, Homo sapiens
tgaaatgtgatttctctcatttttatgactttgccccctctctgttattcagaaatagctcaaaggcatatgcagagtgaaaggggtggtggcagkgttgggtaatggaaaagtggggaggtgcaggggagaggaaggatggaggaaggaacagtgaattatacctttatttttccattaacttctccttaccatcaatctaaaatttcttctcttgtcaaaattaaagtcaccattttttttaaaaaaaactctgtctttattcttcttggtttgccctttgattcctccattctgcatgctgttgacttttttatgctattgagacagtagaaagtagtacagatttgcacagagggaaatacaatgtaaatggctaccaaatagacttattcatagggctagccttaagtatagtctgagtaagaatgactgccttaccatttaccaattactaatatgcttgcaaatctaaggcacgtctgagaaggttgactatttttttttaag

SEQ ID NO: 475876 - DNA, 510 bp, Homo sapiens
tgaaatgtgatttctctcatttttatgactttgccccctctctgttattcagaaatagctcaaaggcatatgcagagtgaaaggggtggtggcagtgttgggtaatggaaaagtggggaggtgcaggggagaggaaggatggaggaaggaacagtgaattatacctttatttttccattaacttctccttaccatcaatctaaaatttcttctcttgtcaaaattaaagtcrccattttttttaaaaaaaactctgtctttattcttcttggtttgccctttgattcctccattctgcatgctgttgacttttttatgctattgagacagtagaaagtagtacagatttgcacagagggaaatacaatgtaaatggctaccaaatagacttattcatagggctagccttaagtatagtctgagtaagaatgactgccttaccatttaccaattactaatatgcttgcaaatctaaggcacgtctgagaaggttgactatttttttttaag

SEQ ID NO: 475877 - DNA, 510 bp, Homo sapiens
tgaaatgtgatttctctcatttttatgactttgccccctctctgttattcagaaatagctcaaaggcatatgcagagtgaaaggggtggtggcagtgttgggtaatggaaaagtggggaggtgcaggggagaggaaggatggaggaaggaacagtgaattatacctttatttttccattaacttctccttaccatcaatctaaaatttcttctcttgtcaaaattaaagtcaccattttttttaaaaaaaactctgtctttattcttcttggtttgccctttgattcctccattctgcatgctgttgacttttttatrctattgagacagtagaaagtagtacagatttgcacagagggaaatacaatgtaaatggctaccaaatagacttattcatagggctagccttaagtatagtctgagtaagaatgactgccttaccatttaccaattactaatatgcttgcaaatctaaggcacgtctgagaaggttgactatttttttttaag

SEQ ID NO: 475878 - DNA, 548 bp, Homo sapiens
actgaggctcagaaaagtcaagtgaattttttgaagtcatacagctgtttatgaacaaaaccagtgcaaaagcccacaaaaaataacaayaaagtctgggcgtggtggctcatgcctgtaatcccagcaagttgggaggccgaggcgggcagatcacctgaggtcaggagtttaagaccagcctgacccacatggcgaaaccctgtccctactaaaaatacaaaaattagctgggtgtggtggcaggtgcctgtaatcccagctacttgggaggctgaggcaggagaatcacttgaacccaggaggcagaggttgcagtgagctgagattgtgccactgcactccagcttgggggacagggcaagactctgtctcaaaaataaataaataaataacaacaaaaaatgttcttgactctccagaaagtatgagagagagagagagagtgtgtgtgtgtgtgtgtgtgtgtgacaaagtataacctaagatttcctttgctattgtctctatcattattaataacaataatcacttatttatcatacttt

SEQ ID NO: 475879 - DNA, 548 bp, Homo sapiens
actgaggctcagaaaagtcaagtgaattttttgaagtcatacagctgtttatgaacaaaaccagtgcaaaagcccacaaaaaataacaataaagkctgggcgtggtggctcatgcctgtaatcccagcaagttgggaggccgaggcgggcagatcacctgaggtcaggagtttaagaccagcctgacccacatggcgaaaccctgtccctactaaaaatacaaaaattagctgggtgtggtggcaggtgcctgtaatcccagctacttgggaggctgaggcaggagaatcacttgaacccaggaggcagaggttgcagtgagctgagattgtgccactgcactccagcttgggggacagggcaagactctgtctcaaaaataaataaataaataacaacaaaaaatgttcttgactctccagaaagtatgagagagagagagagagtgtgtgtgtgtgtgtgtgtgtgtgacaaagtataacctaagatttcctttgctattgtctctatcattattaataacaataatcacttatttatcatacttt

SEQ ID NO: 475880 - DNA, 548 bp, Homo sapiens
actgaggctcagaaaagtcaagtgaattttttgaagtcatacagctgtttatgaacaaaaccagtgcaaaagcccacaaaaaataacaataaagtctgggcgtggtggctcatgcctgtaatcccagcaagttgggaggccgaggcgggcagatcacctgaggtcaggagtttaagaccagcctgacccacatggcgaaaccctgtccctactaaaaatacaaaaattagctgggtgtggtggcaggtgcctgtaatcccagctacttgggaggctgaggcaggagaatcacttgaacccaggaggcagaggttgcagtgagctgagattgtgccactgcactccagcttgggggacagggcaagactctgtctcaaaaataaataaataaataacaacaaaaaatgttcttgactctccagaaagtatgagagagagagagagagwgtgtgtgtgtgtgtgtgtgtgtgacaaagtataacctaagatttcctttgctattgtctctatcattattaataacaataatcacttatttatcatacttt

SEQ ID NO: 475881 - DNA, 523 bp, Homo sapiens
tgcattaaaactctttgtataactgtttaaatttttagcagctcttaagtggatggaaggtatgcaggcttcaagtttgtgaattcaagagmagcattgatttattttagcaatttaaatttggaatttaatttccatcttccttgttcctttctctttgttctctattttctctctctctctttctcactcactgactctctctctctctctctctctcacacacacacacacacacacacacacacacaccccacacagcgcttttctgtagctaaggcaccctaaatacaatagttttaaaacaagctttgagacttttaagataatctccatggtgtggtgctgatgacacactccaggccatttgacagactgcaacgtagtaagtacatagcagaatatttgtaccagttgagcaaagtatggtgtggacaaccattcaagtttataagtgaaataatagaatcaaagaacatcatctctttgagtggtgtttctggcctggtagctccactgagct

SEQ ID NO: 475882 - DNA, 523 bp, Homo sapiens
tgcattaaaactctttgtataactgtttaaatttttagcagctcttaagtggatggaaggtatgcaggcttcaagtttgtgaattcaagagaagcattgatttattttagcaatttaaatttggaatttaatttccatcttccttgttcctttctctttgttctctattttctctctctctctttctcactcactgwctctctctctctctctctctctcacacacacacacacacacacacacacacacaccccacacagcgcttttctgtagctaaggcaccctaaatacaatagttttaaaacaagctttgagacttttaagataatctccatggtgtggtgctgatgacacactccaggccatttgacagactgcaacgtagtaagtacatagcagaatatttgtaccagttgagcaaagtatggtgtggacaaccattcaagtttataagtgaaataatagaatcaaagaacatcatctctttgagtggtgtttctggcctggtagctccactgagct

SEQ ID NO: 475883 - DNA, 523 bp, Homo sapiens
tgcattaaaactctttgtataactgtttaaatttttagcagctcttaagtggatggaaggtatgcaggcttcaagtttgtgaattcaagagaagcattgatttattttagcaatttaaatttggaatttaatttccatcttccttgttcctttctctttgttctctattttctctctctctctttctcactcactgactctctctctctctctctctctcacacacacacacacacacacacacacacacaccccacacagcgcttttctgtagctaaggcaccctaaatacaatagttttaaaacaagctttgagacttttaagataatctccatggtgtggtgctgatgacacactccaggccatttgacagactgcaacgtagtaagtacatagcagratatttgtaccagttgagcaaagtatggtgtggacaaccattcaagtttataagtgaaataatagaatcaaagaacatcatctctttgagtggtgtttctggcctggtagctccactgagct

SEQ ID NO: 475884 - DNA, 523 bp, Homo sapiens
tgcattaaaactctttgtataactgtttaaatttttagcagctcttaagtggatggaaggtatgcaggcttcaagtttgtgaattcaagagaagcattgatttattttagcaatttaaatttggaatttaatttccatcttccttgttcctttctctttgttctctattttctctctctctctttctcactcactgactctctctctctctctctctctcacacacacacacacacacacacacacacacaccccacacagcgcttttctgtagctaaggcaccctaaatacaatagttttaaaacaagctttgagacttttaagataatctccatggtgtggtgctgatgacacactccaggccatttgacagactgcaacgtagtaagtacatagcagaatatttgtaccagttgagcaaagtatggtgtggacaaccattcaagtttataagtgaaataatagaatcaaagaacaycatctctttgagtggtgtttctggcctggtagctccactgagct

SEQ ID NO: 475885 - DNA, 629 bp, Homo sapiens
ccattttcctgcttttctagtttatggctcaactttctacttgttagaatcatggcaccatgctcttgcatccttcatgccaccagcttcctccgcactcatactcatcattaacagctcacacatctcttgctgatcaagggggctcctctgcttttcagtgcctgactgggggctgtactgcacatgggaacaaggcctggcatcttcctttgtctttgtttaaaatctattccctacaagttgcgaggtttccaaggataggattgtgggtatgtaaaaatgcatatgtgtcctgcccgccaacccatgctgcatattgaatgtgtgtaggcaacaaaaaatagttctagtagcatagatatggtagctatatgtgaggcactagctcattaaatcctcaaaatgacctttcagggaggtatttatgatctttatttttagatgaggacattaaaactcaaaaaaattaagtgtctttttaagaacatcacttayagaggacagaggtggaattcaaatccaggtagtctgactcagaaacggtgttggaagatgtttggatgcagggaggctaggaggtgtccactcagggtaggggtagggagaattttgaaataatggaacca

SEQ ID NO: 475886 - DNA, 644 bp, Homo sapiens
tcctgcctcagcctcccgagtagctggaattacaggtgcgcgccaccgcacccggctaattttgtatttttagtagagacggggtttcaccaggttggccagactggtctcgaattctgaccacaggtgatccacccatctcagcctcccaaagtgctgggattacaggcatgagccaccgcgcccggcccaatacctactattttatccaaattaaaaggagatgttacacttaaaattttgttaagaagctagatctcgccttcttctgccgcttctggtgctgcttgtgtgctcatttggtgcggacctggtacctcttttgtgaagcggcagctgaggagacttcagtgctcgccatggccgacgaaaagcccaaggaaggagtcaagacagaacaacgatcatattaatttgaaggtggyggggcaggatggttctatggtgcagtttaagattaagaggcatacaccactcagtaaactaatgaaagcctattgtgaacaacagggattgtcaatgaggtagatcagattcccattcgacgggcaaccagtcaatgaaacagacacacctgcacagttggaaatggaggatgaagatacaattgatgtgttccaacagcagacgggaggtgtctactg

SEQ ID NO: 475887 - DNA, 535 bp, Homo sapiens
gcatgtgcctgcagtcccagttactcaggaggctgagggaggaggactgcttgagcccaggaggtygaggctgcagtgagccatgatcacaccactcctgcctgggtgagatagagtgagataccatctcaaaacccaaaaaaactcacaagctcacctatatatagaaacaactagatgtactgggtcgtggtggtatatgcctgcagtcccagctactccgaggctgaggtgggaggatcacttgagcccaggaagtgaaggttgcagtgaagtatcgtgtcactgcactctagcctgggtgacagagtgaaaccctgactgaaaacaatgttttaaaaaatggatggaaatgctaataattgtgtttggttgatgtaactatacttttgtacttcatgcatttcaagtgttctttaatgagaataaatttttttaaagagagaaaaaagcttatctgcctgtcaacattaagttcctaaaatcaaaggtttctttccagtcctaccctactagtatttgacactattgaact

SEQ ID NO: 475888 - DNA, 535 bp, Homo sapiens
gcatgtgcctgcagtcccagttactcaggaggctgagggaggaggactgcttgagcccaggaggtcgaggctgcagtgagccatgatcacaccactcctgcctgggtgagatagagtgagataccatctcaaaacccaaaaaaactcacaagctcacctatatatagaaacaactagatgtactgggtcgtggtggtatatgcctgcagtcccagctactccgaggctgaggtgggaggatcacttgagcccaggaagtgaaggttgcagtgaagtatcgtgtcactgcactctagcctgggtgacagagygaaaccctgactgaaaacaatgttttaaaaaatggatggaaatgctaataattgtgtttggttgatgtaactatacttttgtacttcatgcatttcaagtgttctttaatgagaataaatttttttaaagagagaaaaaagcttatctgcctgtcaacattaagttcctaaaatcaaaggtttctttccagtcctaccctactagtatttgacactattgaact

SEQ ID NO: 475889 - DNA, 535 bp, Homo sapiens
gcatgtgcctgcagtcccagttactcaggaggctgagggaggaggactgcttgagcccaggaggtcgaggctgcagtgagccatgatcacaccactcctgcctgggtgagatagagtgagataccatctcaaaacccaaaaaaactcacaagctcacctatatatagaaacaactagatgtactgggtcgtggtggtatatgcctgcagtcccagctactccgaggctgaggtgggaggatcacttgagcccaggaagtgaaggttgcagtgaagtatcgtgtcactgcactctagcctgggtgacagagtgaraccctgactgaaaacaatgttttaaaaaatggatggaaatgctaataattgtgtttggttgatgtaactatacttttgtacttcatgcatttcaagtgttctttaatgagaataaatttttttaaagagagaaaaaagcttatctgcctgtcaacattaagttcctaaaatcaaaggtttctttccagtcctaccctactagtatttgacactattgaact

SEQ ID NO: 475890 - DNA, 604 bp, Homo sapiens
ataatcatgtctttgaaaaatgttccctggaatgaattataatgcaatgactatggccacaatcattgctttccaacatagagggtgggggagagaaagggaagttgaatagcatttaccaagatgaagcacctactcccttgccaaagatggttcaaggatctttgcttccatacttttatttagtcctcacagcgactctgtgagatgattgatatgatcattttatggataataattyagatgggttaagccactgtcttagtgtcacatggagagtaagtgacatgtaaacttgaagtaagctcatgctctttttattacactgtgttactcaaaaggaaaagaatcaagactttccccaccttccctcagcaccccactacccccatttccaaaaaagctttgccctggcacactctatccccttaaaaataaagtatatcacattttggagggccttctgaggcactcttaggtgattatattatctactttattagacattaatcttgcatttagaagacctgactttgttttcttgccctttatcatttgcttttgattgatgatgggcaagtcactaattctctttgaatgtcag

SEQ ID NO: 475891 - DNA, 633 bp, Homo sapiens
attgagagctacaatgggatttcaattgtgtaaagggatgtttttacatcatcttccctggaatttatcaggggcacttttattctattatatctctagtgtaatgagactcatgctttttgaatgtttagaccctgcctatatatgtagagtttttgtctagctatatttatatattgattcattaattcatctacttattattcatttattcatccattcatcattcacgctttcattcaacaaatgtgtactgggtgcccctcctgggagacagacactagggagtcagaaataataaaactaattccttccctcatggagctgatattctaaggagagatacacaattttaaaataacgaaaagcaaaaatacastttcaggcaataaaatgtactatgaagtaatatgtgtgtaattggggaatagaattaacatttgtttgaataactctaggcatcatgtgaaggtatattctgtaagggcttgttttttttaatatagcagcgtccaaatacatagttcactgtccctgagaatggcatggttactgctcagtgacccttttcaagtcattgaaaatattttctatttgctgctgatctatttcaataattgagcttgttgggac

SEQ ID NO: 475892 - DNA, 424 bp, Homo sapiens
tggtagaaagatcaagatgaaacgtctaygttgtttttcccttaaaaaatcagagatgctgcaagagctcccaagaaggtattaatttcccaggtactactgcaaaaataagggtgaggaggcgagtgttaggctttattcctgctgtgaatagattaagcagacaccaatttacacctcattgttaagagtaacttttttctgcaagtgagaccacatttacatcttttgtaattaagctaaaggaattttttttaatgacatttcccctaccacaaatcatgaagtaaatattttaagtgagatcaaatgctaacatgtatacattagaaccgtaaaaataaaaagagagacagagagacagagtcctagcgccacctttcagcttcgtcatttgctgggctgggatagtctctgtgcctgt

SEQ ID NO: 475893 - DNA, 391 bp, Homo sapiens
aatccacagtagctctaatttttgtgtgtgtgagtgyggagaattcttaaagttagtataaatttctctgtacctcccttttcttcctattccgagcctgatggtcaaagacagtttacctctctgcccccatatataagacaacacttgtgacctgaataaatagcattagattgtggtgagtttcttcagtcatattacatcatgcatcacgatcgcgtgtgctgtaaagctttgtaaaacagccagctacatgatatcctgcaggtttaatatacttctgcagccttgtacttgggaaggatttctgtaattggagacaatctagtaaggagaactttttaagccatcggaggccaaaatacaagtttttgagaaatgtgcctttata

SEQ ID NO: 475894 - DNA, 644 bp, Homo sapiens
ttgggtttatttttcaatttggaaagtgcatgtaagtttgttaatgttaattagtaattgttgggctctgagggggtgcagcatcttcagtctgagcttattacagtgtaaaatatggattgcctttaccctaatggcctctgaatcctattaccatcccattagagagtgtgggattttagtaattctgttgttgtttccagtgggcagtgaatataatggggaagggcaggggttaatgcaattcatctcttttaatacttgtaactccaactcccttatcactcactgaggtttcattgggtttttcccctttctttctatatctttaaggcccaatatatttctctatgcttctcccagccagaatagtttggggagtatttcgatgattcttgggtttaaatagaattttcaatattagcctttcataaactgaagataaacaaataaggtagtatgtccgcttgttgtgaaacagcctgtcactcagaaaggttttcagtgactgtcattgtgccaagaatagtattgaaatggctcttcawtcaagatcatttataaggccttttggaaggagaagcatgataccagtgggtcggatcaatgcacactagtgttctgggtataatgtttccatgtgt

SEQ ID NO: 475895 - DNA, 657 bp, Homo sapiens
gcgctgggtgccctggcggcccctcctcctggagtatgccgtgggctcccttgttctgaaaccctgagtcccttcactgctgggatcccccggattctgtcctgggttccctccacacacttcgccatggcctcatctccagccctgcccccgtcctgatactcaggcctgcccgcttctcggtcgagtggggtgcttaccgaaggcacaccctgggtgcctcgccagcagggagtggagcacacgtggtcgccaccctcaggaatctctggcttgttcactctcatcagcaattgtcagttaagcagaacaagtgaggccacgtaggtgatgctaagcacgatggagaccacgagggccaatatgtgctcctctgcagggggtgggcagggagggcctctgtgggcattaaatggagggtaagccacacgagtggctgggaggagaatgttctaggcagagggcacagtgaaccccgaggtccagaggcaggagagacrcagcctgcacagaagcagcacgaggccggcatggccgcaggcagtgaggcgtgggctgcggggaggttgtggtctcaggagtcagccactcagggccttgggctgggatagagtctgagtttgactcagggttgtgggaagccagtgctttcgagca

SEQ ID NO: 475896 - DNA, 428 bp, Homo sapiens
tgccattgcatgtcaaagaaagaagtgatttttttggtatcctatttatggagaatctctgacaccagtattacttctctcccgattagtaaatttgtttgctcccattttgcagttgagatatctgacatgctggggctaagtgacaaaacacatcagcctgcctccaggcaccatccatcatttgcactctcactacatccagtgaacacattttagagatgaggacattgacgctcaggaaggatacatgagtaggctaaggtcacatggcaagtttgaggtaaggctcaccttacctggaagctaggtctacaccaaggcacctaccttccactctgtacctyccagcccctccctcttccaggtcatagaccgagtacctggctgccactgtcagacatttggctccatgacagagagagcct

SEQ ID NO: 475897 - DNA, 625 bp, Homo sapiens
actatagagccattggctggtgtcaaatcctggctccaccatgaacccacctagctactttggccaaattacttaacttttccatgcctccatttcctcacctataaaacaggaataatcgttgtacctacaccgtagggttgttgcgacaattaaatgagctaatgcatgtaggggatctaaaagtgccaggcacagagaaatgtccctgtgaggggtttgctatttttgtggctattmtataaaaagctttctaaaatccagaatttcatcctggggcagattctttgcctagctcttttgagatctattagaaacatttagtgatttccttacatttcctgaagttacactaggagcaacaacaacaacaacaaaatggcaatttatggttgacctgattttacactagttaaaagagagccgtcaaccctgcagaagtaacaagtccgtgcccacaggcctcctcggtgttatttgtatttttatgaccctcctgtggctataaggatgctcagtgggtgtagaaattggatggttaaaaataacaaataagaaatcaaagtcgtgctttgtccctatttccatactggtaggtaccacattcattatttgctggacagct

SEQ ID NO: 475898 - DNA, 496 bp, Homo sapiens
agctgactgcaacctctgcctcctgggttcaagtacttttcttgcctcaacctcctgagtagctgggattataggcatgcaccaccacrcccagctaatttttgtatttttagtagagatggggtttcgccatgttggccaggctggtctggaactcctgacctcaggtgatccacccatcttggcctcccaaagtgctgggattataggcgtaagccaccacgcccagccagtctaagctactttagagttgtaagcctgggggctaggccttcctttcatttgctgaacctggtttggattttatgcacataatctacatcttcgagactccaagaaaatgggttgcagacactaccaccatatagatcgcagcctgtggacaggaactaataattgctaatatttattacaactctaggttgtgccaagctctgggctgtgtgctttgaatgcatcgcccagtttaattctcatagcaaccctatgaggtaag

SEQ ID NO: 475899 - DNA, 496 bp, Homo sapiens
agctgactgcaacctctgcctcctgggttcaagtacttttcttgcctcaacctcctgagtagctgggattataggcatgcaccaccacacccagctaatttttgtatttttagtagagrtggggtttcgccatgttggccaggctggtctggaactcctgacctcaggtgatccacccatcttggcctcccaaagtgctgggattataggcgtaagccaccacgcccagccagtctaagctactttagagttgtaagcctgggggctaggccttcctttcatttgctgaacctggtttggattttatgcacataatctacatcttcgagactccaagaaaatgggttgcagacactaccaccatatagatcgcagcctgtggacaggaactaataattgctaatatttattacaactctaggttgtgccaagctctgggctgtgtgctttgaatgcatcgcccagtttaattctcatagcaaccctatgaggtaag

SEQ ID NO: 475900 - DNA, 496 bp, Homo sapiens
agctgactgcaacctctgcctcctgggttcaagtacttttcttgcctcaacctcctgagtagctgggattataggcatgcaccaccacacccagctaatttttgtatttttagtagagatggggtttcgccatgttggccaggctggtctggaactcctgacctcaggtgatccacccatcttggcctcccaaagtgctgggattataggcgtaagccaccacgcccagccrgtctaagctactttagagttgtaagcctgggggctaggccttcctttcatttgctgaacctggtttggattttatgcacataatctacatcttcgagactccaagaaaatgggttgcagacactaccaccatatagatcgcagcctgtggacaggaactaataattgctaatatttattacaactctaggttgtgccaagctctgggctgtgtgctttgaatgcatcgcccagtttaattctcatagcaaccctatgaggtaag

SEQ ID NO: 475901 - DNA, 496 bp, Homo sapiens
agctgactgcaacctctgcctcctgggttcaagtacttttcttgcctcaacctcctgagtagctgggattataggcatgcaccaccacacccagctaatttttgtatttttagtagagatggggtttcgccatgttggccaggctggtctggaactcctgacctcaggtgatccacccatcttggcctcccaaagtgctgggattataggcgtaagccaccacgcccagccagtctaagctactttagagttgtaagcctgggggctaggccttcctttcatttgctgaacctggtttggattttatgcacataatctacatcttygagactccaagaaaatgggttgcagacactaccaccatatagatcgcagcctgtggacaggaactaataattgctaatatttattacaactctaggttgtgccaagctctgggctgtgtgctttgaatgcatcgcccagtttaattctcatagcaaccctatgaggtaag

SEQ ID NO: 475902 - DNA, 534 bp, Homo sapiens
tgcgttaaggattacagtcgagagttgcaaggttctggcaggtagaccaatgggctatgggacttgtcatcatcagagtggccagggaaggaaagcttccctggagaggaggtgcttgctctaagatctgtaggacatgtaagtgctaaccaggcagagatggaggaaagcagcagctttaaaggatgcaagactcgagggtgcggccagtatagtatgcaggcttctgaagtcaagcatttactcatctattactcagcaccccataggcacaaggctccatggatawtgggtcctagggacactgctaactgagaaaaatctctccagccccaggcaggaacacatcttgctgtcagagatcactgatgtcccagtctgagagacccaaattcccatccctgcctctcattttcaacatcaaaaggctgctatgctttagatctaaaacccaggatggcatttttcatctcctctcctctaggtagctggcctttcaaatgggggagaatatcattcctcttcaaagcggtg

SEQ ID NO: 475903 - DNA, 659 bp, Homo sapiens
tggctaagacttaaacttgtccaaatagggtaaatgcatgattkgtaagggagggaaggtgtgggagtcgtccctttgctgcagtgcaaggcatgttcagacatgtctaggcaagtcaggacacaagagtgggagggctgctcacaggctagaaacaaagtacaaggaggtagggcctctgagtcaaggacaaggacattacacaattaaacccttagaagaggaattcaccatctctggcaatttccccctttgtcttttgatactttttcctctgcaaatttttctaacataattcagctctgttgttcaacttgttcacctaggaacaaaatcctatctgagtatggaggaggagaggtaggggtggtttttgtgagaactgtttctataataagtctttgcattaacccatggatacggggtatgatgcagcatcatacaatgagtgcacctgtaacagttgcaagagaggttaatattgaagtcaaaagccctttccatttaccaaaccacttttccatgagacttgtgaaggggttattccggaatttttggctaactagggatgaaagtacagaattggactccaataataacacagactctgccattttctgctaacatgtcaagggctatcatattctcccaggccatcc

SEQ ID NO: 475904 - DNA, 621 bp, Homo sapiens
actctaatgaaattagtggtaaaaggcactaagtttcttatggtcaaatttaaaccacacatgcagactccacaaataccagaggcatgcatgaaagctctgagtgggtcaggtaaaacaaagggaagtaaatgtgtgacacatggtcatgcagcaatcttggttaatggcagttgagagaaaatcaaagatgcttcttccttggcaaccttattgaaaatgggactgcttccttccttcatcacaagcctactccatatcctgctttgttttcttcataatactcacctgtctctayttgaatgcaaattgtgggaggccagggacttactgttcagtgctgtatcctaggtgcccaggatcatgcttgcccagcactctgtagaggttgtgtattgttgggatgtagcagtcaggcagtcgggtgtgttaccactaaaagtaccacatttgtcattgcttaaaaaagggatttcagtgcttttgattactgacccggattccctagaaagttgatcctgaaactacttctgtgcttctgtgtattggggaaaggggtaaacgggacagcaagggtgaggggataaagtgagacaggaaaagaagttaggtgacttcagc

SEQ ID NO: 475905 - DNA, 621 bp, Homo sapiens
actctaatgaaattagtggtaaaaggcactaagtttcttatggtcaaatttaaaccacacatgcagactccacaaataccagaggcatgcatgaaagctctgagtgggtcaggtaaaacaaagggaagtaaatgtgtgacacatggtcatgcagcaatcttggttaatggcagttgagagaaaatcaaagatgcttcttccttggcaaccttattgaaaatgggactgcttccttccttcatcacaagcctactccatatcctgctttgttttcttcataatactcacctgtctctatttgaatgcaaattgtgggaggccagggacttactgttcagtgcygtatcctaggtgcccaggatcatgcttgcccagcactctgtagaggttgtgtattgttgggatgtagcagtcaggcagtcgggtgtgttaccactaaaagtaccacatttgtcattgcttaaaaaagggatttcagtgcttttgattactgacccggattccctagaaagttgatcctgaaactacttctgtgcttctgtgtattggggaaaggggtaaacgggacagcaagggtgaggggataaagtgagacaggaaaagaagttaggtgacttcagc

SEQ ID NO: 475906 - DNA, 621 bp, Homo sapiens
actctaatgaaattagtggtaaaaggcactaagtttcttatggtcaaatttaaaccacacatgcagactccacaaataccagaggcatgcatgaaagctctgagtgggtcaggtaaaacaaagggaagtaaatgtgtgacacatggtcatgcagcaatcttggttaatggcagttgagagaaaatcaaagatgcttcttccttggcaaccttattgaaaatgggactgcttccttccttcatcacaagcctactccatatcctgctttgttttcttcataatactcacctgtctctatttgaatgcaaattgtgggaggccagggacttactgttcagtgctgtatcctaggtgcccaggatcatgcttgcccagcactctgtagaggttgtgtattgttgggatgtagcagtcaggcagtcgggtgtgttaccactaaaagtaccacatttgtcattgcttaaaaaagggayttcagtgcttttgattactgacccggattccctagaaagttgatcctgaaactacttctgtgcttctgtgtattggggaaaggggtaaacgggacagcaagggtgaggggataaagtgagacaggaaaagaagttaggtgacttcagc

SEQ ID NO: 475907 - DNA, 621 bp, Homo sapiens
actctaatgaaattagtggtaaaaggcactaagtttcttatggtcaaatttaaaccacacatgcagactccacaaataccagaggcatgcatgaaagctctgagtgggtcaggtaaaacaaagggaagtaaatgtgtgacacatggtcatgcagcaatcttggttaatggcagttgagagaaaatcaaagatgcttcttccttggcaaccttattgaaaatgggactgcttccttccttcatcacaagcctactccatatcctgctttgttttcttcataatactcacctgtctctatttgaatgcaaattgtgggaggccagggacttactgttcagtgctgtatcctaggtgcccaggatcatgcttgcccagcactctgtagaggttgtgtattgttgggatgtagcagtcaggcagtcgggtgtgttaccactaaaagtaccacatttgtcattgcttaaaaaagggatttcagtgcttttgattactgacccggattccctagaaagttgatcctgaaactacttstgtgcttctgtgtattggggaaaggggtaaacgggacagcaagggtgaggggataaagtgagacaggaaaagaagttaggtgacttcagc

SEQ ID NO: 475908 - DNA, 528 bp, Homo sapiens
acaagagacttgtagagtcagactagaatggagtaagcaggatcaggcatgccaaggtcttgttagagtttctactgcatcagttgacactcattgccaccctagagatcataattctgagacttccctcactcagtacagggagttccctactaatagccttgaatggggtagctctgtccaataaaatgagctgtctacatttcaactactctaatagtctaatttcacctgactcttatttttcaatcttaaaattcctggattgggttagatgkagattcaagtcccatctactcctattcaactgtggctctggttctaatttagggtcttctagcctgggcagtaattccctgcgtactgatgaaggaactgcctcataggcttgtttaaaatcagatgacaatttacccatgttttccttaaaaaaaaaaaattgccagctcttgggaacttagtatatgttcttaaaggaaaaatgccctctcagtagactgcttgtgacttatgacctgtctggctcct

SEQ ID NO: 475909 - DNA, 519 bp, Homo sapiens
tacagtgtatgtcactgtaatgggttggagttctrgaaagctgtttcaatgaaacaactgctggcccatatcctggcttgtggcaaacccctgtctcaagtagaacctctgttgcacccttaagactttcatgcccttcgttaatagtagcagagtccctaacaatgaggtctccggagatgcggcaagtagaatgaaaaagacacaaggcaaaatgcaagacaataggaatcacagtacccagtgagcaggagatggcatagcacaagtgggcagtcagcctgtgagccagcccccaggcatccttgctgcttgatgttcaagccccttcccttgagggtagatgtagtggcttgataaatagataatggaaacgatttgcccctcaaatgagcttgagactggcttctgtcttgggtcttacactcgatttgttttgcaatgtgtgtactaggagaatcaagctatgtggtaaaccactccatgcagcagccaacttggcaaggaggagaaatgttc

SEQ ID NO: 475910 - DNA, 626 bp, Homo sapiens
caagtgggttctcaaatgtgttaacacatttcaggtgatctcttcctctaacaatacaccaacctacttaccaggtgtgacggcttttctggtatgctgaagtagataggctagtgcccagttatgctgacactaatccaagtgttgatttgaaagggttttacaatgtagttgtatcttgcacatgtagctaaagcaccaatgtagtttttactaaaagtatcctggacagcctgaacctgatgcaacctgagtcactatgactgactcagatatgtcagggctatttttaagttccacctgtggacagtggcatcacctgtgccmgtggatcccattctgcgtagaatctttcctgactgcttaggaacaatagcttttctgagttgatgagttccagcctgctcatgatctatcagcatgtggaagtgtctgccggtgagctctggatgcccttagcaaacatgcaagagaaactgagtgtctgctcaacctaccttgtacatggctggacccactcagatccagtgttgagttcaccgtcttgccttgacaggtcaacatctgaagaaccaacctttacaaatactacaataacatgagcatgagaagctactcccccaaca

SEQ ID NO: 475911 - DNA, 574 bp, Homo sapiens
ctactgaactttgatttctacgtttgttaaatagagttaataatccctacccctggcactaatgagagaattaaagaaatatgttccacagagcacaatgcctggcacatagaaagcacttgataaatggaggctatcattcattgttatttttattattgatgacatcataggccattgtttcatgaatttcagactgcaatatttttcatattcattctagcataccagatggttgcttaaaaatatctgaatcacaaaacagctttagacattccattgaataaagcaaatttattttttaaattaaaaagtctcatattttatgtaagagatgcctttgtagagatagtctctttwaaaacactaccacatgttttgccactacttcttgacaaaatgtttttcaagaaaagaagaagcgcgcacacacaattgttcactgtcaagaaaatatatcaagcctgagatgttaacattgccaaaagatgacagtatttggcagacctaaaagtatttgtcatcttaaaagtatttatgcaaaagcaaaaaataaacaattcaatattttagt

SEQ ID NO: 475912 - DNA, 629 bp, Homo sapiens
ctgctggctgcagcccaggcccatctggaggagctcccctttccaaggagagatggcttcaaggaggggcctcttactgtttgggaaaatattctcagctctgagagcagtttctgtgtgccttgtgtgagtgcacagttcatatgtaaaargcaagctccttccagaactagatgttcagactgcagttctgagggccagtccccctgctgattccacagccccgcctctgagggttctgggaagctcctgagctaatcataaacacaccatttaccctggctttaagatggcttctgatccctcccagagcaacctagaccatactgctcaaattggctgaatattttacatctagtgtttctgaatcccacaagggcccttaataatccatgactccaagtccctcattttctagacggggtaaaggcatctcagaaagagaaagtgacttgccaggggcccaggaagcagccaacatctctgcctagcagccctcgatcataacaagtccccacacaactgtgggtcttggctgcaatgggacaccaggaagagtccaaagaataagaccctggttctggttcccagtctgcccccatgtaacctcaggcaagccagatccctct

SEQ ID NO: 475913 - DNA, 545 bp, Homo sapiens
ctggaaggtcatgccccttctgaatgttgaggtttctcataaacatttccccagtgagccttctgggagatgaggatgactctgggcccattgcccttgctggggcagagcgccaaggccccatactcactttcttctcctttctcccgaatctggctctcttcctctttcctccttcctctcctactctgctgtcattccttccctttcttcagtggaaagaggacacgtttcacagtagacacacaggataactcaaccttctgagcctcagtttcctcctgcgtaaatggggtaataatgggrccttcatctcaggatgtaagggaaagtgcttagcactgtgttaggcacgcacagtggacatttaaaacatattggtcatgtctttccccctccaccctatccttttgccctaatcctggccactgccctgttttctttctattttcctgctccagccctgctcccatttccaccctgggcacttccaccccactgactgtgctgctgctgcctgggagggtagacgaagaagccaggct

SEQ ID NO: 475914 - DNA, 582 bp, Homo sapiens
tttttataacttctcccagagagaggactcattctcaggatgacagagctggaggggactctccaagggcaatgaggcgaatcctgcattatcaggtgggagagagatgcacccagaaacactcaatggatgaggggctgcattcgaacatgacgatggcatgcactcccctctgctgtccacaaaccacgaggatgttttcaaaggggaaaaggaagcactgaccactcccctccatgtggcagtatctggarttcagagcccaggagtcctcgggcatgagctcatctgattctcactcacggcacaggcagtgcagcaaggcaaggccctgagcagggaaggccaaggtcacaaaggagtcaggatggagctgggaccagaagatccctgctctccctccaggctgcccacagcccatcctccatttcccttcctgcccagcaatcccatggcacaccacaggcccccaccacatcttctcagagtctctttccacctggcctggttccacaaactacaaatcagcaggtgctccaccagcagtgggactccagccccgcttgcccaaaccagaaacag

SEQ ID NO: 475915 - DNA, 582 bp, Homo sapiens
tttttataacttctcccagagagaggactcattctcaggatgacagagctggaggggactctccaagggcaatgaggcgaatcctgcattatcaggtgggagagagatgcacccagaaacactcaatggatgaggggctgcattcgaacatgacgatggcatgcactcccctctgctgtccacaaaccacgaggatgttttcaaaggggaaaaggaagcactgaccactcccctccatgtggcagtatctggagttcagagcccaggagtcctcgggcatgagctcatctgattctcactcacggcacaggcagtgcagcaaggcaaggccctgagcagggaaggccaaggtcacaaaggagtcaggatggagctgggaccagaagatccctgctctccctccaggctgcccacagcccatcctccatttcccttcctgcccagcaatcccatggcacaccacaggcccccaccacatcttctcrgagtctctttccacctggcctggttccacaaactacaaatcagcaggtgctccaccagcagtgggactccagccccgcttgcccaaaccagaaacag

SEQ ID NO: 475916 - DNA, 545 bp, Homo sapiens
ctggaaggtcatgccccttctgaatgttgaggtttctcataaacatttccccagtgagccttctgggagatgaggatgactctgggcccattgcccttgctggggcagagcgccaaggccccatactcactttcttctcctttctcccgaatctggctctcttcctctttcctccttcctctcctactctgctgtcattccttccctttcttcagtggaaagaggacacgtttcacagtagacacacaggataactcaaccttctgagcctcagtttcctcctgcgtaaatggggtaataatggggccttcatctcaggatgtaagggaaagtgcttagcactgtgttaggcacgcacagtggacatttaaaacatattggtcatgtctttccccctccaccctatccttttgccctaatcctggccactgccctgttttctttctattttcctgctccagccctgctcccatttccaccctgggcacttccaccccactgaytgtgctgctgctgcctgggagggtagacgaagaagccaggct

SEQ ID NO: 475917 - DNA, 459 bp, Homo sapiens
ttcctggcagatatcattttttattatgtcatagcagtcatcactctccgtaataatctcatttatagttttttcttgtttattgtcaagattcctcctcctttcttggtaatataagctccatgagaagaagagcactacatttctagagtccaataaatacttgcagactacaagagagaagytgaagaaatttaagagaagggctggttcattggctgacccagatagaatctactctaccttagaagtaggatagctgggtggagggatgactttggcacaaatgcataatagagagctaacatttcatctccatgtgacgcacagcagggaggagagtgctttctctaggcatttagcactagacatggttctgacacaaatgcctttctttcctgggctttgtttgaagactttgaatgaggcaacccctaggtgggaaaggtctcaagaagg

SEQ ID NO: 475918 - DNA, 650 bp, Homo sapiens
cttcttcttttagcgttttcaaagtgtagtccaagtatcggcagcacggacaccacctgggaaatccttagcaatacaaattctcaggccctctccagacatgctgaatcagagaatctgggggcggggcctgcaatctgtgttttctggaaccctccgtgggattctgaacacacagtggagtttgagaaccactacccttagaagtgaatcagcacaacgcacactcacattttggacgctcaacacgttcacataatacaraaacatatttagagagcatgtttaaatcttagaataataaaaaatacatataaacccaaatcaaatttacaaagactggcacaagtattaaacaaaaaagaactcttacagcaaaaatccgtcaaatttcatcgtaaaagggaaaataagccactggtgctattttaaaatctacaacatttctgaagtgaaattccaagttgcctttcagtttttgtttacagtatttttagagctccctctgcatgctatgttttcttttagacatactgccaactttttgtatctgtcatctggttttgaaaatgaggtttctcaccatttttttaagcatttcaccatttcagttgtcacactgatgcttggtacatctggaagttcctgtg

SEQ ID NO: 475919 - DNA, 610 bp, Homo sapiens
tgcttcttcttttagcgttttcaaagtgtagtccaagtatcggcagcacggacaccacctgggaaatccttagcaatacaaattctcaggccctctccagacatgctgaatcagagaatctgggggcggggcctgcaatctgtgttttctggaaccctccgtgggattctgaacacacagtggagtttgagaaccactacccttagaagtgaatcagcacaacgcacactcacattttggacgctcaacacgttcacataatacaaaaacayatttagagagcatgtttaaatcttagaataataaaaaatacatataaacccaaatcaaatttacaaagactggcacaagtattaaacaaaaaagaactcttacagcaaaaatccgtcaaatttcatcgtaaaagggaaaataagccactggtgctattttaaaatctacaacatttctgaagtgaaattccaagttgcctttcagtttttgtttacagtatttttagagctccctctgcatgctatgttttcttttagacatactgccaactttttgtatctgtcatctggttttgaaaatgaggtttctcaccatttttttaagcatttcaccattt

SEQ ID NO: 475920 - DNA, 666 bp, Homo sapiens
ggcagaggaaatggagacaaatctgcagtttggagggatactgagagaaatatgccctgtccagaggaggtgactaagtgaaactagcaatgcagccttcaaaatcacagcttcagatagcctagcatttgaatacaaccacgcagcccaycaactcactacaacaattctttgagctcatctccaaggactcatgtttttcttttttcccatggctcccaccaatcttcacttcccttccctgctccactaaaataatgtccttcgaaatatcctcagttcccatgacccgcaattcctagggtaaaatcctgcaggaacctgaccagccatgaggccccactcaccctcagactacatcagtgcagataaacaatgatagggattattcaaccagacaaaagagtatagatgtaattcacaatgcattgccttaaatttcccagaaatttaactacctttcttcattatgttccatctctagtctcagcaacactggcaaccccctccttactttcatctgataatcttgcctcattctctttaagaatctctagaagctgtaagatgcgaattttatcccaaatctagaagccctttgtgtctacacccatcttttcctactcttttatttcaatgggaaaaaaaaaaacctcaacatgtccc

SEQ ID NO: 475921 - DNA, 666 bp, Homo sapiens
ggcagaggaaatggagacaaatctgcagtttggagggatactgagagaaatatgccctgtccagaggaggtgactaagtgaaactagcaatgcagccttcaaaatcacagcttcagatagcctagcatttgaatacaaccacgcagcccaccaactcactacaacaattctttgagctcatctccaaggactcatgtttttcttttttcccatggctcccaccaatcttcacttcccttccctgctccactaaaataatgtccttcgaaatatcctcagttcccatgaccygcaattcctagggtaaaatcctgcaggaacctgaccagccatgaggccccactcaccctcagactacatcagtgcagataaacaatgatagggattattcaaccagacaaaagagtatagatgtaattcacaatgcattgccttaaatttcccagaaatttaactacctttcttcattatgttccatctctagtctcagcaacactggcaaccccctccttactttcatctgataatcttgcctcattctctttaagaatctctagaagctgtaagatgcgaattttatcccaaatctagaagccctttgtgtctacacccatcttttcctactcttttatttcaatgggaaaaaaaaaaacctcaacatgtccc

SEQ ID NO: 475922 - DNA, 666 bp, Homo sapiens
ggcagaggaaatggagacaaatctgcagtttggagggatactgagagaaatatgccctgtccagaggaggtgactaagtgaaactagcaatgcagccttcaaaatcacagcttcagatagcctagcatttgaatacaaccacgcagcccaccaactcactacaacaattctttgagctcatctccaaggactcatgtttttcttttttcccatggctcccaccaatcttcacttcccttccctgctccactaaaataatgtccttcgaaatatcctcagttcccatgacccgcaattcctagggtaaaatcctgcaggaacctgaccagccatgaggccccactcaccctcagactacatcagtgcagataaacaatgatagggattattcaaccagacaaaagagtatagatgtaattcacaatgcattgccttaaatttcccmgaaatttaactacctttcttcattatgttccatctctagtctcagcaacactggcaaccccctccttactttcatctgataatcttgcctcattctctttaagaatctctagaagctgtaagatgcgaattttatcccaaatctagaagccctttgtgtctacacccatcttttcctactcttttatttcaatgggaaaaaaaaaaacctcaacatgtccc

SEQ ID NO: 475923 - DNA, 552 bp, Homo sapiens
ggcaacccgagtagaaagaatctccttttcaatatttctagcrtatgtctcgtagattgattcacccatcttgtactacttttctacatctgaaccagtctgtatggctacagacgatcagattactcattgtctacaactgaatcacatgcccacacccaggaacaagaaaatgaggtccaacattgaaagccagacattgatctgagagttgagtaaggtggttccctgaaagaaaaccattgtgctattatatgaagagtaaatatatttggggcatgcaaaaacaaaaagagagacagagagacatctcctacatatatacaggttactttttttaattaccccaagcgtctactaatacagttgcttattaaatcgatcaaagtgcaggaagtgcatgtacttattaaatttcatcattacacttcctctactattctcaccattttaactcttaatggatcatgtcttctgaattaggaaaaaatgaaaatctaatcacaattggattaatgtccttatgcaactcattcagaaaatgttgtgtaa

SEQ ID NO: 475924 - DNA, 603 bp, Homo sapiens
tgtggttcaagtttgactcctcggaagaatactttagccctggagtagcttccatattgggagagaggtcaaatgtaatctttgtggaaatgtttgcaattcaaattatttctatgaatagaacacctgggaattttgagggaaaagcttctcagcagtgttctaactccttattgttttcatccctttaagagcctgcatgccagtagtcataaaaggacaggttttgttgagaatcacttggagtaaagaggctttaaacatatatcaattgaaagatatctgaatgaaacgactgatcgaaacaatttgccatctctaaaaacccttaatcaaacttctacccacccctgattttgggataataaaaacaaacttaattgaagtatacagtaaaattggttattgatatctgtaaacattatctcagataaatcctgggaaaaccaaaagaacaataatgacgtagtctgtttgcaagaatcttttgatgattttggttaattaattaaaaacaattgttaaataacatagtgtgttagtctgttctcacactgctataaagaatacctgagaatygggtagtttattaaggaaaaaaga

SEQ ID NO: 475925 - DNA, 608 bp, Homo sapiens
ctaccctgtccccgcacacttcacaggcactccactgcttggcaggaattctgcatggcatctgccacgcatgctcacagggtgaaaaatcaagctgtcactctgcaaaatctaaaaaccctggaaaggtctataagatgacattagacccagttaagaagcaagtgtcacctgagttggccatgcaatgaatgaatattataagcagtattggagaactaggcggttgcttactaagaagtgtcttggaaacattcgagttcatacagtgcatgacaaagtaatagaaggctgcaagcrctgaaaatgcacccgaatctggtacctaggatgagtacatgaatagtgatgaatagccctttgtgctgtgtgctatatacaaccatttgcattcagaaagcagcatttgaggctgagttccattactggtgattgaagtattttcaggagcagatacatgtggtgcatgttatatgcacttagtttgaaagtatccctcacccaaaaagtgcagaacctctgaaaggtgagccgtggtgcaggtgcccccctcgctgttcgggtcagttcttggccatgcttggcctgtcacacgccgggtctcaaca

SEQ ID NO: 475926 - DNA, 608 bp, Homo sapiens
ctaccctgtccccgcacacttcacaggcactccactgcttggcaggaattctgcatggcatctgccacgcatgctcacagggtgaaaaatcaagctgtcactctgcaaaatctaaaaaccctggaaaggtctataagatgacattagacccagttaagaagcaagtgtcacctgagttggccatgcaatgaatgaatattataagcagtattggagaactaggcggttgcttactaagaagtgtcttggaaacattcgagttcatacagtgcatgacaaagtaatagaaggctgcaagcactgaaaatgcacccgaatctggtacctaggatgagtacatgaatagtgatgaatagccctttgtgctgtgtgctatatacaaccatttgcattcagaaagcagcatttgargctgagttccattactggtgattgaagtattttcaggagcagatacatgtggtgcatgttatatgcacttagtttgaaagtatccctcacccaaaaagtgcagaacctctgaaaggtgagccgtggtgcaggtgcccccctcgctgttcgggtcagttcttggccatgcttggcctgtcacacgccgggtctcaaca

SEQ ID NO: 475927 - DNA, 598 bp, Homo sapiens
tgtccccccggacctggctgccactccctaccccttccccttggggagcccagcctcagagagggacttacactttcggacagagtcttcaaagccagttataccttccaagaggtccatgttttcatccagggcttgctgtgatgggaattgatgttcacaatgtttattcttttaaattatttgcttttatttttatttatttatagagatggggtctcactacgttgcccaggctggtcttgaatttctgggctcaagtgatcttcctgcctcagccccccraagtgctaagattttgttgctgctgttgttacatagacgaggtctcactatattgcccaggctgatctcaaactcctgggctcaagtgatctgcccacgctggcctctcaaagcgttgggattacaggggtgagccaccactcccagcctacactggtaatcttacctatcaacaacgttcttatcagtaatgtgtggggaaaagaaagatcagattgttactgtgtctgtgtagaaagaagtagacacaggagactccattttattctgtactaagaaaaattcttctgccttgagatgctgttaatctgta

SEQ ID NO: 475928 - DNA, 656 bp, Homo sapiens
cccgggaggtggggcgcgcccgggcgcccggggcgtaccttttcggtgcatcgacggacaggcggccggggctcggagcgaactggtacagcgtgtatcccatttagtaatccattatcgaggggatctctccgggccgcgggctgcgctctctccttcgcaagcctttgtcattcctacatgtgtgcttgtctctttgggggaaatagtcgcggcgactactttctgggatgcaaacgcgatgtgttcatctccaatgacgagcggagaaggggagaggaaaaaagaagccaaaaaaaaaaagaagaaaaagaaaaagaaaaccaacaaggaagagggtaaatgttcaagaaactcttctccaaatccaaattccacttggattccactycggtgagtccccttggtggtgtctgcgccgattaacaagtcatttcagggcggggggcggggtgggggctggggcaggggtgcaaggctctggcccggctctgcggccggcagcgcggtgccgcgggtgtggtgatgctggccgctgctacacgctgctaagcgggcatcgcgggcgaccggcaccgcggaggagcgccgctgctgggttccgagcgcctgggcagccgagtgcgcggggagcggagttggctgcagcctcaccc

SEQ ID NO: 475929 - DNA, 656 bp, Homo sapiens
cccgggaggtggggcgcgcccgggcgcccggggcgtaccttttcggtgcatcgacggacaggcggccggggctcggagcgaactggtacagcgtgtatcccatttagtaatccattatcgaggggatctctccgggccgcgggctgcgctctctccttcgcaagcctttgtcattcctacatgtgtgcttgtctctttgggggaaatagtcgcggcgactactttctgggatgcaaacgcgatgtgttcatctccaatgacgagcggagaaggggagaggaaaaaagaagccaaaaaaaaaaagaagaaaaagaaaaagaaaaccaacaaggaagagggtaaatgttcaagaaactcttctccaaatccaaattccacttggattccacttcggtgagtccccttggtggtgtctgcgccgattaacaagtcatttcagggcggggggcggggtgggggctgrggcaggggtgcaaggctctggcccggctctgcggccggcagcgcggtgccgcgggtgtggtgatgctggccgctgctacacgctgctaagcgggcatcgcgggcgaccggcaccgcggaggagcgccgctgctgggttccgagcgcctgggcagccgagtgcgcggggagcggagttggctgcagcctcaccc

SEQ ID NO: 475930 - DNA, 491 bp, Homo sapiens
tgcttcattatagaaccattgctcctaaccaccttttgtacattcttcaagcctyagttcaaacactacttcctccataaagctttcttttattacgttgatcttcactaatctctactttgtcccaaacacctgttatacttaaagtcagcaccacattgctcactctcgattgttctgtatgagttcatgtgtattaattttatctgtaccattagatcttacagtcctgaatagaaattgagccctatttattttgtattattccattatgtctagcaaagtagagatgattaaggaaaacttcctagttaatggatcaaaaaagaataaagtaatgttagaattgcaaaatttatcccagaattttcatctagaatttttccacaaggctagagtctgacaaagacctaactatttcttttgatatctttcatttaaaaaaagtttagtttacttcctgccactcagaaacttaaaaccatatcttc

SEQ ID NO: 475931 - DNA, 640 bp, Homo sapiens
actactgcttatcatgcagtttgttgtggatcccagtattttatgcatttccaaatcaatggtcataatggactgaattttacctttgccaagtgtgccagtgagaagtcttcctgaagataaataactatattaaggacaaatgtcaccagaaaggtattatccctgtatgcatgcacttaaatacagggcaaactgtgcagcctttattttaagcacactgctatatgtcttggtgatttatttgtttaaaaatttagaagtcagaaattctctccattctgctagtctttctctagctgcaacttcttatccacaggagatttttctttctatttaaacartttctggagatttgagtactttcttgttgactacatttagatgagtagttttatctcagccaaaagcttctctccgttcctgtgtggagtctaagtagacttcatataaactactcctgcagcttttcgggttgctgaaagactgagacaaggtctgcttattttagggagcaaaccaacatgcgaggaccgtaacaaggttggatggctacttgctgggtgtaattttctttgagctattttataaagatgattaatgacagcatgtgcctaatcacatgagtatcagagtccag

SEQ ID NO: 475932 - DNA, 554 bp, Homo sapiens
ctggcaacatctggtgacatgtttggttgtcattacttggaggaggatctactctgatacyggtatctaatgggtagaatccagggatgctactgacatattaaaatgccgaagacagttcctactcataacaaaaactacccagcccaagatatcaatactgccaagatgaagaaaccttggttttgatcctggctagtttgtagaaacaagttcttgctatgttgaccaggctgctctcaaactcctggccttaagcaaaccttacaagcctgagccactatgccgggctagaattttaaaaataaaacaaaacaatgtctccctgagaattgaataacctaagctaaccctcacatggatttgggacctaaattcattccaagtagctcctgatattggaaagtgagggagaagggagtaaaaaaaatagaccattgttttccaggaagcgcttttaaactgaaaggaactgggaggagttttttgtgcggcaccccctcccctttttttacttaggagggggcagggggcatctcaataatcgaaacaaa

SEQ ID NO: 475933 - DNA, 554 bp, Homo sapiens
ctggcaacatctggtgacatgtttggttgtcattacttggaggaggatctactctgatactggtatctartgggtagaatccagggatgctactgacatattaaaatgccgaagacagttcctactcataacaaaaactacccagcccaagatatcaatactgccaagatgaagaaaccttggttttgatcctggctagtttgtagaaacaagttcttgctatgttgaccaggctgctctcaaactcctggccttaagcaaaccttacaagcctgagccactatgccgggctagaattttaaaaataaaacaaaacaatgtctccctgagaattgaataacctaagctaaccctcacatggatttgggacctaaattcattccaagtagctcctgatattggaaagtgagggagaagggagtaaaaaaaatagaccattgttttccaggaagcgcttttaaactgaaaggaactgggaggagttttttgtgcggcaccccctcccctttttttacttaggagggggcagggggcatctcaataatcgaaacaaa

SEQ ID NO: 475934 - DNA, 399 bp, Homo sapiens
catgaggcagtaaaagtgggatgatgaactgcaaaagacaattacagttaagaaagttgcggtaatggcattctgagattttcttatcccataagttgtgtatctatgttgtagtctaggtgaaataaagtgacagggaaaggtgtggttcaataaatactatttcctttaaattagtaattcttgaattttaatgcgcccataaattactttggaatctggacaaaatgcagattatgattcaacagatctgggaaacggccccaaattctgttcccaggtgattccagtacttcaggtttggggaccacactttgaaaagcaattctttccactctgyggagaagtgactggcaggatgtcattgtcgacagggatgttttgaggcagaatcatctt

SEQ ID NO: 475935 - DNA, 548 bp, Homo sapiens
gattctcactactgctgaggccagctgctcacacaatatgcttgtagcagcattcctggcaggctctttctcacctagtctggtttatggcctttccagctgactctgtgctctaacactcacctaggcttcagaatcaggagatcacaaatgcctgtaggtatggatgcctagggtcaggtcaaaattagtgggttagaaatcacagttatgacactcatagcttcatattaatacaccaacgataacaatggcagcagcaacatcctggaacacttttgtaaaatgcttaaaatcagccaatcattgctgaagacgactgactttgctrtcagaatcaagggatgtgggaggacaaagttggttccagttctttgtaacctagtatttcagaccaatgaaattagactcttaatggatcaaatctacttagctcaagaagaaaaagggattttatttactgatgtaactaaagagtcctgggcttttgtgatatttagatataggaactaaacaatgccatcaggtatctctctctgtcctctgcc

SEQ ID NO: 475936 - DNA, 610 bp, Homo sapiens
taatacacactgcacagatgatgcacaaaaccccatgttgagtggtggaagccaggcacaaaagaatgcctgccatatgattccattcgtacaacgctgcagaaaagacaaacctagtctatagggacagaaagcagatctgtggttgtctgagggtggggacagactgagaagaggtaccgcggagcctcttcaggtgatgggaatgttcagtatatgattgccgtgctggtggttacacaaatatagacatttttaataaatttctaaaaattcattgatgggtacacctaacatgggtgtgtttattatacacaaattagaccacaataaagcagattttgagaaaacacacatcctggctctcatgaagctctcattctggtggagaatacagamattaatacagccattgtgtaaataaatgcaaactaattataactgggatgagagctatgaaggacatctcatggagtttgagagtgtgtaataaggacttggtcaattcagattgatcgggaacactctccggaggggtaactttaatccgaagtaggcatgaaccagggaagatgacttgggccgtgagagcagcatttgctaagggcct

SEQ ID NO: 475937 - DNA, 612 bp, Homo sapiens
tgaggggagtcgcaggccaagaagggggtctcccagcagcttccctggcggctgcctgtccctctttttgttctcttcctctgaaaagaaataagagccggagagagggacrgagggaggagaaggtgagatggaagaagggaggggtaaaggactggttatttaccaagcacttaatcctgtgtgccgtgctgtgcatggacactccatgattagcctcctgctctttggctccacgttgaagccatggtgtccagcatccataaagggtctgagaaaagggccacctggaaggctgcctggaggagatgcgactggagctgaaggatggcgaaagtgagctgattcaaaccactagtttatactctcaccttccaacagccaaactctaatcccccccaaaccctgagttagcgtgcctccatttccaagtgacgcggaggttgggggatgtatgcctcgaagcagaatatatatgtgtaatataggtacatttcataatcccatttattttaataggcaaagttgcaagaggaaaagttgggaaatactatacataaaatactagcagtcattgtctggtgcctaataaaatattaggtgtggtttttg

SEQ ID NO: 475938 - DNA, 450 bp, Homo sapiens
ttgcttttgtatacagagtgagtttgtttcagtttttgcttttctctgtatgtttagtttcccagtttcatccattaaataatctaacttttccccactaatctctatccacctctatcacataccaattcccaaatacatgtttctgtttctttgttttctattccattccagtgttctatctgactatttctccattctttcttccacagtttcatcataggactttgttttgtgacctatgatgaagtggggagatccagttatattttctgtgcatagatttgtttgtctcaaacaattgttacaaggctgtatagtaatttggaatcctgcttttctcactgaawattgttaattttggcattcctcccatgttttgtcaacactttataaacatcaattcctagaaaatatagtgtcaccatcaataaaaccaaatctcacaat

SEQ ID NO: 475939 - DNA, 654 bp, Homo sapiens
atttttccacttctgtattagtttgctagggccaccataacaccataacattagtttgctggatgtcttaagcaacagacatttatttccttgccagatctagaagctaggagttccacatccaagtgttggcagggctggttctttccgggggctatgaagaagggatctgttctaggcttctctccttggcttcaatggccatcttctctctacctcttcagatcatcttcctcctacatgtctgtgtccaaatttcctcttcttttaagaacaccagtcatattggagtagggcccacctcagtgacttcattttaactcagttgcctctgtgaaaaccctgtctccaaatatgtcgcattctgaggtctagaagttagggcttcaacccatgattttgatggagggcataattcagcacctaccaacctccttaaattttccaggcatgtgttaatatccattcccaaaacatayatacataaaatgtagcatgtgtaaaattaccaatttatgtaataatttaaagggtttttatttatattgtatacaagtaagctccacattaagctggaacatgaagtaagataacaagttttaaagtacttagctcactacttagcatatggaaaatgtaactacaggttagtcg

SEQ ID NO: 475940 - DNA, 516 bp, Homo sapiens
aaaaaataagtaaaagtctattacttagagaaattttaatggaaatattgttagttcattcaaactaatcaaagagttaatgatagacaaacttattatatattgttttttgaaacttggagtttgggatttgcagtggtaagaatcatgaaagtggaagggcaaggaagaaggataagctgccctattctcataagctttaggttaataagctcaaaagatatctgtatggtgcccaaaartaatgcatacttttccacagtgtaacctaactgtggaatttatgaccagcagtataatatatctgggtcagaaaacacgcattaaggtctagactggataccaaagcatagaaaaatgtttttgcatagaaaaatgtcttaatacgaggatctcatacaataggggtccccagcccctggaccacggactggtaccataggtcagtggcctgttaggaaccaggatgccacagcagttggggagcaagcattaccacctgatctctgtctcctg

SEQ ID NO: 475941 - DNA, 647 bp, Homo sapiens
gctggcaaataaacaaactatggtacatccaataatggaatactactcaatggtataacaacaaaacaatggactactgccacacacaacatggatgaatctaccatgcattatgctaagtgaaagaagccagactcgaaggttacacacagtgtgattccacttatatgacattcttgagaaggcaaagctatagagatgcaaaacagattagtggctgctggcaggggggagggttaatacaaaggtagttatttgtggatgacgggatagttctgtattttgatggcgrtggtgatggttacacatctctatgcacttgtcaaaagtaataaaacaccaaaaaagtgaattttactgtatattaaaataagataaaatggagtgtgagccttggactaatacaagggggcaggaacctagaacaaaggtactctccctgtcacaaggacgcttcatatctcccccacctcaccaatcccagaatcgttctgcctcaagcagcactgcccagcagaaatataatgcaagctccatatttaattttaagctttatattggttaaattagaaggtataaagaaacaagcaaaaataattttatatttttgtttaactcaatattccagaatattataattttagcat

SEQ ID NO: 475942 - DNA, 647 bp, Homo sapiens
gctggcaaataaacaaactatggtacatccaataatggaatactactcaatggtataacaacaaaacaatggactactgccacacacaacatggatgaatctaccatgcattatgctaagtgaaagaagccagactcgaaggttacacacagtgtgattccacttatatgacattcttgagaaggcaaagctatagagatgcaaaacagattagtggctgctggcaggggggagggttaatacaaaggtagttatttgtggatgacgggatagttctgtattttgatggcggtggtgatggttacacatctctatgcacttgtcaaaastaataaaacaccaaaaaagtgaattttactgtatattaaaataagataaaatggagtgtgagccttggactaatacaagggggcaggaacctagaacaaaggtactctccctgtcacaaggacgcttcatatctcccccacctcaccaatcccagaatcgttctgcctcaagcagcactgcccagcagaaatataatgcaagctccatatttaattttaagctttatattggttaaattagaaggtataaagaaacaagcaaaaataattttatatttttgtttaactcaatattccagaatattataattttagcat

SEQ ID NO: 475943 - DNA, 616 bp, Homo sapiens
ggcaaataaacaaactatggtacatccaataatggaatactactcaatggtataacaacaaaacaatggactactgccacacacaacatggatgaatctaccatgcattatgctaagtgaaagaagccagactcgaaggttacacacagtgtgattccacttatatgacattcttgagaaggcaaagctatagagatgcaaaacagattagtggctgctggcaggggggagggttaatacaaaggtagttatttgtggatgacgggatagttctgtattttgatggcggtggtgatggttacacatctctatgcacttgtcaaaagtaataaaacaccaaaaaagtgaattttactgtatattaaaataagataaaatggagtgtgagccttggactaatacaagggggcaggaacctagaacaaaggtactctccctgtcacaaggacgcttcatatctcccccacctcaccaatcccagaatcgttctgcctcaagcagcactgcccagcagaaatataatgcaagctccatrtttaattttaagctttatattggttaaattagaaggtataaagaaacaagcaaaaataattttatatttttgtttaactca

SEQ ID NO: 475944 - DNA, 671 bp, Homo sapiens
ccaatccagtgtcacctgatgcaaaaagtccatacatgtgactactttcttatatctcccttggcaaatgatagatctcatttcttttccagtttcagtgaggtctagatttgggcttggggaagttctactttttcatgtggccttcaacaaaaaatattccagcacctaaaatgcgtaattctttggggtcgggcaacttattacagacaagttttaatactgagaagcaacaacaatttgctacgtgaaggatacctgaaaaccagattactacctaagccaaagttaaaacaatgttccgcacagccatttccgaatgttttggattattaatacagcaatggcgctctctgatgactgctggtgtgtattacatgtctcttgaagggaagaatacattttggatgttgtggaggcctcctattccacggtttggataaataataagcctcccttcagcttgatcatcttcactcctcatccccttccccttttatccctcatcatttacttygattgcagagggaaggtcatggatacagaatgcagccttttgtcaatgttcagagacccagcaaccaagacacaggtccccatgacagatagtgaaattgtcacagtgtgaaccaagtgcagacaatctccaggatcacttacctatttaagtc

SEQ ID NO: 475945 - DNA, 593 bp, Homo sapiens
tgctgagaagctgggactcaaattgatagaccattaggagctgccgccaactctggataagggaagtgatgtgattgaggtcttattgcagaaagagaattttgctacctatatagaatggattttaaagggttagaggcaggcatggtcatattagcctggataccctgtgcagcagttagaatacttccagctacaagtaatggattatcaaatggagggtggytagaataatatagacccttataaggtcactttgcaagaagcccagaggcaggcagggctgtacagaggtagacctatgatgctaaggtctcaggacttcccatctgaacacaggccgtccttcatggtcacgaggtgcctgttgcagcctcaaataccacatgctcacttgcagcagcctaagcgtgaaggaaatgcatggaacaaaaggccctctcttttatgaggcctggactccatcttgttattagggagaaaaaaaaaattcctgaagtcttctaacagacttctcacatctcattgatcagatttgggaagcacacctgcccccagaccaatcagtgacaaaggaggataggattgccctg

SEQ ID NO: 475946 - DNA, 633 bp, Homo sapiens
ctggctcacttttggtctttttgcctatctcaccttatgctttcttcagggatcagctattactttctattctttttcttccatcaagcattttttttctctagctgtcacttctrgttttacatccaacctatagttcattcttcacacagttaatgtttgcattgaattgtctttatacttagaatgaaatacaattacccatgggatttatatgttcagccctgaccccccttctctgacaacacttcctgccattctccccatctcttaccaagctatagacttttgttcattcttgtttccaagctacagacacagatattcacacaattggttcttcttgtaattcagatctcagttaaaatggtacctcctcgataaaacctcttactctccttcctgaagtactttccccatcactattattcattctgtttaatttttctttgcagcaattatccttacctaatatttgttcatttatgtatttactttttcattttagaatataagcagcacagtaataggaaatttcttcttccccaagctattactagtgtctgtagtagttcttggcacatagtaaacattagatgaatgaataagattttacaagatttatttacactg

SEQ ID NO: 475947 - DNA, 633 bp, Homo sapiens
ctggctcacttttggtctttttgcctatctcaccttatgctttcttcagggatcagctattactttctattctttttcttccatcaagcattttttttctctagctgtcacttctagttttacatccaacctatagttcattcttcacacagttaatgtttgcattgaattgtctttatacttagaatgaaatacaattacccatgggatttatatgttcagccctgaccccccttctctgacaacacttcctgccattctccccatctcttaccaagctatagacttttgttcattcttgtttccaagctacagacacagatattcacacaattggttcttcttgtaattcagatctcagttaaaatggtacctcctcgataaaacctcttactctccttcctgaagtactttccccatcactattattcattctgtttaatttttctttgcagcaattatccttacctaatatttgttcatttatgtatttactttttcattttagaatataagcagcacagtaataggaamtttcttcttccccaagctattactagtgtctgtagtagttcttggcacatagtaaacattagatgaatgaataagattttacaagatttatttacactg

SEQ ID NO: 475948 - DNA, 651 bp, Homo sapiens
tttctcaccctcagtttcctcatctctataatgggaaaaagactaacagctacctcacagtctcttgggagtattaagtacgatgatgcacattaaaaatactcacatataacctggtattaagtgctcaataaatgttagctgacactattaacagattttagggaaaaacacagacttgccttgattggagcagaggtaagaatcctgccttttcttgtcactgtcacatttttggagtcttagggatctaaggagtttgaaagttactttgtagaacattgtatattatacacatatagttacacatggaaagaggaacaagccatactagcatgtcatattagaaattgtagcttggkcaacataatgagagcctgactgtacaaagaaaaaaataaaaaaaaattagctggatgtggtggcacatgcttgtagtcccagctactcaggaagctgaggtgggaggatcgctggagcctggaaggttgaggctgcagtgagctgtgatcaaccactatgctttggcctgggtgacagagtgagaccctgtcgaaaaaaataaataaaagtgcactaaactggaactatgagtcctgcattctagtcttgattctgtaataaactcacttcaaggctttgagtcacttc

SEQ ID NO: 475949 - DNA, 651 bp, Homo sapiens
tttctcaccctcagtttcctcatctctataatgggaaaaagactaacagctacctcacagtctcttgggagtattaagtacgatgatgcacattaaaaatactcacatataacctggtattaagtgctcaataaatgttagctgacactattaacagattttagggaaaaacacagacttgccttgattggagcagaggtaagaatcctgccttttcttgtcactgtcacatttttggagtcttagggatctaaggagtttgaaagttactttgtagaacattgtatattatacacatatagttacacatggaaagaggaacaagccatactagcatgtcatattagaaattgtagcttgggcaacataatgagagcctgactgtacaaagaaaaaaataaaaaaaaattagctggatgtggtggcacatgcttgtagtcccagctactcaggaagctgaggtgggaggatcgctggagcctggaaggttgaggctgcagtgagctgtgatcaaccactatgctttggcctgggtgacagagygagaccctgtcgaaaaaaataaataaaagtgcactaaactggaactatgagtcctgcattctagtcttgattctgtaataaactcacttcaaggctttgagtcacttc

SEQ ID NO: 475950 - DNA, 558 bp, Homo sapiens
ttatgttgtcctgagccagctaatgtaattaatataatgccaagcctctgtccataatggcattcacagaggagagtgctgtatgtttcaacactgctttgacaggcctgaaagatactttgcaaagacagatagatayttggaacaactgagcagcttgcctaattgtgctgtagtatgatgaataaaggcctgaaaatgggactgtggaagagtcttttctccaaagaattagaggcttgctgccagctctttctaatccttctaatcctaatccagaatgctcttgttacttttttttttttttttttttacaaagcaattacctgttctttatcctttaaagaagggaccccagaactacttgggggatctcagtgacaccagaattttagttgtaaagaatagatgcataaaatactaagagacctttcctcccatttcactagctattcaaggtccaggaaagggggaacgactggcttaagataccacaacaaaactgaatctagattggaggactcctatctttcaggtcatggttccctaccctttttt

SEQ ID NO: 475951 - DNA, 616 bp, Homo sapiens
gggaagtcagtaacgtggggtacagagagaagggcagtggggaagtagcagctcctcttctaaggcgttctactaaaagagaaggaaggagtacaacgggatgagcacaggagggaagcatggggctgaaggcaggctttattatgtgaaacagaaactactgcgataggttcatatagtgatgagactgattcagtattgagggggaaactgataatgccaagggagagagaaggaggggaatttagaattgcttgcaggggaataaatacatatttaatctctatactgtccgaggcagttctccataataacaaggccaaaatgctaacattattctgtggtaataagcttaagtttcactttaaacataaagaaacttccttttgaactattgaatcacaacatatatttcagaatagaaaatcaactctattatatgtctctccttttaaaaaaaatttagaagatctagcaactgaaaatatttttccttttttatttatgtcaggagtactgaggaagcgkatgatcatagctgctgggatccatgacagcatttgtaggtgagtaatgaattgctttagatgagagacaaacccgagacaatatgttt

SEQ ID NO: 475952 - DNA, 616 bp, Homo sapiens
gggaagtcagtaacgtggggtacagagagaagggcagtggggaagtagcagctcctcttctaaggcgttctactaaaagagaaggaaggagtacaacgggatgagcacaggagggaagcatggggctgaaggcaggctttattatgtgaaacagaaactactgcgataggttcatatagtgatgagactgattcagtattgagggggaaactgataatgccaagggagagagaaggaggggaatttagaattgcttgcaggggaataaatacatatttaatctctatactgtccgaggcagttctccataataacaaggccaaaatgctaacattattctgtggtaataagcttaagtttcactttaaacataaagaaacttccttttgaactattgaatcacaacatatatttcagaatagaaaatcaactctattatatgtctctccttttaaaaaaaatttagaagatctagcaactgaaaatatttttccttttttatttatgtcaggagtactgaggaagcgtatgatcatagctgctgggatccatgacagcayttgtaggtgagtaatgaattgctttagatgagagacaaacccgagacaatatgttt

SEQ ID NO: 475953 - DNA, 644 bp, Homo sapiens
aactcatacaaggtttaagattattagccttgagggtcaaatctatgatgtggtggacaayagagacccgtttcagtgtatttgagtaagagaatggaggtaaaaatggtgttttaggaaaactggtctgcagcagagaatggataaggatctgaaatggttaaagtaatactgatatatagtagtaatactctggactgggatggtaggaatagaaaatgaaaaattagtctgggcgcggtggctcatgcctgtaactctagcactttgggaggcagaggtgggtggatcacctgaggtcaggagttcgaaactagcctggccaacatggcgaaacactgtctctactaaaaatacaaaaattagccaggcatggtggcaggtgcctgtaatcccagctactcgggaggctgaggcaggagaattgcttgaacctgggaggtggaggttgtggtgagctgagactgactgagccacttcattccagcctgggcaaaagagcgagactctgtctcaaaaaaaaaaagaaaatgaaaatgaaaaattaagtagtgtgtattataagaatttggaagataatgcaaggtaacagaaaagtaggaacacacttgaaggtttaaaaccttgagatgtgtggttctaag

SEQ ID NO: 475954 - DNA, 644 bp, Homo sapiens
aactcatacaaggtttaagattattagccttgagggtcaaatctatgatgtggtggacaacagagacccgtttcagtgtatttgagtaagagaatggaggtaaaaatggtgttttaggaaaactggtctgcagcagagaatggataaggatctgaaatggttaaagtaatactgatatatagtagtaatactctggactgggawggtaggaatagaaaatgaaaaattagtctgggcgcggtggctcatgcctgtaactctagcactttgggaggcagaggtgggtggatcacctgaggtcaggagttcgaaactagcctggccaacatggcgaaacactgtctctactaaaaatacaaaaattagccaggcatggtggcaggtgcctgtaatcccagctactcgggaggctgaggcaggagaattgcttgaacctgggaggtggaggttgtggtgagctgagactgactgagccacttcattccagcctgggcaaaagagcgagactctgtctcaaaaaaaaaaagaaaatgaaaatgaaaaattaagtagtgtgtattataagaatttggaagataatgcaaggtaacagaaaagtaggaacacacttgaaggtttaaaaccttgagatgtgtggttctaag

SEQ ID NO: 475955 - DNA, 547 bp, Homo sapiens
tgtgtcatctataagacaatcatgcaaacagcagtgcattttaggttaatttctttctaacctgcatattcatctctagtctcagctgggcttattctgctgtttgcaaaacaggcaaaatgtagtaaaggctcattttccctgcatgatacaagtgacagcttgtgctcctagctccacaaggttgaaaggccagatgaaaaggttctctgggtgcactaattagtaggcactaacatgacattttcttgattcttgggtcagtgggtcaagactggaaacaagggatgagaaatattgtgaaatgctcatgaaaatacaattttaaggtcggatggggagggatggttagcaggatctaaagaggagctctgtcattccaaaagtttrtatttgacttgtgttttgctaagtgagagtttataaacactaagatgaaggaatattgtttaattacttaataagcctaattttctatttcaatcgcccttctgaaaaaaatacaaaactgtagagatcacatgacactaaaaagtattaaaagcat

SEQ ID NO: 475956 - DNA, 485 bp, Homo sapiens
caatggctcacgcctgtaatcccagcactttgcgaggccgaggcaggtggatcatgaggtcaggagtttgagaccagtgtggccaaaatggtgaaaccccatttctactaaaaatacaaaattagctgggcrtagtggtgtgtgcctgtagatccagctgcttgggaggctgaggcatgagaatcgcttgaacctaggaggcagaggttgcagtgagccaagatcgtgccactgaactctagcctgggcaaccgagcgagactctgtttccaaaaaaagaaaaatttaataaatcctattttcctgaataccatgccaggtcatttttgtaaagtctttccaattttcctacatatgttgtccctgctgcctggaaatatcttttcttgcttggctctgctggtaaactcctagtagtgattaggcacctcgtgaggtggcggcctccaggacggcgctgggaaagcactcagcacagaatgcac

SEQ ID NO: 475957 - DNA, 485 bp, Homo sapiens
caatggctcacgcctgtaatcccagcactttgcgaggccgaggcaggtggatcatgaggtcaggagtttgagaccagtgtggccaaaatggtgaaaccccatttctactaaaaatacaaaattagctgggcatagtggtgtgtgcctgtagatccagctgcttgggaggctgaggcatgagaatcgcttgaacctaggaggcagaggttgcagtgagccaagatcgtgccactgaactctagcctgggcaacmgagcgagactctgtttccaaaaaaagaaaaatttaataaatcctattttcctgaataccatgccaggtcatttttgtaaagtctttccaattttcctacatatgttgtccctgctgcctggaaatatcttttcttgcttggctctgctggtaaactcctagtagtgattaggcacctcgtgaggtggcggcctccaggacggcgctgggaaagcactcagcacagaatgcac

SEQ ID NO: 475958 - DNA, 595 bp, Homo sapiens
aaaatttacaactatatttctgtattaaaccaactactacctcttctagatacatataaccaacatcagtgtcaaagattttcagagagcagttaggaatctaacaaggtcgggcctcagcatgaatcactgtcattcttaatgtagaatcagcatttctaaaaccatacataaggagccgctaaagagagagagagaaaaaggacattccaagagcttcttgtattgatttcttttaccccaaacaaagagattctsctagttacatgatataccataatcacgtaatttgtttgactgctttaaagaaagaacaatggattcgagaaaaggtgttgacttgcaaaaatacaatcattttgcaagcttttttttttgttaccatgggttgctttcccttagtaatataacatatgtggtctctatagaaaaactgaaaacgcaaagctctaattcatgccattctcaagagccggaactaaatctaaagcatccaacatctgaaaactcttacattgctaccaatgtaggaagaataaatctttttcttcaagccttacatctaggtttcactgtattagactttcaaaactaa

SEQ ID NO: 475959 - DNA, 370 bp, Homo sapiens
aatggagacaagaaaaagtagagaaggcaaaaccaggaaatgttttagaaagtgttagactttcttaagaccttaactccattgccacaactagaattcactctggwttcagctatgtggaagtgaggcccttcatctagcctgaaaataacccaccacttacaccccacaagcaagaggtggacacattctgaatgggaaagaacttttaaaacacagatttttgaaaacagagcaccttatgtaataaattataaacaagttataaataaattataaacaaaaagaatatctttaaataaaaaggttctacacagtctgttactacactattttacttaaaacctagagtaggaggttccattcagga

SEQ ID NO: 475960 - DNA, 625 bp, Homo sapiens
gtttatttatttatttatttgtttattattatttttgagatggagtctcgctctgtcgcccaggctggagtgcagtggcacgatctcagctcactgcaagctctgcctctcaggttcacgccattctcctgcctcagcctcctgagtagatgggactacaggcgcccaccaccatgcccggctaattttttgtatttttagtagagacggggtttcaccgtgttagccaggatggtctagatctcctgacctcgtgatccgcccacctcggcctcccaaaatgctgggattacaggtgtaagccaccgcacccggccggcattattttaaatagtgcctactatttaccttgaacaccatgaagctagggcacccacttataattctatcttacatttacttagttgacaggtgaagaatgcagttttatgatttctgtgctaacagattttgggcagggtccttacacaaaggcctaaaattttatgacgcacatcaccaccaccrtggtttgaagatatagctgcaaacttaaaaccaaaccacagtggctttcttcagatcctccgtcctgaatgtttgaaaactgaatctgaagaaggagagaagcgaggaacagaaccag

SEQ ID NO: 475961 - DNA, 430 bp, Homo sapiens
agtagccttctatttagcaaagatgaggcccccagggcatgatttggaaagaggcattgaaacaaagagatagctaaaccaatcagcayaaaaagtaaacaaggattttacaggggataaaagcagagaagagcagacaagggtgcgggaggaatgaggggttaagccacatagtggaagactgtcagtcattggggaacaccacaagttggacatcaccagtggccagggaatgttcaaagacaaggatgtttgcattgccatttcaggctgcttgctctgtgttgaaagttaatcgcctgcagtgaggccatgtgtgagtggtgagtggtgtttctggaaaatcaaaggaaagaatcttcgttccaaatctgagtagctagaatacatagcaaatggagcagccatgggatggataggggcctttggg

SEQ ID NO: 475962 - DNA, 430 bp, Homo sapiens
agtagccttctatttagcaaagatgaggcccccagggcatgatttggaaagaggcattgaaacaaagagatagctaaaccaatcagcacaaaaagtaaacaaggattttacaggggakaaaagcagagaagagcagacaagggtgcgggaggaatgaggggttaagccacatagtggaagactgtcagtcattggggaacaccacaagttggacatcaccagtggccagggaatgttcaaagacaaggatgtttgcattgccatttcaggctgcttgctctgtgttgaaagttaatcgcctgcagtgaggccatgtgtgagtggtgagtggtgtttctggaaaatcaaaggaaagaatcttcgttccaaatctgagtagctagaatacatagcaaatggagcagccatgggatggataggggcctttggg

SEQ ID NO: 475963 - DNA, 538 bp, Homo sapiens
acttctgaaaggtgctgatttttaagatggtcctgaagaaggttaaaactttagcaaagtgtacatggtgggattggggtctctcagatggcaggaagcggggagcctctttcaagaacagcaaaaggcagagtcactgaaacttcacgtgtctgttagagagtagctggaaaagtgggtgagggccaggtcacagggtccctgattgctaggccagggaggctggcctgcaggaggcaaggaagccatggatagtttttgagcagaggatgacttgatcagggctaggcctcagaaaggtaactacggcaacgcaggagccacaggaggcagggaragcagtttggaggctattggggtggagagattcattcatccactgtgcctttctgtggtccagatgctatgctaggttctgaggccaccaagatgtgtaacgtgcagcctttgagcttaaggaatccattgctactgttgcagactgtttttgccaggcacagtgttaagcactttgcatacattatcatctttgatcctc

SEQ ID NO: 475964 - DNA, 538 bp, Homo sapiens
acttctgaaaggtgctgatttttaagatggtcctgaagaaggttaaaactttagcaaagtgtacatggtgggattggggtctctcagatggcaggaagcggggagcctctttcaagaacagcaaaaggcagagtcactgaaacttcacgtgtctgttagagagtagctggaaaagtgggtgagggccaggtcacagggtccctgattgctaggccagggaggctggcctgcaggaggcaaggaagccatggatagtttttgagcagaggatgacttgatcagggctaggcctcagaaaggtaactacggcaacgcaggagccacaggaggcagggagagcagtttggaggctattggggtggagagattcattcatccactgtgcctttctgtggtccagatgctatgctaggttctgaggccaccaagatgtgtaacgtgcagcctttgagcttaaggaatccattrctactgttgcagactgtttttgccaggcacagtgttaagcactttgcatacattatcatctttgatcctc

SEQ ID NO: 475965 - DNA, 627 bp, Homo sapiens
ctacaatgctctgtttataacttgcttatagttccttaatacagtctaccttatactagagaggcaatttagcccaaaggttaagaatggggccttcaaagtcagacagtattgggattgaatccaggtcccccatgtcctagctgtacgaactggggaagtgacttaacttctctaagcctgtttccacatctgccaaattargacaatctacctcagagggttgttctgaggattatcaagccaataaagcagatcacgcatgcaataatgattagtattagaatgcatgccttacgcctctccctccacagatgagggcatcctgagaacagtgtccatgtctgattatgtctgtacctttccttccatctcttctagcacctagtacggtgccctacacagtgtttttctcaaattatgcaaaataatatccaaactcagagttaatatgataaatattcatgttggtaccacattcaggttccacgggattcttaaggtttactacatttgttaaatttcaatgtcttacttatccctggaaaccccatatgctctagattttgccagatgatactgataccttattaggaaaacaaaaaggcaagccacagattgggagaa

SEQ ID NO: 475966 - DNA, 549 bp, Homo sapiens
tagggacatatataagggatgggcaagctacacatgttaaaccctccacatattccatctctccaaacatgggcaagctaygcatgttaaaccctccacatattccatctctgcaagcaagaaatgggtctctaggctaaatgtctggtaaatgtctcttacatacccatggatccacctcattttcttgaactgccgcatagtattccattgatttgataacccatggtttatttattctcttccatcaacagacattatagtttctctgtttgttgctacttcaaacaatacttcaatgaatagttttatatgtctctgaacacatgtgaaggtttctgtagaatttctaccaaaaggaggctttaagtttgtttacattttgcctctgtgtttagagaggccaagtccctttatcccttcccacttaaagagaagacgcagtaactatagttatgaactatgaggagcagagatagaaggcttttaaggaaaaatcagtaaatggtaaatggaacacttccaaataaacaaatgaacaaacacata

SEQ ID NO: 475967 - DNA, 598 bp, Homo sapiens
atgagaataaaggaaaggatactgtcagtgaattagaagtaagtctgggctggatatctggtcaagaaaggggtgacctaagaacaatgtaagcctgaaaaaggcaggtttctaaatcaatcgagaaaaaaggggctggagtattcagagaccaaatacattgattttactgttttgcttagggtttttcaagtgtagataatgtaaacatcatggatagaggtttttttccagcaggcctcttgtgatgatgggatgaccctctgggatttctccaagtgccctaacttaggcagagtgatgtgatttaggaacacagattttggtgtcagacagatctggacttaattctctgccctgtcatttttgaccattagtggaggacatarttcctatactttataattgttaaaaagatcatgtgggaaaatacatgtgacacaaatgcctgacatatacactaggtgttcaatatttgtagctctctatcctcagctgagatttggcagaacccacaaatctcgctaacacattttcagttagagagttcttttttgtggacacattcagattttaatcaagcctatatttgcaaccc

SEQ ID NO: 475968 - DNA, 451 bp, Homo sapiens
ttaggaaccagcgctttgtctttgcctggggaagctcaggcaatagtcaatacttattaaacaaagttaagcagaagtaaacccaagctcaacttatcaagsatatgagtcatactggcagatttggggtgggggagagagtacgtgtgttttagattatattacttaaaagaagaacctgaggcagggatttgggtatatgtgagttaacaaggaaatgcttctcaggaaaaatctgtaagggagtgaaggcagcagaattggcaaaggggaggcattgagcaatgatatggtcttggataacatccagccttggcctgatttgcagagggctctggagtgtaagtggttccacctggagctgtccggtctccaggcaagaggaacctgctctgtattctgtgttagccaatcattggccatcctcaggggtgggcgtggcatggtgata

SEQ ID NO: 475969 - DNA, 520 bp, Homo sapiens
tactactaaatattgttattgtaaagatttattattctatataagaaagtaagaaactgttgtatcccccttattttttaaagttagattttctcaaagctcccatcctagtagattgcacagaaattctatctcaattattaataaggctctttccctaccacccaaatcaccaaaatgtcctgggggtgcaccacaatctacaacattatgttcctctggtctttaatcttcactgctcctttcctcagccacatagtagcattgtcacttctgtgccaagacagggcatataatytttccccaaggcactcagggatatgattcttaatattctatgctcatgtctcttctacagttcacttttaagatatgtcagaaagcaagtcactttttggggagcgaatgccgtcagcacatctctgttgcaataaactggttctcccactcttcaagagaagctgccctacttccttttcccctacatcaagtcctcatctccctcttctctttatctgga

SEQ ID NO: 475970 - DNA, 586 bp, Homo sapiens
caaaccctatcaatcttccctccttaattatctatcttattatctatctaccttaattcacactgccccaccccccttacctggtctgcagaagattgatttccctgcctccagtctgcctcataggagtctaattttcacactgctctcaagctaaaatctaaactcccctagccatgcatttkaggcttttcatgatctggtccatgctaaactatccaggctaatttctcagcagaccttctcctttgcaccccaacattatactttaactgtatcaaactgttctcagttctttcaaccaccagtttttctctattcatctctcttcctggattactctcctatgcaccagcaccaccttccaccctgttcaccgaggtaactgctccagatctcagtgtaggtataacttcctttgggaaaccactctgacacactaagatgggttggatggctctctccacattgccattgtcatactatattgttaattagaagttccatgcactcagcacaatatcttgcacatggtaaatcttcaatagatagtagatagacagtaaatcttcaatagatagtagat

SEQ ID NO: 475971 - DNA, 586 bp, Homo sapiens
caaaccctatcaatcttccctccttaattatctatcttattatctatctaccttaattcacactgccccaccccccttacctggtctgcagaagattgatttccctgcctccagtctgcctcataggagtctaattttcacactgctctcaagctaaaatctaaactcccctagccatgcatttgaggcttttcatgatctggtccatgctaaactatccaggctaatttctcagcagaccttctcctttgcaccccaacattatactttaactgtatcaaactgttctcagttctttcaaccaccagtttttctctattcatctctcttcctggattaytctcctatgcaccagcaccaccttccaccctgttcaccgaggtaactgctccagatctcagtgtaggtataacttcctttgggaaaccactctgacacactaagatgggttggatggctctctccacattgccattgtcatactatattgttaattagaagttccatgcactcagcacaatatcttgcacatggtaaatcttcaatagatagtagatagacagtaaatcttcaatagatagtagat

SEQ ID NO: 475972 - DNA, 259 bp, Homo sapiens
ctgccatccaaattgcctaggtctcttgagagttggggrccaggcctcttgagagttggagctttgtcagaaccaaaaggactcagcctcaaccccagcagcatctgcccaccatggcctgtcccttccctttcagcctgcttctggccagttggcctcctggtttgaaatggcccctcacctgctaggtgttcttttagctcctttagagagtcaagacagattctcctttgacctgcacggagtaatcagccacata

SEQ ID NO: 475973 - DNA, 624 bp, Homo sapiens
aactacagctgtcagccctcagaggtcagagacatgactgtttacttctatcactaaccagccyggctggttacagctagctacactagctacaaagagacaattaacaaaaaatgtctcatgaggatagaggggtttttttttagttttgttttgtttttaatcatctatcatcctcagggtggagaggggaagaaatgaatacccatttttcttttccatctcatctaaagccaagctataatccattaccactgcaaacagacaacagggcattttctgctacgacagcatacagtaggaacataataatcatcatctcttaaaagcctttactcaccccatttcaccttgccctggaatgggattccttgagtaggagagtatacccaccactcctgttatgatccttggctagaaccactgtgagctgagaatctcagcacccactccacatgccctacttggcagctaaaatgtaactattaagtcacactaacattagattagatgatgctgtcatcccattgttatccaatttattcttctctgacatggtatgaagtggttctgcatcaataatgattcataaatacagccatacctgatctctatcaccatttc

SEQ ID NO: 475974 - DNA, 517 bp, Homo sapiens
caggctgaattgcttttagcccagactgaagactatgtggagtactcaagacatgggacagtcatcaaaggacaggarcgggctgttgcctgctctaagtatgaggaggatgtgaagatccacaatcacacagtatgtgctaaactggaacaatttgtgtccttgtggtttgctctgtattgcatttttccactacaactttattagctaaccattggtattctctatgctttaaaaaaaaaaaaaaaattttaactgtttcatggaattttttcaaaaatagaaaaattttgaaggaatactatgttcatctatatacccatcatctaaattctgaaatttttaacatatggccttatatgcttggtctagttgtatgtgtgcatatgcacagttttacatatatatgtaaaatacacatatatacacacatatagttatgtatatatttatttgactgaaacattggaaattatgtatatcatgacattttatccataaacgctgtatcacatat

SEQ ID NO: 475975 - DNA, 517 bp, Homo sapiens
caggctgaattgcttttagcccagactgaagactatgtggagtactcaagacatgggacagtcatcaaaggacaggagcgggctgttgcctgctctaagtatgaggaggatgtgaagatccacaatcacacagtatgtgctaaactggaacaatttgtgtccttgtggtttgctctgtattgcatttttccactacaactttattagctaaccattkgtattctctatgctttaaaaaaaaaaaaaaaattttaactgtttcatggaattttttcaaaaatagaaaaattttgaaggaatactatgttcatctatatacccatcatctaaattctgaaatttttaacatatggccttatatgcttggtctagttgtatgtgtgcatatgcacagttttacatatatatgtaaaatacacatatatacacacatatagttatgtatatatttatttgactgaaacattggaaattatgtatatcatgacattttatccataaacgctgtatcacatat

SEQ ID NO: 475976 - DNA, 517 bp, Homo sapiens
caggctgaattgcttttagcccagactgaagactatgtggagtactcaagacatgggacagtcatcaaaggacaggagcgggctgttgcctgctctaagtatgaggaggatgtgaagatccacaatcacacagtatgtgctaaactggaacaatttgtgtccttgtggtttgctctgtattgcatttttccactacaactttattagctaaccattggtattctctatgctttaaaaaaaaaaaaaaaattttaactgtttcatggaattttttcaaaaatagaaaaattttgaaggaatactatgttcatctatatacccatcatctaaattctgaaatttttaacatatkgccttatatgcttggtctagttgtatgtgtgcatatgcacagttttacatatatatgtaaaatacacatatatacacacatatagttatgtatatatttatttgactgaaacattggaaattatgtatatcatgacattttatccataaacgctgtatcacatat

SEQ ID NO: 475977 - DNA, 517 bp, Homo sapiens
caggctgaattgcttttagcccagactgaagactatgtggagtactcaagacatgggacagtcatcaaaggacaggagcgggctgttgcctgctctaagtatgaggaggatgtgaagatccacaatcacacagtatgtgctaaactggaacaatttgtgtccttgtggtttgctctgtattgcatttttccactacaactttattagctaaccattggtattctctatgctttaaaaaaaaaaaaaaaattttaactgtttcatggaattttttcaaaaatagaaaaattttgaaggaatactatgttcatctatatacccatcatctaaattctgaaatttttaacatatggccttatatgcttkgtctagttgtatgtgtgcatatgcacagttttacatatatatgtaaaatacacatatatacacacatatagttatgtatatatttatttgactgaaacattggaaattatgtatatcatgacattttatccataaacgctgtatcacatat

SEQ ID NO: 475978 - DNA, 524 bp, Homo sapiens
caggacttgtctctgtcccacagtgcctggggcctctgtggcttgaatgctgggtgcttggaatcctcttcaggcttcatcactgatggatctggcggtcaatgctgttgctggctgggggcctcaatggcctgttggccagaacacctaagtgcggcttctgtgtgtgcctgggcttcctcacaacatggtggttggatcccaaggacaagcatctcaaggaagagccaagtgaaagccatgtcctttttagaacctagttctggaagacacgcagcctcccttttgccctgttttatttgttagaaaggaatcaccaaatcctccccatattcaaagggagaggaaattagaatccaccttttacaggcatgttttaaatatgccacattcctttaaacaaaagcacagagaggatcttggaatagtgatagcagttcaaatgtgaaagaaacaatggtttcagagcaaaaatgtctcttctgmgatcttggatgactctaccctggacagcgttttgccag

SEQ ID NO: 475979 - DNA, 545 bp, Homo sapiens
tgttacttcctggcaggttacctcagcagcaacaacttacagggttgatattatttcacttgcctgaaggctgaatttgacttcttaaaagccctgtgagatctcaggtttcctagcaaaagctatgaaatctctagaaataataattaaacatgtgacattggagcagaaatagcaaatcaccaatagaataaaaatgagattctagaaagatatctgtgtacatgctgtaatttaggaccaggtaaaaatgtcctttcaaagcagaggaagaaatcaaaaagcagaagagcggagtgtacgagaactctctgtrctgtctatgcaatgcttctataagtctaaaacgatcctaatgctaaaattttagtttttaaaaaaagtagaggaaaaactagtacctaaagaggaaaacattaacatcagatctgtcttatatcatacacaaaaatatacttcagatggatgacagaactaaatgcaaatgaacaatgtgatggcaataaaaactatagaagtttcaaagataaatataaaaataaatc

SEQ ID NO: 475980 - DNA, 458 bp, Homo sapiens
ataatgacgactgtaggccagatgagtgctgattgctacacaccaagattaccccaaaatggaggcagtgcatgactccctccagtaccccaagagacaaagctagagaaaatactcagctccrcatccaaaactctgaaattaacttcccctgagatgtgcagagttttatgctcaaacttccaaaaaatattaaaaattcaagatagtcatttttctcagcatgaacttgtgcactcttttttttgtatatatacaccatgattcagcaatgaacttgtgttcttatctccaacaaggaatgtatctaaatagtcatatctttaaggatatgagtttttagcggagtcaggaacctaggaaagaactatacaaagaggtagacagccctcagccacccctttgatggtgtatccatgcatttgcattgtcctattatcttttcttagagaatcaaa

SEQ ID NO: 475981 - DNA, 610 bp, Homo sapiens
atgacgactgtaggccagatgagtgctgattgctacacaccaagattaccccaaaatggaggcagtgcatgactccctccagtaccccaagagacaaagctagagaaaatactcagctccgcatccaaaactctgaaattaacttcccctgagatgtgcagagttttatgctcaaacttccaaaaaatattaaaaattcaagatagtcatttttctcagcatgaacttgtgcactcttttttttgtatatatacaccatgattcagcaatgaacttgtgttcttatctccaacaaggaatgtatctaaatagtcatatctttaaggatatgagtttttagcggagtcaggaacctaggaaagaactatacaaagaggtagacagccctcagccacccctttgatggtgtatccaygcatttgcattgtcctattatcttttcttagagaatcaaaagacctttctaagatcttggagaaagagtaacaaatagtatgtaagatattatatcagagtcagtctggaatgggaaaaatcagatgtgagtccctactggaaagtggagccttaaatcaatcacttgatctctttgagtttcaatttccttagc

SEQ ID NO: 475982 - DNA, 569 bp, Homo sapiens
gggaaacaaccaatgttgggtctaaagaatackagcagagaagaatttaaaattaagaagaaatgtaagtacaggtagatcaaacagcagcgtttgagtcattctcttatgcttatgattaagaacgaactgatcgttccctaatcttaggactatcctcaatacttcaggctaagacactgtttctattataccatcacgaatctgtcttaggaacaaaattatgattctaatgaatacataatttagtcttcccttaaaattctatcctttgatagtgatttattttaaacctctaacatctcattaatatattaaccaaagttgcctggaagggcttggccagggagcaagagaatatcagagagataataaagatataaaaaaggaattccaatttcccagatatgaaaagaaattttgcttgaaaaagttgacgaccttttcctgtttctatagtaaaatggaatacattgaacaactacaagatgaagatataaattaaaacataaggctgacctgtgtcattcaaactccgcttcccacagttcaccatatatgcattttaa

SEQ ID NO: 475983 - DNA, 569 bp, Homo sapiens
gggaaacaaccaatgttgggtctaaagaatacgagcagagaagaatttaaaattaagaagaaatgtaagtacaggtagatcaaacagcagcgtttgagtcattctcttatgcttatgattaagaacgaactgatcgttccctaatcttaggactatcctcaatacttcaggctaagacactgtttctattataccatcacgaatctgtcttaggaacaaaattatgattctaatgaatacataatttagtcttcccttaaaattctatcctttgatagtgatttattttaaacctctaacatctcawtaatatattaaccaaagttgcctggaagggcttggccagggagcaagagaatatcagagagataataaagatataaaaaaggaattccaatttcccagatatgaaaagaaattttgcttgaaaaagttgacgaccttttcctgtttctatagtaaaatggaatacattgaacaactacaagatgaagatataaattaaaacataaggctgacctgtgtcattcaaactccgcttcccacagttcaccatatatgcattttaa

SEQ ID NO: 475984 - DNA, 665 bp, Homo sapiens
tcatgacattttatccataaacgctgtatcacatatctccttaaaatgaggattttcttctatataaccacatcgacattattgcacttcagaaaattaacattatatcacctaatatctagtcattaatcacattttccaaaatatacagaaaaatgcctttaacacctattttttgttttagtcagaattcgtttcaaatttcttttgatcrttatgcggttattatgtctcttttctagagtgtatctcttcattttcatgacggtgaccatttaacagattaggccaattagtttgtaaattgtctcatattctgtattgactggttcctagtagtgttatataacttgtttctctatccctgtatgttttataaataggaatttaggtctaacggcttgattggatataagttaaatattttgacaagaatatttaataagtaatgtagtatattcatattgcattgtaaacatcataaagcatatattgtcctttgctgttctcttgaagtaaccaaactacaacctctctcttagttgagggtcaaaaacctaactccctataggagccagaccagtgatcatacatgagtgaagtgagccaggcaaattgtacaaactggagaacacaagccctatctaatggggcatccactgttc

SEQ ID NO: 475985 - DNA, 584 bp, Homo sapiens
tgcactttggtgttttcactgctggaatatatatatattagcattccctaaatatttgttttgtgagtgttcacttttaactgatttttctcatttgtaatactttttcatatctacccttcataaacttgcaaaaacattttactttgttatatcagatctttcattaagcatctgaagataatctctcaaaagaatcatgcttaaaatgagtgatatctatcttaagataatgctttttatctttttattatggaaagtttccaaaatacattaaaatagaacggtgtaatgatgtrtacccatcatccagcttcaagagttaccaacttaaggccagtcatttcttttatctccaccccgctttgtgcatgtttgtgagtgtgctgaagtacgtatttcaaaggaatcccagacatcttatttcacttgtaaataattgtctgtatctaacaaatgaggactttttaaaaacacaaccacaataccattatcatgcctgtttaacaatatctccttatcatgatgctttttaatgtttacgttttttaggatattgtaattcctaaataccacaaacgcgc

SEQ ID NO: 475986 - DNA, 469 bp, Homo sapiens
tgttttgaatggaaaatatctttttttccctctcctatgtaaactgtattttttttaggactttgtgggtcactgaaacctcaggatttgtttatttatctcagactcttgggtgacctcttcaattgccgagcaatctttcctgtttacacagagcttggcagcctccaggatgagttttctaatagagatatctctctcctagcctggctgagctggagaccctccataggtaaggcttgaagggaagcggggagtgaggcaaatgtaggaatgatctcattgctgagtttcccttgccctctkctgccctccaaattaccaagttccatgggtgtacagaagacagtgttggtgcaatacagcatagcctagccagcataaggaaggctcaaggaaactgctggctggcttttacaattttgattaagtagtagcatttgtataggaaagctttgttggaattttc

SEQ ID NO: 475987 - DNA, 469 bp, Homo sapiens
tgttttgaatggaaaatatctttttttccctctcctatgtaaactgtattttttttaggactttgtgggtcactgaaacctcaggatttgtttatttatctcagactcttgggtgacctcttcaattgccgagcaatctttcctgtttacacagagcttggcagcctccaggatgagttttctaatagagatatctctctcctagcctggctgagctggagaccctccataggtaaggcttgaagggaagcggggagtgaggcaaatgtaggaatgatctcattgctgagtttcccttgccctctgctgccctccaaattaccaagttccatgggtrtacagaagacagtgttggtgcaatacagcatagcctagccagcataaggaaggctcaaggaaactgctggctggcttttacaattttgattaagtagtagcatttgtataggaaagctttgttggaattttc

SEQ ID NO: 475988 - DNA, 478 bp, Homo sapiens
tcttggcagtagagttaagcacaagttgaggctgcaaaatactttgaacttcaaagaaaagagaacaagtgtgaggcasagtagaaaaaaaaacatgcttgaaaataaatcagagaaatcatgttctagcgcctacactgccactacgttacatgagctgggtgtgcaactatcctctcaagagtctcagtttcccaatctggggagtgaggagcatgggcaccacaggatgccaatcgggctttgatattttccacagatctgcacttcactttctagatctgttgtccttgctccccgagagagaacgcagcaggccagccagtaatgtgctgtgaggcctggtgcacggtgatttactgtgaggatgtgtggatacccaatggtacctttgaaacaagctcgcaatccacaatcttgagtgtcatcattattggtctcatgggagaagtctgtttcttccctgcccttcgaatct

SEQ ID NO: 475989 - DNA, 478 bp, Homo sapiens
tcttggcagtagagttaagcacaagttgaggctgcaaaatactttgaacttcaaagaaaagagaacaagtgtgaggcagagtagaaaaaaaaacatgcttgaaaataaatcagagaaatcatgttctagcgcctacactgccactacgttacatgagctgggtgtgcaactatcctctcaagagtctcagtttcccaatctggggagtgaggagcatgggcaccacaggatgccaatcgggctttgatattttccacagatctgcacttcactttctagatctgttgtccttgctccccgagagagaacgcagcaggccagccagtaatgtgctgtgaggcctggtgcacggtgatttactgygaggatgtgtggatacccaatggtacctttgaaacaagctcgcaatccacaatcttgagtgtcatcattattggtctcatgggagaagtctgtttcttccctgcccttcgaatct

SEQ ID NO: 475990 - DNA, 478 bp, Homo sapiens
tcttggcagtagagttaagcacaagttgaggctgcaaaatactttgaacttcaaagaaaagagaacaagtgtgaggcagagtagaaaaaaaaacatgcttgaaaataaatcagagaaatcatgttctagcgcctacactgccactacgttacatgagctgggtgtgcaactatcctctcaagagtctcagtttcccaatctggggagtgaggagcatgggcaccacaggatgccaatcgggctttgatattttccacagatctgcacttcactttctagatctgttgtccttgctccccgagagagaacgcagcaggccagccagtaatgtgctgtgaggcctggtgcacggtgatttactgtgaggatgtgtggatacccaatggtacctttgraacaagctcgcaatccacaatcttgagtgtcatcattattggtctcatgggagaagtctgtttcttccctgcccttcgaatct

SEQ ID NO: 475991 - DNA, 585 bp, Homo sapiens
gctgtgcgagatgtgaggggtagagaaggcggctgagggtgttcatatccccatatcgcatcctcagggccagtctccacgtgcctgaccacagcggtgggggagtgggtgtgagcagctcagcccaataggaaaatgacgcaagtcacatgtgtcagtttgtcttgtagtcacattaaaaaagtaaaaaagaaacaggtgaaattaatttcaatgctatttagcccttgatttcccaaatatcatcatttcaacatgtaatcaccataaaaattattaatgagacattttacattcttaagttagtactaagtctttgaagcccagtgatgtatttcacacttgcrgcggatctcaattcagactggagcattccaagtctccaatagccgcatggtggcttccataatagctccagcatagctgtgtgagttcagatgccatgaactagctgtagtacctttacacgttacttaatctctccccttcagtctcctcctctccaacatgaacacgataataatagaacctaccttagacagttgttacgaggatttaatgtttctagaataaggcctggcatat

SEQ ID NO: 475992 - DNA, 642 bp, Homo sapiens
aaatggtaaaatatcaaatgtgaccaccaaaagatagaattttagcagaacaattacctggaagaacttgaaaacattatggacatgtgactacagcaaatgcttcagtcgcatttgatttcacaggggagttctgatgatctgttgaaactattcactaaagaaaaagaaaactcttgcatttatataaaaccggagcaatgttgacattaaaacttggcaaagatagcatcaaaattaaacacataaacattacaaaaaccactgccaataagtataacttatggatataactgcaaaaattccaaaataaaataatacaaaatccagctgcacattaaaaaaatccaaaattaaaatattaacaaattcagctgtgcattaaaaacacacaccataaccaagtcaggacattttcttgtaaggatagttcaatattctatttccttttgctaattctgctgttaatatgaytctactagattgttttagcatatcttaataaggaaaatattgattatattaaaagaaagtgctggaaatttctacttctattgccaaaacaaacaaacaaacaaacaaacaaaacctgtgaattaggtagagatgcatactttcttaactgggtaaaatatacatgtc

SEQ ID NO: 475993 - DNA, 631 bp, Homo sapiens
aatgccaagaacatctgtgaaaaacaatgtccctgtttaagtccyttgcaagcattaaatttttacaaaataatttatttcttttgtaaattatatttctagttgcaatggtagttttactaaacatagacacacacacacacacacacacacacacacactaaattatcttctttagaagtaaagttgtataaaaaaatgaaaattgttcgttatcgtcatgaattgcattaatataggtggctttgtgggacaataatagaaattgtcctgctttttacccagctatttagctaaaagcatttcaaaacttctagaatataaaaacataatagaaaaacagaaatagcatattttctagaatagattacttcttccttcacagcacttatggtgaatgcaaagtagttaaatgtcagcaaccttcttatatttgaagaatgccattggtaagtgaaccagatttatcattaatacttaagaaatcttggttgtccagcatataataagtgagacaaggcctttggtatctacatttgttattttaactgtctgtgattcgacatctggacacatatttattgttgttctctataatatagtcaggattgtatctgtgaccttgaggctt

SEQ ID NO: 475994 - DNA, 540 bp, Homo sapiens
ctgaaattaatgcccatacacgacttgacttaatgtccagctatagtaagtgctcagtaaatgtagtcacttttctttttattagcattatattatctcctgaacaaggctcactcctycagagctttgtgtagcctttaaatctcctttcctgcactttgcaaccaactgctctgtcgaccaacacttaatcaaattaatcctttgtccaaaagcaaatctagagagggccctcgggggatgctgaggcttctctcctcctgcataaacgcagcctgtttcttcattccctccgcacttggcctgatttcaacccccttcccctcataggctgctgttgcttggacatactccagtttgctggtgtcctcactgggtagactctgctccctgctctttcagcccaagtggtctgcctgaggacttggcagtagaactggacaggatggtggaagcaactgaggcttccaacagaagaaaaccaggcacaatgtgtgttagtctctggagcacgagcaaatcaggggtgtccatcagata

SEQ ID NO: 475995 - DNA, 540 bp, Homo sapiens
ggcacaggggaacaaccgaaacccagaagaaatgcaaggaagcacacatatatcagkatcattttacaagctccataattgaagctttgtatcatcgtcgggtcagattcattatcaaggctttcattcaggactttgaacttgagcctcactcacaaagtgctgagtgaggaagcagttttaagtgcggaaggcaggcagcaatttgagattcaatctggtctcccagatgagaagcctgtgccacctcccgcccacgcacagaggtctgttgcctcccagcaagagagccgccatccccaccaacgcgaccactcacaagacacagccccaccgaggggagcatcccgacatcaccccatgactcagcctcctgggactactagcctagcatgatgacgtggtgcatgaagtgcctgtatcaaggagagccttgggagcacatcagtcacccgactcaccaccagcaatgactgtcacttcccctacaagcttcgctaaggatttacaacagcagcgataggatctgacacaggtgga

SEQ ID NO: 475996 - DNA, 540 bp, Homo sapiens
ggcacaggggaacaaccgaaacccagaagaaatgcaaggaagcacacatatatcagtatcattttacaagctccataattgaagctttgtatcatcgtcgggtcagattcattatcaaggctttcattcaggactttgaacttgagcctcactcacraagtgctgagtgaggaagcagttttaagtgcggaaggcaggcagcaatttgagattcaatctggtctcccagatgagaagcctgtgccacctcccgcccacgcacagaggtctgttgcctcccagcaagagagccgccatccccaccaacgcgaccactcacaagacacagccccaccgaggggagcatcccgacatcaccccatgactcagcctcctgggactactagcctagcatgatgacgtggtgcatgaagtgcctgtatcaaggagagccttgggagcacatcagtcacccgactcaccaccagcaatgactgtcacttcccctacaagcttcgctaaggatttacaacagcagcgataggatctgacacaggtgga

SEQ ID NO: 475997 - DNA, 540 bp, Homo sapiens
ggcacaggggaacaaccgaaacccagaagaaatgcaaggaagcacacatatatcagtatcattttacaagctccataattgaagctttgtatcatcgtcgggtcagattcattatcaaggctttcattcaggactttgaacttgagcctcactcacaaagtgctgagtgaggaagcagttttaagtgyggaaggcaggcagcaatttgagattcaatctggtctcccagatgagaagcctgtgccacctcccgcccacgcacagaggtctgttgcctcccagcaagagagccgccatccccaccaacgcgaccactcacaagacacagccccaccgaggggagcatcccgacatcaccccatgactcagcctcctgggactactagcctagcatgatgacgtggtgcatgaagtgcctgtatcaaggagagccttgggagcacatcagtcacccgactcaccaccagcaatgactgtcacttcccctacaagcttcgctaaggatttacaacagcagcgataggatctgacacaggtgga

SEQ ID NO: 475998 - DNA, 519 bp, Homo sapiens
gactttcttagtctgccgacacatcagatagtgcagtggccctctgttgtgtttgtttcttagcattatgcctttcacctscttttggtaacatcacctgcttttcttctgtgcaacccatcccctccccacctcagctttcagtccatgtggttccgatggggctgattccatccactcttctcctccagggggggagcacaatgctcaggcctgtctaattggagtcatggtgatgaatctggatttgttcatggttcagtttgggccattaagagacagccctgggacttttgctaacataattggtggggcggtggggaggggtgaggggaaacacatcttttccagtgtgggtgctaagctgataagatgtaaatctggagttgctggtggctatttttgcaccttatagaaagagttttcctgggaatgagggaataaaatcaatacacaggacagcagagcagagaatggagagtgtgacacattaccagtgacattactgggcccctggaa

SEQ ID NO: 475999 - DNA, 519 bp, Homo sapiens
gactttcttagtctgccgacacatcagatagtgcagtggccctctgttgtgtttgtttcttagcattatgcctttcacctccttttggtaacatcacctgcttttcttctgtgcaacccatcccctccccacctcagctttcagtccatgtggttccgatggggctgattccatccactcttctcctccagggggkgagcacaatgctcaggcctgtctaattggagtcatggtgatgaatctggatttgttcatggttcagtttgggccattaagagacagccctgggacttttgctaacataattggtggggcggtggggaggggtgaggggaaacacatcttttccagtgtgggtgctaagctgataagatgtaaatctggagttgctggtggctatttttgcaccttatagaaagagttttcctgggaatgagggaataaaatcaatacacaggacagcagagcagagaatggagagtgtgacacattaccagtgacattactgggcccctggaa

SEQ ID NO: 476000 - DNA, 519 bp, Homo sapiens
gactttcttagtctgccgacacatcagatagtgcagtggccctctgttgtgtttgtttcttagcattatgcctttcacctccttttggtaacatcacctgcttttcttctgtgcaacccatcccctccccacctcagctttcagtccatgtggttccgatggggctgattccatccactcttctcctccagggggggagcacaatgctcaggcctgtctaattggagtcatggtgatgaatctggatttgttcatggttcagtttgggccattaagagacagccctgggacttttgctaacwtaattggtggggcggtggggaggggtgaggggaaacacatcttttccagtgtgggtgctaagctgataagatgtaaatctggagttgctggtggctatttttgcaccttatagaaagagttttcctgggaatgagggaataaaatcaatacacaggacagcagagcagagaatggagagtgtgacacattaccagtgacattactgggcccctggaa

SEQ ID NO: 476001 - DNA, 519 bp, Homo sapiens
gactttcttagtctgccgacacatcagatagtgcagtggccctctgttgtgtttgtttcttagcattatgcctttcacctccttttggtaacatcacctgcttttcttctgtgcaacccatcccctccccacctcagctttcagtccatgtggttccgatggggctgattccatccactcttctcctccagggggggagcacaatgctcaggcctgtctaattggagtcatggtgatgaatctggatttgttcatggttcagtttgggccattaagagacagccctgggacttttgctaacataaktggtggggcggtggggaggggtgaggggaaacacatcttttccagtgtgggtgctaagctgataagatgtaaatctggagttgctggtggctatttttgcaccttatagaaagagttttcctgggaatgagggaataaaatcaatacacaggacagcagagcagagaatggagagtgtgacacattaccagtgacattactgggcccctggaa

SEQ ID NO: 476002 - DNA, 552 bp, Homo sapiens
ttgggcccaggcacaatcgcagacatgctatgtgacctctggcagggagcttagctttgctgagcctcagtttccatgtctgtagaatgggcatgagaatagctacctcacagcatcatggggaggattaaacatgagctggcactggaggcatcccataaaccacaagccactaataaaggtgagggggagrtattattgccctgggattagcggtggcccagttcaaccactaggaggagagacgggaaggacagacgcagccggcaggagcccaggtttttccagttagggtgtgtgcatgtgggtggggagaggtggaaaggagcacaggaaggaaggtggggcctctgttgccagctgctgagtcaccctcctctttattcttccttttacgttaaaaaaaaaaggtcttaattactttttctgcttacaaaagtggcacatgctcatcgtataaagttcaaacaacatcaaaatatacagtgtggaaggtagctcgtttcccatgcttatgctccccagatggaaccacagttgacattttggtgt

SEQ ID NO: 476003 - DNA, 610 bp, Homo sapiens
ctgctgagtcaccctcctctttattcttccttttacgttaaaaaaaaaaggtcttaattactttttctgcttacaaaagtggcacatgctcatcgtataaagttcaaacaacatcaaaatatacagtgtggaaggtagctcgtttcccatgcttatgctccccagatggaaccacagttgacattttggtgtatgttcttccagatttttctctggatgaacagatgtctatttactaattagagaagcagataccttgaagataatttaatttaatttaattaattaattaattwatttattttttgagatggagtctcactctgttgcccagactggagtgcagtggcacgatctcagctcactgcaacctccatctcctgggttcaagtgattcttctgcctcagcctccaaagtagctgggattacaggtgtgcgttgccatagccagctaatttttgtatttttagtagagaaggggttttgccatgttggccaagcgggtctcgaactcctgacctcaggtgatctgcccaccttggcctcccaaagtgctaggattacagacctgagccactgtgcccagtcctttgaagataatttaaagtg

SEQ ID NO: 476004 - DNA, 646 bp, Homo sapiens
ccattcttcccagtggactcagttctgaaccactaacccagaccaggaagcagagtgaccacaggtatctcrcagcaggcattgccacaaaagaatctgaacacatttatcctcatggttttaagcccacattgtcaaaggctttgaagatttgaggcaaaatgcgaggaaactgctgaggaagtataagtaggtaaaagaatgtcagtattcaaagctgcatttggtcaggacattcaggagaaaatgcttgggcagcctcacctcccacttccacttcctggccaatcgcatatgtatgcaaatatacaaagccacaacccaaatcccatctttatgactcttaaaatggggctttgtttcagtagataaagtgccacatgctgaattagcaacaccacttcctgtggtatctagactgatctttcactcaagaaatgaccctgtctgaccctaatggttggagaacaatctcatattgttaggaaatcgagtgtcattttccatattacttccttcattcacatcatccataattatctcttctaatttccctgtgtctcctggtttgtccttccctgccatttttagtgaaattcaggacctgatgccatgggggcaggtggagacaatgacaggggtaaat

SEQ ID NO: 476005 - DNA, 647 bp, Homo sapiens
agcacataatgtagaactggtggatcataargtcacagagctgagaggatctttaaagggttttctaacctatgtcataaccctttggttcagcccttgaattagctttgtcttaagagtcccttctgttttgaaaggagatgacctccagttgcctttggtagcttaattctgcctttaatgctccctgtcggataaagtgaatcatgttgctgaatgtgttctgttgttgctttgctttacctactaaaaatattacatatcatacaaggatatctaggaagggttgagatctaatgtatagtttatattgatgtttatttattgagagtaattttacagatacaatttatttttatatatctacttgtctgagcaatgaaaaagggtttttattgttgttttgttttagttctgctatgaaggcaaagctaatgtaggtgcaagcttttttggatcccatttaataatatatcctaaacatagaccagctagtgttgcccttaaatttctaaaatttgtatagtggtgacattatgacaaaattttaaaaatacagtgtgttaaaattagagaggaagtataattagcattgccaagatatatttttgtttatttgtgttggccttatttcagttggcaaaatt

SEQ ID NO: 476006 - DNA, 647 bp, Homo sapiens
agcacataatgtagaactggtggatcataaggtcacagagctgagaggatctttaaagggttttctaacctatgtcataaccctttggttcagcccttgaattagctttgtcttaagagtcccttctgttttgaaaggagatgacctccagttgcctttggtagcttaattctgcstttaatgctccctgtcggataaagtgaatcatgttgctgaatgtgttctgttgttgctttgctttacctactaaaaatattacatatcatacaaggatatctaggaagggttgagatctaatgtatagtttatattgatgtttatttattgagagtaattttacagatacaatttatttttatatatctacttgtctgagcaatgaaaaagggtttttattgttgttttgttttagttctgctatgaaggcaaagctaatgtaggtgcaagcttttttggatcccatttaataatatatcctaaacatagaccagctagtgttgcccttaaatttctaaaatttgtatagtggtgacattatgacaaaattttaaaaatacagtgtgttaaaattagagaggaagtataattagcattgccaagatatatttttgtttatttgtgttggccttatttcagttggcaaaatt

SEQ ID NO: 476007 - DNA, 591 bp, Homo sapiens
acttcaccaatgttgttacttacccataaatgtctacccgtaaactgagctacctgctcccacctmttaagagagtcttagaatactagtcatattaataaccctattacttttgttatagtgaattctaaccttctcctgagcattctaagttctttcgtatcttcttatttgctgttccatctactgatgatcacatcttcaaataatgaacttctctttgtcctttaggaccatgcctttagaaaagccttccagaccttccgagtccccaacagttcatatatgccattaccaaagtgcttaatactaaattttataatatttgtttacaaatctgcctcatttgtagattgtgagccccaaagtcagctagcaggcaagttactgaaaggattaggcattcagttttcgaattgcgtgctacttagcaagaaagtttataaaaaattgaaaatatcttttggctagattgtttttcattacactttcatatcctcaaaggcaggcattgtattttctcatctcacgtcccagaaaactagcacttctgaaacaatgcacagtaacgtttgctccgtgaatgaatga

SEQ ID NO: 476008 - DNA, 496 bp, Homo sapiens
taatttcagataggagttagagaaaacatagtacctacattttgattgattggatcacagtcaatgttcttgtcttttagtttaaccatatattcaatcattttgtttatctttgttacacataaaccagagtatattaattgaattagataaataagcttaagaatattgcatttcttataatagtttccctgcttatttggctattttcctagctttttagagctactaagcatgacattacttagcatcataaattatgcaataacagcgtgatccattgggtgaaattttgaagatttccaaayggttccttgtagaattgcaatacacactgcccacttttcaagtagattgttgtaaatttcctcacttatttaactataacatattttgcaccactaatacaatatttccaaaaagataattgtgaaaagtcattgtggaattagttccttataataattttcccaagggtgttaagaaagaggtttga

SEQ ID NO: 476009 - DNA, 604 bp, Homo sapiens
tattttatagaaagttctattccttyttagcagtgtaccacatctatattaaatgagaatatgatgtttgtcatcttcttttctcagtatcgggaaattagtcatgataacatagggaaaattttgtataacattgtgttccctgtgcaatgtgtttcacatatccactgattaactcacctttttgaagtttttgctcagagctcaccttctcaataaagcctgcacctaccactcagtgtaatattgcaaactccactccaccttgtactcctaagtcctctaatcctctctgctttactttgccctagtacttacttatagcctttagtaattaatcagaaaaaaaaatgttatttattggtttattctttttactttttgattttctatctctctcagctagaagccaggacccacaacagaagagatgccattgatacaactcacctttcatagcatgcctagcctctaacggatgttcaataattatatgcttaattaagtaataaaaattgcactcattttcccccaaattttattcttttcctaaaaaggaaatattttcaactttttttacagtatctcactgtaagtcagcata

SEQ ID NO: 476010 - DNA, 580 bp, Homo sapiens
gcctgtcttcctccaccaccaaccctctctctttcactaatactgtgtttctatggctgctgtaacaaattaccacaaacataatggcataaaatgacacagatttggtaacttacagaaagatgaaatggttctcaataggctacaatttatgtatcagcagggcaacctcatttttggaggtcctaagggacagtttgctttcttgcccttcccagcttctagaagcttcctgcattcttggtttgttgtccctttccatcttcaaagccagcaatggacatttgagtctttctaaaatcacatatttctaatcctgactcttctgcctccgtcttccccatttaagagccctatgactatattggtcccaactaaataattgaggttgatctctatattttaaggtcagttgattagcaaacctaatgccatcttatacctttagttctttttccgtggaagataacatattcactggttccaggaattaagaaatggacatctttggggttcattactatgcctaccacaactactrtataccatatgaagtctgacccaaacttatatgattctt

SEQ ID NO: 476011 - DNA, 645 bp, Homo sapiens
aaatatttcccctgtggtgggtcgataagatttgaagaatatttttaattcattgtcaatatgctagaacagattctggatccatgatttcttcttcaaactataattccttcctgattgttctatatctggtagaagaacaaccattgccccagtgagccaggcgtgaacactcagagtcatgtctctgcctcccacatctaatgaatcatgaaggcacttatgcttctgaaatatcttgtgtaactgtcctcttttcagttgccattgccactgtcctagttcatgattttgtctgttctcatctggaatgtgtcagtagcttattaagttatgtgcctgctgtcaatttctctctcatctccagtctatgcctttcaccttaattataaaagctagcacttactaagcactaactacatgcaccatagcaagcactatgtgtaaatgatctgctttctcataaccatagttaacatttactattaacacagatggtatcactgcagatgagaaaattgagacttygaggggttcattttcctgcagaaatcaagggcaagcactgggacagaaactcaagtggtctgctctgacattcatactcttaatcacaacactatttgactcccatcatggcccagt

SEQ ID NO: 476012 - DNA, 583 bp, Homo sapiens
taagttatttgttcaaggatattcaatgggtagagttatttattcagatccacaatttttactccataaagaaatgaattaaaataaaaactattcctaagcttgattatagctatttttacagagacatgcaacaatgaagtattagcacttaatatggtagccatatatatgaatcaacaatatgttaacctgtaggaataccaattatctttagatacagcaaaagtataaagtgagaaacttaatttagcaattatatcgtttcatttttcataaaagttatttactgcttatgagatagtattatttactagttaagtggtcattactactcacaagttaagtggatctgcacaagaccattcaaatctgactgtaattcaaaaattgttgaatccagtgtatttstgaaaacttgttctttgaaaaaaatcaatttgagagaatatataatgaaaggtttgcatgactactatttacgataaattttaagattaatatttttgacagtctatcaaaaccaaccagatcaaaaaagcatttttttttttaatccaagttgttggtattttctaaccca

SEQ ID NO: 476013 - DNA, 637 bp, Homo sapiens
atcatttccattttatgctaattgtaataagtcttattgattatgatactcatccagacagtttaaactacattgtaaacatcagaatggttaagcctctttatctcctataggtgcaggaggacagtaaggtatgattcaaaagtaacacgtgagtcctgggttgtgaatggaacctaggcagagacttcaaatcccgcagccttctactgctttatacacatggcgttggcctctgctggcttgggtattgccatattactcatctatcgtctgcctgtatcacttcatcacctacaagtgaagtaaccagaagagagaagtcagcatgggctttctttcaacaaaagtagaccastattccatggtgtatatgtgccacattttctttacccagtctaccattgatgggcatttaggttgattccatgtctttgctattgtgaatagtgctgcaatatacatacatgtgcatgtgcctttataatgaatgatttattttcctttgggcatatacccggtaataggattgctgggttgagtggtatttctgtccttaggtctttgaggaatcgccacactgtcttccacaatcgctgagccaatttacactcccaccaacagtgtaaaaagcatt

SEQ ID NO: 476014 - DNA, 412 bp, Homo sapiens
tgcccctctgagtcaggcttcagtttccctgtgtgtgaaattgacctggcgctgggagaggctggtggaggcgcggattttgcagtttccctacaacattctggaagcctgtggttctgggaaaggttggcgtggagaagactgggaaacaaccagtggtcaccagagctgtagcacctcctccacctccgagctctggggctgggaaccccaggcttcggggcccctgtggaggacgcaggtggccccctctttcctgacatctcaggagagggaggggyaaccggctagcagaagaaaagcacaggaaggttatacagccaggtggggaaggggccaaatccctgaacaaccccttcccagagttcctcttcaagtgcagggtacccaagagtcaaggccccgccccctt

SEQ ID NO: 476015 - DNA, 412 bp, Homo sapiens
aaggggacggggacttgactcttgggtaccctgcacttgaagaggaactctgggaaggggttgttcagrgatttggccccttccccatctggctgtataaccttcctgtgcttttcttctgctagccggttacccctccctctcctgagatgtcaggaaagagggggccacctgcgtcctccacagtggtccccgaagcctggggttcccagccccagagctccgaggtggagggggtgctacagctctggtgaccactggttgtttcccagtcttctccacgccaacctttcccagaaccacaggcttccagaatgttgtagggaaactgcaaaatccgcgcctccaccagcctctcccagcgccaggtcaatttcacacacagggaaactgaagcctgcctcagaggggc

SEQ ID NO: 476016 - DNA, 542 bp, Homo sapiens
cataaatggcttgggcacctctttggatctgctcagttgtaaagctattgagactttcagactcagttctctggaaacataartcagcaccactctggctcagactctctttcaagattagggtggtgacaaggacagcttgtcctccatggatggaaattctcaaacaattccacttgtaaaattgagaaagtaactgtctttcagggttgttgcaaagacaataaaagcacataaaaaccccaaacatggtaacggaaacttagcagagagtaaaaaaaaaaaaaaaaatctactaattagtattatttactttccaaaggcacagtttgaatttcagaatttaagggacttgaatggttattgaaccaaagattgtatattggggggactgaattttgcctacagccatgttttatttgttctatgtgtttatttgtttttcgtatgtactttgtttttacagattcagcttagttggcaatgttttttaattgggagattccatacacaaatctaaattaaactattctcttattgat

SEQ ID NO: 476017 - DNA, 542 bp, Homo sapiens
ttcatattctcacagtaagtgcaaaggtaaaaaacataacaacaacaaaaaaaaaacacctgatacaccctgatatgagctcattgactgcatggccaggcctgagtcacctgcctaactctccagtgacagatgattttcactgggaggacgtgatggagaggatggtcctccagatagaaacagtgatacatttacaagaggagtgaatatgtgatgagtgggagaactctgtatgtgtgtatgtttatgtgtgtgtgtgtgtatatakatatatagatagatataatatataatatatattacatataaatatatatttttatatatgtatttctatatacacagagagagagaggagagagaaaacagggacagacaaaaaaaaaaatgacacagagaaagactgccaggttctaagataataaatatagagacctctatgctttttctctaaggaaaatattgggtccaccttttgtactatatcctttttaggaggtcatgaatgatttcagcattaccttgggaattagtttagg

SEQ ID NO: 476018 - DNA, 590 bp, Homo sapiens
ttaacaataattagaaccttattcccatttattggctaatgaaccaacctcaaacatattcaatcgcacagaaattgtttttctgatgcatttcccctttcaaagaagcttctctttattagagacaaagggtaacatgatcttttaggtcagcacgcatatttgttcttcagaaacatcaactattttgatgactaggaagtggggtactgcatatgtaccaccagcacaactacagagaaagttgagtaaagctgactctgaaaagtcttaagtgcctagagaaaaaaggaattgactgacaaaaaagtgcctcgcactacatgatgcaactctcattattcacamtgaaggaggcttttaacctccaaattcatattcttcatttcctgtgcagtggtccttcaatttcccagcctccaggtcttttgggtcagatccccttaaaccctggcatccaaagctggctgtgaaagccactgacctctatagctctcttaactggtcattctaccattcttctaagtgaatgattcgtttctgcaaatacagtgctttctctaagcctccaagaaacagttaatgctggt

SEQ ID NO: 476019 - DNA, 590 bp, Homo sapiens
ttaacaataattagaaccttattcccatttattggctaatgaaccaacctcaaacatattcaatcgcacagaaattgtttttctgatgcatttcccctttcaaagaagcttctctttattagagacaaagggtaacatgatcttttaggtcagcacgcatatttgttcttcagaaacatcaactattttgatgactaggaagtggggtactgcatatgtaccaccagcacaactacagagaaagttgagtaaagctgactctgaaaagtcttaagtgcctagagaaaaaaggaattgactgacaaaaaagtgcctcgcactacatgatgcaactctcattattcacaatgaaggaggcttttaacctccaaattcatattcttcatttcctgtgcagtggtccttcaatttcccagcctccaggtcttttgggtcagatccccttaaaccctggcatccaaagctggctgygaaagccactgacctctatagctctcttaactggtcattctaccattcttctaagtgaatgattcgtttctgcaaatacagtgctttctctaagcctccaagaaacagttaatgctggt

SEQ ID NO: 476020 - DNA, 583 bp, Homo sapiens
atggcgctgtaaagaaatactaaacccattagaatagcaggtttcatttaccagaagatattaaaatcctgtccatgtgatttccatcatgaaggttttcactgaaataataaaaaatgaatgaaggaaatcaaatgtagtcatctagttaaatattcattttccaatctttagagagctgttcatgatactttgaacacctggcctttactagagtgttgcctgattttaaacctgttctcataccatagcaaattccaggaaggccaccagttaatcccataattatgaaaagccaaaataatgaagtgtccttyttctgaatccaggagtaatggaacaaacctttgattctagtaaaaaaaaaaaaaaaaaaaaaaaacctggagaattctttcagtgcctgggccagaggcaagtgaagctccattggttccaaatttaaggagacactcactcagaggtgtggaccctccatgttcatgaagctgagagaaagggcctccttaccttttgccccagaggcacctcatttacttcattctagtcctagccctgagtcctctggcatttgtggtaatca

SEQ ID NO: 476021 - DNA, 583 bp, Homo sapiens
atggcgctgtaaagaaatactaaacccattagaatagcaggtttcatttaccagaagatattaaaatcctgtccatgtgatttccatcatgaaggttttcactgaaataataaaaaatgaatgaaggaaatcaaatgtagtcatctagttaaatattcattttccaatctttagagagctgttcatgatactttgaacacctggcctttactagagtgttgcctgattttaaacctgttctcataccatagcaaattccaggaaggccaccagttaatcccataattatgaaaagccaaaataatgaagtgtccttcttctgaatccaggagtaatggaacaaacctttgattytagtaaaaaaaaaaaaaaaaaaaaaaaacctggagaattctttcagtgcctgggccagaggcaagtgaagctccattggttccaaatttaaggagacactcactcagaggtgtggaccctccatgttcatgaagctgagagaaagggcctccttaccttttgccccagaggcacctcatttacttcattctagtcctagccctgagtcctctggcatttgtggtaatca

SEQ ID NO: 476022 - DNA, 605 bp, Homo sapiens
tagttgaaactttctggcttatcttcaaatttaataatagtttaaggggcattgctttctaagacccccagacatgttacacatttcagtgatgccactaagatgctaatataaaatggcctgaggcacaaaattttgtactcaaaagtaattcctaagaaaagtactatcaaaacaaagcacagaaaaaccttttcctgttatcactgaaagtttcaactacattttatttaaaatttatttcaatcaaaagtatttttagagacccgttattgagattaattttgtacctaaattagcatgtctttctactgcatcaatttagctaagctggaacgtcattttctgaaattccyctccttgtgtaggtctgtgttagaggtgtccataaaagaaatttgtatgagactagtaaggcagaagtgaagtacatttaaaaaaaaaaaaaaaaccactctgaaaatcagcaaatgacaaggaattattgcagcttactcactttttcacagataccttagctcatcttcttggtgcaggacagaaggtattactgtagccccttcagcacccatcagcttctcctttagctttttccaatcatgggc

SEQ ID NO: 476023 - DNA, 526 bp, Homo sapiens
ttatgatttgcaaaactataatttactcaaatttgaaaaggcaatgacacagtatgtcataaaatatacagatgcacccaccaaaataatctcagctccttaagcacttacaaagtattttctatttaattttatgcatgcccatatatttgtaatctatctgagatttctgtatgtttgagtctgaaataagttcagttccagctgagtgagatgcctgctgaatgttaatgagacagattttctattttaatatgtgtttttgtacaaactgattatattaaagtatgttgtaattgaattattttccagactattatttaggagtacttgttacttttgagctctggttttttaacataccaatagtgatgttgaaatgtttaaaataacacagtttgtaaaagaaaaaagatcctattaccagtaaaggttacttgtataacacrtaaaaatagacttcttggaggattttatagttctatttggaggttgtttccctgtgcttttccattgcagcaaaatt

SEQ ID NO: 476024 - DNA, 614 bp, Homo sapiens
gcgagtagagtttggaaaaacattttgaatactttagatctgccaaatacttggttaaagaatgatatcctttaatttcttgagccatgtgtattttaagtgcaatgtaatccatatgtctatgactcatttaaatgcaactcagtgaagcatggtttactaagagcattgggataccatctaagcctttctaagctgctctttgatccaggaaattgaattttgccaacaacaaatgaagctcctgacaagagagggtcaaagagagctgtcctttatcctaggtaagatgttaaagtctactcttgacctgggaggaagctgggagggtggaggtggggagagctccactgcctaagtggtattcatagttttgctttgggtctgctactatttctaccaggtatccttgaaaaagaagtgcaggaatagagatgcaactaatctgccccgtgtgttgctgaaaaattcctttcctgcctgctaattctgcccttcctcaattccaccagtwttatgcaatccaaattgtataatggacttgaggaaaaacgagaatgttagggagctagattactccattagcactgaatgttaattttccagattgtagc

SEQ ID NO: 476025 - DNA, 601 bp, Homo sapiens
ggttgcatttttgtttttttttgagtttctgattagcccctccaaaggaggcaatcaggtatgcatttatctcagtgagcagaggggtgactttgaatagaatgggaggcagctttgccctaagcagtttccagcttgacttttccctttagcttagtgatttgggaggctcaagatactttgctttcacaaggccatggagatatatatgtatgtatgtatgtatgtatgtatgtatgtatgtatgtatgtatgtatagttttttttttttcttattttctagaacttttcttgttttcctttcacagttaaatctgtagtctacctggaattgagttttgggtatggtataatgttgcgtcgttttccatagggatacctagatgtccttttctcactcatttagtgycaccttttatgtaaatcaaatatccacatatgtgtgtgccagttttaattttcatgtttttgatgaataatgatgttgaacacttttccttatgcccttatgcttattggccattgctttctgttttttctttaataaagtatcccttaaattttgtgtgcctgttgttaaactcctgttattactgtaac

SEQ ID NO: 476026 - DNA, 581 bp, Homo sapiens
aagtcaccagaacagtaaatattgtcataagactccctccaaacaggatactgatcttgcttttagattttaaaagacttttttatttttcaaaattttaattaaatacttgtgagtcaattgctgtggtattatatagtacaaatggcctagacttagaatttcaagattgcctggaatttacagcatgcgagttataaaatctgtaaaagtatatgtcactattatgctgcctttccatttgtattgtttgattattttgcttcagttgctgtgcaaatatgaaagggatattaaatattcttataatattttataattttcaataggaggtctacctatataagtactttcacatatacaatkgatattcaccatttgtggattttgtattttagaattcacccacttgctaacatttatttgtaaccccaaaatataattgcagtgcttttgcagtaatttgtttacatgtgcaaagcaatgaaaaatgtgagttgcctgacgcatatgttcctagtttagatcaagcaaggtctaatgctttgccttcttgttttaattctcatactgttaacaaa

SEQ ID NO: 476027 - DNA, 571 bp, Homo sapiens
gatataggggctacataccacctggggagctagaggctgaacagtcaatcaggaaactattctgaaggtccagacaggttcctgaattttcatctacaattcaggggtttgtctgtgttggtgtttaaagccacctgtagctctgaagttctacagcaagtaagcatctgctcacattaggctaggagaggattaggaaggaaatgaaagatatgtaagataggggtcctcaacaaacagtgactgtccaacaaattgagcttttggtagagattcagagagtttagctgtagggatgtattaaacttcatagatccttgataaaattcttacagtacttttagttgtttctcactgaaatgttagaaccatgtaccactccccagaacccaacttctgtttcttaaagtttctcctsctgtattccctcttatttagggctctccagtcacaaagtatatatgtgtatatatatttgaaacttacaatgtctaatacagaattgaacacacactacacatcatcatcatcatctttatagtagagataaaggtgttattaaccagccaaa

SEQ ID NO: 476028 - DNA, 640 bp, Homo sapiens
aatgaacatattttgttagctcactcacttcaggagagctgtaattcactttaagaaattagagatttcctttgaccaggcctatgaggatgaggtggaactaaaagctgtcaacagtcattctttccaaattgctttgrccattctgcacaggtttatgcacatagtgcactcagaagcagtgaaataattccaaaagcatggagctgtatcaacggatcccagtgaaatgcacaggcaatatttggggtcatagatgaatttatatcagcaaaactttaacccatgttccctgagctactcgcaactcttagtgtggactttttaaagacatggtcacgctgaggtcggtgttgtggtaaaaggtacattgcattccagaaagatgttattttgattcacaaaatgtgtatttagtaagacttttttccacaagtaatagagattctccttggcttaaataagaatggagaatttattttaaagacacaggttttacttgaactttaggtcaagacacagccagttcttgcaagaactggacacagtaagctaggtagcattctttctctcctgcccctgtgtgtgctgctcggcactgggatctttgccttggcagccacaggcctcccaatagcag

SEQ ID NO: 476029 - DNA, 490 bp, Homo sapiens
gggaagcttgacttgtaaaataattttgctttgatgatctcacccaacctattgattttttttgtcaagagttttattcagaaaaagcatgatataaaagatgaagtcaagatgagcagcagttattwaaccacattagaacccaggtctgtagtttcttttgctggagacatttacataagcagacatcatctttaatctttgtttatattgtcacagtcttgtttttagttcttttgcctcttaaaactaagctgtgattattagttggacatttttactggcttattcattccagttgggatttccttccaaccttgcctgggaaatccagttactaatgcaactacagagaatggtaagttcaacttccactaaagtagccatttctgtttatcaatttctaatttgtgaaatacagagctgacaactggagacacataaatgaaggagtctcttactacctgatgcagagagctgtctgtgctca

SEQ ID NO: 476030 - DNA, 544 bp, Homo sapiens
tgttcccctccttcctgcaatgctcttcccttacctctttgcaaacatcactcctttgtagcagttgtgcctcagcccaaatctcacctctctgtatagatcttgcttcatcacctcttctaaatagtgacccctcatcagtctgtatcacatcactctgtcttatttcccattctttaattaatctaaaataattttctttgtttatttgtatatatgtgtggctgttttagtcaatgtgaattccctgaaaattaggacatgcttctttgtgcccaaaagccagcagagtgtctgggacatggtagatgcttaataaatatttgataaataaatgaatgatgagtgcttgatgagggcatatgacctgcagcaggggctgaggaggagctgaacccaaacagagatgtgactgttgggtcaccctgaactagttgctcccctgcctgggttgctgtcttctaaggtagccatttatcctctgccactcacamtattttctcctccaccctaatgaggacactctatctatccacagcccaca

SEQ ID NO: 476031 - DNA, 632 bp, Homo sapiens
tgcctgacttttggtaggattttctcccccatcagatcacctatgcctttcaaaaattagctgtaagtttggtcatgcagattgactaaagaaaatatggatgcacgtccctctaaagatgtcacaaatgtatttacaatgcccactttacatctccattctcaccctggcctagggctctgccactgctcacctgtcactgtagacttattgcactttatcacttgcctttgtcactttaattcatccctgcctccaccttgcccactttccctttttccgttctcatccatccttcatctagcagccaggaagctcttttgaaaatggaaatcacatcctgtcaaacagatcccctcaagcccctcatgctttctcatcatgctttgaataaagtcccaactcctttgcatgacctttgagaatctgcactgtctaagcgctgttgacctgaaaaaccttatcatttccctttccctcatctgctgcttctgcaacataccacacctcccccgatgcggttctcactgcccamaactcttctcccctacttttgcttggctggcttcttgttatcttgcaaggaccaccttaagcaggtcatcctgctgttctcggtcacaacatttagt

SEQ ID NO: 476032 - DNA, 621 bp, Homo sapiens
gtaaaacgtgtttttgcacagttcctggccctgtaaatgactactattgtttctgttgctgcagttatctgaggctatattgttattgttttataaataacattatctggccactaagaaagataagagcaacatgcagtggaaaattgtacctctcagttaataagaaatgcagaatcacatgtagcttctagttgagagactaagaatagctgtagttaagtttctgcttaaaaataactcatgcatttttaggctatcagaaccgaaggtgctttagagagcatctttatcagttgtgctaatttatagaaatgacatttccaggaccaatcacytaagctggggctcaaatcctggtctcctgacccttgtccatcgtatttcctactgtctcttgagctgctgctctttttttggatttaaccacactgcatcccttctgctttcccattagtccctatagtcgctgggcaccatctgaagatcctgctttgtccagtaccaataagatgatgataatacatcttgctacacagacagtgctgagatgttatttctgtatgcagagaagtttccactccactctaactgtcccttagcgtcagtcctacatgagtt

SEQ ID NO: 476033 - DNA, 608 bp, Homo sapiens
tttgcacagttcctggccctgtaaatgactactattgtttctgttgctgcagttatctgaggctatattgttattgttttataaataacattatctggccactaagaaagataagagcaacatgcagtggaaaattgtacctctcagttaataagaaatgcagaatcacatgtagcttctagttgagagactaagaatagctgtagttaagtttctgcttaaaaataactcatgcatttttaggctatcagaaccgaaggtgctttagagagcatctttatcagttgtgctaatttatagaaatgacatttccaggaccaatcacctaagctggggctcaaatcctggtctcctgacccttgtccatcgtatttcctactgtctcttgagctgctgctctttttttggatttaaccacrctgcatcccttctgctttcccattagtccctatagtcgctgggcaccatctgaagatcctgctttgtccagtaccaataagatgatgataatacatcttgctacacagacagtgctgagatgttatttctgtatgcagagaagtttccactccactctaactgtcccttagcgtcagtcctacatgagt

SEQ ID NO: 476034 - DNA, 640 bp, Homo sapiens
ctgataactgatgacttttgacttataaaaactggcaatttcatatgatccaacctgataccaaccttcccatctatctattccccaacctatacattgaccttccctcctctaataccttcctttcacaaatatgtattaagagcttgctatgggtgaagcactattggcaacacagtggaaaggtgaaagaagcatggtgcttgccctcttggaggttacacttcattgagaggagatccataataaataggtgaacrgataaatatatacagggtaacaaactgagaaaggtgttataaatgtaagaagcaatttcacaaggggtccatcacctcactgacccccattacttcaaagctcattcccaatgcattgccttcattcacaatatttgtgtctgaatggcctctcccattctctctgattgttcgtatccttaatggctgagctccaatctcaactcctctgtaaaaccctctatgattaactaattaatccattcaacaaacatttatttaacataaattatatgccaagcactatgctatgtgctggggaaacagcattgagcaagtgaggcaaggtctctgtgccctcattgagttgagttaacattttagtagggtgccagatggtc

SEQ ID NO: 476035 - DNA, 411 bp, Homo sapiens
ggcacggtggctcacgcctcccagcactttgggaggccraggcgggcagaacatgaggtcaggagatcgaaaccatcctggctaacacagtgaaaccctgtctctactaaaaaatacaaaaaattagccaggcttggtggcgggcgcctgtagtcccagctactcaggaggctgaggcaggagaatggtgtgaacctgggaggcggaggttgcagtgagccgagagcgcgccactgcactccagcctgggtgacagaacaggacttggtcttaaaaaaaaaaaaaaatcattagagaggattgaatcctgctctacttaccttacagttggaaaacctgaggttcaggtgggaaaggatatgtttaagtccatacagaccacctgagaagaacaaggctggaaactgggtt

SEQ ID NO: 476036 - DNA, 411 bp, Homo sapiens
ggcacggtggctcacgcctcccagcactttgggaggccaaggcgggcagaacatgaggtcaggagatcgaaaccatcctggctaacacagtgaaaccctgtctctactaaaaaatacaaaaaattagccaggcttggtggygggcgcctgtagtcccagctactcaggaggctgaggcaggagaatggtgtgaacctgggaggcggaggttgcagtgagccgagagcgcgccactgcactccagcctgggtgacagaacaggacttggtcttaaaaaaaaaaaaaaatcattagagaggattgaatcctgctctacttaccttacagttggaaaacctgaggttcaggtgggaaaggatatgtttaagtccatacagaccacctgagaagaacaaggctggaaactgggtt

SEQ ID NO: 476037 - DNA, 411 bp, Homo sapiens
ggcacggtggctcacgcctcccagcactttgggaggccaaggcgggcagaacatgaggtcaggagatcgaaaccatcctggctaacacagtgaaaccctgtctctactaaaaaatacaaaaaattagccaggcttggtggcgggcgcctgtagtcccagctactcaggaggctgaggcaggagaatggtgtgaacctgggaggcggaggttgcagtgagccgagagcgcgccactgcactccagcctgggtgacagarcaggacttggtcttaaaaaaaaaaaaaaatcattagagaggattgaatcctgctctacttaccttacagttggaaaacctgaggttcaggtgggaaaggatatgtttaagtccatacagaccacctgagaagaacaaggctggaaactgggtt

SEQ ID NO: 476038 - DNA, 411 bp, Homo sapiens
ggcacggtggctcacgcctcccagcactttgggaggccaaggcgggcagaacatgaggtcaggagatcgaaaccatcctggctaacacagtgaaaccctgtctctactaaaaaatacaaaaaattagccaggcttggtggcgggcgcctgtagtcccagctactcaggaggctgaggcaggagaatggtgtgaacctgggaggcggaggttgcagtgagccgagagcgcgccactgcactccagcctgggtgacagaacaggacttggtcttaaaaaaaaaaaaaaatcattagagaggattgaatcctgytctacttaccttacagttggaaaacctgaggttcaggtgggaaaggatatgtttaagtccatacagaccacctgagaagaacaaggctggaaactgggtt

SEQ ID NO: 476039 - DNA, 626 bp, Homo sapiens
taggtacaggtgtggtagctccaatgggctctgcctgtgagtattcatgccctggtgcggtcctcattctgcaatgggctgcggctgtgagtattcgtgccccggtgcggtcctcattctgcaatgggctgyggctgtgagtattcgtgccccggtgcggtcctcattctgcaatgggctccggctgtgagtattcgtgccccggtgcggtcctcattctgcaatgggctccggctgtgagtattcgtgccccggtgcggtcctcattctgcaatgggctccggctgtgagtattcctgccctggtatggtcctcattctgcaatgggctctggctgtgagtattcctgccctggtgcagtcctcattctttgaatgtaggctagtcacgcaacttgcttttggccagtggaaattcacgctgaggaacttccaatagtgggtcttatagcactgaaatttccacctgggtccctgggaatacttgtgtcatatgataaatctgactatctcaagattaccaaagtgtaaggaagtccccatgctggccatgtggagaggatggatgcggagagagaaggccctggccagtcatagcagacccagttgtcacaacacaggatccag

SEQ ID NO: 476040 - DNA, 626 bp, Homo sapiens
taggtacaggtgtggtagctccaatgggctctgcctgtgagtattcatgccctggtgcggtcctcattctgcaatgggctgcggctgtgagtattcgtgccccggtgcggtcctcattctgcaatgggctgcggctgtgagtattcgtgccccggtgcggtcctcattctgcaatgggctccggctgtgagtattcgtgccccggtgcggtcctcattctgcaatgggctccggctgtgagtattcgtgccccggtgcggtcctcattctgcaatgggctccggctgtgagtattcctgccctggtayggtcctcattctgcaatgggctctggctgtgagtattcctgccctggtgcagtcctcattctttgaatgtaggctagtcacgcaacttgcttttggccagtggaaattcacgctgaggaacttccaatagtgggtcttatagcactgaaatttccacctgggtccctgggaatacttgtgtcatatgataaatctgactatctcaagattaccaaagtgtaaggaagtccccatgctggccatgtggagaggatggatgcggagagagaaggccctggccagtcatagcagacccagttgtcacaacacaggatccag

SEQ ID NO: 476041 - DNA, 695 bp, Homo sapiens
tgcctgcataatatccccttcattattttttaaagtcagtttatattttaatgcagcaatagaatattggacagctcccaaaagtaaaattgtcatcaaagagaaactcctcactttaagactaaaaaaagcctgaattatgtggggtaggtaaggggccgggagaataatgagtgatggttgctctcaaaacagctctcactgaaaaagccatccccagattggaagacctggcccttgttcttgcttttccaaattgtcccatgaccccaagaaaatcagtcagcagttttctgagtgtccaatgaaatataatatcttgctatatgcatgcatactgttgtaacttgttcactctacagtacaattcccagacatatccttctatgtggtctcctgactccaaccttgcccctttaatccatttttcttcccgaaaccagcatcatttctctaaaaggcccacatgacacatcatctgcctgttgaaatccctcaatgacttgtcgtcactttatagtccatgctcattagcatagttttataaggytttttatgatctgtttccacttacttctacctcttccttctcctgtcccccaagactcaacatcttttatttattgcaacttacattgcactgtctcttctccaagcttccacacatgatatctctagcaagaacactctgctca

SEQ ID NO: 476042 - DNA, 622 bp, Homo sapiens
cttctttgttacaatgcacatgtaaaaactaaatggcatttttgaagaataaaaattctatctccttagttcattatgcattgtacaatgagtgccagagcaaagttttatttcattacctacgttttatagattaaataatacgattcttgtattaactgcattggtagacccacaaaagtatatacagatagatgcttaatagtttgaaattagttcaatatagagattttaaacttcatgatgcctgggagactgttaagcttgtttatatctatattctaatttcctgaatggttctttaaaaaacttttttgaactaaagttgagctacttggtttataaaattgtattacttaataacctcaactaatatttatatcttagaacctgacacagcatatctttctggctgacattgcagactttagagtcagaagcttgataccaataaagggggaaaggaaggggaaaattaacctcatttaacaagtgttaactatgmatataccataatccaagatcacacggctaacttttagaaatatagctctgaaacaggtagacaaggacctaactgtcacaaaaatttatcttccgatagaaacatacactaaatgaa

SEQ ID NO: 476043 - DNA, 582 bp, Homo sapiens
gctgagtatctcgtgacggtttgcaagtctggggacataagattccaactcacaaaagcaaataaggccaagactaataaatcaaaggtgccttcagaaaagttgcaggacctacttcccctgcctggtaggactgcggatgccttatctggcttctgcgaaaagaaaaggatcatcagggagccagaattagaaaggacttgcrcttcatcaagtttctccctgtctgagccagataaaatatcctctgggaagacttcaggaagtgcctcaagggaatgacagttgatattagttgaatgggtgaaagagcacagacagagatggaaatatttggcttttttcaactgtgaacttaaccccagagtcttcgacatttacacagactcagggcaaagtcttgctcttacaatgcatgaccacagggtggtctcaatttgtaattgggtccccacggtaaaggctgctgagggatggatttttatttttcttttttttaagttctttctacctagagacttagctgtggtaccctgcaataagaagttcaattcctcaataagtttttaattttgtagaggc

SEQ ID NO: 476044 - DNA, 582 bp, Homo sapiens
gctgagtatctcgtgacggtttgcaagtctggggacataagattccaactcacaaaagcaaataaggccaagactaataaatcaaaggtgccttcagaaaagttgcaggacctacttcccctgcctggtaggactgcggatgccttatctggcttctgcgaaaagaaaaggatcatcagggagccagaattagaaaggacttgcgcttcatcaagtttctccctgtctgagccagataaaatatcctctgggaagacttcaggaagtgcctcaagggaatgacagttgatattagttgaatgggtgaaagagcacagacagagatggaaatatttggcttttttcaactgtgaacttaaccccagagtcttcgacatttacacagactcagggcaaagtcttgctcttacaatgcatgaccacagggtggtctcaatttgtaattgggtccccacggtaaaggctgctgagggatggatttttatttttcttttttttaagttctttctacctagagacttagctgtggtrccctgcaataagaagttcaattcctcaataagtttttaattttgtagaggc

SEQ ID NO: 476045 - DNA, 450 bp, Homo sapiens
cctgctcattacctctcagagttttgaaattattccatcaaacccagaaatctgtattaatgagagtaagggtggtcaagctgtttgtaaatttacaccacattttcaaaaatggtgactaaattataatcaaccttcagaatgtcttgcttttaatggttctctctcctggagagagaccaattcttatttggtatgaaagacagaaatggaaatactagcatggcatcatgctcctaaaaagaagaaatcccatatctatactctctcatggctaagaaattgacaccaataaactcacaatattttagcatttgaatcagkgaattcattcaattatctattgctaagactatatggaaaaacagtggtgaatgagaacaaataataatatgctatcatatctgactttacttatgtaatagataaattcctattcatccctcaaaa

SEQ ID NO: 476046 - DNA, 359 bp, Homo sapiens
gggaagccagccacttaaaacacaataggcagccaaactctgagagtatccctccggctaattggagaaaactttcwtggcattctgaagggaaccaagacaggatggtgggaccacacacagatccccgatttcagtaaggataataaacagacctacgtggagtgagggtgtgatattttcttattgaagttgctgtgtttttgtgccaggtgggttccaaaggcaatactgcaagggagtgacacccgagaaagggagcagggttcgttgcgagtaactgaggattctccagcaaccacaggacagggagattatagggccagaaaagtggcagcttggaatgggggttgtatgaa

SEQ ID NO: 476047 - DNA, 630 bp, Homo sapiens
gtaggtggcataggtgcgacaatcggaaggctaatggatatatttctcctggaatctgactcaagacagttcacatatgcacaaattccaacaaagaaaagtgcctgaactcatgcatggggtatgatgagcccaattattaaaattgaggttgcttaggggtaataagacatacttcttgaatttggagtctatctgtatatgtcggtctatctattcatctctctatccatctataaatgcatatgtatgtttatatatgtgtataaatatctctctctatatatgtatacatcttatakatacgtcacagtttttatgcatgattgtgacacaccatcacaaagcagagagatcaaactgcttgagacttagaggaaagtgagaatggtcttctcttaaaatccctagcagaatcgcctttccacataaacaatgatgaagagggagctcccagggcaggtggcaagagagcaccctccgggatgtcatgtccccctttccaggcaaatgcagtagtgtgtgctcaagggcaaattatgaggtttgcttgcatctgcatacaatttaattaaacccacctacgtgtctgatggctctggatctgtggcagagtgtttgggacgtcca

SEQ ID NO: 476048 - DNA, 503 bp, Homo sapiens
tatttcttgagtgtttatgaaatgtcccctgtgtgccaggcattgtgcagaactagtgttttagtcagactatttgaggttgcagggaacagagatgggttaaaatttatttcattccaaattaaagaatccaccaagaagtttcctccmttgcagcatgtacactctaggcccgtggagaactagtcattcattatccaggggtggtataaaagtggctgtcatcatctaacagcttatcaggggacccgtgtacaacttgttaggttgacttttgttgcttctgcatccctgtctttcttctaatttctctctcttctcccttatttctgtctcagtgtttctacttattaccttgctctgtttccgtgttaagtgccactcttcctgcagtaacactatttgtgtgttttactttcaaactctcagggagagagctgactcaggcgtacaataccgttcagtacagaaggtcattggaccaaggaacattcctggaccag

SEQ ID NO: 476049 - DNA, 435 bp, Homo sapiens
ggtccctgaatgactggatggaggacagtcccctagataattcgagttcccacccacaaatataattcctttgtcttaaggccattgcctatttagatctacttgttagagcagaataattgaccctaagtaacacaatacagttttatttgttcactaaggcattgtgagatgtacagctttctataggaggaacagcatgacacagactagaaggctttgctatcagccaggcctgtgtttgaatctcagctcctccatgattgtgtgactttkggcaagccgtacacactttagtcatcattaatacggggatgtagtagtcactgttggggccttgcccttttcctttcaccttaccactaccttggtgcacataagccagatttccacggcagcacctgtatctgtctggcttgcgacactcaatttgct

SEQ ID NO: 476050 - DNA, 162 bp, Homo sapiens
gggacacacatgtctctctgagcacatcttccaatatccttgaagaccctgtaaccagcccaaactctgtgagctcattgacagataaatccaaacataaaaccgagacatgggtmagcaccacagccattccctccactgtcctgaataataagataatgg

SEQ ID NO: 476051 - DNA, 593 bp, Homo sapiens
agctgccctttcaagctctacttgttcctagtcaatgctaaggttacaaattgactaacggtcttcgtaagtattgcttttcagactccctggaaaatcatctagggctacatgccttgggaatggctttccaaatttattttttaatttttatttatttatttttttgagacggagtttcactcttgttgccaggctggagtgcartggcacaatctcggctcaccgcaagcttcgcctcccgggttcaagcgattctcctgcctcagcctccagagtagctgggattacaggcacccgccaccacatccggctaattttttttgtatttttagtagagactgggtttctccatgttggtcaggctggtcttgaactcctgacctcaggtgatccacccacctcggccccccaaagtgctgggattacaggtgtgggccaccacgcccggccataaatttcaagacccgccccccccgccaactaagtattactactagtcttgttcagcaatgcgtcatgccttcacccttttcccctcctgcacgagatgtccctatgacacagcttgccatctaaattctaggaaacat

SEQ ID NO: 476052 - DNA, 593 bp, Homo sapiens
agctgccctttcaagctctacttgttcctagtcaatgctaaggttacaaattgactaacggtcttcgtaagtattgcttttcagactccctggaaaatcatctagggctacatgccttgggaatggctttccaaatttattttttaatttttatttatttatttttttgagacggagtttcactcttgttgccaggctggagtgcagtggcacaatctcggctcaccgcaagcttcgcctcccgggttcaagcgattctcctgcctcagcctccrgagtagctgggattacaggcacccgccaccacatccggctaattttttttgtatttttagtagagactgggtttctccatgttggtcaggctggtcttgaactcctgacctcaggtgatccacccacctcggccccccaaagtgctgggattacaggtgtgggccaccacgcccggccataaatttcaagacccgccccccccgccaactaagtattactactagtcttgttcagcaatgcgtcatgccttcacccttttcccctcctgcacgagatgtccctatgacacagcttgccatctaaattctaggaaacat

SEQ ID NO: 476053 - DNA, 593 bp, Homo sapiens
agctgccctttcaagctctacttgttcctagtcaatgctaaggttacaaattgactaacggtcttcgtaagtattgcttttcagactccctggaaaatcatctagggctacatgccttgggaatggctttccaaatttattttttaatttttatttatttatttttttgagacggagtttcactcttgttgccaggctggagtgcagtggcacaatctcggctcaccgcaagcttcgcctcccgggttcaagcgattctcctgcctcagcctccagagtagctgggattacaggcacccgccaccacatccggctaattttttttgtatttttagtagagaytgggtttctccatgttggtcaggctggtcttgaactcctgacctcaggtgatccacccacctcggccccccaaagtgctgggattacaggtgtgggccaccacgcccggccataaatttcaagacccgccccccccgccaactaagtattactactagtcttgttcagcaatgcgtcatgccttcacccttttcccctcctgcacgagatgtccctatgacacagcttgccatctaaattctaggaaacat

SEQ ID NO: 476054 - DNA, 593 bp, Homo sapiens
agctgccctttcaagctctacttgttcctagtcaatgctaaggttacaaattgactaacggtcttcgtaagtattgcttttcagactccctggaaaatcatctagggctacatgccttgggaatggctttccaaatttattttttaatttttatttatttatttttttgagacggagtttcactcttgttgccaggctggagtgcagtggcacaatctcggctcaccgcaagcttcgcctcccgggttcaagcgattctcctgcctcagcctccagagtagctgggattacaggcacccgccaccacatccggctaattttttttgtatttttagtagagackgggtttctccatgttggtcaggctggtcttgaactcctgacctcaggtgatccacccacctcggccccccaaagtgctgggattacaggtgtgggccaccacgcccggccataaatttcaagacccgccccccccgccaactaagtattactactagtcttgttcagcaatgcgtcatgccttcacccttttcccctcctgcacgagatgtccctatgacacagcttgccatctaaattctaggaaacat

SEQ ID NO: 476055 - DNA, 602 bp, Homo sapiens
ggtagaaattctttttgattaattaatcagttaatgttttcaaagcattttcaagatgaaaaacattttgcgagggctatataattgttatttttcctacgcgccctggctttccacattactaggtttgtttttctctcctgttgctcaccaagccacgtatcctcacagacgcatggtagggaatactcttagagaatagagacagagagatgggttactaatgagcargcaataagaaaaaaataactctgaagatacactttaaaattatatttgaaatataaccatacaagaagatggagaggagcatcatgctaaaaactagtcatatcctctaccaggaaaattccttttactcccttgcaaaaaaccccacgtgccttgcatgttcctggactaatacctatagtttaaggaataacaatgactatcttttacgaagtgcttactatatcattattattattattggctagtacttggcatatattaataaaatttttcctcaaagcaacagtttgagatatcgttattataaacatttcacacttgtagaaaatgaggactacggaagctaagttactcacccaaggccatta

SEQ ID NO: 476056 - DNA, 603 bp, Homo sapiens
ctttccccattgcttgtttttgtcaggtttgtagaagatcagatagttgtagatgtgtggtcttatttctgggtcctctattctgctccattggtatatgtgtctgttcttgtaccagtaccatgctgttttgattactgtagccctacagcataatttgaagtygggtagagtgatgcctccagctttgtcctttttgcttatgattgccttggctatttgggctcctttttggtactttaggaatttggttctatatggatagttttttctagttctgagaagaatatccatggtagtttaatatgcatagtattgaatctgtaagttgcttatgggcagtatggccattttaatgatattgattcttcctatccattagcatggaatgtttttctcttttcatttcattggctcaattgatgtagtccttcccattcctgaaccaatctttggcaagggaggggaggtaccaagactgacttaaaacaatcaggcctacacctaaacagggggtcagtctcaactattgtcacaatggatgggattgatttaactacaacatccactgtgagaagctagagagaaaatataaagaattag

SEQ ID NO: 476057 - DNA, 603 bp, Homo sapiens
ctttccccattgcttgtttttgtcaggtttgtagaagatcagatagttgtagatgtgtggtcttatttctgggtcctctattctgctccattggtatatgtgtctgttcttgtaccagtaccatgctgttttgattactgtagccctacagcataatttgaagttgggtagagtgatgcctccagctttgtcctttttgcttatgattgccttggctatttgggctcctttttggtactttaggaatttggttctatatggatagttttttctagttctgagaagaatatccatgrtagtttaatatgcatagtattgaatctgtaagttgcttatgggcagtatggccattttaatgatattgattcttcctatccattagcatggaatgtttttctcttttcatttcattggctcaattgatgtagtccttcccattcctgaaccaatctttggcaagggaggggaggtaccaagactgacttaaaacaatcaggcctacacctaaacagggggtcagtctcaactattgtcacaatggatgggattgatttaactacaacatccactgtgagaagctagagagaaaatataaagaattag

SEQ ID NO: 476058 - DNA, 609 bp, Homo sapiens
acatcatttagcatcaaccatgcgctagtaagaatttgactttagcttataaatgctttttgcagttagttatttgccatacatatttgttataaagacatttgttccataatcacactccccttagcattaggtatttggcttttgctggacacagtgcrcacaggcttaccagcatacactgagttattttgatgacatcatgttttattaattagtgctgagtcagttcccttcagtgcttctaatttttttaagcacagctactagatccaatgctagttgagcattaaacgtgtgtcaaaactttttctcacaggattcagtaatccatgagattccatgtaccctccccatccaactcatctcagttcaagatctctgttttggcactaccctcatgccccctgctattcaagaaccaaatgtaacttggaatctgtagaagcgaagtccactggctgtgttccccacacacctatgaaaaagaaggctgctgcttctctgttaaccttttgttctgtgttcactgggagtcctgccataaggtttgcattaggtcagctttctggcttcttggacaaataaataaaaaacaagaggaggtag

SEQ ID NO: 476059 - DNA, 609 bp, Homo sapiens
acatcatttagcatcaaccatgcgctagtaagaatttgactttagcttataaatgctttttgcagttagttatttgccatacatatttgttataaagacatttgttccataatcacactccccttagcattaggtatttggcttttgctggacacagtgcacacaggcttaccagcatacactgagttattttgatgacatcatgttttattaattagtgctgagtcagttcccttcagtgcttctaatttttttaagcacagctactagatccaatgctagttgagcattaaacgtgtgtcaaaactttttctcacaggattcagtaatccatgagattccatgtaccctccccatccaactcatctcagttcaagatctctgttttggcactaccctcatgccccctgctattcaagaaccaaatgtaactyggaatctgtagaagcgaagtccactggctgtgttccccacacacctatgaaaaagaaggctgctgcttctctgttaaccttttgttctgtgttcactgggagtcctgccataaggtttgcattaggtcagctttctggcttcttggacaaataaataaaaaacaagaggaggtag

SEQ ID NO: 476060 - DNA, 423 bp, Homo sapiens
tgcaggatgacggcattgctggtacctttcctgagcctaaaagtaaactaagtaaacacgtttgcattcccaccaccctcccgctacaaaatttgcccacagagagatttataatatgttgtgaagwcctaaactgccttttttagatctaatgggcaatttgaaggcagggggaaaattagcattagaaacttaaaagaaggtgtccatcttcttcagaaaggtaaatagacacaatgtcggtttttgagtagagccttatcaaactctcagtgtcctgagagacataggaaatcatttaggcgttaagaaaatgcttcacttttgagaacccgtaatgggaatcagtatccttgtaactgctcctggctgttctttgagttgaaagctgagccttgtgccaacatattcctaagcttgaca

SEQ ID NO: 476061 - DNA, 571 bp, Homo sapiens
gcccgcctcggcctcccaaagtgctgggattacaggtatgagccaccacgcctggccgttatcctaaagcaattttaacaaaaatgccctcatgtaagtcccctaggttttgtctaactgctttcatatctttgatctccttgccatctacaccattagaatatatttgacataccaggcatggacttcctcatctcatggataataaaactaaaggtccwgagaaatatttttccacaaagttgcagagcttttcagagacttagctaggctgagtaaccctggcttcttgaattcaaattggattctatggctgccaataatagaactgaagaaagatattttaaaacagcttcacacgcaatctgtgattcaaatgtgcaactcagatagagaaatctagatttatattccagctttatttagtcctagttctaccactaacttggttatgtgaccctgagcaagtcactgaaatttctgggtttcaatttctgtacgtaaaagtgaaagagtatcttcaggtaggtttcctgttcttaaacctgtgttaggcactgctaattgacca

SEQ ID NO: 476062 - DNA, 571 bp, Homo sapiens
gcccgcctcggcctcccaaagtgctgggattacaggtatgagccaccacgcctggccgttatcctaaagcaattttaacaaaaatgccctcatgtaagtcccctaggttttgtctaactgctttcatatctttgatctccttgccatctacaccattagaatatatttgacataccaggcatggacttcctcatctcatggataataaaactaaaggtcctgagaaatatttttccacaaagttgcagagcttttcagagacttagctaggctgagtaaccctggcttcttgaattcaaattggattmtatggctgccaataatagaactgaagaaagatattttaaaacagcttcacacgcaatctgtgattcaaatgtgcaactcagatagagaaatctagatttatattccagctttatttagtcctagttctaccactaacttggttatgtgaccctgagcaagtcactgaaatttctgggtttcaatttctgtacgtaaaagtgaaagagtatcttcaggtaggtttcctgttcttaaacctgtgttaggcactgctaattgacca

SEQ ID NO: 476063 - DNA, 649 bp, Homo sapiens
gtctctgaggccagctctgatacttagtagtggtgtaacctggggcaagtcacctaactctttctgcttcagtttccttgcttgtaaaatggggaaaataatatcattgccttttcgggatgttgtgaggattaaatgaatgctgagtccagtgcctggcatgtagtatcagataaatactagtgatgattcgttttcccctggccctggtcattctctggagagatgcttctggctgtcttgggtcatcgtccttctgtgctcatccctyccgtattttaggaaagaagttatctttcttttccatgtgatcaggggaagaaggtggcagcaagattagacacaggccgcatgattcttttctcccatccatagacttctgtctacctgactgtcagctctgatttttacccttttgagctatagctgggattactcctaatttgcagcacatggttccttagcaaccttcactaatataggattaggtataaaaatacttttggttagaattttaaacatcttcatttattatagaccattgcttttaaaaaatcttttatttcccctctccttattacaaaagtaatgcaaattcattgtcaaataattagaatccccagatagtcagaaggaataaaagcccgcc

SEQ ID NO: 476064 - DNA, 649 bp, Homo sapiens
gtctctgaggccagctctgatacttagtagtggtgtaacctggggcaagtcacctaactctttctgcttcagtttccttgcttgtaaaatggggaaaataatatcattgccttttcgggatgttgtgaggattaaatgaatgctgagtccagtgcctggcatgtagtatcagataaatactagtgatgattcgttttcccctggccctggtcattctctggagagatgcttctggctgtcttgggtcatcgtccttctgtgctcatccctcccgtattttaggaaagaagttatctttcttttccatgtgatcaggggaagaaggtggcagcaagattagacacaggccgcatgattcttttctcccatccatagacttctgtctacctgactgtcagctytgatttttacccttttgagctatagctgggattactcctaatttgcagcacatggttccttagcaaccttcactaatataggattaggtataaaaatacttttggttagaattttaaacatcttcatttattatagaccattgcttttaaaaaatcttttatttcccctctccttattacaaaagtaatgcaaattcattgtcaaataattagaatccccagatagtcagaaggaataaaagcccgcc

SEQ ID NO: 476065 - DNA, 544 bp, Homo sapiens
ttgaaatgacaaaaatttagacatggggggcatattatggggcaggggagaagaagggagaaagatatktagggtatataagagatagcatattattaatataaaagactaacaggagagattcttatgttggaactttcagggtcttgattgtggtggtggataaattaacctacatgtaggtaactgtataaaactgaacacacacacaaatacaaatgtaaatgggaaaatttgaataagatcagtgtattgtatcaatattaacatcttagttgtgatattatattatttcctcacaaaatgttaccatcaaggaaaatgaacaaaatttacatgggatctctctgtactattttacaaaactgcatgtgaatccacaaatattacaataaatatttcaaccacaaaaaaatcaaagacccatcattaaaatagaattggaaacgaattcagatgcaaagtttcaaatctgctgcgcttttctgtctcccatgagctctgtaaagcaagatgatcttgaaaagccagcatccaacaacag

SEQ ID NO: 476066 - DNA, 536 bp, Homo sapiens
tgagcagcacactagagttgaaaatgtagaagagagttaactcagtaacttaaatcaattgaagttgtttttggattttacactctgaatatggcaattgtaattgataatgtgagcaattcacttctctattacaaayttgaacaatagccatgtttctagtctgtcttaccttggacatttttttaaacgaataataataaaaggtaaaataaaatgattggatgtttgtgaagcaattctaacttgggttaactattttgttattcttgagaaagtgtttgggggacctggaatttctttatttctacacttcatgtgactagaggtttcagtcagcattatggtgcagcaaagagcagacagatctatgcagacaatcatatgcgctgaactgatttcttaatagttggacccaattgtccctcagtaagaaagttttttaattaaaatttattttttaattttgtgagtacataggtatatacatttataggatacatgagatgttttgacacaggcatgcaatttgaaat

SEQ ID NO: 476067 - DNA, 587 bp, Homo sapiens
ggaaaaccaaaataccagaatgaggacaagcaggatgtgaccaacaacttggagaagactgtttctttgctgtggatactgtgttgagtgaatgttccggctaaattcttgtccaaatagacctatttgcatggatctgcacagaggctgctgggagagggtgagttgttatgagccagttagtaagagaagtagaggttgggttccattctcacttgccmggaaggactctggtgaataaccacagttctgccatgctgggctcaaatgaaatttcaccttctctaagagagatttcctgttaatctcatgcagtagtgatattgctttcaaccgggaccctcttgtattgagctgggtcagacatctatctctgaattttctaattctgaatatataccaattaaaaaaaattagattgtttagggctttcttcagttctattgaatgataatttgtagggtggagtcctggcatctttattttagttcattcctcattattcttatgcagcaagcctggtatttgcaaacacgtcagattttattctaatgatgtttctatattgtaaacatgatccttggcgt

SEQ ID NO: 476068 - DNA, 587 bp, Homo sapiens
ggaaaaccaaaataccagaatgaggacaagcaggatgtgaccaacaacttggagaagactgtttctttgctgtggatactgtgttgagtgaatgttccggctaaattcttgtccaaatagacctatttgcatggatctgcacagaggctgctgggagagggtgagttgttatgagccagttagtaagagaagtagaggttgggttccattctcacttgccaggaaggactctggtgaataaccacagttctgccatgctgggctcaaatgaaatttcaccttctctaagagagatttcctgttaatctcatgcagtagtgatattgctttcaaccgggaccctcttgtattgagctgggtcagacatctatctctgaattttctaattctgaatatataccaattaaaaaaaattagattgtttagggctttcttcagttctattgaatgataatttgtagggtggagtcctggcatctttattttagttcattcctcattattcttatgcagcaagcctggtatttgcaaacacgtcagattttattctaatgatgtttckatattgtaaacatgatccttggcgt

SEQ ID NO: 476069 - DNA, 554 bp, Homo sapiens
cacaagctctcggtacacaagtgacattcattcccataggtgatgtagtcagaaccacaaactggtaggtatgtgatggggcaggggatggccaccactggatacttcttgtaaatgctgcagtccacctgtgtcatatacaagcaaatgtcctgtttttctcccagaccccaagctaggccactattagatatactacaagggctggaagtcccagctcagatattcagatgttgcttggccacttctttaagtactagtgttatcactatgacaaatactagcactactggtattctatttttttctgctacactcagttaacaattgctgggcatttctgggctaggcgttaaacttaaatcttrcatgaattttcttgtttaatcttcagaacaactagagtaaattctactattacctctctttacaaatgtgaaaattaaagcttagaaatagagataacttgttgaagataaatgctggtaagtagtagagttaggatttgaatctagagcctgtgcaatttatcagggtacttttgctctgccttt

SEQ ID NO: 476070 - DNA, 578 bp, Homo sapiens
gctgggatttaacagttaggtaaagtttttccatacgaaatttaggatgtggtaacattcccagcaaaagcaatagtattagcaaaaatatctgaggaaccagaaatattcattttgacagggagcaacaggcgataagattgggcaagcaggaaaggagaccaatgactgctgagggggctggagtctggtttatggactgctcaaaactgcactgtagggaagctggtgttagcaatgcccattaacaattggggcatggagcaatcaaaaatggagagactagttaacagactgctgtactaggcagtaactgtttcttaaaatgagctcttaactcagagccaacatgcccaatttctagctcaagaactaaaatcataggatgccagagctaggaggaagctcagaggtctaaccacctctgcccccactgacagatggggaagctgtgatctgagagatgtcacttgcccacggccacagagcaagctagggcagaggcaggcctggaacccagttcccatgagcacacayaccaagtaccttggaagcatatacccttgcaaagggagaaa

SEQ ID NO: 476071 - DNA, 568 bp, Homo sapiens
agtgttgataatgttagtagctactgtttattgagcactttctagatttcaggcagtgtgccagcatgctcccatatattatcttatttactcctcactttggccctagtgttaggattaaccccagtttacagacaagaaactgcaaggctcacaggaataagtgtctgagatgaaaccgcggattgtatcaaagcttgaacgtaaattcattttaaaaatatccaatttaacacaaagtggaaatacaaagcaggggaaaattgaggttctgtcatccatgacactataggctcttgtgttttagtttgttttctggcgctctccaacggatgtgctctctctaaaccatcytgagaagccagccgctatggacgtgggccttgctgtgggcattggaaagggctgatgactaggccaaggtcgcctttatttggccctggtgagtggccatgcctggacctcacctgtgtgtggtgcctctcccctcaaagtgatttggcctctgccattgcctgtccctaacttgccagggaaaaggacacctcagggcccccccgcttgccga

SEQ ID NO: 476072 - DNA, 416 bp, Homo sapiens
ctaagtctggaagtggtcatcaagtgatttgggtggaagggttggggggacacgaggaggaaggagaggatgtcattcagaacagaagcatcgggaattggatagattcagttattgtaagggaaagttggagagaacttcaatggcatcagaaggaaattggccacactgcggtccgtccatgcatgaaaatatggtgcagtcattagacgcaacgtggtagacagygttggtgtgcaatggacttttctgattattgtaaaaaaaaaaaaaaaatccaagcaattcagagcacttccgactctttggagtgaaccattgttttttccttaactttttattgtggaaatttaaaaagataacacaaatgtggaaagaacagtagaatgagtcctcacatacccaccacccagctt

SEQ ID NO: 476073 - DNA, 516 bp, Homo sapiens
gctaagtctggaagtggtcatcaagtgatttgggtggaagggttggggggacacgaggaggaaggagaggatgtcattcagaacagaagcatcgggaattggatagattcagttattgtaagggaaagttggagagaacttcaatggcatcagaaggaaattggccacactgcggtccgtccatgcatgaaaatatggtgcagtcattagacgcaacgtggtagacagcgttggtgtgcaatggacttttctgattattgtaaaaaaaaaaaaaaaatccaagcaattcagagcacttccgactctttggagtgaaccattgttttttccttaactttttattgtggaaatttaaaaagataacacaaatgtggaaagaacagtagaatgagtcctcacatrcccaccacccagcttcctcacctgtttcatctgctcccccagacagtgtgtcattttacccataaatggcactaccagataagggctttttttttttttaacataacaactatg

SEQ ID NO: 476074 - DNA, 606 bp, Homo sapiens
ggagggccccttctggaaactgtcagttgaaggactccctctgccctgtaagtgaagggarttgatgttcattgggcacctgcagagtgctagcaactgttaagtgccttgtgtatgttatctggcttgattattaaagttgcttcagaaagaaaaaggatgagttaaatgtactgaccaaggcactggtggttcttgaatatctgcatgtttattcctgcatttaacacactgtttttagcagccaactgcatgctacacactgtgctagccactgcctacaggatgaacaaaaattgtgtacacaattggggatgaacaaaaattgtgtcatggaggttatagttgagcatcaggctcaagcggagaacttgtaaagcatagataggtgcccagctccatccccaggaattctgattcggtgagacaggaaatagagggtgtattaggtccctagggctactgtgacaacgtgccacaaacttggggctttattctctcacagttgtggagaccagaagtctgacatcggggtgtcagcagaccatggttccctctgaaggctctaggggaaggtccttccttgctcttctatcatttggcagc

SEQ ID NO: 476075 - DNA, 606 bp, Homo sapiens
ggagggccccttctggaaactgtcagttgaaggactccctctgccctgtaagtgaagggaattgatgttcattgggcacctgcagagtgctagcaactgttaagtgccttgtgtatgttatctggcttgattattaaagttgcttcagaaagaaaaaggatgagttaaatgtactgaccaaggcactggtggttcttgaatatctgcatgtttattcctgcatttaacacactgtttttagcagccaactgcatgctacacactgtgctagccactgcctacaggatgaacaaaaattgtgtacacaattggggatgaacaaaaattgtgtcatggaggttatagttgagcatcaggctcaagcggagaacttgtaaagcatagataggtgcccagctccatccccaggaattctgattcggtgagacaggaaatagagggtgtattaggtccctagggctactgtgacaaygtgccacaaacttggggctttattctctcacagttgtggagaccagaagtctgacatcggggtgtcagcagaccatggttccctctgaaggctctaggggaaggtccttccttgctcttctatcatttggcagc

SEQ ID NO: 476076 - DNA, 553 bp, Homo sapiens
ggagggccccttctggaaactgtcagttgaaggactccctctgccctgtaagtgaagggaattgatgttcattgggcacctgcagagtgctagcaactgttaagtgccttgtgtatgttatctggcttgattattaaagttgcttcagaaagaaaaaggatgagttaaatgtactgaccaaggcactggtggttcttgaatatctgcatgtttattcctgcatttaacacactgtttttagcagccaactgcatgctacacactgtgctagccactgcctacaggatgaacaaaaattgtgtacacaattggggatgaacaaaaattgtgtcatggaggttatagttgagcatcaggctcaagcggagaacttgtaaagcatagataggtgcccagctccatccccaggaattctgattcggtgagacaggaaatagagggtgtattaggtccctagggctactgtgacaacgtgccacaaacttggggctttattctctcacagttgtggagaccagaagtctgacatyggggtgtcagcagaccatggttc

SEQ ID NO: 476077 - DNA, 290 bp, Homo sapiens
gtcctttgaggagcccacctggaccrcctcctttatttatattctgggaaggatcttccgggcttccagtctcgtgtcccagaagcggttgagtgtgagtgctgcagtcaggctacttagcatcaaacctcagctctgtcgtcaaatctgtgtgctccctcacttatccctgtgcctcagtctcctcaaatggagataaaaatccccacctaacagggttattttgaagaccaaatgacatcatgtgcatccagcactcagcatagagcctggtacaagggaagtgctgg

SEQ ID NO: 476078 - DNA, 512 bp, Homo sapiens
gtgtttatcgccaatacctaatgttcaagaggccccaaaatcattatcttctctaccaaatgtattctttctcctggattttctacctttcacaaaaaaacaaacacaaaacagtggaatcatctctaattgcttactgtccttcagcttgcatagctgtcaccacatgacattgacttcaccttcacagcatcccccaccttgatccactcgccttctagcctacctccttgctctgcgtagctgcctcttcctgggttatttattgcagctcctccctctacatgagtagcaattcttaagtttagtactttctttctctttttctcctgtttactgctaacaaatgaatcttcctaaaggaacaatatttatgccacttactgtcctatctgaacaayttttgcagcttcccattacatgtagaattgacctcgaaatctctggtgtgcattcaaggttgataaagttggtaagttctgactaaactaaatgacttgtttttttcctaa

SEQ ID NO: 476079 - DNA, 549 bp, Homo sapiens
caatgcttgggatgtcccagaaaccaaaaggtggccagtataattggtgcatggagaacaatgtagaataataggaaatgtgacctatgaaaagtggcagggatcagaccatgtatggcacttccagacactacaaggaccttgatttttacyttgagtgaggtgagaagccactgggtagcacgacctgccttatggttttaaataattactttggcttaagagttgagagtagattgtagagagcaaaggtaagagcagtagaaatgagctcttctaaatcacagaaggacaaaagaaaagaataatgaggacctaaggcatagtctgcaggaataatacaaatggcagaagcgtgtaaaatctaaagtgcatcatgggccttaaagccagaacttttggttcaattcttggttctcaagttactaactacatataattataattatatatgatattatttgtatcatataatatttatgttaatatatagtaaataatatatcagtatataattgtattatatgtaactaattaaatatatttctt

SEQ ID NO: 476080 - DNA, 549 bp, Homo sapiens
caatgcttgggatgtcccagaaaccaaaaggtggccagtataattggtgcatggagaacaatgtagaataataggaaatgtgacctatgaaaagtggcagggatcagaccatgtatggcacttccagacactacaaggaccttgatttttactttgagtgaggtgagaagccactgggtagcacgacctgccttatggttttaaataattactttggcttaagagttgagagtagaytgtagagagcaaaggtaagagcagtagaaatgagctcttctaaatcacagaaggacaaaagaaaagaataatgaggacctaaggcatagtctgcaggaataatacaaatggcagaagcgtgtaaaatctaaagtgcatcatgggccttaaagccagaacttttggttcaattcttggttctcaagttactaactacatataattataattatatatgatattatttgtatcatataatatttatgttaatatatagtaaataatatatcagtatataattgtattatatgtaactaattaaatatatttctt

SEQ ID NO: 476081 - DNA, 549 bp, Homo sapiens
caatgcttgggatgtcccagaaaccaaaaggtggccagtataattggtgcatggagaacaatgtagaataataggaaatgtgacctatgaaaagtggcagggatcagaccatgtatggcacttccagacactacaaggaccttgatttttactttgagtgaggtgagaagccactgggtagcacgacctgccttatggttttaaataattactttggcttaagagttgagagtagattgtagagagcaaaggtaagagcagtagaaatgagctcttctaaatcacaraaggacaaaagaaaagaataatgaggacctaaggcatagtctgcaggaataatacaaatggcagaagcgtgtaaaatctaaagtgcatcatgggccttaaagccagaacttttggttcaattcttggttctcaagttactaactacatataattataattatatatgatattatttgtatcatataatatttatgttaatatatagtaaataatatatcagtatataattgtattatatgtaactaattaaatatatttctt

SEQ ID NO: 476082 - DNA, 549 bp, Homo sapiens
caatgcttgggatgtcccagaaaccaaaaggtggccagtataattggtgcatggagaacaatgtagaataataggaaatgtgacctatgaaaagtggcagggatcagaccatgtatggcacttccagacactacaaggaccttgatttttactttgagtgaggtgagaagccactgggtagcacgacctgccttatggttttaaataattactttggcttaagagttgagagtagattgtagagagcaaaggtaagagcagtagaaatgagctcttctaaatcacagaaggacaaaagaaaagaataatgaggacctaaggcatagtctgcaggaataatacaaatggcagaagcgtgtaaaatctaaagtgcatcatgggccttaaagccagaacttttggttcaattcttggttctcaagttactaactacatataattataattatatatgatattatttgtatcatataatrtttatgttaatatatagtaaataatatatcagtatataattgtattatatgtaactaattaaatatatttctt

SEQ ID NO: 476083 - DNA, 502 bp, Homo sapiens
atcaaacataatggatgaaaacacattttcaattctaaatgatcaatgaaaagatagtttcacctagtagaaacacttatttaaaaaaaaaagagtcagtaagaaggcaaattttaaactgtgtcaacttttccccaagtaatgatgaggtttgtactgttgtggctattgttaagaaatagaataaacaggccgggtgcagtggctcacacctgtaatcccaggactttgggaggccaaggtgagtgaatcacttgaggtcaggagtttgagaccagcctggtcaacatggtgaaaccccatttctactaaaaaaaaaaaaaaaaaaaattagctgggcattgtggcacgtgcctgtaatcccagctattagagaggctgaggcaggagaatcacttgaacccgggcggcagaggttacagtgagcccagatctgcgccactgcactctakcctgggcaacagagcgagactccatctcaaaaaaaacagaaaaaaagaaa

SEQ ID NO: 476084 - DNA, 603 bp, Homo sapiens
tgggaacatggaggaatgattttgttctttctatttcatttccatgttcaattatgggagggccacttcaacataaaaatgaaagaattaaggcatatttagagaaactgtctgattggagacatgtatttgaaaatccatgtcctttgaagattgtcaagacttcacacttaagcaaggagaaagtcataatcttgaaatattcaagtagttttgtcttttaagtgtggaaacaggacaagttctagcttatctccgtgaataaaagtgaggccagtgggccaaagaatgaaaggtctggaagacaggttccaagtggatgccaggaagaacttcctaacagtttgmggatttcaaagatggatgatttaccatggaattccaaggatgatatcagtacagactttacaggcagattaaagcaaaggcttgggagtcattagagatacagtaatgagcattggaaatttagaaaaccacctctggactagggtttaaatcccaagtctgtacttattatttctatatcttcaggtgagttatgcattccgtctgtcagtttatttgtatgttggggttataataatagttttgtaatgcaat

SEQ ID NO: 476085 - DNA, 603 bp, Homo sapiens
tgggaacatggaggaatgattttgttctttctatttcatttccatgttcaattatgggagggccacttcaacataaaaatgaaagaattaaggcatatttagagaaactgtctgattggagacatgtatttgaaaatccatgtcctttgaagattgtcaagacttcacacttaagcaaggagaaagtcataatcttgaaatattcaagtagttttgtcttttaagtgtggaaacaggacaagttctagcttatctccgtgaataaaagtgaggccagtgggccaaagaatgaaaggtctggaagacaggttccaagtggatgccaggaagaacttcctaacagtttgcggatttcaaagatggatgatttaccatggaattccaaggatgatatmagtacagactttacaggcagattaaagcaaaggcttgggagtcattagagatacagtaatgagcattggaaatttagaaaaccacctctggactagggtttaaatcccaagtctgtacttattatttctatatcttcaggtgagttatgcattccgtctgtcagtttatttgtatgttggggttataataatagttttgtaatgcaat

SEQ ID NO: 476086 - DNA, 580 bp, Homo sapiens
tacggggttgggcagtcacactgtagyccttcccacgtacacgttaataaattttgtatgccttttctctaattaatctgccttttgtgagttcatttttcagcaaaccttcagagggcaaaggggaagttttctccttgacccctagaatacgatattgtttatctggggaccacaatttgggaatgatggaccaacttctaatgacacaatttcataataagacacagctaatgagcaagaccatttttaaaaggcatttctgcaggctgagacaagaaattaacatgtgaacaacacaaattattttaaattaccaggcctagagagacattaaaatgagaccagcatatgccctttgaactatgtattcatctcttgaaactgcttactgttgctataagtagctataaattatctaacaatgcaacaatggacaccataatccatactctataacttaacaatgtgtagccaatcattaatcactgttatttctataaaccaatgagaattcctgacaattttatatcagccgctccctgtccccctttttttgcctttaaaatcctccctgcag

SEQ ID NO: 476087 - DNA, 503 bp, Homo sapiens
ctgttgttatttcctctaggcttaagcaattcacttgaaacagcagagaaatctaataatggctacattattatttgatagttgcatawatttgagcttctcaaaaaggaagttctgaaacacaggaaagtgcctgggatactgaagccacagggtttataataatgtcccttcttggaatcttaaacctagtcaatgacttaggagtaatcggtaattaaaaacattatttttacattaaaactaatcagatggagttgatgaaatagaagtcatatgcatttttaaggtaaaaaatgaggattcaaagaaatgttggattcagcgctatctcccaaaagggctaaggcccacacctagaagcgtgattcatccttctcaagtcaacatcacaccttaccccgcccagcatcctcctccttctgatggtagcactgtgatttccctctagggaaccatccctcatacacactctcacttctggtgattcaggatggatccca

SEQ ID NO: 476088 - DNA, 597 bp, Homo sapiens
aaaaattataaaggaaaatatgagcccctagatattccaaactaggatgaaatctcacacagcatcttccaacaagttgtaaatatagtaagatttttaaaactgagaccactacggataataatatctctatgcatttattataatcataatgaattgaagctaaattatcaaactttttgaaaatgcatctaatatttatttattaagaaggagaatatcacactttttttrtgtgtgttttggagtctttttaaaaaacagttgcatttaatggcgatctttcccatcccttaagtgttcaattgttactgtatttgataagttggtgttgagaagacttttattctttttacctcagcaatgtgtgagaaatactatttgtttagtcagacagtttcaacttggctgttttccttgactctgattccactttaagatgtgtgctccagtttatgggcaacatgcttgcatatttcttacagatgactaaacttgggagcttatcaatagtttggacttggaagtacagtagttctaatgggaaaaccttgctttgctgaaccgttatgctcaagtttaagtgtgaaagcccat

SEQ ID NO: 476089 - DNA, 617 bp, Homo sapiens
tgctgatccaagaatgttctttataatgagcttggggttgaggtcataaagttgttcacggccagctctgttcttgctgtacctgtgggcttgtacttgaacttgagaaggtcagattcaaagttatttttaattacaatttttaaaagatattttaacctagaatgaaagggttggaagcatggaagagaakaggtactcccagaagacagggaagcagggaagaaattaaacaaagcaggtgatctcacaagaaatggaagtgaccagaacagatgggaggaaagcagcagtgcctctgaagacacaaaactttatcctagaatagcaaaggtctctagaaaacgctaggagaacagaagaggaaaaaggagaggtagaagaagctactaagacaatataaataattccattcaagaaggatctagtcttttgacaccagaggagagaataagatgccaagctactctctctggatgtatgtgagacaggattctgatataccagcaagataaatcaactctggctgttttaagcagaaaattgttcaatagaaggatgacgggtagctgctgaatcactaggaacactcaacaacagactcagcagctacttag

SEQ ID NO: 476090 - DNA, 555 bp, Homo sapiens
aggggaggtcctgcagagcctgggaatgaagacgatagaacagcctcatattatagtgttttcagtattggtttggggtgggggagaagarctttggttcagcagcaccttgttaagactctgtggggagccactagtcaggcagagaggcagatcccagtgatgaatggacttctcagacctttttttcttagtgccttttctcagccataagatgactgaaaaaaatacagattcagaaacacacaaaaagatacacagagatacatacattcatatatgaatacatgcacacatacagaaataaagacacacacacacacacacacacacacacacacacacacacacacgcaatgtgagcctggcaaaagcctgcttaatttttaaaaggtctgctaattttagaaggctgcttcctgtttaggttaaaaaaaaaaaaaaaaagtaaaatgacctccaggacaagttttgtctttagaataagaaagatagggagaatctactaaattgtggggatatggtattttcagtgaatcttgggtaaatgtgaat

SEQ ID NO: 476091 - DNA, 546 bp, Homo sapiens
ggtgacatttgagcagggactgattgaagtgagcggggaagccgtgccactctctgggggggaagagcttcccaggaatattacaactgaaatatatctctgtaagctttattgcagattagattcaggctgctcttttggggcttgggacattattcggttgatattctaatataatactgggtgtccaggcaagacacagkgctgggatgtgcgtcctttgaaagcagcctaggagaatgagctgaaactcaaccagggtcagagaggagggtgaagcacctgaatcgggggacatcactgaattccagctgctcaacacagaaccacctgcagacaggccaaggactgaccgctcagagggccaaggactgaccactgttcactcagcacatcccttgtctccgccttgatcctagccccatcaattactctgccaacatggctcagacaaggtttgaactgagttaagacgtcctggcctgatctgaattttgtctggctctgcttttgtcatttggcaaaagggcattctggtcctgtgga

SEQ ID NO: 476092 - DNA, 628 bp, Homo sapiens
tagactcctgagtcaaggagtggcaggagtgccaggcctgagtactcgccctgcctcagactcactgtgagccttcagacaacttcacctttctgcctcagctttctcatctgtgcaatagggattgtaacatctaccaagttaatcataggatagcgatgaaaattcactgaggaactgctgaagtgtttaaaaaactctgagcagtcagttggggaagaggatagactgaaggctgtgcgatttgaggtgggatggtcacggaaggcctccctgagggggtgacatttgagcagggactgattgaagtgagcggggaagccgtgccactctctgggggggaagagcttcccaggaatattacaactgaaatatatctctgtaagctttattgcagattagattcaggctgctcttttggggcttgggacattattcggttgatattctaatataatactgggtgtccaggcaagacacagtgctgggatgtgcrtcctttgaaagcagcctaggagaatgagctgaaactcaaccagggtcagagaggagggtgaagcacctgaatcgggggacatcactgaattccagctgctcaacacagaaccacctgcagacaggccaagga

SEQ ID NO: 476093 - DNA, 546 bp, Homo sapiens
ggtgacatttgagcagggactgattgaagtgagcggggaagccgtgccactctctgggggggaagagcttcccaggaatattacaactgaaatatatctctgtaagctttattgcagattagattcaggctgctcttttggggcttgggacattattcggttgatattctaatataatactgggtgtccaggcaagacacagtgctgggatgtgcgtcctttgaaagcagcctaggagaatgagctgaaactcaaccagggtcagagaggagggtgaagcacctgaatcgggggacatcactgaattccagctgctcaacacagaaccacctgcagacaggccaaggactgaccgctcagagggccaaggactgaccactgttcactcagcacatcccttgtctccgccttgatcctagccccatcaatkactctgccaacatggctcagacaaggtttgaactgagttaagacgtcctggcctgatctgaattttgtctggctctgcttttgtcatttggcaaaagggcattctggtcctgtgga

SEQ ID NO: 476094 - DNA, 546 bp, Homo sapiens
ggtgacatttgagcagggactgattgaagtgagcggggaagccgtgccactctctgggggggaagagcttcccaggaatattacaactgaaatatatctctgtaagctttattgcagattagattcaggctgctcttttggggcttgggacattattcggttgatattctaatataatactgggtgtccaggcaagacacagtgctgggatgtgcgtcctttgaaagcagcctaggagaatgagctgaaactcaaccagggtcagagaggagggtgaagcacctgaatcgggggacatcactgaattccagctgctcaacacagaaccacctgcagacaggccaaggactgaccgctcagagggccaaggactgaccactgttcactcagcacatcccttgtctccgccttgatcctagccccatcaattactctgccaacatggctcagacaaggtttgaactgagttaagaygtcctggcctgatctgaattttgtctggctctgcttttgtcatttggcaaaagggcattctggtcctgtgga

SEQ ID NO: 476095 - DNA, 656 bp, Homo sapiens
gtttagctcagtggattagcttttgtccctctatgggttaggcactgacattccagctcccgccacttcagagggtgtgacgcagtgatggagatgcacaagcaggcaataaaaactagtataatgaggttcaagttttaatagagaaagtagagcccaggtgcctagactatcctggaggtcagggaaggcttcctggaggaagaggagtctaggctgggtcttgaaggatgaatagaatttgaccacatacagttagttgcacaggctccaaaggtcttaaaagaaaaatgaaagcttaggcttaagaaatctgacaaatttaagaaattgaaactttaatgccaggtttgtttccctctgcccccacctccacaccttccgcatccgcctatgccccaagtctctagctcctccctgttgctagaggcatggctcacattgtgtggggcatgtggaaagggctgatatgtggttggttgtcttggggctagatgtatgcaaatgasacttttatctttagaatcttggaagcaagagtcccagattaaaatcacccaacatgtttttgatttttttttttttaatctggttcatatccaaccagcaattcacttcagggctgtgaaagttaactgtttgagactgtcacaaat

SEQ ID NO: 476096 - DNA, 616 bp, Homo sapiens
ctgctgactactgcataccctcatttctggggtcaacagtccagatggggtaagtgcatttttaaaaaatctctaatattttccagcctgagcaacatagtgagaccttgtctctataaaaaaaaaaaagaaataaaataatttaaagtagccaactgtgatgtcacctgtagtcctagctacytggggaggctgcagttggaggattgcttgagcccaggggttcaaggctgcagtgagctgtgattgtgccattgcactccagcctgggtgacaaagtgaagccctgtctcaagaaaaataattaattaattcacgaaaattaaaataaatatctccaatatctaggaaatgaacagatagatcactgttctaatctttttaccttttttggcatttttttctacctaggcttagtatgtaagtcagtctctgttcagtggttttaacacagcaatcacccctaagtataatgagctttaaataaatgagttgaggcctgaagtaaatcaggtacagttctataataatttcattaagtctgagcatgtatttgatattggagaagtgtgtgaatgtgggagaagtttaagtatatttgctgaaggcagatgcc

SEQ ID NO: 476097 - DNA, 574 bp, Homo sapiens
gaggcgggcatggtggctcatgcctgtaatcccagcactttgggaggctgaggcaggtggatcagttgaggtcagcagttcgagaccagcctggccaacatggtgaaacccagtctctactacaaatacaaaattagctgagcatggtggcacagcctgtaatcccagctactcaggaggctgaggcaggagaatcgcttgaatccaggaggcagaggaggttgcagtgaaccragatcgcaccgttatactccagcctgggcgacaagagtgaagagcaaaactccatctcaaaaaaagaaaaaaagaatgaattaggagccagtgcacagatagaattgaggggattcagcagagggcacatttcaggccaatatgggcaaagacagaaaggaataataaatagtatactcagagtaacaatttgataggcaaagcagaagagccaagaaatgaatctggagaggaggcaagggagaagatggagggttttataggccaggtaagggtttcagccattattcaaagctattaagtgacagggtcacatttttgctttggagagattagcctg

SEQ ID NO: 476098 - DNA, 574 bp, Homo sapiens
gaggcgggcatggtggctcatgcctgtaatcccagcactttgggaggctgaggcaggtggatcagttgaggtcagcagttcgagaccagcctggccaacatggtgaaacccagtctctactacaaatacaaaattagctgagcatggtggcacagcctgtaatcccagctactcaggaggctgaggcaggagaatcgcttgaatccaggaggcagaggaggttgcagtgaaccaagatcgcaccgttatactccagcctgggcgacaagagtgaagagcaaaactccatctcaaaaaaagaaaaaaagaatgaattaggagccagtgcacagatagaattgaggggattcagcagagggcwcatttcaggccaatatgggcaaagacagaaaggaataataaatagtatactcagagtaacaatttgataggcaaagcagaagagccaagaaatgaatctggagaggaggcaagggagaagatggagggttttataggccaggtaagggtttcagccattattcaaagctattaagtgacagggtcacatttttgctttggagagattagcctg

SEQ ID NO: 476099 - DNA, 473 bp, Homo sapiens
tcctctgcctcagacttccaggagaataacatcaaggaattggtgaaatcctggatgatgtcaccagttggacttgtattcatagtcattcatgaaacattaagcaactattgagwgtcaggcattccgctaaagctgagtgtccgggaagttctgtccctcccatcctccctaatggatctgccactctctctgcaggtcctgagaaataagaacatgccttctgaagttcattcatgtttgcccctgagtttgttttcttcatccacaatcccgttccccatcccaactatttcagtttgtttaacatgaagccctttgcttgtatacattcttataaaatgcatagttttgtgtgcaaatgcttttgtagtataggtctcatctgtttatttttcacttagtactatgtttttcagatccccccaaattccctcttgtaaatcttatctactgccccaattgcttctagc

SEQ ID NO: 476100 - DNA, 502 bp, Homo sapiens
gtcctgtggccatgggggcctggtgaggccagatcttcaggttgttctagaaaagtgagtattctagaattatgtttcaagcctcttggtttgcaaatactagtaactatttttaaaatgttttggtatttggcctggcacagtgtttgacccctgtaatcccagcactttgggaggccaaggtgggaggatcacttaaacccaggagttggagaccagcctgggcaacatagcaagattctctctctaccaaaaaaatgaaaaaattagctgggtgtggtggtgcacgcctgtagtcccagctactcgggaggctgtggtgggaggatcacttgagcccaggaggatgagcctgcagcaagctgtgatgccaccactgcactccagcctgggtgacagagtgagatcctgtctcagaaataaaaagtaaataaagttttggatgctttgagcatctggcagaaatcttcgctatgccccrctgatgtcctgggcccgatgt

SEQ ID NO: 476101 - DNA, 572 bp, Homo sapiens
attattagagaggaaagtaaggatatactagaaaggtaytgtcaaatgttttaaatacacaaacatatatactgtatctaagtagagttggatttctcacctacttaaaaaaaaaaatcccttctaaagccaaatatacaacctaatgtttagagagtactgtatttatgagatacttgttttatttctggagatattttagtcaaataataaaaccacaagttaaggcctaactcaaaaacaacttggagaagtgtacagcattcccacttgaccgcctttgtccaattcgccttctcttgcatttctaatagagaatgaagtgtgcaggactcaaacaacactgccaaaagtggagttctgttctctggtggtaaacatcacccctataatttttttcaagctgcttctggattacagtaagaacagcctttgtgtgcatatccaagtactttgttatacaaatcttataataacagtaagttaaaacaaggcttgatttcataaaatagaaacttaccagagccactgcttgcctctttgtttgagatggcacttgcaggcgttagcag

SEQ ID NO: 476102 - DNA, 612 bp, Homo sapiens
tgttcagcaagtcttgacataggaacacagaaatagcttcaggccaggtgcagtggctcacgcctgtaatcccagcactttggcaggctgaggcaggaggatctcttgaggccaagagttcaagaccatcgtgggtaacgataccagacccgctctctaccaaaaacaatttttaaaaattagccaggtgtggtggtgctcacctgtggttccagctacttgggaaactgaggcaggagaattgcttgagcccaggaggttgaggctgcagtgagctattattacaccactgcattctagcctggacaacatagcaagaccctatctctaaaaaaaaaaaaaaaaaaaaagraaagaatatggcttcaaacaaccacattcattgtgcacttgctaagggtcagtccctatgaaaagagcttcagagtggagtgtggatatgaatatggattctgatctggaaggcccaggcctgaatttgctctgccgcttatgaggtgtttgaacttgcataagccatttaatgtctctttgcttcgtttcctcacttgtaaaatgggggtaatattttacaaggcttaaagcagctcctggcacacagtaagctctatc

SEQ ID NO: 476103 - DNA, 605 bp, Homo sapiens
tggtgacattcggcaggtgagggactaggttagaaagtcgccaagcaggcccaggcctcgggagagggagtttaacctgtgtggctttgatgctggtcagaagccacactcccttgagagctgtcctgatctctatcccaagagaccagacaccagccggcgctccacttaatgccagccagaggaaggctaaggggcttagagtctggctaaggatttctgtccctctttgcttccctccttacaaactagcagactgaaaactctccaaatcacggagtgatgattcacagaggttattaaggtgcagggacctgggaaagcagtggttctcagccctggtcacatgtaagtatctcttccagaggagcttttaaaaactaacaatgcccaggtcctacctgagacctatgcatctgaatgtgcaaaggtgcagcccaggtmcctgtatttctcaaaacctccccaggtagttccaagggacagccagatgtgagaatcactgcgctagaaggtaaataaatggctcctgggaagggacagacggtgacatcatagtgtgtggtgtggactcacccagcccattctcccttcttctgttaaca

SEQ ID NO: 476104 - DNA, 596 bp, Homo sapiens
tgacatttggtgggtggtgacattcggcaggtgagggactaggttagaaagtcgccaagcaggcccaggcctcgggagagggagtttaacctgtgtggctttgatgctggtcagaagccacactcccttgagagctgtcctgatctctatcccaagagaccagacaccagccggcgctccacttaatgccagccagaggaaggctaaggggcttagagtctggctaaggatttctgtccctctttgcttccctccttacaaactagcagactgaaaactctccaaatcacggagtgatgattcacagaggttattaaggtgcagggacctgggaaagcagtggttctcagccctggtcacatgtaagtatctcttccagaggagcttttaaaaactaacaatgcccaggtcctacctgagacctatgcatctgaatgtgcaaaggtgcagcccaggtccctgtatttctcaaaacctccccaggtagttccaagggacagccagatgtgagaatcactgcrctagaaggtaaataaatggctcctgggaagggacagacggtgacatcatagtgtgtggtgtggactcacccagcc

SEQ ID NO: 476105 - DNA, 395 bp, Homo sapiens
gggctgcttggagccaaaggtaagattcygaaagcatggtggtaggaagtgagcagaacgtccctgattctgctttgtttcagactcctctggcaagaaagaggatcacttaaaccacaaagagcagcccaagtactggcaaggcagagccaaagtccaaatggagccaaggttctgagccttctgaatgtgttccagcctcccaacatgaacaaacatggactgtggcattgggaccctccgtgaggatggatggatgcttcattgctgtgcagtggggactctggggaactaacggggaacccagcacttgaaagcacataatgacattccaactgcaaaaaaagaaagaaactagagtttgtgagctcaagggtagcaaacattccagctga

SEQ ID NO: 476106 - DNA, 625 bp, Homo sapiens
gaattataagtgtgtgccaacatgtctggctcccacttaattttcaatctgtcttgaaccaattttttcataaaaaatgaaaatgaaatgaaaaaaatgcatagaaaaggcaagcatgagtgtccagcaatgtcaatttgttatgaaagcttccatttatctcaatttctgtccttacatcacgaaggatgtttgcaaacgggcaatggtccagggaccacactttgagtagcactgttctgtaaggcccttttctctcctctggccttggctggccacatccacctcctgaccctatgactggggctgcacctgctctatcctccagcccagtacttcgcaaatttaacggtgctccaagatcacccgagaagcttgttcacataaagcctctgattcagcaggtctaaggtggggtctgagattctgcattttgagcaggcttccaggtgaggccagcgctgctgggyccaggctttggccaggtgaggggctcagcccagcccaggcttcccatcctctccccatggtcctggtggcaaatggccatgatcaaagagccagccacctccttcccgcctctgaagctccctccagccggcagatatttaaaagaaagcatgaa

SEQ ID NO: 476107 - DNA, 349 bp, Homo sapiens
gcctgcatcagcctcccaagtgctaggactacaggcgtgagccaccgagcctggcctaayattgttaataattaataccgtaattgattgggcctctgtggttctaggtgcagggacagagtggtaaccaggaaaagcaggctccctgctctcgtggagtgtgcaccgaaatgggccagacataaacacgaaaataaataaacaagtaatttcagagagtcctaagtggtacagagagaggtgcaggggtcccaggaaggaagatctgccctcccaaaaagctccgggggcttccgtcccccacacagtgccacattcccaagtgaggcgggtcatttgtttggcacag

SEQ ID NO: 476108 - DNA, 349 bp, Homo sapiens
gcctgcatcagcctcccaagtgctaggactacaggcgtgagccaccgagcctggcctaatattgttaataattaataccgtaattgattgggcctctgtggttctaggtgcagggacagagtggkaaccaggaaaagcaggctccctgctctcgtggagtgtgcaccgaaatgggccagacataaacacgaaaataaataaacaagtaatttcagagagtcctaagtggtacagagagaggtgcaggggtcccaggaaggaagatctgccctcccaaaaagctccgggggcttccgtcccccacacagtgccacattcccaagtgaggcgggtcatttgtttggcacag

SEQ ID NO: 476109 - DNA, 349 bp, Homo sapiens
gcctgcatcagcctcccaagtgctaggactacaggcgtgagccaccgagcctggcctaatattgttaataattaataccgtaattgattgggcctctgtggttctaggtgcagggacagagtggtaaccaggaaaagcaggctccctgctctcgtggagtgtgcaccgaaatgggccagacataaacacgaaaataaataaacaagtaatttcagagagtcctaagtggtacagagagaggtgcaggggtcccaggaaggaagatctgccctcccaaaaagctccgggggcttccgtcccccacacagtgccacrttcccaagtgaggcgggtcatttgtttggcacag

SEQ ID NO: 476110 - DNA, 680 bp, Homo sapiens
catttctaggtattattcttcctattttgcagatattttcctcttttaaattgtagagggccagtagccctatccaatttcataataccaaccttccctaattcattcacagcttcactttcaggattattgttcctctctctatgatcctygggcactctctttcctttatgtttatggtttcattttcttatgcattcagtatttcatggttgtgtagtaattttaaaacatgtttcacacttaggtttcttttcatttctttccttctttcttttttaaaaagccttagatttgtgtttggttaacaatagtttcacttcccattgtgcttcacaaccctcacaatcccatggcttagaaatgtaaaagtttctggcttagaaatcccatggcatctcctttctgcttattcctgccttccattcctttaatttttttgaaactacatgaggtccatccttggttgaaaagatataaccaatgtaaccaatattatacctataataccaatattataccttttgtgcaaaagtaaatcttcctcttatcctggacatggtcccttcctttccacagttgcatacacttcttttttggagttatcctggctatttttgattatttattttaccatatgaattttagactaaactgtctatttccagagaaaaacctgt

SEQ ID NO: 476111 - DNA, 680 bp, Homo sapiens
catttctaggtattattcttcctattttgcagatattttcctcttttaaattgtagagggccagtagccctatccaatttcataataccaaccttccctaattcattcacagcttcactttcaggattattgttcctctctctatgatcctcgggcactctctttcctttatgtttatggtttcattttcttatgcattcagtatttcatggttgtgtagtaattttaaaacatgtttcacacttaggtttcttttcatttctttccttctttcttttttaaaaagccttagatttgtgtttggttaacaatagtttcacttcccattgtgcttcacaaccctcacaatcccatggcttagaaatgtaaaagtttctggcttagaaatcccatggcatctcctttctgcttattcctgccttccattcctttaatttttttgaaactacatgaggtccatccttggttraaaagatataaccaatgtaaccaatattatacctataataccaatattataccttttgtgcaaaagtaaatcttcctcttatcctggacatggtcccttcctttccacagttgcatacacttcttttttggagttatcctggctatttttgattatttattttaccatatgaattttagactaaactgtctatttccagagaaaaacctgt

SEQ ID NO: 476112 - DNA, 624 bp, Homo sapiens
tgttggtgccatgcatcttgtacagcctgcagaactgtgagccaaataaacctcttttctttataagttacccactcttagatatgtcttcatagcaacacaagtagactaaggcatcaagttttaccacttaagattaaggtggtgagtaccaaatctttctattaaacaggtatatatttttccctttataattaataaataatctgtagagtgatactgtgagatcaagtgaatatccttttccgcagcacaattcattatccagctttagaatccattgaggatcctgaatcttttatcctattgaygatttttaaatggtgattttcaggttcctccgtttcttctagcacactttgtagattcttagcaaacttctaaaaatgatttcttctcagtagacgttggactttgttgcttgatctcccatattttcctattttccatttctgtatcttttttgtatgggttttaaagatattttattatttacttttgaatgatttgtttttattccaactttatattttcattttctatgaatacttttttcacttaatatttctttcatattattctattcttgtatcatgtggagtagcttctcatatccttatgaga

SEQ ID NO: 476113 - DNA, 552 bp, Homo sapiens
gctccatcttctctcaatgttatcatcatagaatttggaggcaaacttatttcttaaatggcataaacaaaccacattctaaccacagatgaatcttccctctccatagctcattccatactcatttagcacrttagtctttcattgggaaactgctctttgtggattatctttcttttctgtctccatcagtttatatgcaaattatgtttattactgaaacatcccagatttcccaccccaggaaaaatgtagtactcccaacaaccctgataaatgaatatgagaattactctcatttataaatgtttatagcactagattcatctcttaaaaaattaagacagggccaggacatctgtataattaccaagctttcaaagtctgcaggacttttaaactaaactaaactactatttaaaactactattttaaataaatatctaaactactatttaaaaataatctgtttcctgaaaacctcctccactttctagtctgacttttactcattttctctgcttccctaatctgtttttcaaattgcccagt

SEQ ID NO: 476114 - DNA, 552 bp, Homo sapiens
gctccatcttctctcaatgttatcatcatagaatttggaggcaaacttatttcttaaatggcataaacaaaccacattctaaccacagatgaatcttccctctccatagctcattccatactcatttagcacattagtctttcattgggaaactgctctttgtggattatctttcttttctgtctccatcagtttatatgcaaattatgtttattactgaaacatcccagatttcccaccccaggaaaaatgtagtactcccaacaaccctgataaatgaatatgagaattactctcatttataaatgtttatagcactagattyatctcttaaaaaattaagacagggccaggacatctgtataattaccaagctttcaaagtctgcaggacttttaaactaaactaaactactatttaaaactactattttaaataaatatctaaactactatttaaaaataatctgtttcctgaaaacctcctccactttctagtctgacttttactcattttctctgcttccctaatctgtttttcaaattgcccagt

SEQ ID NO: 476115 - DNA, 591 bp, Homo sapiens
ctatcattattaggcaagacctagaggatgggaggggacaggaaacaggttggctcttgatgggattaggcaggttctgttgatcggtcatctatggattgagttacgccccaatcctccatgagggcccctcccgttgtcataccaggaacagccaatcacatcagttcctgctgacaaatcccctggctccaccccctgctgacagtgtacaagattcccccaagagctcagttgtcagagcctcatccacctgccgctggccacagccccgtcgctacacawcccaagccttcgggagcagctttggggctgacaccactctctcaaaggaataaaggattcgggagccaagaagaaatctttgcaggagacagacaaacactggcagtggctgacttggagaacctggaaattttcaccatgaaaggttcccggcgcccaagaagccccagtgattcctgcaccgaatcaagagcgacacgcaggagagagcgggtgagctttgctatgtgctggggacgcctgcggggtgacctgcctgtgggatgtgtgggtgtgtgttggagagaggggaagggaaaagggtgc

SEQ ID NO: 476116 - DNA, 613 bp, Homo sapiens
cagcatcaagagttatttttctgactgtcaagtttcaacattcaggtaagttctaactcaggacctaatgactctaggaacttctgctgtcctttaaatagaagtgtccccaagccatagctttgatggaagagagccctagaaatagagagctgttaactaaaaactagctttttcctaaagctggagcccaactggcttcaacactcaagagagctggtgtaaatctcagcagacataaaggtacctggtgctgaggccatggagtctagagtgtagaatctactacattaagacatcagctactgaaatcaggacccatggaagacgggggaaggaggggactaaaaccagattacttagaatctagcagcckaactgtgcttttcaatgagaggtatcatttccaatggtggggggtaccaatgattttttttttttgacaactgccttgagaacaggctttcctcactaaacaaattctgaatcagaacaaataaagataagccctgagaatagggctttttcaaggagctgccaaacagatcaaatagtgactatgttctgcagattgatgtctggagaactctacagctattttgactgctaggca

SEQ ID NO: 476117 - DNA, 380 bp, Homo sapiens
ctggaatctgcctaagcctacggaactccccgggggaggggcgaccagcactggctgcggctgcctgctaagtcttttttgttccttggggaaggggcgacagccagcactggactcacaactgcctaacacgctaagctccctgggcgggggaagggcggcacccctttcaatagctccaggctgtrcttttcccctgctagagccgggtaggctggacggcttggtcccaagacttgtccccacagcccaacacaccggctgtggcagtctgcagccagagtgcctcttcagggctaaccctgacccatccttcctcagtgggcagagcttccttgcaggatctccaaagactccagccagaggctcagagacagaat

SEQ ID NO: 476118 - DNA, 498 bp, Homo sapiens
atagtagtggtctcctctgagtgtggaaatctctgagtcacaggtgagtgagtcccttcccagraagctgtgcttgatgtgtccagggtaagggtagcctgtgagatagtccctataggacctgtttggttggtgatggccatttctgtggatcctgttacaaaaggaaaagtggagagcctggtgatggtttctgtggagatgtagggtgacattttggaatgatcaggccctgagatggttgttctgctggaagtgataacttctgtcctggagacctcagtagtagtagtagtgggcacttctgaaaggacagtgctggtctctgtcacagtgttgatctcctcagacgtcctggtgtcccttaatccaggaatcaaagaggatgttgattcagtctgaattctagtctcaaagaaggcaggagttgatgtagaaacacttgtatcccccatggcgaaggtgatacccattggagatgtggctttggatgtgtgt

SEQ ID NO: 476119 - DNA, 484 bp, Homo sapiens
tagtacttctgctcatagtagtggtctcctctgagtgtggaaatctctgagtcacaggtgagtgagtcccttcccaggaagctgtgcttgatgtgtccagggtaagggyagcctgtgagatagtccctataggacctgtttggttggtgatggccatttctgtggatcctgttacaaaaggaaaagtggagagcctggtgatggtttctgtggagatgtagggtgacattttggaatgatcaggccctgagatggttgttctgctggaagtgataacttctgtcctggagacctcagtagtagtagtagtgggcacttctgaaaggacagtgctggtctctgtcacagtgttgatctcctcagacgtcctggtgtcccttaatccaggaatcaaagaggatgttgattcagtctgaattctagtctcaaagaaggcaggagttgatgtagaaacacttgtatcccccatggcgaaggtgatacc

SEQ ID NO: 476120 - DNA, 498 bp, Homo sapiens
atagtagtggtctcctctgagtgtggaaatctctgagtcacaggtgagtgagtcccttcccaggaagctgtgcttgatgtgtccagggtaagggtagcctgtgagatagtccctataggacctgtttggttggtgatggccatttctgtggatcctgttacaamaggaaaagtggagagcctggtgatggtttctgtggagatgtagggtgacattttggaatgatcaggccctgagatggttgttctgctggaagtgataacttctgtcctggagacctcagtagtagtagtagtgggcacttctgaaaggacagtgctggtctctgtcacagtgttgatctcctcagacgtcctggtgtcccttaatccaggaatcaaagaggatgttgattcagtctgaattctagtctcaaagaaggcaggagttgatgtagaaacacttgtatcccccatggcgaaggtgatacccattggagatgtggctttggatgtgtgt

SEQ ID NO: 476121 - DNA, 576 bp, Homo sapiens
gggaagaaggagaactggtttcttccacagagggagggctttgccatgacacgcccttagtacttctgctcatagtagtggtctcctctgagtgtggaaatctctgagtcacaggtgagtgagtcccttcccaggaagctgtgcttgatgtgtccagggtaagggtagcctgtgagatagtccctataggacctgtttggttggtgatggccatttctgtggatcctgttacaaaaggaaaagtggagagcctggtgatggtttctgtggagatgtagggtgacattttggaatgatcaggccctgagatggttgttctgctggaagtgataacttctgtcctggagacctcagtagtagtagtagtgggcacttctgaaaggacagtgctggtctctgtcacagtgttgatctcctcagasgtcctggtgtcccttaatccaggaatcaaagaggatgttgattcagtctgaattctagtctcaaagaaggcaggagttgatgtagaaacacttgtatcccccatggcgaaggtgatacccattggagatgtggctttggatgtgtgtgaatcag

SEQ ID NO: 476122 - DNA, 572 bp, Homo sapiens
ggaagaaggagaactggtttcttccacagagggagggctttgccatgacacgcccttagtacttctgctcatagtagtggtctcctctgagtgtggaaatctctgagtcacaggtgagtgagtcccttcccaggaagctgtgcttgatgtgtccagggtaagggtagcctgtgagatagtccctataggacctgtttggttggtgatggccatttctgtggatcctgttacaaaaggaaaagtggagagcctggtgatggtttctgtggagatgtagggtgacattttggaatgatcaggccctgagatggttgttctgctggaagtgataacttctgtcctggagacctcagtagtagtagtagtgggcacttctgaaaggacagtgctggtctctgtcacagtgttgatctcctcagacgtcctggtgtcccttaatccaggaatcaaagaggatgttgattcagtctgaattctagtctcaaagaaggcaggagttgatgtagaaacacttgtatcccccatggygaaggtgatacccattggagatgtggctttggatgtgtgtgaat

SEQ ID NO: 476123 - DNA, 498 bp, Homo sapiens
atagtagtggtctcctctgagtgtggaaatctctgagtcacaggtgagtgagtcccttcccaggaagctgtgcttgatgtgtccagggtaagggtagcctgtgagatagtccctataggacctgtttggttggtgatggccatttctgtggatcctgttacaaaaggaaaagtggagagcctggtgatggtttctgtggagatgtagggtgacattttggaatgatcaggccctgagatggttgttctgctggaagtgataacttctgtcctggagacctcagtagtagtagtagtgggcacttctgaaaggacagtgctggtctctgtcacagtgttgatctcctcagacgtcctggtgtcccttaatccaggaatcaaagaggatgttgattcagtctgaattctagtctcaaagaaggcaggagttgatgtagaaacacttgtatcccccatggcgaaggtgrtacccattggagatgtggctttggatgtgtgt

SEQ ID NO: 476124 - DNA, 398 bp, Homo sapiens
ctgccattatcttattattcaggacagtggagggaatggctgtggtgctkacccatgtctcggttttatgtttggatttatctgtcaatgagctcacagagtttgggctggttacagggtcttcaaggatattggaagatgtgctcagagagacatgtgtgtcccctgtggtccctccagtagagccatgccacatagagaattccattccagttgtctttgaaaccagttctggactgctttgctgaccagtccctgtgatgcttctagcagttggtgactctagggagacagaggacattgtggccagtgactgcctggtccctcctggagttccagaataaaggttggtccaagcctcaggtggggatggggagagggagaccctttctgtagcc

SEQ ID NO: 476125 - DNA, 398 bp, Homo sapiens
ctgccattatcttattattcaggacagtggagggaatggctgtggtgcttacccatgtctcggttttatgtttggatttatctgtcaatgagctcacagagtttgggctggttacagggtcttcaaggatattggaagatgtgctcagagagacatgtgtgtcccctgtggtccctccagtagagccatgccacatagagaattccattccagttgtctttraaaccagttctggactgctttgctgaccagtccctgtgatgcttctagcagttggtgactctagggagacagaggacattgtggccagtgactgcctggtccctcctggagttccagaataaaggttggtccaagcctcaggtggggatggggagagggagaccctttctgtagcc

SEQ ID NO: 476126 - DNA, 558 bp, Homo sapiens
ctcctaaatcctttgcttatgaagaggacttaatgggtttatgaggaggggccagctcctgctcctcttggtgtaggaaccgaggcatgtggatatgagttgaatactcactgctggtggtggacacagagctctgatgggtgaaacctgcatagagaaggagggaggagagtgggtaagagacaaggagaggtgggggaccaaatggaggtcaatgctaccctggtgcaatgaaccgagtttcatggtacagggacaattgaagattttctatcagcatcctcacatcaggaaagaatgccctgagggaacacagtccatgatggtaaggaaaccatgaagtccagaccttagtcatcccatgtagagcacatgacagaattttcaaaggccaggcagggagtgtgayctctagttagagattagaggctgcccagcaagggggaagagatttcaaccacatcacagccactcaccattgacatagagactgttcctgtccagggtgtaggggcccagctcttcaatgtcattggtcagtttgcttagctcccagta

SEQ ID NO: 476127 - DNA, 503 bp, Homo sapiens
tgataacgcaaggccccaatcacrtcttagcaagcagaggccccgcccaccccagggacagctaaagccactgagtcactctccaaaagctggctgagccccagcagcccctaggaggcctccaccagccaggattagcaagttgtgacgcattggaccttttttttttttttttttttttttgagatagagtctaactctgttccccaggctggagtgcagtggtgcaatcttgggtcactgcaacctccatctcctaggttcaagcaattctcctgcctcagcctcctgagtagctaggattacaggtgtgcaccatcatgcccagctaatttttgtatttttagtagggacggggtttcaccatgttggccaggctggtctcaaactcctgacctcagatgatccgcctgccttggcctcctaaagtgctgggattacaggcgtgagccaccgtgcccggcctagacactcagtgtgcacacacctcctcagcatcttcc

SEQ ID NO: 476128 - DNA, 577 bp, Homo sapiens
ttccatttctttggtttagggggagcctgagacgaacagatcacaagcctttcacgccatctgatctctcaagcctgccctagacgtgtctactgagggcttcctttgtgccagggaacttgtgcgtttctctgatccacacacacgaatgatctaaaatgcaaagccatttgcaatcataatttccaactgtcctggtctcccctcctgactgcacgaggctaggagcatgtgagccttttttaactgcagcttcgcatcggcccttccgtacagaggggrgccaagggtctccactatacagatggggagcgccaagctcagaggaggaaggcaacttgtccagggacgcccagcaagagtcgggactttctggccacgtgaaaatgtctagccactgaggagcgtggtaagaagagactttgaaatggcagcacctggctcacaggtacttagaaaatgtccatcaaatgaatggatctcaacatggcttgaagttcttcaggagtcaatatgcaatttttttttttttttttgagacagggtcttgctggagacaggtcttattggccaggct

SEQ ID NO: 476129 - DNA, 503 bp, Homo sapiens
tgataacgcaaggccccaatcacgtcttagcaagcagaggccccgcccaccccagggacagctaaagccactgagtcactctccaaaagctggctgagccccagcagcccctaggaggcctccaccagccaggattagcaagttgtgacgcattggaccttttttttttttttttttttttttgagatagagtctaactctgttccccaggctggagtgcagtggtgcaatcttgggtcactgcaacctccatctcctaggttcaagcaattctcctgcctcagcctcctgagtagctaggattacaggtgtgcaccaycatgcccagctaatttttgtatttttagtagggacggggtttcaccatgttggccaggctggtctcaaactcctgacctcagatgatccgcctgccttggcctcctaaagtgctgggattacaggcgtgagccaccgtgcccggcctagacactcagtgtgcacacacctcctcagcatcttcc

SEQ ID NO: 476130 - DNA, 613 bp, Homo sapiens
ctcactcccttttgacagccctggagtcctcacccagggaagacacagccctgagctaagatcttcatgcagagggagagagcccagcccctgaagacccctcctgggtggggtgatgtcaactcaaggcatgactgtcagactagaagtattcctggtccaactgagttcctggstacctgatgctgccatttcagcttcttgtccctctggtctctgtacccaagagagtgggcccaccttgaccctggctcaggctgggtcctttacacagaaggcctgttcctctcatctgtgtcctggctgctggacactgccttttaaactctcttcccagtgacctactggcaagcatctcccctctctgggctgcctgtcccagccacataaggctgggagtgtccaatttccccactcccaacctggaggtggcagggtggcattggtcaaggcaagaatgctgcaagaagagaaaggcttaccttacaggacaccatgaacaaggtgaagatgaagatgaggctggctttggacactgggagccagcgggtctgctggagggtgaagaggatggctccatacaggctggccttggtggggctggagggagcag

SEQ ID NO: 476131 - DNA, 503 bp, Homo sapiens
tgataacgcaaggccccaatcacgtcttagcaagcagaggccccgcccaccccagggacagctaaagccactgagtcactctccaaaagctggctgagccccagcagcccctaggaggcctccaccagccaggattagcaagttgtgacgcattggaccttttttttttttttttttttttttgagatagagtctaactctgttccccaggctggagtgcagtggtgcaatcttgggtcactgcaacctccatctcctaggttcaagcaattctcctgcctcagcctcctgagtagctaggattacaggtgtgcaccatcatgcccagctaatttttgtatttttagtagggacggggtttcaccatgttggccaggctggtctcaaactcctgacctcagatgatccgcctgccttggcctcctaaagtgctgggattacaggcrtgagccaccgtgcccggcctagacactcagtgtgcacacacctcctcagcatcttcc

SEQ ID NO: 476132 - DNA, 515 bp, Homo sapiens
tggctggaaacgccacctggatctgatcacaccttgtgcagaatttgagttttatcctgagtacaagtgsaaagccgccaaaggtagatctcggaaccaggtgaggaaacaggctcagagagggtcagcgacttgcctggggccacacagttagggaggggcagagtcaggaatcactgtaggcctctgggggcctcagcttcttgctgcagcactgagccagcatgcactcatggagtgccaactgtataccgctcaggttgagcaaagcatcacgcccgccagctcaaaggaggagccctccatgcccagccccatgggcctcgctttaatccatccattctccatgctctctgcttctaaaccatccagggcagtgtggtgagcctgccctgccccgctgtgccctgaccctcccaggaccaggcggctggcccctgcacttgaccacacctcccaccccacagcaccctgacccttccccacgctggtccatctgattctcacaacagcct

SEQ ID NO: 476133 - DNA, 580 bp, Homo sapiens
aaaaattctgcctctagatggagattcaggaacagagccgggcacaatgaggaaaacaatcaggattcatcttcaggcrtggctggatccagcagcccaaattatgtcatctagagtcctttcccattccatctcctgcttttgccatcctttgcgctggcttcagccacttgttggggattcccagtaactaaggcttccaaacagacacccaacaacttggactaaagcttccatttctttctttcttttgagacagggtctcactctctcgccctggctggagtgcatgatgcgatcttggctcaactgcaacctcgacctcctgagttcaagcgattctcgtgcctcagcctcccgagtagctgtgattacaagtgtgtgccaccatgccgggctaatttttgtatttttagtaaagatagggtttcggcatgttggccaggctggttttgaactcctggcctcaagtgatccgcccaacttggcctcccaaagtgctgagattacaggcttgagccactgcgcccggccgtagagcttccatttctaaataattccattagaaattccagaattg

SEQ ID NO: 476134 - DNA, 604 bp, Homo sapiens
ctcctggaggctgggagagaacccctcgcctgggttaactttagtggtgattctagaagcaggacgytgctgaggaaaaggccaaactgtagctttgtccgctccaccccaagcctttgcctgagctggaactttcctctaacaagccctgtaagaggagcttcacaccatgctccctgtgtgaaccatggtacctgtgagtattggcaatgatattatgccaatgtgctattatgtgcatttagcataaaagccacttgtaagtagtcacgtggcaagaccacggctggggcccagagaatcctgctgggggcccataacatgggattggccccctggagctaaggccagggctgcagtgcaggaggcccacacccgcaggggatcctgcccgaggggcagggctggatgagaggcagtgagcccagagcatagacagaagacagtgggcgtgtgtgtgtcttggtcactgcgtgcgtctctaggtaactttggtttgcacgtttgtgaggttgagcgtctgtcaatgtgagtttccgtgcatggctggtgactgcatttgtgtgtctgtgcatgggcctgggtacatccgtgtctctcggtg

SEQ ID NO: 476135 - DNA, 590 bp, Homo sapiens
tgtcagtgaataggttgccactgtggtgagtgactgggtgacagtgaacatgttcycactgtgatgaatgagggagttacagtaaacagttttcccctgtaatggatgagagggtgacagtgaacaggttccaactgtgttgaatgagtgggtgacaaagagattcccacagtggtgagtgagttattgacagtgaactggttctcaatgtggtgaacaagtggcagacagtgaacaggtttccactggagtgacagtggttgacagtgaataggtttctactgtggtgaacgagtgggtgacagtgatcagggtttttttgtaatgaataactcggtgacagtgaataggttcccactgtaatgaatgagtggctgacaggcaacaggttcccactgttgtgaatgagtggctgactgtaaagaggttcccactttgatgaatgagtgggtgacagtgaacatgtaaccactgtggtgaatgagtgggcgacagtgaacaagtttccaccatgatgaatgggtgggtgatagtgaacactttcccactttggtgagtgactgggtgacagtaaacaggttctcacagtg

SEQ ID NO: 476136 - DNA, 588 bp, Homo sapiens
tacctgttaatatatggtctgtttaattyagcattttaaaatctggccaaggtttttaatagttctgggtgaaaagagggctagaaatcaaaaggggatgagtctcttgactttcaattttcatgcctactggttttttttttttcttttgaggcagagtttcactcttgtcacccaggcttcagtgcaatggcatgatctcggctcactgcaacctccacctcctgggttcatgcgattctcctgcctcagcctccaaagtagctgagattacagtcactcgccaccacacctggctaatttttgtatgtttagtagagatggggtttcgccatgttggccaggctggtctcgaactcctgacctcaggtgatccacccaccttggcctccctaagtgctttggttacaggtgtgagccacctcacctggctggttttgttattttggtttttgatgctatgacaggaccctgaaaaaatctccccttatgtgtgtctaaggtacccagtaaatcacaacctgaaacattccttatgaaggccataatgtctccaggaaataaatttcttgtcataagagtgagccg

SEQ ID NO: 476137 - DNA, 511 bp, Homo sapiens
ttgatattatcatctgctgagggtggagctgagggtggaaggggagtgagctgacgctcggaaggtgtcttgagattatcatccgctgagggtggaaggggatggagcagacactcggcacgtgtcttgagattatcattccgctgagggtggagctgagggtagagctgagggtggaaggggagtgagyagacactcgggaggtgtcttgagattatcatccgctgagggtggaaggggagtgagcagacactcaggaggtgtcttgagattatcatccgctgagggtggaaggggagtgagcacacactcgggaggtgtcttgagattatcatccgctgagggtggaaggggagtgagcacacactcgggaggtgtcttgagattatcatccgctgagggtggaaggggagtgagcagacactcgggaggtgtcttgaggctcagggagttatcagttatagaatgttgttgagttggaggaggtggctggtggcccatcctgtttttt

SEQ ID NO: 476138 - DNA, 308 bp, Homo sapiens
actaaagactgccctatttctgttttctcttyacttctgggcataatcctggtcctagtgcgtgattgatccttactcctaaggcatgaccattccatgatttcaactgaaagtcgggggttcaagaaggctccttacctgtggggcttgaactccatcctctgtctccccagcctggtgctgctgctgaaatcactgctcagcatttttgccctccagccactgtcatctacctgcctgtactcacttggaagactagaagttcatacccaggctttcgcccctcttcctgggtacacatagttaat

SEQ ID NO: 476139 - DNA, 392 bp, Homo sapiens
caaacgtggtaaaatatcatcttaatatatatatatatatatgttttatatatataggttttwtatatatatatatttttggttatatatatatacatattttggtttggcaactcactgcaaactattttatttccacaatcatgattacacatatatacagatagagtagaaatgcacattagtatagctatatgtctaaattctaaataatcatatccttctgtttaggggaaatacaaacaatcctgttgacctaaatcataagaattttttttttttgagacagggtttcattcttgttgcccaggctagagtgcaacagcaatatcggctcactgcaacctccatctcctgggctcaagtgattcccctggctcagccttccaagc

SEQ ID NO: 476140 - DNA, 591 bp, Homo sapiens
tgagatctacaatcccttcttttccyacattctatttcgtgagagaaaaatgtaaggcaactgaaatcattttgtgtgatacttacagaactttctaaagaaacagaccggccgggcgcagtggcttatgcctggaatcccagcactttgggaggccaagacaggcgaattgctgaaggccagttcgagaccagcctggccagaatctctactaaaaatacaaaattagccaggcgtggtggtgcacacctgtaatgccagctacttgagaggctgaggcatgggaattgcttgaacccaggaggcggaggttgcaatgagctgagagtgtgccactgcactccagcctgggtgacaaatcagagcaagactctgtctcaaaaaaagaaaaaagcaagtattgtgccaatgtggatgtggaacacaggggtggtgtccaatctgattccaaggtgaagctgtaaagtgccctacagggcacgcatctcaggaagcaattctgggtgtttaagaatgaagtaaaaatggtatttttatttcattttatgtgtacttttttttcaaatgactaataagttgttaggacataaa

SEQ ID NO: 476141 - DNA, 596 bp, Homo sapiens
tacttgagtttatttttgctgccatattttgtgttttctattgttatgctttcttgagttttcttctatcctttgtctaacttctgtgaaattcatgaagtttcattattcgatttttttctatattttctattttttctccacagtggtagttaatcaatatccatatcctacttttawcttctaagccctattaaaacccttagcatgtttcacttctattctcagatccccactctcacttcctgctttgaaagccactggagattttttcccaaactgttaccccttttgtattatgcatcaaaattctttatccttaattctatggttttctggtttactgtgtcatcactttttatgtcccatattttcctttttctttgatctatcattttcattttgctggaatacatccttaaataattctttcagataagggctctcaatgataaaattcctaaatacttatatatatgaaaatgactttaatttgtccatacttgactgatagtttctctgaataaaggattttaggtgcaaaataattttctttcagaattttgaactctattttctctttatatccagtattg

SEQ ID NO: 476142 - DNA, 571 bp, Homo sapiens
ttggaagaggggagcccagagggaagagaaggcaaaaccagagagacccctgtcctcccgacccgtgtgagctcccagcgccactggggacccttcgttgtcccctctcctccckgctcctccttctgactactcaaatattccaaggcaggaaactcatgaatatttataggggcctggcagtgaggcagatataaaaaaaaaaaaattggaatttatgaaccaggattcgtctataaataacaggcctgtggctggtggggttcttccctcacccacaacattgcttcaactgcagctccagccccatccaaagctcacagagcctccccttcacacacatacacacagcttcactgtggatgcacaatttcccatccgccagtgcattggcgcacacacacgcattcatacccagccgaacacacagacacgtgttcacacctgcctgggtctggcccactgcctcccttccactcacagacaccccgatgcaaagtgagcctgaatgcatcctcctctgtccacattcgggctgatgcagccactcacactgcatctgcacaaaaca

SEQ ID NO: 476143 - DNA, 571 bp, Homo sapiens
ttggaagaggggagcccagagggaagagaaggcaaaaccagagagacccctgtcctcccgacccgtgtgagctcccagcgccactggggacccttcgttgtcccctctcctcccggctcctccttctgactactcaaatattccaaggcaggaaactcatgaatatttataggggcctggcagtgaggcagatataaaaaaaaaaaaattggaatttatgaaccaggattcgtctataaataacaggcctgtggctggtggggttcttccctcacccacaacattgcttcaactgcagctccagccccatccaargctcacagagcctccccttcacacacatacacacagcttcactgtggatgcacaatttcccatccgccagtgcattggcgcacacacacgcattcatacccagccgaacacacagacacgtgttcacacctgcctgggtctggcccactgcctcccttccactcacagacaccccgatgcaaagtgagcctgaatgcatcctcctctgtccacattcgggctgatgcagccactcacactgcatctgcacaaaaca

SEQ ID NO: 476144 - DNA, 571 bp, Homo sapiens
ttggaagaggggagcccagagggaagagaaggcaaaaccagagagacccctgtcctcccgacccgtgtgagctcccagcgccactggggacccttcgttgtcccctctcctcccggctcctccttctgactactcaaatattccaaggcaggaaactcatgaatatttataggggcctggcagtgaggcagatataaaaaaaaaaaaattggaatttatgaaccaggattcgtctataaataacaggcctgtggctggtggggttcttccctcacccacaacattgcttcaactgcagctccagccccatccaaagctcacagagcctccccttcacacacatacacacagcttcactgtggatgcacaatttcccatccgccagtgcattggcgcacacacacgcattcatacccagccgaacacacagacacgtgttcacacctgcctgggtctggcccactgcctcccttccactcacasacaccccgatgcaaagtgagcctgaatgcatcctcctctgtccacattcgggctgatgcagccactcacactgcatctgcacaaaaca

SEQ ID NO: 476145 - DNA, 574 bp, Homo sapiens
tcccatctgggaagaacagcctggcactgggatgggcctccaaggcaccctggtgggctctgcaagggacactcgtgggctgtagccccagggtcccagaggcaggcaacatagctcttctcccggctccccacctacagtctgcatgctggcagaactcagggtggccccaccctgtgtggcccaaactagcccatcggctctgactctccaggaggcggaggaggccagggctggtggagttaggaggaacagggctgccagcagagggggcaagacggcagcagagtagcatctgagtgactcacgtttcggaagccaagtggggagggctgcgtgtgtgtkcacgtggtgtgtgtggtgtgactgtgtgtgagcaagtgtgtgtatgcagtcttgtgcacgtgccaggtcaggaggaatggctaccgccttcctgactccaggccacccccaggaaggtgcccatgggccaaagcctgccctaccccaatcctcttgctctgacacaaacgggcgtcccttccagtgtcctccctaggccagtggtgcgacagccccagcaagccagggc

SEQ ID NO: 476146 - DNA, 481 bp, Homo sapiens
ctggggagaaggtaaatgactctccaccctctagcctcccacagtcaaggtgtccccaatcttttccctctgccctttgcccttttattataccttcgacctcaggaggttgctaccaaccttgtcatctttaattcctcagctcagcattacagagcaatttaatgcatgcaacttatgtgttcatatccataaccaccacatgcaataggcattttcatcccattttacagacaaggaaaactgagacttggaatggctgaatgacctgcccaaggacatgcccctagcaggcaggagcaaggacttgaacctygtttccccaactcccatcccattagcccattcaccatgccccagccagcctgacctttccgcctctgacctccaggttgcaatttctgacctttgtcccataacctttctgcagggcaagcttggggtgccaggcctcccaggttatccaggacgccctggacct

SEQ ID NO: 476147 - DNA, 481 bp, Homo sapiens
ctggggagaaggtaaatgactctccaccctctagcctcccacagtcaaggtgtccccaatcttttccctctgccctttgcccttttattataccttcgacctcaggaggttgctaccaaccttgtcatctttaattcctcagctcagcattacagagcaatttaatgcatgcaacttatgtgttcatatccataaccaccacatgcaataggcattttcatcccattttacagacaaggaaaactgagacttggaatggctgaatgacctgcccaaggacatgcccctagcaggcaggagcaaggacttgaacctcgtttccccaactcccatcccattagcccattcaccrtgccccagccagcctgacctttccgcctctgacctccaggttgcaatttctgacctttgtcccataacctttctgcagggcaagcttggggtgccaggcctcccaggttatccaggacgccctggacct

SEQ ID NO: 476148 - DNA, 366 bp, Homo sapiens
tatgtctatgctggagacctgtgtgtgagctgtgtgtctgaattgtgggttttgtggagttgtgtgtgtgtctattttctttctctctctytctttccttccttccttccttccttccttccctccctccctcccttccttccttccttctttccttcctcccttccttcctctttttctgctgctttctttccttccttccttccttcttgctttcttctttctttctttctttctttctttctttctttctttctttctttctttctttctctctctctctctctctctttctttctttccctctctctttctctctttcgtcttattctgtcacccaggctggagtgcagtgatctcagctta

SEQ ID NO: 476149 - DNA, 366 bp, Homo sapiens
tatgtctatgctggagacctgtgtgtgagctgtgtgtctgaattgtgggttttgtggagttgtgtgtgtgtctattttctttctctctctctcyttccttccttccttccttccttccttccctccctccctcccttccttccttccttctttccttcctcccttccttcctctttttctgctgctttctttccttccttccttccttcttgctttcttctttctttctttctttctttctttctttctttctttctttctttctttctttctctctctctctctctctctttctttctttccctctctctttctctctttcgtcttattctgtcacccaggctggagtgcagtgatctcagctta

SEQ ID NO: 476150 - DNA, 366 bp, Homo sapiens
tatgtctatgctggagacctgtgtgtgagctgtgtgtctgaattgtgggttttgtggagttgtgtgtgtgtctattttctttctctctctctctttccttccttccttccttccttccttccctccctccctcccttccttccttccttctttccttcctcccttccttcctctttttctgctgctttctttccttccttccttccttcttgctttcttctttctttcttyctttctttctttctttctttctttctttctttctttctttctctctctctctctctctctttctttctttccctctctctttctctctttcgtcttattctgtcacccaggctggagtgcagtgatctcagctta

SEQ ID NO: 476151 - DNA, 481 bp, Homo sapiens
atgcagaggcgcgtggatctcgggccggggagtgggagcgctgcagcgctctctggccacccccgggggaggggcacgtggccctggaagggggtcccgaaacacctgggtgtatsccacccctcgcccaccgatccccagcgcggggggatcgtttcctcattccgtggcccctaaggacttagggctccgtggcttttcgaagtcccggacatcgttcccctcccctgaagcgtcttgggaccccagcatcttaaccccccaaaaccttaaaaaaaaaaaaaaaatcccatcctctctgcagcccggaggcattaaggacttcaactcccagcagatcctgcagcgccgggtctatgaagccgcagcagcgcgagcgcgagacctgccgggaattgtagtctctaagccctcaacgggagctgggggcccggaggtgggagggggtggccgggctcccagtgggtcgcctggggtcggg

SEQ ID NO: 476152 - DNA, 523 bp, Homo sapiens
ccaaacactgggtgcagggacggatgggtacgttatcatcactgtgagtctatttccccccacgctcacacacagatacccccactctccgttctgcacaccgagccaggccgcactgcaatagctgcacaatgcaggctcccagccctggacaccctcggtccccaggtccccttccatcccaggaggcctgctggcagaggcagcaccttttttttttttttttttttgagacagagtctcactctgttgcccaggctggagtgcagtggcgcgatctcagctcayggcaacctctacctcctgggttcaagcaattctcctgccccagcctcctgagtagctgagactacaggcgctcaccaccaccccggctaatttttgtattttaagttagaatcgggggtttcaccatgtgggccaggctggtcttgaactcctgacctccagtgatccacctgccttggcctcccaaagtgctgggatgacaggtgtgggccaccgtacctggccgaggaagcac

SEQ ID NO: 476153 - DNA, 569 bp, Homo sapiens
ctgcctcccgcagtgagcccccaycagcccctctcgtgggtctccaaggcagcccctccacctctgcctgccatgacaacagttgcgcgtgggtttccaggcaacaaggggcatcctgccactctccttactctcctgccaccccctgtctggcggagccagcccagcctcaggaactgggactcgaagggaagggaggttctccccagtggggacaaagggtctccaaactcagagttaatgaggtttcccgtaccccaccagagaggacacaaagacgtgcccccttcacccagcaagggtgatggtggaggggatgctgctgggcttgagcgctgccaggcacagaggggagccctgtcctttgcacccctatctggaggtgaggccctccctccagaaacagcgtccgcatcccaggtcctctaaggcagcccctgctctccacctgctctggggccaaatgtgcagcctggtgtacagagaagcccaccccctgcctacgggctgtgatgccacatgctggggacaagagtgtggggtctgtggcccaccccagccatcagcca

SEQ ID NO: 476154 - DNA, 540 bp, Homo sapiens
cctctgcctctcccaccaggccctagaaaggtctgtttaggcagggcgcatgcctgtaatcccagctatttgggaggctgaggcggcagaatcgtttgaacccaggaggcgaggttgcggtgagccgagataacgccaytgtactccagcctgggtaacaagagagaaactcagtctcaaaaataaaataaaatagaagtctgtttatacccacagatcccctgtccctcccctgggcccttcacaatcctcccaggactgcccgtcagtcccagcataagactctcccatgccccgctgtgctgccaccaaggcgacaatgacagtgagagcccataagacacagtctctgccctggagcagctcatccgcctggcaccaccttctccttcctcctctacttgtttcccccacctcctgttctggcaagtccctgagcccagcagacacactcttgcctctggcctttgcacctttcctgcttttttcctggatacctccctgcatctgtccttcaacacctagttccaggtcacttac

SEQ ID NO: 476155 - DNA, 540 bp, Homo sapiens
cctctgcctctcccaccaggccctagaaaggtctgtttaggcagggcgcatgcctgtaatcccagctatttgggaggctgaggcggcagaatcgtttgaacccaggaggcgaggttgcggtgagccgagataacgccattgtactccagcctgggtaacaagagagaaactcagtctcaaaaataaaataaaatagaagtctgtttatacccacagatcccctgtccctcccctgggcccttcacaatcctcccaggactgcccgtcagtcccagcataagactctcccatgccccgctgtgctgccaccaaggcgacaatgacagtgagagcccataagacacagtctctgccctggagcagctcatccgcctggcaccaccttctccttcctcctctacttgtttcccccacctcctgttctggcaagtccctgagcccagcagacacactcttgcctctggcctttgcacctttcctgcttttttcctggatacctcccygcatctgtccttcaacacctagttccaggtcacttac

SEQ ID NO: 476156 - DNA, 567 bp, Homo sapiens
cccacaggcaaagttctcaagtcagagggacagaggcccagagacagacacagagagagacccagagagagggagacagagacccagaaagagagggagacagagacccagagagagagggggacagaggcccagagagagagggggggggacagagacccagagaggaggacagagacccagagagagaggaggacagargcccagagagagaggaggacagaggcccagaaagagagggggacagagacccagagagaggaggacagacccagagagagaaaggggcagagacccagacagagagggggacagagacccagagacagagagatagagacccagagagagacagaagcccagagacagggggtacagagacccagagagagaaagagagagagatatatatagagagagactcagagagagacagaggcccagagagagagagggacagagacagtgggttgggggtgcataaagacccagagagagtgatagttacctagaattagagtggaggggcagagaccagagagcgagagagaaacctagactcagata

SEQ ID NO: 476157 - DNA, 567 bp, Homo sapiens
cccacaggcaaagttctcaagtcagagggacagaggcccagagacagacacagagagagacccagagagagggagacagagacccagaaagagagggagacagagacccagagagagagggggacagaggcccagagagagagggggggggacagagacccagagaggaggacagagacccagagagagaggaggacagaagcccagagagagaggaggacagaggcccagaaagagagggggacagagacccagagagaggaggacagacccagagagagaaaggggcagagacccagasagagagggggacagagacccagagacagagagatagagacccagagagagacagaagcccagagacagggggtacagagacccagagagagaaagagagagagatatatatagagagagactcagagagagacagaggcccagagagagagagggacagagacagtgggttgggggtgcataaagacccagagagagtgatagttacctagaattagagtggaggggcagagaccagagagcgagagagaaacctagactcagata

SEQ ID NO: 476158 - DNA, 501 bp, Homo sapiens
gtgattattaattaccaacaattaattaataatttattaaattattaattaatgtgtgttcaccactcactaggctccagattttttttttttgagacaaggtcttgctctgttgcccaggctgaaatgcagtggctcagatcatggcttactgcggccttgacctcccaggctcaagcgatcctccagcctcaacctcccaagtagctgagactacaggtgcataccaccatacctggctagtttttwaaatttttttgtagtgacgagggtctcactatgttacctaagctggtctcgaactcctgggctaaagcaatcctcctgcctcagcctcccaaagtgctgggattataggcgtgagccaccacgcttggcccaggctccagctttataggtgatagaggatgtgctgcttttgttgtgtgtgattgagggtggctgctaagacaccagtcatgagagaattaatgaagacacagaaatgagtttaccagaacc

SEQ ID NO: 476159 - DNA, 501 bp, Homo sapiens
gtgattattaattaccaacaattaattaataatttattaaattattaattaatgtgtgttcaccactcactaggctccagattttttttttttgagacaaggtcttgctctgttgcccaggctgaaatgcagtggctcagatcatggcttactgcggccttgacctcccaggctcaagcgatcctccagcctcaacctcccaagtagctgagactacaggtgcataccaccatacctggctagttttttaaatttttttktagtgacgagggtctcactatgttacctaagctggtctcgaactcctgggctaaagcaatcctcctgcctcagcctcccaaagtgctgggattataggcgtgagccaccacgcttggcccaggctccagctttataggtgatagaggatgtgctgcttttgttgtgtgtgattgagggtggctgctaagacaccagtcatgagagaattaatgaagacacagaaatgagtttaccagaacc

SEQ ID NO: 476160 - DNA, 501 bp, Homo sapiens
gtgattattaattaccaacaattaattaataatttattaaattattaattaatgtgtgttcaccactcactaggctccagattttttttttttgagacaaggtcttgctctgttgcccaggctgaaatgcagtggctcagatcatggcttactgcggccttgacctcccaggctcaagcgatcctccagcctcaacctcccaagtagctgagactacaggtgcataccaccatacctggctagttttttaaatttttttgtagtgacgagggtctcactatgttacctaagctggtctcgaactcctgggctaaagcaatcctcctgcctcagcctcccaaagtgctgggattataggcgtgagccaccacgcttggcccaggctccagctttataggtgatagaggatgtgctgcttttgttgtgtgtgattgagggtggctgytaagacaccagtcatgagagaattaatgaagacacagaaatgagtttaccagaacc

SEQ ID NO: 476161 - DNA, 385 bp, Homo sapiens
gcacaggggatttcaaacgttctacgtcctaaagccaggaagagtgacaaggcaggtggggacagaaggaagaarccaggagcctccctgagaaggtgtcaccttatctgtcctcctcttccccacacactggcctctgggtcccccttctctgtccacccacagagtgaaaccaattaaaatgttggatctcatttaaagtctgggtgattctttagtttccgtgttttctccaggaggggcaggtagaaacaggaactactctgttccttctgtctgtggggcctgggtccctccatgtgtttcctgtctcatcaccctcctttccttgacatctctctaaagccaatttatgaaggatcaggggctgggtgcagtggctcac

SEQ ID NO: 476162 - DNA, 615 bp, Homo sapiens
agggcaggagaccagcctcattctgtttctagggtccctaggtagacttgggggtgaagagcggggctcgggggccaaagagatttaaattttacccctggttcttccactcatcacctgtgtgacctcgggaattgacgaaacctctytcagcctcagtttcctcctctgagaaagggacctctgagctccgtggggctgtggggagcatcctaagaggccatatcgccgggtgatcaggagggcaccggctccggggcaggtgctggcccagctctggctctgccgctgacgtgcgagacagaactggagactacacttctctcagcctcagtttccttctctgtaaagtggggatgataccagaagccgcctgggaggaagtttccatggagttactgttgcctgagatcttgttcccaaggtccatggtgcatgcagtgtgtgagaagctggggccccctggaggtccttaaggtcatcagccacctgaactgtgggcacctccctccctcccaggctcagtctcccccgctgtagaatggagttatctgcatgtctgccccaccaggtggctgtgagcattcagacctcacctgtgggaacaactgctca

SEQ ID NO: 476163 - DNA, 620 bp, Homo sapiens
ccaccatgcctgaccaatttttgtatttttttttttgtggagacagcgttttgccatgttacccaggctggtctcgaactcctgggctcaagcaatctgcccaccttgacctcccaaagtgctgagattataggtgtgagacacagcacctggccatctgcattgttttaaaaatcacaaatggttgcgaggtatacatactgyccagcaccatacttgtttcctttgaatatataaatattataattttataatatttataatatataataacacaaataataataaatatatatggtttggtcatatacaatatataaaataacattcacaaacacttattgtcaaagtgcaattaaatgggaaaaaaagaaaaacatttggccaggtgtggtggctcatgtctgtagtcctagcactttgggaggctgaggtgggaagatcacttgagcccaggagttggaggctgcagtgagctatggcaacgccgctgcactccggcctggatgacagagggagaccttgtctcttaaaaaaccccaaaaaacaaatctgattctctgacgcatatatataagcacaggtcaaagatttatttaagtcatgaatgaaggaaccag

SEQ ID NO: 476164 - DNA, 620 bp, Homo sapiens
ccaccatgcctgaccaatttttgtatttttttttttgtggagacagcgttttgccatgttacccaggctggtctcgaactcctgggctcaagcaatctgcccaccttgacctcccaaagtgctgagattataggtgtgagacacagcacctggccatctgcattgttttaaaaatcacaaatggttgcgaggtatacatactgcccagcaccatacttgtttcctttgaatatataaatattataattttataatatttataatatataataacacaaataataataaatatatatggtttggtcatatacaatatataaaataacattcacaaacacttattgtcaaagtgcaattaaatgggaaaaaaagaaaaacatttggccaggtgtggtggctcatgtctgtagtcctagcactttgggaggctgaggtgggaagatcacttgagcccaggagttggaggctgcagtgagctatggcaacgcygctgcactccggcctggatgacagagggagaccttgtctcttaaaaaaccccaaaaaacaaatctgattctctgacgcatatatataagcacaggtcaaagatttatttaagtcatgaatgaaggaaccag

SEQ ID NO: 476165 - DNA, 620 bp, Homo sapiens
ccaccatgcctgaccaatttttgtatttttttttttgtggagacagcgttttgccatgttacccaggctggtctcgaactcctgggctcaagcaatctgcccaccttgacctcccaaagtgctgagattataggtgtgagacacagcacctggccatctgcattgttttaaaaatcacaaatggttgcgaggtatacatactgcccagcaccatacttgtttcctttgaatatataaatattataattttataatatttataatatataataacacaaataataataaatatatatggtttggtcatatacaatatataaaataacattcacaaacacttattgtcaaagtgcaattaaatgggaaaaaaagaaaaacatttggccaggtgtggtggctcatgtctgtagtcctagcactttgggaggctgaggtgggaagatcacttgagcccaggagttggaggctgcagtgagctatggcaacgccgctgcactccrgcctggatgacagagggagaccttgtctcttaaaaaaccccaaaaaacaaatctgattctctgacgcatatatataagcacaggtcaaagatttatttaagtcatgaatgaaggaaccag

SEQ ID NO: 476166 - DNA, 609 bp, Homo sapiens
ggtccagctgggagcggccagccgtaaatcaccgcccccgtgggccgtaccattctggccggggggacctgggaggggacgcgcggagggcttcccccggggactgcctgtatcgagactctctccagcccaacaggaggatgggaaggagacttgtgtgggggcctcgggctggcgggtcgcgggttccttatcctccgccttggcgcctctccgcccaccgcccaccgcccctccctggcattggttggcgccaggggaagccgaggctccatcctttctgcgcaggttcccgccgcactcgcgcagacctagcgcgtccaggtgggaggttagtgtggcccgggcgtccgctcctcagcggatgtggcagccccgagccatggctctcgccgtccgagtcgtttattggtaagcccagcggccagcggcccccgtccccgacccccgccgggacccgattctcggagccggggtcagggagccccggggagaggacccatgggagcccytgtatgggaaaagggagcccctgtatgtgggtggggtgggcgtacggaggggcgaaaaacagagggcggtcgtccctaggccccgtcttcgacttgt

SEQ ID NO: 476167 - DNA, 244 bp, Homo sapiens
ttctcccaagatgatttatgacctgttcagaaagcgcaaagtcatctcctttggaggctgcatcgctcaaatcttcttcatccacgtcrttggtggtgtggagatggtgctgctcatagccatggcctttgacagttatgtggccctattaagcccctccactatctgaccattatgagcccaagaatgtgcctttcatttctggctgttgcctggacccttgttgtcagtcactccctgttcc

SEQ ID NO: 476168 - DNA, 244 bp, Homo sapiens
ttctcccaagatgatttatgacctgttcagaaagcgcaaagtcatctcctttggaggctgcatcgctcaaatcttcttcatccacgtcattggtggtgtggagatggtgctgctcatagccatggcctttgacagwtatgtggccctattaagcccctccactatctgaccattatgagcccaagaatgtgcctttcatttctggctgttgcctggacccttgttgtcagtcactccctgttcc

SEQ ID NO: 476169 - DNA, 338 bp, Homo sapiens
tctgggagcgatcaccctgggtagagagtgagattgggtatacagcactcagtgaaacggagagtccacgtttattctcctcccacctccccatccagttattccccaagtctttcttcagttccaaggccaaggtcagtgcataatggttaagacgtgtttgatcartgcctttcaaacactgatatgcctataagtcatctggagatcttgctgaaatgcattctccttcaacaggtctgtgttgttgagacctgagattccgtattaggtgacacctatgtggctgctcccagaactgtccttgagttcaaggatatagaccattccacagatta

SEQ ID NO: 476170 - DNA, 511 bp, Homo sapiens
gacatctggctcctgcccagatgagcagggtgtggggtatgagcagggccctgggctgggtggtcgcagcttggatcccagctccaggaccctgggacggtgactgctcacctctgggctcacttcccccgaaggctcccccaagtccacccacagcctgatcagcctctggctctgccctgtctcctctgagaatgggagacagtgccagggctgaaatctgaaagtctctggactttccgggtggggaggggtgcaggrggcgtgtcagcattggtagggtgaccagtaagcaagaagggcacccaggggtccccaaactgaaggcctggcttccagtcccagacctgccctgtgttggctaggtttatgggtctgcaagccttacgcggggtctctcccactctctcaggggcaatggaggtacaggttcaactccgcctcaccccactagggccagagagaatgcagggactcctccaatgagaatggcctgtctggttcaaatccc

SEQ ID NO: 476171 - DNA, 511 bp, Homo sapiens
gacatctggctcctgcccagatgagcagggtgtggggtatgagcagggccctgggctgggtggtcgcagcttggatcccagctccaggaccctgggacggtgactgctcacctctgggctcacttcccccgaaggctcccccaagtccacccacagcctgatcagcctctggctctgccctgtctcctctgagaatgggagacagtgccagggctgaaatctgaaagtctctggactttccgggtggggaggggtgcagggggcgtgtcagcattggtagggtgaccagtaagcaagaagggcacccaggggtccccaaactgaaggcctggcttccagtcccagacctgccctgtgttggctaggtttatgggtctgcaagccttacgcggggtctctcccactctctcaggggcaatggaggtacaggttcaactccgcctcaccccacyagggccagagagaatgcagggactcctccaatgagaatggcctgtctggttcaaatccc

SEQ ID NO: 476172 - DNA, 504 bp, Homo sapiens
gcccggcacgtagtaagtgctcatgtaatcctcctgccattctctgcaggccccacaagcttgggcttcactccttaccctggtctctggctgcttccgcccagcctcgcaagtgctcccctccagcaagactcccttggaggcccctgatttgtctgtcgagggactcccaagtgtggggtgctttcgcagtggtgcacccggaagatattttctagcgatggtgggtctgcctcaccctggcatcacccttatggctcccaccacttccctgccctcgcccaggagaaggagctgaggcccggcttgtgcagcccctgggcctgaccacaatgcagaacctggacttcttcaaacccaggcytgtctgtctcttgcacctgctgccctgcgggtgtgtcctgacctccagctttttcagccccagtcggccttccccgctggagcgcagcatcccggaaggcctcccaaatctcagcgcatgccccgcgggcagggcctcca

SEQ ID NO: 476173 - DNA, 629 bp, Homo sapiens
ctctgctataaagacatattagaaayataaaagaaaatttaagagtcagtgaacgcgtcttctataaatacttgccatctctaacttctgtttgttcatcttcactttcttaacggcaattataaatagagcagggttttcaagctaactcaagttggctgataaggaagtgaagcaaaaaggtcctacatacaagttctgcctgaaagtttccccaggtcctgtggtgaaactgaagggtaactcttgtggctgcttcccaatccagtcacctctcaacctcagcagcacacatcctcacctttgggaaagcaactgatccatggcaatgccttctctctgctgatagtccctcagaaggctgtgggcatgatccaggttgacaaagtccctgtaatcatcctcatctgcaacacagatgtagtagggcaggaagagcggcagcccaggaggcacaggatgggcagcacccaggacagcatcctgcaggcggaggtcttggagccgagcagtccagtctacgtctttggcactgctggcatcattcccaaaatccaaggtaaactgtggtgaaggcccctcctcagtatcacttccccagtcatcagcaccttcacaccagtcctcag

SEQ ID NO: 476174 - DNA, 502 bp, Homo sapiens
tgcctggatcctgcgccacgggatgggctgggggtggtcctgaaatcacctgcgtgctagggctctcacaygtgaagctgtttccacaagaaggtgcatgctacacacaacacataaggcattcttgaggtaaaggagaattccatttattaactttatcaaagtacaatacgtggggtcctcatgatgccaacagccaatgccagactcaaggtggagtctgaccctgacctgcctcttggccttcccattagagccaggagaaaagcagcacgcccagcacctccaccactgtctctttagcacagtggtggagtttctggacaagaaaatagagccagaaaaacaagtaaggcttctgaagaccctaatccataaagctttactgagagatgtaaaataaaacttcagtgaatggaggaaacgcaccagaccctcaaagccaggactcaatattaaagggtgtcagctccaaattaacacagaatttgaaagcacttca

SEQ ID NO: 476175 - DNA, 502 bp, Homo sapiens
tgcctggatcctgcgccacgggatgggctgggggtggtcctgaaatcacctgcgtgctagggctctcacatgtgaagctgtttccacargaaggtgcatgctacacacaacacataaggcattcttgaggtaaaggagaattccatttattaactttatcaaagtacaatacgtggggtcctcatgatgccaacagccaatgccagactcaaggtggagtctgaccctgacctgcctcttggccttcccattagagccaggagaaaagcagcacgcccagcacctccaccactgtctctttagcacagtggtggagtttctggacaagaaaatagagccagaaaaacaagtaaggcttctgaagaccctaatccataaagctttactgagagatgtaaaataaaacttcagtgaatggaggaaacgcaccagaccctcaaagccaggactcaatattaaagggtgtcagctccaaattaacacagaatttgaaagcacttca

SEQ ID NO: 476176 - DNA, 267 bp, Homo sapiens
aatggttaataagctgaatggtacagtacaaattacacaaggaacaatacatgaattagaaatttaaaatttagttgaaatataaaataaattattgccagaaacacaaagggcacatgaatacaataggggaaacagcttaatggstttctgttctctgaaaactcaaggcccatctctgagtgataagagtaccctaacaggcaaagccctctgaggtccgggaccaggaagacagtgctactccacctactggcggtctggcac

SEQ ID NO: 476177 - DNA, 523 bp, Homo sapiens
gcagctggggcaggcagaggcggtgctcaggtccccaagccggggaactgcgccagagcctggggagctccgcggagagccgtccagggccccgcgtacccgtttaagcgcctgctgtgtgtggggcggccctccgctcggagaagggcagcctagggttttcccgcctgtctgagggaagctgaaggcctggcgggtgcggacacatatctgctgcgcagactctgagccttaacgctacagtgacaagggccgggtggttgcggtcccctggccctgggcactatgcctcagtttctctcttccatcaacaaaggtggcggcccagtgcccggtgtggggcagaggtggggccaggggcggggcgcgcgttccctcaggggccgtcggagcagctcctgtccmgctgggcgttgggccccgccctcctctcagactagggatgccccgcaaagcctgcccccgccagccccgaaacggccttccccaggccccgggcagcaaaacggactccacacagacg

SEQ ID NO: 476178 - DNA, 642 bp, Homo sapiens
tgggaattctagttctttgaagctcatggtggttaagggaaggaaaacatttccaggccaggtgtggtggctcatgtctgtaatcccagcacttcgggaggccaaaacggatgcatcgcttgagcccatgagttcgagaccaacttggccaacatagtgaaaccccatctctattaaaaaaaaaaaaaaaaaaaattaggctgagcgcaatggctcacgcctgtaatcccagcactttgggaggccaaggcrggtggatcacgaggtcaggagatctagaccatcctgatttaacacagtgaaacctcgtctctactaaaaatacaaaaaattaaccgggcgtggtggtaggcgcctgtagttccagctactcgggaggctgaggcaggagaatggcatgatcctgggaggtggagcttgcagtgagccgagattgtgccactgcattccagcctgggcgacagagcgagactccgcctcaaaaataaataataataatttaaaagaaaagaaagaaaacctttacaggttgtactagtgggaatccacaactcctggtgatcacttgggtttgttgccccacgtccggtgcatttgtggtctccttggctcccccagggtccgcatggctcatgaggaagt

SEQ ID NO: 476179 - DNA, 543 bp, Homo sapiens
ggaattctagttctttgaagctcatggtggttaagggaaggaaaacatttccaggccaggtgtggtggctcatgtctgtaatcccagcacttcgggaggccaaaacggatgcatcgcttgagcccatgagttcgagaccaacttggccaacatagtgaaaccccatctctattaaaaaaaaaaaaaaaaaaaattaggctgagcgcaatggctcacgcctgtaatcccagcactttgggaggccaaggcaggtggatcacgaggtcaggagatctagaccatcctgatttaacacagtgaaacctcrtctctactaaaaatacaaaaaattaaccgggcgtggtggtaggcgcctgtagttccagctactcgggaggctgaggcaggagaatggcatgatcctgggaggtggagcttgcagtgagccgagattgtgccactgcattccagcctgggcgacagagcgagactccgcctcaaaaataaataataataatttaaaagaaaagaaagaaaacctttacaggttgtactagtgggaat

SEQ ID NO: 476180 - DNA, 445 bp, Homo sapiens
agtacaagctgagggcgctggtttccatcatcaaggaactagagcccaagctgaaatctgttctaacaatgaacccaaggatgaggaagtttcaaggtaaggaatctataggacctgccacaacccataaaaggcactgggaaaacgactttcaaacatttcttcattaaacataggcattagcaggatatctagcatctaaaacttccatgcttcacaaacaacagcagttctcacctttgcgtagagattttcatggaatctgtgcaagtttgtagaatactttggagagcaagctactgtcttctttcatgtatcatatgtgctaaatggaaaactaattttcatcaaattatccactaacttatttcraaaggcatttctaatatgaataaggtggacttgttacaatgatcatattcatgcaacctatagatacaattta

SEQ ID NO: 476181 - DNA, 575 bp, Homo sapiens
ccctcctggatggccgggactcatccggtctgtctggatgctgttcagcctgtctcaccggccgtgccttagcacctcactccgttttgccttcttgctttctgtctgtgtctgaagcatgggttgcttgtctcctcattgtgctgcagcgactgcacaggtgaggcagagattctcccctctcttgtccaccgccaacccttggcrcttagagcagcgccaggcacaggtaagtgtgtttgttgaatgaacaagtgtttgtggaatgaacaaatctcttcatgagttgatcagccccagggaatttctctttacctgtgtgtgccatcacccatttctgtcccaggttcccaaactgtctctgcggacagttcttcacatagtccctccggtgatttttttcttttttaaaaaatgaatatgtttatcattttactttattttatttttggagacagggtctggctctgctgcccaggctggagtgcagtggctcaatcatagctcactacagccttgacctcccagctcaagtgatcctcccacctcagcttctgagtagctggcaccacaga

SEQ ID NO: 476182 - DNA, 611 bp, Homo sapiens
acggcgatgacctccttcaccagcttcttctccttgagccgcacagcctcctccaccgcgatctcacagaaggggttcatggagtgcttcacaccatccgtgaccacaccggtcctgtcaggcttcactcggatctgcccagcaggaggggaaggggtggggtcaggaggaaacaggcaagaaggtgggggcctcagcgccaaccctctcccaggctggatgaggacaacgacagcctggaaaggggcagggccttgtccggggtcacacagctcyagggacagaactgggttagagtttgtaggcaggggcaggtcaccctgtctccttctctcatccagccattcctgggtaccagggacatctgacttgatcatccctactgttgtcactgctcctctcaggcctgaaagagtgtttctcaaatttacagtatttatggtaacccacagtgagaggtacattttactgtatctccaagtgtatataaatacataatacactgatacataaatacaaatgaggagaagaaaaggaaaaaccagttaggtagacagttaagggtggtcctcagaggagcagcctgcctgaaaaatcacagctacaggcaa

SEQ ID NO: 476183 - DNA, 515 bp, Homo sapiens
cccttctcaggtgccagggattgaaacctggctgttttggagggctattttatttcttggcccaccacaatcctttttttctttctttctttttttttttttttttgagatggagtcttgctctgttgtccaggatggagagcagtggcatgatctcagctcattgcaacctctgcctccccagttcaagcgattctcctgcctcagcctcctgagtagctgtgattacaggtgcccaccaccacgcccagctaattttttgtatttttaatagagacagggtttcactatgttggccaggctggtctcgaactcccgatctctggtgatccacccacctcggcctctcaaaggcaggggattacaggcgtgagccaccgctccyggcccaacctgagtttttataaggtcattctggattcttggtggagaaaattggaaaaggatgagaggaagtggggagagagctgggtggctgtttgtcaccaaagtgagaggtgacagtggctcagaca

SEQ ID NO: 476184 - DNA, 492 bp, Homo sapiens
ctgcccctcaggagccatcctccccaccaccaccgaacaaccaaggaacgggcgtcatccccaaaggctctgtcccagggcagygcgcggtgtcgcgcctgttgttcccgtgctttgggatgctgatgctggaggattgcttgaggccaggagtttgggaccagcctgggcaacacagcaagactctgcttatacaaaaaataaataaccactcctaaagagctcttaacaggacctgagacagaattcgaggggcccctgtacaaaatggaaatgcaaatccccttgttcaaagatcgttgatcatttcaggacagtgacaacagagcattagatggagccaggggacctgtgccacagctcgggtcactgttacaagctggggctcctaactcccgtcccccaaggctgcactgtccttgcccacaagcccagaggaagtgggcgacttcacagacttcacatcccacctgcgacctatgacctctgatg

SEQ ID NO: 476185 - DNA, 512 bp, Homo sapiens
cgtctcaaaaaaaaaaaaaaaaagtcagcaatgaactcgctgtgctggcccaagggcaggagaagaaagccgcccttaaaggagaaatttgcaaagacaaaatgaggtgatgagaaaaagccgagttctaggaaataccygagagatcatccaggtggttcacaaatagcagaaaatccaggtgcagtgtgagaggagtgagtaggttagataggaatctggatggctgagctgtaaggacataagcactgacctcccgcaaccttgacaaagatcaaagcaagaatttttttttttttgagatggagtctggctctatcacccaggctggagtgcagtggcgtgatgtgagctcactgcaacctctgcctcctgggttctagcgattctcgccaaacatgctatttgctgtctcatttctatctctcgccatcctttgcagcaaatgctgtacattttcattgatgaaggaactaggtttaaccagaaaggttgagcacgtactcccgcag

SEQ ID NO: 476186 - DNA, 512 bp, Homo sapiens
cgtctcaaaaaaaaaaaaaaaaagtcagcaatgaactcgctgtgctggcccaagggcaggagaagaaagccgcccttaaaggagaaatttgcaaagacaaaatgaggtgatgagaaaaagccgagttctaggaaatacccgagagatcatccaggtggttcacaaatagcagaaaatccaggtgcagtgtgagaggagtgagtaggttagataggaatctggatggctgagctgtaaggacataagcactgacctcccgcaaccttgacaaagatcaaagcaagaatttttttttttttgagatggagtctggctctatcacccaggctggagtgcagtggcgtgatstgagctcactgcaacctctgcctcctgggttctagcgattctcgccaaacatgctatttgctgtctcatttctatctctcgccatcctttgcagcaaatgctgtacattttcattgatgaaggaactaggtttaaccagaaaggttgagcacgtactcccgcag

SEQ ID NO: 476187 - DNA, 512 bp, Homo sapiens
cgtctcaaaaaaaaaaaaaaaaagtcagcaatgaactcgctgtgctggcccaagggcaggagaagaaagccgcccttaaaggagaaatttgcaaagacaaaatgaggtgatgagaaaaagccgagttctaggaaatacccgagagatcatccaggtggttcacaaatagcagaaaatccaggtgcagtgtgagaggagtgagtaggttagataggaatctggatggctgagctgtaaggacataagcactgacctcccgcaaccttgacaaagatcaaagcaagaatttttttttttttgagatggagtctggctctatcacccaggctggagtgcagtggcgtgatgtgagctcacygcaacctctgcctcctgggttctagcgattctcgccaaacatgctatttgctgtctcatttctatctctcgccatcctttgcagcaaatgctgtacattttcattgatgaaggaactaggtttaaccagaaaggttgagcacgtactcccgcag

SEQ ID NO: 476188 - DNA, 512 bp, Homo sapiens
cgtctcaaaaaaaaaaaaaaaaagtcagcaatgaactcgctgtgctggcccaagggcaggagaagaaagccgcccttaaaggagaaatttgcaaagacaaaatgaggtgatgagaaaaagccgagttctaggaaatacccgagagatcatccaggtggttcacaaatagcagaaaatccaggtgcagtgtgagaggagtgagtaggttagataggaatctggatggctgagctgtaaggacataagcactgacctcccgcaaccttgacaaagatcaaagcaagaatttttttttttttgagatggagtctggctctatcacccaggctggagtgcagtggcgtgatgtgagctcactgcaacctctgcctcctgggttctagcgattctcgccaaacatgctatttgctgtctcatttctatctctcgccatcctttgcagcaaatgctgtacattttcattgatgaaggaactaggtttaacsagaaaggttgagcacgtactcccgcag

SEQ ID NO: 476189 - DNA, 501 bp, Homo sapiens
gctgcatgggtcctcgcagcgccgccaggcccacggcgtacgaggcgctgccccacaccacgcacaggccgcccagcaggaagaagcctgcgggagaggcagggtagcaacagggccaaggtcgggggatggtctgggagcraagccagggttgaggagacaggaacagaggcagggccgtgccaggggctagcctgcatctttgagaatcagatcggaggggaggggaccataaccatgtcctgggccacccattcagatggacctagtgcctatgggaggggtgtcttctggtgggggaagaatgggggttctatacttactactgggagtgggatggggtaggagagtctactctcaccagggcaggtgataggggctctgcattccctggttccgtggggcgagagggggggtctgcactcaccatatgctgcttcccgacccatgtcactctgcatgaaggagatgaccccgatgcccgatgccaggaggccattg

SEQ ID NO: 476190 - DNA, 566 bp, Homo sapiens
atgggtcctcgcagcgccgccaggcccacggcgtacgaggcgctgccccacaccacgcacaggccgcccagcaggaagaagcctgcgggagaggcagggtagcaacagggccaaggtcgggggatggtctgggagcaaagccagggttgaggagacaggaacagaggcagggccgtgccaggggctagcctgcatctttgagaatcagatcggaggggaggggaccataaccatgtcctgggccacccattcagatggacctagtgcctatgggaggggtgtcttctggtgggggaagaatgggggttctatacttactactgggagtgggatggggtaggagagtctactctcaccagggcrggtgataggggctctgcattccctggttccgtggggcgagagggggggtctgcactcaccatatgctgcttcccgacccatgtcactctgcatgaaggagatgaccccgatgcccgatgccaggaggccattgcggaaccaggagaggaaggctggagggagggggacatggggggattaacatcacccccaaccctacctcc

SEQ ID NO: 476191 - DNA, 298 bp, Homo sapiens
aacatggagccttcacaaaactggatcttccaaaaggggacaacaaaggtggagaagcattgaaagccatgggaaattgagagaatgagaaatgtttggcagaggtaaaagagaatgagatctctctttgcagaagagacagtttgaaaatggggcaaatgagaggagcctaaatttawcattcattcaaagttttattgaacacctactatgaggcaacatccttcaaggtattagagagacaacagtgaataagacaaaaaggaccttagtctcaaggacattgcattctagtgaa

SEQ ID NO: 476192 - DNA, 581 bp, Homo sapiens
gctgctttttcctcccactgtctgagctyctgcaagtgctgtcgttgttttatctcaatgggaagcgagtcagtaaaggggtcccggtgatgtggtatatatatgtccagcctcctggggtaccaggcatggcttagaaggctgaaaaatgtatggggggcagctacagaataaccagcagataggctcacatgaggctgtttaccaattttatgtgtgtatgtatgtatgtatttttagcacaaggtctcactctgtcacccaggctgaagtgcagtggcaccatcatagttcactgcaacctcgacctcctgagctcaagcaatcctcctgccgcaacctcccaagtagctgggactacaagtgtgtgccaccatgccaggctaattaaaaaaaaaatgtttgtggagatgggggtctcgttatgttgctgagactggtcttgaactcctggcctcacaggatactgctgcctcagcctcctaaagtgctgggattatagatataagccactgttcccagcctaatacttagatttagggaaaagaggggcttgatgttgggttgagatcaatcaaagt

SEQ ID NO: 476193 - DNA, 581 bp, Homo sapiens
gctgctttttcctcccactgtctgagcttctgcaagtgctgtcrttgttttatctcaatgggaagcgagtcagtaaaggggtcccggtgatgtggtatatatatgtccagcctcctggggtaccaggcatggcttagaaggctgaaaaatgtatggggggcagctacagaataaccagcagataggctcacatgaggctgtttaccaattttatgtgtgtatgtatgtatgtatttttagcacaaggtctcactctgtcacccaggctgaagtgcagtggcaccatcatagttcactgcaacctcgacctcctgagctcaagcaatcctcctgccgcaacctcccaagtagctgggactacaagtgtgtgccaccatgccaggctaattaaaaaaaaaatgtttgtggagatgggggtctcgttatgttgctgagactggtcttgaactcctggcctcacaggatactgctgcctcagcctcctaaagtgctgggattatagatataagccactgttcccagcctaatacttagatttagggaaaagaggggcttgatgttgggttgagatcaatcaaagt

SEQ ID NO: 476194 - DNA, 581 bp, Homo sapiens
gctgctttttcctcccactgtctgagcttctgcaagtgctgtcgttgttttatctcaatgggaagcgagtcagtaaaggggtcccggtgatgtggtatatatatgtccagcctcctggggtaccaggcatggcttagaaggctgaaaaatgtatggggggcagctacagaataaccagcagataggctcacatgaggctgtttaccaattttatgtgtgtatgtatgtatgtatttttagcacaaggtctcactctgtcacccaggctgaagtgcagtggcaccatcatagttcactgcaacctcgacctcctgagctcaagcaatcctcctgccgcaacctcccaagtagctgggactacaagtgtgtgccaccatgccaggctaattaaaaaaaaaatgtttgtggagatgggggtctcgttatgttgctgagactggtcttgaactcctggcctcacaggatactsctgcctcagcctcctaaagtgctgggattatagatataagccactgttcccagcctaatacttagatttagggaaaagaggggcttgatgttgggttgagatcaatcaaagt

SEQ ID NO: 476195 - DNA, 585 bp, Homo sapiens
ccgctgcatttcctcatttgtaaagtaccaatcttaattgtatcaaatttattttatttatttattttgaggtggagtctcgctctgtctcccaggctggagtgcagtgacaygatctcggctcactgcaacctctgtctcccaggttcaagcaattctcctgcctcagtctcccgagtagctgggattacaggcgcccaccaccacacccagctcatttttgtattttcagtagagatggggtttcaccatgttggccaggctgatcttgaattcctgacctcaggtgatccacctgccttggcttcccagagtgaattgcatcatatttatttgctgctatgaaatttcaagtgagatcatatgtgaaatctttggacagcgcctggtaggaagaggtggaagaggaggaggagaaaaaaaaaaaaaagaaaactgaactgcttaatcacctatagaccaagtgatagaaacaggctaatgaatcgaagttgtaaaagggtaggtttgggctcattgtgagaaattgacttccaaagcccacacggcatgtagggatggaaaaggaatgagcctcttgtcatt

SEQ ID NO: 476196 - DNA, 647 bp, Homo sapiens
tgcaagctgtttcagaaacttcagcaagtttcttcactaccttatgcctcagtttcctcatctggaaatgggcgtgataatgtaatcctttaataggattggtaaaatawttatatgagttaatatttgcaaagcccataggatagtgcctggcacgtaagaagtactatgcaagtgtttgtcaaacaaatgcaagaacaaagtgcaaggatgggagggatagcatagcaagcctgtggccaatctttggggagagtgagagacaacagcccagctccagccaggtttggccatgtagagtgaaggaactgtgttgctaaatttctcgaggttttaaaagaaagtggaaattcagaggtgtttttatcccctggggactcagtttcttcatctgacaaatgggtttactgactattgtgtctcagactagagtgaagttcatggcaggtttgcacagtgcaggggaccaagaggatagaggaacaagggcacccaaggcatgtttcttaatctattcttgagagaagagtagattccctgggaaccatgcagactttctacctattcagaccatggaaaggtctttcttgcctcagggtactaggagacagggtaattgtcactagctcctctaacaaacacctccc

SEQ ID NO: 476197 - DNA, 647 bp, Homo sapiens
tgcaagctgtttcagaaacttcagcaagtttcttcactaccttatgcctcagtttcctcatctggaaatgggcgtgataatgtaatcctttaataggattggtaaaatatttatatgagttaatatttgcaaagcccataggatagtgcctggcacgtaagaagtactatgcaagtgtttgtcaaacaaatgcaagaacaaagtgcaaggatgggagggatagcatagcaagcctgtggccaatckttggggagagtgagagacaacagcccagctccagccaggtttggccatgtagagtgaaggaactgtgttgctaaatttctcgaggttttaaaagaaagtggaaattcagaggtgtttttatcccctggggactcagtttcttcatctgacaaatgggtttactgactattgtgtctcagactagagtgaagttcatggcaggtttgcacagtgcaggggaccaagaggatagaggaacaagggcacccaaggcatgtttcttaatctattcttgagagaagagtagattccctgggaaccatgcagactttctacctattcagaccatggaaaggtctttcttgcctcagggtactaggagacagggtaattgtcactagctcctctaacaaacacctccc

SEQ ID NO: 476198 - DNA, 639 bp, Homo sapiens
taagcaggccaacaactgcccacctcagtctccagtagaaaacatgaagactcccctctcctctggtagtgtcaatctagccataagcatttaggcttatgcyttatgctgtattaggcttatgcctagccttctgcaccatccaccataggacttgctatagcacaaacaggaggtgtaaacaacaggagtggttgaaaggagtcagtagacagtagacagtggcccagccttctcaagccccattggtgtgatgctgaggtagttcttcagagacaccccagcaggattgaaccccaagtgcttgcagcagtgacctgctcatgaatggcaacacttattggatttccttccttccctgtctcaccttcaccattccccaacttgggctccctgggatcaccttgtggaaaaactacctacatccaagtcctggtctcagggtgtatgctagaggaacccaaaccaaaccacctgcccagccctgactcctttcacaagcatcttgtctacagtccagactcattttttggagtgtaattcattcctggaattaaacaagtgtgatctgaatttttgggtatccttccagggatattttaagcatttacaagcaaatgtggatataaaattcataca

SEQ ID NO: 476199 - DNA, 639 bp, Homo sapiens
taagcaggccaacaactgcccacctcagtctccagtagaaaacatgaagactcccctctcctctggtagtgtcaatctagccataagcatttaggcttatgctttatgctgtattaggcttatgcctagccttctgcaccatccaccataggacttgctatagcacaaacaggaggtgtaaacaacaggagtggttgaaaggagtcagtagacagtagacagtggcccagccttctcaagccccattggtgtgatgctgaggtagttcttcagagacaccccagcaggattgaaccccaagtgcttgcagcagtgacctgctcatgaatggcaacacttattggatttccttccttccctgtctcaccttcaccattccccaacttgggctccctgggatcaccttgtggaaaaactacctacatccaagtcctggtctcagggtgtatgctagaggaacccaaaccaaaccacctgcccagccctgactcctttcacaagcatcttgtctacagtccagactcattttttggagtgtaattcattcctggaattaaacaagtgtgatctgaatktttgggtatccttccagggatattttaagcatttacaagcaaatgtggatataaaattcataca

SEQ ID NO: 476200 - DNA, 584 bp, Homo sapiens
tgcaagcgatatttggcatgcaggctaacaaatggcaacctctgatgaggcgcatagtttgagacaggcaggaaaacttgcaacttgaaggccacttcagtctccaagctttgcatttggattcagcctctgatgagcatcaagaggtccaaagggcaagatggatgtccagcaccgaatactcatcaatttaaccaacacgtattgatcagctactctgtgctcggctacacgcctggcactggggacccagagatgaacaaaggtcttagttatagcagggacaatgaatgtgggtttgggggagaaggatgacttcattctaagcacctttgggtaaaaaccaagactattgattagtattggctcaggaatggcaagagcggataaatgcaccattgagtcagcctcagggagatgagaaagsctgaagcaggagccccagactggatacgaagccggagcagggctgtgcagccgtgattagagaagtgagggaggcgggtccaattaaactggccactgcaggcatttaataagcacgggaacttttacagagacggctcccgattggagaacctggc

SEQ ID NO: 476201 - DNA, 553 bp, Homo sapiens
tgcattagttctatattgctcaatttctaatttttattgattttttaaatctattttctgattttcttttagttttttcttcatcattgcctcacctcattgaacatatttaagacagttgctttaaagtttttattcattcaagaagtccaatgtttgaggtttcttagagatggtttatctcagttcaggtttttccattgatgagccatattttcatgtttctctctatttttcctaattttgtgtgcattgaaaagtagacatttgcatctggaaatcagattctgtccccttcattgtttgctgttcttgtttgatgaaggctgtaactattcatttgtttagtaacattttcaaagtgtgtttgcagagactctattccctatctgatgtacacactgaagtctctgttctttagcttgtgttcatttgtgttctgatagagatttcctgaatgctacaagctaaaagtaagaaggaagatgaaacatacaaaaacctgacctcttccagtctttgyggatggctcttgtggagcaattccttgaac

SEQ ID NO: 476202 - DNA, 642 bp, Homo sapiens
tgttgtatgaagaatggcctgtagggggagccagtggatacagggagaccgagtaggaggctttttgcagacaagagacttaaagtgttagactctgatagattaaatatgtaaattaaaatttctaaaagtataggaataaaatgtataatttctgaactcagaagaaaaacgggaataagacaaaaatccgaaacaaggcaaggaaggagagaaacrgaaatacggaagaggcaaataattcctccaaaaaattcaaaatgtatgaagaattgcaattaatgcagatggtccaaatctgtgctactcaataccatgctattccatgtcaatagccatatgttactatatggcacttggaatgtggatctgaactgaaatgtcctgttgtggccaggcgcggcggctcacgcctgtcatcccagcattttgaggggccgaggcaggtggactacttgaggtctggagtttgagaccagcctggccaacatagtgaaacgcggtctctactaaaaatacaaaaattagccagggtatgtagggaccagccccacagggtcggtgggtttttctccctgtgtgtgtgaggagatgagagatcgtagaaataaagacacaagacaaagagataaaagaagacag

SEQ ID NO: 476203 - DNA, 642 bp, Homo sapiens
tgttgtatgaagaatggcctgtagggggagccagtggatacagggagaccgagtaggaggctttttgcagacaagagacttaaagtgttagactctgatagattaaatatgtaaattaaaatttctaaaagtataggaataaaatgtataatttctgaactcagaagaaaaacgggaataagacaaaaatccgaaacaaggcaaggaaggagagaaacagaaatacggaagaggcaaataattcctccaaaaaattcaaaatgtatgaagaattgcaattaatgcagatggtccaaatctgtgctactcaataccatgctattccatgtcaatagccatatgttactatatggcrcttggaatgtggatctgaactgaaatgtcctgttgtggccaggcgcggcggctcacgcctgtcatcccagcattttgaggggccgaggcaggtggactacttgaggtctggagtttgagaccagcctggccaacatagtgaaacgcggtctctactaaaaatacaaaaattagccagggtatgtagggaccagccccacagggtcggtgggtttttctccctgtgtgtgtgaggagatgagagatcgtagaaataaagacacaagacaaagagataaaagaagacag

SEQ ID NO: 476204 - DNA, 452 bp, Homo sapiens
cctgcacctcccccggcatctgtccttgtagattcgccatcaccatcaacctgcagacctgctctgccctctcacctgcatccttacctgtcctcatttgcatcccttctgccctccygcagcctcacctcactctcccagaccccgtttctagatgggcctgagccaagaatccatgctttggggtgagctgtgtctggtgactgaacccgagaggaggcagtaggggctggcaggcagggcagtgtttccggctggagccccagggaggggaagacatgagtcagcagttagggagggagtgcgggggctttgtggtcacggcacacaaagtgctttctggtgacagcgctgcttggggagcagcagccttgggtttggagagcaggggcgctgttgctaaaggggactggggccctgagcacctcctctcactgcacctctggtccttt

SEQ ID NO: 476205 - DNA, 452 bp, Homo sapiens
cctgcacctcccccggcatctgtccttgtagattcgccatcaccatcaacctgcagacctgctctgccctctcacctgcatccttacctgtcctcatttgcatcccttctgccctcctgcagcctcacctcactctcccagaccccgtttctagatgggcctgagccaagaatccatgctttggggtgagctgtgtctggtgactgaacccgagaggaggcagtaggggctggcaggcagggcagtgtttccggctggagccccagggaggggaagacatgagtcagcagttagggagggagtgcgggggctttgtggtcacrgcacacaaagtgctttctggtgacagcgctgcttggggagcagcagccttgggtttggagagcaggggcgctgttgctaaaggggactggggccctgagcacctcctctcactgcacctctggtccttt

SEQ ID NO: 476206 - DNA, 545 bp, Homo sapiens
acgcaatctgccggtcatgggaacagggaacgtcgaccttgcagcagggtttggacacataggaagccggactgcatgtggaagctctaaaggtgcagaaaaaggactccaggaggctgacttttacctctgtcttggaaatcaccctgactgaagttgtcaagattcttatcagtttttctgccctcgctggtcctgtgtaaccctagccacttaccctggaggatcaacccagtcctcraccctctccataactcgcacttcccatcctagactgtgtactatgagaaattgcaaccctcttcctacaactatccataaccctggtacagctcaatggtattatggcatgtcatggggattaaggctttatatctcaggatttaatgttggaactatgttcaccatccagaaaaaaatcctggtcccatagagctctcctaagccaatcggacctttaactgatttaggtaatcctatgttcccaaaacacccagacagggtcgatttaactttcccaccgccgttcctggtttctaaacctc

SEQ ID NO: 476207 - DNA, 574 bp, Homo sapiens
cagagcctgccctcacccgtgaagagcaacgcaatctgccggtcatgggaacagggaacgtcgaccttgcagcagggtttggacacataggaagccggactgcatgtggaagctctaaaggtgcagaaaaaggactccaggaggctgacttttacctctgtcttggaaatcaccctgactgaagttgtcaagattcttatcagtttttctgccctcgctggtcctgtgtaaccctagccacttaccctggaggatcaacccagtcctcaaccctctccataactcgcacttcccatcctagactgtgtactatgagaaattgyaaccctcttcctacaactatccataaccctggtacagctcaatggtattatggcatgtcatggggattaaggctttatatctcaggatttaatgttggaactatgttcaccatccagaaaaaaatcctggtcccatagagctctcctaagccaatcggacctttaactgatttaggtaatcctatgttcccaaaacacccagacagggtcgatttaactttcccaccgccgttcctggtttctaaacctca

SEQ ID NO: 476208 - DNA, 574 bp, Homo sapiens
cagagcctgccctcacccgtgaagagcaacgcaatctgccggtcatgggaacagggaacgtcgaccttgcagcagggtttggacacataggaagccggactgcatgtggaagctctaaaggtgcagaaaaaggactccaggaggctgacttttacctctgtcttggaaatcaccctgactgaagttgtcaagattcttatcagtttttctgccctcgctggtcctgtgtaaccctagccacttaccctggaggatcaacccagtcctcaaccctctccataactcgcacttcccatcctagactgtgtactatgagaaattgcaaccctcttcctacaactatccrtaaccctggtacagctcaatggtattatggcatgtcatggggattaaggctttatatctcaggatttaatgttggaactatgttcaccatccagaaaaaaatcctggtcccatagagctctcctaagccaatcggacctttaactgatttaggtaatcctatgttcccaaaacacccagacagggtcgatttaactttcccaccgccgttcctggtttctaaacctca

SEQ ID NO: 476209 - DNA, 530 bp, Homo sapiens
tttgtattttttaataggaaaatgaaagaaaaagctcaatgccttctcttgtcctgccaccactacsccccaccacactcccaccccaaccccgggtggcccctgtgtgtacactttttctcttgaacttaaataaaataaaataaaatttaaaaaaccctaatcagcagcagtggtcaggggcgcacccactgcactccaaagaaggtctcatcagtgtttcgggaaggcaaaagtgtcccagtgaggttggtgcagagtgtgtcccctcgggccaggggcgtcaggcgctgggaggcaatggtacaaccttggtggaagctgagacgcagcaggctgatgctacgggaggcgggagagcagattcccacggccagggtggtggggtggtgcctggaggccgtcgtggaggagcagatggccagcgtcacctggatgtgtaccatgtagatgccatcacgatggatacgtagctgccccttgtccagctctggtccatgcaggaaggagcggcccagtgctgggccccc

SEQ ID NO: 476210 - DNA, 620 bp, Homo sapiens
ctgatttttgtattttttaataggaaaatgaaagaaaaagctcaatgccttctcttgtcctgccaccactacgccccaccacactcccaccccaaccccgggtggcccctgtgtgtacactttttctcttgaacttaaataaaataaaataaaatttaaaaaaccctaatcagcagcagtggtcaggggcgcacccactgcactccaaagaaggtctcatcagtgtttcgggaaggcaaaagtgtcccagtgaggttggtgcagagtgtgtcccctcgggccaggggcgtcaggcgctgggaggcaatggtacaaccttggtggaagctgagacgcagcaggctgatgctacgggaggcgggagagcagattcccacggccagggtggtggggtggtgcctggaggccgtcgtggaggarcagatggccagcgtcacctggatgtgtaccatgtagatgccatcacgatggatacgtagctgccccttgtccagctctggtccatgcaggaaggagcggcccagtgctgggcccccctgccagtatagcctggggtcctgctgaggtcctgggggcacagggttagagggatgagaggatggaggtttagggaaactgag

SEQ ID NO: 476211 - DNA, 301 bp, Homo sapiens
gctggaagctctttctccaatgagcaaagttacagtgacctggctggagttacctggtgcacataggaccttaggggaaagttcagcgtggactacacttgctctgggatctgcttttccacatgtgtgtatggcacgcctttttctgctggattgggaaggacaagattttgctgtgctagggagaaatgaaaacggggkgagctgagtagctgggtttctggaggatagaacatcagatggggaggctttccgaggtgaagaatgagagggaaccacttactagagagaaaagagctcc

SEQ ID NO: 476212 - DNA, 621 bp, Homo sapiens
ctgggaccatctagttgcaggaacacaagctcagggctcccaccgattccacattatggtgagttgtagaattattttattctatattacaatgtcataataataaaaataaagtgaataataaatgtaatgcgcttgaatcacccagaaaccatccccgctccccccctaccccatacacacaccaactgtcttccatgaaaacagtctctggtgccaaaaaggttggggatcgctgcactagggtatcagatacttatccaggtgcagtggggactagagtcagaaatgcaagagtctgcctggagcatgtgtgtgtttgtgtcctgcatcatctctgcccaccatagtcaaatctgcgattctccgtgcattggccgggggggtggtgcctttctgtgtccaagagtgtctaggggcacatgggtgtgtctgtggatgtggtgtctccatgtggccgtggtaggtgggttgtgtactctgtgtgtgcacgtggctgtgtatagctgtgtgtgcatgtgcagtatgtgcacgtcggtgctgtatcwaagtgcacatgtggctactgatcaacagacatttactgaacgtctactgtgttccatgctctattctaaaccc

SEQ ID NO: 476213 - DNA, 563 bp, Homo sapiens
tgtcacttaccctctcggtgggctcagctaaccaaatccggcacacgaattcctgcaccgcagctctttctttgaggcctcttggggtggggcttcctggcttggctaataagtccctgggcccccaaccctccggtcccacatccggggccaagaggaagcccctgagcagacagtaagggctggaggaggaagggagccttcccacttccaacagggcctccstcttcatgtccagagactggtcaggaggtggtgccccagggataatgccaggggctgtggtctgaggaacaggtagacaagcagagttttgcatgcaagggtggctgatgcaaacatgacaaaattaatgcctcttgctaggcatggtgcggacaagcacttgtagtcccagctactaaggaggctgacgtgagagaattgcttgagcccgggagttcgaagctacagtgacttatgatcacagcactgcactccagtctgggcaacagagcaagaccacttctctaaaatagtaataataattatgtctctgggtgagaatgacataccacattcat

SEQ ID NO: 476214 - DNA, 557 bp, Homo sapiens
aattaggtgccctacaaactagtcttgtcaatcatgggctctgagaccttgagctgggggtggggtgggggcagggccctctcacctcggcacaggggcctgagccttcctcygtcttctcctcctgatccatcatgtccctggactccagtcacttttctgctggcctctgccccggcccagtgccagagagggccttttaaacgtccaggacgtgggggtgtggattccccccatccccaaatccccagctcatgccccatctgctcccacccaagcttaagccccataaagatcatccagataattgtttgcccacaacgatgctggatctggcatggtgggtagggggcagggcgacctgagcttggacctcgctgtgcccagcagcaatgactggaccccagggactctcaggtgtgatgtcacaaaaggcctgagcagcatccccacagttggagaagggaggccaacagtgtagggtggtagctggcttagggaggacttgcaggtgtccccacccagccacccaggttcccccactggctcctgaaagg

SEQ ID NO: 476215 - DNA, 557 bp, Homo sapiens
aattaggtgccctacaaactagtcttgtcaatcatgggctctgagaccttgagctgggggtggggtgggggcagggccctctcacctcggcacaggggcctgagccttcctccgtcttctcctcctgatccatcatgtccctggactccagtcacttttctgctggcctctgccccggcccagtgccagagagggccttttaaacgtccaggacgtgggggtgtggattccccccatccccaaatccccagctcatgccccatctgctcccacccaagcttaagccccataaagatcatccagataattgtttgcccacaacgatgctggatctggcatggtgggtagggggcagggcgacctgagcttggacctcgctgtgcccagcagcaatgactggaccccagggactctcaggtgtgatgtcacaaaaggcctgagcagcrtccccacagttggagaagggaggccaacagtgtagggtggtagctggcttagggaggacttgcaggtgtccccacccagccacccaggttcccccactggctcctgaaagg

SEQ ID NO: 476216 - DNA, 439 bp, Homo sapiens
ttaaagcatctactatgtgctgaggagcatgggacttggggtccttcaggcctggaggtcacgggctaccttctttcgctgcttgactataggtaagtcccttctctcggagcctcagggaggtggggtgtggcgcggccaggctctgattagcggcagctcaagctggcccttttgacattgtgagaggaacccagagaccatcctgggactggaactgtccagggaggcagctggacagacctgagtccgagtcctggcttctycctggatgagcagctcagtttgctcatctgtaaattgggagtattcaaagcaccagcacacagtaggtgctcagtaaacctactggcaggatgctgggggactgtcctcattctgtggggcctctctcagtggaactgaggttccaagagggtaagtcatttgtccccatcac

SEQ ID NO: 476217 - DNA, 541 bp, Homo sapiens
agctgcacccctttacctgctgtgtgacttaatcctctctgggccccagtttcctcatctgtaaaatggggataacctcgtctgtaaaatctctcacataggttgctgtgtgcgtaaagccttcagcccaatgccagatatagggaggctctaaaaatgggagcatttttagtgcaatttcctgaaaaatatctctcacataattaagcagctcccaatccggcagccagcaaggccctgtgtggctgacaccttctcctctgtattgccccctctgtatgcccctccagtgacaatggcctgcctttctgttttatttttggagagatggtctcactctgttgcccaggctggagtgcagtgcagtggtatgatcacggctcactgcatccttgacctcctgggctcaggcgatcctcccacctcagcctcctgagtagcttggaccacaggcacatgccacctgcctagctaattttaaaattattttgtaggccgggygtggtggttcacgcctgtaatcccagcacttttggaggcc

SEQ ID NO: 476218 - DNA, 505 bp, Homo sapiens
gcagtgctgggcacagggacgtgggattgatagctgaggttgtcatctcaggctacagcttttgtactgtacccgtgtcccagaagaacccagagttcctagagaaggatctaggctctgccaccatcttggccctgtctggtagacatgctcgggctcaggcttggtgttctcatgaacctgggggcactgttcccctctggcatctgtcaccctctgaccatgtgggcgtggtctgtgagatayaggacttcgtgatggagtggtggtcttcttgtgaggttggaatatgaactgctgcaagttggcccacctcattcttggccatttgtttgcaactttggggctgtggcacagtgtgccgtgcaagggctacaggctgggaagccagcagatgggaagtggctaggctgtggaaccccgtccagggcctcactttgcccaagacacctggaggagtcttggaagaccttaccccaggtcctgtcaccccgttcctttgtga

SEQ ID NO: 476219 - DNA, 511 bp, Homo sapiens
taacacaggcttctaccagcaagcttccactctccctgccttgccacactgtgccgccactatatggataatcctgtcactgagttaaccacagtggattgttaggtttaatttccacattgctttaattcgtggctttgcaaaaatctcatgtggcttcccttctccctccttatataacaatttggaatagctttaggattgccaagaaggtaaactggagaaaatktgtgtggtcatagtaacttccaggacctctgcattgaaaacgaaggctctctcaaaacacgttgagccttgctgagcaaacatgtttgcctgagagagagcagcagagccagtgccaccattgaccacagctttggagggacaggagaggtggccttctgtctagcagcatctccaggacccactcagagatggcacccttgacctggactttgatgaagctttgtgaggaccaccaagagtcactgtgttctcatgatcctctgggatggccagtgcaggt

SEQ ID NO: 476220 - DNA, 462 bp, Homo sapiens
gctgaggcgctgctgcggtgtgggactggggcagggggcggggaaggagagccacctccaagtggtaggtacttctggagaagtcagggctctgagtttgtagcaggtgaaggagaggggcggcagtccttaattagtcaccaactgtgactgtgcgttgcgcacttggcggcgccccgggtcaggtccagcgtgagacgcgagggagttctgactgctggaytctgttagcaccggacaaaaagagggtttgtattctatttccgggcctgggactgacttgttcacttcgacttggcttccagggagcaaccaggcagagctaggttgcctacttcccccagcccccaccccgacgctggaagacaagtccagaggaaacttgggcacagcaagagcaaacagaagaaaacttcgctgggttaagtctagtgtctccccaatgctacatagggccagaca

SEQ ID NO: 476221 - DNA, 623 bp, Homo sapiens
tgtcaaatcgttagtcacacaatccaattstctcccttctttggtgtgcctcttcagtattggaatgcagtcttctatcagagcctgatagcagcctcctttaagattgtctacaacatcaccacatgttttttgcatatatttcttacatccatcaatcaccatttggtcaatctctaccatagtgaccatctttgattttagtttgactatttctcataatatgcccccatctcagcctctgagaagcagtacctctttgccagtgaaatctgctttgctgctgcccgtgatggcccaggtatatgccaaatcactctgccgaatcaacatccctactaaggatgagaatatttccaaattgcttctagtgtagaattgtaatgttccaataaggtgaatcttcattgtacaccacttcatctatgtcatattcaaccaggcgcccatcggtggtggaccaatgtctgttgatggcccctcttcaaactacaggtggtaatcgcttcaccagcccagtactgtcttgactcaattctttcattcttttttctacattgtttgaaaggctgtcgatctcttctttgccctgcaagtcatcattgtaactctgaaggtccagc

SEQ ID NO: 476222 - DNA, 595 bp, Homo sapiens
aataaaaaacttttacctgaagtcaagggcatggagtgtgatttgttgtgctcgttgggaagtggatggcttggatggtggacagtatcacttggtacctcctctgtgactgcaggaagtaggggcatgaatgtctttggtaagaatctacttgggtggaattgctgcattttcatatgaagttagtaggcagggcactctctccagcaaaggcacgttcctgaaagagctatttttctaattcagcagaccctyggggtttctggagttaacatttgtggtcggacaatcgagagaagtctcatgagtcactgaattgaagtaattgtgctgaagcacacatttgatcacagaggctgcaaggttggtgtgcagaagtgagttctgggcacaggagccagcctagcagcccatgggcaccagcctcacggcatagctctgttgttcgcaatttgtctccttacggacattttatcgagaaattagaaactgaattctgaaaccaggatgggatgaaacatattggaaagctgatgcagtgttgcctgcttgccacagtggtgcaaagaacatgagtgttgggagttccccaggg

SEQ ID NO: 476223 - DNA, 492 bp, Homo sapiens
gtaacagactctgtggtccatgctttctttaccttgtagtccatgactactaacaggtcactgatgagtctccttaccctggttcttgtctgcatgctaacaccccttgattaggaactgaggatgagaagctctggaaaagtgatgatcacagtatttttcaatctgcaagataaagaatattacctgtttccttgttccagagtggtaaactcctaactgacagatctaggattcaagtccagctctgcctccaagcctctgtccattctttctttctttcctgcacaacctaatgggaatatctaacaaaacatttgaagccacaagcctgsaaatcatcagaaaagtctaaggttgcctctactaaatctttccagtcttgcccttgccctctgagagcactaaccattccttcttttgaatctccttggtatagcatctgtaaaaattaggtgccctactttgttatatgtctgtgtccctctctgg

SEQ ID NO: 476224 - DNA, 558 bp, Homo sapiens
gctaaaaaaacaaaaaacaaaaaaaaacctcctatcaatctgactgtacttaaaatccagaactgtaactgcttacatgaatatttactgaattatatttgcactttagttacattttccctttaaaaggttctcatcttctgaatattctgcatctgccctcagttcttggaagggtaaggtcatggtttcttatatcccttctccttttgtatctcctcaggttccccactgtctaaagttgatcatcaagtaacagagcctcctggcacagaagacacttctacatgaattgggaaaaggcagattcatctgggtggatgaattacrtaaaggagctccttcaaggaagaggaattagcaaagatcatcctttcctccagataaataaaagcagccctaaaccaagatgaatggtgagtgaaagggctggattccaaccccaccccttccacaaacccaggtccttttgtgcaggtcacaacctgcacaattttacatggcagccccacaaggtaagttggatctggaaagtgctttcgttagggttttcagcag

SEQ ID NO: 476225 - DNA, 421 bp, Homo sapiens
tgctcctgtagccaagaacacagaatcagaaagctgtcgcaggcygggcgcggtggctcatgcctgtaatcccagcgctttgggaggccgaggtgggcagatcacccgaggtcaggagtttgagactagcctggtcaacatggtgaaaccccatctctactaaaaatgccaaaattagccaggcatggtggcgcatgcctatagtcccagctactagggagactgacgcaggagaatcgtttgaacccaggaagcagaggttgcagtgagccaagaacgcgtcactgcactccaacctgggcaccagagtgagaccctgtctcaagaacagaaaaaaagaaagcaagcaagcgccacagactgcttgactcactggtgctatacccccagcaccggcgcataggctattgacatcagcaac

SEQ ID NO: 476226 - DNA, 421 bp, Homo sapiens
tgctcctgtagccaagaacacagaatcagaaagctgtcgcaggctgggcgcggtggctcatgcctgtaatcccagcgctttgggaggccgaggtgggcagatcacccgaggtcaggagtttgagactagcctggtcaacatggtgaaaccccatctctactaaaaatrccaaaattagccaggcatggtggcgcatgcctatagtcccagctactagggagactgacgcaggagaatcgtttgaacccaggaagcagaggttgcagtgagccaagaacgcgtcactgcactccaacctgggcaccagagtgagaccctgtctcaagaacagaaaaaaagaaagcaagcaagcgccacagactgcttgactcactggtgctatacccccagcaccggcgcataggctattgacatcagcaac

SEQ ID NO: 476227 - DNA, 421 bp, Homo sapiens
tgctcctgtagccaagaacacagaatcagaaagctgtcgcaggctgggcgcggtggctcatgcctgtaatcccagcgctttgggaggccgaggtgggcagatcacccgaggtcaggagtttgagactagcctggtcaacatggtgaaaccccatctctactaaaaatgccaaaattagccaggcatggtggcgcatgcctatagtcccagctactagggagactgacgcaggagaatcgtttgaacccaggaagcagaggttgcagtgagccaagaacgcgycactgcactccaacctgggcaccagagtgagaccctgtctcaagaacagaaaaaaagaaagcaagcaagcgccacagactgcttgactcactggtgctatacccccagcaccggcgcataggctattgacatcagcaac

SEQ ID NO: 476228 - DNA, 588 bp, Homo sapiens
tagtgaagaaaaatctgggttccatgaaggaatgaataaacctaaagtaataccacaagtgggtaccatgattcttcctagtcttctccaaagcggcctatagctaatcatcagtataacctggcactagaaaaaaaggaaagtacccaaatatttcgaaaactattgtacgctgactctaaggtaacgccaactcccagaactcccaggttatcaatgcagtctaccaatcacagtagagataacagaagacatatgatattgactttttttttttwacaatatccacctcaccagaggtccaatgggaccgagaggtgacaatgtggtagcagccctcgctcactcttggcgcctcctcagccttggtgtccagtctggccgcactcaaggagcccttcagcccaccactgcactgtgggggcccctctctggggctggccgaggccagagccagctccctctgctcacagggaggtatggagggagaggcgcgggtgggagctggggctgcatgcagcactcgcaggcctgggcaagttctgagtgagcatgggttcattgggctctgcactcagcactgccagc

SEQ ID NO: 476229 - DNA, 639 bp, Homo sapiens
ctggttttaaagaatataggatggcctatagctattcaagtttcagtgaatatatgtaactgttgctctcacagccagaatacaaggatctggaatcaagggacagarattggattgtcaccttttattagtactcctactgacccactttccaaatttatgctcccatctctgtgactctgggttccactggctttgaacccaggaaggaatgattccacagtcaatgatggctatactcaggatcctcatgccagtcggaagacaaacaaaaaccaaggtggattccaaattggtgaaaagggtcgatcctgactctcaaagggaactaggtatgctgaaacccagcaggagcaggaaggaactatgaagagaatccagaggctcccatcagatgccttctcacatgaccatactgttaatgatggagggtgtccaggttcttggcatcttgaaaaagaattggacaaaacacacaaagcaaggaaggaatgaagggatttattgaaaatgaaagtacactccatggtgtgggagcaagcctgagcataggggctcaaggccctgttacagagtttttatgagtttaaataccctctacttggggtatgtcctaggtaaatgaagaggatgaagtaa

SEQ ID NO: 476230 - DNA, 639 bp, Homo sapiens
ctggttttaaagaatataggatggcctatagctattcaagtttcagtgaatatatgtaactgttgctctcacagccagaatacaaggatctggaatcaagggacagagattggattgtcaccttttattagtactcctactgacccactttccaaatttatgctcccatctctgtgactctgggttccactggctttgaacccaggaaggaatgattccacagtcaatgatggctatactcaggatcctcatgccagtcggaagacaaacaaaaaccaaggtggattcyaaattggtgaaaagggtcgatcctgactctcaaagggaactaggtatgctgaaacccagcaggagcaggaaggaactatgaagagaatccagaggctcccatcagatgccttctcacatgaccatactgttaatgatggagggtgtccaggttcttggcatcttgaaaaagaattggacaaaacacacaaagcaaggaaggaatgaagggatttattgaaaatgaaagtacactccatggtgtgggagcaagcctgagcataggggctcaaggccctgttacagagtttttatgagtttaaataccctctacttggggtatgtcctaggtaaatgaagaggatgaagtaa

SEQ ID NO: 476231 - DNA, 605 bp, Homo sapiens
ctggagtgcagtggtgtggccactcactgcccactgcagcattaagctcctaggcttgagcaatcctctcacctcagctttctgcccagataatttttaaaagttttttgtagagacaggggtctcagtgttttgcccaggctggtctcaaactcctgggctcaatgaatcctcctgccttcgcctcccaaggtgctaggattgcagacatgatccaccacgctcagcaatgagcggtttttttttttttttaaaccaagatatctgtacatgtttctgacaaatattttatttaaaatctttaacaactgcatactaaccaaggttattctgtttttcattttcattatgactacttgtttttctttcttattctcattttttacctaattaaaataatttaccatgtagtggccctggcatgcattttgctccttcatacagtcatacagctacctcgatgtcccttctttctgccattctgaaattggacctcattccttgactcttgctccccatctgctatgtgataaagtcctgtctgattacattgyctccaaagcctcttttatagacttccatttgccccttggcatgtcttgcat

SEQ ID NO: 476232 - DNA, 550 bp, Homo sapiens
ttggaaacattttttaaaaagcaaacaaaagcaaagtctgaacccggggtcctgttttcagcagcagtaaataattccctgtattctctattatctcttttggactgggccctttactcatatagtctaactgtatctcaaaggaggtgcctaagcatcgaaggattcctgtaaatcaagtgaacttgctttagaaaatggcataatctctatctagaaactattcctcacagccctttagggaataatccattcatgaaactgaaatattgttgggcttactttatatctgttgctcctcttggctgtatctgagarttggctcttgttcttgctctctctctctctctctctctctctctctctctctctcctctctctccctctttctctcctctctatttttctccctcctcttcccaaccaaatgatcttgagaagcaaagatttattgcctggaatcgagagccactgctcactcagccaacaaaatctggtctccagttaaggctaagggcaactggctgtgagtgcctcaacctgctgaacc

SEQ ID NO: 476233 - DNA, 550 bp, Homo sapiens
ttggaaacattttttaaaaagcaaacaaaagcaaagtctgaacccggggtcctgttttcagcagcagtaaataattccctgtattctctattatctcttttggactgggccctttactcatatagtctaactgtatctcaaaggaggtgcctaagcatcgaaggattcctgtaaatcaagtgaacttgctttagaaaatggcataatctctatctagaaactattcctcacagccctttagggaataatccattcatgaaactgaaatattgttgggcttactttatatctgttgctcctcttggctgtatctgagaattggctcttgttcttgctctctctctctctctctctctctctctckctctctctcctctctctccctctttctctcctctctatttttctccctcctcttcccaaccaaatgatcttgagaagcaaagatttattgcctggaatcgagagccactgctcactcagccaacaaaatctggtctccagttaaggctaagggcaactggctgtgagtgcctcaacctgctgaacc

SEQ ID NO: 476234 - DNA, 571 bp, Homo sapiens
aagcatttgaagaggtgcctgaagctgtggaaggcaggagacgtaagaagcccatatggcagagtttcctgagctaatgtgagcacatgcgatgatcggggctgctaagggaagtaagcaattcctgctatggctgccacaccccagtgggacttgcaggggaataacaggacactgctgtgtccaccactccrggagaaatgtctcttccagagctgctgaaaacacaacagatctccctctggggcagcctgacgccagaggccgaggggaaagaggaaagtgctgtctgatgcccactgcaacttccattctatctgaggcaggccatttcctaaggcttggaggctggcagaatggcaatcaatttcagtcaactgcctgctcacttccatccgtggcttgatgtggcacaaagaatgacaggctcccactcagaataggagagttcaaattctagcttttctaacccctgcaaatctggcaactgactgaatttctctggatctataaaatgggactaattctgtctacatcacaggtatgattaaactggagaagatttgtatga

SEQ ID NO: 476235 - DNA, 571 bp, Homo sapiens
aagcatttgaagaggtgcctgaagctgtggaaggcaggagacgtaagaagcccatatggcagagtttcctgagctaatgtgagcacatgcgatgatcggggctgctaagggaagtaagcaattcctgctatggctgccacaccccagtgggacttgcaggggaataacaggacactgctgtgtccaccactccaggagaaatgtctcttccagagctgctgaaaacacaacagatctccctctggggcagcctgacgccagaggccgaggggaaagaggaaagtgctgtctgatgcccactgcaacttccattctatctgaggcaggccatttcctaaggcttggaggctggcagaatggcaatcaatttcagtcaactgcctgctcacttccatcmgtggcttgatgtggcacaaagaatgacaggctcccactcagaataggagagttcaaattctagcttttctaacccctgcaaatctggcaactgactgaatttctctggatctataaaatgggactaattctgtctacatcacaggtatgattaaactggagaagatttgtatga

SEQ ID NO: 476236 - DNA, 619 bp, Homo sapiens
ggcatggccacattttataggccctcattaagttccatcatgtgagggtccgctcacttcttcaaatactcagattctcatcattggcagtggctggtgatcaggtggtaagttatccatgccaataaaaataaacattagtttgcatgagatttaagaatgtcaaacaattaatctgcatgaaatctatagccgtcacatggacaggaaagctcctcttggcctgttccagaaaattttctccctgtaaaaatcttcatggtaacccaagttgtaatcggaagtcatctctctgatttatcaggagacatccccatcttggggaccagaactcttgaaagtccctgcaagtagtacattccctcactccccttcccaaggcagacttacatggaaggcaaaactaaaatgagaaggatgctttgtgtgcatggaatcaagatgaggagatttagatatatgtgtataatagcatcaggatgagatggctggatgtatccatcctgccatcaggatggtctggaaaaagggagaaattggagcctagcagctaaagctccrtgtccctgaacacctgaacagtctcagccaatattcaccctcccattttctagatctt

SEQ ID NO: 476237 - DNA, 423 bp, Homo sapiens
gtgaggcatatggtcagaacttcagcagaagcaaactactctacttacatattcttatatataaagccaagataaaaccatgattgtctttttgtggccaggaaatgtactcatggaagaaagcctacttatcgtcctgcaaattggtaatttttccrtggtgacttctctccttgaatcctggagttcccacctggaatgttcctggctgcctctctagcagtgatgtggctgtctgctgaggtggcctctgcctgtgccagggccagcagcagcttcctgatcctggcttcctggtcccagtatggcagccacagctgcctcctcatactttcaaagctgatgataaaatcacagaatcaggaatccagctgccaccactgctctgacacattttcatgacctgcttgtccacagatgtag

SEQ ID NO: 476238 - DNA, 423 bp, Homo sapiens
gtgaggcatatggtcagaacttcagcagaagcaaactactctacttacatattcttatatataaagccaagataaaaccatgattgtctttttgtggccaggaaatgtactcatggaagaaagcctacttatcgtcctgcaaattggtaatttttccgtggtgacttctctccttgaatcctggagttcccacctggaatgttcctggctgcctctctagcagtgatgtggctgtctgctgaggtggcmtctgcctgtgccagggccagcagcagcttcctgatcctggcttcctggtcccagtatggcagccacagctgcctcctcatactttcaaagctgatgataaaatcacagaatcaggaatccagctgccaccactgctctgacacattttcatgacctgcttgtccacagatgtag

SEQ ID NO: 476239 - DNA, 588 bp, Homo sapiens
atctattttctaaaagacttgccttagaaatgacacataattacttccactgatattctatttgtatgaagtagctcacatagccacacctaaatgcaaacagggttgtaaaatgtaatttctgctagacaaccatgtgtcaaaggtatctctgctcactccccagggatgtctccatgttattaagagggaacataaaacagacagttgactatctctgccatagcagagcacttaatctagcctataattttagcctttgcattttgcttcaccataaggatttgctgtcatcatctttattttctcttggttcataaaaattatttctttgtcccatttccaatcaagaaattaagaatacaggcagtgaggactattcakaatagagaagataaatatgtcatttagttgtaggagttacatcattgatgacctaacaccagtgtaattgtgggaaaaaattcacttaggattcactagtccatcatttcttgttctgttggcatctgcccttatcctgttgggtgaccttgggaaaatacttgtattctttggacctgtgtttttgtctttacaaaataaggg

SEQ ID NO: 476240 - DNA, 150 bp, Homo sapiens
tctaaggcatggccttcatcttgaattggttctgggtcaacagaagcctaggctgggttgattagctcacttcrctcttccctgagaggcctctgaggagctagctacagtgggagctttgggagggtaggatcaacacctttggatatc

SEQ ID NO: 476241 - DNA, 150 bp, Homo sapiens
tctaaggcatggccttcatcttgaattggttctgggtcaacagaagcctaggctgggttgattagctcacttcgctcttccctgagaggcctckgaggagctagctacagtgggagctttgggagggtaggatcaacacctttggatatc

SEQ ID NO: 476242 - DNA, 150 bp, Homo sapiens
tctaaggcatggccttcatcttgaattggttctgggtcaacagaagcctaggctgggttgattagctcacttcgctcttccctgagaggcctctgaggagctrgctacagtgggagctttgggagggtaggatcaacacctttggatatc

SEQ ID NO: 476243 - DNA, 150 bp, Homo sapiens
tctaaggcatggccttcatcttgaattggttctgggtcaacagaagcctaggctgggttgattagctcacttcgctcttccctgagaggcctctgaggagctagcyacagtgggagctttgggagggtaggatcaacacctttggatatc

SEQ ID NO: 476244 - DNA, 589 bp, Homo sapiens
ctgtgacttcttgggctcaggtgatcctcccacctcagcctcctgtgtagctgggactacaagcatgtgccaccatgcccagctaattttgttttcagtagagacggggtttcgccatgtttcccaggcttgtctcaaactctttggctcaagtgatctgcttgcctcagcctcccaaagagctgggatcacaggcatgagtcaccatgccgcgcctggctcctccttcttttttaacttaaatgtatccactgcacactgctctcccttccacccttccccttattccatccagtctttacatggtaaaggtttatgcrtaggctttttaaagtaccattctcaggctagcactgttttggctagaagagagaacagtggccttgagtattgttgagaaagcagaaaggaatacagaacctacacacagattaagattccaagatataatcctgctacactacagagtttttcagattttcttctgttaattttaaggtgtcattgaagaaagcctcaagtaattatttgtttaaaaaggctttccattgtctctccatgaagccacccttttcttcatttgtagcct

SEQ ID NO: 476245 - DNA, 595 bp, Homo sapiens
cagcctcgcacagagccagcacctgtgctggtgcctgaagctgtccaccccatcacagcaaccagcatgcctggctgtgygcagtggtcagatcccgtgcttgctcactcgctcccacaccctttgctgcttctcaactggctcacccttggcagatgtggcatctgggttggtagtaggaaccaagcacagcctgccaggttgagttgggggaatgagcccagtgggcacaagcaaaacccaagtagaggcaccaccagccacagaggtttctggctggcaaagtgataccctaaagagcttgtgacattattcttatgtttgttatgttacattagctgtgtttacctacacaatttgttttcattcattttagatttttaaattactttaatattcagtatgatgtatatttttgttttagagattatctttgtacttacatctttaaaaaatgtccttagtcacactcattagagtggctacataaaaaaaaaaataacaagtggtgagaatatggagaagttgcaacccttgtgcactgttgatcagattgtaaaatgatgcaactgctatggaaaacagtatggtagtt

SEQ ID NO: 476246 - DNA, 436 bp, Homo sapiens
agactggtaccaaaccagcttggttctgttctgcttccactgcctgtcaagactgtgtgctctgggcaaggtacttcaaccactgggtcttggcttcctcatctggaaaatgmaaataaaactgcaactttataaagcttttctgaaatcaaatgcagcaatgtacataaaaggcaaataagctcaccctatgttttacctaattttctttttatcctgctctgtgtatttcttaagccaaaccatcttacttcctttttagaatgcatcgggatagacacaaataaatggaaacaccattacaaagcccctgctcacacttcagaattcagattgcattacctcctccgggaagtcttccttaagtcactctctgctcgagtctcatttagatgatctcctgtgtgcttgcatatcgtctgagcatacctctgtg

SEQ ID NO: 476247 - DNA, 436 bp, Homo sapiens
agactggtaccaaaccagcttggttctgttctgcttccactgcctgtcaagactgtgtgctctgggcaaggtacttcaaccactgggtcttggcttcctcatctggaaaatgcaaataaaactgcaactttataaagcttttctgaaatcaaatgcagcaatgtacataaaaggcaaataagctcaccctatgttttacctaattttctttttatcctgctctgtgtatttcttaagccaaaccatcttacttcctttttagaatgcatcrggatagacacaaataaatggaaacaccattacaaagcccctgctcacacttcagaattcagattgcattacctcctccgggaagtcttccttaagtcactctctgctcgagtctcatttagatgatctcctgtgtgcttgcatatcgtctgagcatacctctgtg

SEQ ID NO: 476248 - DNA, 436 bp, Homo sapiens
agactggtaccaaaccagcttggttctgttctgcttccactgcctgtcaagactgtgtgctctgggcaaggtacttcaaccactgggtcttggcttcctcatctggaaaatgcaaataaaactgcaactttataaagcttttctgaaatcaaatgcagcaatgtacataaaaggcaaataagctcaccctatgttttacctaattttctttttatcctgctctgtgtatttcttaagccaaaccatcttacttcctttttagaatgcatcgggatagacacaaataaatggaaacaccattacaaagcccctgctcacacttcagaattcagattgcattacctcctccrggaagtcttccttaagtcactctctgctcgagtctcatttagatgatctcctgtgtgcttgcatatcgtctgagcatacctctgtg

SEQ ID NO: 476249 - DNA, 658 bp, Homo sapiens
ttcccagttttaaggatgttaatataaggattgagtacaaaaggaatggcagaaattcttccttgtagattaccctttcaggagaaaataccttgggaaatctaacctatgaatggtgttggatttcctaacatagattcctagtggagtgaaaaagtgtcttcataaaatacctttggctgatcaccctgtaacagtgagagaaaatacagactgtaccatcacagctcccagcaatatcactgtgtccatgcaatttatttattcatccagcatatatttattgaacaaatgctttattgattattaagaaaaaatgtggaaattatctttgccaattctttttttttttttttgagacaaagcctcactctcgttgcccaggctggagtgcagtggcacgatcggctcactgcaacctctgcttccagggttcaagcgattctcctgcctcagcctcccaagtagctgggattacaggcacccaccaccatgcctggctaatttttgtatttttagtagagacggggtttcaccatgttggccaggttcgtctcaaactcccgacctcaggggatccgcctgcctcagcctcccaaagtgctaggattacaggtgtgagccrccatgcccagtcaccaattcttgataaatcaca

SEQ ID NO: 476250 - DNA, 593 bp, Homo sapiens
ctgcaaacctttccttgggtaatgggattagcactctgttgtaactgcaatccttaaggatacaaatttgtttctgaatgttgtagctagtaatcttatgctccttgacaggtcttacagtgtaactgccactcttggaatggaaaatgcagacctcagacctctctctgtctgctaggttaggaagttcaaagactttaacaggaagtattcagtcttgaggaagtaaaaattagctgctccccacctttatttttcaatgatattattgaaggaatgtgatgagtcacctaaatttagmatacatatagatgcttttataagagaatttttccttgtagtacccttaatttttagtacttttaaagaaaagaatgctaagaaatattttctgtctaagtatatttgttgatatttaaaaaccttctgaaccagttagtttgtttggaattcagtattaaaggaataaaagtcaagaactgtttgtggttcttctctttgctatcctctttctatgagacagctcttatttccctggatggacaatatgcattgagcattcttaatccagaaatctgaaatcttccaaaatg

SEQ ID NO: 476251 - DNA, 551 bp, Homo sapiens
gctgccacctcatggagaagtaaatagagtcagttttcattgttttcagtaagctgacctccaaaggcatagatgtgagctttcttttgaaaggaaatgaagtattcaccgttaaggataaggatgtttgtaatgtgacagtgttaatgctagctaaatgagaaagccatatatgaatacttagactgttgctacctgggagcattatttattgacctgtgccttcgtcagagcttcagatgtgaggggaatgatgctaatagaatcatgtaaagatgtttgtcattaaaaagtcacatcgcaattartagattcagaattcatcgagtcctcttgctctgtgtcacacccgctgcctctgtgacaaccttcatttcctacttagcaaatccaagcctggtagctggagccccaggaagttgttaaagcaattaaaggcttctgtctcccagcacattgcttggttaccatagtatcctctgcctccaagtctctcctgatgatgtcagtatgcatacaggggttgttcagatcatctacgtggggatgat

SEQ ID NO: 476252 - DNA, 502 bp, Homo sapiens
ccaacagcaaagaattagctggtctaaagtgtcagtagcgcacaagaaaccaaggtgtaaaaagrtgatactcaaagatttttaagcaaggaagttgtattcccaggttcatattttaaagaccactctactgtaaggaaaatagatgggtggtagaggtgggaagggagaagaatggaaaccaggtaggatgctgtggtggtctcctagacaggagctgttagttacctgagttattgtggtgggagcgaagatggagagaagcagatggaatcaaaatatgttttgggggaagaaatgttaggacttgtcagtgattgaatattagtattaaagcaggggaataaatcattctgaaccgtcaaatttctgtcttgagaatctagggaatgcttatttaatgacttgaggaaaatgggcaagaagtaagcttgggggctgagttaagtttcaagtctattaagtttgagatcctgtgtgaatttcaaatgaagcaggcagc

SEQ ID NO: 476253 - DNA, 528 bp, Homo sapiens
caagagagggagaccgtagaaagaaaggggagagggagatggagagggagagccattwttttcaactaacgaaatttattcatcatgattttaagaatattaagacagacatttccaatgtgttgttgaattcagatggcctgtgtctccagaatttccctgatctgtcattttagtgaccttatcagaaggcacgatttgtccataaggagcctgggttggtcctcaatacttatcactttcttttctgagttcataaactctgtttagacgtgacttgctgtggtttgatgtcagactcatgaggatatcattttcataatcttcttttacctgtttttgaaaataagaacgttgaccttttcaagtctattgaccctaatcccagtcttacgcactttcccctgcagagataagtgccagtgtcttagctattgtatctgtaggttcatttgcaactcagcataatatactaatgaaaggttgattaaccttcctgggcagaaatccttgctgtgaaacttctag

SEQ ID NO: 476254 - DNA, 443 bp, Homo sapiens
gttacccctctgaactcctaatccttacctgtgaaatgtggctaataataatgcctatcaaatatgttgtgaagatttagtgagttaatctgggcaaaggatttagaatagtgcctctcatgtagtggacactcagtagatttaactttgttattgctctagaatgttatttgggtgggcctgatgtcctgctatcttaactatttccgcaatctgtcatctctccaattccctattaagcatgattattctcttctttagagtttgaagactgttcttttgataaagaagatagagttttttttttttttcagttgygagatttaatagagtgaagacagagctcccatacaaagggaggggacccaaagagggtagccgttgctggcttgaatgcctgggtttatatccaatcattgtccctcccactgtgctctcaggca

SEQ ID NO: 476255 - DNA, 526 bp, Homo sapiens
cttactgagactgttaacatttcatgtttccttttttcacttggagacttgatttaaaggaagaaatccgatacctctttcttctggagaaacaaagatgtggtctttttccttttgtctcttcctgagatgtattcaagaggcccatgagaggctgaatgtaaccagcgcaccaacaatttgttcagctaaatgggcagttcgattttcttatctgcacactctactgagtgggaccccttgccctaamcccccagctaggtgtgttattggtgctcattcagaacccagacagcagctccttctgatgctgctttttgtagcagaaatcataaaaccctttgaaatgtatgttgcagccaaacctctctgcttaggggaatcctgcagatacctttttattctttctctttcgttctccagaggatatcatcatggcagtctgagttcaaagtgggtttttgtcatttctgtgcttggatgggagccagcaattgcctgcgagacctctgaactacaaagttta

SEQ ID NO: 476256 - DNA, 600 bp, Homo sapiens
tgtaaaaatcagctttcaatgttacattttttatgttgaaggtaacctattttatttctctgattctaagatattttgttgtattgttggttttcagcagtttttctgttatatttctaggtgtggatttgtttttatttatcttgctttggattttttggcctctttgaatttgcatattgatatcctccatcaattttggaggatcatcagccattatcttttaaaatattgcctgtcataccctctcttctacacttctttgatttcaataaaatatatatattcaacctttgcattctatcttctatatcttttgcactccctttcttatttttcatcttttttctctcattattgcattttcgtttgtttcttctgacccgtttgttgttgttcattgttgttctgcagatatttctgaaggttaccttaaatctattttggaacaaagtgggataaaatacctagctctccatatttccatgtttcycaatgacttccagattattatatttttctctgaatttctatgattgctactagaaaaataaaacagaaaggacaaaaaagcaataacataaaatgccagtgttagct

SEQ ID NO: 476257 - DNA, 284 bp, Homo sapiens
gaatatatgtttaaaatttaaaatttataragtgtggaatgccatgtccataggaacatgtatctcaggcagtatttgtgacccagaaataatatgaagttttttaacttaaaaaaattgttcatttacatagtttaactgataaaagtgtgaggacttacatttttctgaacaattactatggacatgaaggtcttactgaattggtgggagactggtaggtagaggttatagatcagaatcactttcggagttctaaaattcacacatgctcccacttcttg

SEQ ID NO: 476258 - DNA, 658 bp, Homo sapiens
tttgaatatgaaagccagggtatttccttttacattaaaattagcaaacatcattttcttatcatggctaattgtaaataatgctgcaatgaacttgtgagtgtgaatatctcttcaagatattgacttcatttcctttgaatatacaatcagaaatggggttgctcaatcgtatggtagttctatctttattttttggagaaacagccacattatttttcataatggttgtactaatttacattcccactgataatgtacaagggtacccktttctccacatcctagccaacatttatctttctttaatcttttagataacaaccatcctagcaggtgtgaagtgatatctcattgtggttttggtttgcatttccattattagtgatgttgaacatcttttcatgtgtctgttggtcatttatatgtcttctttggaaaaatgtctattctggtcatttgcccatttttttaatcagaataatctctcagaatgttatacctacatgtactgttacagcaatgaatcatggcccattaaataaattagatggatagttaccctgtgaatcattaaaacttgtttttaacattcacttttagtttgattctgggtagttttagacaagaagtgtttcactatgtactcattcagagt

SEQ ID NO: 476259 - DNA, 576 bp, Homo sapiens
ctgacagtttgaaggtttgaatatgaaagccagggtatttccttttacattaaaattagcaaacatcattttcttatcatggctaattgtaaataatgctgcaatgaacttgtgagtgtgaatatctcttcaagatattgacttcatttcctttgaatatacaatcagaaatggggttgctcaatcgtatggtagttctatctttattttttggagaaacagccacattatttttcataatggttgtactaatttacattcccactgataatgtacaagggtacccgtttctccacatcctagccaacatttatctttctttratcttttagataacaaccatcctagcaggtgtgaagtgatatctcattgtggttttggtttgcatttccattattagtgatgttgaacatcttttcatgtgtctgttggtcatttatatgtcttctttggaaaaatgtctattctggtcatttgcccatttttttaatcagaataatctctcagaatgttatacctacatgtactgttacagcaatgaatcatggcccattaaataaattagatggatagtta

SEQ ID NO: 476260 - DNA, 658 bp, Homo sapiens
tttgaatatgaaagccagggtatttccttttacattaaaattagcaaacatcattttcttatcatggctaattgtaaataatgctgcaatgaacttgtgagtgtgaatatctcttcaagatattgacttcatttcctttgaatatacaatcagaaatggggttgctcaatcgtatggtagttctatctttattttttggagaaacagccacattatttttcataatggttgtactaatttacattcccactgataatgtacaagggtacccgtttctccacatcctagccaacatttatctttctttaatcttttagataacarccatcctagcaggtgtgaagtgatatctcattgtggttttggtttgcatttccattattagtgatgttgaacatcttttcatgtgtctgttggtcatttatatgtcttctttggaaaaatgtctattctggtcatttgcccatttttttaatcagaataatctctcagaatgttatacctacatgtactgttacagcaatgaatcatggcccattaaataaattagatggatagttaccctgtgaatcattaaaacttgtttttaacattcacttttagtttgattctgggtagttttagacaagaagtgtttcactatgtactcattcagagt

SEQ ID NO: 476261 - DNA, 658 bp, Homo sapiens
tttgaatatgaaagccagggtatttccttttacattaaaattagcaaacatcattttcttatcatggctaattgtaaataatgctgcaatgaacttgtgagtgtgaatatctcttcaagatattgacttcatttcctttgaatatacaatcagaaatggggttgctcaatcgtatggtagttctatctttattttttggagaaacagccacattatttttcataatggttgtactaatttacattcccactgataatgtacaagggtacccgtttctccacatcctagccaacatttatctttctttaatcttttagataacaaccatcctagcaggtgtgaagtgatatctcattgtggttttggtttgcatttccattattagtgatgttgaacatcttttcatgtgtctgttggtcatttatatgtcttctttggaaaaatgtctattctggtcatttgcccatttttttaatcagaataatctctcagaatgttatacctayatgtactgttacagcaatgaatcatggcccattaaataaattagatggatagttaccctgtgaatcattaaaacttgtttttaacattcacttttagtttgattctgggtagttttagacaagaagtgtttcactatgtactcattcagagt

SEQ ID NO: 476262 - DNA, 585 bp, Homo sapiens
aaaattggtttctcagagacatgataaaagttaccagatgtctctcagactatatctatgaaaaaatacataaccaaatagacaccaattgcaaatgaattaattacattgaaattctaataactttcatttcctaaactgacattgatggaaaagaattctaagatataaaataagctctacttcatcctgctttcaatagcacatgatttaatcagaatatataatactgttgagcacataaatattattttcattacttaatgatgataattatgactattttcattgctataattttggtcatgccatattgattagcaataaaatatatacttagctagagaggcagctaatccaaaacttttgggatttcttttttttttttagattattggtgctcctcctcctgtcattgaggttaaaattaaatgttacatattccttctctgtgtatgtgtatcttatttcctcatattctacctcttcagagtagtgtgtgtgagtgcmtgcacacacacttgcatgtgagagcttctaatatctaaattaatgttgaatcattattcagaaacagagagctaa

SEQ ID NO: 476263 - DNA, 482 bp, Homo sapiens
aagctgtatttcatggaaaaagaacagaataactcaaaaggcagaacgaagagcctagaggtcagagatgagaggcatgaataattattcacaggcgttgaatataatcaaatgacttgcaacatttaccactgggattttaaaatgtggtggaccaatcatcttttagtctgtgcattttcccatttttttcaacaggaatgtctagagatattattcctgttttgccactgtatttttggtgagtgtgtagtaagtaactggcctctttagtatcacaaagctggatgaagaaaatgtggtacatatacaccatgagatactatgccgccacaaaaaggaaatgagatcatgtcctttgcagggacgtggatgaagctggaagccattatccttagcaaagtaacgcaggaacagaaaaccaaacaccacrtgttgtctcttataagtgggagctgaacagtaagaacacatggacacag

SEQ ID NO: 476264 - DNA, 578 bp, Homo sapiens
tgactctaacacttccaattcaaagaataaaagtaagtttcatgttgtttttttcaatcctatgtaatcctataattttgtaatggactctctgcttgtatcttctgcttaaactcaactcataagtaaatgaagcagttttgcattcagcattgtatgagctaccttcatctgattcttcttttcttattcttttttttttcctttgagatggagtctcgctctgttgcccaggctggagtgcagtggtgcaatcttggctcactgcaaactctgcttcccgaattcaagtgattctcctgtctcagcctcccgagtagctgtgattataggcgtgtgccaccacacctggctaacttttgtatttttagtagagatgaagtttcgccatgttggccrgtttggtctcgaactcctgacctcaggtggtctgcccacctcagcctcccaaagtgctgggattacaggtgtgagccaccatgcccagctcatctggttcttcttaggcctactacatagagtgttttgttttttttctggtaactccctcagcttgtttctagtctttagatcccagc

SEQ ID NO: 476265 - DNA, 578 bp, Homo sapiens
tgactctaacacttccaattcaaagaataaaagtaagtttcatgttgtttttttcaatcctatgtaatcctataattttgtaatggactctctgcttgtatcttctgcttaaactcaactcataagtaaatgaagcagttttgcattcagcattgtatgagctaccttcatctgattcttcttttcttattcttttttttttcctttgagatggagtctcgctctgttgcccaggctggagtgcagtggtgcaatcttggctcactgcaaactctgcttcccgaattcaagtgattctcctgtctcagcctcccgagtagctgtgattataggcgtgtgccaccacacctggctaacttttgtatttttagtagagatgaagtttcgccatgttggccggtttggtctcgaactcctgacctcaggtggtctgcccacctcagcctcccaaagtgctrggattacaggtgtgagccaccatgcccagctcatctggttcttcttaggcctactacatagagtgttttgttttttttctggtaactccctcagcttgtttctagtctttagatcccagc

SEQ ID NO: 476266 - DNA, 650 bp, Homo sapiens
ggaactcagacaggaaggtaggaaggaggggcccccggcatggtgataacacaaattaggggctggccagcatcayctttggtgaaaatttagaaaaattgggattttcttacctataaataaaaactgttggttttagaaacctaaactaagagtatgtgtgcaaaaggaaatctatataaggaagcagggctggactgtagttacaggaggcccaggaacagcccacttcctttctttgtgcctttttaaatcatctctaaatgtggagatggtaatacaattgcactcttctcgacttaaaaatacttttcttctaaatcacctgacacatctttttttgcccctgcatggtgctcatagccagtaagagatctttcagagcctctttatcagtctagtagatcttgctggaagccgccagcactccagatgctgaatgcagtcagactacagctcaagcactgaccctgaccatcctcctggtcttaagaatgtgccaaacctttatgttcgagctgctttattaggaacttcttgagctttctttccatgcaatttctccattcctactttaaacttttccacccagcttttatgataataatgagcgaggcttggatgctgctttatggcttttgaaaagcctg

SEQ ID NO: 476267 - DNA, 555 bp, Homo sapiens
tggttgggggaaaagagaggtctaatgatagaaaccttycccaaagcaaaggatgtaagcccacaccgagaattattagaaagaataatattctcccacactgagaattattagaaagaaagaaagaaaaactagaaagaaggacaaaggcattccagcatgcttcctgtgacagattgagccagtctttgtaacctcagattcacaaggacattgcaaagaatttcctgttgcgctcaccaaaattggctggcccttgtgccagagtcccactgacatccagaaaactattgcccatcttctctgggctgtgcaaggattagtgtcataatagatcatcacagccaaatgttattatgcaaagcagaaagctgcaagaaatggatcttcattcattgaatttgcatgtttggtggggactgcttcagacttcctttatctcgtgatcagtcgtgtgtgttgatcctctttgcaagttgttgtgagaactgggtgcagcaaaagctgccacttcaagagaccaaagggatttctgagatgaaaaagtgcatcaat

SEQ ID NO: 476268 - DNA, 555 bp, Homo sapiens
tggttgggggaaaagagaggtctaatgatagaaaccttccccaaagcaaaggatgtaagcccacaccgagaattattagaaagaataatattctcccacactgagaattattagaaagaaagaaagaaaaactagaaagaaggacaaaggcattccagcatgcttcctgtgacagattgagccagtctttgtaacctcagattcacaaggacattgcaaagaatttcctgttgcgctcaccaaaattggctggcccttgtgccagagtcccactgacatccagaaaactattgcccatcttctctgggctgtgcaaggattagtgtcataatagatcatcacagccaaatgttattatrcaaagcagaaagctgcaagaaatggatcttcattcattgaatttgcatgtttggtggggactgcttcagacttcctttatctcgtgatcagtcgtgtgtgttgatcctctttgcaagttgttgtgagaactgggtgcagcaaaagctgccacttcaagagaccaaagggatttctgagatgaaaaagtgcatcaat

SEQ ID NO: 476269 - DNA, 551 bp, Homo sapiens
caaattatccaaggaaatctgattagctagttcactgggttcctgcaaaatggagcttggtgtrtttctgcagcagaaatgtcagcataattggagtttctggagctcaaagagcttctttcttattgtttccatcctttggaggaaaaaaaaacaccccaaacaaacaaaacccaaacccccaaagaattgttctttgacttacattctttgcttttgcacatggttcagaagctgctcctgactgtgtttacgactttattaatcaggggaacagcccgaacatcatttaaacaaacaaggccaaaaaaaaaaaaaaaaaaatccatccctaaacagatgatgtgagcttaatagagatggccaagccaaagaccttaaataaataaactgactttaatttgtaggaaggagcatggggtggtcattacttgaggctgtgtgccatgcgatgtaaccaaattcaaaactcgctaatttcattattttaatggaagtctgcctcccattcattaggctgacatatgactagccattagtaacagtccatt

SEQ ID NO: 476270 - DNA, 474 bp, Homo sapiens
tcccaggattcaaacaaagaattttgatctcagaggttgcattatgtagttatgtgttctgctttaaagaactatactggaggtaaacttgaaactgcctttgcagaaattataactgaggaaattatgacagtgaaagagatcagacctaaccaactacaccttgcatctaatcttaaagctatccctattcattcctgggcataggccraaataaccttgggaaggaatttagtttacagtttgactctgaaacaaaattgttaatagccctttcctgaaaagacccccttcttgcctggtgaccagtctgcctttgtaggactaacaaattggctacaagattggaaattatggtttaggggtcatgcagcccctgactccaagagtctgaacctccccagattgctcctagggatagcgtcattattgtaaaacttaagatcagtgcttgagatattttgcaaaccctgc

SEQ ID NO: 476271 - DNA, 330 bp, Homo sapiens
tgttcattttttagcaggactgactttacctggagaataagtgaacccattaaacatcagaattgtttgagtagatagatggtaatgactgatatttattgagtgctttttatgaaaaaagtggtgttttaattctcacagtgacctgtgaagaaggttatcatttcatcactccagaaggagggtttattccctacagaggagaaaagagaggctctgatataatgggacaggattaaattcaggagaatctgagccccaaacctcagtcttscaactttgatgtgatttaaatcatatctgaatgcaaccaatattgctatctgtatt

SEQ ID NO: 476272 - DNA, 325 bp, Homo sapiens
ttttatggagctttcagagagggaagacaagtcaacacatgaataaatgttaagagrtagtgagcattaaggagataaagtaggtatagagaatggagagagatgggaggtgtgacccggttttgatagggtggtgagtgaaggcctctctgaaaaggtggctttgagcaaacgcccaaataaatggaggggctgagccgtgcagatatctggaagcaaatggggcaggggaaggagctgtttcaaaggatccaagatgggcaaatacctgcagggcttagaaatggtggctataatcagaaagcatgtagcaatagaagccttg

SEQ ID NO: 476273 - DNA, 325 bp, Homo sapiens
ttttatggagctttcagagagggaagacaagtcaacacatgaataaatgttaagagatagtgagcattaaggagataaagtaggtatagagaatggagagagatgggaggtgtgacccggttttgatagggtggtgagtgaaggcctctctgaaaaggtggctttgagcaaacgcccaaataaatggaggggctgagccgtgcagatatctggaagcaaatggggcaggggaaggagctgtttcaaaggatccaagatgggcaaayacctgcagggcttagaaatggtggctataatcagaaagcatgtagcaatagaagccttg

SEQ ID NO: 476274 - DNA, 576 bp, Homo sapiens
catgcatttgaggcagcaatgacttctttctagggggtttayatgaggagggatttttctttttgggaaaaaccctgaggtacacgtactcaaaggaaatatttgttgacttggatggaaagggcctgtcttcagctttctttctgctctgcacggctgcctctcagtgttaggttcaatgcttgaggctgtgccaagttgatttccctgtgagagcagacgcctgatagaagggcacagtgccagtcccgttgataatgaaatctttgcatccccgttgacacttctataaaggacagaagaggaactgcaagttcccattctgatcttttatttctgttttgtcaccctcaagaagatctgtcagaaagcttttgggatctggactcagatggacctgaatttgaagcccactgcgaattttactgcagtgggattttggtgagagctgctcaaacctgaacttgaggccaggcctggtggttcatgcctgtaatctcagcactttgggaggccgagacaggaggatcatttgaactcaggagttcaaggctaggctgggcaacatagggagat

SEQ ID NO: 476275 - DNA, 576 bp, Homo sapiens
catgcatttgaggcagcaatgacttctttctagggggtttacatgrggagggatttttctttttgggaaaaaccctgaggtacacgtactcaaaggaaatatttgttgacttggatggaaagggcctgtcttcagctttctttctgctctgcacggctgcctctcagtgttaggttcaatgcttgaggctgtgccaagttgatttccctgtgagagcagacgcctgatagaagggcacagtgccagtcccgttgataatgaaatctttgcatccccgttgacacttctataaaggacagaagaggaactgcaagttcccattctgatcttttatttctgttttgtcaccctcaagaagatctgtcagaaagcttttgggatctggactcagatggacctgaatttgaagcccactgcgaattttactgcagtgggattttggtgagagctgctcaaacctgaacttgaggccaggcctggtggttcatgcctgtaatctcagcactttgggaggccgagacaggaggatcatttgaactcaggagttcaaggctaggctgggcaacatagggagat

SEQ ID NO: 476276 - DNA, 583 bp, Homo sapiens
ctgaatacatgcatttgaggcagcaatgacttctttctagggggtttacatgaggagggatttttctttttgggaaaaaccctgaggtacacgtactcaaaggaaatatttgttgacttggatggaaagggcctgtcttcagctttctttctgctctgcmcggctgcctctcagtgttaggttcaatgcttgaggctgtgccaagttgatttccctgtgagagcagacgcctgatagaagggcacagtgccagtcccgttgataatgaaatctttgcatccccgttgacacttctataaaggacagaagaggaactgcaagttcccattctgatcttttatttctgttttgtcaccctcaagaagatctgtcagaaagcttttgggatctggactcagatggacctgaatttgaagcccactgcgaattttactgcagtgggattttggtgagagctgctcaaacctgaacttgaggccaggcctggtggttcatgcctgtaatctcagcactttgggaggccgagacaggaggatcatttgaactcaggagttcaaggctaggctgggcaacatagggagat

SEQ ID NO: 476277 - DNA, 614 bp, Homo sapiens
catttgaggcagcaatgacttctttctagggggtttacatgaggagggatttttctttttgggaaaaaccctgaggtacacgtactcaaaggaaatatttgttgacttggatggaaagggcctgtcttcagctttctttctgctctgcacggctgcctctcagtgttaggttcaatgcttgaggctgtgccaagttgatttccctgtgagagcagacgcctgatagaagggcacagtgccagtcccgttgataatgaaatctttgcatccccgttgacacttctataaaggacagaagaggaactgcaagttcccattctgatcttttatttctgttttgtcaccctcaagaagatctgtcagaaagcttttgggatctggactcagatggacctgaatttgaagcccactgcgaattttactgcagtgggattttggtgagagctgctcaaacctgaacttgaggccaggcctggtggttcatgcctgtaatctcagcactttgggaggcygagacaggaggatcatttgaactcaggagttcaaggctaggctgggcaacatagggagatcctgtctgtaataaagaataaaaaattaaaaccctgaatttg

SEQ ID NO: 476278 - DNA, 660 bp, Homo sapiens
catcaccatggtacatttgtcaaaagaaattaatattaatataatgctattaactatagactttactcaaatttcatcagtttttccaccaatgtccttttttcctggatccaaatttgatttagataccaattgcatttaatagttgaytgtattactgttttttaaattctctacagacaaggcacctattgactgcacctggcagaacaaagcactcccacactcctctttcttggttctcccctcttctcagccttagagaagtcccattttcattccgtgattgacccttcttcttctctctccaccaaaggaaactttttttttttgtggttttagccttttattattttatttcgctaatataagcaaatatatattctaatccctttcacttccttatacaaaacaacatactcttttctgaaaccttgctaatttcatttgaatgaactggaaactcctccatactggggatgtagaggtccttctcattcttttagtatgtttcatagtactctgctgggtggctatatcatgctttattcaaccattcccctattgatggacatttgggttgtttctactcattgggtgttataatactgcaacaaatcagtcgtggttttcttagggagaaagatgagggtgggaggg

SEQ ID NO: 476279 - DNA, 660 bp, Homo sapiens
catcaccatggtacatttgtcaaaagaaattaatattaatataatgctattaactatagactttactcaaatttcatcagtttttccaccaatgtccttttttcctggatccaaatttgatttagataccaattgcatttaatagttgactgtattactgttttttaaattctctacagacaaggcacctattgactgcacctggcagaacaaagcactcccacactcctctttcttggttctcccctcttctcagccttagagargtcccattttcattccgtgattgacccttcttcttctctctccaccaaaggaaactttttttttttgtggttttagccttttattattttatttcgctaatataagcaaatatatattctaatccctttcacttccttatacaaaacaacatactcttttctgaaaccttgctaatttcatttgaatgaactggaaactcctccatactggggatgtagaggtccttctcattcttttagtatgtttcatagtactctgctgggtggctatatcatgctttattcaaccattcccctattgatggacatttgggttgtttctactcattgggtgttataatactgcaacaaatcagtcgtggttttcttagggagaaagatgagggtgggaggg

SEQ ID NO: 476280 - DNA, 631 bp, Homo sapiens
tggacctgctgaaagggtgagatccctcaggggctcatgcagggcagattggagggagcagagctgaacagtggagagcacagttagaaggcttcttcaggcatccaggggtcataactggagagaggagagtggaattgaagagggctggatgggacagacatgaagttgggatcgagccgacctcaggargatgaagtactgggggagggtgtgggcagaggggagacagggaaaggaaaaatcagatgttgaatttgttcaacttcagtggcagaaatgagaaaaccattttgggaaaaaaaagatgaagatggactaggatccgagaagaagcagggtcacaaacagcgtaagcccaaaggacattccctgctgtttctgaacccgccttggctggcccgtaaactgggcaggggtgacagtcctgtgttgtaaagggcgtagagggcttaagcgaggtaattgatatagcctggaagctacactgatttgaactttgttcatacatctaattaattacctgatattattatttacatttggctctcttgtcttacttatctttataactgtctctctatttgcttaacctcaggacctataacagagccagatttacagtttcttt

SEQ ID NO: 476281 - DNA, 631 bp, Homo sapiens
tggacctgctgaaagggtgagatccctcaggggctcatgcagggcagattggagggagcagagctgaacagtggagagcacagttagaaggcttcttcaggcatccaggggtcataactggagagaggagagtggaattgaagagggctggatgggacagacatgaagttgggatcgagccgacctcaggaagatgaagtactgggggagggtgtgggcagaggggagacagggaaaggaaaaatcagatgttgaatttgttcaacttcagtggcagaaatgagaaaaccattttgggaaaaaaaagatgaagatggactaggatccgagaagaagcagggtcacaaacagcgtaagcccaaaggacattccctgctgtttctgaaccckccttggctggcccgtaaactgggcaggggtgacagtcctgtgttgtaaagggcgtagagggcttaagcgaggtaattgatatagcctggaagctacactgatttgaactttgttcatacatctaattaattacctgatattattatttacatttggctctcttgtcttacttatctttataactgtctctctatttgcttaacctcaggacctataacagagccagatttacagtttcttt

SEQ ID NO: 476282 - DNA, 515 bp, Homo sapiens
tatataactacatatatactatgtactatatgtaactatatatttatatatttaatatatacatttatatatttacatgtgtttacatatagtacatgttcatttatatatttactaaatatataaatatagtatatatttagtactaaatatgtactatatgtaactataaatatttatgtatactaaatatactaaatatgtatttagtaaatttagtatatactgaatatatatttagtaaatttagtatatactaaatacagtatctatagtatatatrgtattatatatagtatatcgtatatacacacatatatagtatatattatatatacacatactatctatacatatatagtatatttagtgccaaatatatattatatgtaattatatcaatatttatatattattatatataaatatatatggtatatatagtatttatgtatactagatatgtaaatacttagtatatatagtatatttagtactaaatatgtactatatgt

SEQ ID NO: 476283 - DNA, 624 bp, Homo sapiens
atatacaaactacatacatatacatgcagttgtgtatttatatagtgtgtgtgtgtgtgtgtgtgtgtgtgygtgtgtgacattgtgtatgtacaatcaatatccccctccccacgggaaggcatctgggtttgtagactggctggtgactaacggattatggaaagttgttgcctgtggtcagggtcgtgctcaaaatgtttgagcaccgggagggcatgagcacagattcaccagagtggatgctggagcgggccccgcaggcccttgctcggccaggtgttaagcctggataatgagagtgaggggcatgtgaggtagcaggggaggttgctgagcgactggcgtgggagagtgtccctgttttgaacaactggtgtggccgtactgaaagccctagtgaaatatccgtcttgccgttggcagtcttattttaaaattctaataagaaagtggtgggctgtctacaccctgatttgcaagtggcaaattgggaagtgggctccataaatagaaggcctttgggagtttatcctgaaccttggacttcctgctccaggggttggatcccagacccgggtccgacagtgccaaccagttctgttgtatcgtaatcttgaaggg

SEQ ID NO: 476284 - DNA, 602 bp, Homo sapiens
aaatgagctatgcctataaaatgtttagtcatatttagcacttaaaatagttgatattgttattatcgttataattatccccatggtatgcattaaacagtcattttcagaaatttctggctttagcacagttgccaaaactttattttttcttgatttttatccttaaaacctgcatggcattgaaaataaataagacaggatctctctattctcaaaggagtgaccatctggttatgcggaggagggacagagaaagagggaaagaacaagttacaatagactgtgtcatatttattatagtgggaatatattggaacagagaggaaagtagtagccttatacagcctgggaagggggctcagtaatggcccatggggggatttgaacctatgaaagatgaggataaagtataggatcagcagtcaaggaatggagagggggttggagcagaaggaacagcacctgcaaaggcgtggaggtttgaaagcacctggaccatttggggatgttgcaattaggctgaggaatctaaagtgaarggggcttgttgagaaatggctgggcgggggccagggctcagttatggtaggatttcccag

SEQ ID NO: 476285 - DNA, 608 bp, Homo sapiens
gtctttccctgaagactgtggctactctccttgggttccataactatttcycctccaggtctaggggtagaaatggctcctcactgctgctagttagggctactgcaacctccctttttgtttttgttttttttaatcccacttatacagctatatatagccctttgctaaactctttttagttaccccatttgagtttactatgtatttcctgccacaaccttgattgatacagcagcccagagaagggaagcaattaactttctcactcctttattcattcatccaacctcccttcaacacttactctatgccaggacttgtgctgaggcttttaagaatgagacatgatttcttgtctatgtccctgagttctcagttgttcaccccagaaactgactcttaccaaagaaagagaacatgccgaaggcactgctgaaggcccagccttggaaaacaccccatacaaggtgactccagatagctttatagcggcaactcctccaagggcatgcgttagggataggctgatctggggacccctgctctccctgcagagaattcatggaaacccaatagggcctgtgttcttgcatcatgagtcaagg

SEQ ID NO: 476286 - DNA, 608 bp, Homo sapiens
gtctttccctgaagactgtggctactctccttgggttccataactatttcccctccaggtctaggggtagaaatggctcctcactgctgctagttagggctactgcaacctccctttttgtttttgttttttttaatcccacttatacagctatatatagccctttgctaaactctttttagttaccccatttgagtttactatgtatttcctgccacaaccttgattgatacagcagcccagagaagggaagcaattaactttctcactcctttattcattcatccaacctcccwtcaacacttactctatgccaggacttgtgctgaggcttttaagaatgagacatgatttcttgtctatgtccctgagttctcagttgttcaccccagaaactgactcttaccaaagaaagagaacatgccgaaggcactgctgaaggcccagccttggaaaacaccccatacaaggtgactccagatagctttatagcggcaactcctccaagggcatgcgttagggataggctgatctggggacccctgctctccctgcagagaattcatggaaacccaatagggcctgtgttcttgcatcatgagtcaagg

SEQ ID NO: 476287 - DNA, 606 bp, Homo sapiens
acgtccagctaatttttgtatttttagtagagacggrgtttcaccctgttggccaggatggtcttgctctcttgatcttgtgatcggcccacctcggcctcccaaagtgctaggattacaggtgtgagccaccacgcccggtccaaccttcttctattttatctgcctattctattttatatgtttacatgttctattttacatgtaagtgttgaatgaacactgatgtttccaagaatgtagcagctatggtgtaaatcaagagaagatttgactctgtttggtatgggaatttatcaagaaagagccactcttttgaagaacatggcactctcagtaaagccgatgcgacaatacaccacgctgtctgcgtttgtgactgtcactggttattctacacacacgtgtgtgagcacttgactgcttcgctccgtctttcctggtggaaacccaaatcatttctctatatattatttcattagaaatcctcatcatttcatttctcctttttattataattagggcacaattgtgattggttagaagagtagatgggttataggatcagcacattttttttttttcagggtagaaaagagagctttt

SEQ ID NO: 476288 - DNA, 451 bp, Homo sapiens
ggcattttattctattggaaaattccactaggattttctatgattacaatagagcatgggtcctcagtcaaaccctccaccacttataagaagctctgtgactttggggaagtgacttaacctctctgagcctcactttttctatttggaaagagtgatgggttggtaggttttatgtgttaactcttagggatacaggtgcacagctatttgcctaaacatcattttgggtgtgttcgtgagggcgttttgggatgaytgtcatttaaattggcagattgaggaaagcagttgcccctcctaatgtgggtggacttcatccaatccacggaagacctgaatagagcaaaagtcggtcctttccgaagtaagagagaattcctcctgcctgaaggtttttaaactgcaccattggcttttttctgcctttgtactcagactgaaacactgc

SEQ ID NO: 476289 - DNA, 451 bp, Homo sapiens
ggcattttattctattggaaaattccactaggattttctatgattacaatagagcatgggtcctcagtcaaaccctccaccacttataagaagctctgtgactttggggaagtgacttaacctctctgagcctcactttttctatttggaaagagtgatgggttggtaggttttatgtgttaactcttagggatacaggtgcacagctatttgcctaaacatcattttgggtgtgttcgtgagggcgttttgggatgattgtcatttaaattggcagattgaggraagcagttgcccctcctaatgtgggtggacttcatccaatccacggaagacctgaatagagcaaaagtcggtcctttccgaagtaagagagaattcctcctgcctgaaggtttttaaactgcaccattggcttttttctgcctttgtactcagactgaaacactgc

SEQ ID NO: 476290 - DNA, 598 bp, Homo sapiens
tggtacccacccagattgagggtgggtctgcctctcccagtccactgactcaagtgtaaatctcctttagcaacatcctcacagacgcacccaggatcaatactttgccyccttcgatccaatcaagttgacactcaatattaaccatcacacctggtatgacagtactagccttgtcccaagaggcaggagccccagaactgcagagcatctgatagagatgtgaatagtggctttggaaggaatgactgtggccaggtaaggtgacaggtaatggcgaaaacaggcatgaaatcgtggggcagttcaggtgagccattccccaatattcaccaagagataatagggaagggagagagagtaggggtctcaaaagcagggtcacggtgctgataatctgaaaggtagggtctcagagccattgaatgtttcatttattcactcaacgagaatttcttgagtggctaatatgtgccaggtgctgcagcagccagtggggattgtaggtcacaaaaacatgacttcattcaaagcatgcaccattatttacatatgtaaagtgccttggcatgaaatagaagcccaataatctcttgca

SEQ ID NO: 476291 - DNA, 441 bp, Homo sapiens
tacccacccagattgagggtgggtctgcctctcccagtccactgactcaagtgtaaatctcctttagcaacatcctcacagacgcacccaggatcaatactttgcctccttcgatccaatcaagttgacactcaatattaaccatcacacctggtatgacagtactagccttgtcccaagaggcaggagccccagaactgcagagcatctgatagagatgtgaatagtggctttggaaggaatgactgtggccaggtaaggtgacaggtaatggcgaaaacaggcatgaaatcgtggggcagttcaggtgagccattccccaatattcaccaagagataatagggaagggagagagagtaggggtctcaaaagcagggtcayggtgctgataatctgaaaggtagggtctcagagccattgaatgtttcatttattcactc

SEQ ID NO: 476292 - DNA, 399 bp, Homo sapiens
ttgtatacatagaaatgattgctgtaaatatrtgttgactccctttaatacatatgcaactaattgaaagcgggcagtttatggtgtagtatcagtgaaacgtgctctgttgccattaagtatagctttgttacattattgagacaacttgccttgggggcactggggtaagttattgcttcttcaaccatattttggtccttagaggaccaaccgctagtccagcttttattacctgctgtttctttaatcacaacagggaaatgttggctaggcatcggacgggagacttttcttataagatgaaatgagccaagattggaagacgacatttttatttgccttacaaatggactggatacagtgtgaatggcttcgtgaatgagatgaagggctctg

SEQ ID NO: 476293 - DNA, 671 bp, Homo sapiens
ctgttaaccaatgcatgctgcaggggaggaaactgagaccctgagaacttctgtaactygcatcatggtcacacagctagttagtggtagaaacaagttacataccgactcggtggtggacacaattaagggtcccacagtcagttagttgtagaaacagttaagagtcacacagctagtcagtggttgacatagttaagggttgtgcagctagtcagtggtagatactgttagttaagggtcacataggtagtcagtggtggacacagttaagggtcacacagttagtgatagatttaagggttacacagctagttagtggtagatacagttagttaagggttacacagctagttagtggtagacacagttaagggtcacacagctagtcaatggtagacagttaaaagacacacggatagtttaagacacatggatagtttagtggtagatacagttagttaagggccacacatctagtcagaggcaggtatatttagttaaaggtcacaaagctagtcagtggtaggtacagctagttaagggtcacaaagctagtcagtggtaggtacagttagttaggggttacacagctagtcagtggcagacagttaagggtcacaagactagtcaatggtagacacaattaaaagacacatggatagtttagt

SEQ ID NO: 476294 - DNA, 671 bp, Homo sapiens
ctgttaaccaatgcatgctgcaggggaggaaactgagaccctgagaacttctgtaacttgcatcatggtcacacagctagttagtggtagaaacaagttacataccgactcggtggtggacacaattaagggtcccacagtcagtyagttgtagaaacagttaagagtcacacagctagtcagtggttgacatagttaagggttgtgcagctagtcagtggtagatactgttagttaagggtcacataggtagtcagtggtggacacagttaagggtcacacagttagtgatagatttaagggttacacagctagttagtggtagatacagttagttaagggttacacagctagttagtggtagacacagttaagggtcacacagctagtcaatggtagacagttaaaagacacacggatagtttaagacacatggatagtttagtggtagatacagttagttaagggccacacatctagtcagaggcaggtatatttagttaaaggtcacaaagctagtcagtggtaggtacagctagttaagggtcacaaagctagtcagtggtaggtacagttagttaggggttacacagctagtcagtggcagacagttaagggtcacaagactagtcaatggtagacacaattaaaagacacatggatagtttagt

SEQ ID NO: 476295 - DNA, 487 bp, Homo sapiens
cctgcttaaattcctgaccctcaaaatcatgatctataataaaaacagttgtggctttaagccataatgtttggggattaacttgaatggcatccttcaggagataccccatgtgtcataggttttggggatggaggttatcttagcctaccaacagtgcctgatacaaatatgcaaatgtttcattgggtcacgcaatctcaagaaagcagggataagggaaagagagaaagaggaagagcaaaaccaaagaagtgyatattgcctagtggagttgcagtttcccagaaacacaagcatgggataactctggagtcagtcatctgccagctcctgctgtttcctgtctcttattggtcaaagcttgctccactctgcacttctgagtaatggccctcagcccctcctagcagcttctgggggatccaggacctctgggagctgataggtgtgatagaggccagcccttaaccccacccagggtagg

SEQ ID NO: 476296 - DNA, 581 bp, Homo sapiens
caaagcagcactggaagaacagcaggggaagaacattccaagcatagggaagagcatgtgcgaaggtcctggggcaggaatgctagtgtggatggggtgcagaaagagaggcagagaatggtggttatctttggaggatatatggcctgaaagtgaatttgggtccctgactttamgtctctttcctctgcagtttagttatgtctatacacttttttttgaaccccattatggtctggcttcatttaaatgcatctgaaatgaaatctctaatgttaacagtgttgtcagatgtgaaggcttcatttctctttggttctttttcaccgaatgctatctgtgagtttctggggaggatatgaggattttgattgttttgattgtttttttttttttttttgtatgaccacattatgttaatttccccattgtcttagagtatgagaacataaaagcaataactcatttatatgaagactgaatgtgctgagaggttgtcatggaaacctctcatgttggcttgagtaaattgaataacccctgttaaaagattgaacacagataactggcaggctttgttt

SEQ ID NO: 476297 - DNA, 581 bp, Homo sapiens
caaagcagcactggaagaacagcaggggaagaacattccaagcatagggaagagcatgtgcgaaggtcctggggcaggaatgctagtgtggatggggtgcagaaagagaggcagagaatggtggttatctttggaggatatatggcctgaaagtgaatttgggtccctgactttacgtctctttcctctgcagtttarttatgtctatacacttttttttgaaccccattatggtctggcttcatttaaatgcatctgaaatgaaatctctaatgttaacagtgttgtcagatgtgaaggcttcatttctctttggttctttttcaccgaatgctatctgtgagtttctggggaggatatgaggattttgattgttttgattgtttttttttttttttttgtatgaccacattatgttaatttccccattgtcttagagtatgagaacataaaagcaataactcatttatatgaagactgaatgtgctgagaggttgtcatggaaacctctcatgttggcttgagtaaattgaataacccctgttaaaagattgaacacagataactggcaggctttgttt

SEQ ID NO: 476298 - DNA, 581 bp, Homo sapiens
caaagcagcactggaagaacagcaggggaagaacattccaagcatagggaagagcatgtgcgaaggtcctggggcaggaatgctagtgtggatggggtgcagaaagagaggcagagaatggtggttatctttggaggatatatggcctgaaagtgaatttgggtccctgactttacgtctctttcctctgcagtttagttatgtctatacacttttttttgaaccccattatggtctggcttcatttaaatgcatctgaaatgaaatctctaatgttaacagtgttgtcagatgtgaaggcttcatttctctttggttctttttcaccgaatgctatctgtgagtttctggggaggatatgaggattttgattgttttgattgtttttttttttttttttgtatgaccacattatgttaatttccccattgtcttagagtatgagaacataaaagcaataactcatttatatgaagactgaatgtgctgagaggttgtcatggaaacctctcatgttggcttgagtaaattgaataacccctgttaaaagaytgaacacagataactggcaggctttgttt

SEQ ID NO: 476299 - DNA, 670 bp, Homo sapiens
gtgcaggaaattcattgaagaaaatgcctgtgaagggaaatggggagggagcagggagagatttcagaccgtaatgcaggtctgacacctctgaaagcagagtgggaaggaagagagatagttagaaagagaaaggcttcagcacaactctgagaatgtatcagccagccgtaatagttcctaaggcaactctctctgttggacaactcccagttgggttagaatcacctaattccattacttccgctgtgcccagtcactggctgggaaratccccagggaagtgcagcctagcatgaacacctcggtgggtcaaaaggtacagcagctagaggttgtcagttagctctgcttccagagcagttcaccttgaaggaagatttgagcacagaacttccatgactgagagcttctggtgcactttacagcagaggaatttgtgaggcaggttcactgttcactggctaccaacttgtccagtgagacagaacactcccacacaacaagttacatgaggtaggtttattacttacagataggcagcaagagatggtagaagcctaggattcattgtgagctattcctccaagtccccggaaacctgctgagggtaagtagagtcatatctgtgcatgcctcacttacacagaagctcagataccccagaaag

SEQ ID NO: 476300 - DNA, 670 bp, Homo sapiens
gtgcaggaaattcattgaagaaaatgcctgtgaagggaaatggggagggagcagggagagatttcagaccgtaatgcaggtctgacacctctgaaagcagagtgggaaggaagagagatagttagaaagagaaaggcttcagcacaactctgagaatgtatcagccagccgtaatagttcctaaggcaactctctctgttggacaactcccagttgggttagaatcacctaattccattacttccgctgtgcccagtcactggctgggaagatccccrgggaagtgcagcctagcatgaacacctcggtgggtcaaaaggtacagcagctagaggttgtcagttagctctgcttccagagcagttcaccttgaaggaagatttgagcacagaacttccatgactgagagcttctggtgcactttacagcagaggaatttgtgaggcaggttcactgttcactggctaccaacttgtccagtgagacagaacactcccacacaacaagttacatgaggtaggtttattacttacagataggcagcaagagatggtagaagcctaggattcattgtgagctattcctccaagtccccggaaacctgctgagggtaagtagagtcatatctgtgcatgcctcacttacacagaagctcagataccccagaaag

SEQ ID NO: 476301 - DNA, 405 bp, Homo sapiens
gggaagatccccagggaagtgcagcctagcatgaacacctcggtgggtcaaaaggtacagcagctagaggttgtcagttagctctgcttccagagcagttcaccttgaaggaagatttgagcacagaacttccatgactgagagcttctggtgcactttacagcagaggaatttgtgargcaggttcactgttcactggctaccaacttgtccagtgagacagaacactcccacacaacaagttacatgaggtaggtttattacttacagataggcagcaagagatggtagaagcctaggattcattgtgagctattcctccaagtccccggaaacctgctgagggtaagtagagtcatatctgtgcatgcctcacttacacagaagctcagataccccagaaag

SEQ ID NO: 476302 - DNA, 405 bp, Homo sapiens
gggaagatccccagggaagtgcagcctagcatgaacacctcggtgggtcaaaaggtacagcagctagaggttgtcagttagctctgcttccagagcagttcaccttgaaggaagatttgagcacagaacttccatgactgagagcttctggtgcactttacagcagaggaatttgtgaggcaggttcactgttcactggctaccaacttgtccagtgagacagaacactcccacacaacaagttacmtgaggtaggtttattacttacagataggcagcaagagatggtagaagcctaggattcattgtgagctattcctccaagtccccggaaacctgctgagggtaagtagagtcatatctgtgcatgcctcacttacacagaagctcagataccccagaaag

SEQ ID NO: 476303 - DNA, 670 bp, Homo sapiens
gtgcaggaaattcattgaagaaaatgcctgtgaagggaaatggggagggagcagggagagatttcagaccgtaatgcaggtctgacacctctgaaagcagagtgggaaggaagagagatagttagaaagagaaaggcttcagcacaactctgagaatgtatcagccagccgtaatagttcctaaggcaactctctctgttggacaactcccagttgggttagaatcacctaattccattacttccgctgtgcccagtcactggctgggaagatccccagggaagtgcagcctagcatgaacacctcggtgggtcaaaaggtacagcagctagaggttgtcagttagctctgcttccagagcagttcaccttgaaggaagatttgagcacagaacttccatgactgagagcttctggtgcactttacagcagaggaatttgtgaggcaggttcactgttcactggctaccaacttgtccagtgagacagaacactcccacacaacaagttacatgaggtaggtttattacttayagataggcagcaagagatggtagaagcctaggattcattgtgagctattcctccaagtccccggaaacctgctgagggtaagtagagtcatatctgtgcatgcctcacttacacagaagctcagataccccagaaag

SEQ ID NO: 476304 - DNA, 405 bp, Homo sapiens
gggaagatccccagggaagtgcagcctagcatgaacacctcggtgggtcaaaaggtacagcagctagaggttgtcagttagctctgcttccagagcagttcaccttgaaggaagatttgagcacagaacttccatgactgagagcttctggtgcactttacagcagaggaatttgtgaggcaggttcactgttcactggctaccaacttgtccagtgagacagaacactcccacacaacaagttacatgaggtaggtttattacttacagataggcagcaagagatggtagaagcctaggattcattgtgagctattcctccaagtccccggaaacctgctgagggtaagtagagtcatatctgtgcatgcctyacttacacagaagctcagataccccagaaag

SEQ ID NO: 476305 - DNA, 473 bp, Homo sapiens
ttgcttacaggaatatcagctaagacagatgttgcatgttggagttaagggtgagtgagttgaaggaagcatgtatttgcatgctggttgtgcccctcaaaatacttcacttgcatgaaaagccacaaaagctgtagttcagagagagagagagagactgagtacacacatgcgtgagactccaaggcaaactgtttatctgctctctccaacaaaaagcaatcamaaacaggttctttttaatacgtactagtctagacgaggttttgcaatgtcacaggtccctaattgcagtaataactgcctgagaacaattaagcagacaccaccaaacatttctatagggtgaatccattgtcctattaataagcagccatgaggttacctctatctggaaaaacctctttggcttgttttatcctacataaggctcaagccgggtttttcccacacattccgggtgcgtgaagcag

SEQ ID NO: 476306 - DNA, 645 bp, Homo sapiens
ttgtgtcaaattaagacatgatgatttgacctcttgaattcctgagaacatgttcagctggggagaaaccccttgggtctcagtcagcccttgagtcactgtgcatctgtttgccctgggatctcccctaagttgctgctcttattggcagccattcctctggctttggaaaaactctgtcctttctgtgatggtgcatcactttcccaggacttgtgcctattcagcagacacagggaagtccctggaagaayagttgaagggccagactcacaagtcttcctcagcccccacccaagggtcatggggaaaaaaaaagattgatgtgcttatagtcagcaaattttaatgagaccattcaataggagatatttctgtttgtataacataagatcagtagcattcatgatatcagaaaagcaggctaatctaatttcttatatttcaggtggaatgatatgaaagataatttctctcaaatgtttactctgtaagattgcatttctagaaagatcgtgtcttggggaggaaaacagaggagactgttccccttataaaaaggatgttggatccctttactttctccctcaaacctctgataattgacaagtgacagacaggcattactttgaagagcaggaatgt

SEQ ID NO: 476307 - DNA, 465 bp, Homo sapiens
ccaaatctactactctagacttgattctcctggctttcatccctcttgaacacagtaaggccgaggagacgtacacttttaagctgtgatcagcttaatgtgaatgacttgcagatccttttctgaaggttataaaaagcaaaaacgatcactaagagatcaataaagtgaggaatatatgatgtagaaaagaaaaaaaaaggctggaagttcagaatgtggttggtcctgggtagggattctcaaaggcaaactgctagctttgtaatttttctcaaggccaattcttagtggatgcctttctgaattcatttggtggttcaccagaatcttaaataaataagataaaataaagttactattacatgtttaagttatatctgtttgttcttagtaatcatcaggtattctagcgtctaaaaaatgcctatttgtrgagcaaatagcagataagaaactgtagag

SEQ ID NO: 476308 - DNA, 583 bp, Homo sapiens
gaaaatccctttctctgcgtcacactttaggacttgagaaaagcactctctgatgttctacaaaataagggcacaaagggaactggattctttattctgccaacattgcttgtcaatgtcctaggaaaaatgcatataatttcaaagggctaaattaaaataagagaaagaaacttattacactgtttacagtcatgtatttctgatataacaacaacaaaaagctgagagctgttagtagaaggaagcatttagttaagacctttccrtttttctttgataatcttgataagttaacatggtataatcaagttcctgtaatagattaatcattttaatatttcagtttgatacagtcagctccatcatttaaactattctataatatcacgttgctgagctggaaatcagaagtaggcttgtgaaaggaaattgcttctacattctgtttcttgtcttcctagaaatgcctttatacaacaaccatattatttctgatcttggctagctagactgataggaagtcacttgaaggttacctggagagggagtgacatgatgtcaccattgtctctattgttcc

SEQ ID NO: 476309 - DNA, 597 bp, Homo sapiens
ctggatatggatgaggcttcattgtcatatacttaatgtttttgcttagatctttggcaaaccaatatttttccatgactttttgacagttatttttgttcaatagtgaataataaagtgagatttacggtctgtatatgataatgtttgtcttactttgacatttcttttctagacagtaaaggccttataattagattttccctgtgccaaaacattgctgcaaaaccatctccctgaaaaaacgtttctttgcttcttytaggagctggcgtcatcttattttgatttggaatttttttcatatgtcagtcaggaaatgaaacaaaaatttctcttgaatatgaattcttaacaagaaagaaattaacttttgccgaaaaataaaactagaagggaaaatgagaagaaacgtctttgaaatgctgatggttccattgtctttttaaattctaatttatgtcaaacttcagtgagcaatataggaaactcccttttccaccttgttgcaaaagagcttattttattcttgttgctactcctaccagttttatgttgaattctttgaaatacccaggagactgaactagaacttat

SEQ ID NO: 476310 - DNA, 473 bp, Homo sapiens
gctatgtatttgtccactcagagtttgccaaaaataaacagaaagcagactcgtagcacaaaacagcatataatatttatttaacatgtatcgatgaaaagattcaaactctgtagaatatttgaagagatttattctgagccaaatatgrgtgaccatggcctgtgacacagccctcgggaggtcctgagaacatgtgccaaggtgggtgcagcttggttttatatattttagagaggcatgagacatcaaccaaatacatttaagaaatacattggtatggtccagaaaggcaggacaactcaaacagggctgggcgggggcagggacgggtgcggggggagcgggtgcggcttccaggctacaggtgaatttaaacattttctggttgacaattgattgagtctgtctaaagacctgggattgacagaaagggaatgttcaggttaagatgaagattgtggagaccaaag

SEQ ID NO: 476311 - DNA, 473 bp, Homo sapiens
gctatgtatttgtccactcagagtttgccaaaaataaacagaaagcagactcgtagcacaaaacagcatataatatttatttaacatgtatcgatgaaaagattcaaactctgtagaatatttgaagagatttattctgagccaaatatgagtgaccatggcctgtgacacagccctcrggaggtcctgagaacatgtgccaaggtgggtgcagcttggttttatatattttagagaggcatgagacatcaaccaaatacatttaagaaatacattggtatggtccagaaaggcaggacaactcaaacagggctgggcgggggcagggacgggtgcggggggagcgggtgcggcttccaggctacaggtgaatttaaacattttctggttgacaattgattgagtctgtctaaagacctgggattgacagaaagggaatgttcaggttaagatgaagattgtggagaccaaag

SEQ ID NO: 476312 - DNA, 173 bp, Homo sapiens
tgagaaccacatgaatgaagcactgacyatcttttcaaattcaatgcacattccatcttgtctgaggagctgattaccttttccttagacacctgtaacatccttctcatcaaatttcttcccttaggggcccttctctccatcaccactaaactattttccttcctagagca

SEQ ID NO: 476313 - DNA, 654 bp, Homo sapiens
ggcattcctctctccctcttgctcaagcaagcatggccaggggcccttcttgcgtgttcctacagcatcctgcatttacatgtttccctgtagcacttatgatactatagtttctgatttacttgtagttgactctatgggtagcctacccaagagccattccttcctactaggcccccagtgaaattcaaatatccacctacccttgcagccacatacttacagggaggtgggcctcagccccagccaccatgagggaaacctgattgtctcagctaatcatgaaagtacgatttccaaggcagtgatttgttaagacatcggcatgtgaaaccattttggccaataagacattgaagggaagtgggacaaggggagaccatctggaaatgattttttttctttcttaaaagaagacgtaaaaagaagatcctcttttctgactggccatagttatctgcatgtaatagktggacctgtgacagacatctcgagtttacaggaacaaaccagaaaactcaccaacacttgaggctggcagaagagaaagatgaaaaagactcaggccgcctttgataatgtcactgagtgacttggagcctcccacctcaggatggctttggtttaagccagttaagttacaactttctggca

SEQ ID NO: 476314 - DNA, 522 bp, Homo sapiens
gactgtggagctgggcatggcttttcaaggaagggagtggggagggctcgacctctgaatctcccagcctaagggtgaaggacactggctctggctgattttgagtttggcaatgggggctatgcccaggtggtcctccatctctccgacaggcgtcacccgggcctgcaggtgctgtcgtgttgctcccagccacagaggccactaaggcttagcagggtcaccaagtcagagccckgggctgagctaagaacggccagaattgctttcacaggggttagaattaattatacaggagatagattatttactgcatgactgtgatgtttatcatccatactgttagttgtccgctttgaccatcctctgtctgcctctatctttaccccaaagagccgcgacaaccaaaccattttcactcagcgccccctagtggcctgagagctgcactgtctccgccttttttttttttgtacccgagcttcatccctagatgacatgtggctgggtacctcggcacag

SEQ ID NO: 476315 - DNA, 626 bp, Homo sapiens
gatggagtccctgctaagtgtacactgccagtcctggagacatgaactcaagggagcctgggagaccggggaagccctggagtccccggagggcactggtatgaaatgaaaaggtggcactctaggagcagagcagcagcaggactcaagctcgggaggtggggctgtggaatgctctccagcagtcacaaaagccctcacaaatagggtagaggaaggccacatcacaaggggcttttgccgtcaactaagatgggtgtggtctcccccgcagcaggaagccggtgtttgtaagacaggagtgacttgctcakagccggtttggaggaagaggttgatgaacaagtacagagttatgtgtctttgtgccgtaagaaaatgactgtgcaagtcgggcgtggtggtgtgcacctgtaatcccagctattgggaggctgagatgggaagtatcgcttgagcccaggggtttgaggctgcagtgaggcatgatcacaccactgtactccagcctgtgcaacagaacgagaccctatctcaaaacaaacaaacaaaaaatcaaaaaagaaaatgaaaatgagtgtgtagtgtgtggaggacaagcaggcaggcaatgaggacattcgtaa

SEQ ID NO: 476316 - DNA, 500 bp, Homo sapiens
gcttcctgtcatgcaaaggagctttcatttctctagatgtcagggtgggtgggtgtgagagagacagtgggcaggaccaaagtcaaactagcaagcaggtgggcgagaagctgccaggggcagagagaagcccgcagcctccaccccacaccttacttctattccctaggcctcctggtgatccctgaggtgacctttggccctcagtccctctaaggcacatcaaggccggaggtgaggcaggtgtgattccagggccgctgccgggaaatagttcccccayacccatcaaagcctggtgcctgaaaggtaactggttgtctggtggctctggagagagagatccaaggtgggaaggcgctcaggcctcccaaaaaagcttccagcactgaggcggactttgctcttccttgaagggaaccctgcactgtgctcccgggaaaccccctctctgattccaccactgtgatggagaaaactgaggctgcagaagaaaaatt

SEQ ID NO: 476317 - DNA, 569 bp, Homo sapiens
ctccgcatcctcatcaatgcttggtggtgttgtcaataactgtgttgagaggacagagatttaaggccragggtggcctagcatttagcctcgagcgcagctgtcactggctcctcaccccctcccctacctgtatcgttggcgggaatgaaaggcacagtccccagtgtgggtggctcaggagagccctccctgggcccaagcagctcttccagcagggagggcttgagccggatacagatcccacagcaggaggctgagcctcttgggatggggctgggctgacatctgaattcttgagtaagactggaaacatcatccactcaaaacttggctgggcggcatggggagggctcagtgtgcccaggtttgtggcacctctctgctgggtcacagctgggcaggggtccacaggtaaggagtggctgcagccaggagtgggagaggggatgggtacagcttgttaggcctctcttggttttctcaaggtgtgagtccatggccccaaagctgggcaggaaacctgctgcccttccagcctcccaggcttggcttttttttttttttta

SEQ ID NO: 476318 - DNA, 509 bp, Homo sapiens
ccaggaagaccagagggctggtcccggacattcatggaacatgcaagttcagtgtgttccgtgaggaggcgcctgttgctygccctgcgtcgcaggttcagaccctgatcctggcagtgctgcctgagcccatgtgggtagtgggtgaggttgcagggctgtctggccccagcgggggaccactgccccaccctgatgtcctcacgtggtctcctgtcagcctgccaggagcacttttgacccagggggtattctgtggtgttttgcaaacatggatgtgccaggtactatgatgagtgctgcaacattaggaggagtgaccccagcaagccggtgggcaggttctgtctagggtggcaggacctgccactagcctctctgctcagggctctgggcatggcaggcaggtaaacaggtgggccctcccaagatgggaggtgacgaacttctaaatcaggaccgtgcctctgggacaacaagggtccctgtgctctgcagacggctttcag

SEQ ID NO: 476319 - DNA, 509 bp, Homo sapiens
ccaggaagaccagagggctggtcccggacattcatggaacatgcaagttcagtgtgttccgtgaggaggcgcctgttgctcgccctgcgtcgcaggttcagaccctgatcctggcagtgctgcctgagcccatgtgggtagtgggtgaggttgcagggctgtctggccccagcgggggaccactgccccaccctgaygtcctcacgtggtctcctgtcagcctgccaggagcacttttgacccagggggtattctgtggtgttttgcaaacatggatgtgccaggtactatgatgagtgctgcaacattaggaggagtgaccccagcaagccggtgggcaggttctgtctagggtggcaggacctgccactagcctctctgctcagggctctgggcatggcaggcaggtaaacaggtgggccctcccaagatgggaggtgacgaacttctaaatcaggaccgtgcctctgggacaacaagggtccctgtgctctgcagacggctttcag

SEQ ID NO: 476320 - DNA, 509 bp, Homo sapiens
ccaggaagaccagagggctggtcccggacattcatggaacatgcaagttcagtgtgttccgtgaggaggcgcctgttgctcgccctgcgtcgcaggttcagaccctgatcctggcagtgctgcctgagcccatgtgggtagtgggtgaggttgcagggctgtctggccccagcgggggaccactgccccaccctgatgtcctcacgtggtctcctgtcagcctgccaggagcacttttgacccagggggtattctgtggtgttttgcaaacatggatgtgccaggtactatgatgagtgctgcaacattaggaggagtgaccccagcaagccggtgggcaggttctgtctagggtggcaggacctgccactagcctctctgctcagggctctgggcatggcaggcaggtaaacaggtgggccytcccaagatgggaggtgacgaacttctaaatcaggaccgtgcctctgggacaacaagggtccctgtgctctgcagacggctttcag

SEQ ID NO: 476321 - DNA, 509 bp, Homo sapiens
ccaggaagaccagagggctggtcccggacattcatggaacatgcaagttcagtgtgttccgtgaggaggcgcctgttgctcgccctgcgtcgcaggttcagaccctgatcctggcagtgctgcctgagcccatgtgggtagtgggtgaggttgcagggctgtctggccccagcgggggaccactgccccaccctgatgtcctcacgtggtctcctgtcagcctgccaggagcacttttgacccagggggtattctgtggtgttttgcaaacatggatgtgccaggtactatgatgagtgctgcaacattaggaggagtgaccccagcaagccggtgggcaggttctgtctagggtggcaggacctgccactagcctctctgctcagggctctgggcatggcaggcaggtaaacaggtgggccctcccaagatgggaggtracgaacttctaaatcaggaccgtgcctctgggacaacaagggtccctgtgctctgcagacggctttcag

SEQ ID NO: 476322 - DNA, 641 bp, Homo sapiens
tgtctactaaccaggactttttaggtgcaacatcagtagggtaagttaatgagaaaatagaagcgttgtcctttcattcttgcattctttcattattataaccattcatggaaaataattttctgaccttgtacggataaattgccaagattcccatttgaaaggagattttataggaaacacaagtttaaaatgtttttaaaaatatttcgatwcttaaatattatcatattaatactggattgtcttcattgtttcattaacttgggtgagaactttttgaaaatgtatggctaaacttttatttagttggacataaattatctgattagtagattaggctctcttcctctctctctagcatttttttcttttattttggcattatacattatttattggcataggttagataagcaacaaggaaagcagtataaatctgcaatatttattagtattactagtgatggataaatgtttgatctgagaggttaaaactagctgtggatataaactgactcacatgactgggctctgtccaggtgcggtagcaggtgccttctatgtgcattggggatgcaatgccgaaccctgagcacatctgtctacaaagagcgggcttccggtcttcgagtttctca

SEQ ID NO: 476323 - DNA, 641 bp, Homo sapiens
tgtctactaaccaggactttttaggtgcaacatcagtagggtaagttaatgagaaaatagaagcgttgtcctttcattcttgcattctttcattattataaccattcatggaaaataattttctgaccttgtacggataaattgccaagattcccatttgaaaggagattttataggaaacacaagtttaaaatgtttttaaaaatatttcgattcttaaatattatcatattaatactggattgtcttcattgtttcattracttgggtgagaactttttgaaaatgtatggctaaacttttatttagttggacataaattatctgattagtagattaggctctcttcctctctctctagcatttttttcttttattttggcattatacattatttattggcataggttagataagcaacaaggaaagcagtataaatctgcaatatttattagtattactagtgatggataaatgtttgatctgagaggttaaaactagctgtggatataaactgactcacatgactgggctctgtccaggtgcggtagcaggtgccttctatgtgcattggggatgcaatgccgaaccctgagcacatctgtctacaaagagcgggcttccggtcttcgagtttctca

SEQ ID NO: 476324 - DNA, 556 bp, Homo sapiens
tcagaatccagcctcctccctgatagaagcctgagaaaaccaagtgtgggtatctggttgatagctccagcggagctcagccttcaagtcatcccagcccaggagcctgacatgtgagtgaagcagcctccagataattccagtgccccaccgtgatgaaagtcactctcagccatgtgcactattgtatcaaatgaggccccagacactgtggagcagagaagcagagagacaagctgtgcccactgtgcccttctgaattgctggacaacagaatacaggaccataagaaaagttactgtttttaccactaagtttggggtggtttgttacacagctagaataaccaaccagttatcctctctctacctttcctcagaatctgtgttatgaggacctctctaagggaaggtggaacttcttwagtagtattattgcagattctgttaaattggctcgacaacacccattccaaaccacccccccaacaacttttatcatcttttccaataaggctaaaaaatagaattctcaagttcccagcctttcttgcagt

SEQ ID NO: 476325 - DNA, 620 bp, Homo sapiens
gctgctgggacagctatagcaatatctctgcaatgactaagccaggcttgaaacaagaagggaaaatgaagaatgcaaattaatctgaatggttattgattcacaggttctaatgatgatgaagaataaaagaaaagaataatctgtcaaataaaaaaattcaatatttgcatgggaaaaaaaggatctattttctcttattacaaaacagcaaactctttactccagaaattcagttactcatcatttccatcaggattgtaaacaaatgaagtrttgtttaaatcatgtaaacaaaagcatatctctagaatgactaatgatgtttgcaagaggaaaaggaccaaagtctccagcctataatatttttaccatagttctcatcctattacctaaataaggccagtttacagaacagtcctgaagacctcacattataaaatagtacacacaattcatgttgcgaactaagactgaattttaattcaggcccacatttctcatttggcctcaaaagtgacccaacaaatgatctatccctgagaataatccatgtgctaaggaaaagaacgtgtattctgtacctgttggatgaaatattttataaatatctattagat

SEQ ID NO: 476326 - DNA, 472 bp, Homo sapiens
cagtgagactccacctcaaaaaaaaaaaaaaatccttgaactaatgactcaaattttcaaatgaaacmaaataagcagtggatcttgcattggagatggagttaaactatgttgcccaggctggtcttggactcctggtttcaagtgatcctctcatcttggcctcccaaagtgctgggattacagggacgagccaccacaccccacctattgtctatatttctatctttaacagcacttcagtcctgccttaagttatagttatgtatagatacccattatactttaaatttttcagcagaaattatgcttttatcttctctgcagtgttatatgttggtgtgcaaaaatgttaaatttatttttcctaagtaccccatctgcttttcaactctgtcctctgcctgaaaagcctccctccagcccctacttccctcccatcttagttcacaagtcaggttgatttgccccc

SEQ ID NO: 476327 - DNA, 601 bp, Homo sapiens
ataatcgggaaaactgcatgtagggtatatgataactctatattagtttcacaatttttctgtaaatctaaagctgtcctgaaaaataaagtctattttcaaaaagcatttgggaaggcagggcactgtggctcatgmctgtaatcccagtactttgggtagccgaggtgggcggatcgcctgaggtcaggagttcgagaccagcctggccaacagggtgaaaccccatctctaccaaatatacaaaaattagccagtcatggtggccgcatctgtggtcccagctacttgggaggctgaggtggaagaatcactcgagcctgggaggcagaggttggagtgagctggaatcgtgccattgcactccagcctgggtgacagagtgagactccatcccccaaaaacaaaacaaaacaaacaaaccagaaagtatttgggaagcttagagaataatatccagcaaagtaagtaataaataaacaagaaaataaggatcttagaggaaggaaagtaagataaatcaagggatgaggttagaatactaaaatgcatgcctttaagtgactacatctttgttagagttagctgtcagtgtgagtca

SEQ ID NO: 476328 - DNA, 632 bp, Homo sapiens
ccgcacgacttccgctttccgcacctcttcatcctcccccgcccgctgcgtcccttctttccagggctgggcagcccctgtcccggatcctgcgggagctctccccagccgccgcggggctgcggcgcggccagcacaggccgggtgggggtgggggtggggtaggggccagtcgccatggcgacggcgccgcggcctgaggggctggtaggtrcgaggggctgggatgcgaaggtgcaaactttcccaggtggggcaggcgggcggcgcggcgcgctctgggtgctgggagggggcgccgggcgcgatccccggggaggcggcatcttgtgcgcccgggttgtgctcccttggctcagggccagcccatcgcttccttggcggtccttggcgttgtcggtatttccgtcctctgtaggaggctgtcgatttaccggcccctgctgtttcccgagtgcgaaatgtgtttccgcagaagtaaggtttctttgtgggtagccgacatcattttttttaaagaccatgtcgtcggaaaggatcactggtttccttcggagcagttaatgagtataaactggttcagtatttgcgatgcatggtttacgttctgaatgagactgtgcctttagtgt

SEQ ID NO: 476329 - DNA, 417 bp, Homo sapiens
ttaagagaagaaggactgagaaaaaggatggatataagaaacagtaagagaatatttaggaaaaagaagtaggaaacgagatccaatttataatataaattgagaataatttccctcttgattttttattggagatcgattaagattctcccatagcatttagtattccgagaaggactgactgaagacaaatgacttggctatgctggctctacactaagaagcctgtgagcacatattcagccatgtgaagggaaagaagagagaaggagtattctgaatcacatggagacatgtttgagaacaatctcccctacacctgtaaaamcaggcttactaaatactgagatctgtaagagaatggttgcagtagtgcagtaatctcctttctgttttaatgtgatttattatttccaa

SEQ ID NO: 476330 - DNA, 645 bp, Homo sapiens
ctggctgtctacccaggaggaagagcagccagtttctgctgctgatgatcaggaggtggagaaaatgttcagtcaggcagggagtgggaatagacaagaccacaagcagcttggtgcctctgaaagggagaggggtggaggggagactagagaggtgggtaggaatactggattccactgaccacgtgctggatgtcacgcttagccctcctgctctgtgccgggttaggcacctggtgttttacgtacataatctcaattctgtgagggcatccgacctgtgggaaaagagctgtttgtttcaaatgccagtcctgcttcctaacaagtgtttagagcttaatcgtgttcaaaatacatatacaatgtttaatacttacaagaatttggtggggaaaatattaccatctttcccttttgtgattggagaaaaatgaggctttgaagggtttaagaacttgcccaaggtcggccaggtgcagtggctcatgtctataatcccaacactttgggaggctgaggtgggaggatcgcttgaggccaggagttcaagaccagcctgagcaacatagtgagactttgtctctataaaaaataaataaataaataaaaasaacttgtccaaggtcagacaggcagcctctt

SEQ ID NO: 476331 - DNA, 541 bp, Homo sapiens
tggccatgctttagttatttgatgggaggaaaaataagtgggaggtgaggagtaactcctgggctctgatgagtattcaaggcaagtacagatctggaaagcctgtatgcaaaggaggaactcactgaaaagtgctggcctgaggagggcagaagggagggctggggaagcccagcagcgggagcaaaggagtaggctccaactgggtgaagatgttggtgtggtgcgttatgtaaaatatacaaattattattggraataaccacgtctcagcagtgctagttctcagtttggagaatgggaaatcgaaaggatcagattcagagacggcaacttactcaaggtcacagcattttaaacccaagtgaaatctcctaggcccttcatgccacactcatccatccctacctacttgtgttgcaaccaagggccccactgtagtgcctaggggagcaggtctagggcacagtgccaggcctgattaatgtcttccttaccattttccagtgaggggctgtgattaggcctatttataggggcc

SEQ ID NO: 476332 - DNA, 366 bp, Homo sapiens
gctttagttatttgatgggaggaaaaataagtgggaggtgaggagtaactcctgggctctgatgagtattcaaggcaagtacagatctggaaagcctgtatgcaaaggaggaactcactgaaaagtgctggcctgaggagggcagaagggagggctggggaagcccagcagcgggagcaaaggagtaggctccaactgggtgaagatgttggtgtggtgcgttatgtaaaatatacaaattattattggaaataaccacgtctcagcagtgctagttctcagtttggagaatgggaaatsgaaaggatcagattcagagacggcaacttactcaaggtcacagcattttaaacccaagtgaaatct

SEQ ID NO: 476333 - DNA, 541 bp, Homo sapiens
tggccatgctttagttatttgatgggaggaaaaataagtgggaggtgaggagtaactcctgggctctgatgagtattcaaggcaagtacagatctggaaagcctgtatgcaaaggaggaactcactgaaaagtgctggcctgaggagggcagaagggagggctggggaagcccagcagcgggagcaaaggagtaggctccaactgggtgaagatgttggtgtggtgcgttatgtaaaatatacaaattattattggaaataaccacgtctcagcagtgctagttctcagtttggagaatgggaaatcgaaaggatcagattcagagacggcaacttactcaaggtcacagcattttaaacccaartgaaatctcctaggcccttcatgccacactcatccatccctacctacttgtgttgcaaccaagggccccactgtagtgcctaggggagcaggtctagggcacagtgccaggcctgattaatgtcttccttaccattttccagtgaggggctgtgattaggcctatttataggggcc

SEQ ID NO: 476334 - DNA, 333 bp, Homo sapiens
ctgagcgggcctgggaattaaggctgcagggttggtcccaagcagtcttgctgaagcttgccacatcccccagcctcctggatttgccaggatccaagagcatggactttaggaattcctggtggaggagtgaagaaaatgygacagggtgtcctaagccccgatctacaggaagaaaactggaaataagactgaggacttagtttaagatgttcctactcagcctctagcttttgtgctacagttctgggaacagactcctctctcctgaaaaccacttacctccgcagcattagatttcaccaagatgtcttgcttgtgggaaagacttcc

SEQ ID NO: 476335 - DNA, 333 bp, Homo sapiens
ctgagcgggcctgggaattaaggctgcagggttggtcccaagcagtcttgctgaagcttgccacatcccccagcctcctggatttgccaggatccaagagcatggactttaggaattcctggtggaggagtgaagaaaatgtgacagggtgtcctaagccccgatctacaggaagaaaactggaaataagactgaggacttagtttaagatgttcctactcagcctctagcttttgtgctacagttcygggaacagactcctctctcctgaaaaccacttacctccgcagcattagatttcaccaagatgtcttgcttgtgggaaagacttcc

SEQ ID NO: 476336 - DNA, 630 bp, Homo sapiens
taggtcagctggcttttttgtcatagcaagtctttctcaatgaagaaggcactatgttcatttacagtcttacataagctccttatcttgctgaagaccggtaatttgaatagcactgccctaaatkacagtaggatctcctgagtatatcagtagaaaggagacacataagtatgtttggagtgtggcagcaagagggccataataatagaaaaaagagaatgcacaaaagttcaggctgttaaagatgtgacaaacttaaaataacttttaggacaaaattcacaaaagctgctaatactcaaaggaaccatatgataatattctagaaaactaaaacactaaagccaaaattgactttctcatgatgcagggttaggtcaagccatatatatatatatatatataaaaaacacgtactaactattctatggtgatactattatataataaactttcaagctaaaacatgttgtttcttttggtcttccagaactggtaaaggtacattgaatcccaacttaagttgagcttactggccactaaagagggagcttgagaaatgttagccaacaagaatttcattcaatttcaaccctgactttatttttaaagaactgcatggtcgcc

SEQ ID NO: 476337 - DNA, 630 bp, Homo sapiens
taggtcagctggcttttttgtcatagcaagtctttctcaatgaagaaggcactatgttcatttacagtcttacataagctccttatcttgctgaagaccggtaatttgaatagcactgccctaaatgacagtaggatctcctgagtatatcagtagaaaggagacacataagtatgtttggagtgtggcagcaagagggccataataatagaaaaaagagaatgcacaaaagttcaggctgttaaagatgtgacaaacttaaaataacttttaggacaaaattcacaaaagctgctaatactcaaaggaaccataygataatattctagaaaactaaaacactaaagccaaaattgactttctcatgatgcagggttaggtcaagccatatatatatatatatatataaaaaacacgtactaactattctatggtgatactattatataataaactttcaagctaaaacatgttgtttcttttggtcttccagaactggtaaaggtacattgaatcccaacttaagttgagcttactggccactaaagagggagcttgagaaatgttagccaacaagaatttcattcaatttcaaccctgactttatttttaaagaactgcatggtcgcc

SEQ ID NO: 476338 - DNA, 493 bp, Homo sapiens
gcaagtctttctcaatgaagaaggcactatgttcatttacagtcttacataagctccttatcttgctgaagaccggtaatttgaatagcactgccctaaatgacagtaggatctcctgagtatatcagtagaaaggagacacataagtatgtttggagtgtggcagcaagagggccataataatagaaaaaagagaatgcacaaaagttcaggctgttaaagatgtgacaaacttaaaataacttttaggacaaaattcacaaaagctgctaatactcaaaggaaccatatgataatattctagaaaactaaaacactaaagccaaaattgactttctcatgatgcagggttaggtcaagccatatatatatatatatatataaaaaacacgtactaactattctatggtgatactattatataataaactttsaagctaaaacatgttgtttcttttggtcttccagaactggtaaaggtacattgaatccc

SEQ ID NO: 476339 - DNA, 618 bp, Homo sapiens
ggacaaatatcagagaagtttctcctacgaatcacagtaatatggttctaagctttgttgcatgtaatcttttatttcaataacaaaacwtaagaagatgacactgcttcctgaatataaaagaaaatccagtgtatttacttcaattacacttttatttttaatatcctgaaaatgttcatcttgcagtggatacaggcaaaccctatgtgggtagtagtgaccactaggaggagggtaatctcaaaataataataaaacaaacaaataggagacaacccaagtttcacatttaaagctagataccaacaaggacatgttcccagattgcccaaacaaaggtacctagggctaataaattcattatctaaggcagggaaaaaaaatcactagaatatgtttctgttactttagctgaatgttttacacaaaatattctcatgttatgctttttacacaaactataagaatgttccaatttagtaagcaccaataattacaatcatttaaaacatcagcaatctcctcctcactggtacaattaatagagaaaagccatactaagaagaaatggaaatgtttgggaagatacatgggagaacaacaaccacaacaaac

SEQ ID NO: 476340 - DNA, 618 bp, Homo sapiens
ggacaaatatcagagaagtttctcctacgaatcacagtaatatggttctaagctttgttgcatgtaatcttttatttcaataacaaaacataagaagatgacactgcttcctgaatataaaagaaaatccagtgtatttacttcaattacacttttatttttaatatcctgaaaatgttcatcttgcagtggatacaggcaaaccctatgtgggtagtagtgaccactaggaggarggtaatctcaaaataataataaaacaaacaaataggagacaacccaagtttcacatttaaagctagataccaacaaggacatgttcccagattgcccaaacaaaggtacctagggctaataaattcattatctaaggcagggaaaaaaaatcactagaatatgtttctgttactttagctgaatgttttacacaaaatattctcatgttatgctttttacacaaactataagaatgttccaatttagtaagcaccaataattacaatcatttaaaacatcagcaatctcctcctcactggtacaattaatagagaaaagccatactaagaagaaatggaaatgtttgggaagatacatgggagaacaacaaccacaacaaac

SEQ ID NO: 476341 - DNA, 558 bp, Homo sapiens
ccctcctctggagcccagtgggagcaggggcaggatcagccccatcaaaccacatggacagaaggggaagagtgagaaaccaccaaggaaaagtggargagcgtgatggttaattttgtgtgtcagtttgactgcaccacaggatgcccagttggattgctaaacactattgctgagtgtgcctgcgatgatgtttcggggagaggttagcatttgaattggtggactgagtaaagcagatggccctcaccaatgtgggtgggcatcatccattctgttgacggcctgagtagaagaagaagaaggtgaattatctctgccggattgcttgagctgggatatcgatcttctcctgctctcagcactcctggctctgagaccttcagattcagactggaacctgaaccatagggtctctggctctcagaccattgaactataccacgagcttttctaggtctccagcttgcaaatggcagcccccataatcatatgagccaataccttataatacacctctttctagagagatacgtatacttcctattggcctgtttc

SEQ ID NO: 476342 - DNA, 647 bp, Homo sapiens
gtatatagcaatctgtgaaaatgtctttcaaagactccaggagagctctgtgttctgttcctagaggagtccccagccaagcaaacttgggggatctggagttttattgggaaccagggacttgccatggctcaaagaagcttttgcaactgctyattatggcgccttcccttgaaagggctccatatttttattcagtttcatgtttttgttggcctggggtcactttggctagaagtttctgccttttctttagattgttttctggagaacaaagtcatccttttagctctctttacagaagtcccaggcaggcccctggctgtagtgggccctggaagcctctgtaacccttccaatattctcctttctctttggtggagaagatggtcagaatggccaaggatttacttactacccttgtgaggatatttatctgaaccagtggtgatttgcattaaaaggagctagtagaaatcaccctaagagggcaccctctatattatctcccttccatctttttataatttctattccctcagactttacccatcaaccaacaccatgccaccatgtgagtttatgacagccaggtgacaggtcactgtagagaagtgagtgctgattgggatgtgggtgttatgctg

SEQ ID NO: 476343 - DNA, 647 bp, Homo sapiens
gtatatagcaatctgtgaaaatgtctttcaaagactccaggagagctctgtgttctgttcctagaggagtccccagccaagcaaacttgggggatctggagttttattgggaaccagggacttgccatggctcaaagaagcttttgcaactgcttattatggcgccttcccttgaaagggctccatatttttattcagtttcatgtttttgttggcctggggtcactttggctagaagtttctgccttttctttagattgttttctggagaacaaagtcatccttttagctctctttacagaagtcccaggcaggcccctggctgtagtgggccctggaagcctctgtaacccttccaatattctcctttctctttggtggagaagatggtcagaatggccaaggatttacttactacccttgtgaggatatttatctgaaccagtggtgatttgcattaaaaggagctagtagaaatcaccctaasagggcaccctctatattatctcccttccatctttttataatttctattccctcagactttacccatcaaccaacaccatgccaccatgtgagtttatgacagccaggtgacaggtcactgtagagaagtgagtgctgattgggatgtgggtgttatgctg

SEQ ID NO: 476344 - DNA, 554 bp, Homo sapiens
tatttaataaatgtaagttcccatcctgattcctttcccatgttgctaaaataaatcaattctacagaattatgttktatgtatgaaatacttctgaagcatggttatatctaaacaaatcaagcccgatcagaaattctaatctttgtctttttctctcaattaagaagatccaaatagatatttcatggcaactctttaaaaatctcctgtttctatttctccccacccctaaactgagagtgtctcattctttgactccccaaaaacatcgtaatccatgctattcagtccctatcttagttctaagacaaactcttttgtctctgtcatctgtgaccccatgacatgctcttgacacttcaagccccctagatgtagtcaggcccccagggagtagggtgctcccttttgcactgttttctcaagagagtacacatgaagagattttatcctttttctccttgatgaagaaggaaagaagcagaaaataatcaggcaaaaggtgtcaggaaaggactgcaaaccttcccacattaaatgcttttattcaa

SEQ ID NO: 476345 - DNA, 554 bp, Homo sapiens
tatttaataaatgtaagttcccatcctgattcctttcccatgttgctaaaataaatcaattctacagaattatgttgtatgtatgaaatacttctgaagcatggttatatctaaacaaatcaagcccgatcagaaattctaatctttgtctttttctctcaattaagaagatccaaatagatatttcatggcaactctttaaaaatctcctgtttctatttctccccacccctaaactgagagtgtctcattctttgactccccaaaaacatcgtaatccatgctattcagtccytatcttagttctaagacaaactcttttgtctctgtcatctgtgaccccatgacatgctcttgacacttcaagccccctagatgtagtcaggcccccagggagtagggtgctcccttttgcactgttttctcaagagagtacacatgaagagattttatcctttttctccttgatgaagaaggaaagaagcagaaaataatcaggcaaaaggtgtcaggaaaggactgcaaaccttcccacattaaatgcttttattcaa

SEQ ID NO: 476346 - DNA, 632 bp, Homo sapiens
tacttctaaactttctcaaatattcctcatgtctacatttcctagaattcatttttataacacatcacagctttaaatcattatcagggtaaatttttgtttaccctatgaggacagggacatatctgtctctttctccccagctacagccctgtgcttctgcatagctggctctcaaacattgttgaatgaatgaatgctccctacccctatttgtctttttggcmtgccttatttgtaccaggcactattttaagtgttttgcatatattaatataattcttataaccaattttattatgtagggatcattattttacagataagaaaatgggcatagaaaggttcagtaattttcacatacaacagttagtaacagatatcatttattgagtacttaatttgtgccaggcagggctgccattagctacccaaagtgactatgtgtaaatttgaaaaagatgccccttttacatggataaattacaaaaggagtctcttccctaggcacagggcttatcagtgaaagccagttcctacctgtactggcccctcaaccatgagcatttttggagggcacaggctacacaaaatacagtgtatctaatatcatttcttttataatatactac

SEQ ID NO: 476347 - DNA, 621 bp, Homo sapiens
gctggtgagagttttgcttctggtaagttaaaatgctgaaaataagtttgtacaggacattttttatcaatttccttttatatttgacatggcaactaataaaggggccagaatattgagggaggagatgtgtggatggctggtgagaagggagcactcccaggtttggccctcttcaaaattttgctgagagagaggcttgggscaaactattcccacaggatactggggagtacatttgtgggaagccaccattgagctattttgtaaatattttgaatttcataaagcttaatatttttccaaccaccgatctgcctactttttacacccaagtgtcctgtagaggaaatttgatctacatattttgcagttctttataccccagccatttaaaatgatatttagcaatagtttgttttaagaaaaaaaaaacaaaacacaaaaaactccaagacctctctccagtcttttgtcaataatctctttccccaatttgggaatccgcttctcgtgagttaaatccacttgacaaaatttaaaattcaacttagtgatattatttaatttcctataacactttatggctagtgaagcactttttcatacaccatgtttcag

SEQ ID NO: 476348 - DNA, 621 bp, Homo sapiens
gctggtgagagttttgcttctggtaagttaaaatgctgaaaataagtttgtacaggacattttttatcaatttccttttatatttgacatggcaactaataaaggggccagaatattgagggaggagatgtgtggatggctggtgagaagggagcactcccaggtttggccctcttcaaaattttgctgagagagaggcttggggcaaactattcccacaggatactggggagtacatttgtgggaagccaccattgagctattttgtaaatattttgaatttcataaagcttaatatttttccaaccaccgatctgcctactttttacacccaagtgtcctgtagaggaaatttgatctacatattttgcagttctttataccccagccatttaaaatgatatttagcaatagtttgttttaagaaaaaaaaaacaaaacasaaaaaactccaagacctctctccagtcttttgtcaataatctctttccccaatttgggaatccgcttctcgtgagttaaatccacttgacaaaatttaaaattcaacttagtgatattatttaatttcctataacactttatggctagtgaagcactttttcatacaccatgtttcag

SEQ ID NO: 476349 - DNA, 588 bp, Homo sapiens
tggatcctcaaattgtttgtaaatgaatacataaataaaaatatctgcaagcgttagtcaaatcagaggccccagcattcctcactagtatcttttatctgtaggacccatattttgggccatctgtatactcagaaccccagtacgcatttcaagttttctgccttccattcttaccatttctactatttggacctagtttttcctctctctttgtttttttttttttttttagagacaagtctcactccatcgtcacccaggctggagtgtaatggcgcgatctcggctcactgcarcctccgcctcctgggttcaagcaattctcctacctcagcctcctgagtatctgggattacaggcatgcaccaccacgccaggctaatttttgtatttttagtagagaggggggtttcaccatgttggtcaggctggtcttgaactcctgactttgtgatctgcccacctcggcttcccaaaatgctgggattacaggcatgagccactgcacccagccagtttttcctctttctgtctacagcactgaacactgagccctgcaatcagaaatacctatatgtcattatc

SEQ ID NO: 476350 - DNA, 636 bp, Homo sapiens
tagctgtgtgccacatgcaagttaattaagtctttcagtcctcaatttactgatctctaaaatggggataaaatacgcacttcaaagtgtcaggcatctacatacccaataaatgatacctattcagagaaaaagatayataaacctaaaaaagcaaaaatgaaaaagaacacatattcatagctggcaataagcaaaaggcttacatttactccaaatatttatttttttaattgcctcagaaaaaaatattcccttcctcctatttcttgtcaaaacaagatagaaaaataaaattcaatgggaagcagtacagctaacattttacttaatactactttgttacaggaaaattcaattttcttgtattattttttattatggcaaaaacataaaatttatcattttagccattttaagtgtacagtacagtagtgttaattatatgcacaatgtttccaacacatctctgaaacattttcatcagccaaaactgaaactctatgcccactgaacaataactccccattttccccttcacctaatccctggcaaccatatttccagagcttgactactttagatacctcatataagtagaatcatttttctttctgtgtctggcttatttcactt

SEQ ID NO: 476351 - DNA, 636 bp, Homo sapiens
tagctgtgtgccacatgcaagttaattaagtctttcagtcctcaatttactgatctctaaaatggggataaaatacgcacttcaaagtgtcaggcatctacatacccaataaatgatacctattcagagaaaaagatatataaacctaaaaaagcaaaaatgaaaaagaacacatattcatagctggcaataagcaaaaggcttacatttactccaaatatttatttttttaattgcctcagaaaaaaatattcccttcctcctatttcttgtcaaaacaagatagaaaaataaaattcaatgggaagcagtacagctaacattttacttaatactactttgttasaggaaaattcaattttcttgtattattttttattatggcaaaaacataaaatttatcattttagccattttaagtgtacagtacagtagtgttaattatatgcacaatgtttccaacacatctctgaaacattttcatcagccaaaactgaaactctatgcccactgaacaataactccccattttccccttcacctaatccctggcaaccatatttccagagcttgactactttagatacctcatataagtagaatcatttttctttctgtgtctggcttatttcactt

SEQ ID NO: 476352 - DNA, 658 bp, Homo sapiens
cctggttttctaaacagttataattcatgttataatcagagaagaaaaccaatacatgctataacataaaggaagataaaactaacatttattgaagagatattatttgcccagtgtttgacatacattactggataaaaccagtaataaagttggttggggtatacacacgaaattttttttttctaaccgctaccaccagatatgtcatagtaagtctttttattatcatattgtattaacttctgaagtgagtgctatgactttataactattttaaattattaaaaattcagtctggtacagagttaacccccaaactgattagtcaccctcttccttctcccagttcaaatttgacccatggctccagggaattgcaggtgtgtgtatgtggggtgttgyccttcttcctctccttcttgttctacctcctcaggcggaaaggcttatgggaaatgaggaaaaacatttacatttaactgggtctgcagttgtatcttctcctggatgtttctactcctcctcaggctaacacaaattattctgtgtggcaggtttccacacaaaggtgcttttgtaggggtcatgtatgagttcttgcacagtttcataattggaatattccattcctactcaatttttcccccacaaaata

SEQ ID NO: 476353 - DNA, 676 bp, Homo sapiens
ctgcaaacctagctcttacctctaggcaagcaggcaagcaagcgtctctttcctgaactaatagccatgtagctccttgaattaattggcaagtcaatggtgcagcctgtgtgttgtttccccaggagacctggtacttcacatcagcaactttttgaattcagtttggccttaagtttgctcccaatcttaacccttttttggcctcttatattcaaatggatggtcatattgartatattgcatatacagtacaaggatacatctatcaataaaactcgagaaaagtgggaaagagccactgattttttacaaaataactaaaacatgcttttaaggaagtctcttgtaaaaaattattttttgttttgatgatttatataaaggaagatctttaagagactcttaagaaaacccatttttatgtgttttgctggatagtttctattttaaattatttaaattcttaattccttatacttatttaatcttagcagaatagattgaaaattagaagttttactcctgacttgatcacagacttttaaaataatcttggaaactcaacataaagtaggttttcttctgtgtaagattaacaatttaggtaaggtaagaccttttccaattccaaatttctggatatattttaaaaattcagccagtgatttgaaat

SEQ ID NO: 476354 - DNA, 577 bp, Homo sapiens
acatgtttatatacattggtaagttttcattttattagtaagtaaattttattttttttaattagtttgattttttaaatgttatttgcaacccaaagaatcctgaataacacaagcacctcttatgtatcagagatatgctaaagactgagtgatggaatgagagacatgctccttggcctcgcrgaatttatattcttgggttactttcattctatgtgacaaacataaaattctgacagatcacctataaacacttatttttcgttattgttgtttgacaagaacactgttgatatgggcaggagatatggaaatactgtgtagaagggggcatttccccagcaaagtacccacgcccaagcctggaaacctttggccctaaatgagaaaaggcattccagaatgttgcctttttgcccagcatgccctgctatcctgtacccatataagccccaaccccaggctgcacgagcagatgggcagatgagcagatgaacagaagagcagaggagcaagagagtggtgtggccaagaaggagagaagtgagggaacatctgaacatcaggaagggtt

SEQ ID NO: 476355 - DNA, 577 bp, Homo sapiens
acatgtttatatacattggtaagttttcattttattagtaagtaaattttattttttttaattagtttgattttttaaatgttatttgcaacccaaagaatcctgaataacacaagcacctcttatgtatcagagatatgctaaagactgagtgatggaatgagagacatgctccttggcctcgcggaatttatattcttgggttactttcattctatgtgacaaacataaaattctgacagatcacctataaacacytatttttcgttattgttgtttgacaagaacactgttgatatgggcaggagatatggaaatactgtgtagaagggggcatttccccagcaaagtacccacgcccaagcctggaaacctttggccctaaatgagaaaaggcattccagaatgttgcctttttgcccagcatgccctgctatcctgtacccatataagccccaaccccaggctgcacgagcagatgggcagatgagcagatgaacagaagagcagaggagcaagagagtggtgtggccaagaaggagagaagtgagggaacatctgaacatcaggaagggtt

SEQ ID NO: 476356 - DNA, 624 bp, Homo sapiens
ccagaaacaaatgtgtccatctgtttttgcttggggctactatcccctaggccttgttttatgtggctcttgggtaggcatggtttccacataaagcacatcctktaggataaaaatcacaggaccaatttggcacctaaagggactagttattgattctccactcaacattaggttccacataacccaactgaccctatattttgaacatagtaattaatcttgttgaaaatattgaaaatgcttatcaacgaactacagtcttgtgccttaagatgaaagtttatgcctaaagtgggttgtgacctaactcaatcagtaactttagacattgtattttttatgattttgttctctccatcctgacctaagaataaagatgttgccaatgttaccagtacatttccagcattgccaatgtcctgtaaattatataagttgagtgtaaatccttggccagattccatcatccctgaggccccagtaacaaaatgttttgaagtgatattttagatatatagagaattttttgttgttgttaaagtggcttcattattttttaatttattaaaaaacgtttattgaatacctactatatgcctggcaatctgctcatactggagt

SEQ ID NO: 476357 - DNA, 493 bp, Homo sapiens
ttatgacaatgtgagtggttaggtcatataaacattttggaaagatcactttgatctcaacctgtagcaaataggtttgaatacagctaaagtaacgtggaaaaagggaaacactgccatgaggtaagaagcaattatacatttaacaaccaaggwggcaatggagatgcagatacaggttacacttatgaattaaactagtcaagactaagtcatgacttaaatatgaatgaataaaaatactgttttcagggagaatctcagatttctgagaaaggactggctggagatagaatttaggactgatttatattcagttgaacttcaaagtgggatagtgactataatagcatagggagaaaataaattgtgaggagaggaagcacaacacagcatgttaagtaactgcaatggcatgtagaatagtgtgaacatacagactggcacagcagcagaggagaatgcggatgaaggaaagtaagtaaattaggcc

SEQ ID NO: 476358 - DNA, 493 bp, Homo sapiens
ttatgacaatgtgagtggttaggtcatataaacattttggaaagatcactttgatctcaacctgtagcaaataggtttgaatacagctaaagtaacgtggaaaaagggaaacactgccatgaggtaagaagcaattatacatttaacaaccaaggtggcaatggagatgcagatacaggttacacttatgaattaaactagtcaagactaagtcatgacttaaatatgaatgaataaaaatactgttttcagggagaatctcagatttctgagaaaggactggctggagatagaatttaggactgatttatattcagttgaacttcaaagtgggatagtgactataatagcatagggagaaaataaattgtgaggagaggaagcacaacacagcatgttaagtaactgcaatggcatgtagaatagtgtgaacatacagactggcacagcagcagaggagaatgcrgatgaaggaaagtaagtaaattaggcc

SEQ ID NO: 476359 - DNA, 634 bp, Homo sapiens
ctatgttttctcttcctctgtctttgtccctaaaagatcccataataaaaatytagttggtggagaacacacaagtattgttagctatggaacacatatctttatttttgataaaaagaaagtactgctgtatttgtacttccaaagccacactttgttcaaagctttatgtaaaacacttttatttacctgatcttttaaagtatccgatctttgtctttataattgtgctgcttaagtcccagcctctttttctgttcaagatatgaggctatttctttcattttttacaattacttacagttaccatttcactgattttaaacttttttttctatattcaccaaatgaagtgtttcctgttaaatatttttcaaatttgagaaacggtgactcacttggaaaataaattttactgaacgtgtttttcaacttggtagaaagtgctgccttgactgtgagtagttatcaaaaataccctttaaaattaaatgactttttgtccttagtcacatttgaatacctggaaaaacaactattgttctttgaaatatctgtattttttaacttaaaaagcttacttgaaacatttatttgcataaaaataaaggagtatatttataagtaactacag

SEQ ID NO: 476360 - DNA, 634 bp, Homo sapiens
ctatgttttctcttcctctgtctttgtccctaaaagatcccataataaaaatttagttggtggagaacacacaagtattgttagctatggaacacatatctttatttttgataaaaagaaagtactgctgtatttgtacttccaaagccacactttgttcaaagctttatgtaaaacacttttatttacctgatcttttaaagtatccratctttgtctttataattgtgctgcttaagtcccagcctctttttctgttcaagatatgaggctatttctttcattttttacaattacttacagttaccatttcactgattttaaacttttttttctatattcaccaaatgaagtgtttcctgttaaatatttttcaaatttgagaaacggtgactcacttggaaaataaattttactgaacgtgtttttcaacttggtagaaagtgctgccttgactgtgagtagttatcaaaaataccctttaaaattaaatgactttttgtccttagtcacatttgaatacctggaaaaacaactattgttctttgaaatatctgtattttttaacttaaaaagcttacttgaaacatttatttgcataaaaataaaggagtatatttataagtaactacag

SEQ ID NO: 476361 - DNA, 494 bp, Homo sapiens
tggagaaaactctgctttcaaagagctctgtgattaggccatggtcaccctgataatctccgtattttaaggtcgactgttttggaaccctacttacatcagcacagtcccttcacacagcatgtagattagtgttcctttgaatgactgggagwcgtgcctactccagggcttggaatcttgggagccatcttggaagtcggcatatcacactgacctagggatcagttttttttttttttctggtatccttgatctttaggagatggtttcacatttatttgttcattagcgtgtccattagagaattcctagcctataaatatctcatcttccttttaaatcctgagttggtctgggggtaaatatgtcatagcatgccccatgaggaacctgatattggcatgaatataatgagtggcaggtagttttgctataaaggaagccaatttaggcttatctagctgaaatgtttcaaacaccacaaaaatgcc

SEQ ID NO: 476362 - DNA, 605 bp, Homo sapiens
gaaattacctgatctttctttgcaaaaacaaaaacaattctgatcacataaaattttaaagcactaccttgatcaaatagttttatgcaattagttaagagactcatatgctttttgccctttagttccttttgggtttgtgtagcatctgcaacacaaatcctgaatgtacaaattttcctctttgccagagtttctgcaacatwcatgcagctcttacttacactcatccagctttggccactgactaaatctctcatctaatgacatgatatatccagctcagttttcctctctaaaaagtttgagcccacagcacattcattgatatcaccagaatcctggaaacttgcacgtactctgtgttcttggatatggtcaggaagatttgtctggaatttcagtagatgacttgactcttcatacatataagggattttcagcatgctttgtggagccacctccacaaagagaccttcttaatagtaagctctttgcagagcagaaatgattttgcaaactggatctttgcataagcatgggtgaaaccgctgtagttttcccgggaactctattaggatgtgcttgctagctacttttaacac

SEQ ID NO: 476363 - DNA, 614 bp, Homo sapiens
tgctctgcctccttggcttcatccctctctgctggctcccaygggctcaatggcctccttgccacttcagtgcaccaggcctgctcctaccctgggccattgttctaggaaagagcctttctgggcttgacctcagaagaccttttttttttgagagtcaaggtaaattatgtaaattatttattgatgacagaagaacactatcttagtccagtttctgttgctataacagaatagcatagacagggtaatttatatagaaaagaagtttatatcttacagttctagaggctgggtagttcaaggacatggcatcagcatctgattaggatatttgggatgcatcatcccaaacaatggaaaaatggaagggcaagtgagcacatgcaaaagagaaaacatgaggggctgggctcactttataacaacccactcttatgataactaaccccctcccaccataacagcattaattcattcatgagtgtgaagccctcctgacctaattacttctcacaggcccccacctcttaatactgttgcaatggcaattaaacatcaacatgggaaaatacctttttcaattgacatcctgcctctaccacttattagtt

SEQ ID NO: 476364 - DNA, 615 bp, Homo sapiens
ctgctctgcctccttggcttcatccctctctgctggctcccacgggctcaatggcctccttgccacttcagtgcaccaggcctgctcctaccctgggccattgttctaggaaagagcctttctgggcttgacctcagaagaccttttttttttgagagtcaaggtaaattatgtaaattatttattgatgacagaagaacactatcttagtccagtttctgttgctataacagaatagcatagacagggtaatttatatagaaaagaagtttatatcttacagttctagaggctgggtagttcaaggacatggcatcagcatctgattaggatatttgggatgcatcatcccaaacaatggaaaaatggaagggcaagtgagcacatgcaaaagagaaaacatgagggkctgggctcactttataacaacccactcttatgataactaaccccctcccaccataacagcattaattcattcatgagtgtgaagccctcctgacctaattacttctcacaggcccccacctcttaatactgttgcaatggcaattaaacatcaacatgggaaaatacctttttcaattgacatcctgcctctaccacttattagtt

SEQ ID NO: 476365 - DNA, 615 bp, Homo sapiens
ctgctctgcctccttggcttcatccctctctgctggctcccacgggctcaatggcctccttgccacttcagtgcaccaggcctgctcctaccctgggccattgttctaggaaagagcctttctgggcttgacctcagaagaccttttttttttgagagtcaaggtaaattatgtaaattatttattgatgacagaagaacactatcttagtccagtttctgttgctataacagaatagcatagacagggtaatttatatagaaaagaagtttatatcttacagttctagaggctgggtagttcaaggacatggcatcagcatctgattaggatatttgggatgcatcatcccaaacaatggaaaaatggaagggcaagtgagcacatgcaaaagagaaaacatgaggggctgggctcactttataacaacccactcttatgataactaacccmctcccaccataacagcattaattcattcatgagtgtgaagccctcctgacctaattacttctcacaggcccccacctcttaatactgttgcaatggcaattaaacatcaacatgggaaaatacctttttcaattgacatcctgcctctaccacttattagtt

SEQ ID NO: 476366 - DNA, 593 bp, Homo sapiens
cttagaagacacaagttaaccacatcccatgggtcagtggaagaaaacaagggaataattagaaaactgtgcaagatcagaagggagcccctgaagctataactgcaagaacctccagaccctattgcctttaaatccccttttaaaaggcaccaagtgaggaaaattccaagatgaatgggttacgggtctgaccttcaggaacatgtaggctgcctgccgatgtccacaacatcgtccctttcacatgcctaatacattagygtgggccactcatttaaaatttaaaaaatttcatttagcatttaaaaattcatttgacagaagagatgtttcaaataaatagtcttcaaaaaaagcccggtctataagtctctgtaacacagcccatctgctttaggtgaagtgaggcagtaggcctggagcctcacctggttggctcttaaccacatttactttccaggagaagcctttcaccaacttcctcagaacctccaaaacaccaaggaacaagatcctgaaattgtccatagtcttaactttgttaataacagactgcatgcccctggaaaaactatttcacttctcttggc

SEQ ID NO: 476367 - DNA, 580 bp, Homo sapiens
tttgtgagtatgagcagtgctacttgaagtggggctcacttgagtctgttaagaatgaaacactttgagccacagactattaaatcagaatctctgaaagtggcatccaggaacttacattttaacaaaatttccataagagcattccagtttgccaagtcctaggctgggaaagggttgctttctggagcttccttttgatttacaagccagaatcccctttctagtgtttcaaaaagattctgaattggtcccggcactggcttataacatcatccgaataaattatttagccattctgaccttcagtttcttaaattgcaaattaggaataacacttgtacgaatgaagccacgtacaatacatacaaacagacatacacagacacacgtacatatatgtatctgtatgcatacatatctatagagacagggagtgacagagagagagagacagatcgaagaaatgaatcttatggtgaaagctttttgtaaayaatgattattggaacactggctttccatagtctccttgttgttctttctcctcagggatatgtagcttgaggagatcgctttc

SEQ ID NO: 476368 - DNA, 627 bp, Homo sapiens
agtatgtttttattcctttcactgctgccctcctccccactttttagataaaatatataaatactaaacctctggagaacctctttggacaaaacagccacatgtgcctgtgacttgagtttttcccgggtgcaccctcaggctggctcaataaaccttgatgatttaagatttattatgctcagttactcattttggttgtcaccaccatattttaggctgttgtttgttactggaatactccttcattcccagaaatcctgaaaattcttccaaacatataagtttaatgagcattttaatactaattatctacatagggtattatgagtatatgtttttccatatcaccctttggcttaccttattacagcagcaacagtgttttgcttattttagttgcagttagaagggtttcttctaatcagattacattttcrtttgacaaatttatgaaaagaagccttaaaaatacttgccaggagaatctgataatttatgtcaaaattacatcagctgatttttaaaaatttttatttccatgcttttgggaatatagttggtttttggttacatggataagttctttagtggtgatttctgagattttagtgcacccatcacctg

SEQ ID NO: 476369 - DNA, 527 bp, Homo sapiens
gatacagaatttccatcatggaatataggcatcttcaattttaacaagtactaactttatgctctctgaagtgggtatcccagttttcagtattaccaccattccatagcagctctatttcatcatgtttatggcagtgcctgttgccaacagatttaaattttgccaatttaatgtctgggaaatattatctccttttcatttggatttctctggtttctgtgtagtgaggctttgtgctacaaacccatagaaggactaacttttggttttaaatggtagagagatttttkctttctctctaggcaaacagagatagacttttttttaaaagttcccttctgagtgtttgtcccattcctagcttacacttagtctgatggcatagcctttggggacacagttgtaagctgggtcacctttgaggctcactatcttggctttctccagcctgcatatcacatgagttcagcaaaagtcaccagggtccagaagatagcccaaaataggagccccattaggagaac

SEQ ID NO: 476370 - DNA, 641 bp, Homo sapiens
aacccattacctttctcctctctctaccatatcccatccccatagtcatacctctgcatctcctcccacctctcctcttccccacttacccttattcctttcccagttctccctttctcttccctccccttcttatttacccctactctactctcacctgtctcacttccagttgtatttctctcacttaagcacttcccactgtatttctgtaccttatgtctgacttccttcacactctcaaatacgtggctcacaaagtatctatccgtataaacgtattttattcagtgagtcaatatcaccaggttccctagaggttctctagttctaatcaccactaatgcagaacaagaacgatgttgattctatctataggaaatgagcatttcttcatttaagaaaatgggcaataaaattagagctctctgtggcacccaggccttccttgccaggttaccagttatcaggcctatttcaggttttgtacttgattgccagtaattcatcattttggaatatatgttcttactctgctttgagttttaaatcccatgatamtactactactactactactactactactactactactactactactactactactaccactgatgtattttaatagtatt

SEQ ID NO: 476371 - DNA, 625 bp, Homo sapiens
taattttttttactggttgtgtctgtattagtcggtttttatactgctataaagaatggccagaggcagggatttagcaaggaaagaggtttaattgacacagttcagtgtggctgggaggtctcaggagccttacaatcaaggtggaaggcaaagggaaagcaaggygctttcttcacatggtggcaggaaggaggagtgccgagcaaaggggaagagctccttataaaaccatcagatctcatgagaactcactatcatgagaacagcatgggggaaactgcccccataatccaattacctccatctggtctctcccttgacacatgggatttatggggattataattcagaggagatttgggtggggacacaaagcctaattgatagcatctaatatatctctttagtattaaattttacctttccttcactatttctttttatttattggcttcatttatataatttctcttatcataacatgtaaaattgtttttcatcttattttactatttgttatattctattgcttttgcttcctctttgtcattttctttttttggagtgcagtggcccaattacatctcactacagtctcaagctcctggactcatcctctcag

SEQ ID NO: 476372 - DNA, 642 bp, Homo sapiens
tctttcttgggtattgcaattttctcttcccaccattttctattactgtaatcatagtcatctttattacttgcttagaatatgtgactgttatgttatcattgcagagaccttttccttattaccaatcttcttttaaagcattacatggaggaacatgaacagtctgagcattcaaagttcaagatttcaagacaatcagttctgtttgcctgatctacaggatgaaggtcacaataagagcacgtgatcataatagtcaatatttaatacatatttaatatatatatttwtagatttaactactggttaaatctattaaccatatatcatctaaccatttctataccttcctatcactcttcttttcctattctctcttaattccaattttcctacaacacacacactcatatacacatacgcacacatgcacccactatccataagaccatcacgtctggggattttgcacatacagagcctaataaaattcagcaacaaagatcattcaaattcataactcaaaaattatcaggtacagaaatacatgaactgaggtgaagaaaagccaaaatactgggagaagtagaatatctttcacaaaagaccttctaggaagatcatatggtactgttctgc

SEQ ID NO: 476373 - DNA, 572 bp, Homo sapiens
ggacagagttcaggagagagcagatgcacagacaacaatctcttgaaatctgcagagagtctcagagatctggatatgtgcatgaggaagctacccaaggctgaggaaagaagcatcggaaataattatacggggaacagtacctggcaccttcctacggctggaaataggccttttctcaccagtcagaatggaaaatctcttaattcatatgcaattaggtagaacctcagtagtgagaaatgaggtagactatgcactgctctggtctctcctggctaacattttaatcccaaaaaattgaaagcaaaaagagccaagtgaatctatctatatctagctggtggcataatcacaccaaaagaaacaattttacatgacttaaaacctcagtaatacatacatctttaaagagaagaagggggctgtacacagggtgtacacaggatgtgtacatcactactgatggtagtagtcttggtattattattctgagcctgttrtaagtgtatttgtagcataagcaaataagtacgctactatcattaagaattaagattgtaggatggtca

SEQ ID NO: 476374 - DNA, 641 bp, Homo sapiens
gctgttgcgcctctgctgaacgcccagccagagcggattcacttttcacacaaatcaaccggagggattgttgctgcctgcaatcaataactcagcggagtgagttgctcaaactagaggcgtccctcgtctgggtctttgagggccgtccggattgagtcccagcgctctgctttccaaacaaagaagtgggcaccaaaacgcaggacgagatttttaatccccacttccaccacaaccccgggtaaagattttttaaaatgaaaaagcacacacatagtaaggtatctagaagaaacagttaaaaggggaagtgtgaaaatccattccttgaattgaaggtttctgtgatatttcaagaaakgggatagaatcaatgttctgatgaacaacatttaacaattttgtaagtaaaggtaaagtcgcattaaatttattcatgcatgtggttatttttgaatcagccacacacttgcaagcaaattactgatcaagccttatttggacatactgattacaggaaaagaaagaaatgtatcataatttgtagtgtcgtttaaaaaaaaaaaaaaaaccttaccatacctttcagatgttatttcatgaagattgcatttctataaggtgaataggccctggga

SEQ ID NO: 476375 - DNA, 396 bp, Homo sapiens
aagtaatagggtatcatatcaggcagaagtagcagagactatcaggaatacttagaaatcaggcagatggtggccatcatcagatctgattctatttcatgaaacaccacagagtggaattagggcatagtgacagcatccaaagatccaaggaaacttagcagaggcctagtcccgtgtagacagaagaggacaatttccatatctatagagccacactggcccctaggatataattcggaatcatggcctcccagatctagtgaactgcacagattccagctcagaatgagcaataatacgggagcccagcagtagtagcagggccactatatgtacccaatgaggaaaagagagtcaaaggctccaaataygcttcctattgttgctgagttt

SEQ ID NO: 476376 - DNA, 603 bp, Homo sapiens
tattttcagatgtaatttaaaaccaagtaaagtatgtacttttaatattctgggtttcttgggcttatctcatgttattgatgatcatttctctaattttaattcctgacccagagatctccagtatgtaatgtgaagcttctgcaattttgtatcttactccacaaagacatgatatgtctgtttctaaatatttaaatttaaaggaaggatggcttgttataaaaaatatggttataaattgaagaataatcttaattttgcaccatttattttgtgtcaatgcttatcttttttgattcttgttatctragatgtagtttaagggctttcaaaaagaaaagatctcactgctgatagatgcttgtaatctaagattaaatattccatattatttttaaggtgttctcacagcaataatttttttaaagtaagattaaaggatttagatttaaattagttgacatttacatatatcaaatagcactttcataatcgtccatcctatttgcataacgagggacgttatcacctctgctgtcaaaacaggagattgttttcccttcagaaatgaattagctgccctacttagcatacacaggt

SEQ ID NO: 476377 - DNA, 485 bp, Homo sapiens
cttccagttagcttctgccaatgtcagcactgkcaggagactggaaacagggatgaagtgagaaggcatctttttgttctttctggtatcatcagtggcagcagcagtagcaggccagggggacactcttgggttcctggacagtagtggcagcagctttggcagcttagtgcttatggtctctgtctcttgccacaggatcccagggtccctgcaatgtcaatgagagcacaggcttctggcttccctaaggtggcagcagcaggagcaacagcagcagcagcaggtataccccagcagttcaggagttcagtaatcctgagttttgtgtaacattatgcaagcatacctcacacatattgcaggtttggttccagaccaccgcaataaaatgaatatcacaataaagcaagtcacatgaaattttttgttttccagtgcttataaaagttatgtttacactacgtggcagactattaagtgtg

SEQ ID NO: 476378 - DNA, 514 bp, Homo sapiens
tccatctagcccatttgcaaagtccacaattctgcaagatgcatagaagtgcagtgatttggaacaattcacaccccccagctcttctgtgtcagtctgaggcttctattgagctcttagattccataataaagaaagagggcactgctcacatcaccagtcttttgtgcataccrttcctgcctcagtgggttgcaagttttctgcagagaaaaaagacagctacttttattaaacctctttgtggtcctcaacttttcccccaaccttcttgatgacaagcttctctcccttgagtcatgcacattcatctcagaggccagagaggagaggttttcacatcaaggcaaaggatacctagtaagaagaagctatagaagaggtggtgagctggggtatagatgagaactagagacggtctcttccaacaaaggttattctcaccagggccttaaaggtcttatgttaagaaaaaaatggtgtgcatttcttcaggcaggcgcaagatgataat

SEQ ID NO: 476379 - DNA, 506 bp, Homo sapiens
ataaggtaaaatactaaagattttttttttttwaaaaacctaattatgttgactatatgtgtgaatttaaaaatgtggtatagttaggcttgcccctgtggctcactcctgtaatcctaccactttgggaggctgaggcaggtggattgcctgagctcaggagttcaagaccagcctgggcaacacggtgaaaccccatcactactgaaacccaaaaaattagctgggtgtggcagtgtgcacctgtaatcccagctacttgggaggctgagacaaaagaatcgcttgaacccaggaagcggaggttgtagtgagccaagatcatgccattgcactctagcctgggtgacagagtgagactccatctcaaaataaaaataaaaataaaaatgtggtacagttaaacatgtgtggtgtttaataatatattagtaacaaaacataatagatttgcaacttctgtgtcttcaaagtagtgatatctatctataaataaatagtatttt

SEQ ID NO: 476380 - DNA, 596 bp, Homo sapiens
taatttgttatttgtcttttagttgaattttaaacttctgttaatacccataaagtgaaaagccatcagtagacaagataaataaatamattatatctaattttcacagatataccctgcttcaaagccatgtcagagtgcaattcacaagagtttagctatatataaatgataagatgctctggggagaagttttgaagatttgcaagcttcttccctcaggatcaacattgatgaatctaagtaaatgaaggagaagaagcatacaagataataattatttacaaaaacaacaaaatgttagaaacatttgaaaaatgaaggttctgtgccgagcacagtggctcacgcctgtaatcccagcactttgggaggccgaggcaggtagatcacctgaagtcaggagtttgagaccagcttggccaacatggtgaaacccggtctctacaaaaaatacaaaaattagccagccatggtggagagcgcctgtaatcccagctacttgggagactgagactggagaattacttgaacccgggaggcagaggttgcagtgagctgagaccacaccattgcactcctgcctgggcaacaag

SEQ ID NO: 476381 - DNA, 551 bp, Homo sapiens
gcatgagttaaagaaatggttatagttttaaaccacttaattttggagtggtttgtcacaaagcaaaagctaactgatatacatggtcartatcttcctggcagaggagtaggacattagtttgtcatgtaggcaatctaaattcacttatactgtatataaaattagtttgacactttatttaattataagatgaacttcttttcacccaagtatattagacaagccacaggtgtcaagtcagtcttgcctctttatagtctatcttaacatgaagatccagtgtggttttagtctttcgtgagttctagctttctgatgctgccgtataagcaccacgagactttgattatccaacttacttttgaaataatcactataaacctgactcctgtttaattttttttttttttacattagaatgccacacagttgtctaaggaaggggcccatggaatgatacaggtctgtggcctgttaggaactgggccacacagcaagagggagagcaaacattatggtttgagctctgcttcctgtcagatcagcag

SEQ ID NO: 476382 - DNA, 551 bp, Homo sapiens
gcatgagttaaagaaatggttatagttttaaaccacttaattttggagtggtttgtcacaaagcaaaagctaactgatatacatggtcagtatcttcctggcagaggagtaggacattagtttgtcatgtaggcaatctaaattcacttatactgtatataaaattagtttgacactttatttaattataagatgaacttcttttcacccaagtatattagacaagccacaggtgtcaagtcagtcttgcctctttatastctatcttaacatgaagatccagtgtggttttagtctttcgtgagttctagctttctgatgctgccgtataagcaccacgagactttgattatccaacttacttttgaaataatcactataaacctgactcctgtttaattttttttttttttacattagaatgccacacagttgtctaaggaaggggcccatggaatgatacaggtctgtggcctgttaggaactgggccacacagcaagagggagagcaaacattatggtttgagctctgcttcctgtcagatcagcag

SEQ ID NO: 476383 - DNA, 577 bp, Homo sapiens
ttccttggctataatcttccaggttcaattccagcagaaaaaaaagagggagaaaacccctgaccccaacgggaatgtctccaggttcattccaagagcatggcttgtgttctcagtgcttacctctaaaccaaggacatgagatgcactgattggcctagaacttgattacctgcttatccctagagctggggttggagctctgtccagaccacatgacctgagagtggtgtggaatgrgggaatcctcaaaaatctgggttgcttcaagaaggtaagaaatggatcctggatagctgaaatcaacaaataccctttatgttggagtctctctttaatgaaagattttgacatttctagaaatcatcatatatttcagctacaaattgcctgagagcagcattcataaaaggctcttttataatttctgatgtctgagaaagtaaaaaatggtttgtgtttgccaaccactggattctttatgaactacaagccttaatcctgtatctttagatcactgaaaataaacatagctgtggctcatgcctgtaatcccagcactttgggaggctgaggc

SEQ ID NO: 476384 - DNA, 652 bp, Homo sapiens
ctgaaatatttaaaagttgcagatatcaggatcctttggctctaaaacactttcttttttttttttgagacagagtcttgctctgtcgcccaggccagagtgcagtgcagtggcacaatctctgctcactgcaagctccgcctcctgggttcacgtcattctcctgcctcagcctcccgagtagctgggactacaggcgcctgccacctcacccggctaatttttttgtatttttagtggagacggggtttcaccgtgttagccaggatggtctcgatctcctgaccttgtgatcctcccacctcggcctcccaaagtgctgggattacaggtgtgagccaccrcgcccgggactctacgttcaccttcatctcctgggaacaggaacattctcctattcatcacaataccattatgatgcataagaaaattaacagtaattacatgatataatctaatttccagtccgtattaaaatttaacccatgtcccaagaacatcttttagatgtttttattgaaccagtatccaatcaaggttcatgcattgcatttagtagtaacttagcattagactttaatctagaacagctccccacctaggacacataggatctataggctcaatttttaaagcagtatttctcaaaatg

SEQ ID NO: 476385 - DNA, 579 bp, Homo sapiens
gaaaacttcttgaaggcatagattagctcattcatttttgcatcctaatagaacttatcaccttgcattctaatacttatgtccaaactgttaataattacacaatagacaatggaacaccctacatcatgaaagtcatttattttgccttagctgcagttcattcttccatccaggcacttatcacattatattgtaaatatccccttatttgtctctttcttcccactggattggaarcttattaaaagcaaaaagcctcccatctttgtatttttaacacatagcccacagcatcctgctaatggcctcccagtaaatatgtaattaatgaattaatatttggaatctgttcttgtagatttctttatttgtcagtgctttgcttcccaaataaatctttttatatcaacgtccaaattactttacaaagcttgggatttaactaatgtttttactataaagcacaatgtttctacctatacaatattcagtaagtttgggtcagagtcatgtggatgtcaaggtgttatgaaaaatctacactttctttttagaggcagagtctcactctgttca

SEQ ID NO: 476386 - DNA, 638 bp, Homo sapiens
tccccttccataccctgctctgtagaactggggatggaagactgaagctgcattccacagacttcttgttgtttggcttcctaagtccagctaatgtgaggcattggcaggagaacagaagatgagagaagagctttcagttgctgattgacaacaatggaagctgttagaagttaccatcacagcaacggggcaggacaactgcagacttctgtagcctaggctgcagcaacaacttctgcagtttctgcatttccagcagtgcagcagcaggggcagccctgtgggctccagcctagggctgttggttgtttcttcatcttagagtatcaccccttcttccttttgctcctccagtctttatcttttcctctcatttattcctagcctttccaaaacattgtgacaaagttcctatagtaaacccttcctttttgaaatacctagctgcttttctatgtcctcagccctgcccttgctgatagagtgccccayagcactcaatgccatctcctttcttcctctctttaaatgactgcagtttattcacccctccacccccaaaacccacacactccacttatctattttaggcctctagaatccttattgctgttcccacattctgatcataaatt

SEQ ID NO: 476387 - DNA, 545 bp, Homo sapiens
tcagctggaaatctgtaattggtgttttttccatatttacagtacaatgacaaataacatccttggcgatatcagaaggtctggtagaaggttaaagcattttctgaacaattaaaatggattatctcatgtttagtagattggtagtgttctgagtgtgtttctgtgtaaaaattttaattccttaaaaagtcaataatatttaaattctaagcatattaaaaaatttgattaaaatatctcatcctctaactctcatatatgtttaatatgtcttagaaagtagaattcgtaagttttaaattctcttaatattgaaactacacataacagaagaaatttttaaaaatgtatctacctatctaaagttagacttcccagagtcttactggaccaataaaaaatacttgcacaatccaaacttagacccacacattyagatttgatttttaaagacagataccttgagtcaagaaaaagaaaatcacctgccatagctataaacacagttctttaggaaaatttttattattttttcctttatg

SEQ ID NO: 476388 - DNA, 520 bp, Homo sapiens
gttcagctccttccatgcttcaggcacaatcaagaagtaaagagagacctaatcctatcaaccagaacaattcttccctcagggtagtcattaagtcaggtgcaaagtgaggtgttttaacttctaacctcaagggctacagttagagcactgaagcagtcacttggaaatctcagctttcaccagctgtatttattatgcttatgttatttgttcttccagtttcccttcccccagagaacgactcccaaaacacaaatatttccccatcccgcttatagagaaattcctttcactaggggacaaaacatttcattctatatacaatgcttagaagccaaacgctcctggaggaagtaaggtttccagtttaaattttcaaaggaggcttctccacaagccatcccagggccttcaaagatcttccyttactctgaaagcccatcctactgtgtaaattgagaataatcctttccttgtgcaggaagggaatgcaaatgaggaaggaaagattcaaggg

SEQ ID NO: 476389 - DNA, 546 bp, Homo sapiens
atgatgcacactcaggttccctctacaagcagacatgcctgtttctgcttcacattacagtaccttctcttatcaactggaagataattattgtgtatatttctaatttttgatctctctgttccattcattctgattctgttcagggtgttcatgatttcccttttttcttggctrtgctgttcactctctgattactttgcctgtgactcttccttaccctggaggcatcagctattgttgttggtaatgtgttcacaatctgggtttgatcacccccgactgctttctgcttagcaagtgacactgcacctaggaaacctaaagggaaggaatgcctgaaagtgggccaatcagtctatccttgtgcctgtcttctcccaaccgtaccctactcctagaattatctcaagatctcctacccctacaaacagggctggggctggaatgttttcctattccactatggagagaaaaaagacaagtgcccattagccattcctggcaatgtaagagagcaaagtgcgcagtgaagattctccccaa

SEQ ID NO: 476390 - DNA, 358 bp, Homo sapiens
catactaaattaacctgtgcctttacctggcatctttatcattcaaccttatcaaccatctttgactcttttctctctcccccacctcctttatttaatcatccactaaatcctgtgtatttaaataacaatmagacttagagcttaatatgctttaggcattatgaaaagtcctatataggtatatgttaactcatttcagcctcacaacaacccaaaaggtggagtctctcatagtatacagatgaggaaattgaagcaaaagaaggtgagtaatttgcctgaagtcacacagcttaaaagcgatggagctaggattggaacccaggcagtctggattcaaagccctacctcctaa

SEQ ID NO: 476391 - DNA, 358 bp, Homo sapiens
catactaaattaacctgtgcctttacctggcatctttatcattcaaccttatcaaccatctttgactcttttctctctcccccacctcctttatttaatcatccactaaatcctgtgtatttaaataacaatcagacttagagcttaatatgctttaggcattatgaaaagtcctatataggtatatgttaactcatttcagcctcacaacaacccaaaaggtggagtctctcatagtatacagatgaggaaattgaagcaaaagarggtgagtaatttgcctgaagtcacacagcttaaaagcgatggagctaggattggaacccaggcagtctggattcaaagccctacctcctaa

SEQ ID NO: 476392 - DNA, 572 bp, Homo sapiens
attttgggaggccaaggggagaggattgcttgagcccaggagtttgrcaccagcctgggcaacatagggagacaccttctctacaaaaaatttaaaaactagctgggtatggtggcacgcatctgtagtccagctacttgggaggcttaggtaggaggatcacttgagtttgggaggtcgaggttgcagtgagccatgatcacaccattgcactccagccagggtgacagagtgagactctgtctcaaaataaataaataaataaaaagagagagagaagaggttctagtgtgaaaataatgcaaacgtggtctgttacggtttgtaggaggcagatcaaggaagaaaagaggccgggcatggtggctcacgcctataatcccagcactttgggaggctgaggtgggtggatcacatgagatcaggagttcaagaccagcctgaccaacatggagaaaccctgtctctactaaaaatacaaaattatccgggcatggtggcacatgcctgtaatcccagctacttgggaggctgaggcaggagaattgcttgaatttgggaggcagaagttg

SEQ ID NO: 476393 - DNA, 479 bp, Homo sapiens
gtcacagaacaccaggcatctgcctaaatccagtgtcactcagaaaggctgaggtcactcctgtccagggccagaatctgtcctaacttcaaaggttctgcatgggtcaagcactagagtcactggcacacttggtgctgcacatacagtgtcacacaaacataaccacacatccactcttttatttttttgagacagggtctcgctctgtcacctagactggaatgcagtggttcaaacacggctcactgcagccttgacctctcaagctcgagatcctcccacctcagcttcccgggtagctgggaccacaggtgtgggccaccacactcagataatttttaattttttgtttgtttgtttttgagacgaagtctcgctcttgtyccccaggctggagtgcgatggcgcgatctcggctcactgcaacctctgcctcctgggttcaagcgattctcctgcctcagccccctgagcag

SEQ ID NO: 476394 - DNA, 463 bp, Homo sapiens
ttaaccatgttggccaggctggtctcgaactcctgacctcaagcaatctgccttgccttagcctcctaaaatgctgggattacaggcatgaggcacccacgccgggcctgatacattttaaaaatatcttgttcatttcttttttgtattttctcctcccaaatccagaatgtcttgtttactgctacctcctgaagcagattaagaacactcacaataatttayaaggtttcaactataataatttttaaacaggctggagtgtagtggtacgatctcgggtgatacattcatattaaaaagtacacaaggaggttgggcgtggtggctcacgtctgtaatcccagcactttgggaggccaaatgggtggctcgcttgagcctaggagttcaagatcagcctaagcaacatgatgaaccccgtctctactaaatatacgagaaaaaaaaaattagccgggtg

SEQ ID NO: 476395 - DNA, 596 bp, Homo sapiens
ccattacaggatgcattatttgataggaggtctgaaagactgaagagcaattactctctacaaccaagggcaaatggcaactgtggagcttggccttttctcatttcttggtttcctgaggtcagagttctctacaatgacaaaacctctttgctctggctcatttgaaaagcaatgtcattttaaaggttagattttgygtgtgtgtgtatgtgtgtgtatgtgtgtgtgtgtctgtgtgtgtaagatagagagaggattttatagtgatttttatgacaatcaattaaaaaaatgctttggaaacatttattgagaggggtcacaaaggtaaatgtcgtgttgaaaggaaacagatagttctggctcttccaaatctgttttaccagaacccaaggcctaggaaagggacaacagtcctcgatgaagtccattactgggccctgagaataatctttccttaccttcctgcatatcattttcctttcctcctctctcccctcccctttccccaagatacagagctggctgggaggccagcttaaccatgtcccaccccctttctctcactttgccccaggacagtcagagctaaa

SEQ ID NO: 476396 - DNA, 640 bp, Homo sapiens
ccatgaatagctactatagccttttcagacatggaggtgagacctgaatttattaacagtcttcagttgtacaaaggacaattgcacagaaggtaagtgttactttcacactgaggctaaggtgagaatgaacacaagttaaccaagcagaagttatttaggtcaggcatttagaagaacgtgctgaacaagattgggcttatcagttaataacttttgcatggattagtaggaactagattgaagctagagttcaatatagttgaagtataggagagggcagaggcaggtgctgagagctgccaaactgggctacttcaaaatttcaaaaacaatggatcttaaatgaaatgaccttagtgggtgaaaatgaattagattcaggaaaggatattaagctgaaatcaaggtttgcagaccagataagtctggattgcttgcttttccagggagtatttaccctaagagtctttaaatagccaaatkgttttacaaatatttgattcagaaaattgtgattttctcatatagctttccacggctacttcttttttttgaagccaggtatacctataaccatgcattaattactggttccttggaacacaactctagattcaaagaataaggccaaaaacca

SEQ ID NO: 476397 - DNA, 477 bp, Homo sapiens
ccaaatctggtcatttttccttcccaacatctcctccccttgcgctttccccctcccgctgaccccamgcctggcttgggcccttacctgtctgtccactgcggactctccctaacttctgtctccagccctcttcaatccactaagttgccttcatagtactctcccatggcagcttaataaaaccagccacaactctcccttatttagcgaagcaaatttcacagtccttgggctaatattcaagattacaagaaatacaatctgatttcaaactactcttgtactcaagaaatacaatctgatttaaaatcactcttcagaaaattacatacgcttttggtcacagcattctctacttcatttaccctttcccacctagaaagtcaaggaattccgaacttccttctaattcctaacttgatttctaacagtaacaacccaaactcctaagaatatgcttctacactaacccaa

SEQ ID NO: 476398 - DNA, 477 bp, Homo sapiens
ccaaatctggtcatttttccttcccaacatctcctccccttgcgctttccccctcccgctgaccccacgcctggcttgggcccttacctgtctgtccactgcggactctccctaacttctgtctccagccctcttcaatccactaagttgccttcatagtactctcccatggcagcttaataaaaccagccacaactctcccttatttagcgaagcaaatttcacagtccttgggctaatattcaagattacaagaaatacaatctgatttcaaactactcttgtactcaagaaatacaatctgatttaaaatcactcttcagaaaattacatacgcttttggtcacagcattckctacttcatttaccctttcccacctagaaagtcaaggaattccgaacttccttctaattcctaacttgatttctaacagtaacaacccaaactcctaagaatatgcttctacactaacccaa

SEQ ID NO: 476399 - DNA, 530 bp, Homo sapiens
caggagggcaagacccatccagatgctgtccaggatgagggtgaacaaaggggtcaacctctgtctcttccaatgaccacaaaccaaagggactcagagtaccaaaaattttactaacataaataggaaacttggggactgagcacaccagagccacttggaggtaagagggccactctgcatacactttctgttagtcaaaccaaattaaacagcaggagctccccarcactccccaccatgacctgtctactcgaaagtcccggagctttgtgaaggagggcggcctttaagaatggtcagaggctctctcaccctctgctgggggaagagtggggcaggcaaacccggcataatccttagagaggtcaggagagatttctttctaaggccagggtctcctgtggccactttaggagtcaggacccggggccaggaagacggcagtgggtttgacttgcatacattaggctcctgctaactggcagtttaaataaattgaagtaggactttagcttttccttagcatt

SEQ ID NO: 476400 - DNA, 546 bp, Homo sapiens
gccttctctcacatacctggggactacactggcaccccttgtactgcctcacacagttcaagcacactcactttttaaaagatatgtttcacttcactaaaaaaggaaatatcaaaaagaaataaaataggaaacagcaaaaccatcttgcaatttgagagggaaataatgtctggtaagttttcaaacgttctgcatgcccctctggcatattcagctttggggggacccggcttggtgactgaggcagtagggatctggagagcacggaggatcctggtaagctgggggacagtgtcagatccaatgtccaaattctttcaggscctcccagtccagtctcaatgccacttctggaagaaagctcccaaagcaccccatctgtagccttcttacggcattgttcacattctgctgtttattcatgtcttctcctatcagacttcgaactccagaaaggcagggcccacatgttaatccttgcatccctcacaaggctgaggattgcaccgtacaccttaaggaataagcgagcacaggtgatag

SEQ ID NO: 476401 - DNA, 636 bp, Homo sapiens
aatgttttacattgaagggaaaagggctggatcgccarataccaatatattccttcctggattagacagttcctcaaagcacacttaactaatacattccaacagacaggcccagatgagttaaatgcgagcatttgctggaacaaagaacaaaaccgtcttgcttgttaaagatcgttggccaatcagggaccttccacttgatatggtaagaaagaattcaagagaaaatgtagtcaacaactctcagttttgaattttatcccagtgcttcagaccataaggagtccctcaggctggagtccaattgcccagaagtaaaaacagactctcagaccaacagctagaaccctttccaggacattgaggtattcacccacaagtgctctaaagctcgacttcaaacagcatgaagctgtgtaaaaacttccagctctacaaccagatgaatggtttttactacttcatgggacaccaaattccacataattaaggtatgtttgggatagaatgtagtttattaggtggtaaaaaggtgactttaaactgcttttccagcagatgtcacagtcctaccaagatatcaagatcaaagcttcacatttaaggaaatcattatttttttctcctcatttt

SEQ ID NO: 476402 - DNA, 584 bp, Homo sapiens
attggatttaaaaacattgtggtctatgcatactaactgctactcagaaataaaataccaaatcactggtatatgcaacaacagggctaaatctcaagaaaaccttgctaaatgggataagctagacacaaaatatctacacactgcatatttatatggttttctggaaatgggaaaatatgggaayagaaatgaggacaatgacagccagagcctgattttgcgatgatgggtgtggagagagggttggttgcaaagtggcacaggaaatatttgagatgataaaaatgttgtatttctcaattcagatggtggttacaccactttcaaatttgtcaaaacacattaaacggtataccaagaaacagttttattgtatgaaaattaacctcagtaagcatgaaaaaaagtaaacagagtgtccttagagagttaaaagttgtatatatgacaaactaatcctaaggaaagtatgaaagtattagggaaatgccataaaagaagttggaccctctccactaacaatctgcttcttatataattagttatataagaagttacaaggtcttataacaagttacaag

SEQ ID NO: 476403 - DNA, 584 bp, Homo sapiens
attggatttaaaaacattgtggtctatgcatactaactgctactcagaaataaaataccaaatcactggtatatgcaacaacagggctaaatctcaagaaaaccttgctaaatgggataagctagacacaaaatatctacacactgcatatttatatggttttctggaaatgggaaaatatgggaacwgaaatgaggacaatgacagccagagcctgattttgcgatgatgggtgtggagagagggttggttgcaaagtggcacaggaaatatttgagatgataaaaatgttgtatttctcaattcagatggtggttacaccactttcaaatttgtcaaaacacattaaacggtataccaagaaacagttttattgtatgaaaattaacctcagtaagcatgaaaaaaagtaaacagagtgtccttagagagttaaaagttgtatatatgacaaactaatcctaaggaaagtatgaaagtattagggaaatgccataaaagaagttggaccctctccactaacaatctgcttcttatataattagttatataagaagttacaaggtcttataacaagttacaag

SEQ ID NO: 476404 - DNA, 538 bp, Homo sapiens
agactgattggtccagtttgtggttttgagccagattacccagaatcactggctggcctatggggtagctagctgtgatcaggatggggcaacatcacgtgaagccaacaacagagaagcaggaaccttagaggtctggrtgactgggtcaggctccttgggtggcctgtcccacacagttttgccttgtgtgctcctgtctttccctgcaggccctggtgaaaataggctctgagaagaggcttagtggctgccattttcatgtcacccgaatgttgctgtttctagtggtactaactcagacactttcaaaagttttgtaggaaacgcaggaaaaaaaaaatcatctcttccttagcaagtcaaaagtagaagaagccatgatcaaaaaaggcaataggtcatgggaatgggtggggcgttggcaagcaaatctatgaggggacaaagagaaaataaagggagtgtctggagaaccagtctgaaactgagaattacgctccagggaggtgtttccatatgatgccctagactcaca

SEQ ID NO: 476405 - DNA, 643 bp, Homo sapiens
tctggaggaagaagctaaggtaattgaaacaggagagtgggcctgttggtgaggctgcaggtgaggttagtgaaactccaggtcctcaagagatttcagttcaagacatgcaggctttaaataataagcctgcagtaactaagcctgagatgacttatactactcatctctagtgaatcaggtgactgagagagggagtggaccttgattgagatttaggaagattatctatcctgaaataatttcttcacttactttctaattcttaaaaatgtacaatttaagataaaatagatcaaatgaaaaggaattggaatcaaatcattaaatgccttaatatggagaacaaatagtttatgaaaacaacgggaaatgactgacaacagctcctttcagattctaatgggaaatgagtggaaggaactggaagggtctaaatgcagaattggcaaaagagggtcaaagctgttgtcaggagtgtttctaagggtgtgtgggaggacgaagaagaaaggckgggaagaagttgacttcgcagaggtgatagctaatgactgtttagtgtcagctttgtttagcctcaactaggaagagagcagtaggaggaatgaatggctgtatagcatcaactttgtttactctc

SEQ ID NO: 476406 - DNA, 577 bp, Homo sapiens
agagtgaccctctgaaaacactgagatcactgattgatgagrtcacatctcttctctgctcaaaatactcccactccaatagctgctaatctgaatcaaaatttgatgaggtttcaccttattagtgagacttttcttgaccaccctacataaaacagtagtctcctgtcccgttagtacttcctatctcccttactctgcttttttttatccatagtacttactaacaattgatatacatttcctttagttatttattgcacatctccttccatcagaatgtaaattccatgagggcagggactttgttttgttcactgctgagattaaaagttcctggcacctaacagtctcttaatattgaatgaatgaatgaatcacagagattacaaagttcatattgtcagaatgaaactgggtttttaatttgtctttgagtctattcctttaaataaattttaacctcccagaggcaatatttcattaactaaaaaaaattttattaaaaaccctgaaacttaaattcatttatcaggattcatggctttaagaataatgaatacttacagtggataac

SEQ ID NO: 476407 - DNA, 538 bp, Homo sapiens
tggaagtggggagggggcagaaaggggaggttttcatgggtgtgtcaaaaaaattgtgtgaaatatttgccaaaggttaactgaaagagactgaataccgcctgctcttcygctgggaccttctcttttcattagtgggaggtgttccattcctttgggaagaacaggctccttgttctcattttgttcacaatagctactcagacatctatttaacgttatttattcttacttattgttaacccatctagggaaggaaagagatgggctgcctggtaaactaaggtaatggaagcgtgagagtaaacacaccccacatacccccttggggaaataaacaggagtaacagtatggggcaaaaaccatttttcctcttgaacaagggatgatgacagtggtaaagatggtgctcaactagaaattttgagacagtaacagcagcagttttcgacctgtgcttatcccagaatgtttcctgtctgtggaaagacaacagcagctcccttggacaatgctttatctgaggcagtggtcccc

SEQ ID NO: 476408 - DNA, 607 bp, Homo sapiens
agcgatgaagaaggtgaaaagtaaaagaattccaggatattctggagataaaaccaacaaagcttggtgatagaattagtataataaactgatcactttctaagtaccacatcatgatcccttttcattttaatataaggttgaatttttattaaacaacctaacattgatgacatttgttcaactttgctgataaccatgttccttattgttattcatataaacaaatgactttcatagtagcattattttggtgtgtcaaagtttgataatttgaaaaatgcatcaacaaaagtctacaaatgcttggtttaaaaaagactttcattttgccatattctgcaaataagatttatcatgctagagttatgrgttgattttgtgatgtctgtgtctcaataaattattcctggctttctacttaggtgcagtatgtgtggtttattacggagagtagagctgagcagaattccagtacatatgttcatgtgggggccatacacatggctagtcagtgtatacaagggtttttttgtacccagtccctaatgtcttggcattacttttattatgtctgcagtgctcatgtagatgaaatgccacaaca

SEQ ID NO: 476409 - DNA, 592 bp, Homo sapiens
gaatgtccttacaaggacagagaagrccaggtatccatcctgagaacatgggagtcttaaaacaccttcggcagagcagagctctgagctagctctatgaaaacaggcagatctcttgtttcaaccttttggctcctaaaaacagcttctacacagctaatgtggaaagaaatgcaaatgtcttagaaaaaaataacatgtctcacatttgtaggtatactacacctttaccctaaagtcataaactttcacatacataatttcagggggtttgtggtttgttttgttttttttgcaacacttctgcaggattcactcttctggacacattaattagtctaagggatgtaactcatgatctaaatcagatcaatgagaattctggtttagaatttttatatctcaactggagcaaaagggaccctttcctttctggtcacaaaggtgcataagatgatgagttcagagctgcagtggctgggttccctgtcaagtgaaattagctgatttcaaagaatgcacaggagctagaaagcctgggtggtgtgtgagtccttgattccagccatttctcaagctaggttccccctta

SEQ ID NO: 476410 - DNA, 629 bp, Homo sapiens
aatgaacactacatttcactagataagaaaatatatatgtgaatatttaatagagtacctagtacatattttgtgcttgttaaaaattagttgaacctgaaattcagtgaaccatgaggaagaatatttttaaaccacttaattgtagaaaagaataaagtatgcatctttagcacataaattctaggagtcggcagtctacgaagatttatctcaaaataaattttttcttgttcttgtggctttggtttaagccacttcatagaacccccaaaacatgccttaaaagatacaatgccagctttattccagagcaggccaacatggtttcaccagtttataaatctttgcattgttgtaaaacagaaacaacatgccagtctgcaaagattctttcacgagtcttaaattcaagttatactcaccccactatagtcatcgaatagagagcctgggttctccatgayagaggttctttctaggggttcagaactcctgatccttgtcacctggagagcccaatgtttcaagtttatctgctccctctgccgcctcgctctgtggtaattaccaggctcccagggctggcctaacagctcatgtgatagaagtacacaggcaaagaaaca

SEQ ID NO: 476411 - DNA, 629 bp, Homo sapiens
aatgaacactacatttcactagataagaaaatatatatgtgaatatttaatagagtacctagtacatattttgtgcttgttaaaaattagttgaacctgaaattcagtgaaccatgaggaagaatatttttaaaccacttaattgtagaaaagaataaagtatgcatctttagcacataaattctaggagtcggcagtctacgaagatttatctcaaaataaattttttcttgttcttgtggctttggtttaagccacttcatagaacccccaaaacatgccttaaaagatacaatgccagctttattccagagcaggccaacatggtttcaccagtttataaatctttgcattgttgtaaaacagaaacaacatgccagtctgcaaagattctttcacgagtcttaaattcaagttatactcaccccactatagtcatcgaatagagagcctgggttctccatgatagaggttctttctaggggttcagaactcctgatccttgtcacctggagagcccaatgtttcaagtttatctgctccctctgccgcctcgctctgtggtaattaccaggctcccagggctggcytaacagctcatgtgatagaagtacacaggcaaagaaaca

SEQ ID NO: 476412 - DNA, 589 bp, Homo sapiens
aggctagcccacaaaaacctatgtaaaccacgatataactgaactgtcattcacaatattactaagtgagagtctctgccctggggggcacatcccataatctgcaaaaggagggcacagaacaagaaatcagggaggtttcagcaagcaagagctcaaggtaacacattcagaccagactaggatttggaccccagccttgccacttaactgagatgttgagctgttacttaacatcccttaagctttgttttttcttccctgtaaaataggcataagagtaaatctgtctcatgggttgatgtgagggttaacttagatattgctttgtaaagcctctgctccataaatagggatcatagttgtcatttgccaccctcctgcttgcaatggcccctccctgggcacccagtgaattcacttcttccgctacgacatctgccaggatgctgctctaaatagtgggatttcagcagcacaacagagtacagcgagtgagagaaatgcaggccttgtgggcaggctattttgggccccactgttggttggtcagcacgtaggcagkccaggcttgcctgggattctgccc

SEQ ID NO: 476413 - DNA, 551 bp, Homo sapiens
ctgcctttccctcaactccatcatctgaggaagacccataggttaacactccagccagtgtggctagaagtgggtttgtccaggtgagcatgaggagaatgagctgcagagcagtagaaagagctccgaatgagccccgcaagcattgggtcatattccattctgtgtcagatggacacagggcagaggcagggccagcctcctggagctgacacacaccagcccagcccctctccttgcctcwcgccactctcctcactgtgtcactttttcaccctatccttagctcctgccgcccagaaacttttctccagatgggaggactggcaatcatctcctctcccttgtgtaatcaaatatctcaccctgaagatatgctcagactccctggcctccactcagccctccctgttcacagcgcggcacagccagccagccagccagcccacagccccaccagtttctaattaaaacccaacaagtgtttctctagacacagaacgagttcttggaggagaaacaacgggttcctctaaggttggcctgcaggt

SEQ ID NO: 476414 - DNA, 545 bp, Homo sapiens
aactagaaatgaaggcgaccaaatacaaggttgcatgggggaagataacgaggcctgagggacatggggagtgtgagggactgtaagataaataactgttgatgcccactctggtgacaggactgcaggtcaaatgaacacacactatttgtccattcctggttctaaactcctcccttaccaaatttgaaattgaaatccgtatgtgcatgttgccaatcttctgtggaaaaaataattcwttataaaactctctacagtgagacagatcctcttaaatatgaaaaggcccacttgtgttgtgggtaacgatgagaaaatcatcttcgtgcgaaatttgcctttctcttcccttacatcatagctgactccgccaagaccactatgatcaagtttttattcctcctccaaccctccactgcaacttttggctgtacaagacgaatacttccatatggtgcaatgtttatgttaagatgggggaaaatgtgagatgctttcagtaaattttattcaagaagtaataaatttatacattctaagca

SEQ ID NO: 476415 - DNA, 648 bp, Homo sapiens
tttcctttcctcaaaggatgtgggaccttaaaacaggtttatatgggaccccagtaaatttcacatgtgaattttaatgctagttaaccaagtcttactctaaagaaagcttatcagtcactgtactttaagagagagaaacaaaaccatcttttctgggtgatgacacatatccatctttgtgcctaagcaaaacggaaataactgaggaaatgactgaacytctagttacgttttcagacttttgaaatacagtggtatgcttaagtttgaaacttgggtgggcatgggggtggaggggaaacgtatctgtgctgtccctttctgcggacagagaataatcttgccaaacatccaaactgctagaagccaaaaaagaaagaagcaaaatggacaagctgattccatttcctgtaagtggttagttccctgctttgttaaatctcttacatgtatcactgctaatgcctctgtccagggtggtatgcaaagtgggcagaacgtttttcccccttgcactcaacatttcagctaaacaactgcaaattcccaggaaactttcgctttgaattcagtgtggatcaagggcaatattcaaatcctttttaaagcacaataccaggagtttgaggctttactttgttccag

SEQ ID NO: 476416 - DNA, 424 bp, Homo sapiens
aatctggatgtcagagggttagaacagatggcctctgggctcattcatccccctgacattctctatccactaaaataggggagctgtgtcataggattttcactttggcacccagtaaggaagctacctgtagggcctgagggtgtgttttcataagaatggcagcatggctsttgttgcttgcaactaaccaaacggctggtaaatatcttgataaggaatgcctaagcaaaacaaggctgggcgaaatgatttgcccaaaataaagcctctgtgtgggatggtcaggttcataggcagtgccagcctttcccagctctcacacctgacttcagcgtcctgattctctcacctcacaataatgcagcagaacaaatgttctttaaaaccctgaaatttctcatggttcctgacaaaacaataa

SEQ ID NO: 476417 - DNA, 623 bp, Homo sapiens
gtggtatctcttacctacctgggaaaaccatgggaggttgataatctgggaaggccgttactgaccttcctctaaaaatgaattgtagagttgtaacactatctacaagagctctgcagaatcacacgttgtgccacgggtcaatccatgtccaaaggaaagtccctgaaagccaggacagagaccagagtcacagcttgactctcatagcccagatatactgcttgctgatggctccactctgttgtttctccaaaccttggatcccaaaccctgtctcatgtctaaagactaggactcctcttttgctccaccttcctatattctggacttttggctgccagtctctggccatactctgcctctgtcccttgcctracatgggccttcatctactgcaggcctatggaatcaaagaaacccaaccttcacaagtctaccagctccttcctgtttacatttttctccaccttcccaatgtgcagcttttaacctgccttagaccctctcttgacctttcttaggctagtttgagtctagaattttttctcatggaactcctgtcccaaggttctgttggaagttggtgagcagccacactggtgactgttttctctgccaaa

SEQ ID NO: 476418 - DNA, 569 bp, Homo sapiens
ttaaaacagagatactcaaacttatcacatcctaattatatttttctgttgtttatgcttttgatgttatttacatgtcttgtgttatgtaggtcgagcatccctaatctgaaaatccaaaatccaaaatgtgccaaggttcaaaactttttggaactgggaagagatgctcctcactatacagcgtttccgtcatatasaactccacattctgtgacatcacatcggtagccagaagtcagctatagtgggagtattatcaccatttacaccatagaaatcagcgtcagggcttgagttactgccgtgttagacttaaagtgacggacacaatattagtaacatagattaaactttgtgtcatgtttatagcccttacattataaataccacaatgcaatagggaaattttttttcagtttgtaaaaaccgttatctgattctgcaaagaagtcactcatatgattgacaaatgagtgaagtttacaacatatatcttagttgtttcattttcatcatacttgttaacaaaaatagcaatgaacatttatgtcagccaggaggttcag

SEQ ID NO: 476419 - DNA, 569 bp, Homo sapiens
ttaaaacagagatactcaaacttatcacatcctaattatatttttctgttgtttatgcttttgatgttatttacatgtcttgtgttatgtaggtcgagcatccctaatctgaaaatccaaaatccaaaatgtgccaaggttcaaaactttttggaactgggaagagatgctcctcactatacagcgtttccgtcatatacaactccacattctgtgacatcacatcggtagccagaagtcagctatagtgggagtattatcaccatttacaccatagaartcagcgtcagggcttgagttactgccgtgttagacttaaagtgacggacacaatattagtaacatagattaaactttgtgtcatgtttatagcccttacattataaataccacaatgcaatagggaaattttttttcagtttgtaaaaaccgttatctgattctgcaaagaagtcactcatatgattgacaaatgagtgaagtttacaacatatatcttagttgtttcattttcatcatacttgttaacaaaaatagcaatgaacatttatgtcagccaggaggttcag

SEQ ID NO: 476420 - DNA, 614 bp, Homo sapiens
cttaaaaagaatacgggctgaatcaccatctagtcatayatttgttttacaaaattactaccctcaggctataatttttcataggtctctgctcctcctcttgcttctcctatctcatggagctaatctaaacatataaccttttacccagaccagattcagccatatgattattattttcttcaaagtaaaagaagtgaccacctgtgtcatggtacacaaggtttacagattacagaaaacacactgctattagtgtctgtttttaaaaaaaaccttcttcctaaatctgtggttctcattatccaagagtctgtttccttaaaactccaggaatgaagctgtgaatgacagcagctcatctcagttgcacataataattaaaatgacggcatttatatttgacaagttaaattcctaagcaaggaactctagtttcatttacaagaggcttctttttttttaagctacccaataaagagcaccataacaagagagaattgcccttggatgtagacggacaagaaaagagcttaaagagaaagtcaggtcctccagaggatatgctgctcacctgaggccaaaacttggtcatttaaccaggaactcgccag

SEQ ID NO: 476421 - DNA, 613 bp, Homo sapiens
accaatttacatgaaataaatactacaaccatggctgatttcaagctccaacgagacatcatttgaaacacacagttgggaaaasggcatagcagagcacactgttatacaatatttccaccctgcagttaaaatagactgaaataaccccaacagcatagataatagtaacatatagtaaaataatttgtaagtaatgaatttttattattattattactacctttgtttttaatgaaatatatttaaatgtaagtttaggccatttcacttttataatggctgtatttaataagtggttcacaacattcctgaaactttaacattggcctttgtgagtccgtatgagtgacccccagcatatatctggccagggataatgcaaatggaaagagataagttgaagggttgaagggaggcaagaggacacgctgcaaacatcaaacagtgcccttggcccgtgtagtgagaggaggctgaagagcaactgcagagacatcctgaagcacagagcaccttgtgagatatgaacatgggagccacccagaggagaaaaggtgttgggatgtgttccctaatgggcgaccccacttgctctactttgaaacattaa

SEQ ID NO: 476422 - DNA, 613 bp, Homo sapiens
accaatttacatgaaataaatactacaaccatggctgatttcaagctccaacgagacatcatttgaaacacacagttgggaaaagggcatagcagagcacactgttatacaatatttccaccctgcagttaaaatagactgaaataaccccaacagcatagataatagtaacatatagtaaaataatttgtaagtaatgaatttttattattattattactacctttgtttttaatgaaatatatttaaatgtaagtttaggccatttcacttttataatggctgtatttaataagtggttcacaacattcctgaaactttaacattggcctttgtgagtccgtatgagtgacccccagcatatatctggccagggataatgcaaatggaaagagataagttgaagggttgaagggaggcaagaggacacgctgcaaacatcaaacagtgcccttggcccgtgtagtgagaggaggctgaagagcaactgcagagacatcctgaagcacagagcaccttgtgagatatgaacatgggagccacccagaggagaaaaggtgttgggatgtgttccctaatgggygaccccacttgctctactttgaaacattaa

SEQ ID NO: 476423 - DNA, 598 bp, Homo sapiens
agcctctcaagtagctggggctatgggtgcccaccaccacacctggctaatttttgtattttttttgtagagatggggttttgccatgttgacccaggatagtcccaaactcctgggctccaataatcctcctgcctcagcctcccaaagtacagggattacaggtgtgagccaccatctccagcctaaagtgtttttatgttttatagatgttttctgtagcattattattaatactacaaactgaaagtaacataaatgtctaataaaagggaatgggtcaaataaatatggctacattcatacaacagaatattgcatattggtttggtgaaatggctcagcaggctggtgtgataatgcaatgaactactctattgccattaagaatcacaattattagggttatctagaaatgtggaaagaactataggaagtaataataacaagacaaagtagaaatcagtaatatacatattaaaattccatatgatataaatcagttctacattaaattcagaaaagattagggcakatatcgatgttccagaaacttgcgtttttctgatgattttgtatgtgttcagatgtttgttaa

SEQ ID NO: 476424 - DNA, 565 bp, Homo sapiens
cctacgaacaaagaggcaacacgttcccctgtggctctcacaagggaaggggagtgcctggattttagggctagattctataccacgaccctgctcccttccccggcctccctcctcgagtcctccgcactctatattcacacacttttatgaagttctcttaaaacatttataaccttttgtgattaacacttgagataccactgatcacatggggtcagaagacattgaggcgagtttaaggaggatggcaggtaagagaagggggcagcaagggatgcctggagtgagatgagactgccgggagtgagccaagtgaagcgggactgggtgaggtcaggggaggcgaggtgcacctgcacaaggggacatggccatcctggagcagcagacacctcagggacgggggcgcagggggaggggggcrgggaggctcagcaaacagctaaaccaagtggaaaaaaacttgcagcctttgcagaaagaaaaatctggaaagatagagtctaaaaatagataagttggccaaacagactaggaatttagagaccagcgttctggtcta

SEQ ID NO: 476425 - DNA, 523 bp, Homo sapiens
ctgattgaactagcaggcagtttagccttagtagctgaccaacaaccatggtgtggcctagcaggaagggccaggctaacctaatcatattctttttctcccaaatttgagttgaaaaatactgaaaagatgaagcagttcatagtgcaaaataaaactgagggaatacaaaaagcaaagctattaaataacttcataaccatgaagaatcacagcaatctmaatttacaaagctactagtatgaataacaagaaactatacaaaaaagaaaagctacacaaagcagaggagaataacaaccctgctaataaccccaggagaagtagacccagagagaaatcagtatgtgaagaatggctgagtgcagttgcagacaagtctgtttcttagttaaaaaactatattcctcagtttcttgcagctaggaatggcagcatgatcaaattctagtaaatgagatataattagtaagtcttacaagtcttccaggagggaagcacactcttcttctgccctttcacc

SEQ ID NO: 476426 - DNA, 487 bp, Homo sapiens
accctcattctgtccctgcggacttttacactggaactgtgccctgcacccacaagagcctggaggtctctgctgtggagatcattccttaattkgttcttcctctcctgaatgtcctaaacatttttcatttagagaaactctcttcatgtaatgaatattatgcaatgagctaaagaactgttcttgtagatgtactcaaaattgctatggctcttccattgaaactgtacatgtattgaataaagcctttccctattctccacctgtggaattgatttcaagctggtaaatcaagattggtatagatgggcctgaagcagacagaaaaggggcagggacccagctcagaggccttttttttttttttttttttttttttttttttgatggtgtcttgctggctgggtcgcccaggcttccgtgtagtggcgcaatcttgctttagtctaaattccagggggcctttaaggagctgtggatacta

SEQ ID NO: 476427 - DNA, 527 bp, Homo sapiens
tgtaaaacttaagaatcatatctctttgagtaaccccttaacagctatctgattatggttcaaatccagatattctaattcattctgcaagcagatacctctcagatgcactctgagtatattcaagtcctccacaggctcactctaaaggaggcaaagttctagctgcactagaaagaaacatttgagtcattccagatgtccagcmttgttaaagtcagaacttcaaaacacttgagttcactggggtccagcatcttgacctttttatgccatatattcacatatccacttccctattttgaaatacaaagcatcactaaattcacaattatcttttctttcccccacttgagacagagtctcactctgtggcccaggcctgagtgcagtgccacaaacacggctcactgtagtctcgacctcctggacttgagcagtcctctcgcctcagcctcctcagcgctggcaccaaggtgcatgccaccatcttgggttaatattctttatgtttcatagagagggag

SEQ ID NO: 476428 - DNA, 636 bp, Homo sapiens
taaagttgttgggcagctcattactactgcctatatgtttcattcggtttttacagtatacttatcaagagaatcatttcttgcacaaacattcatggactttaaaatttttcacaagggtatctcttaatactttgagatcacaagtattctctctgaagtgcttttgcattcatttgcrtggtgttccagttactttggctacataataaaccatcccaaaacttagtggcttgaaaaaacaacagttatctttttagctcacaaatctgccatttaggcaggggctggtggagaagtgtagtctctactccacatggggatgcttgataggactagagggcccacttgcagaattgctcacttgcatggtgggcaagtaggtgttgactctcagttgggagcccagtaggagctgagaagggagggtgcccttgtttctctctagcttaagcctctccctgtggacctctccacaggctggacatccttccccttgtctggatcccaagaatgagcatttcaaggaaaccaggctgagtcacatggctctttcttatccagccccaaaggtcaaataatgaacaaaagggtgagctcgagagatctactgtacaacatagtgactatagttag

SEQ ID NO: 476429 - DNA, 612 bp, Homo sapiens
ctgattttcaactgccaggactgacctctttttgtctgaggggtccttggcaccctggcacactggtactgaagcattttgtccaccactgcagcagactagaaatgctagagaatcattgccctcccagaaacagccctcgaccgactagcagggattgatgtataaatatcccaacttcctcactccttagatgggataatgctgaggccratgtcttacactggcacccagggtaaagtttccattgccccggataactggattgatagtgcaccctttataaccctataatcagcctactagttggttgtgaaatgtggccaaggacagtggctccctcagtccacttcacgacatcccaacatacgaggggaaggaggaaccaacaaatcccaaacatccagaaaaccttctagagaaggacgtatattctgcacaaaacccacaaggcccgacacaatctcagcctccatgtcctctctaacctcacctcctctggctctttacttggatggctccattccagccattctgtcttcttggctgttcccaaaatatgcatggcatagtcctgccccaaggcttttgttcttgctgttgccctgtcta

SEQ ID NO: 476430 - DNA, 545 bp, Homo sapiens
ctgcccgtgtcccgctcgctcctgcgcccggcacacgcgggcgcacagctcggtgaggaagcaaccgaggagcagccgaaggacgcggcgcatggtgtctcccagcccgggctcggccgctcggccgccgctggagcctctgcggccgcctctcgaggcgcggccgaagctgccgaggctgctgccagggagctgcgagccgccagcagggccagcacatgcagggagcggcgcggggcgctcggtggtcggcaggccactgcgctcggctcagcccagcgttcgcctcakcccgcgttcgcctccagcgcgccgcgcgccgaggggccggccggggaggagcgcgcccggccgggcggggggaggatgagcggggtcaagcagcggggtgcaggtccaggccggccactgggtgaggcgggggtggagagcagaggagaatcgggctggcagcgcctagccttggccggcagccccggactggccgcccctagccctctcgcagtatccctctcacactcaccagctcgccaagtgcgctgaag

SEQ ID NO: 476431 - DNA, 619 bp, Homo sapiens
agctgtaattatattcccaaagatttgatttttatcattatttacagctaataagacatttatgatctcttttggttgtctctgttgaagcattgttggcaatgctttcctgacttgaagttctcatgtgtgttgaaatcgaattaggaaaatgagtaagtaaataacttatcctaagagtataatctctcctttgtgacataaattagaaatccattcacatctgtggaataattcccaggtttgcgactacacaatctgatatgcacaagcaaacatgccaatcttttctcagtctaggagaatttggtcactttctacttgaacaaaacaagctatatgtgcttttaaatagatgtatcattttctcaaaattggattataaagagctgatctgagctgcaatcagatggataattaaacagcaaaggtaagaggcttctgactgcccatgtttamagtgttaattgaaaaaataaaaatatgatttttaatcctaaaggtaatttgaccaatgcacatgtacaatgatgtaaggttctctcactttccattttaatctcaggattgtggaggcatttgaacctagctttctcacagagaatggaagaagtttgac

SEQ ID NO: 476432 - DNA, 575 bp, Homo sapiens
gggtgttgatggaaataccgtgcttctttttggacatgatggaatttggggatgtggtctatttgttagatgcagtttctaggaagagattacccaaagaactgaagaacaatgacaaacttatgtgtatgtgagggcaagataaagagtagagagatggtatagttgggtatggagagaatgctgtaactgaactgctcccttcaagatgtcaggtaagattggagagaaaatgcaggatagcatttgtcacaggtagttggaatgtggagggaagactggaaggatgagaaggactgaggtggacctgtgggctgtgttagccggtgaaagttggagggaaagggaaatgggaggcagtagagcatggagttacatatgcaggcactggagtcaggctgttggagttcaaaggctagctcttctgtggatttgttatgtgactttacwcgctctctcttgcctcaagttcctcttctgcaaaatgaggttaataataatacctgcataaacacatgcacagcacacagaacagaagctggaatgtgataagcacttcataagcattaattctt

SEQ ID NO: 476433 - DNA, 635 bp, Homo sapiens
ccacgggggtgggagtgtttgtcttcccaaacattggcatcaatygagctgtgggacaaattcatagttatcattaattgctgtctaagaacacatttgccttgcctcagtggctcccagtgctcttggaatgctgagacccttgccccaggtaagactgatatctactcatacctgcagcaccacactgtaaacatacctcatttactcatgcaattaattaacagacatttattaaatgattactatgcatcggacactaggcttgatacttaaaatacaaagatgtgtctactggtggaaataagatccaagttcaacaggataatcactaatgaagctataattcactcatttactcattcattcattcattcaacatttaccagatgctcatgactatggccagctctgtcttaggcaactgaaggatactgcagagaacaaaagcgagaaagtatttgcctggattgagcatatttctggttcatggaagacagacaataaaccaatacacaaataagcagctaaaataacatcgggtgatgacaagtgctgtgaaaaaataaagtaggataaagggcttacaaagtgacggaggaaaagctatcttaaacagtggtcagggaaggctt

SEQ ID NO: 476434 - DNA, 635 bp, Homo sapiens
ccacgggggtgggagtgtttgtcttcccaaacattggcatcaattgagctgtgggacaaattcatagttawcattaattgctgtctaagaacacatttgccttgcctcagtggctcccagtgctcttggaatgctgagacccttgccccaggtaagactgatatctactcatacctgcagcaccacactgtaaacatacctcatttactcatgcaattaattaacagacatttattaaatgattactatgcatcggacactaggcttgatacttaaaatacaaagatgtgtctactggtggaaataagatccaagttcaacaggataatcactaatgaagctataattcactcatttactcattcattcattcattcaacatttaccagatgctcatgactatggccagctctgtcttaggcaactgaaggatactgcagagaacaaaagcgagaaagtatttgcctggattgagcatatttctggttcatggaagacagacaataaaccaatacacaaataagcagctaaaataacatcgggtgatgacaagtgctgtgaaaaaataaagtaggataaagggcttacaaagtgacggaggaaaagctatcttaaacagtggtcagggaaggctt

SEQ ID NO: 476435 - DNA, 666 bp, Homo sapiens
tttgaccatgttggctagactggtctcggactcctgacctcaagcaatccacctgcctcagcctctcaaagtgctaagattacaggtatgagccactatgcctggtccccatctgctttttgaacaacagatcctaaatctgcattttgcattgggcattgtgaaatatgtgaacatgactgacctcaaatgaccactgtgatgattcaataataaggtacatgaaggtcccaggcacacataggatatcaagaaatcctctcctgcctctcccagacttcattccaccccactgcccctctctccctcttcaygtctgcagtctttttgctcccatcaattatctccactgtcaaagaaatccacaaccttttattagcctgttttcatgctgctgataaagacatactcaagactgggaggaaaaagaggtttaattggactcacagttccacatggctggggaggcctcagaatcatggggggaggcgaaaggcacttcttacatggtgacagcaagagcaaatgaggaagaagcaaaagcagaaacccctgataaacccatcagatcttgtgagactcactcaccaccacgagaacagcatgaaaaagaccgcccccatgattcaattaccttcccctgggtccctcctataacacgtggga

SEQ ID NO: 476436 - DNA, 666 bp, Homo sapiens
tttgaccatgttggctagactggtctcggactcctgacctcaagcaatccacctgcctcagcctctcaaagtgctaagattacaggtatgagccactatgcctggtccccatctgctttttgaacaacagatcctaaatctgcattttgcattgggcattgtgaaatatgtgaacatgactgacctcaaatgaccactgtgatgattcaataataaggtacatgaaggtcccaggcacacataggatatcaagaaatcctctcctgcctctcccagacttcattccaccccactgcccctctctccctcttcacgtctgcartctttttgctcccatcaattatctccactgtcaaagaaatccacaaccttttattagcctgttttcatgctgctgataaagacatactcaagactgggaggaaaaagaggtttaattggactcacagttccacatggctggggaggcctcagaatcatggggggaggcgaaaggcacttcttacatggtgacagcaagagcaaatgaggaagaagcaaaagcagaaacccctgataaacccatcagatcttgtgagactcactcaccaccacgagaacagcatgaaaaagaccgcccccatgattcaattaccttcccctgggtccctcctataacacgtggga

SEQ ID NO: 476437 - DNA, 532 bp, Homo sapiens
gtcttataatatacagtgttttgaagtactttccaaaccatcaaactgaatagtttgtgtagtttgtgtgcttggtgtatactgcggcattctatatgccacaatgatacttctgttttggtgacattataactcacagtcagatgttgattaacttgaacacttcattccctgatcctgagagtgaagagagagctcactgcatctctcaggtggattatccataactgatatttctgcaggagaagagtacctagtttgtttgccgatagaagtggcatgtatatcaaggttcccagacatttcaagtttcactcttttgcattcaaygtatttttgttcccagaattatccctgttgtcggaccatctcagttaaggcagctctttaattttggagacctctctgagaaaatggagggggtcaagcttatgttttcctggcttcctgtgattctatgtgtgatattatgtgcatgagtgtgtgaatgtgtgttgttgcatacatgtgtgaactcactcctctgttcctc

SEQ ID NO: 476438 - DNA, 532 bp, Homo sapiens
gtcttataatatacagtgttttgaagtactttccaaaccatcaaactgaatagtttgtgtagtttgtgtgcttggtgtatactgcggcattctatatgccacaatgatacttctgttttggtgacattataactcacagtcagatgttgattaacttgaacacttcattccctgatcctgagagtgaagagagagctcactgcatctctcaggtggattatccataactgatatttctgcaggagaagagtacctagtttgtttgccgatagaagtggcatgtatatcaaggttcccagacatttcaagtttcactcttttgcattcaatgtatttttgttcccagaattatccctgttgtcggaycatctcagttaaggcagctctttaattttggagacctctctgagaaaatggagggggtcaagcttatgttttcctggcttcctgtgattctatgtgtgatattatgtgcatgagtgtgtgaatgtgtgttgttgcatacatgtgtgaactcactcctctgttcctc

SEQ ID NO: 476439 - DNA, 610 bp, Homo sapiens
tcaggagtatggctactgggctgggaactctggggaggggcactggccatctggtgttggtatctctgagggacacaatgagggtggttttgggagtgtaaactgcaacctattgctactgtagtaccacctgtttctgccagggtgaagtatcattgctgggtgatgctgagagcaataggaattatacaggaagtagcaagttcttttctccctctttcttccctctagtctcctctgagtgctcctattgacagaatataacagggtgtttgatattccttttgtataggatcttggtttgaatcatctcaggccaacgtatctccatgggttccatattttgtcttcaggattccacatttttattagccattggaggggaatgcagttagttcccaaatgtagccctctccattctgctgccattatctgctttagttttctcaggagcaagttatgcaacaaaagactgtggytcccaatggcagggaatacatgagaaattttacaggcttttttttattctttcttaagtctctctaggcttggggtgaagcacagataccacctatactcctcttgcaatggctcgaaattataggacagc

SEQ ID NO: 476440 - DNA, 636 bp, Homo sapiens
tgccagctgctttagtcttgcaatttaaagttacattagtaatgaaaactaatgaacacaaaatttctatttttataaaagttccacacaactgacatagtttttgagaaaaataactttaaatagtttggcaactactgattaaatatttgaatctggttttttgcacgtagagcacattctattcattacattaaccacacagtaaatagatgaataccacagtcatttactttgcttagtataactaaaaagttaagtattaaatgtgcaataaatgtgtagaaatgaaagtaatgaggaacattattggaatgttgtgcaaaaccccacaacattcttgtatcttattattatgtctttcttgaaatttaactgaataatcctaatkttatttcttatataattatataaaatagttttcaaatataattttgattcactcctgcatttcctcaattgttcactaatgcttaattactaagccaaaacttatgttagttgtcttgttgatcagaacattaaaaaaatcatattgagagaaactttaattggctgtcagtgacttcaggtcttttttcttcaaatattattctaggtattattgcaaatttcaaagtagatagataaataata

SEQ ID NO: 476441 - DNA, 600 bp, Homo sapiens
ctagtaggctgaggcaggagaattgcttgaacccaggaggcggaggttgcagtgagcagagatcgcaccactgcactccagcctgggcaacaagagcaaaactctgtcccataaaaaaaaaaaaaaaaaaaaaaaaaaaaaaaaaaaggccaggcacagtggctcatgcctgtaatcccagcactttgggaggccgagggggacaaatcacctgaggtcaaaggttcaagaccagcctgaccaacatggagaaatcccgtttctataaaaatacaaaattagccaggcatggttgcgcatgcctgtaatcccagctacttgggaggctgaggcaggagaatcacttgaacccgrgaggggagaggatgttgtgagctgagatcgcaccattgcactccatcctgggcaacaagagtgaaactctgtctcaaaaaacaagagagataaagctacatgtgatgtgaataatctcaactcaacattaaccattactcaaaaaaagtatgcattatgttaatccaaataataataatgactataattatactatgtctcagaccaaaaacaactcaaattcccaaaggtgacctcttaaacctt

SEQ ID NO: 476442 - DNA, 625 bp, Homo sapiens
tttcattgacacaataattgcacatattaatggagttcagtgtaatatttcaatacatgtatacaatgtgtaatgatcaaatcaggcaaattaccatattcatcatcttaaacacctgtcattcatttgtgttgggaacattcaaaatctgctcttctaggtatttaaaaatatacagtaaattattattaattatattcactacagaacactagcgctacagcgctatagaacactagaacttattccttctatatagctataattgctttctgttaaccaacctctggctatgtgccccacgccccttccctagtaaccacaattctactctctacttctcygaaatcaacttttttagctcccacatatgagtgagaacatgcggtacttgtctttctgtgcctggcttatttcacttaacataatgtcccccaagcacatccatgttgccagatacatttttataaactgatttgtgttgcctagcttcaggctgcgaacctctcaagtaagtagtcatagaagccatctcctttcattttttaacttatttgtgtcaggcaagatggaaaaaagaggaaaaatcaggcttcttgatcagatgttataaaaacagtgtacc

SEQ ID NO: 476443 - DNA, 515 bp, Homo sapiens
ttaaggaaaatatcaaaattggaaataagttttatattatttgaagrcaaagcaactctttatgtcattgctttgattttttttgtcaaaatattttatttttattttaggttacaccacaaaaagggttaaatgtatatatttacatttatgaaatggagcatggattaaaacagattgaaaagtattagtttaaaaggtgtattcattttctatcgtcatagctaattaccacaaatgttaattaatgttaacaaatgttaattaatcagttaaatatttcaaagaacacacacttatagtttctgtgagtcagaaatctgggcacaatttagttgggtcttctggtcaaatactaaccaaaacctcaatgagatctcataaggctgcatacaatgtattggtttgatttgaagacttggctagggaagaatctacttccaagctcattccggttgttgggataattactttctttgtggttgtgtgactgagaagtccttgcttcttattgg

SEQ ID NO: 476444 - DNA, 663 bp, Homo sapiens
tttttgcaaaaccaaaggttattgattaacccagagcaagtaggaggtcactatttgatttgttatatttttcagcctaaaatgacttaaaaacagctcaataggaatgctcacatcartgatattttactactttctatgctctttttgaagtgtgaatagagtttcacaaattaaagggaaaaacgttttcttttaaaaaaattgtaggttattttcagagaatttgctctatggagaggcataataaaaaatcttcctccgggaagactgtattatagtgtcactaaattcagttctattcaacctctatcagcaatttggaagatgtagaggatgactttttactgtctgaaattacacaaagcttagagggatatttaatgtaataagctacttcaagatgaaaaattatcttgacattagaatcaataatacaaaatttgtcagcaataaatatgaaaatttacatttaggatttaataatcaattatgcaagaacggaataaaggaggctgggttcctttgaattcatatgagaaaaatgcctcagagtttactttatcataagtgcactaggaattggccacatggtttggctatttaaaaatctaacataattttggactatattaataaaatgtaatttgtatatttaatcat

SEQ ID NO: 476445 - DNA, 663 bp, Homo sapiens
tttttgcaaaaccaaaggttattgattaacccagagcaagtaggaggtcactatttgatttgttatatttttcagcctaaaatgacttaaaaacagctcaataggaatgctcacatcagtgatattttactactttctatgctctttttgaagtgtgaatagagtttcacaaattaaagggaaaaacgttttcttttaaaaaaattgtasgttattttcagagaatttgctctatggagaggcataataaaaaatcttcctccgggaagactgtattatagtgtcactaaattcagttctattcaacctctatcagcaatttggaagatgtagaggatgactttttactgtctgaaattacacaaagcttagagggatatttaatgtaataagctacttcaagatgaaaaattatcttgacattagaatcaataatacaaaatttgtcagcaataaatatgaaaatttacatttaggatttaataatcaattatgcaagaacggaataaaggaggctgggttcctttgaattcatatgagaaaaatgcctcagagtttactttatcataagtgcactaggaattggccacatggtttggctatttaaaaatctaacataattttggactatattaataaaatgtaatttgtatatttaatcat

SEQ ID NO: 476446 - DNA, 488 bp, Homo sapiens
gctggcatactcagtaaagtatatggtgaaagtcacaggagagcttcaaagtattagaaaagaggtaatttgcattccaacagatttttgttttatttaataattgaagcttctggatcaatggggaaaaacgaatcaggcatgatgtttaaaactctggttatttttgagaatcttttgatagggagtcaaaatgatgttcttcaactcatttccaaagaaaaaagtgttcaacaatcttaacgacctaaaaggtgtgtagagacttatattgttaaagatagtcacgttttccatagttttgtaaaactgtactttcyaaatgcaattgtactttctaaatatactttctaggtatagtagatattaccttaatattctcccgcctgtgaaatgtcatttagctgactgggtgttgaagggtgtctccaggctcagagcaaggatagcctttcacatcctgtctcctctcaaacactgtgtcttaa

SEQ ID NO: 476447 - DNA, 479 bp, Homo sapiens
ctcaaaagtgtctaaaaataattaaataatytcagccaaggcaaacataatcattcgaggaaattgagagcttgaacctctgtgtggtcaaatgggcattgtgacacccaactggcctcttagcaaaggtttagctttaacggctgttagaaggagagaataacctgtgtcattacactagattctgtttctagtgcacacaatggagattagctgtttatttcttcccctgacttttgaaaatcatagtttccacttgtaatataaaactttatcttagcttgactttgtggggtgactgcatgataagatacatataaatcctcacttgtaaaacatttcaaagtgcccaaatgaaacatttgcttctttttttacattacattcaaaactaggctgtagaaaaacagacactttagtgatgactctacccaaatactgaagtcaaataaggagctgcagaacagtcttttccttgt

SEQ ID NO: 476448 - DNA, 664 bp, Homo sapiens
tgtctcaaaagtgtctaaaaataattaaataatttcagccaaggcaaacataatcattcgaggaaattgagagcttgaacctctgtgtggtcaaatgggcattgtgacacccaactggcctcttagcaaaggtttagctttaacggctgttagaaggagagaataacctgtgtcattacactagattctgtttctagtgcacacaatggagattagctgtttatttcttcccctgacttttgaaaatcatagtttccacttgtaatataaaactttatcttagcttgactttgtggggtgactgcatgataagatacatataaatcctcacttgtaaaacatttcaaagtgcccaaatgaaacatttgcttctttttttacattacattcaaaactaggctgtagaaaaacagacactttagtgatgactctacccaaatactgaagtcaartaaggagctgcagaacagtcttttccttgttggttacaaatagtttctttcctaatgacaaagatatttcaaatactcagggtttttgtttttccttcctcctttttaaacttattttctgtctttcttattcgttattagtgttgtcctataaaggatgacctgtgacatctcttaaattctgagcaagtttcttttaatactgtagccat

SEQ ID NO: 476449 - DNA, 278 bp, Homo sapiens
tcaagggagaccaaccctgaaataacacagatgaatttagcaggcaggtactttaaagcagctactataactgtactcaaagacttaatggaaaagatgttcccaaaaggagaagcaaccaactttagtagtcctatatgtactaaacatttatagactggaaaatgaagatgttcaaagtatacaagaattataggaaacttcacaattcctatttataatcctatttgacctgtttttacttgtaytgaaaaatttcattcaaatcaaggcaagac

SEQ ID NO: 476450 - DNA, 696 bp, Homo sapiens
ctgccagcacagctaggatataaagtgggcagaaaaatgtgaaagcagagaccgacctagcttcccagcctacrtctttctccaatgctgggtgctttctgccctcaaatattggactccaagttcttcagttttggaactcggactggctctccttgctcctcagcctgcagatggcctgtcgtgggatcctgtgatcatgtgagttaataattaataaactcccctttatatatatatatatataactattccattagttctgtccctctagagagccctgactaataaatacacatatttaatgaagaaccagaatttacaactcaataagaaatcaggcaatcaattaaaaattggcagatttgagcagtcacttcacaaaaatagacatacgaatggcaaataagcacatgaaaagatactcagtatgactgatcgtcagggaaatgcaaattaaaaccacagtgagatacagctatatgcccactaaaatggcaaaaatgaagaagactgcaaatactatgtattggtaagaatatagagcaactaaaactctgacacattgctggtgggtacattttattatatgtagagtagaataaaagtaaacttaaaaatgtaagagttaaaccaatgaagtttcaaaacaatggctatgatttacaaggcagggataaaaaggtccaaagatta

SEQ ID NO: 476451 - DNA, 555 bp, Homo sapiens
ggtccaaagattacaaaggagtaatgggataatygctaatatttatggaggcactatgctaaatccttgctatatagtctggcccaatcttaacaaagagcctagaaggtaagtatacttatcatctccgttttagagctgagcaaactgaagcttacagagattaagtggcgaagctggggcaggctgactgcagtacctaagctcataagcattaagcgaaagcactttacggggcatctttaaggctggtcataaaattgggtgaatacaatgctcaggaatagatggtaaatttcctctgagcctagttccagtttaatacacagcactataggtagtaagatctttatggaataaattgatttgaaaaggcttgggctctgttccagctccacagtacaccagcctcataaccatgtgcaaatcccttacccttggtttctcaactgtgaaatggagatctaatccctgccttttctacctcaaatgtctactgtgaggatgaaataaacataacatttaaaagtgctttgtaagctatacagccttaaa

SEQ ID NO: 476452 - DNA, 630 bp, Homo sapiens
gcaaacttgaaatagcccccaaaggcctctgggagtgagcagtggttcactttgggaagatccaaccttgaagattacagaagacgtgaggcaactggttctttttctagacaacagcacacacctaagagagcaggacatctgaaggctatagaagccagtccacaataatgtcaaaacccagaatcccaggagacctaggacagaaggaactgaaaaagtgatgaaaaatggcaaccaactggccaaaacagaggagccagagcgaagcctagaaatgttgatgattcgggaaaatatagacttcccaagagtgaagacaggggacttatgggaacccggaagactaccaaggacaagtagccccagcccaaaragaagagcaaactggagacgctcagtgttagctgccctgccctgaacacttcaggatggctgaacgcctacacatggtgctgaaggaatgaaggaagggccctcattctagctagattcttttggcttttaggaacagagatctctgcatatcagctccttagtcttccctcaattgactttatctgcctcaccacagtgactgcttcctcacagctttgcttatttatagtccatcatggactcttcagccct

SEQ ID NO: 476453 - DNA, 630 bp, Homo sapiens
gcaaacttgaaatagcccccaaaggcctctgggagtgagcagtggttcactttgggaagatccaaccttgaagattacagaagacgtgaggcaactggttctttttctagacaacagcacacacctaagagagcaggacatctgaaggctatagaagccagtccacaataatgtcaaaacccagaatcccaggagacctaggacagaaggaactgaaaaagtgatgaaaaatggcaaccaactggccaaaacagaggagccagagcgaagcctagaaatgttgatgattcgggaaaatatagacttcccaagagtgaagacaggggacttatgggaacccggaagactaccaaggacaagtagccccagcccaaagagaagagcaaactggagacgctcagtgttagctgccctgccctgaacacttcaggatggctgaacgcctacacatggtgctraaggaatgaaggaagggccctcattctagctagattcttttggcttttaggaacagagatctctgcatatcagctccttagtcttccctcaattgactttatctgcctcaccacagtgactgcttcctcacagctttgcttatttatagtccatcatggactcttcagccct

SEQ ID NO: 476454 - DNA, 629 bp, Homo sapiens
atctagaaccaaagcacaggtcttagctttccatgaaaaactgacaattgaatttatatgtatatgtatttatatgaatttatatgtttacatattaacttcaggtatatgtacaattaaaatgttttaggtagtagtttttttatttgtttttttttgtttttttttttttgagatggagtctcattctgtcgcccaggctggagtgcaatggcatgatctcggctcactgcaacctctgcctcttgggttcacgccattctcctgcctcagcctcctgagtagctgggactacaggtgcccaccaccacgcccggctaattttttgtatttttagtagagatggggtttcactgtgttagccaggatggtctggtagtagtcttttttattattattctctttagtagctgccagccatcagtgcagtcagattaagcaggacttctgctgcaattttaatccttcctgcccctccccactcagtaacttgcttaagcaccaaatgtataataggcactaacaaacccctattccttgacaaccccaaaggaggtaagcagccgaacaacaacaaacaccctgygcccaaataagcttcatggcccaatattcctccactgagccaa

SEQ ID NO: 476455 - DNA, 531 bp, Homo sapiens
aacatcatccccctgctgtaaataacattagtgatttctgagagttcaaactctttagtggagcacttaaggcccttcccaacttaggctttagctacctttgcagtgtttatctgcatcccctcactcattttgtgctgaaaccagatcaaaagaactgcacatctctcaacatgtgcagcaccttcatgctttccattttttttcaaattatagttcattcaaaaagcaatacttaaagctttctatgtgccattctgaggattcaaatcaacatatttcctgccttcaataaatagacttacaaccaccattgcagataaaccgcccactaagcaaataatagaacctgatctataaagtaatagatatgcaaagtgccgaaatagaccaaagtcggagatgattaactttctttaggagtcattcatgaaaggcctcacygaggatgtaatgctagagcagagctttgaaggatgaagagaagttcaccaagtgaacgtggaggaaaagcagtccaggcagaaggaa

SEQ ID NO: 476456 - DNA, 632 bp, Homo sapiens
ttgccatatgagataacatttatccattctggagattcacaggttctggggattaagacagggactcatcttttccaggggctgccattcaactcactagacctgaatttaagttcttgttcttgactgcctttccatgattgggcaagttactgcatctctccaaaactagggtttctgctctgtaaaatgagaataataacgcctaatttacagggttataataagaaataaaagtggtaaatatatgtatttatatatatgtaaagttacctaacccagttcttagcataattagttgctgtagttccaggcattcaatagatagaacagattttaaactactttaaagactagtgtraggctggcctatacttagttaagaatttgttaaagtttgatgatttggttgaaaaaatattctggagtgtgatggttaatccctctggagaaccctgactaatatactgagtaactacaaaatgattttatatttagttcaccattatacatagaatagccacaaaatggttttatattcagataaccattatttgttggccatgcctcatttaataatatttcctctgtctgctttccactgcttcataaccactagcacattttgaaac

SEQ ID NO: 476457 - DNA, 433 bp, Homo sapiens
ctggattattattaatgtgttggggagaggagctgcaagagaaggctggacaaggtgggggacggggccacccagcctctggttcctagcaggagccaggaccttcctctcccggcaaacacacacataatctccacccccacactttccttccactcactcccactcactacttgaaatgcgcatgtataatgtcccatggkgagcccctggggttcagaagctggcccgactcctgagggacagaggagggggctgggactcctggtcctgggggggaggagggagctgggaacccaggttcctgagtctgaagaaggaggcgccgggagggccggactcctgggtccccgccttggcggcacctggcacgaagtttccctggagattatccttgtagctccaccagtcctcggggtcaggtgctggtccg

SEQ ID NO: 476458 - DNA, 607 bp, Homo sapiens
cattttagtagatgtggtaggtaaataaccatgaggaagagaggcagagaactacttctccattttaaaaagactttgatgaggaagcagtgaggggataaaaaccaaaatgacctgttttcatgaagaccacttcatcagaagactaattcttcctcaatctacaactgtcatgatcctaaaaattactgtagcaatttggcgtaaagcctaattgtcatccctcgtggtgtctcaaaatgaacataaatgaatgaaaaatctttaaaaaatataacayaaaacaaaactaatagaaatgactcctaaagggagggaacaggataacggaagaaggaatgaaatgagtttatcttattattatctatcttattatatagttatatatatataacatatatatatatagtcagagatatattataagatggtggagacagaagtaagccatgatcacatcactgcactgcagcctcggcaacagagggagaccctgtttctaaataagtaaataaatacaattttattttacatataaaacatttatgtaatttatatggccaaactatataatatatatattatggctggagctgaacagttaggg

SEQ ID NO: 476459 - DNA, 557 bp, Homo sapiens
gcagagggctgactgtaattggttagagaaagggctgccccagtctctgctttctctaccaaggcactgaccttgggctgagctggtccagcagatgtcagagcccaacctctccccagatagacctggctgctggcctctgcccaagcctgcctgccagctcttcctagacagaaagcagcactttccctcccacaggagcagagcagaagccctctccaccycctccaagccccttaccacctcttgccctgtttccaaggggctccctaaagaccagcctcccatgtcttcctggccagacgcccagctctcagcagcagcctcaaagtttatctcctcatattgtgtctctcctgtttatcttctcctgggcatgaatacaaaatcctttctctccaccacttgctacctcagtcttattccatcatctggctgctacatccttctcagttactgttttctgaagacttaaaatctttgtcctcccgcctggtcactcctgcagtgtgagtctgtgaaaagagcacagggctttgaagccaactggagctggg

SEQ ID NO: 476460 - DNA, 456 bp, Homo sapiens
ctgtttatcacagtcactgggggagctctaaaatgatacagattcctgccttccattctgctagcctcactcctctagattaagtctaaggtggggatagagatgggtagaattttttttcttttgagacacagtctcactctgtcgcccaggctggagtgcagtggcgtgatcttggctcactgcaccctctgccacccaggttctagcgattcttctgcctcagcctcccgagtagctgggattacaggcatgcaccaccatacccggctaatttttatatttgtagtacagacagggtttcaccatgttggccaggctggtcttgatctcctgacctcatgatccacccaccttggcctcccaaagtactgggattacaggtatgagccactgcgsccagccacgatgggtagactttaaaagcttcgttgggattccacctttggaaaggca

SEQ ID NO: 476461 - DNA, 624 bp, Homo sapiens
tgcgccgggctcagcaccccacagtggtgagagttgttacggtgatttagtgtggccgtcggttactcaggtagacttggtttgttgtccttgactgctgcaccgtcctccatagcatgcatttaagatccacattttatatttgattccctaaataatgagacagcttcttgtaatcacaaacgtgatccaaacatgatcacgatgaaccatccgtttctagggtttgtgtgagaactttcctatgcttgggaatggagtcactggcccgtaaatctgtgcttaatttttttttttttttttttgagtccaagtctcgctctcagtctcgctttgcccaggctgcagtgcaatggcacggtctcagctcactgcaacctccgtctcctgggttcaagcaattctcctgccccagtctcctgagtagctgggatgacaggtgtctgccaccacgcccggctaattttttgtatttttagtagagacagggtttcaccatgtgggccagactggtcatgaactcctgacctcatgatgckcctgcctcagcctcccaaagtgctgggattgcaggtgtgagccaccgcgcccggcctacttcgcttaattaaatgctgcagactt

SEQ ID NO: 476462 - DNA, 568 bp, Homo sapiens
gtagcattccattcacccagatttggccccgtgacatcagccttgttctcctgtgcatgaatcattaaaacaggcagacactgagacttgctgaggtgtgggagtggagaagggagtctgggagagagaaacctttcccagcatttccgctctggtgcccggctctgcttgagctatctttctccaagcctagctgactgggcagggaggatgaagtattatctctgcaaagcatagcaatgactcagcatttaatacctgcacctttgacacatyatggcttaacacgacttatgagccgtctattgtctctaaatccacagtggaactttggtatcatgaaagaagctttggcagtgcagtggcagactcttttagcaaagggctgcatctctaaataactcgagcaccgtctttggaatcaaggtgtgatgaaaagtgctttggagtcacaagcacctgcggttgggtcctagctgtgtgcttaggagcaaggtgacttgatgtaagttagtctgcctcctcctgctcccgactttctcctatgagtgagagctgaaaatgagat

SEQ ID NO: 476463 - DNA, 587 bp, Homo sapiens
ctggtgaagctttggaaccattgtggttaggaggacaagaatatgcttcagaaccatgtaagacttgagttcagatcctaactctgctatttattagctataaaaagttggacaatgccctctctgaatgtcctcgactcattggtaaagtgaaactaattaaaactacaaaatagggttgtttcgaggatttcatrtgataacatatgtaaagcccatagcagatcctggatgcagcaaatatttgttgcatccgtgaatgaaggagagaactgaaacctcatcaagaatgaaaatgggtccctctggaggaatatagtgctgacctaaggacttggctctagcaatttaatctctcacaaaatggaaaagcgaagagctttggttctgaggtcagagtgggtttgaattctgcctcccccttttctttactagttgtgtaatattgggcacgttgcttgacttcttaatctcaatttcctcatctttaaatgggtgtagtaataatagtggctattccgtggcatcgtaatagagattaagttgagataatgaatgtaacataataagcactctaatattagcca

SEQ ID NO: 476464 - DNA, 587 bp, Homo sapiens
ctggtgaagctttggaaccattgtggttaggaggacaagaatatgcttcagaaccatgtaagacttgagttcagatcctaactctgctatttattagctataaaaagttggacaatgccctctctgaatgtcctcgactcattggtaaagtgaaactaattaaaactacaaaatagggttgtttcgaggatttcatatgataacatatgtaaagcccatagcagatcctggatgcagcaaatatttgttgcatccgtgaatgaaggagagaactgaaacctcatcaagaatgaaaatgggtccctctggaggaatatagtgctgacctaaggacttggctctagcaatttaatctctcacaaaatggaaaagygaagagctttggttctgaggtcagagtgggtttgaattctgcctcccccttttctttactagttgtgtaatattgggcacgttgcttgacttcttaatctcaatttcctcatctttaaatgggtgtagtaataatagtggctattccgtggcatcgtaatagagattaagttgagataatgaatgtaacataataagcactctaatattagcca

SEQ ID NO: 476465 - DNA, 649 bp, Homo sapiens
ttttgggcttattggggtccccagtactctagggagatcaatggcagcttttgggaaactgaagactccaaatgttttccagaaatacacacattccagtttcagaggtgcagcctcaccatgatctggagttmagcaatctcattctctgcgcgtggatccctccgcccatccctgtccccagcctttctccctctggttctgaccccaacacggggtcagagaaactttctaacaaatacgcctgccctctttctgcctagaacctgctatggctccctatggcccaaggcagtggttcttagactgtcttaccaaaatactctgaagggctgaagggctcagacctagtccctcatttctgggctttggggagcttggctagaagagactcgcccctacaggatcactttctttgaaggctcgggttaaatctttaaaatttttgcatataggccatgttcattttaataaaaatgtcccctactttccctaaattttcagtcctctgtttatcccaagagtcctatcctcccatcactcctagtttgagaagctcaggcctatggattacaaaccacagaccccatcacctctctttgtcaccccccaccacaccggtctagagttggctcaagaagacttttct

SEQ ID NO: 476466 - DNA, 649 bp, Homo sapiens
ttttgggcttattggggtccccagtactctagggagatcaatggcagcttttgggaaactgaagactccaaatgttttccagaaatacacacattccagtttcagaggtgcagcctcaccatgatctggagttaagcaatctcattctctgcgcgtggatccctccgcccatccctgtccccagcctttctccctctggttctgaccccaacacggggtcagagaaactttctaacaaatacgcctgccctctttctgcctagaacctgctatggctccctatggcccaaggcagtggttcttagactgtcttaccaaaatactctgaagggctgaagggctcagacctagtccctcatttctgggctttggggagcttggctagaagagactcgcccctacaggatcactttctttgaaggctcgggttaaatctttaaaatttttgcatataggccatgttcattttaataaaaatgtcccctactttccctaaattttcagtcctctgtttatcccaagagtcctatcctcccatcactcctagtttgagaagctcaggcctatggattasaaaccacagaccccatcacctctctttgtcaccccccaccacaccggtctagagttggctcaagaagacttttct

SEQ ID NO: 476467 - DNA, 497 bp, Homo sapiens
cacaggttggtggcgcccagctcagacacaacttgggaaatgggctgacagtgacgtgccttttttcttttttctttcaggaattgactttaaaattaggaccatagagctcgatggcaagagaattaaactgcagatatggtaagagtcattgttctctgtcattctctccacctggcaatggcttcaagccagaagcccttggccttctccctccaccgtccctgtgaccttggcctccatttcttggtgcccagtcctggcacatggggctttctccrgaagctcctggaggtttatacccagcccagagagctgtcctctgctggctgcagggcaccagggcctacagcatcataggcacaaagctgcccagccctggctagctcagtgttccacagtgggcaccatctgggtctggccttcagagtgggctgcttctgttgaacgggaagagagccctctcagtgccaggtgctggtgacgcctgcagggac

SEQ ID NO: 476468 - DNA, 657 bp, Homo sapiens
ttgaagtgtcctatttctcttttcataaccaacccgcagccttgtatatcatatcccatcttctggtgctccaggaggaacgattctattactgccctcaccaacctaagtcctaagccctatggccattcaacccagccagaattgagaaatggggtcaaattcattcctgaacatttacgtagcattttcctcattgcacagtactggccttagacctgagcaagcagggaccctgtgcctcacagagccatgtactttaaaatgctttcctcaaagtgttctatgtccccctgcagcagtgcctggaaccagctggggtcagcagtgtcatcagggagggctcaaaatactgcttcagctttttctctcctctgtagcattctmtatgacccccaatcacagcatagacagggacagaatgttaccccggcaccatggagggtaggctccagtaagataaataaatgacagttactgtgagagtctgggggtgggagctctatagaaagacccattttggcctgattctctccactgaaaaaatggatttccaagagaatgggaggaaacaacagagttgtgtcttagtgtgacgggagttattgattcagtctgacctggtgttccaaggacagacccagagccctgatgcat

SEQ ID NO: 476469 - DNA, 652 bp, Homo sapiens
agtgagcttctgttacttgcaaacaaaaaaaacctaatgaccagagcactgcaaaaaactagtccttctaacatttcaaggaaagtctagttatgcttgtcacttgcatataatgctttactgactccccrtcacacacctgtgagataaaagctgtaattccttagtatgacatttctcatattctgcacactccttctttcactccctatcacactcaccttcaaaccccatcttacacccagcaccaagcacacatgcctccacctctttgcacatactgcctctaccccttgcctgcaatgtcctcctctttttgccttgttctcatgagaaactcctaactcttccaacagctaagtcaggtatccggatgtattcctttaaggatatgtttcctacatatagtcgacaatgtttaagatacattaattgaaagacttttgtacacattatcctgggtgttgagcatttaatagcgagcaacaacaaacatgcttcatgcccaaatgaaacttatttattaatggaggagataggcattaatcggataatctatgggtaaatggagggatgcccctgtgaccagtgctgtcatgatagtcaaagtgccatgcaatcctataattacaaaatgtgaccttgtggggat

SEQ ID NO: 476470 - DNA, 652 bp, Homo sapiens
agtgagcttctgttacttgcaaacaaaaaaaacctaatgaccagagcactgcaaaaaactagtccttctaacatttcaaggaaagtctagttatgcttgtcacttgcatataatgctttactgactccccatcacacacctgtgagataaaagctgtaattccttagtatgacatttctcatattctgcacactccttctttcactccctatcacactcaccttcaaaccccatcttacacccagcaccaagcacacatgcctccacctctttgcacatactgcctctaccccttgcctgcaatgtcctcctctttttgccttgttctcrtgagaaactcctaactcttccaacagctaagtcaggtatccggatgtattcctttaaggatatgtttcctacatatagtcgacaatgtttaagatacattaattgaaagacttttgtacacattatcctgggtgttgagcatttaatagcgagcaacaacaaacatgcttcatgcccaaatgaaacttatttattaatggaggagataggcattaatcggataatctatgggtaaatggagggatgcccctgtgaccagtgctgtcatgatagtcaaagtgccatgcaatcctataattacaaaatgtgaccttgtggggat

SEQ ID NO: 476471 - DNA, 637 bp, Homo sapiens
tggcttatggccgttaactgagttgctctccaaaaattaccttcaacccaaagttgctcactcatgagtaacggcaggttggtgtggacatataaagccacagccccttccccctaggccatctgactctcctgggactggccaaagcctatcttgcactgcactgtagctcacctcatccttacctgcctcctccgtcaccacggaggttaatccatgkgtgtttaccacaactcacctcatccttacctgcctcctccatcaccacagaggttaatccgtgggtgtttacctgtaaaattcctgcagcaaattttcatctcagagtctgtttctgaggaatcttccctaagagaggcccaaaccattgccaaattgtatgagaaaatacggtaaaaggcaatagagaaaaatgggaaggggcagcactttgcaatctatggctccctaaattctgttttcaaaacccctctgtacctctctctcagtttgtctataactgtgtgggtaaaagccagtaaagttgttctgtcttattagtctcttgatgttgtttggtagagagacagattcctagaattgctctcatgttaattttgaagtttaagcatgaaatctcttttgttctttgcttgag

SEQ ID NO: 476472 - DNA, 637 bp, Homo sapiens
tggcttatggccgttaactgagttgctctccaaaaattaccttcaacccaaagttgctcactcatgagtaacggcaggttggtgtggacatataaagccacagccccttccccctaggccatctgactctcctgggactggccaaagcctatcttgcactgcactgtagctcacctcatccttacctgcctcctccgtcaccacggaggttaatccatgtgtgtttaccacaactcacctcayccttacctgcctcctccatcaccacagaggttaatccgtgggtgtttacctgtaaaattcctgcagcaaattttcatctcagagtctgtttctgaggaatcttccctaagagaggcccaaaccattgccaaattgtatgagaaaatacggtaaaaggcaatagagaaaaatgggaaggggcagcactttgcaatctatggctccctaaattctgttttcaaaacccctctgtacctctctctcagtttgtctataactgtgtgggtaaaagccagtaaagttgttctgtcttattagtctcttgatgttgtttggtagagagacagattcctagaattgctctcatgttaattttgaagtttaagcatgaaatctcttttgttctttgcttgag

SEQ ID NO: 476473 - DNA, 637 bp, Homo sapiens
tggcttatggccgttaactgagttgctctccaaaaattaccttcaacccaaagttgctcactcatgagtaacggcaggttggtgtggacatataaagccacagccccttccccctaggccatctgactctcctgggactggccaaagcctatcttgcactgcactgtagctcacctcatccttacctgcctcctccgtcaccacggaggttaatccatgtgtgtttaccacaactcacctcatccttacctgcctcctccatcaccacagaggttaatccgtgggtgtttacctgtaaaattcctgcagcaaattttcatctcagagtctgtttctgaggaatcttccctaagagaggcccaaaccattgccaaattgtatgagaaaatacggtaaaaggcaatagagaaaaatgggaaggggcagcactttgcaatctatggctccctaaattctgttttcaaaacccctctgtayctctctctcagtttgtctataactgtgtgggtaaaagccagtaaagttgttctgtcttattagtctcttgatgttgtttggtagagagacagattcctagaattgctctcatgttaattttgaagtttaagcatgaaatctcttttgttctttgcttgag

SEQ ID NO: 476474 - DNA, 570 bp, Homo sapiens
tggagccttgctctgtcgcccaggctggactgcagtggygctatctcagcttactgcaaactccacctcccaggttcaagccattctcctgcctcagcctcccaaggagctgggattacaggcatgtgccaccacgcttggctaattttttgtattcttagtaaagatggggtttcaccatattggccaggctggcctcaaactctggacctcgtgatccacccgccttggcctcccaaaatgctgggattacaggcgtgagccaccacaccctgcccatgttgtaggtttttaattcagtggtgttcagattaattgggtcattcttttaatcattatgaatgatacacataagttttcatagtcttttttccatgatttgtcctgttaatgtcttcctgaggctttaggataaagtctcactctcaggaaatatatagtttatagaaatttgtttatttgttgaactcataccactggctaggtcatagctatagggcagtgattgttatagaatatatctgaaaatattctttctcaggctctttaaagcttgcctatcttaaacac

SEQ ID NO: 476475 - DNA, 521 bp, Homo sapiens
aatttagctctgttcttcagacctcttgtgattcgatttcctactcagtatgttttcagtaacttcctttactgatgctccactgactgagatatttgggatcttcgataacttcctttctataaccacagtaggtttttgttgtttacatttatgagtcctgatagataagaaagtggagcaggctaaggggtttggtagtaagtggtaggggtgaagatkgagagcttacaattttggataaggtggtatgttggatttctgccagtttgctatcagatttcttccctgcctttccctgctctgccatttataagataccatttcccctgggttctctggacttctggcttctagttgcattagctaatgggaagcaccggcagattggagagtaagttgggggtacttatccttcctccccctgcttggggtggggttatccttggcagtggttgcattgttttccccatgattttagttcctgttagacagcgtctccttccctgatcccagctcct

SEQ ID NO: 476476 - DNA, 639 bp, Homo sapiens
ttcccagaggccaaggcagacatcagagataaggcctagaacatttgcaaggtgagcaaaggagaaagtcacagagtgagccagaacagatacctcctagccccaaagtgagaggaacaacacaatggcttcttttygtaaagaggaaggtattggggaagactgatcccaacaccaaacacatcaaaatccaaacctagattatttttaaatcttcttctagaatggataaggtggtaatattcatttatgactagtataattattatgcttttcttccaggtttgccttaagctgagcgttcaaaaaatatatatataaagtaatcctaagaacaacatatcttgattttacagcctttctttttccttgccaagaaccctagagcattttgtgagagggtattagattcctaatgagcagtagcaagataggaggtgtttccacagtctcttggaatttcgtgaagaaagttaaaggcaatgaagaggtcaccaaaggccacagatccattgtgtaaagtctgtattcatgcatattttatagacaggtatggtaagagttagaaatgttacagttctgtgagcttttggctcctaagggattgagatgggccaaaaatgcaggtaaacaaaatac

SEQ ID NO: 476477 - DNA, 639 bp, Homo sapiens
ttcccagaggccaaggcagacatcagagataaggcctagaacatttgcaaggtgagcaaaggagaaagtcacagagtgagccagaacagatacctcctagccccaaagtgagaggaacaacacaatggcttcttttcgtaaagaggaaggtattggggaagactgatcccaacaccaaacacatcaaaatccaaacctagattatttttaaatcttcttctagaatggataaggtggtaatattcatttatgactagtataattattatgcttttcttccaggtttgccttaagctgagcrttcaaaaaatatatatataaagtaatcctaagaacaacatatcttgattttacagcctttctttttccttgccaagaaccctagagcattttgtgagagggtattagattcctaatgagcagtagcaagataggaggtgtttccacagtctcttggaatttcgtgaagaaagttaaaggcaatgaagaggtcaccaaaggccacagatccattgtgtaaagtctgtattcatgcatattttatagacaggtatggtaagagttagaaatgttacagttctgtgagcttttggctcctaagggattgagatgggccaaaaatgcaggtaaacaaaatac

SEQ ID NO: 476478 - DNA, 604 bp, Homo sapiens
cgcctccaaatgatgcattgttgcaacacaattcagaggaacgtggggaagacagagaactagagcagagaacagcaacagcaggaagacacagtgagaagcaatctcccaaataacaaacaaaagcaatcagcatttggcagaatattgtgtaaacaaaagcttcctgaactccagcctctagtggatcagtgcaggagctagtgtttacaaacacatcattgaggagtcaaggtaagggtaacctcaagcaaagactagaaaagtaagaattctcagataataataaaaatccttacatgggaaaatcaggtctccagtgctaatgacatatgccagagaactagatgatagaaagacaaagaaccagattaggctaaacattttccttcactattatctaggaacaggtaatgaatacagactaatgtagcatcatgagggttatttgtttgattaattagttgattatttactgttcaaaattttcctgaagtgcttttacatcttatgggccaaattacacctaaacaaaaactcacaggtgtcattatttatgttttataataggagtcgggggawcaactgtaatattttcaaaatt

SEQ ID NO: 476479 - DNA, 568 bp, Homo sapiens
tgtgttaccttggataaatctcttaatctctccaaacctccttttctctgctgtaaaattaggactttaatggtatttatcttatagtgtgagaattaaattagataatrtatgaaaattgcttagcataatgctgaacacataaaagacattcaataaacctcttttctataagagtgtttttagaaaattaacctggtactgacattgaaatttaatatgcaattgagattgtggaagtttaggaaatgctgctttgtatgataattgggaattttataaaatgttaccttattttatcataatttaatagtcattccaactcagttgtgccaaaaaagggggaaaaaagtcatactacttttggacataactatctcagtgtgatctaatagctgctgctccctttggggtgttttacatactttcactaaggtaaaatatgtgttttaaaaaagaaaaagtagctttattcatttcgcaaagttttgtaaacatttaaaatagtttttaaaacatttggtgaattaatattatgtattgactattgtaggcattcaactgagat

SEQ ID NO: 476480 - DNA, 568 bp, Homo sapiens
tgtgttaccttggataaatctcttaatctctccaaacctccttttctctgctgtaaaattaggactttaatggtatttatcttatagtgtgagaattaaattagataatatatgaaaattgcttagcataatgctgaacacataaaagacattcaataaacctcttttctataagagtgtttttagaaaattaacctggtactgacattgaaatttaatatgcaattgagattgtggaagtttaggaaatgctgcttkgtatgataattgggaattttataaaatgttaccttattttatcataatttaatagtcattccaactcagttgtgccaaaaaagggggaaaaaagtcatactacttttggacataactatctcagtgtgatctaatagctgctgctccctttggggtgttttacatactttcactaaggtaaaatatgtgttttaaaaaagaaaaagtagctttattcatttcgcaaagttttgtaaacatttaaaatagtttttaaaacatttggtgaattaatattatgtattgactattgtaggcattcaactgagat

SEQ ID NO: 476481 - DNA, 593 bp, Homo sapiens
ctctctcttttgcctttctccgtctcttagttcaagaaaagcaaacgtatgcctagttttcttaataacattttaaaattataaaagtaatagatgtctatggtagaacatctggaagatacaagaacaccctaaagtcatatctaatttaaatgagcaatgatttataaccaaaatgtacatgcactcttatgtatacaggacctggaaactactattaaatgttgtctttaaaatagctcttaaagtaaaatttaaggatggctttcttttaccaaaatccatttacagcactcttccaaaaaatgacagtagatgtttaagaagtttgatccttctggaagttgatttaacttcttggatttattttctctctagcttatataagaatttaataggggctctagcacattatccttaaaaatcaagrcaatctatctcaagttttatacactgatataaagtccctctgttctgtttgaaatccccagctcattcatttatattcattaatcttaatgatatcattaatgcacaatgtgtttcacagaaactaattgtattttgccagaatcaaacattcacaattatgc

SEQ ID NO: 476482 - DNA, 375 bp, Homo sapiens
actagcaaatatttgcattaaagataaagattaaataaaattaatcttgtctgagaatcctgttgtttttgagatctctcaatatacctgaggttaccaaaagatccctccaatccaggaagaaaactcatggagagtctgagaagaaagaagsgtaaatgatcctgctcctttcacccagccatccttagcttcaaaaagagaaggcaactatctcattcatgaagacaggggagaaaactgtaatgttttacatgtacaagcaactgccacagtggtaattttaaaactaatttttggtatttaacagctattcatagacaaacaaaacaatatggctatacatgccgcacgtgtttagagaatctctgaacg

SEQ ID NO: 476483 - DNA, 659 bp, Homo sapiens
ggctttttctatgccttaggaacgcctgatacctctagcaatttcagaamgttttacatttctattgtttttgcttttaaaggcttatgtttttcatgacgttgttttccagcatcataatttagtacctagtacaaatgacagaggtttttgttttccttagtttttcagggctgtccatcttgttctgtgttgcttgatcttgttcggtttgtggaaattcatcaagctgtacactaacgagtccatattatatttcaataagaagttttatatacatgtgcacacactgaaagaaaatggtcagcctccacaaagaggaagcagttgcgaatgccaggcccgtgccggtggtaccatctgtggaaggcatttctacctctcgtctccactttaggtacgtccagcaggagtcagcaaggcttagtggttaagaacaggggcttaaagccagagtaatcgggcttgaatcctggcttcacttttaccagctgtgcgaccctgtgcaagttactgaacttcaccctgcttcagtttcctcatctgcaacatggtgctaacagtacccaaaatcctcaggttgctgtacagatgaaagtggttcacatgtgtgtaaagcaactagaagcaggctggacccatgggaatactgtgtcagt

SEQ ID NO: 476484 - DNA, 593 bp, Homo sapiens
ctctctcttttgcctttctccgtctcttagttcaagaaaagcaaacgtatgcctagttttcttaataacattttaaaattataaaagtaatagatgtctatggtagaacatctggaagatacaagaacaccctaaagtcatatctaatttaaatgagcaatgatttataaccaaaatgtacatgcactcttatgtatacaggacctggaaactactattaaatgttgtctttaaaatagctcttaaagtaaaatttaaggatggctttcttttaccaaaatccatttacagcactcttccaaaaaatgacagtagaygtttaagaagtttgatccttctggaagttgatttaacttcttggatttattttctctctagcttatataagaatttaataggggctctagcacattatccttaaaaatcaaggcaatctatctcaagttttatacactgatataaagtccctctgttctgtttgaaatccccagctcattcatttatattcattaatcttaatgatatcattaatgcacaatgtgtttcacagaaactaattgtattttgccagaatcaaacattcacaattatgc

SEQ ID NO: 476485 - DNA, 573 bp, Homo sapiens
agctgcagtttgttgatgactatctgaatcgttcccttgcattctttcttaacgaattatamatgtgaaaattgcacacttgaaaattaaaatatgggtatgtactggagggaaagcactgagagaggagttaggggctggataggcagatagagatggagggtctagggagaagggacagaaaggaacaatgttcacaggaacaactgcaggacagcacctaccccgcctctgcagctaacaggaagaaatgtggttaagaacttgcccttatgccaggatgttgctcagcagggacggtctcaacttaggcacaggtgcaacaaatcaacctaaatgtccttaatttgacccagctcactataatgccattaacataacattagcgttgtggttttaggcacctcccaccatgggtttcacttaggcattcaaccagttggagtcactttggtcaaccttaggcatgcgtagatatagtaccccaggagggaattttatccctcccatgtgggcaaaacccacagaagacttcctggcttctgccacataaaagacacagaacacagacac

SEQ ID NO: 476486 - DNA, 573 bp, Homo sapiens
agctgcagtttgttgatgactatctgaatcgttcccttgcattctttcttaacgaattatacatgtgaaaattgcacacttgaaaattaaaatatgggtatgtactggagggaaagcactgagagaggagttaggggctggataggcagatagagatggagggtctagggagaagggacagaaaggaacaatgttcacaggaacaactgcaggacagcacctaccccgcctctgcagctaacaggaagaaatgtggttaagaacttgcccttatgccaggatgttgctcagcagggacggtctcaacttaggcacaggtgcaacaaatcaacctaaatgtccttaatttgacccagctcactataatgccattaacataacattagcgttgtggttttaggcacctcccaccatgggtttcacttaggcattcaaccagttggagtcactttggtcaaccttaggcatgcgtagatrtagtaccccaggagggaattttatccctcccatgtgggcaaaacccacagaagacttcctggcttctgccacataaaagacacagaacacagacac

SEQ ID NO: 476487 - DNA, 629 bp, Homo sapiens
tgaagagttttagcatgctttgacttatttactatttagcaatccttaggtattcaagagaatcatgttcacaccatataatgtagcggagtgtcttgttggtctaccattactcagtcttattaaccaaatatttctaaacttattgagagtacttgtgtctttcctcaggaatctaaggccgctgctccagctcctgtgtcggaggctgtgtgtcggacctccatgtgtagtatacagtcagcaccccctgagccggctaccttggtgagtgactccctgggcatttgagcagtggcttgagaaagttttctgcctcctcctgtcactctctgctgtgtattaccatcattttatcttatcctgacaaattaaaaataaaatctgatatcattatagtatctgttgtttctttgggcttcaggggtgtcgtagaaattcagactaagatttaaatttttaattaaattactcccaactgtatttttctctactcttctgaaattctagttcctcagctattgtggataatcctgccttttcacttctctgcatcttttaagcctatatrgatttccaccgaaagcccaaagttacttttttactgactttcctggtagaataacatg

SEQ ID NO: 476488 - DNA, 594 bp, Homo sapiens
gaatgagtatcagatctgaatgagccatctagttacctacactcttggccaccgttgattaattctatggggaccaatcagagtatgaactctctaatctcaggttggcagcctggagtaggctcttgtcttggtggagagatccatggaacaggaggctcaagagctcacatgggtctgattctctccaggaagcagggttatagtgtggcctagtgaaatcaagatgagggaaggagagagttctaaagtacagaagggaactgagattgggtagtccagtaatgagmccccagacaactttatttctccaccgtggctgggggaagaatgaggaggaagaatgaggcaacagagctaagaaatctagatggctacaaagacatgactcattgttttcttcttactttattttccccaaaaagctcttaaaattcttaaaaggacagagagtaaaagagaaagactgggcctactctgcagttgataacaaatatgttaatcaatgtatagacatgactatattatgaatatgttatattcattcagcggacattaataaaagtccaccatgtgaaaggaaaggtagaaggt

SEQ ID NO: 476489 - DNA, 563 bp, Homo sapiens
tcacacaacctagtggcagggcctggtgtcatgagtcatgggccagttcttacaccatatcctctgagaatgacatggatgatttcttccttgtatcatacttggttattcacaaatgcaatgttcttgcaaatgttaatattataatctttggtaactgtagcaaataatcgttgaattattttgtaatttttggtgtgcaacatcctttgcaaagtcctaaatttcatacaratgtgaaagctggttgcgctactttattgatcctcacaattaaaatttctaattcatccagaagaacatatgtgaatctgtatgaaatacatatctaagaattttaaatttacaatgaaccattataaaaaggccttgaccttctccacatttcctacctacttgcccgtttcccattatattttactctgacctagggaaagtacaggatcagagataaaggtgaaaatgattcccagaaagacaggaaaaatttgaacttattaagctctattaagttttagataaggagttaggcccagagtgagaaatttactgtggtgataaca

SEQ ID NO: 476490 - DNA, 683 bp, Homo sapiens
catgacagctggctcctcccagagtggacgatctgaagagagtgcaagggagacacaatgccttgtatgatctaggcctggaagccacatactgtcrcttccaccactgtttatttattaaaagcaaatcaccaagcacatttttcattcaagggaagagaaatgagacctcacctttcagagaagaagcaaagattttgtagacatagttttaaattgctgtaagcatatttggctttcggccaggatatatagatcattctcatcatgatttaataattgtcactgcagcggtattctgggcctgcaaggtcacatttccgctagttaataatcttgaaccattctgtatcttccaggaaatgactttgtttagtgctaggagtagaaattggccaaggaagttctgcttctctttttttcctttcttcccctcccctttctcccattctctttttccgttttctgagtcccccttgcccctggggcccctagaacaagttgtagatatgtgggttgagggaatggattatttacgcagctctaggaagatgtgtgttttctgtaacaatagctggcttgtagataatgagctataaccttcaatacaactatctacaaaccttgagagaaaatctctaggcattcagacctttgacatacagcacactgccctttgtagt

SEQ ID NO: 476491 - DNA, 683 bp, Homo sapiens
catgacagctggctcctcccagagtggacgatctgaagagagtgcaagggagacacaatgccttgtatgatctaggcctggaagccacatactgtcgcttccaccactgtttatttattaaaagcaaatcaccaagcacatttttcattcaagggaagagaaatgagacctcacctttcagagaagaagcaaagattttgtagacatagttttaaattgctgtaagcatatttggctttcggccaggatatatagatcattctcatcatgatttaataattgtcactgcagcggtattctgggcctgcaaggtcacatttccgctagttaataatcttgaaccattctgtatcttccaggaaatgactttgtttagtgctaggagtagaaattggccawggaagttctgcttctctttttttcctttcttcccctcccctttctcccattctctttttccgttttctgagtcccccttgcccctggggcccctagaacaagttgtagatatgtgggttgagggaatggattatttacgcagctctaggaagatgtgtgttttctgtaacaatagctggcttgtagataatgagctataaccttcaatacaactatctacaaaccttgagagaaaatctctaggcattcagacctttgacatacagcacactgccctttgtagt

SEQ ID NO: 476492 - DNA, 545 bp, Homo sapiens
aagtggggcatgcagggacaagattccatctttccttggcagcttgcttgaaccatgggggaccagctagctagcaattaattctaggattatgttattccttgatgcctatctatagataataaacccgctttgtataacttgtgtgcttgggtgttctgtctcactagactcagagaagttggtaaccagtgcatagtgaacttgcttcacaytatgtcatttatttgtttatttatttatgtattttagtgacctgatcttcctatggtgcccaggttagactccaactccctagctcatgggatcctcctgcctccacctcccaagtagctgagactacaggtgcacgttaccatgcccagctattgcttttaacacatcccacccatgctttcagttaaacaattattctatctccctgaattgcgtgacattttccaaaaaaagaatcatcaaatgaatcctttcaaaagaaatcaagcatctcttgcatcctcaccctgcagcattaagatgcaggcctgccagcgagggggtgaaat

SEQ ID NO: 476493 - DNA, 615 bp, Homo sapiens
agacctaaaataacttagggcttatgtattagaaaatgcataggtgatcggatcctgtttctggatctgagaaccatggtacatggtactaaatggttccaggcaacgctatttggcctggaaagggccatttaagagttcagtgaaagggctgggcttggtggctcatgcttttcatcccagcactttgggaggctgaggcgggcagatcacttgaggtcagtagttcaagaccaacctggccaacatggtgaaaccccgtctctactaaaaatacaaaaattagctgggtgtggtggtgtatgcctgtaatcccagctacccaggaggctgaggcaggggaattgcttgaacctgggaggtggaggytgaagtgagccgagatcctgctgctgcactccagcctgggtgacagggcaaaaccctgtctcaaaacaaaaaaggttcagtgaaaggaattgaggtgaccttctcaagtcgttgttgagggccagattctggaatagcctgtgtggcctgtgggccactaggtagacaccctattttgccccagtccctgaggcttgatggaggttcgatcagcagttgcctgagaagatttggtccttgacatgt

SEQ ID NO: 476494 - DNA, 577 bp, Homo sapiens
taggtatgtttcataaaaaccaaatccatttggttttagctcaagtaaccaaaaacagtggcaatgccccaaactctaaaactggaaaggtccccaaaaataataataaagaagctcctgtatgtaattttctactccaattctgttaatactatgaagattattttcagaacaatgtaagaaacttctaggcttatataaaactttcatataaattttgtgatttcaactaagctaattttgtaagaggtacacaataacagaatgtgactcagattaccaaaataacatatattaacactggcaaaacatttacagtagcacatatatacatttctttctttctctcatcatcttcgctaaaagaaatcaaagttcaggtaaggagaaaaatcatgcagttcaaaacatttgtgtccaagaatttcactcatgaagtacctttttgatattatgtaaattttagtggcaagatgataaatatttctgggtataaatgaaacacttttttttttcccaaaaaaytgcaattttaaaagatgatcaagcacacaggaaaaaactgctcattaaagtt

SEQ ID NO: 476495 - DNA, 631 bp, Homo sapiens
acataatggtaaccagtcagaggagggcataactatgaaactggacaccttggttgtcaggttagaaggatrgggtgtagggttggtaagaaaagaattcagggaagagcagcgatcagattatgaagaatttgtcttgagaaattacagaggatttaaaccagaatgttaggaatagttattctagcaagatgaatgtggaaagtgttagtgtgcatgtgatgagtcttgaagctggaaactaggtaacaggttcttaaatagttcatgtgaaaatcatgacagactaaggcagtggctgtggggctgtccgggagttctctacagaaaacatctaaaacttgaatgtgcaagtgagtagctaacttccaagcttcccatttctgtataatttaagcatgaaaatgagaacactgagatttgataggcatgtagaagtcagagtaagcaagagggcttgagttcaccgatgaacttcagtaactatccttgacttagtattggtggaaaccatttgtgaatttacagactccaaaaacaaaaagataatttagagtctcaaagtaagatttggggagatgtccattggagacagaagtggagagagggagaagttcatttgttgacatat

SEQ ID NO: 476496 - DNA, 631 bp, Homo sapiens
acataatggtaaccagtcagaggagggcataactatgaaactggacaccttggttgtcaggttagaaggatagggtgtagggttggtaagaaaagaattcagggaagagcagcgatcagattatgaagaatttgtcttgagaaattacagaggatttaaaccagaatgttaggaatagttattctagcaagatgaatgtggaaagtgttagtgtgcatgtgatgagtcttgaagctggaaactaggtaacaggttcttaaatagttcatgtgaaaatcatgacagactaaggcagtggctgtggggctgtccgggagttctctacagaaaacatctaaaacttgaatgtgcaagtgagtagctaacttccaagcttcccatttctgtataatttaagcatgaaaatgagaacactgagatttgataggcatgtagaagtcagagtaagcaagagggcttgagttcaycgatgaacttcagtaactatccttgacttagtattggtggaaaccatttgtgaatttacagactccaaaaacaaaaagataatttagagtctcaaagtaagatttggggagatgtccattggagacagaagtggagagagggagaagttcatttgttgacatat

SEQ ID NO: 476497 - DNA, 567 bp, Homo sapiens
taattttagcattgggttagctcatctaagaggtaatagcaagccattttccagtaattctgattagatcaaatctgcccttttctgatccccccacraccacaagaaaggttctataagagcacatattgtggagtaaaatcctcaaaagttttaaaatttttgaacagttaaattttgaatagatttcatatttatcagacaactcttggggtctgaatagatgtactacctggagatttaaggacagtatcacattttgccctctggcatttttcaacgtcttgagttcagaccaatgttgaaaatctgtagatgcaagcatagacaggcactatatgtatgtaatgaactaccatgttttagcccactaaccaagtttttcttatttctttgcaataagtaaaccttgggccagccgtggtggctcacgcctgtaatcccagcactttgggaggccaaggcaggcagattgcctgagctcaggagtttgagaccagcctggacaacatgctgaaaccccatctctactaaaaatacaaaaaattagttgggcatggaggcaag

SEQ ID NO: 476498 - DNA, 567 bp, Homo sapiens
taattttagcattgggttagctcatctaagaggtaatagcaagccattttccagtaattctgattagatcaaatctgcccttttctgatccccccacgaccacaagaaaggttctataagagcacatattgtggagtaaaatcctcaaaagttttaaaatttttgaacagttaaattttgaatagatttcatatttatcagacaactcttggggtctgaatagatgtactacctggagatttaaggayagtatcacattttgccctctggcatttttcaacgtcttgagttcagaccaatgttgaaaatctgtagatgcaagcatagacaggcactatatgtatgtaatgaactaccatgttttagcccactaaccaagtttttcttatttctttgcaataagtaaaccttgggccagccgtggtggctcacgcctgtaatcccagcactttgggaggccaaggcaggcagattgcctgagctcaggagtttgagaccagcctggacaacatgctgaaaccccatctctactaaaaatacaaaaaattagttgggcatggaggcaag

SEQ ID NO: 476499 - DNA, 567 bp, Homo sapiens
taattttagcattgggttagctcatctaagaggtaatagcaagccattttccagtaattctgattagatcaaatctgcccttttctgatccccccacgaccacaagaaaggttctataagagcacatattgtggagtaaaatcctcaaaagttttaaaatttttgaacagttaaattttgaatagatttcatatttatcagacaactcttggggtctgaatagatgtactacctggagatttaaggacagtatcacaytttgccctctggcatttttcaacgtcttgagttcagaccaatgttgaaaatctgtagatgcaagcatagacaggcactatatgtatgtaatgaactaccatgttttagcccactaaccaagtttttcttatttctttgcaataagtaaaccttgggccagccgtggtggctcacgcctgtaatcccagcactttgggaggccaaggcaggcagattgcctgagctcaggagtttgagaccagcctggacaacatgctgaaaccccatctctactaaaaatacaaaaaattagttgggcatggaggcaag

SEQ ID NO: 476500 - DNA, 567 bp, Homo sapiens
taattttagcattgggttagctcatctaagaggtaatagcaagccattttccagtaattctgattagatcaaatctgcccttttctgatccccccacgaccacaagaaaggttctataagagcacatattgtggagtaaaatcctcaaaagttttaaaatttttgaacagttaaattttgaatagatttcatatttatcagacaactcttggggtctgaatagatgtactacctggagatttaaggacagtatcacattytgccctctggcatttttcaacgtcttgagttcagaccaatgttgaaaatctgtagatgcaagcatagacaggcactatatgtatgtaatgaactaccatgttttagcccactaaccaagtttttcttatttctttgcaataagtaaaccttgggccagccgtggtggctcacgcctgtaatcccagcactttgggaggccaaggcaggcagattgcctgagctcaggagtttgagaccagcctggacaacatgctgaaaccccatctctactaaaaatacaaaaaattagttgggcatggaggcaag

SEQ ID NO: 476501 - DNA, 634 bp, Homo sapiens
ccgcacgacttccgctttccgcactcttcatcctcccccgcccgctgcgtcccttcatttccagtgctgggcagcccctgtcccgggatcctgcgggagctctccccagccgccgcggggctgcggcgcggccagcacaggccgggtgggggtgggggtggggtaggggccagtcgccatggcgacggcgccgcggcctgaggggctggtaggtgcgaggggctgggatgcgaaggtgcaaactttcccaggtggggcaggcgggcggcgcggcgcgctctgggtgctgggagggggcgccgggcgcgatcccsggggaggcggcatcttgtgcgcccgggttgtgctcccttggctcagggccagcccatcgcttccttggcggtccttggcgttgtcggtatttccgtcctctgtaggaggctgtcgatttaccggcccctgctgtttcccgagtgcgaagtgtgtttccgcagaagtaaggtttctttgtgggtagccgacatcattttttttaaagaccatgtcgtcggaaaggatcactggtttccttcggagcagttaatgagtataaactggttcagtatttgcgatgcatggtttacgttctgaatgagactgtgcctttagtgtt

SEQ ID NO: 476502 - DNA, 634 bp, Homo sapiens
ccgcacgacttccgctttccgcactcttcatcctcccccgcccgctgcgtcccttcatttccagtgctgggcagcccctgtcccgggatcctgcgggagctctccccagccgccgcggggctgcggcgcggccagcacaggccgggtgggggtgggggtggggtaggggccagtcgccatggcgacggcgccgcggcctgaggggctggtaggtgcgaggggctgggatgcgaaggtgcaaactttcccaggtggggcaggcgggcggcgcggcgcgctctgggtgctgggagggggcgccgggcgcgatcccgggggaggcggcatcttgtgcgcccgggttgtgctcccttggctcagggccagcccatcgcttccttggcggtccttggcgttgtcggtatttccgtcctctgtaggaggctgtcgatttaccggcccctgctgtttcccgagtgcgaartgtgtttccgcagaagtaaggtttctttgtgggtagccgacatcattttttttaaagaccatgtcgtcggaaaggatcactggtttccttcggagcagttaatgagtataaactggttcagtatttgcgatgcatggtttacgttctgaatgagactgtgcctttagtgtt

SEQ ID NO: 476503 - DNA, 586 bp, Homo sapiens
cccagaagaaagggtattctaaccaaagggagcagcttggctgtgtaaatttacaaactgagtaaagttacacagcttggcatatatgttgaatatttgggaactggcaggatatttgtctgcttgtgaattcagtggaagaaaattaccaaagcaaactaccaaacacattaaacaatctctccggaccaagctctgtggtgcttcttaygcatcatccaatttaatcccccgaaaactctatgaggtaaggattagctccatttcatcagtaagatagctaaaatttatagaggttaaacaatgtttcctggtcacatagatcacatttaggagataagaataaaatctacgtctatttaaattcaaatttcatgatcttagcatctgtaatattgtgaagccaaggaaagaaaggctgggcatgaagaggcttagggacctgtccccgggtttgttcagttgctctggaggaagaagaaagtaaaatgaggttgctattaagctggttttgcgtgtggtaaagtatttgctcacatgctgaacaacattttttaaaaaaacagtttttagttttttgagacag

SEQ ID NO: 476504 - DNA, 525 bp, Homo sapiens
tctcaggcattcaatatatatttgttgcaacaacaataatagggaatatttattatgtgtctagcactgttctaagggtattaatttagtttttgctggcaacagccctacgaggtaggtaatatgattacatccattttgcagatgaagaaactgaagctagagaggttaggtacttgtctagtttcacacagctaataaatagtggacccaggaatcaggcagttttccttcagtttacaggtatccactatgctgtacagggtctcttataaatgaatacacgactgaatggtcaaattggttaatatatttatttggctctttgaccagtaacaaatgccagctatcttttttttttttwaaaaaaaatgaaaattagagggaatggactgcctactttgtaagagccaaattagttttatggtcttctggactaggctgtacttaactacctactaatactcctcctggaattaatatccatacaggtataggttataaatcattcttacctgaagattt

SEQ ID NO: 476505 - DNA, 517 bp, Homo sapiens
caatcaagtgtcacttcctcaggttcctattatataagcccacaaaattctactgttctattcagagcatttacctctgcctgtaattatacataattatttgttgwtgttgttgttgttgctgtcgtgtgtaaattttattagggattgtcttcctcctatactcttcactccatgataatgcagaccaggaattttttgctcattattggatctctggggtcaagaacagtgctaggtacatggctgacactgaatgaatatttgttgaataagtgaaacccaagagctagaggtcactgtcaaatacatagataaaaaatttttccactaatactgaggtaaagctggaggcaaagatattagtgaaaatctataataggacttagagctattattaaaacagaaggagagtggaggaacccaggacaatgcaagctgaaacagtgctaactatctactggataatcatgggaccaagagagtctgtttaattagggaactagacaagaactag

SEQ ID NO: 476506 - DNA, 605 bp, Homo sapiens
caagagatcctccctcctcagcctcttgagtagctgggactaccggcgtgcaccaccacacctggctttttttttcttttaatattttttgtagagagaaggtctcactatgttgctggtttcaaactcctgaactcaagcaatactcccrcctcagcctctcaaagtgttgggattacaggcatgagccaccacactcagtctcaccaagtctcgtaacttttaaagtcaaatttccagagtcacttcaggacccaccaggccttaaggtccagcttattaaaaatcttacattaaatctctgtatattttttctaggcattataatttccttcctcaaggagttgagaaaaaaactgtatgtgggaaccacaacatacagttgaaggaagttagaattaaaatttctatagcttttaacatttgattagcacatcatacatgtgtagaatgttttcctaagctttcattctaaaaacacagaattcattttatttccaagtgcaccttgatgaagtagaagcacatggcattttattttagaaagcaatgtcttaacaaacttgttatttcttccaattatgcaaactcaccaaatgattttt

SEQ ID NO: 476507 - DNA, 605 bp, Homo sapiens
caagagatcctccctcctcagcctcttgagtagctgggactaccggcgtgcaccaccacacctggctttttttttcttttaatattttttgtagagagaaggtctcactatgttgctggtttcaaactcctgaactcaagcaatactcccacctcagcctctcaaagtgttgggattacaggcatgagccaccacactcagtctcaccaagtctcgtaacttttaaagtcaaatttccagagtcacttcaggacccaccaggccttaaggtccagcttattaaaaatcttacattaaatctctgtatattttttctaggcattataatttccttcctcaaggagttgagaaaaaaactgtatgtgggaaccacaacatacagttgaaggaagttagaattaaaatttctatagcttttaacatttgattagcacatcatacatgtgtagaatgttttcctaagctttcattctaaaaacacagaattcattttatttccaagtgcaccttgatgaagtagragcacatggcattttattttagaaagcaatgtcttaacaaacttgttatttcttccaattatgcaaactcaccaaatgattttt

SEQ ID NO: 476508 - DNA, 626 bp, Homo sapiens
acgacagggcttaccatttaatatcaattctaaagctgattatttatttttgagacagggtcttgctctgtcaccgaggctggagtgcagtggtataaacacagttcactgcagccctgacttcctgtaaagctgattttttaggccatttacttgcttyataaagtaactagaatggcatgaactatgcttttttgtgcctgtgattataaactgaaaatttacaaacaatatgtcacatgttatttgagctaaatgtctgattttactaaaatgaaagtatccttcctggattattagaattagcagtaaatttaagtttgcacctagaagagaaaagcgattgtaaagaatgtaaaacatctgaagcaaacaaagtccaataagatcttccttctacttgaatttctatgaccacaaaggcacaggatgtaaggtccatagctttatacacagggattggtggggacgacacgatttcaactctgaaccccaatgaccagctccaggaacacatgccttttagccccgcaaagctactgaccaaatcacccagagagataatcacatctcagccaaaggacctgaactcagacgatcagaacacaggacctgccatcaggcag

SEQ ID NO: 476509 - DNA, 626 bp, Homo sapiens
acgacagggcttaccatttaatatcaattctaaagctgattatttatttttgagacagggtcttgctctgtcaccgaggctggagtgcagtggtataaacacagttcactgcagccctgacttcctgtaaagctgattttttaggccatttacttgcttcataaagtaactagaatggcatgaactatgcttttttgtgcctgtgattataaactgaaaatttacaaacaatatgtcacatgttatttgagctaaatgtctgattttactaaaatgaaagtatccttcctggattattagaattagcagtaaatttaagtttgcacctagaagagaaaagcgattgtaaagaatgtaaaacatctgaagcaaacaaagtccaataagatcttccttctacttgaatttctatgaccacaaaggcacaggatgtaaggtccatagctttrtacacagggattggtggggacgacacgatttcaactctgaaccccaatgaccagctccaggaacacatgccttttagccccgcaaagctactgaccaaatcacccagagagataatcacatctcagccaaaggacctgaactcagacgatcagaacacaggacctgccatcaggcag

SEQ ID NO: 476510 - DNA, 540 bp, Homo sapiens
ataagtgagcattacgcaggttaaaatagcttgtccaaaactcctccatgcccacacactggccctccagagcccatgctggtcccgacaggccagctcccactgcgatgaggctctgcacccacggcttcttggcttggcatgctgccccttcactggcacagcttcctcagcagacccagctcagtcccaccccttggtgcaactcctggggcagactggcccatccaccaggctctcagaatcctggcacaaggaactgccgaggctggctgacctgtctctgtagctagtcaaataactcacttaagaccagaggcctacccagccctcctgcagacaccggcagagcggccagattctagtctgtgttgtataaatatgagayatgatacacgtctgccttccggatataatcttgtcaaagagagctcagcattactctgccactttataatcctttagttaatgatacagagcttcaaaaatatatggcaaattaaatctaacttgatatttaaactttgatttaaaaataca

SEQ ID NO: 476511 - DNA, 540 bp, Homo sapiens
ataagtgagcattacgcaggttaaaatagcttgtccaaaactcctccatgcccacacactggccctccagagcccatgctggtcccgacaggccagctcccactgcgatgaggctctgcacccacggcttcttggcttggcatgctgccccttcactggcacagcttcctcagcagacccagctcagtcccaccccttggtgcaactcctggggcagactggcccatccaccaggctctcagaatcctggcacaaggaactgccgaggctggctgacctgtctctgtagctagtcaaataactcacttaagaccagaggcctacccagccctcctgcagacaccggcagagcggccagattctagtctgtgttgtataaatatgagatatgatacacgtctgccttccggatataatcttgtcaaasagagctcagcattactctgccactttataatcctttagttaatgatacagagcttcaaaaatatatggcaaattaaatctaacttgatatttaaactttgatttaaaaataca

SEQ ID NO: 476512 - DNA, 583 bp, Homo sapiens
taaactagagtgacagtcttccctgtgccagagtgtttaataagacctaatgacctttacacactttggagggcagggagagacaccaagggctgagtgtgaatttcccaccagcctaggaggatgggtactcagatgatttaaagaaaataaagygatgcacacttgaatatagggaactaagattaatacctgctacagtcgtacacaactatgcatacacatatacacccccacacagacacaccagtcatccttccttcttcaactgtttatttcaacactgatttcataacactatttaaacagctcaggctatctccatatcccagtaagtacttgtcagtacacaaacaggtcacaatccattatttaaaaagcatggcggctgggtgtggtgccttatgcctgtaattccagcactttgggaggccaaggtgggaggattacttgagcccaggagttcaagaccagcttgggcaacatagtgagatcccatttctatttttaaataagaaaactttaaaaataatacaataaaataaaaaataaaaagcacagttcatattagaaaatgggcaaa

SEQ ID NO: 476513 - DNA, 463 bp, Homo sapiens
tggtgagactttctctgaagtcgggatggggagtcgtaatgaacktagactatttccagtcctgttggtgagaccaattgtgctggagaagcatagctgtccaccaacaccagttctttccttcctccacagtaatgagtccctagctgggggacctggggtaatgcctctgttttcaggcatccctacagttaggtgtggccatatgcctaggttgccaatggaaggtgagaggcaatttcccacttctggcctaacccttaaaacaatgcacatatacatgaacatgggacaggtggaaggaaccttggattcccaagtgactgtgtggagcagaggagtccctgaagctacatgaagaagaaataaacttccataagtcactatatcatgaggtctctttgttaggggaaaaatctaagcttctgtgacaagggctccaatgtctattgcatccagccag

SEQ ID NO: 476514 - DNA, 614 bp, Homo sapiens
tatccatgaatatcaggaggcagagttcattgaaggtcatcttggggccatcttaaagggcatcttggggcctccttggacattagtcatgtctaatggcattcaaggtcttcgataagatatatacataatttagtagtaaaaatcttgcacgaatatctaaatatgacttgtgaagaatggaattttaaccaccagcttacaaggattcatgaggctaccccagtctaaccaaattccacatgttcctgcaatttcctttatctcacgaaggtaactggatttctagaagacctatgcctcagtcaaatgaccttgaagttattatgtgtgcctgtggttctgtcttaaattcatgtatcttacatccttgaagtttgagaagagtttcctatttagaaaagcagtttggaatcaatatagattgctattctgagaagtaatgtaaatggcagcctgttgtaaagtgaggcacctccctaccactctcactcttgctcttgctcctgccatatgatatgcaagctccaacttcaccctccatcrtgaaaaataccaatactttttttttttttttgagacagggtctcactctgtcactcagctagaaatgc

SEQ ID NO: 476515 - DNA, 531 bp, Homo sapiens
tccaaaagtaacaaaacaatgcctaatattaagtaagtagtcaatctgtgtgctgtgtttgttggttatgttgaaatcacaaactccagaggagcaaaagggtttttcaatgtcctttactttcagaaacagagaatataatattctccctgaggccttgaattgattttttctcataaaatcatctaataagctaatttttaaaaagaaatgccgttaagtatgttgcattgtggtttaaawttcctaacaagttctggaaagaaaaataatatttgatttttaatcttaaatgtttttaaaaattaaactcaaatgggcatgaagtataaatattttgtttctttatggaggacatgtggaaaggatttgaagttttgggatggaagaagtattttgcagagctatccatgtccaaatgattttttaaaaataataaaggtatttaagcggtgaaaaacaatacaaaaatacatataatgtactacaggaatgcaaagggcatcttaacattgctaccaaggttttctt

SEQ ID NO: 476516 - DNA, 665 bp, Homo sapiens
ttcatccacaaggtctaaactacagaagtatggagtccttctccggccgtattaactctgttttaacagatcgattagctttgtttctggatgctgttatgggaacagggctctgtagagttccttggttgcagatagcttcatatgatgggtttttcagacttgcttggtgtagcaatgtattcttatttggtggtgtaattcaggctgcagtccagtagatggtgcttaagagtaagagatgagctggcaggaggctcttaactctgcttatgcacgccttcagcaggggtggaggcaacagaaaagcacgagtgccctccccacctcttccgcataccgtttgtcttcatcgggggtggagcccctggaaaagcctgagaggcacctctttcaccctacactccctgggacccagcaggaagaggcgctgctatgtccacgaaagtacactggggaggctgtctggaagtgagagatgacccccatctccaagtctgttcccaggctttggtgttgtgccctttggtggctgtcacagcactcatagttcctttgaccccaaagggactttggcgggctgcactcccccttcgcttagtggcagttcacacggagggttagatctccaggtgagtgggrtccacctccctcctactccttgc

SEQ ID NO: 476517 - DNA, 605 bp, Homo sapiens
caccggcagtataggagcattccctttctaccccatccacaccaacatctatttctttttttttattattattatagccatttgcgcaggagtaaggtggcattgcactgtgattttgatttgcatttccctgattattagtgacgttgaccattttttcatgtgtttgttggtaatttgtatgtctcctttgagaattgtcaacccacagagcgggagaaaatcttcacaatttatatatctggcaaaggactaatatccagaatctacaatragcacaaacaaattagcaagaaaaaaatcacatcgaaaagtgggctaaggaggtgaatagacaagtctcacctttttctttaaatcatatagactatagttattaattgtagcttcaatgtagactaaagaagaagaatgtggtcaaactttatcataaaggagtcaggcctttcataaagaattattttcttgtggtgaagattgttacacactggaatgatttacttaaggaccatcactaagttaccttctccagggatctttaacagcagcagagactctgtaggtcaagattggtctcattcatcagcttcacacaaagatgagaa

SEQ ID NO: 476518 - DNA, 474 bp, Homo sapiens
ctgaatttttacattaaagggatgtttattaaatactctaaaatcaaactgagggtttsagggagcaagttaatatcaggagaccttacgatgaagctgctgagttgttctaaattacacagaaatatgacagcacaggcaaaatagtttccaacattattttttcttcaacaatccttgcaaaaatccttcagtctccatggttgctcaaacttatttttaaaatgtaaaaattatctaaaaatattacagtgcctgggagctgatcattagtaagttatcaaacacaaataaagaagaaagtaggtgggttaccatgaaagcagttatacatcaaaaatatggttttcttcatcttcttttcctccttttcctttctcttcatcgtatctcttcagccacattcacccttaacacaaaaagttcctcctgaaatcctcatgctattttcttggctcaaatccctttgactac

SEQ ID NO: 476519 - DNA, 474 bp, Homo sapiens
ctgaatttttacattaaagggatgtttattaaatactctaaaatcaaactgagggtttcagggagcaagttamtatcaggagaccttacgatgaagctgctgagttgttctaaattacacagaaatatgacagcacaggcaaaatagtttccaacattattttttcttcaacaatccttgcaaaaatccttcagtctccatggttgctcaaacttatttttaaaatgtaaaaattatctaaaaatattacagtgcctgggagctgatcattagtaagttatcaaacacaaataaagaagaaagtaggtgggttaccatgaaagcagttatacatcaaaaatatggttttcttcatcttcttttcctccttttcctttctcttcatcgtatctcttcagccacattcacccttaacacaaaaagttcctcctgaaatcctcatgctattttcttggctcaaatccctttgactac

SEQ ID NO: 476520 - DNA, 313 bp, Homo sapiens
caactagcacctgatcttgtggacaggctgcaagcaaaccgcccccactgccacccacaagcctggagacctgggagttttttctccacacccccaggacataggcctgaagcaatgattgctgatgatatgatataagtaatccagcttcctctttcctaatcaagataattctgacatgtgawctatactagtccattcaagtagccaatatgcaaactttgccttgttatctaggacaagatgagcttgtgccagaacataaatctgtatgctgcttccttcacaaagaaatgtttctatgaaagaaagg

SEQ ID NO: 476521 - DNA, 616 bp, Homo sapiens
ctttaggaacagggagtcagacgaatggcctaaggattagtgctttctgtaatacaataagagcgtgacagtatgagaactctgtttaatatagtatgatctttttcaagaaagattgtattccatcaaggagaattatgaagctgtaaattacattgtgtcacagctagtagtattaaataccaagtgtttaattagcagttttaattttatattcttgcttagatatacctctacaatacttgaaagatgctttttgctgaaaacatttttaatcagataaaaatcaaagaagaaatgtctaagcaccacaaatatgatgtatgacttggcagtgaagaaaaactaaattattagtaagataaagtaatctatatttatattgtacttgcttacaatgtattatattaaacctaaaagtaatagcaatctaagatacttctgacactgagaattctttccagaaatcttagaaaaggcattaagaaaaattaatccaacaaatgtattatgagagcatgtgccacttgtatacacatctccaatcttctgcttgtcataatacttttgggttgcttaagwtcacttaaattaaaaggaattaattgccttggaa

SEQ ID NO: 476522 - DNA, 588 bp, Homo sapiens
ctgggtacattggtggactgacttttattttgcctgaattcttaaaatatatgtttgtttattgtggaatttgaggttggcatttatttgtaattttcagtgacagagaagtcagttgtctgtctaacttttgcttctttgyagttaatttatcatctctgactgcgtccaacatctgtttgtctttcatattctacgttatatttttgatgtttctaagtgtagatgaatttttaaatttcttgctttggatgtgcaaatttttgagtttatatagggtagaatattctgagttatttgcccttcaggtataaaaactctgtcacattctctttcttctctctggaattctgattagataagtattagaatgtcttgctatattttcctcatctattaacctctctttcatattttctatttttctgtgctgcactctgattggtttccattaacccatcatccaggacactctagttgtatttaatttactgttaaatagatctttatgcttgtaatttcaattatctcattcttataatttctagaattctgttggacaatttttcaaatttctcagtcactttt

SEQ ID NO: 476523 - DNA, 559 bp, Homo sapiens
ctgttgcctggtaccatttgtgattgtcagctaaaattctgaaagcaaagtaaagtgtggtgagtggatttacccggaatgagagactttgttgttttctaaaattttaaactatccaatatatatctcaagaaattatgtttttaaaaaatggtaaaaatactttccaaaaaactgaaaaaaagtgagtaacattttgctcacataaaaatcatggtgtttggagaggctccctctgcctattttgaacagagtaacagtgtcaatgcaagtcacctctatctttggtgaatgggagtggccaaggctcttcaggtaacagtgacagaaaactgacatgacatgacaacactctaaacaaaagacatgctatttatgcccataataaatcacttgmcttataccacttatgaatgcccttctagtattttgaaaataaattgaggtattcagtttttattagtataacattgatttttttttttttacacgctcactagatgagcattgaccaaatatttagataatacctgttgggaaagtgctgaattactagcct

SEQ ID NO: 476524 - DNA, 596 bp, Homo sapiens
gtgggttttcaagtgctgtaaagttgattcatcatcatttcaagaaaagccagacttgggatgtactgacttggcttttgggtcatctggctagaaccactattttatgatgtaatttctaattcagtaacatgttaagtatctgaggggaaaatgatttaaaaaacatatgccaagtgctattgtatatctctscatttcaccatgcatttaaacaagttagatactgattgtacttcaagtgtaaaatgctgaaggcctattctgtccttttgagttcaattaaatttttaattactcagtgaaaggagacacatggggaagaagaggtgacatttcaccaaggattttcccaaaattaagagttgaagaacaatgagattttcatctgctactgttcactaatgatgaaacaatgcttttttatgagctcattttgttcccatattttttcagttttgaccatttgtccatctccgaaggacttgtatcagccctactggaaactaataggaaagattagcatcaaagacaaagaataagtaaaatccttgcctgttttcaggtattcacaatttctgggattatatcctttg

SEQ ID NO: 476525 - DNA, 633 bp, Homo sapiens
gttagcaggggctactctaaacagatgctcagcctctcaggagactgacagctccagtatgcgatgggccaggcagtttgggagctgccccttccttctgccagaccagatgatgattagcawctgacacatgaataggaatagctgggcctgggcctgaaactgcagggaggggcactggtcccagccaacaagcctgcaaagcagttggagaatagaaaaatgcaaatgtcctaggtctcctcagccattaattcagaatctaagtactggtatatagttagctgtttcaggaagataaagaactgcttttagaaaaagatagccatttacaaatcagcttaggattgttcttatatttcagaagctttttatttccaataacatttctatagaatatcacccctgaacatgttaatatttgaacaaattttaaaaacctaaatcttcctggaattaggttgtactcattttgccaatatcctacttctaatggaggaggtgaatcattaagacaaaatttagggaacctctgagatatcaaaattgatttaaaataacatgaaaaattgtatttccatggtcttactttgcctaacccaatggtttcttccctttaaacgagttggcatc

SEQ ID NO: 476526 - DNA, 633 bp, Homo sapiens
gttagcaggggctactctaaacagatgctcagcctctcaggagactgacagctccagtatgcgatgggccaggcagtttgggagctgccccttccttctgccagaccagatgatgattagcatctgacacatgaataggaatagctgggcctgggcctgaaactgcagggaggggcactggtcccagccaacaagcctgcaaagcagttggagaatagaaaaatgcaaatgtcctargtctcctcagccattaattcagaatctaagtactggtatatagttagctgtttcaggaagataaagaactgcttttagaaaaagatagccatttacaaatcagcttaggattgttcttatatttcagaagctttttatttccaataacatttctatagaatatcacccctgaacatgttaatatttgaacaaattttaaaaacctaaatcttcctggaattaggttgtactcattttgccaatatcctacttctaatggaggaggtgaatcattaagacaaaatttagggaacctctgagatatcaaaattgatttaaaataacatgaaaaattgtatttccatggtcttactttgcctaacccaatggtttcttccctttaaacgagttggcatc

SEQ ID NO: 476527 - DNA, 612 bp, Homo sapiens
aggaatatagcccctttcgtttgatgatgtttatccatatttaaacatggccacctgaaagtttagccttagtgttttatcttaaatatgtcagtgactttggagactgttgaagtacatccataatgtttgtatgttagtttaaaagtaaaaaagacttggtcgggcgtggtggctyatgcctgtaatcccagtacttcgggaggccgaagtgggtggatcacttgaggtcaggagtttgagaccagcctggccaacatggtgaaaccccatctctactaaaaatacaaaaattagctgggcgttgtgttgggcgtctgtaatcccagctactagggaggcgaggctgcagaattgcttgaacctgggaggtggaggctgcagtgagctgagatcctgccactgtactccagcctgggtgacagagtaacactggatctcaacaaaaaaagtaacacttttcctgcaaggcagttttctcaaattcatatttgaatattcttatgactatttgtggtcaagaaagatgccttttaatcataaaataatcttgaatagagtttttaaaaaatgtacttcatgcaagaagacaaatgagaatcttttccttca

SEQ ID NO: 476528 - DNA, 603 bp, Homo sapiens
gtatcattttgtgtgtatttagagcacatgagctaaatcttatattggttaaagagtttaaaaatctgtcacaaaattttgcccaaagacagaaaattttatgttgtcatttactgttttttttttaaatacctagtctaggattgattttttttttttgtaatgcactatgagagattgcctacattaaaagcrttggtaacagcacgtaaatgttttgtaagaagtttctgcgtaaggaatataatatatttaaaatgttaattcattcccatatgcttaagtagtcatgtgtgtcagatcttttcaagtacagtgttcttgcattaaaatagcctagaaattttatttctgcattccagttctgtcttctataacttttttttaacccgtgaaaatgggataaaatgttgggttttttttttttttttttaggatcatgtgtgtgaatttgaggttcagagactgcagtcactgcagagacctgaaagccattactgtctgtcctctgtgattatatgtgtcccctgtgattcccacctgcaggattaggaatgggagggagagcagggggtagaaaagggaaggtggcagaatccatcg

SEQ ID NO: 476529 - DNA, 552 bp, Homo sapiens
acaaaaatgcaccactatgaccagctaatttttttttttttgagacagattctcactctgtcacccaggttagagtgcagtggtgtgrtcgtggctcattgcaacctctgcctcccaggttcaaaggattctggtgcctcagctcctgagtagggattacaggcacccaccaccatgcccagctaatttttctatttttagtagagaaggggtctcattatgtagcccaggttggtctcctggacttaagcaatccttttaccccagcttcccaaaatgctaggatttcaggagtgagccactgtgcctggccaaggctaggctcttatctcccagcctatgtgaccttctgatggtgtcacaggtgaggggggcatggtacatggcggcttgattttcaccaagcactcaacttggttcccagtccaactctgtttctgccctggggacccttcttgatattggaaacggataaagcctgtgggtttttgttaaatttatttttccccacacaacactgatgtatcaagggggttttacccagtctggatt

SEQ ID NO: 476530 - DNA, 500 bp, Homo sapiens
gtggtcaccaacagcaagatagcacacactgcatctacaaatgtatgtgacatatcttcacattttgtgtgtgtgtgtgtgtgtgtgtgaccacaacttcaaagaaacgaacaaaagaagcaaccaataatcataatgaagaggttaaattttaccagagccaattgggcagagaaaaaaaatccaaaaacacaatgaaaacaaagaatattagacctgttaaaaaataataataaaaaccttagagttcattttagtcaaacttttcattttgcagaaaaagaaactggatctcaaatttccaatttaatgaaagttatgtctgagaatmtaaatctgagacctgatctcaccaccagaaaatagggttggaattgaccttataaataatatatctaagcccctcagttcactggtgaggaaactgaggttcaaagaaatttcagggactacttcgagtccacactgttacttagtaggactaactcccatgtgtttat

SEQ ID NO: 476531 - DNA, 606 bp, Homo sapiens
ctgggtgagtcatcctgcacccccaccgctcgcccaccagtccccaggctgccattacatttgaaaaatagcaagcgaagaattatcagagggaaaatctaaactataaagaaaaaactaggccagrgacagtggctcatgacagtaatcccgacactttgggaggtggagcccaggagtttgagaccagcttgggcaatatagtgagacccccatctctacaaaacacttaaaaaaattagccaggcatggtagcacacgcctgtggtcccagccactcaggaagctgaggcagcaggatcacttgagcccaggaggttgaggctgcagtaagccatgatcgtgccactgcactccagcctgggtgacagagcgagatcttgtctcaaaaaaataaataaataaaataaacaaataaataaatgagcaatcttcctttttgtcccctacgctgccatacacaacacaggattgaaagtggatacctcaatggttaatcaacactctgacctcagtttacacatgctctgggaaggaagcccctttatgaggagtgcattgtgggaaaacaaggggaatgttctacataaatctcagggcaaagtg

SEQ ID NO: 476532 - DNA, 629 bp, Homo sapiens
aaacattcatttcttgttttgcttttaataattttgtttcaacccaacctagtcttcatccttttttcaatactcaggaaactgcaacaaaccaataaagtttattttatctcatgtgccttaaatgacactataaaaacatgcatttggatatgtcctataaaagatattcaagttaggagaggttctttggaaacacaagggtgagagacctttggaatggcccatggggtggctagagaggggcagaggrcaagaagggttacaggaaggggaccagttgatgggtggtgatgaggcgatttgaagtccaaataatggaaaagtggaggtgaaggataaaggaataagaaagacattgaggaagacagggcagggcctcttccagcccatacagcaccttcgtacaagttagaaaaaggcaccacttcctctgagcacacacaaacccatgcaagagtgcatggctagatgtcagcctgtgctcttcccttcagccaggtaatcttccagaaggcacagcttgcatgataccatacatgggggcccaggaaaaaatgtgggtaagagattgaaaggccaaaatggggaactttagaagtactggaaggaaaaaaaaaaagtcatgg

SEQ ID NO: 476533 - DNA, 596 bp, Homo sapiens
agctgagcaaacattcatttcttgttttgcttttaataattttgtttcaacccaacctagtcttcatccttttttcaatactcaggaaactgcaacaaaccaataaagtttattttatctcatgtgccttaaatgacactataaaaacatgcatttggatatgtcctataaaagatattcaagttaggagaggttctttggaaacacaagggtgagagacctttggaatggcccatggggtggctagagaggggcagagggcaagaagggttacaggaaggggaccagttgatgggtggtgatgaggcgatttgaagtccaaataatggaaaagtggaggtgaaggataaaggaataagaaagacattgaggaagacagggcagggcctcttccagcccatacagcaccttcgtacaagttagaaaaaggcaccacttcctctgagcacacacaaacccatgcaagagtgcatggctagatktcagcctgtgctcttcccttcagccaggtaatcttccagaaggcacagcttgcatgataccatacatgggggcccaggaaaaaatgtgggtaagagattgaaaggccaaaatgg

SEQ ID NO: 476534 - DNA, 534 bp, Homo sapiens
ttcagttgcctttcttgtacttttcggccatctctgctcccttaggaaaggcagatgcaggagaatttcctccaggtgcagcttctgaacagaatatctctgagtcttgcaacattgccatgtatttttacttataaattatccaaatgggaaaagcagaagattggtacttaagtgtcagttttataaaactgctaattacatggcattgagtagatatttcacctaatgagaagaaataggtggtttaactctgaacctggaatttttatttctgacagcttgaaacagaaaaatgagtccatgggaagtagtakttagttgtgaaagaaggaatgttagatgcaaatctagtagtttgatggggagacaaaataagaattgcatgctgcactcttacattgctttcagaattgttttgttggaaggttactgggaacatgagatagtgtgataaggtctttaattatcctacttgtctgtcatctctggaaagtcaggagagaggagttgaacactttctgcttcacctga

SEQ ID NO: 476535 - DNA, 629 bp, Homo sapiens
ggctccagcacagccctcacttcctagtaacgaagggacctgcagcagcccaggtgtccagacctacattgaagggacgcatgggggctrtggttcttcccgtcatgtccataatcagatgaagttctgtagaaagcctgagacagaacttcccgagcagctaatgacacaactcagaagtatggggtgtgatgcctcattgttcagcagtgagagacagaagaaagaggttgacaaatccagtttctcaaaaaaaaacatttaatagtgtaaactaaaaataaaattctacacccccccccaacagaatgaatggaccgtttcttggccaaggtggaccccagagaaaccttgaaaactgagttcttagccatgacaggataggaggttggacacaactcattagaccccctcccttactaatggttaaccaccattaggctttctttcctaggggctaaaaagaaaccagccctctcaaaggactccaccacagatatcaaccaaccacctgaaaaaagaccactgaccctggagtagtcctgactagtctacgaagaatgggcagtaaggattttcatgtcctctgcttcatcttttggcatcagagggctgaaaactctaccctc

SEQ ID NO: 476536 - DNA, 608 bp, Homo sapiens
aacactttattcaagtgctataatatttacatatttacatatttgtataccaaaatatgtcttgttatgtgcttgttttagggtaagaaatagtgaccagaaaaaccagaagttacttaaatctaaactttttagtttggaatccaagatcccacataatttgccccagtctcctttgagagtttaaaatttaagacctagatgtaaagggcacagcttctgaataagaatttgaygtttggttaacattcaaactctattgctgtggaaatctaatgagcatatgatgtcagctatgttacacgggaaacattgctcatagtttaaatgatctctgactgataaatgacatctggatagggagaaactataaccacctggagataagttatactttggacttgagtgtagtgactcttgtaattaagcatttcccctatagaaactctggaagctatgtttctggagatgtaacaagagtaactggctccagtgaggcatagagcttctaagcctgggagactcctttacctgcccaataccttctctgaatctgagctgccagttgtaggaggagaggaaggaaaagaccttctggatagctatat

SEQ ID NO: 476537 - DNA, 425 bp, Homo sapiens
tttctacatattaactagatgaccttgggcaggttacttaactctcaatgtctaggtttcctcakgcaaaacgagaataatagtagtactcatctgtggtggcactgctaaatgtctatttgatgtcaatttccttccttcttcaccaatatccaactccatagctttttaggcagctatgttgtcagatgaaagaaaaacaaaaagccttcatttctcaaccagttatgccactgggtgtccatgtgatatcgttctaaccaacgagatggagtggaaatctgaagtctgctagaaaatcttaggaaagttttccatttatttgcacttgttgcttttgttgtctttctactgggatgccagtgcgatgccttaagtggaccagtcattttataaccatggggctaaaaaacacacactgagca

SEQ ID NO: 476538 - DNA, 478 bp, Homo sapiens
  misc_feature (1)...(478): n = A,T,C or G
ggccagagtatttctgttttatttctctactgctcttcaatttctaatttatatttcaccttgtataggtgaaatatgtatgtagcatttttaaataaatattcatggaaatgagagcgagctgaaatttcagcagttggtgaatttgattcaaagacaaaaagcatggcctaaacagaggtaagaatatcgagagagttaaataatagggctggaacaaaggactccatagattagccaaaccacttataaacatttgctgtgatatgggagcaacaccataatattttgttgttataatatgccggtgatagtaactaaaataatcaagtgagattccaatgccagagcaatattgccaataacatacactagatttcaatcctctgctagtctctcctttgagactgtaagmtccaaggcaaaaggagagtctcttatttgtctttgctctccttagtgcctagacttgcagcan

SEQ ID NO: 476539 - DNA, 503 bp, Homo sapiens
tgctgcaggagtggaagaggccagtccagccccgactgtgaaggtctggcctttactcaaagcaactgtggtcctcagaactccgggatcatcccgtttcttgctccaacccctgggtcccaggtccccagcgcgcccaccccagtgctccgtgcttgctggtccctggagggcccccttactgggaacccttcctccccgtgaaggctgccggcgggacaaacagtgaggggtgaggcagggagggagactcacgttggggacctcccccaagtctgggtaacaccgtcttggccgcggcccgcgggttgggaaggtagggggcagtgagccgtagcggagaggctggccccagcccgccacgccgcttccccacgctcgcagccacgcggagccgcgtcctggtccagcctcacccacccagagcaagaggcggaggaactggaacagcgcccsggcccgtgggctgccactggccgcagcaacgggacgggtgagagcac

SEQ ID NO: 476540 - DNA, 608 bp, Homo sapiens
ctgtgacaagtgctacaaagaagatgaaaacatagtattygctactctttttccaacttttattttatgttctggggtatatgtgcaggtttgttacacaggtaaatgtgtgccatggtggtttgctgcacagatcctcccatcacctaggtattgagcccagcatccattagctattcttcctgatcctctccctcctctccccacaccctgtgacaggccccagtgtgtgttgttcccctccgagtgttcatgtgttcttattattcagctcctatttataagtgagaacatgtagtatttggttttctgttcctgcattagtttgctgaggatggcttccagctccatccgtgtccctgcaaatcacatgattttgttccttttaaggcttactctttacatcaatgtgtagtagcaactcaatttcccttagtaatcaggtcttgcatgataaatccagtccaacatttcagtctccctaagcctttagataccttcctcttcagtgtcccaaggtaattctggtatttcagcttcatttagcgtaggccaccctttgtttcatccttaactcaaccaaacccatcgagctgcaactctatatt

SEQ ID NO: 476541 - DNA, 634 bp, Homo sapiens
tcctaccagcctttgcctcttccttcaatgtggtttccatgggaatttgcttcagaaaagccaagtatgggctgttcagaggtgcacacctgcattttctyagctcttctagaggggctaagagacttggtacgggccaggaagaatatgtggcagagctcctggaaatgatgcagattaggtggcatttttgtcagctctgtggtttattgttgggactattctttaaaatatccattgttcactacagtgaagatctctgatttaaccgtgtactatccacatgcattacaaacatttcgcagagctgcttagtatataagcgtacaatgtatgtaataaccatctcatatttaattaaatggtatagaagaacactttgtggcatgcctgttttctctggaaactgtggttagacggattcccagaatggaccacacatctcttcagctcctgaaaactcacctccccatgagtccatggaaaaaattgtcttccacaaaaccagtccctggtcccaaaaagtttgagaaccactgcactagaagacagcctactagtggttaagtctcaatgtgtcaatgtatttaacagagagaacagagagtgttgcttcactcaacaggtggttcag

SEQ ID NO: 476542 - DNA, 634 bp, Homo sapiens
tcctaccagcctttgcctcttccttcaatgtggtttccatgggaatttgcttcagaaaagccaagtatgggctgttcagaggtgcacacctgcattttcttagctcttctagaggggctaagagacttggtacgggccaggaagaatatgtggcagagctcctggaaatgatgcagattaggtggcatttttgtcagctctgtggtttattgttgggactattctttaaaatatccattgttcactacagtgaagatctctgatttraccgtgtactatccacatgcattacaaacatttcgcagagctgcttagtatataagcgtacaatgtatgtaataaccatctcatatttaattaaatggtatagaagaacactttgtggcatgcctgttttctctggaaactgtggttagacggattcccagaatggaccacacatctcttcagctcctgaaaactcacctccccatgagtccatggaaaaaattgtcttccacaaaaccagtccctggtcccaaaaagtttgagaaccactgcactagaagacagcctactagtggttaagtctcaatgtgtcaatgtatttaacagagagaacagagagtgttgcttcactcaacaggtggttcag

SEQ ID NO: 476543 - DNA, 566 bp, Homo sapiens
ttcctaccagcctttgcctcttccttcaatgtggtttccatgggaatttgcttcagaaaagccaagtatgggctgttcagaggtgcacacctgcattttcttagctcttctagaggggctaagagacttggtacgggccaggaagaatatgtggcagagctcctggaaatgatgcagattaggtggcatttttgtcagctctgtggtttattgttgggactattctttaaaatatccattgttcactacagtgaagatctctgatttaaccgtgtrctatccacatgcattacaaacatttcgcagagctgcttagtatataagcgtacaatgtatgtaataaccatctcatatttaattaaatggtatagaagaacactttgtggcatgcctgttttctctggaaactgtggttagacggattcccagaatggaccacacatctcttcagctcctgaaaactcacctccccatgagtccatggaaaaaattgtcttccacaaaaccagtccctggtcccaaaaagtttgagaaccactgcactagaagacagcctactagtggtt

SEQ ID NO: 476544 - DNA, 437 bp, Homo sapiens
cctaccagcctttgcctcttccttcaatgtggtttccatgggaatttgcttcagaaaagccaagtatgggctgttcagaggtgcacacctgcattttcttagctcttctagaggggctaagagacttggtacgggccaggaagaatatgtggcagagctcctggaaatgatgcagattaggtggcatttttgtcagctctgtggtttattgttgggactattctttaaaatatccattgttcactacagtgaagatctctgatttaaccgtgtactatccacatgcattacaaacatttcgcagagctgcttagtatataagcgtacaatgtatgtrataaccatctcatatttaattaaatggtatagaagaacactttgtggcatgcctgttttctctggaaactgtggttagacggattcccagaatggaccac

SEQ ID NO: 476545 - DNA, 634 bp, Homo sapiens
tcctaccagcctttgcctcttccttcaatgtggtttccatgggaatttgcttcagaaaagccaagtatgggctgttcagaggtgcacacctgcattttcttagctcttctagaggggctaagagacttggtacgggccaggaagaatatgtggcagagctcctggaaatgatgcagattaggtggcatttttgtcagctctgtggtttattgttgggactattctttaaaatatccattgttcactacagtgaagatctctgatttaaccgtgtactatccacatgcattacaaacatttcgcagagctgcttagtatataagcgtacaatgtatgtaataaccatctcatatttaattaaatggtatagaagaacactttgtggcatgcctgtyttctctggaaactgtggttagacggattcccagaatggaccacacatctcttcagctcctgaaaactcacctccccatgagtccatggaaaaaattgtcttccacaaaaccagtccctggtcccaaaaagtttgagaaccactgcactagaagacagcctactagtggttaagtctcaatgtgtcaatgtatttaacagagagaacagagagtgttgcttcactcaacaggtggttcag

SEQ ID NO: 476546 - DNA, 492 bp, Homo sapiens
taatagactaagcatttccaagcatatgttttcttaartggtgagaaattggctttttaaaaatttggaagaccttttttcctatgtaagaacatgtggttttgtttttagtttagataattgatgtcttcttaaaagttggggatatttatacaaagaacatttaaggagcaactttcatatactgggcactatacttcctcagtgatacaaagattaatactgtaggatttttgcctctaagcgattcacatcctagggagaatttcacattatatgcttttattgatttaagtttttagaaatggaaataactccataattatgataaaaattatcttattaggttggttgcaaacagacaagaagagaaattagaataaagctagtccttgctaatacttaccattattgtatctacttagaagtttatgtttattgtaaataaataaataacttgttctcacctgtagacatgtttctagctataac

SEQ ID NO: 476547 - DNA, 492 bp, Homo sapiens
taatagactaagcatttccaagcatatgttttcttaaatggtgagaaattggctttttaaaaatttggaagaccttttttcctatgtaagaacatgtggttttgtttttagtttagataattgatgtcttcttaaaagttggggatatttatacaaagaacatttaaggagcaactttcatatactgggcactatacttcctcagtgatacaaagattaatactgtaggatttttgcctctaagcgattcacatcctagggagaatttcacattatatgcttttattgatttaartttttagaaatggaaataactccataattatgataaaaattatcttattaggttggttgcaaacagacaagaagagaaattagaataaagctagtccttgctaatacttaccattattgtatctacttagaagtttatgtttattgtaaataaataaataacttgttctcacctgtagacatgtttctagctataac

SEQ ID NO: 476548 - DNA, 443 bp, Homo sapiens
tctcaagtagtgccaacaatctctcaagaagatgcgttcgtttccctacatggactgtaccttttgtagggccttccctggcttgagtgtgtttgtgagcacaggcacacacgtgtgcatgtgcacatgtgcgtgyctgtgtatgcaggccgtattaggccattcctatgttgctataaagaaatacctaagcctaggtcatttataaagaaaagaggtttaactggctgatggttctgcgggctgtacaacaagtgtggtgctggcacttgcttctggtaaggacatcaggaagctttcaatcatggtggaaggcaaagggggagcaggcatgtcacacagcaaaagcaggagcaaaagagagagcagggaggtaccacacagttttaaacaaccagattttgtgataactcaccattgtgaggacagtaccaagccactca

SEQ ID NO: 476549 - DNA, 443 bp, Homo sapiens
tctcaagtagtgccaacaatctctcaagaagatgcgttcgtttccctacatggactgtaccttttgtagggccttccctggcttgagtgtgtttgtgagcacaggcacacacgtgtgcatgtgcacatgtgcgtgtctgtgtatgcaggccgtattaggccattcctatgttgctataaagaaatacctaagcctaggtcatttataaagaaaagaggtttaactggctgatggttctgcgggctgtacaacaagtgtggtgctggcacttgcttctggtaaggacatcaggaagctttcaatcatggtggaaggcaaagggggagcaggcatgtcacacagcaaaagcaggagcaaaagagagagcagggaggtacmacacagttttaaacaaccagattttgtgataactcaccattgtgaggacagtaccaagccactca

SEQ ID NO: 476550 - DNA, 630 bp, Homo sapiens
cctgacagttcttaggcacaagacagtcttcccctaggtttggactctagaattcacattatctgaccaggcaaattcccaaccaagaagttagtttaattcagactgactatctattatctgaaatgcatgggaccagaagtttccgattttggaatatttgcattacacttacctgttgagcaagcctaacccgaaaatacttaacctctgtaactcaaggctgacagtgcttccaggtcacacaaaacacatattcttctgtaaatgctgcaaataacattccaacaaacaggaaacctcaatcaaaaaaatcttaagaggccaggcgcagtagctcatgcttgtaatcctggcattttgggaggtcaaagggggagaatcacttgaggctaggagtttgacactaggctgggtaataaagggaggccctgcctttaaaaaaaaatttttttttgttttaattagccaggtatggtggggtcctgaaggctgaggcaggaggactgcttgaacccaggaggttgaggctgctgtgagcyacaactgcaccaccgcaatcctgggtgatgttgcctgggatgtagcctgggtgacagagtgagaccctatttcaaaaaaaaaaaaaaa

SEQ ID NO: 476551 - DNA, 603 bp, Homo sapiens
ttttgctcttgccttgtcttacaaaaaagacaagagttttcacaaacaaaattggctaagtattcgtaacacatttttaagaggcatttttatacatatatatataataatggatttggcttgtcctgtggtaaatatttctagttctctgaggttgctctttggcttggagcactttcataaatgcagaacatcctaaagcaggaggatttggacatttgaccctaatatcacacttragatactgaaaaataaactgtgtaaatgtagatagtgagtcacagcacaattcagggtttttaaacttaatttacaactatagaatatgaaatcctgctggtgccagcaatgttgctttagggactattctgtaacattttcaaagcttcaaaagcttttaagctgaaaagcatgatcagtgtctgcagtatgttggttctgttgttttatgggtcagataaaatttactttgtttcctttcatgtttttatacatcttgttgagtatggaataacagtctacactaatatttctttgtgatacaggttgaggaggaagagggtactacatacttaatattaaaattcatttgtataaaatagc

SEQ ID NO: 476552 - DNA, 590 bp, Homo sapiens
tgtttggtttagtgactttgcagtcatgcaaaggcacagaagggaaaccaaacagatttccttaacctttcagtccctagacaaactttttagctctttactttttcttttatttctaatgtaggcagactttttttttttaagtttactgttttaaatgaacacaggtcaaggttcacaggggatcaagaaatattattcttgtataatctgtttactttgacctaaataccagcttttaaatactaaccctggcataaaatactgctgtaaatggcagctcattgaatccaattttaagtgtgattgtttttgtttttatctgagcttccattgaacggtggtattttaactttttttcatcaagggatatattcagtatttctaagattaattcaattggtttttatgttgctctcaaggctagagctaatggtctgcagtcctgtgtgattatcatacgcattcttcgagacctctgtcagcgagttccaacttggtctgattttccaagctgggtaagtagtaygtaactgtatggtgtaaaaacatgtaggaaataattctgcagcttttatcctctcagttta

SEQ ID NO: 476553 - DNA, 292 bp, Homo sapiens
cacaatgcacaaacttccgcaaagagtggataaggaggaaaagtgtttctttcacatcttctgaacttygacttcgcactttgttgctgatttctgccttttgattattgtttaattctcctctagactaggacaactctatatctgatgaccgccatgaggggcttaatgacctctgaggcaggagtagttgagagatgttaatctcctactgtgtggcagatactctactggacacatagaatataaaattgaagaacaaggcatacttccttcagttaaacagaagaag

SEQ ID NO: 476554 - DNA, 292 bp, Homo sapiens
cacaatgcacaaacttccgcaaagagtggataaggaggaaaagtgtttctttcacatcttctgaactttgacttcgcactttgttgctgatttctgccttttgattattgtttaattctcctctagactaggacaactctatatctgatgaccgccatgaggggcttaatgacctctgaggcaggagtagttgagagatgttaatctcctactgtgtggcagatactctactggacacatagaatataaaattgaagaacaaggcatrcttccttcagttaaacagaagaag

SEQ ID NO: 476555 - DNA, 516 bp, Homo sapiens
ctcttgggaagatgatcgtagaagaatatgagaagaccttttaatctcctttctgatatttaattacacagctgccaaaaatctgaaatccaagtaaggaaatgtggctgagagtctcaacattcagtaggtacattttactcaattctccttgttttagtatgccactcctcccctcaagtgactctttgtctctttattccgttttattttccttctaagctctcttcactgcatgaccyactatattttcatctcttagtctatttttgtcttcaattagaatgtaaagtcaataataacaagttttatttttcttcactgttgtatccccaatgtctgacagctatgctttgcacatagtagctgctcaataaaaatgtatgtcatgacttaggttaaataatatgaaatttctgctattcatctggttttgaacttcaaaatggaaatctcttacatttcaaactgaataaaagaggatctgaatggctaaggattatcaccattttcctt

SEQ ID NO: 476556 - DNA, 388 bp, Homo sapiens
gctgccctacaacacgataaatctctatatactcacagatgtagaaatattctcggcctggcctgaattcaaatcctagagaaaagggagtgaagagctggaatttttcagagaacttcagcggtccatttggagagtgaggccggttacattcccatctcttgaaccctttggaagtgtggtcgcaggcactgtagccatcaaagttcaccatgtagaggacatagcgctcagtcttatcttctgggacggagtcctcatagtgagggcagaaaacatccaggtagtcmttgatacagacatcaatatggtagtcacccctctggaatctgttagaaaaagaaaaaaaaatgtgataattcatagagaaagggctttctgcttggaa

SEQ ID NO: 476557 - DNA, 488 bp, Homo sapiens
tgtagtttttttatgatactactgagatttttsaaatgtgaatgttaatcaaatattaagccttcttagaaacataaaaattaagaactcattatatatttcttaaaatgaagactctacaactactcaagctgtctcttgtatatagactttcacgtatttaaagtgacatatacatactgaaattataaagataatttttcatttgggaagtagtagtgacatctcttagtgcgaatataatttgtaattctcaacaaaatagatttctcatgtcctctggaacacaccaagccaaattcactcacgtgattttcacaacgtacctgagggtagaagtgccaactaatagactgtacacatcctcttacggactgaaacatctcacctaacaaaatatgcccacacaacagtgtcataggccaacccctattacatgatacatcatgtcctactcttttgctactgagtattgtggaagaaagaac

SEQ ID NO: 476558 - DNA, 635 bp, Homo sapiens
atgttcaaacaaggcaaaggcccacttgtaaccaatccggctgtttctgtacctcacttctgttttctgtacatcattktccgtccataagtcctctttggccccagggctacactagtcgctctgaacctagtctggttccacagactgcccaattcatgagtcattcgttgctcagttaaactcttaaattaattcgtctaaagtttttcttttaacagtatcaaaggttggtggcaaattgaggctgcggtttccctgtgtcagggggctcttcactcgcatgcatggtatatgagtgatggggcaagagaagccgtgtgccagggtagccactgccaggccttatgatgagacgaggagggttcctgctgtatttcttgtcctgtacctcctctgatgctaaggattagaccagagcttgtttttgtcctgagtggacccaactggatctgtaactctgttaacacgtctatttttcagcagtctcatcagggcgttcaacatataaaagagattaaaggggtattttattagcataaaacattttatgtttacatattcaatatttatatattattttgtcagaccaacgaagctgttctgctaaacacaaacactggaagttagagttt

SEQ ID NO: 476559 - DNA, 609 bp, Homo sapiens
gctcagatcctggtcggaggtggcctgggctttctggtcaacacagccgggaccgttgtcgtcgtggtgatcacagcgtctgcggtggcactgataggctgttgctttgtcgctctctttgttagatatgtggattaggtcaataaagagacaatgaccctaacctcagagacagtgaagcacatggcaggaagttaacattttctgcagctctgaatcttagggtctgcccattggacgcccactattgtgatttcagccgtggaatctgcccacctctctctctctctctctttttttttttttttttgagatggagtcttgctctgtcacctaggctggagtgcagtggcacgatcccggctcactgcaagctycgcctcctgggttcacaccattctcctgcctcagcctctcgagtagctgggactacaggcgcccaccaccatgcatggctaattttctgtatttttagtagagatggggtttcgccatgttagccaggatggtctcgaccttctgatctcatgatccgccccccttggcctcccaaagtcctgggattacaggcgcaagtcaccgcgcccagtcccacctctcactttaaac

SEQ ID NO: 476560 - DNA, 586 bp, Homo sapiens
catagtattcttctaggtatgaaatatatgtaaagtagtaaattaatttttgtcctctgatgacagtgaagtttttgacattacagtcatccttagtagtttcatcaacacattaagcagatgagtagtatttctaagccatatggaattcctaagttgagagcagagggaacactggagttactcatctgaagtctgtgggtgaaatttgactttaagcggtttacaattttaatggcagaatcaaggtcatagaggagcaagagacatatggtgatttaaacagctcctgatttcaagtccttctaggtcagctaaaatgcactacccagattcttcttccaaaaatgcatagaattatgagacatctcaaatagctactgaaagcaagctaacacacyggtatacttgtgctcacgctttcattctccctttgctctatcatcctctctctctttctctctgctttcctggtttctttcatgcagtcagcaaatatttattgagcacctgctttgcctctggtgctggcaatacagtaaaaaaacaaaacagacacggtgcctactcttcttgaaatgtatac

SEQ ID NO: 476561 - DNA, 586 bp, Homo sapiens
catagtattcttctaggtatgaaatatatgtaaagtagtaaattaatttttgtcctctgatgacagtgaagtttttgacattacagtcatccttagtagtttcatcaacacattaagcagatgagtagtatttctaagccatatggaattcctaagttgagagcagagggaacactggagttactcatctgaagtctgtgggtgaaatttgactttaagcggtttacaattttaatggcagaatcaaggtcatagaggagcaagagacatatggtgatttaaacagctcctgatttcaagtccttctaggtcagctaaaatgcactacccagattcttcttccaaaaatgcatagaattatgagacatctcaaatagctactgaaagcaagctaacacaccggtatacttgtgctcacrctttcattctccctttgctctatcatcctctctctctttctctctgctttcctggtttctttcatgcagtcagcaaatatttattgagcacctgctttgcctctggtgctggcaatacagtaaaaaaacaaaacagacacggtgcctactcttcttgaaatgtatac

SEQ ID NO: 476562 - DNA, 464 bp, Homo sapiens
gctgatttttgtatttttagtagaaacggggtttcaccatctaggccaggctggtctygaactcctgacctcatatgatccacctggtttggcctcccaaagtgctgggattataggcgtgagccactgcgctcatcctgatcatctcgtctctctttttttttttagagacagggtctcactctgtcacccacactggagtgcagtggcacaatcatagctcactgcagcctccaaatcctgggctcaagcaatcctcctgcctcagcctccagacatatgggcatgcaccaccatgcccagctaatttttaaatttttagtagatctggggtctcactatgttgcccaggctgttcacaaactcctggcctcaagtgattctcctgccttggcctccgaaggcgctgggatttcaggcatgagccaccatgcccagtctcatttctgttttatctagaacat

SEQ ID NO: 476563 - DNA, 464 bp, Homo sapiens
gctgatttttgtatttttagtagaaacggggtttcaccatctaggccaggctggtcttgaactcctgacctcatatgatccacctggtttggcctcccaaagtgctgggattataggcgtgagccactgcgctcatcctgatcatctygtctctctttttttttttagagacagggtctcactctgtcacccacactggagtgcagtggcacaatcatagctcactgcagcctccaaatcctgggctcaagcaatcctcctgcctcagcctccagacatatgggcatgcaccaccatgcccagctaatttttaaatttttagtagatctggggtctcactatgttgcccaggctgttcacaaactcctggcctcaagtgattctcctgccttggcctccgaaggcgctgggatttcaggcatgagccaccatgcccagtctcatttctgttttatctagaacat

SEQ ID NO: 476564 - DNA, 464 bp, Homo sapiens
gctgatttttgtatttttagtagaaacggggtttcaccatctaggccaggctggtcttgaactcctgacctcatatgatccacctggtttggcctcccaaagtgctgggattataggcgtgagccactgcgctcatcctgatcatctcgtctctctttttttttttagagacagggtctcactctgtcacccacactggagtgcagtggcacaatcatagctcactgcagcctccaaatcctgggctcaagcratcctcctgcctcagcctccagacatatgggcatgcaccaccatgcccagctaatttttaaatttttagtagatctggggtctcactatgttgcccaggctgttcacaaactcctggcctcaagtgattctcctgccttggcctccgaaggcgctgggatttcaggcatgagccaccatgcccagtctcatttctgttttatctagaacat

SEQ ID NO: 476565 - DNA, 464 bp, Homo sapiens
gctgatttttgtatttttagtagaaacggggtttcaccatctaggccaggctggtcttgaactcctgacctcatatgatccacctggtttggcctcccaaagtgctgggattataggcgtgagccactgcgctcatcctgatcatctcgtctctctttttttttttagagacagggtctcactctgtcacccacactggagtgcagtggcacaatcatagctcactgcagcctccaaatcctgggctcaagcaatcctcctgcctcagcctccagacatatgggcatgcaccaccatgcccagctaatttttaaatttttagtagatctggggtctcactatgttgcccaggctgttcacaaactcctggcctcaagtgattctcctgccttggcctccgaaggcgctgggattycaggcatgagccaccatgcccagtctcatttctgttttatctagaacat

SEQ ID NO: 476566 - DNA, 386 bp, Homo sapiens
ttttttttagccacgtagattaagattcttattagaatatcacagtttagagacaaagaatggatactttatggttgctaagacccaagaattgaaattggagttgcagtgacaattcaaatgaactttgtgtcccatttcataagaagttaagacagttcagtttccgtaaaagactgcttgcctcctctagaaaagcttgtgccaacccggtatcattcccgcttctccccaccaacccaccacccccagcctttagctcctagttaactcagtgctgggcatgctgctttctctataacttacatggactttttwaaaaaatggaatcacatgtttcagtaataatagcaaggcaaaaactttaaaaacatttacaacactgg

SEQ ID NO: 476567 - DNA, 574 bp, Homo sapiens
attgtcttaatatgttgacatgcygcatcacaaacacagctactgtatgctcttgtcttaaggacatttcatccctacattaacattactgcacatctgagtgatccagaaattgtgctcaatatcagtaggacttagtaaaagtaagagcataaaagtaaatatggtataagcaaatttaatagaactcaaaaatatcatgtagcaagaaggagcatgcaaatgacggaatgacagcgagggggactgaatggggaaatacggaaggcaaggagtgtatagaggtgcatgtgaacagccatgcagtgctgtgcaagccacgggaaaagggcatgaaccatcttcagatttttcctgtgtctccccaaaggtttcttatggaatgggtctggtatgttcctcattttgtaatgcaccaagtgatgtgctaagtaagaatgtgatgctgtaatggttaattcactcatctaatatgtatgatactataaataactcccaaattctttgtttgagttacaatggtgactaaagtatacatgtatttttgctaatatataatatgaatctgtgtgca

SEQ ID NO: 476568 - DNA, 574 bp, Homo sapiens
attgtcttaatatgttgacatgctgcatcacaaacacagctactgtatgctcttgtcttaaggacatttcatccctacattaacattactgcacatctgagtgatccagaaattgtgctcaatatcagtaggacttagtaaaagtaagagcataaaagtaaatatggtataagcaaatttaatagaactcaaaaatatcatgtagcaagaaggagcatgcaaatgacggaatgacarcgagggggactgaatggggaaatacggaaggcaaggagtgtatagaggtgcatgtgaacagccatgcagtgctgtgcaagccacgggaaaagggcatgaaccatcttcagatttttcctgtgtctccccaaaggtttcttatggaatgggtctggtatgttcctcattttgtaatgcaccaagtgatgtgctaagtaagaatgtgatgctgtaatggttaattcactcatctaatatgtatgatactataaataactcccaaattctttgtttgagttacaatggtgactaaagtatacatgtatttttgctaatatataatatgaatctgtgtgca

SEQ ID NO: 476569 - DNA, 511 bp, Homo sapiens
catttttttttttttttgagatggcatgatctcggctcactgcaacctccacctccccaatacaagtaattctcctgcctcagcctccctagtagctgggataacaggcacccaccaccacgcctgtctaatttttgtatttttagtagagacggggtttcaccatgttggccaggctggtctcaaactcctgacctcaagtgatccatccttctcggcctcccagagtgctgggattacaggcgtgagctacccacccagcctattcccttgggcttttaaaaagccatttcggccaggctggtcctgaactcctgccctcatgtcggccaggctggtcctgatcttcccacctcggtctcccaaagtgctgggattacaggtgtgagccaccgtccatggcccatgatgttgttttgaagactcagtgaggacatgtgtgtactagacytggcacacaagagttggtcaaatacatttactgctccccacccttctaataaaccaaatg

SEQ ID NO: 476570 - DNA, 633 bp, Homo sapiens
tgggatagtagggggaggcactgggatagctaagcagggaggggatcctggggctccagggatgggcagagactcagatgctcagatctggtatggagccccatgactgaaccccactgagattttgggttctttaatacaacagtgaacctttcaatgaccatgaaggtgtctcagcctcctgagtagctgggattacaggcgcatgccaccatgcctagctaatttttgtatttttagtagagacggggtttcaccrtgttggccaggctggtctcgaactcctgacctcaagcaatccacccgcctcggcctcccaaagtgctgggattacaggcatgaaccaccacacctggccaagactccaactcttaaacaaacaaaaagacactcatattggattcaagcccagctaatgacctcatcttagcttgatcatctgcaaagaccctttccccaaataatatcacattcacaggtcctggggttgaagatttcaatatcttttgggagcacaaaattcaaagtataacaatgatggagatgtagagaaatggacatgttccaaagacatttaggaggcaaaatcaatgactcagggatgggttgcttatggccagttggggaaagaaa

SEQ ID NO: 476571 - DNA, 628 bp, Homo sapiens
ctacaggaaaacagcctgaaaaatgtccatattaattaaggtaaagaccaggttgttgtaaccaacagatcccaaaatgcaatcattcaaataaaatacaagtttctttctttcttttgtgtccctcttgaagtagacagttagtccagcactgcaaggtggttcccctccttgtggtcaatcatggacccagattccttcaaactcgttgctctgctatagttcagtggttctcaaagtgcagcctccagacctgcagcatcagcatcaccttggaactttttttttttttttttttagacagacagggtcttgctctgtcacccaggctggaatgcagttatgcgatatcagctcactccagcctcaacctcctgcacccaagcaatcctactgccttagcctcccaagtagccaggactataggcatgcaccacacayccagctatctgaaacttgctaaaaactcaaattcttaaaccccaccccagacctactgaatcagaaacccaaaacctgtgttttaacaaggcctgcaggcaattctgaggcatgttctcagcagagcatcactaccctacagtattatcatgatcttcatggtcaaagagcagaaggttttgtacag

SEQ ID NO: 476572 - DNA, 611 bp, Homo sapiens
aaagctccaggcctcccttctgaaagcctacaaatttctccactaatcctgtttggtccttcagtctctctcctgtctccttyccatccctggtcctttattctcctagaactttgattcaccaattaaagaactcacttctgtcccagggagtaataccacaatactgggggagaggactatattttgaaaaagcacatcctgtatattaaatttatattaggaaaatagcataattgtttcttgtcttttcatatacaagggtgggagtggggacagaagttcttggctggtaggaatttgcagaagagtgatttttacagaggatagccctctggcgtggggtgggagatccgaatcttgtttgaggaaggcatccttatggtatgaaggcaggtaggtatagagttttaaggttgagaagcaccacactagaggttggtctgtggctctcagtatctctccatgttatgatattgcttccccggtcagcacagggacaaagctgttcttccctcaggactctaggcaaagcctattctactctgactctgatccccagtgagtttctctgaacaaaggatgtgcttccaggaggtgttatataccag

SEQ ID NO: 476573 - DNA, 649 bp, Homo sapiens
tcagagatttttattattacagtaaactggacatattgactaccacagtgacagtattttgagataaagtaattagaactttttattgtttctgaataatgagagaaaattatggaagctgcttgtgattttatctaagagatggggaaatcctggcttcacagaatgggtctgagtgtgccagaaccatgcagggggagtaaactcgctgaaacaagagtcctacctaacataccaattttacaataattaggtacagaaacagactcactatattaacggaagctctctattcactctgtaaaacatattgactggtatcaaagcaaactttgctcctggtgtatgatagaacttctgtcccctgagawgaatgctggccaggaggcagttacatttgttccaaacctgacttgccagttgtattctttaggtagttacttaagttaataaaatgttattaaatcaacgggtagaatagaatgttgcacctatgaacaccaagtcgaatattttggaaagtcttgattaaattgagtggaattgggggtatatataatagctgcaaaagactgagaaaagttgtaaaaatatagaagaactacacattcagatttttccacaaatgtctttaaagtcttcctttgaa

SEQ ID NO: 476574 - DNA, 649 bp, Homo sapiens
tcagagatttttattattacagtaaactggacatattgactaccacagtgacagtattttgagataaagtaattagaactttttattgtttctgaataatgagagaaaattatggaagctgcttgtgattttatctaagagatggggaaatcctggcttcacagaatgggtctgagtgtgccagaaccatgcagggggagtaaactcgctgaaacaagagtcctacctaacataccaattttacaataattaggtacagaaacagactcactatattaacggaagctctctattcactctgtaaaacatattgactggtatcaaagcaaactttgctcctggtgtatgatagaacttctgtcccctgagatgaatgctggccaggaggcagttacatttgttccaaacctgacttgccagttgtattctttaggtagttacttaagttaataaaatgttattaaatcaaygggtagaatagaatgttgcacctatgaacaccaagtcgaatattttggaaagtcttgattaaattgagtggaattgggggtatatataatagctgcaaaagactgagaaaagttgtaaaaatatagaagaactacacattcagatttttccacaaatgtctttaaagtcttcctttgaa

SEQ ID NO: 476575 - DNA, 592 bp, Homo sapiens
tgtatacttggtgtataatgtgtgcagcattaggggttccccaatattagttccagaatatctacctataaaatgatagcaatattgggatcgatgatgtctacaacatactactatttccttgtggtgcaagaaaggacgcgggctatagagaaagtcacaagtatcaagtgttcctggggtttagggacataagactaaagaggacaagtattattgaggtacttcagggcaagcatgtatgcctttgtcccagtctttttagggaacatttaggttcttcagtaacctaggctagcaatattagcatcaaaaatcttattttaagctggctggaaggtaattttgaagagtcattttgcaaatttatcctaatatcttatgtgatcctttcttttaaccaaatgtaagtgtgaagagacagagattgtcaccaggaatagagcactaatgtacagcaatagacggtagaaaatggtggtcctttcamtgagccactacaaagccatcttgttttaaattacctaaaagtgattctccatgtctgggaattttagaattacgtgagaggcttacagctttttaggccaca

SEQ ID NO: 476576 - DNA, 538 bp, Homo sapiens
taccatattcttgacccagttttctttcctaccaaactgtgtccctgtgtcagtaaacagaacaataagtatgtgtgcatccctggcttttctcacttggttcctctgtcttgattgacctttctttctaatgctagatcaactaaagtcttactcatcttttcaaggctctgctgaaatatggctttatctgctgcttttccctccctaagctatatccatccaacctttattaagcagaacacaacatggcagaggatctgtagttctttttttatatatcactattaaagcctttgttacaaagaagagtttagctgttttagtccctctttaactctaacatttatgccaagtttaaatgggtagtaagttccttgaacgaagagatcatatcctattaatgaccatctgctgagcaccttgcatataggataggcttccataaaagtctagatttaaaacaatttgtttaaaggtttgcttctgttytttttgtttgtttgttttgttttgttttttcttgagatagggtctc

SEQ ID NO: 476577 - DNA, 586 bp, Homo sapiens
gtgacttttgaagaacaaaaggctttggcaacagaaaacaattgttctgggtgatttctagaatggtttttgttgagtctctgaacatcctaaatattggtttgttattcttttccagaaagaaaatgaatttgactggttcacctgtgtactgagtattgataaactttgaatttttttaattgccttcaattgggagagaaagctttatatttgtaagaaatatatttgataaagtttcttaaagcaacaccaaaaaaacaaaagaaaagctaagtgaatttttgcacattctacacacagtgcctgtaaatctcatttgtattttcagtttgcccttaattttttttgttagtgtttagaaaacaatgttttaaacattcttcagtgttctgatttcttattaccccctttcctcttgggcttttgaactgtatttgatgttgctttgggataatgttwataagtcaaacataagatattgtacattgggcacatatctcctcttgggctgctaataataaattaataacaggtaacctggacaaaccaggaagcaccaaaccccttttcagtttgaactctt

SEQ ID NO: 476578 - DNA, 615 bp, Homo sapiens
tgccagtttcactgggcccgtgggggagcaatagcactcaatgagagggacggggagtgaagtttggatgtttatttgttcggcatcctctcagggaaatccttacaaggtggcggtgtccttcactcaaaggccrcagctctgtcggacaggcttttccacattgtgctggctctctaggttccagtgcttctccctggacttgccccttcaggattgcaaccacttcctgtgtttaccagccctagggtactgtgttttactttgtggcttcctgacatactgttcacacatttgtaaacaatcactgaatgaaaccttcctcaaatttcccaatttgagtttgctatttggttcccacgtaggtcctgctgatgtacgtatgactcagctctgatgagttgtgagcccagtgttgattctcctccttttcaagagaagctgaaatcgaagtttatatataaaaattccacttgtttttatcgtaaattcaattttttaaatgcactattcagagcaaaaaaatatctccgtaggccagatttggcccacgcagttagtctgcaacctctgccatttatgataagaaataaatcagatgaaggagaggccact

SEQ ID NO: 476579 - DNA, 529 bp, Homo sapiens
ttttctgcatcctgcttttgttgctcctccttatgtttggaaaaggtatctcattctattgaattactaacctacagatatttctatttttcaattgaaggccatgttaaattgttcccaatatttttgctatcctaaagaatgtttctctgaatgttcatgtcagaatttcctaggacacatggatgaaattctctctatgtcatatacccaggaggggaattactaaagggtagggtacgcaggtytgcacatcctccacttgaatagatagtgccaaatggctttttgtgtcttgtttaagaaacacttactttcaccagctcatgaagatattatcctgtattttattctaaagttttacagttttacttttcattttaagttctttgaaccacccagaaatgtagatcttcctccctccctcaccccagtgtgaataagcagataaatagtttctccgggccatttagtgactggtccaaacctctctaccaacgaacaatcctcctgcttcagcctccccagc

SEQ ID NO: 476580 - DNA, 470 bp, Homo sapiens
ctttgtctatcttcttaattaaggtaagttcatcattcatgaggctcctcaatccagagagcaagttgactcccagggaattctctcaccaattcagagtcagaggctgttactgcatgagtatgtctcactccacagctgaycatcagcttcctgaggagagggcgcattgcacttctggttctccctcactgtgctttccatgcagtatgttggccacaataggaactcaataaatacatgctgaatggaaggaaacaggacctacctagcatgaagaaagaaccatttcttaccgcacagggttcgaaagttggctgaaggcaaaaatgaaaatgaacaccagattttccagcacatgattgaattgcatttgatggtattgtcagggaggcttctttggactaatagaaataattaaggaagacagactgcttcagacaccctaggggctacttagctctccagtg

SEQ ID NO: 476581 - DNA, 470 bp, Homo sapiens
aatcctgtagttgttcctttattttgcctaaaaggttgaattttcttccttaactttcccacaaaatcattcatacaatacctttgtgtgtgcaatgagcttttgccaaggttgtggtgagatcagaggcaagccaattacagcaatacaaacagactaaagtactgttaggcatccctgttgctgcaggtttccaacccaccgctatgttgctggtcatcctttctttccctcttgtcattgttcctgcctccctcaaagtcctattcagcttcctccttagtggccytgcctctttattactgatgccctgaaagttttatctgcacctcagtttatcaaggatttttctacacaaagatagtttctctctaaaatataagtataaaatattttccccattaaataataaatgattgcatcagagtaatagtgtttaaaaagaactttgagagattcattgtagtgat

SEQ ID NO: 476582 - DNA, 574 bp, Homo sapiens
ctgaggtctaatggattccaagtacttaaataggtgagcggcgcgcaggggcgagttgcaagccctgggatccttccagctcgccgcttcccctcccaggggctcaggtttctctttcatctgtgaggtcctctcccgcccggacgccggggcccgccatccccaacgtccaccgcgagctcccyagatccatggtctggagcaggtccagaagacgcacctggcaggacgccccgggcgccacagtcgccctccacacgggccaccccaatcctgccgcggctccgtggctctccttacctttacctgaggtgaagcaaggacgtggaagcagctacggcgcgctaccaagcacctcacaccgctctcaacagtactgctcagcctcccggcccgccgatgcgcaggcgacagcagccaacttgtaagtcaccgctggtcgcagccaactggaaggcacccagcgcctcagggcaaggcgggccgagcccccagccccgccccctggcccgatcccgggggctccggggagggggggctgagaggaggtggccggaacaacgtgcgcttgttc

SEQ ID NO: 476583 - DNA, 619 bp, Homo sapiens
tctaacttcttgtttatacattcatagttctcttggctatctggtctttaccgaagaagtgaagtgtcagcaggaatacatagtttttatgtactaggaactgtctcattatcagtcatcaggacagctgcctcctggtagacaaaacagttgagcaagataataactcaactctgtgrctgcaggtacactttttttatatcagtccaactgtgtagtcaagtgaggtcatcaactgatgcttattcaatgttacattattgtgtgtgtatcaggggttttgagccactagaagatatttatttaaggaagtgaagaacagaagaaatgagtgatgggaaaattcctaaatatttatggtcctattattcattaatctctctatgatattaggtttaattttaattataatggaaacaatcaaatctttatttggctgtaaccagttttaagaagaactaaaaaaagagagaaaaaagagacaaaggcaataacgtaggtaaaatgaaagctctaaggaaaggaatgtgattattttctctagaaatagaaaagtgagttcaaactggttgaaaaaaatttaagtttttactaatcttccaaataccagagaacaggt

SEQ ID NO: 476584 - DNA, 502 bp, Homo sapiens
aaataatatttaaacataaaagcaaaatgcctcactggagagctaagtagcccctagggtgtctgaagcagtctgtcttccttaattatttctattagtccaaagaagcctccctgacaataccatcaaatgcaattcaatcatgtgctggaaaatctggtgttcattttcatttttgccttcagccaactttcgaaccctgtgcggtaagaaatggttctttcttcatgctaggtaggtcctgtttccttccattcagcatgtatttattgagttcctattgtggccaacatactgcatggaaagcacagtgagggagaaccagaagtgcaatgcgccctctcctcaggaagctgatggtcagctgtggagtgagacatactcaygcagtaacagcctctgactctgaattggtgagagaattccctgggagtcaacttgctctctggattgaggagcctcatgaatgatgaacttaccttaattaagaagatagacaaag

SEQ ID NO: 476585 - DNA, 608 bp, Homo sapiens
accaaactaattttttaatattaaaaatggatagaattttaaacctgaactatttatgatcagaattataaataagaatttcagtaaggtcataaatatctgctcataaaccaaggtcaaaggagataattctctttactgtagctgaacagcatccatttcttggtctcattttcctctcaataatacgatcttcatctatttccaaccttttgatttaaaatttttctggtgaaaattactaatatcttgaatgaaattaaagcagacacagaacaaaataaaacacaatatcttaatttaggctttctgtaaaaattaccaaatagtgacataattatagtggtacaggaagtagaaaatgagattgttaatatctccattattaaaaacaytaaataattctgtgcaaaggaaaagacgtttccttgtaaaacacagtttttttcttcaattttatgatcaagtatggaaatatttcatgacttcacaagaaagcaatgtttctcaaccatgaaactgggtcagtgttctttctcctctaatataatcttatacaaatttttactgcgtttgacacggtattaaaagatctgttcattttcaac

SEQ ID NO: 476586 - DNA, 538 bp, Homo sapiens
gctgacatccaccctctcaagaggagatgtatggacagaagacctggctcagaaacactgctctatgaaaagggcagatagttatgtaagaattttgcaaaaacttgagaaattaaaataagggagactatgaatgcaaaaacattaactgtcaagcaagtaagagataattcaaagaattttttaaaaagatgtagtccacataacttaaatcatgaggaagactggcagatgacagcatcagagtggatttcctaaataactgaggaggtgactgggaaaactgagccacctaccaaaacagctttacagagccaatgcatctcaattgttgtaaaagaagatgagttctagaactcttatttactatggagttttcaaatacattgaacatcacttaatgttttcctcaatcccaagcttcttgtaaaactttgaccttgccaaccatggcaccttagaggcagatgaaagcttacctaytttatggaatttcagatttctaaatatagcacatgcaatacagggaatgcaccca

SEQ ID NO: 476587 - DNA, 669 bp, Homo sapiens
tgagccactgcgcccggcctacttggccaaattcttgcctgatcgcctctccacccctgctacgtgtaatagaaaggtagggccatgttggagagggatccaacatttattatccccattttacagatgaagaagttaaggtggccaggcatggtggctcatgcctgtaatcctagcactttgggacactgaggtgggtggatcacttgaggtcaggagtttgagagcaatctggccaacatggtgaaaccctgtctctactacaaataaaaaattagccgggtgtggtggcgtgtgcctgtaatcccagttactcgggaggctgaggcaggagaatcgcttgagcctgggaggcagaggttgcagtgagctgagatcgtgccactgcgctccatgctaggtgacagagcaagattccatctcaaaacaaaacaaaacaaaaaaacaagaagttaaggattgcagagcataagtatcttctatggggctacccaactaggtcgggacagggcagggatttgaacctaggagctcttggattgcaatttttcattcacccctccctctccacccttcctgtcttcaagcctgagcaggtgatactgcattttgtaccgtatgactttwaaacagaaccacgagttcagaactttggttaggtcctgcccg

SEQ ID NO: 476588 - DNA, 581 bp, Homo sapiens
actcctgacagttctttattgctttcccacctctgccaaggtcaaaaatggaacttgcttcttgttctcgtatcactcagactaagcagttgatgtaacagataacccccaaatttcagtgatttcacatttaatctgtaaaaaatgaggatttgtttrtagccccaaagacagtctagtttggattatttgaggacctagacttcacctgcacagtggtttcaccatccatccccccatggcctccatggtaccctctgattcaggctcagcaggagcgggagaggatgcataggactacatgttttctgggccaggactggaagcagcatatctcagatccaacctctttaccttggcaaaaattcaggatgtgcaggacgaggaggaaaatgggagtagtgactatttagccagtctttgccacatcccggttcatatctcactccgtcatttataacctgtaattaaatctttagtgagtacctgtcacaggttgagcagtcttctagggcctctggttaccagcaatgaaaaaagccccatttggtaaaatacagtagttggattcattatctctg

SEQ ID NO: 476589 - DNA, 581 bp, Homo sapiens
actcctgacagttctttattgctttcccacctctgccaaggtcaaaaatggaacttgcttcttgttctcgtatcactcagactaagcagttgatgtaacagataacccccaaatttcagtgatttcacatttaatctgtaaaaaatgaggatttgtttatagccccaaagacagtctagtttggattatttgaggacctagacttcacctgcacagtggtttcaccatccatccccccatggcctccatggtaccctctgattcaggctcagcaggagcgggagaggatgcataggactacatgttttctgggccaggactggaagcagcatatctcagatccaacctctttmccttggcaaaaattcaggatgtgcaggacgaggaggaaaatgggagtagtgactatttagccagtctttgccacatcccggttcatatctcactccgtcatttataacctgtaattaaatctttagtgagtacctgtcacaggttgagcagtcttctagggcctctggttaccagcaatgaaaaaagccccatttggtaaaatacagtagttggattcattatctctg

SEQ ID NO: 476590 - DNA, 497 bp, Homo sapiens
ctctttgaaatcccacattcttttttggatttaggtattaaccccttggtgtgaggagaaagataattgtcaacacacttaggagagaaatcatgcagtaaagctgacccgacatagactaacttaaaactaactagttcattagtgctaacttagttcattagtgctttatctccttgtgtgtgtgagtgtgtgaggggatcaattatatacataagacaaagaccacctaggaaatgtttgagaaactgtgcagtgaggatgaatcaacaagtaaatatcatgagaatttcttagattgaagaaatattactcctatttggtgtcaactctgtgctggccttttcactsaagttctctgatgtaactgcccacagtaatcctgtaaggtatggctaatcatttccattttatagattaggaaaccaaggtcaaaagtggtgaattgatttgaccaaaatcacagacccaggaatttcctcagccaagagcataca

SEQ ID NO: 476591 - DNA, 497 bp, Homo sapiens
ctctttgaaatcccacattcttttttggatttaggtattaaccccttggtgtgaggagaaagataattgtcaacacacttaggagagaaatcatgcagtaaagctgacccgacatagactaacttaaaactaactagttcattagtgctaacttagttcattagtgctttatctccttgtgtgtgtgagtgtgtgaggggatcaattatatacataagacaaagaccacctaggaaatgtttgagaaactgtgcagtgaggatgaatcaacaagtaaatatcatgagaatttcttagattgaagaaatattactcctatttggtgtcaactctgtgctggccttttcactgaagttctctgatgtaactgcccacagtaatcctgtaaggtatggctaatcatttccattttatagattaggaaaccaaggtcmaaagtggtgaattgatttgaccaaaatcacagacccaggaatttcctcagccaagagcataca

SEQ ID NO: 476592 - DNA, 638 bp, Homo sapiens
tgactcaggtacttaaaccaaacctacagaaggtgttgactctcatacctgaaactgggacatgtgtgggattgttaatttcatttcaggaccttcctgctggtgtaattctgatgtatgcttctgcccagaatctgagcgatttgacttcccagcctcggtccagcccccagtagggattatgacgtatcacttggccaagcacttagctgatgtgacctattctcctgccttggctccgcccatagaggacactgtgatgcactgtcaggccctgcacccaggttatgtgatttctgcctgtgccctgaccacattggctattttgacatattgcactgtccaacactcaagtgatgttacacttcttcctgtgcccttcctgcagtggacattatgaaatatctctgtgcccatcatccatgtatgttgactctcttctgcatgcattctgctcacagggggattgggacatatctgggctcagcactctgctgatgtgatgcttctctctctytttttttttttttttttttttttttttttttttttttgagatggagtcttgctccatcacccaggctggagtgcagtggcacgatctcggctcactgcaatatctgcctcctgggttcaag

SEQ ID NO: 476593 - DNA, 453 bp, Homo sapiens
ctgagactgtggtctctgcggttaggtctgggttcaactcctagctccaaacccacctctactactcacgggctggatgtcttcagggatgaactcctcagcttctctaaacgtgtgtccataggtggacctcctctgcccactcagaatagtctgtgaccgcctgtttcctggggctctgatgtaacaagagccccatgcctgccactctcagcacccattatggaggggcttgctgggctgggtgtggagttctgtggagggcactggagccctgtactgaaaggagagagcccacagaaacaaagagggcaccgggccctcgttgctcattctccctccctctctcctttcttcacatggggtccacctgctgagcaagagagacatggaggtggaggatgggaacyggagatgccttctgcaacaccttatccattccttccttcattc

SEQ ID NO: 476594 - DNA, 512 bp, Homo sapiens
tgctcattgccacatgcagctcagcctgggctacacagccaggtgtcagatgtgtctctgctgatctgagtctgcctgtggcatggacctgcatcttccctgaagcatctccagggctgaaaaatcactgaccatggtaaggaccccgcaacgctgagctcatggacgggctgaaggagggagggagaccccatggggaggctctgagagggaggaggtcaccctcgcctgaaaggggctgactcrggaaggcaccgggtctatttgctgctgtgtcccggctctcagtgagataaagataaatcaggcagacagtggcccggggaagggagaccccacttctgtctgaaatgtctgcagagagcctggtgcctgtagtctcaactacttcacttcagccctggggaaatgagagccaggctcctggggagagcagttcccctttctgtgggctgagaatgagaaaatcctatgacaagaaggacccagcctccgagctgccacaccctgtg

SEQ ID NO: 476595 - DNA, 483 bp, Homo sapiens
ccggagctggagcccagcctgattttcagttggccacatttgtctctgatctctgagccccacttccaacccatgtctctaattcccgccgtgcatcccagacagaatctgatgcccagtagagctgagtgtgagctccaatagggccctagatgctgaccccaaggtgatggcagtatctacgtacccggcatggagacagtggctgccagcccgcatgcccctgaggctgcaggtcccacacccacagcggggcgtcgcacgatccttgtgcccaccgcctcccatttctctatgcagcttttacctgatttgggtcacggatacaaaacacacaggaattcatcagtcagcgggtgtgagggagacgggggtcttgcgtgagctgggactctgtgcccagtgtcctgaaggagccaggggtcctrtgtgagctgggactctgcccagtgtcctgagggagccaggggtcctgtgtgagcc

SEQ ID NO: 476596 - DNA, 483 bp, Homo sapiens
ccggagctggagcccagcctgattttcagttggccacatttgtctctgatctctgagccccacttccaacccatgtctctaattcccgccgtgcatcccagacagaatctgatgcccagtagagctgagtgtgagctccaatagggccctagatgctgaccccaaggtgatggcagtatctacgtacccggcatggagacagtggctgccagcccgcatgcccctgaggctgcaggtcccacacccacagcggggcgtcgcacgatccttgtgcccaccgcctcccatttctctatgcagcttttacctgatttgggtcacggatacaaaacacacaggaattcatcagtcagcgggtgtgagggagacgggggtcttgcgtgagctgggactctgtgcccagtgtcctgaaggagccaggggtcctatgtgagcygggactctgcccagtgtcctgagggagccaggggtcctgtgtgagcc

SEQ ID NO: 476597 - DNA, 606 bp, Homo sapiens
gagaaagtggggcagagaggaaaatggcacccaaggatgcagcatcaagaacaggccccagggggtgctggcttggccccaagagggagctctggaaggtttagagagctrgcctgatcagaggcaagggggccgggcgccgtggctcacactcgtaatcccagcacttgaggaggctgaggtgggaggatcacttgaggacaggagtttgagaccagcctgagcaacatggcaagaccctgtctctacaaaaaaaataaaaaacaattagccaggctttgggacatgcacctgtagttggagaggctgaagtggggggattacttcagcccaggaggtcaagactgcagtgagctgtgataacgccactgcactccagcctgggtgacagtgtgagaccttgtctcaagaacaagcaaacaaaaacaaacaacaatgaaaaaagaaaaaacaattaaaaagaagcaaggggacatttacacctacccccccctttgttagtggtggctgatcctggggtgatgtaactcctgaggcatttttagccctcagtgcaggcaaacaaggtcagtcagggcagctggcacagagacccaaggaggctga

SEQ ID NO: 476598 - DNA, 555 bp, Homo sapiens
caggggcaggggagagactctctccccaccacccggctcaggccccagcacagcccggcctctggcctcactgrcgtctgtgcccagtgacgcaggcaggtgagctcctggcaaattagcattgcaggctgtgctctctcctcctgctctgctgcagctgggagtgtgcagagactggaggggatgacagtcaccctctgttttctgtggtggctctgttttctgtggtgctggatgcacctctgttttctgtggtggctccaagagagtgcacggtccctgctgattgaaagaaggatgaagggcagaagaggggcggggagctgtgtgccctaagatctcattgcctttttatgccgattaacatgcttttagcccctactgagcttatagttaacagaagtttccaggtctttcttcacctgaactgtgtctaaagcaagttccctccaccttctgtatttatacgcttgatttttaaaacctaaatgttgggcttcacatttgttccttgtaaatttcatcttggtgattgcagtctaccctctggccttt

SEQ ID NO: 476599 - DNA, 555 bp, Homo sapiens
caggggcaggggagagactctctccccaccacccggctcaggccccagcacagcccggcctctggcctcactggcgtctgtgcccagtgacgcaggcaggtgagctcctggcaaattagcattgcaggctgtgctctctcctcctgctctgctgcagctgggagtgtgcagagactggaggggatgacagtcaccctctgttttctgtggtggctctgttttctgtggtgctggatgcacctctgttttctgtgktggctccaagagagtgcacggtccctgctgattgaaagaaggatgaagggcagaagaggggcggggagctgtgtgccctaagatctcattgcctttttatgccgattaacatgcttttagcccctactgagcttatagttaacagaagtttccaggtctttcttcacctgaactgtgtctaaagcaagttccctccaccttctgtatttatacgcttgatttttaaaacctaaatgttgggcttcacatttgttccttgtaaatttcatcttggtgattgcagtctaccctctggccttt

SEQ ID NO: 476600 - DNA, 555 bp, Homo sapiens
caggggcaggggagagactctctccccaccacccggctcaggccccagcacagcccggcctctggcctcactggcgtctgtgcccagtgacgcaggcaggtgagctcctggcaaattagcattgcaggctgtgctctctcctcctgctctgctgcagctgggagtgtgcagagactggaggggatgacagtcaccctctgttttctgtggtggctctgttttctgtggtgctggatgcacctctgttttctgtggtggctccmagagagtgcacggtccctgctgattgaaagaaggatgaagggcagaagaggggcggggagctgtgtgccctaagatctcattgcctttttatgccgattaacatgcttttagcccctactgagcttatagttaacagaagtttccaggtctttcttcacctgaactgtgtctaaagcaagttccctccaccttctgtatttatacgcttgatttttaaaacctaaatgttgggcttcacatttgttccttgtaaatttcatcttggtgattgcagtctaccctctggccttt

SEQ ID NO: 476601 - DNA, 650 bp, Homo sapiens
tgtgtgtataagatgtatataaaagagataaattttgtgtttagacttgggtcctatccccaagaaatctcattacatataaatttacaaatattccaaaatttaaaaaaagcaaaatccaaaacacttctggtcccgagcatttccagatgagggatactcaacctgtatttacaaaggtgagggcagggtatatagaaatcaggggtaatgagtcctctcaggggtagtatagccaaccatagttaccatccctaggctggaaggggagaatggagaggtattctcagagccaggtgggctgtgtgagaaaagcctctggcaggggctgaagtctttgttatttatttattttatgttctttttttttttttttttttagaaccagggtctcgctctgttgcccaggcagtgggcatgcagtggcatgatcatagctcactgcagcatcaaactcctgggctcaagggatcctcctgcctcagcctcccaagtagctgggactacaggtatatgtcaccatacccgttaagaaatatttctttattttttyttaaatagagacaggttcttgctatattgcccatgatggtctccaacttctggactcaagcaatccttccaccttggcctcccaaagtgctgggatt

SEQ ID NO: 476602 - DNA, 648 bp, Homo sapiens
ctgcggtgccgcgaccgcgacctcggcccgcagccctcgcaggtgaggcgcgtgcggtgccaggtgccagcgggggacgcgggatctctccgaaggaggaggcgttgggatgggcttctcttggatgacagcaggagactttggtgggggtgtccgtggggaggtgggggtcgggaatggggagatctctccagtagttgacgggctggggttccctctgatgggggagtgcttggggatgcaggtccttgcgataaggggccgataccacctcccgggctccttccgcactctgctgggtaaggaccctctagcacccaacccccagctccctcaggcctgatggtccccccacctcattcctcctcctccacatcgtgttccctccccactcagagctaccagcccctactcatamcaccactccccaggattcaagcctgatctgcgtgtgaccaaaaccccctcctctgagcctccccctcctcctccaggtctgagaatccttctccatgtctcccctcctccctggaacctagtggggggaaggctcatttctctccaccttcactgtccatttctcttctcaagctccctccccatctccctcctcagagctaagagcccccactaatatttgtagcctct

SEQ ID NO: 476603 - DNA, 648 bp, Homo sapiens
ctgcggtgccgcgaccgcgacctcggcccgcagccctcgcaggtgaggcgcgtgcggtgccaggtgccagcgggggacgcgggatctctccgaaggaggaggcgttgggatgggcttctcttggatgacagcaggagactttggtgggggtgtccgtggggaggtgggggtcgggaatggggagatctctccagtagttgacgggctggggttccctctgatgggggagtgcttggggatgcaggtccttgcgataaggggccgataccacctcccgggctccttccgcactctgctgggtaaggaccctctagcacccaacccccagctccctcaggcctgatggtccccccacctcattcctcctcctccacatcgtgttccctccccactcagagctaccagcccctactcatacsaccactccccaggattcaagcctgatctgcgtgtgaccaaaaccccctcctctgagcctccccctcctcctccaggtctgagaatccttctccatgtctcccctcctccctggaacctagtggggggaaggctcatttctctccaccttcactgtccatttctcttctcaagctccctccccatctccctcctcagagctaagagcccccactaatatttgtagcctct

SEQ ID NO: 476604 - DNA, 653 bp, Homo sapiens
gttcatgcacgcgtgcattcaacatttgcagagtgcttactgtgtattggagatgccagcagttcccttcagcacttggtatctgtcagcttgcacagggtcatctgagagcattttgtgtaacgattgagcacgtattgttgtatcaggccctctgttggagatgctggttgagtgcggtccaacctgcaggagtccactcaagcaggccccttccttcctcctatggggtctccagccccatagccacctccttcttccagcactgacgggaaagaaggctttgagctccttctggatcactgctttctgcccaagactgcacaagtcagagttttctgacttggaggttaaaagaataaatgagctccaagctacagaggggatcctgggagcctggagcttaccagagatggggggtgaggggtgcccccaaaaggtctagatgcttcatagacgcctatagatgcaggactttgagccctggctgagggtcagtgtgttgggagggctggtgcttggggatctgagggtgttgggtccggtggaatggactttgggagtgtaaggtttgaaggatctgtgggcagggatttgggggagtgggagatgagwtttgagtagagaatgggagataattggatgtgcagggt

SEQ ID NO: 476605 - DNA, 222 bp, Homo sapiens
ctctggggtggaggcagcagaggtgctgagygcagaaatgctggtgggctcaggagtgtggtggagggagaagggtctgagggcaagagggttggccactcagcacagagcacaacatgagcaaaggtccagagacaggatgtgcaggagagtcccactgagggcttcgcggtggatcctgaaggatcacatacactaggactcgggccaggaggtcttgtg

SEQ ID NO: 476606 - DNA, 603 bp, Homo sapiens
agcaaggacaaaattgttcccctatggatcttcaggtcttctcccactcaaacatatacacacaccacggtcttagcctcacatctcacttctactgcttctgaccccagaatctcttcagtattccaccttgtagattggcacatgttttctccaactcttcacrgtgtactatggactgtgattccatcacaatttttcatcagacaacaggaatctctcattcattcattttctaccctcaagaaattggttgaaatctctcagttcctggtacatccccctccatttcttcttactatgctatgagcttactctttctttcacttctaactctcttttagtgggacctcaggcataacagaggtatgcctatcatcattccacaatttctaccataattctgttaaaaaaaaaaacactcttttcctatcctcttaccttactttctcactggcagtctcccccagatcccctgctctagccctgctctgtggactcctctattgccatattctgctgtattctcctgattctttatttcaaagtcaaaataatgactcttgcaatattaaagccttcttctaagggtgggttggcgga

SEQ ID NO: 476607 - DNA, 655 bp, Homo sapiens
tgtgtaaccagtgaaacagcttgccaagaacagattttatttccccaaggaggaagtagagcaagagatccacatctgtggtagggattgggcactccaaatcatagtacctagagctgacagggagagccccgtgagaggaggagagcattgtccggaggaggaaaacgtaacagggagatggaagaagataatagctaatgttaacttcgctatttttgctcaaatccaaccctgtatgggaaaacgctctctctggccaggttggcaagcactccacatgatttgctctgacagactggtggccgtgcgcctttctgccttacagcccctgtgttacagattttctgtgacactgcttttacatgtagtgatgacataccttataatcatcctcactgtggcaacagacatgctcagactggctgtattaaatcgttttaacagtgtctggatttacagatgaygagcgtcgaagcttcttaagatgcccccacttaatggagtaagactcaggatgactttccttttgtgtgttatgctgcacaggtgagatgctgagaggcatgtgggatgctgtagtttctagttccatttcctttttcctattgtgtacaagtcttttatttggctgggttagttacctaggaaacag

SEQ ID NO: 476608 - DNA, 554 bp, Homo sapiens
gcacttcgccccctcctcagaggctgcctcttgagccttcagtgcttcctgagtgcctcctgaaaccaggccgggtgctccccagacagtgactgtttaatgaccgccacactccagtcgtggctgagaatgaaggaastcttcccttaaaactgaggtgtctgggccaggtgcagtggctcacacctgtaatcccagcactttgggaggccaaggcaggcggatcatgaggtcaagagatcaagaccatcctggccaacatggtgaaaccccctctctattaaaaatacagaaattagccgggtgtggtggcgggtgcctgtaatcccagctactcgggaagctgagacagggagaattgcttgaacctgggaggcagagtttgcagtgagtcgagatcacgccgctgcactccagcctgggtgacagagccagactccatctcaaaaaagaaaacaaacaaacaaaaaaaaactgaggtgcctgataaggcacagaagttacctaaatttctgttgtcatgctggaggcccagacatcccagtccattagga

SEQ ID NO: 476609 - DNA, 451 bp, Homo sapiens
caaagtactgggattacaggcacaggccactgtgtctggcttgggctgggatttaaatctatttctgtctgcattcaaattgtcagtgtgtaccctctcattctcaagrggccccacagccctctccctgaggggccacagggctcgttgtaggggtcttcagtgacgagcaagaatagtcctcatgagggtaacttatctgaattcaatctagacaggcctgttctaaccaatctctttctccccttctctgcccctcacctcctcttttcctcctccccagttttaacctgctcagctttgcagagagctttcagtcatggcaggacacgctggtggagaccacagatgcagcgtgtcatgaggctatgcaatgggtgacccacctgcaagctcagggcagcacctccatcttgcaagcattgctggcaagtcccaccacggagcccga

SEQ ID NO: 476610 - DNA, 451 bp, Homo sapiens
caaagtactgggattacaggcacaggccactgtgtctggcttgggctgggatttaaatctatttctgtctgcattcaaattgtcagtgtgtaccctctcattctcaagaggccccacagccctctccctgaggggccacagggctcgttgtaggggtcttcagtgacgagcaagaatagtcctcatgagggtaacttatctgaattcaatctagacaggcctgttctaaccaatctctttctccccttctctgcccctcacctcctcttttcctcctccccagttttaacctgctcagctttgcagagagcyttcagtcatggcaggacacgctggtggagaccacagatgcagcgtgtcatgaggctatgcaatgggtgacccacctgcaagctcagggcagcacctccatcttgcaagcattgctggcaagtcccaccacggagcccga

SEQ ID NO: 476611 - DNA, 392 bp, Homo sapiens
atatgatccagcactgaagaagcacccatcaaaatagaatgatgtgattgatgcataaatcaacagagataagtggaagattgcaagacagggagagtagatagatgggtagaagcaaggaaagaaagatatatgtaatgaattagatgggtggaaggttggatggatggaaatttggatggataggtggaaggatagatgatggaaggttggatggacaggtttaagaatggatggatgacaggttgtatggataggttgaaatacagatggatggaaaggacaggttgaaataaagatggatggaaagctggatggacaggtagaagtacagatggatggaaggttggrtggataagcagaaggatggtcagggagaagattggatggat

SEQ ID NO: 476612 - DNA, 570 bp, Homo sapiens
acatttctccccatcttgtgaggcactctcagcctgggtgctgtgtccttcctgcttttccctggtgtcctgaacctcagacttcaggcagctttgggcttacactgccagtgcctccacttacccctctgtgcctgacagtcacctcccataacttctgaatttaagtggctcaaacaagtcacatgcatctgtcctcacttccatccagcccttcattctgtctctgggagacacactgcccaacttgtcctcactcctcaaggtcatctggtcaccctctctgagctttcctcaagtgtcaacacttgctaccattgccctttatttccagagccatstggtgaccctctctgagcttcccaggctgcctgaaccgggacctctgcatatggccattctgccccgaactctcctagccaactggtctcattgcttcccaccccacctgcacccctatctatctgcatcccctctcaactgtccatggtctgcctctcaccagggagctgcatgcgcactgtccctgcaagacccttgcaattacagaaaacacgcagcgtgacttca

SEQ ID NO: 476613 - DNA, 607 bp, Homo sapiens
tgatggacccaaatgcacattggtgatgacttgtaaaattccttaagaggtttgtgacactatgacttctccacatggggacttgcaatgatttgttctttgaccactgcttggccaggtgctggctatagagatattcctatgctgactggtttacacacaatcagactattggaagaggcctgattttcagaaactctgtctggaaactggctggctgcaaatccagcacaaagtgtacttttcytcctcagctctgaaattaaagggtatatctgttatttatttacaatatttattttgtactaacataattcaaaccaaatcaactcaaacccagaaacaatagcctgatgaatttttaaagaaactttccaaaataagtcaatgttcttggcttgggttacgtttgagaagtttccaccccttaggaagagttttgacttgtttctttgctttgtgaatgttagaaggcatttggtaaaagccattacatgggggatcccattgcctcaaattggagatgctgctgacatctaaaaatttagagaaatgaatcataatgagagttatttattaggcacttaatagtttattatatgcctgg

SEQ ID NO: 476614 - DNA, 607 bp, Homo sapiens
tgatggacccaaatgcacattggtgatgacttgtaaaattccttaagaggtttgtgacactatgacttctccacatggggacttgcaatgatttgttctttgaccactgcttggccaggtgctggctatagagatattcctatgctgactggtttacacacaatcagactattggaagaggcctgattttcagaaactctgtctggaaactggctggctgcaaatccagcacaaagtgtacttttcttcctcagctctgaaattaaagggtatatctgttatttatttacaatatttattttgtactaacataattcaaaccaaatcaactcaaacccagaaacaayagcctgatgaatttttaaagaaactttccaaaataagtcaatgttcttggcttgggttacgtttgagaagtttccaccccttaggaagagttttgacttgtttctttgctttgtgaatgttagaaggcatttggtaaaagccattacatgggggatcccattgcctcaaattggagatgctgctgacatctaaaaatttagagaaatgaatcataatgagagttatttattaggcacttaatagtttattatatgcctgg

SEQ ID NO: 476615 - DNA, 619 bp, Homo sapiens
tgtcactttactttccacaagttctacaaaactctggaaggaatagcacactgattattttgtcttctctcaacttccatccccatgccagccccaatccagggctgactccaattagaagaggctctgtttcagcagacaggataagctgtagtcccagaagaaccctgactctcagggtagagtgcaatgccaaggccccctggccctttgctactcaaagtgtggtcctgggaccrgcagcattagtatcatctgggagcttgttagaaatgcatgatctcaggcttcactatgacctactgcaccagaatttgtattttaacaagaccccaggtgatttgtgtgcacattaaagtctaggaatcactgcccaaaatcaatactttttctgtttgatccttccaagcggtcactcatttgctgaggtgatgggagttcaccaatgcatcccttcacagatgcgatgtttatattgagtacacatttatcttctctgtgcaggagatgcaaagtcaaatcccttcagttggccagatgggaactctggtagagtgtgcatgttctgtctaaaagggacagctaccatttcactccagccaactgctacatggaaacg

SEQ ID NO: 476616 - DNA, 619 bp, Homo sapiens
tgtcactttactttccacaagttctacaaaactctggaaggaatagcacactgattattttgtcttctctcaacttccatccccatgccagccccaatccagggctgactccaattagaagaggctctgtttcagcagacaggataagctgtagtcccagaagaaccctgactctcagggtagagtgcaatgccaaggccccctggccctttgctactcaaagtgtggtcctgggaccagcagcattagtatcatctgggagcttgttagaaatgcatgatctcaggcttcactatgacctactgcaccagaatttgtattttaacaagaccccaggtgatttgtgtgcacattaaagtctaggaatcactgcccaaaatcaatactttttctgyttgatccttccaagcggtcactcatttgctgaggtgatgggagttcaccaatgcatcccttcacagatgcgatgtttatattgagtacacatttatcttctctgtgcaggagatgcaaagtcaaatcccttcagttggccagatgggaactctggtagagtgtgcatgttctgtctaaaagggacagctaccatttcactccagccaactgctacatggaaacg

SEQ ID NO: 476617 - DNA, 547 bp, Homo sapiens
gctgctgaggggtacaggagagggagatgacaaggggagtataaatggatttcccagggagggatagcattaggagaaatacctaatgtagatgatgggttgatgggtgtggcaaaccaccrtggcgcatgtattcgtatgtaacaaacctgcacattccgcacatgtatcccagaactgaaagtacagttaaaaaaaaaaaaagtgaaaaaaaaaaagatgatgtttccactgaggcgcactaattgtgagcgaagtaggatcatggataaacatcagcaggtaggttttgcatttgctcagtgtgagacaactattgtatgcctacatagtgcatggccttgtgcttcctgatccattcttcgtgattcccttgctctatgtgtatggcaggtcttcacccctgcaggtagtgtttcccaggctaccttgtcagctaaatcttggcagcatatggcccctattaagaactggctggagcttggaaggcagaataaggcaaaaaggcgagtatttctcccttttttttccctgtgctttaagtgtg

SEQ ID NO: 476618 - DNA, 544 bp, Homo sapiens
gctgaggggtacaggagagggagatgacaaggggagtataaatggatttcccagggagggatagcattaggagaaatacctaatgtagatgatgggttgatgggtgtggcaaaccaccatggcgcatgtattcgtatgtaacaaacctgcacattccgcacatgtatcccagaactgaaagtacagttaaaaaaaaaaaaagtgaaaaaaaaaaagatgatgtttccactgagrcgcactaattgtgagcgaagtaggatcatggataaacatcagcaggtaggttttgcatttgctcagtgtgagacaactattgtatgcctacatagtgcatggccttgtgcttcctgatccattcttcgtgattcccttgctctatgtgtatggcaggtcttcacccctgcaggtagtgtttcccaggctaccttgtcagctaaatcttggcagcatatggcccctattaagaactggctggagcttggaaggcagaataaggcaaaaaggcgagtatttctcccttttttttccctgtgctttaagtgtg

SEQ ID NO: 476619 - DNA, 547 bp, Homo sapiens
gctgctgaggggtacaggagagggagatgacaaggggagtataaatggatttcccagggagggatagcattaggagaaatacctaatgtagatgatgggttgatgggtgtggcaaaccaccatggcgcatgtattcgtatgtaacaaacctgcacattccgcacatgtatcccagaactgaaagtacagttaaaaaaaaaaaaagtgaaaaaaaaaaagatgatgtttccactgaggcgcactaattgtgagcgaagtaggatcatggataaacatcagcaggtaggttttgcatttgctcagtgtgagacaactattgtatgcctacatagtgcatggccttgtgcttcctgatccattcttcgtgattcccttgctytatgtgtatggcaggtcttcacccctgcaggtagtgtttcccaggctaccttgtcagctaaatcttggcagcatatggcccctattaagaactggctggagcttggaaggcagaataaggcaaaaaggcgagtatttctcccttttttttccctgtgctttaagtgtg

SEQ ID NO: 476620 - DNA, 547 bp, Homo sapiens
gctgctgaggggtacaggagagggagatgacaaggggagtataaatggatttcccagggagggatagcattaggagaaatacctaatgtagatgatgggttgatgggtgtggcaaaccaccatggcgcatgtattcgtatgtaacaaacctgcacattccgcacatgtatcccagaactgaaagtacagttaaaaaaaaaaaaagtgaaaaaaaaaaagatgatgtttccactgaggcgcactaattgtgagcgaagtaggatcatggataaacatcagcaggtaggttttgcatttgctcagtgtgagacaactattgtatgcctacatagtgcatggccttgtgcttcctgatccattcttcgtgattcccttgctctatgtgtatggcaggtcttcacccctgcaggtrgtgtttcccaggctaccttgtcagctaaatcttggcagcatatggcccctattaagaactggctggagcttggaaggcagaataaggcaaaaaggcgagtatttctcccttttttttccctgtgctttaagtgtg

SEQ ID NO: 476621 - DNA, 621 bp, Homo sapiens
agaatctaggagctggggctggtcagtgggattagattcacttggggactgtcttggaaggagccattataaactagatatatgatgagggctgtccagtaggcattagtaggaactagaactgcagtggggactgtccagttgagcttaaaccttgggaaagatgcagcagcttccagagtcactgcctggtgcactgaggctgggagataaatgccctgacttcttcctttcccaccgtgactctcccacccatgcctcccactggccaaacccggccataagtcagagatcaggaagctggagaaacccagctcgcaggagaaggacaagcataggtctgtaagcagcaggacatggctggcccataggaccaggtctgttttctagggagatcccagtactgactgtgtgggaagggctggctggcctcaaggagtcaaactgattttgaaggatccataacgagaatagggcataagctctaccatgaacttgggcaaaggcagtggagatggagaggaggggtggattgaaaagacctgmctaagtctaggtgaccacctgaatgtagagagggagagggaggaaagagagcaggtgttggatgtttcatgtttg

SEQ ID NO: 476622 - DNA, 471 bp, Homo sapiens
agtggctcacacctgtaatcccagcattttgggaggccaaggtaggggaatcacttgaggtcaggagttrgagaccagcatggccaacatggtgaaaccctgtctctactaaaaatacaaaaattagccaggcgtggtggcgtgcacctgtagtcccagctactcaggtggctgaggcaggagaattggttcaacccaggaggcagaggttgcagtgagtttgcagtgagactctgtctcaaaaaaaaaaaaaaaaaaaaaaaaaagacggaaggatgccaggggtctttgcaagctggctgtgggagtgggaggatcccgggagtcccactcaaccatctggaataggtctccaacttgtgagtggggtggatggtatagaaatgtcctgaaggagtaggaggaggagttatgaggaaacgctcgctgtgcaatgtatgttctagaacaggaattggcaaacttcttctg

SEQ ID NO: 476623 - DNA, 497 bp, Homo sapiens
ttattggggaatgatggggtgctggcctcttgggcaggctgagccagacaccatgcacatggcagcctttcactctcaccacctctcctccctctgcagtcactgctgtttataagctgcctggcaataacaaagcagtagggatatatttagagggtttgggagatttccaatattctctaagtccccacccacataatgctctttcacattttggactttctcctgtaggtcacaaggaatgggggtatttaattattctaatagtttaacaatgagattgaattcacttttgtaaaattgcctttatgacctattrgatctgaaaggacccagttcattgtcagaaagaaccaggttattcgaagccaatccctggtatcgtcaggatcaaaagggtagcatcaaatatttcctcgtgggtctcaattgtccatagacaatcacataggatgggatctaggaagtacattttcttatctctctctccttctctc

SEQ ID NO: 476624 - DNA, 582 bp, Homo sapiens
caaatttttgtttgagtgctcaagtgggtatcatttaaaataatcttatatactatatataacagccaaggtttgggcaacacaacagaaactgcatgagtttattttatcagaattttttaaacggtatgggagaactaaaaaagtaaaaaagggaacccttgagttaacaaggagataagaactacrtaaagcagttactgtcctgaaggaataaagggaagagcatggggttattagaacctagaagtttggaaccaccaggagctgggaccctatgaggagagggttggcccctgacaatgctggtgtctctaagggagctcctgaggctgattctagcagtgtagggaaagaaactggaaactggaacaatttcctctgtaatcaatgacccttgccagggtaaagaatcactgctgaagagatgctactggaaaagcaagcaaacaaaaaggagggtgtcccttccccttcttccttccttccagtctccctcatgacagagcatctggctggtgacgggaaaaggtgctccacagagcaccaccccaacatcacacgggcatctgctgacccaca

SEQ ID NO: 476625 - DNA, 582 bp, Homo sapiens
caaatttttgtttgagtgctcaagtgggtatcatttaaaataatcttatatactatatataacagccaaggtttgggcaacacaacagaaactgcatgagtttattttatcagaattttttaaacggtatgggagaactaaaaaagtaaaaaagggaacccttgagttaacaaggagataagaactacataaagcagttactgtcctgaaggaataaagggaagagcatggggttattagaacctagaagtttggaaccaccaggagctgggaccctatgaggagagggttggcccctgacaatgctggtgtctctaagggagctcctgaggctgattctagcagtgtagggaaagaaacyggaaactggaacaatttcctctgtaatcaatgacccttgccagggtaaagaatcactgctgaagagatgctactggaaaagcaagcaaacaaaaaggagggtgtcccttccccttcttccttccttccagtctccctcatgacagagcatctggctggtgacgggaaaaggtgctccacagagcaccaccccaacatcacacgggcatctgctgacccaca

SEQ ID NO: 476626 - DNA, 598 bp, Homo sapiens
aatttgagaactgtatccacagtcattaactasggggcagtgcccaactgtccccaagccagaagtaagaggtatgcatcttcacgacctcaatgacaaacttgatcatataaaataggcagcattcattgacctggttcaggctacgccggaggtggactaccacctggaaacagagagacattgcggaagcttccctgaggttccccttgcagccttcaggggtgaattctttgacactgggtgtttgaaatggagcaatcaaggccccagcaaaaaacagatgcacactccaatggggtaattgaggacagtttaggaaagagattatttacagaagtgtggacaggattaagagaaaacaaggatgtggagcacgctggtattatcaacagtggggtctaaaagggaaggagagagagagagagaatcctggaacccagagagagctgtcgctgtaagacagagctgcccaacaggaactgtggcctttggggagaaactgagccactgcaaactctcagcccggaaggaaagaagccaaaggaataaataccctgacctccccttccaccctccaatctcctactgggtcccc

SEQ ID NO: 476627 - DNA, 556 bp, Homo sapiens
ctgacacccagattaatttgagaactgtatccacagtcattaactagggggcagtgcccaactgtccccaagccagaagtaagaggtatgcatcttcacgacctcaatgacaaacttgatcatataaaataggcagcattmattgacctggttcaggctacgccggaggtggactaccacctggaaacagagagacattgcggaagcttccctgaggttccccttgcagccttcaggggtgaattctttgacactgggtgtttgaaatggagcaatcaaggccccagcaaaaaacagatgcacactccaatggggtaattgaggacagtttaggaaagagattatttacagaagtgtggacaggattaagagaaaacaaggatgtggagcacgctggtattatcaacagtggggtctaaaagggaaggagagagagagagagaatcctggaacccagagagagctgtcgctgtaagacagagctgcccaacaggaactgtggcctttggggagaaactgagccactgcaaactctcagcccggaaggaaagaagcc

SEQ ID NO: 476628 - DNA, 360 bp, Homo sapiens
aatttgagaactgtatccacagtcattaactagggggcagtgcccaactgtccccaagccagaagtaagaggtatgcatcttcacgacctcaatgacaaacttgatcatataaaataggcagcattcattgacctggttcaggctacgccggaggtggactaccacctggaaacagagagacattgcrgaagcttccctgaggttccccttgcagccttcaggggtgaattctttgacactgggtgtttgaaatggagcaatcaaggccccagcaaaaaacagatgcacactccaatggggtaattgaggacagtttaggaaagagattatttacagaagtgtggacaggattaagagaa

SEQ ID NO: 476629 - DNA, 598 bp, Homo sapiens
aatttgagaactgtatccacagtcattaactagggggcagtgcccaactgtccccaagccagaagtaagaggtatgcatcttcacgacctcaatgacaaacttgatcatataaaataggcagcattcattgacctggttcaggctacgccggaggtggactaccacctggaaacagagagacattgcggaagcttccctgaggttccccttgcagccttcaggggtgaattctttgacactgggtgtttgaaatggagcaatcaaggccccagcaaaaaacagatgcacactccaatggggtaattgaggacagtttaggaaagagattatttacagaagtgtggacaggattaagagaaaacaaggatgtggagcacgctggtattatcaacagtggggtctaaaagggaaggagagagagagagagaatcctggaacccagagagagctgtcgctgtaagacagarctgcccaacaggaactgtggcctttggggagaaactgagccactgcaaactctcagcccggaaggaaagaagccaaaggaataaataccctgacctccccttccaccctccaatctcctactgggtcccc

SEQ ID NO: 476630 - DNA, 655 bp, Homo sapiens
ctgacatttccataatccacttgccatcttacgtgtsttaaatgacttctcgttgtcccaaacttggagattttaatctcgtatattaagccagcagggcccagtaattccctgaatgcatttttattgactttgtaaatcagacttccccacatcagggcctgtgaccaggaaagaggtgtttgtctgtgaaattggctggacacagaccattgactgtgatgataaccagtgatttgtgaagccagatagacaagccacatgcactaagcagattaaaatataacaaaacaaaaaggttccattaccaggaatactgtcaaagggcagcaggatgtttgtgataaaagacgaaaacaaactaattccaagtctggaaggaagcccaaaataacactttgctgtctcttcagtctgccaaagagaaagtgtgggaatgctaaacacagctaagtaaaccaatttctgaaagctctttagcaaaagtcagaaaaagcttggctctctccctacctgggctctcattcacaaggttgttcacacctccttgccttctgtgacaggaattgtttacaaaaaggtgcagtaacaattttaaacaggttcaaagaaggacactcttctgcgggtctccctctcactgaagataaaaatc

SEQ ID NO: 476631 - DNA, 523 bp, Homo sapiens
tttccataatccacttgccatcttacgtgtcttaaatgacttctcgttgtcccaaacttggagattttaatctcgtatattaagccagcagggcccagtaattccctgaatgcatttttattgactttgtaaatcagacttccccacatcagggcctrtgaccaggaaagaggtgtttgtctgtgaaattggctggacacagaccattgactgtgatgataaccagtgatttgtgaagccagatagacaagccacatgcactaagcagattaaaatataacaaaacaaaaaggttccattaccaggaatactgtcaaagggcagcaggatgtttgtgataaaagacgaaaacaaactaattccaagtctggaaggaagcccaaaataacactttgctgtctcttcagtctgccaaagagaaagtgtgggaatgctaaacacagctaagtaaaccaatttctgaaagctctttagcaaaagtcagaaaaagcttggctctctccctacctgggctctcattcac

SEQ ID NO: 476632 - DNA, 495 bp, Homo sapiens
tataattttatttatctgttaatgagtgttttccctcagggccacatttttaaagttctaaagaactgcttttagtgctaattaatgccccttttttggagacagagcttcactcttttcgcccaggctggagtgcaatggcacaatcttggctcactgcaaccttcgcctcctgggttcatgtgatcctcctgcttcagcctcccgagtaggtgggactacaggcgtgccccactacacccggctaatttttttgtgtatttttagtagagacggggtttcgccatattggccaggctggtcttgaactcctgacctcagatgatccacctgcctcrgcctccctaagtgctgggattacaggcgtgagccactgtgccctgccaattaatgccctttggacttaaggtaatattttccgccacaggacttgagaagctcaaggtgaaaacacaccttggaagtttaatccacacctgaaatcatgagcccagt

SEQ ID NO: 476633 - DNA, 514 bp, Homo sapiens
gatggtgatggtgatggtgatgatgaggactcacaggccataatgcctcatggtrttagccaattattgtatcctctactgaaaaaacagccattggaagaagggacagagcaggctttctgcctgggccagtgtggcctacagagatgctccaaaacaactggtgattaactagcaccactgggtcccccaatttgagaataagggagcagcaatgactgaggaaaagccaagtgcgctcaacatggcaggggcaggaaagcagacgggcccagcaccgcctggattcttaacagcttgctcaatctaggccataatttgcttctctgtttgcaatcagaggagaccaaccagcatactttcatttgacagtcaggcttggaaagaaaatgactcaatgtcacagggccaccctgtggcactgctcagagcagagcccaggcctctgaacttagattcatcccttccgcttctccagtggtccacttcctcatccaaggatagaacccccact

SEQ ID NO: 476634 - DNA, 514 bp, Homo sapiens
gatggtgatggtgatggtgatgatgaggactcacaggccataatgcctcatggtgttagccaattattgtatcctctactgaaaaaacagccattggaagaagggacagagcaggctttctgcctgggccagtgtggcctacagagatgctccaaaacaactggtgattaactagcaccactgggtcccccaatttgagaataagggagcagcaatgactgaggaaaagccaagtgcgctcaacatggcaggggcaggaaagcagacgggcccagcaccgcctggattcttaacagcttgctcaatctaggccataatttgcttctctgtttgcaatcagaggagaccaaccrgcatactttcatttgacagtcaggcttggaaagaaaatgactcaatgtcacagggccaccctgtggcactgctcagagcagagcccaggcctctgaacttagattcatcccttccgcttctccagtggtccacttcctcatccaaggatagaacccccact

SEQ ID NO: 476635 - DNA, 592 bp, Homo sapiens
tgcttgtctacatcaccagcaggacttgcatcttgttccgaaggttttgcaaaggggaagaaagtagttgttcccccctcttttttcctatgagtatgaaaaattctagttggccaggcacggtgtatcacgtctgtaatcccaacacttggaaagccaaagtaggaggattaattgaggccaagagttcaaggccagcctggacaacataccaagaccccatctctaaaaaaaaacmgtttaagtttcaataaatcctgcataatttctgggattcttgaaagcatgggctctctccgcactgagtctagtttcactgcttcttactggttttaatctttaatgttagacctatgtttatcccttattaaaatttccccctgctttaatttcaatgtaccagtgtcaaacatcttataattcacagtgtactctcaaggctggctcatagttattttttaaaattttactaaacatttgatttttctctagcaactgaaattaatctctgaactttttagtgtgtttatttacaaatagagcatctctaagcgagtttttgaactcagcatttcattttgaaggcgtctgg

SEQ ID NO: 476636 - DNA, 592 bp, Homo sapiens
tgcttgtctacatcaccagcaggacttgcatcttgttccgaaggttttgcaaaggggaagaaagtagttgttcccccctcttttttcctatgagtatgaaaaattctagttggccaggcacggtgtatcacgtctgtaatcccaacacttggaaagccaaagtaggaggattaattgaggccaagagttcaaggccagcctggacaacataccaagaccccatctctaaaaaaaaacartttaagtttcaataaatcctgcataatttctgggattcttgaaagcatgggctctctccgcactgagtctagtttcactgcttcttactggttttaatctttaatgttagacctatgtttatcccttattaaaatttccccctgctttaatttcaatgtaccagtgtcaaacatcttataattcacagtgtactctcaaggctggctcatagttattttttaaaattttactaaacatttgatttttctctagcaactgaaattaatctctgaactttttagtgtgtttatttacaaatagagcatctctaagcgagtttttgaactcagcatttcattttgaaggcgtctgg

SEQ ID NO: 476637 - DNA, 592 bp, Homo sapiens
tgcttgtctacatcaccagcaggacttgcatcttgttccgaaggttttgcaaaggggaagaaagtagttgttcccccctcttttttcctatgagtatgaaaaattctagttggccaggcacggtgtatcacgtctgtaatcccaacacttggaaagccaaagtaggaggattaattgaggccaagagttcaaggccagcctggacaacataccaagaccccatctctaaaaaaaaacagtttaagtttcaataaatcctgcataatttctgggattcttgaaagcatgggctctctccgcactgagtctagtttcactgctkcttactggttttaatctttaatgttagacctatgtttatcccttattaaaatttccccctgctttaatttcaatgtaccagtgtcaaacatcttataattcacagtgtactctcaaggctggctcatagttattttttaaaattttactaaacatttgatttttctctagcaactgaaattaatctctgaactttttagtgtgtttatttacaaatagagcatctctaagcgagtttttgaactcagcatttcattttgaaggcgtctgg

SEQ ID NO: 476638 - DNA, 573 bp, Homo sapiens
ccagaacaaatttgccatgcacagtgcaaatgagtagagagttggggtcggcctctgtccaacctacatccacatcccttgaagcagcacctatcccatgactcatcaacaattatcccatgattcatcaactgttgaaggggtcacggtgcatcagccccaagaagaactataacaacatacagttttgcacagatttcttcataactttagggcactstcacattcacctgcctggtgaccctcttaatgtccctgaaaggggcagggcagctctcaccacccctatttgttctcattggaaacttccaagcttagaacttcaaccattgcataatccattgcgtagagttgaagtcaggtttacttgacttgttcaagtttgcaaaacaacctctaagtagcctgggagtagaactcaaggtttctaactgaatacactctttcataccatttcaaaacactttgggaaaagacccataataaagtcacaggccaccaaaaatccattatgccccagtcggaaactcaagaccctgggcacaggcatcccagagaaaagtgaagagagga

SEQ ID NO: 476639 - DNA, 643 bp, Homo sapiens
ctccaagagaagctttacattgaaatgcagcacatgaggaaaatgaagaggtattcattaactttaatggagtttcctttattccragattatatacttgatatctagtgggttgtggttaaaatgtccttcctaatagaaggtggaaggtatttcttcttgttttatggcccctcgctttatgcccttacttagctaaggaaaaagttggttattctaatgtgctccaaaaatatttaacattttaaaggtttataaaatttaaaagtttgaggtctactcttctgtaccatttggaggtcttatgtgggacacattggaccaagttcagccaattttattgaacgagttttattccatgagctaacaccaactcattgtactgaaaaggatcctgagcctcatatgtgatcaaaagtggggaaaatatgctggaatccattaatgaggtctgctgtggatgcgaaggggaaaatcgtgacccatttgcagtggtaaatatttaacaactactctctaaaaagaagaaaagccctgatttgtgacattggccaatttctatggtgacaatgctctcaccacggccagttccaagccactaacacagcataacaaggaagagctgtgaagaaatgcacatgat

SEQ ID NO: 476640 - DNA, 577 bp, Homo sapiens
aaatgaagaggtattcattaactttaatggagtttcctttattccgagattatatacttgatatctagtgggttgtggttaaaatgtccttcctaatagaaggtggaagrtatttcttcttgttttatggcccctcgctttatgcccttacttagctaaggaaaaagttggttattctaatgtgctccaaaaatatttaacattttaaaggtttataaaatttaaaagtttgaggtctactcttctgtaccatttggaggtcttatgtgggacacattggaccaagttcagccaattttattgaacgagttttattccatgagctaacaccaactcattgtactgaaaaggatcctgagcctcatatgtgatcaaaagtggggaaaatatgctggaatccattaatgaggtctgctgtggatgcgaaggggaaaatcgtgacccatttgcagtggtaaatatttaacaactactctctaaaaagaagaaaagccctgatttgtgacattggccaatttctatggtgacaatgctctcaccacggccagttccaagccactaacacagcataacaagg

SEQ ID NO: 476641 - DNA, 643 bp, Homo sapiens
ctccaagagaagctttacattgaaatgcagcacatgaggaaaatgaagaggtattcattaactttaatggagtttcctttattccgagattatatacttgatatctagtgggttgtggttaaaatgtccttcctaatagaaggtggaaggtatttcttcttgttttatggcccctcgctttatgcccttacttagctaaggaaaaagttggttattctaatgtgctccaaaaatatttaacattttaaaggtttataaaatttaaaagtttgaggtctactcttctgtaccatttggaggwcttatgtgggacacattggaccaagttcagccaattttattgaacgagttttattccatgagctaacaccaactcattgtactgaaaaggatcctgagcctcatatgtgatcaaaagtggggaaaatatgctggaatccattaatgaggtctgctgtggatgcgaaggggaaaatcgtgacccatttgcagtggtaaatatttaacaactactctctaaaaagaagaaaagccctgatttgtgacattggccaatttctatggtgacaatgctctcaccacggccagttccaagccactaacacagcataacaaggaagagctgtgaagaaatgcacatgat

SEQ ID NO: 476642 - DNA, 577 bp, Homo sapiens
aaatgaagaggtattcattaactttaatggagtttcctttattccgagattatatacttgatatctagtgggttgtggttaaaatgtccttcctaatagaaggtggaaggtatttcttcttgttttatggcccctcgctttatgcccttacttagctaaggaaaaagttggttattctaatgtgctccaaaaatatttaacattttaaaggtttataaaatttaaaagtttgaggtctactcttctgtaccatttggaggtcttatgtgggacacattggaccaagttcagccaattttattgaacgagttttattccatgagctaacaccaactcattgtactgaaaaggatcctgagcctcatatgtgatcaaaagtggggaaaatatgctggaatccattaatgaggtctgctgtggatgygaaggggaaaatcgtgacccatttgcagtggtaaatatttaacaactactctctaaaaagaagaaaagccctgatttgtgacattggccaatttctatggtgacaatgctctcaccacggccagttccaagccactaacacagcataacaagg

SEQ ID NO: 476643 - DNA, 533 bp, Homo sapiens
cacatgctgagtttcccatctacacctctgcttctctgggtgctctgatttgtgctatcacctgattctcaagacatcactgtagagtatatgtgcaggggagggagagaggaagggaggagagagagagaaatggagaaagagaagtggagaaagtgacagaaagtagaagagaggggagaatgaaaggaatgaagataagggagatggcagagagagggaaagtgggggagatagagtggaagagaatgaaaagagagcaggaggaaagagacrgaggagggagagaagagaaagattttaactgcactttacaagaaactgagctccagagaggatgaatgtccaattcaaaatcatatgaaagaagcagcaagactcaaatccaggtgaatcatattccaacatgtgcttattctggtctggagaagagggcaaagtaaggattttatatgaaaataatgaagtttctgagactttattctgatgggtaataagaatccgcagaggcttgtaaacaggggaacgcagta

SEQ ID NO: 476644 - DNA, 533 bp, Homo sapiens
cacatgctgagtttcccatctacacctctgcttctctgggtgctctgatttgtgctatcacctgattctcaagacatcactgtagagtatatgtgcaggggagggagagaggaagggaggagagagagagaaatggagaaagagaagtggagaaagtgacagaaagtagaagagaggggagaatgaaaggaatgaagataagggagatggcagagagagggaaagtgggggagatagagtggaagagaatgaaaagagagcaggaggaaagagacggaggagggagagaagagaaagattttaactgcaytttacaagaaactgagctccagagaggatgaatgtccaattcaaaatcatatgaaagaagcagcaagactcaaatccaggtgaatcatattccaacatgtgcttattctggtctggagaagagggcaaagtaaggattttatatgaaaataatgaagtttctgagactttattctgatgggtaataagaatccgcagaggcttgtaaacaggggaacgcagta

SEQ ID NO: 476645 - DNA, 496 bp, Homo sapiens
ttttccctgatcattctttgtccctggtggtcaaggctaacctattctggctcagcatgggtggagagcctccaatgcaccaagcaccctattcattctcttgttagaacttcattgctctaggccaggcacgttggctcacacctgtaatcccagcacttagggaggccaaggcaggcagaccacttgaggtaaggagttcaagaccagcctggccaacatggtaaaaccccatctctactaaaaatccaaaaaattagccaggcgtgatggtatgcacctgtaatcccagctactagggaggctgaggcaggagaatcgcttgaacctgggaggcagagattgcagtgagccaagatcatgccatcgcactccagcctgggcaacagagcaaaactctaaaaaactttattgctccatcattccttcaacacatatttattgttcctactgtgtcccaacktctgtgctgggcatgaggtaggggaagagtgat

SEQ ID NO: 476646 - DNA, 628 bp, Homo sapiens
aacccatttatgtggcaaagttatgggaggaggttgtccctgatcaacctctggtggctgaactgcccaggaccaacagggtaggttgctatcawgtagctagagtcgattaagtggccaagggtccaagagacaggtgagaccatgaggaggcacattcgatgtgatgtgaccacagaaccctgggtagtctcaagggtagaagccctgatgatgggctgtgcagatgagaatggaaacaggatgattccttgaaaatttgttcaaggagttgctgtggttctggcttccccctccccatacaatcaggcatctaggtggcagctctttccccagcctggcagaacatacaatcaggcatctaggtggtagctctttccccagcctggcagaagactcaggtattgttgctctctagggacagggaactagagaagctccacactcacagtcaacagagacaatttggggctgcgatgaggtaaggtactaaaaataggaggaataagcaaagttggcaaaagttgaacagggagacgctaggaccacacacagcccagcttgaattgtcactcaggagattagaaaattcctccttgggcaaactgaaccacccaagggaaaagac

SEQ ID NO: 476647 - DNA, 653 bp, Homo sapiens
ctggcagcttgaggaaggtgagcagacacaatagccatgctctgtgcaggcatcaaggccctcrtgcctgtgatcagtgagtgcagccttcctcgggagctatcatcaggacctgcaagtgagtttaaatgccagtgagcagagacaatgtattcaaaaaagactccagtttcagctcaaacattcccctaggaataattttggcaagagatctattctgaattcgtggtaggctgggggcaaagatgagagaaagaagaaaagggaagtctctctgaaaggagctttgaccccagggcttagaaacggagtctgtcttcaagcttttggatgctctcgtaaaaagggtttgtaaataatttagcacccccaagtagtagattctaagtggcaaacagcctgctgagaggagggctgtagaggccccagggaaaagagaactcaggacaaccagcttcacaagagcagggaccatggctgctggtcaccaccatacccccagcacctgcacagttcttggaccatggcagatgctgctcaggggctacttgcgtgggtcaacatctaagggaataaacaaataaatgatttatcattagggaaaaaagcatgccaaaaacaacagcacatacccataatcattccccagtttt

SEQ ID NO: 476648 - DNA, 542 bp, Homo sapiens
cggctaattgtaatttcttttggtttcctctctaaatcattttctttttttgtctttgaatccctgtctccatttatgtcaggtttggctcagtcaaagctccatcccagctctgtggaacatctgcccatctccctctgaggccaagaaggatccaggtggacaatggaacagtgggatttggctacagttgggactgctaaatctgtcagtcatccagactgaagaagagcctgttaacacagaatcctaaaaaaagaagttcatatgtggcaaggatttgagatattcacatacaacactcagaagtctgactgtataacattctcccactgatttctcacagaaaacctttccacatccaaattgttctgtccccaaactcccttccactgacagactgaactctattttcttccccagaacattcttacckggtgatgttggggggctgggttggggggcagaaactgtaacaacagggaaaaagaaacctaggaaaatgagctcagtaatattgtagccacctcctcaaagggcaa

SEQ ID NO: 476649 - DNA, 536 bp, Homo sapiens
tgggacaccagggtggttgtagaaaatatagaaatttgaagaaataaataccccactggcaacattattacaaatcacctccccaaaataacaagatgtggggcaaaagcgatcatttcttccagggaatcctaaaatgtaatattccctgcaccaacacagtaccttactctgtaatgacgagcttatgttctctcctaacttagcccacaatactttggcctttatttcctgcctactgcctacttcctacttcctacctagttaattctgatggagcatgtggggcacgaaacacacaagtgcaccagctcacagttgcacacacctacctaagctaatttccccacattggctgtggtctcagatatctccacaacccctccttccaatcttttcttccattgccacagarcatctagttgagtacttgacatttcctttgaattaaggctgcacattaagtggacattttcccttagatggatgtctatttaacccctccttgtggctaatcatgccagaggatgtgattt

SEQ ID NO: 476650 - DNA, 361 bp, Homo sapiens
aggtgctttcctcctggttgaggtcgaggctctgccttcctccaggaatgggatctgaagggmtaatggcttttctgtcattgtccatccatgcattggccctagacccatggtcacaggattcaggttttgcccaccatgctttccaccactggccccccttgaaccatgacagcaaccaatattcatttattcctgaattcaacaaatgtttatgaaaattcctgttatgttgcagactatcttttggcatcggggacacagttgttgcccatgccttcatgaggcttattcatattccattctctcctggtttctcccccaagtacacacactgctttcttctgtctctctgcaaact

SEQ ID NO: 476651 - DNA, 601 bp, Homo sapiens
gctcgtgccatcctacaaggacctccactttctgcactgagtatttgggagatggtcatctgtggctcactttctgggtatggaggaagagcacagagtaagggatgtttcacaccagccacacaagaagcctgtgaacaaaccagccttttaccagagacggccctttatggaccacttagctgcttcccggatttagtgagtcttgacaaggacactgcaggtgaatgactgccaagtctgtttccttccctcttcaccatgctccattcagacaacctgccttctgtttgagcagctattgcgggatctggccagcagcctgcaatgcaayggggctctctctctgctcctaggtggatcggcaggttgagaaataatagacacacacaagacagtgaaagctgggtccaggtgggtcactgccttctggtcccgcggtgccaacaatgcactgggtataccagcatttattattaagtttagtgagggcgggggtaggtcagtgagggatttagggtcatttgattatgaggtgagatggtcacatggggatgaagtaattctttaacataacatttgtatgaagaagtacagtaca

SEQ ID NO: 476652 - DNA, 627 bp, Homo sapiens
atgaattacaagtctcttccctttgtgtcttgtctttcactttcttaatggtgtcgtttgataaacagatgttctgtattttaatgaaggctaattatttatttttcctatcaggcttattgcttcttgtgtcctgtttaagaaatatttgcataccccaaggtcacagacattctccactaggttttctaaaagcttgcttttcgtaggtttcatgattaattttcatcttaagttaattttgtgtatggtgtgaggtagaggtcaagatgtatgatttttccagttgcygccgcaaaatgtattgagaagatcaccctttccgtcactgaattgcagccataaatcaaataaccaatatgtgtgatctatttccgcactgtctttccctggtctttatatttaaccttgtgccaatatgagggtggtaaattttaatcatcttcctttttatgtaggcatttaaaactatcctgttataagtgctctggtaatagaaatacagactataacacacgccagaggatttgacctaagggaagagggtcagagttggctttctgagcggatgtgccatttaggtggagaagtactttgtgcgtctgcattctagggcatgccctgctt

SEQ ID NO: 476653 - DNA, 627 bp, Homo sapiens
atgaattacaagtctcttccctttgtgtcttgtctttcactttcttaatggtgtcgtttgataaacagatgttctgtattttaatgaaggctaattatttatttttcctatcaggcttattgcttcttgtgtcctgtttaagaaatatttgcataccccaaggtcacagacattctccactaggttttctaaaagcttgcttttcgtaggtttcatgattaattttcatcttaagttaattttgtgtatggtgtgaggtagaggtcaagatgtatgatttttccagttgctgccgcaaaatgtattgagaagatcaccctttccgtcactgaattgcagccataaatcaaataaccaatatgtgtgatctatttccgcactgtctttccctggtctttatatttaaccttgtgccaatatgagggtggtaaattttaatcatcttcctttttatgtaggcatttaaaactatcctgttataagtgctctggtaatagaaatacagactataacacacgccagaggatttgacctaagggaagagggtcagagttggctttctgagcggatgtgycatttaggtggagaagtactttgtgcgtctgcattctagggcatgccctgctt

SEQ ID NO: 476654 - DNA, 634 bp, Homo sapiens
tattcctttagcatcatgagccacatatgatagtattgctagatcagttctcataatgtaccctttgcaggatagactgtgaaaatctaattttggcaaaatgactgaaatcccagtgaatgattttttcttttcttatataaasctaagcatccaatagtgaaagtttatatgactcaaatggaagaagaattcatgacaaaaggtgtgattattcgcataagaccctgaaattcctttctgggtgaaataggccctttcttccttccataagaggctctgactgatgagttggcttttattaggcaatgtatgtctgatgcaatatctgtggataaaaccaccagcccctatcaagtcaatcaaatatttactgagcacttattatgtccaagacactttggagaacaaagaaatataacctggccttgcccttcaggctgtatcaattgagatagaatttggactgctgcaatcaattacacagatgtctctcaaggtagtgtcttgatgcttgagggaaacaagacaaaatgctattaataatgacttagttttctttgtcaagcaatcggcttgccacatcattgaggtaacttcacattttcttgcatcttttacaattagcagcttc

SEQ ID NO: 476655 - DNA, 634 bp, Homo sapiens
tattcctttagcatcatgagccacatatgatagtattgctagatcagttctcataatgtaccctttgcaggatagactgtgaaaatctaattttggcaaaatgactgaaatcccagtgaatgattttttcttttcttatataaacctaagcatccaatagtgaaagtttatatgactcaaatggaagaagaattcatgacaaaaggtgtgattattcgcataagaccctgaaattcctttctgggtgaaataggccctttcttccttccataagaggctctgactgatgagttggcttttattaggcaatgtatgtctgrtgcaatatctgtggataaaaccaccagcccctatcaagtcaatcaaatatttactgagcacttattatgtccaagacactttggagaacaaagaaatataacctggccttgcccttcaggctgtatcaattgagatagaatttggactgctgcaatcaattacacagatgtctctcaaggtagtgtcttgatgcttgagggaaacaagacaaaatgctattaataatgacttagttttctttgtcaagcaatcggcttgccacatcattgaggtaacttcacattttcttgcatcttttacaattagcagcttc

SEQ ID NO: 476656 - DNA, 634 bp, Homo sapiens
tattcctttagcatcatgagccacatatgatagtattgctagatcagttctcataatgtaccctttgcaggatagactgtgaaaatctaattttggcaaaatgactgaaatcccagtgaatgattttttcttttcttatataaacctaagcatccaatagtgaaagtttatatgactcaaatggaagaagaattcatgacaaaaggtgtgattattcgcataagaccctgaaattcctttctgggtgaaataggccctttcttccttccataagaggctctgactgatgagttggcttttattaggcaatgtatgtctgatgcaatatctgtggataaaaccaccagcccctatcaagtcaatcaaatatttactgagcacttattawgtccaagacactttggagaacaaagaaatataacctggccttgcccttcaggctgtatcaattgagatagaatttggactgctgcaatcaattacacagatgtctctcaaggtagtgtcttgatgcttgagggaaacaagacaaaatgctattaataatgacttagttttctttgtcaagcaatcggcttgccacatcattgaggtaacttcacattttcttgcatcttttacaattagcagcttc

SEQ ID NO: 476657 - DNA, 634 bp, Homo sapiens
tattcctttagcatcatgagccacatatgatagtattgctagatcagttctcataatgtaccctttgcaggatagactgtgaaaatctaattttggcaaaatgactgaaatcccagtgaatgattttttcttttcttatataaacctaagcatccaatagtgaaagtttatatgactcaaatggaagaagaattcatgacaaaaggtgtgattattcgcataagaccctgaaattcctttctgggtgaaataggccctttcttccttccataagaggctctgactgatgagttggcttttattaggcaatgtatgtctgatgcaatatctgtggataaaaccaccagcccctatcaagtcaatcaaatatttactgagcacttattatgtccaagacactttggagaacaaagaaatataacctggccttgcccttcaggctgtatcaattgagatagaatttggactgctgcaatcaattacacagatgtctctcaaggtagtgtcttgatgcttgagggaaacaagacaaaatgckattaataatgacttagttttctttgtcaagcaatcggcttgccacatcattgaggtaacttcacattttcttgcatcttttacaattagcagcttc

SEQ ID NO: 476658 - DNA, 365 bp, Homo sapiens
ttgctttatgctgtgggccccttttccttgactctgactgtacttttgctggttcctgcgtccatctcttgtcacawagctcaatttgcgtgtgccatcaatttcctgctgggattaagatacctggcagtgcagggtttcctgggatatgggacctctaaaaccgaaacctagacagtcccagtaaatcaggaggattaatctccctaactggaacccagccctgtctcctcccttggccctgctccaattaccttcattctggccctcagtacccccaagttggataacggctttgctggccagtgactaaatacagtggccagatggggtctgtggccatcgccatgtgcacctctctgcta

SEQ ID NO: 476659 - DNA, 365 bp, Homo sapiens
ttgctttatgctgtgggccccttttccttgactctgactgtacttttgctggttcctgcgtccatctcttgtcacaaagctcaatttgcgtgtgccatcaatttcctgctgggattaagatacctggcagtgcagggtttcctgggatatgggacctctaaaaccgaaacctagacagtcccagtaaatcaggaggattaatctccctaactggaacccagccctgtctcctcccttggccctgctccaattaccttcattctggccctcagtacccccaasttggataacggctttgctggccagtgactaaatacagtggccagatggggtctgtggccatcgccatgtgcacctctctgcta

SEQ ID NO: 476660 - DNA, 591 bp, Homo sapiens
tcctacatagtcttcatacaaactataaattgagcatgagagacattctttttttttttttttttccaagactaacttttgctctgtagcccaggctagagtgcaatggcatgatcttggctcactgcaacctccgcctcccaggttcaagcaattatcctgcctcagcctcccgaatagctgagattatatgcatgcaccaccacgcccagctaatttttgtatctttagtggagacagcattttaccgtgttggccaggctggtcttgaactcctgacctccagtgatctgcccaccgcagcctcccaaagtgctgggattacaggcrtgagccactgtgcctggccggcagcaattcttttatatacttggagggtaggcacttgaagcccagaaaggctaaaagactaggacattaagtcatagaggagggtttttttttttttttttaagttttgttgttggtcgtgatggtgttattcaattcttttattatctcagaactcatgtcatactgccccagcctctgtatcagcattatgtagcaatgatgttactgagcctgatctctgtaagaggctctgaataa

SEQ ID NO: 476661 - DNA, 431 bp, Homo sapiens
ttgggccatagcacaacacctattagctcgcttacgtctaggtcrgtagaacctcctctggacctcagctactcttcccactctgcatctcgagacacttgccttctttccatgtgacttatcgctaagctcctgactgcatgaacctccttccttccactggtccaagtgacatcattcccccgtcctcactcccaataccaccacttcagtaacctcccacatgttttcctgctctactttaatccagtctacacagagagagcagccagccactatcctgttttatttatttatttttttacttccttaacagacgtttactggatatgtcctgaatcccagtcactgtgttaggaagtagctcaatccgttgtctgtacacctccatgcatccgttccttcattcaatgatgagtacataggacagg

SEQ ID NO: 476662 - DNA, 431 bp, Homo sapiens
ttgggccatagcacaacacctattagctcgcttacgtctaggtcagtagaacctcctctggacctcagctactcttcccactctgcatctcgagacacttgccttctttccatgtgacttatcgctaagctcctgactgcatgaacctccttccttccactggtccaagtgacatcaytcccccgtcctcactcccaataccaccacttcagtaacctcccacatgttttcctgctctactttaatccagtctacacagagagagcagccagccactatcctgttttatttatttatttttttacttccttaacagacgtttactggatatgtcctgaatcccagtcactgtgttaggaagtagctcaatccgttgtctgtacacctccatgcatccgttccttcattcaatgatgagtacataggacagg

SEQ ID NO: 476663 - DNA, 605 bp, Homo sapiens
tttttatgtgacacatttaggtgttccttaaataaaatgaarttgaccaaagttctggttagtatgtagcaaactaaaattatgtgaaaatatccaaagccttaacagagctaggatattcccgcatccacactcacacagctactcactgtaaaagtgatcgttgacaaacataaggaggcaaataaaagggcatagcctttgtcttttaaaccactgtgacaggaaaagttatggggagtgggtcagtgaggaaggaagtctgaacattgctgcattcaacagagaaagtaaatgaaaggaagacgcttacaaataagagagaagaaaggaccgcattaactctaaagaaggggctagcaggtcctgtggagccgatggggcagtgcaaaagcctgaccatgctgatctccattgggtgggtccaatggaagaacgctcagggttacgtcaggaaggtgccctagttttggggaaagaacatttcaactcaggttcagaggaaaatttagatatgttaaaactttagataagttaatagacagggcagaaatgaaagaaagaaagattcttcacagggaagtcctggctatctaactgtgaaa

SEQ ID NO: 476664 - DNA, 605 bp, Homo sapiens
tttttatgtgacacatttaggtgttccttaaataaaatgaaattgaccaaagttctggttagtatgtagcaaactaaaattatgtgaaaatatccaaagccttaacagagctaggatattcccgcatccacactcacacagctactcactgtaaaagtgatcgttgacaaacataaggaggcaaataaaagggcatagcctttgtcttttaaaccactgtgacaggaaaagttatggggagtgggtcagtgaggaaggaagtctgaacattgctgcattcaacagagaaagtaaatgaaaggaagacgcttacaaataagagagaagaaaggaccgcattaactctaaagaaggggctagcaggtcctgtggagccgatggggcagtgcaaaagcctgaccatgctgrtctccattgggtgggtccaatggaagaacgctcagggttacgtcaggaaggtgccctagttttggggaaagaacatttcaactcaggttcagaggaaaatttagatatgttaaaactttagataagttaatagacagggcagaaatgaaagaaagaaagattcttcacagggaagtcctggctatctaactgtgaaa

SEQ ID NO: 476665 - DNA, 579 bp, Homo sapiens
gtgcccggcccaaaaggcccactcttgtccagctctatcctttccccatccccttcctcagaatggggagacacactttctggatatgtctaggacctgagaactcactcaattctacccgtgcttcttaagcctgcttcatgccaggccctatgtgaggcactgcaggtaagaatcaaatcaaagagccaggtgtggtggctcacgtctstaatcccagcacttggggaggccaaggcaggtggctcacttgaggtcaggagttcaagaccagcctggccaacatggtgaaaccccatctctactaaaaatacaaaaattagctgggtgtgggggcatgcacctgtgtaatcccagctacttgggaggctgaggcaggagaatcacttgaacccaggaggcggaggttgcagtgagccaagatggcacgactgcactccagcctgggccacaggccaagactctgtcccaaaaaaataaacaaataaataaaaactttaagaattaggtcaggtcaaagaccagctcgcacacctctaagaattagggctcactacaacccacacccctgggccatgc

SEQ ID NO: 476666 - DNA, 260 bp, Homo sapiens
gatcacaggggaactgtatctcttgggtattcaggagacacggaagagaagagacagctccggctcttttactggaaggttcctctccagtgagcacctctgactttcagggcagaaatagctggagatgcaygaacatgatgggaaacccagaaaggctctttttcttaattttggtatccgtcagacttggattctcaccttagattaggtaaagccactgaaacaagtaagaaagcctctaggatccaaatacaagc

SEQ ID NO: 476667 - DNA, 460 bp, Homo sapiens
gttttgcacagtaaagtgtttatacggaatattctattttaaaaggcaagtgtacctcagaagtcccacccaagggatcagagctctgtgtatattcatggcagagggaacagcagcttgttcacttcatgggacttgaaaaaattatccatactagaaatcattattttaaaatgtaggagtattttgtctaatattttattgaggaaaagctaaatctaggatatcaggtggcagtggtgggagaatrtgtaatatttatttgaccaagagaaagcgaaggacttggcgtggtggctcacgcctgtaatcccagcactttgggaggccaaggtgggatggttccttgggcccagtaattcaagaccagcctgggcatcataaataatacaaatattttattataaagaaaataaaaaaattagctgggcatggtggcacacacctgtagtcccagcta

SEQ ID NO: 476668 - DNA, 508 bp, Homo sapiens
tctgcaggaagagggaggggaagtcagctagcaaagggctggtgggaatgggggaacagaggaggccagagtggctggagagtagggagkaaaagtggagggtgggacctgggtgcagggccatgtgtgctgtgctgtggtgtttgggctttatagtaagtgttatggcaaacttgggaacgctgacctaattagtatgtatgtgtatgcaagtttttctttaatagactttattttttagggcatttttagtggacagtaaaattgagcagaaggaacagatgtttcctctaattcccctgccccatcgcatgcatatgggagcttgagcttccgttatcgaaatcccccatcacagtggtacatgaattacaatggaggaagctgcttggatacatcatgatcacccaaagtccatagttttcactgaggttcactctcactcttgtacattctgagtttggacaaatgaataaagtcgtggatcccccactgtagtatcatccag

SEQ ID NO: 476669 - DNA, 507 bp, Homo sapiens
tgcaggaagagggaggggaagtcagctagcaaagggctggtgggaatgggggaacagaggaggccagagtggctggagagtagggaggaaaagtggagggtgggacctgggtgcagggccatgtgtgctgtgctgtggtgtttgggctttatagtaagtgttatggcaaacttgggaacgctgacctaattagtatgtatgtgtatgcaagtttttctttaatagactttattttttagggcatttttagtggacagtaaaattgagcagaaggaacagatgtttcctctaattcccctgccccawcgcatgcatatgggagcttgagcttccgttatcgaaatcccccatcacagtggtacatgaattacaatggaggaagctgcttggatacatcatgatcacccaaagtccatagttttcactgaggttcactctcactcttgtacattctgagtttggacaaatgaataaagtcgtggatcccccactgtagtatcatccaga

SEQ ID NO: 476670 - DNA, 640 bp, Homo sapiens
gagatgggagcaggtgtctcctccccaggaagggccacagggatggatgtcaagaggarataggaagcaggaggaagaaagagtgtcacatgctggctggaaagttgagaattcttgccccatgtctgaggagtgcagcgagaaccctgtagttttgcctgctcaaccttcatcccttcacctcttctggaaatacattttgattttcctttgggggctccctccctcactctcagtccatgtagttctaaggagattgacccattgccaggctctacatgtgggcatgtgactcaagccagccccagcaaagccaaaccaggaacttttgtgagagccataagaagatactgtttttactaaggttgctaagttggtaggatataaacatgacattgcagacaaccaactaggcactctgcagtgaaattctccatgatactaaagtcaacgtagagggaagcagaaccagagggtagaggaagattcctgaggacatttttgaacacctagacccagccatacctgaacccatagcctcctaaatgtcttattttagtaagacaatgagttccccttttaaaattaaatatattaaactcttacaagtagagattgctataaatatgcttctaacgtg

SEQ ID NO: 476671 - DNA, 640 bp, Homo sapiens
gagatgggagcaggtgtctcctccccaggaagggccacagggatggatgtcaagaggaaataggaagcaggaggaagaaagagtgtcacatgctggctggaaagttgagaattcttgccccatgtctgrggagtgcagcgagaaccctgtagttttgcctgctcaaccttcatcccttcacctcttctggaaatacattttgattttcctttgggggctccctccctcactctcagtccatgtagttctaaggagattgacccattgccaggctctacatgtgggcatgtgactcaagccagccccagcaaagccaaaccaggaacttttgtgagagccataagaagatactgtttttactaaggttgctaagttggtaggatataaacatgacattgcagacaaccaactaggcactctgcagtgaaattctccatgatactaaagtcaacgtagagggaagcagaaccagagggtagaggaagattcctgaggacatttttgaacacctagacccagccatacctgaacccatagcctcctaaatgtcttattttagtaagacaatgagttccccttttaaaattaaatatattaaactcttacaagtagagattgctataaatatgcttctaacgtg

SEQ ID NO: 476672 - DNA, 640 bp, Homo sapiens
gagatgggagcaggtgtctcctccccaggaagggccacagggatggatgtcaagaggaaataggaagcaggaggaagaaagagtgtcacatgctggctggaaagttgagaattcttgccccatgtctgaggagtgcagcgagaaccctgtagttttgcctgctcaaccttcatcccttcacctcttctggaaatacattttgattttcctttgggggctccctccctcactctcagtccatgtagttctaaggagattgacccattgccaggctctacatgtgggcatgtgactcaagccagccccagcaaagccaaaccaggaacttttgtgagagccataagaagatactgtttttactaaggttgctaagttggtaggatataaacatgacattgcagacaaccaactaggcactctgcagtgaaattctccatgatactaaagtcaacrtagagggaagcagaaccagagggtagaggaagattcctgaggacatttttgaacacctagacccagccatacctgaacccatagcctcctaaatgtcttattttagtaagacaatgagttccccttttaaaattaaatatattaaactcttacaagtagagattgctataaatatgcttctaacgtg

SEQ ID NO: 476673 - DNA, 640 bp, Homo sapiens
gagatgggagcaggtgtctcctccccaggaagggccacagggatggatgtcaagaggaaataggaagcaggaggaagaaagagtgtcacatgctggctggaaagttgagaattcttgccccatgtctgaggagtgcagcgagaaccctgtagttttgcctgctcaaccttcatcccttcacctcttctggaaatacattttgattttcctttgggggctccctccctcactctcagtccatgtagttctaaggagattgacccattgccaggctctacatgtgggcatgtgactcaagccagccccagcaaagccaaaccaggaacttttgtgagagccataagaagatactgtttttactaaggttgctaagttggtaggatataaacatgacattgcagacaaccaactaggcactctgcagtgaaattctccatgatactaaagtcaacgtagagggaagcagaaccagagggtagaggaagattcctgaggacatttttgaacacctagacccagccatacctgaacccatagcctcctaaatgtcttattttagtragacaatgagttccccttttaaaattaaatatattaaactcttacaagtagagattgctataaatatgcttctaacgtg

SEQ ID NO: 476674 - DNA, 605 bp, Homo sapiens
gctctggcttcctttctgctcttaaagttgccttgcttcctcctgccccagggcctttgcacatgctgtttttaccactgggcatgctctcccactgttctcctttcagttaatctcctgggagggtcttggaaaaatcctccaawtattgccggccactcttttaagaccaccgtgtaatggcgttcatgtgttatatgaggttaataagttctgacagtattctaaataaagtaaactaaaacctccacttacttctaataaaatgcttgcatatctgtggtgggaaaggggaattattcagtggctaaaggtctttttagtggcagctcatttctgtttcagaattatacttgcttgcttttctgatgtatggatatagaaatgtctctataaatagattaaagaaaaacctgtccatcaacaatccaaactgaggaaggaaagcctgagactgaaagtcatcacaaatctctagatctcttccccaacaaagcgagatgaggcgtcccctccccaaaccctcactcctaaactagttcttctagccaaagctcaaggatagccatctccattatttttcccaaaaagaccctcataactac

SEQ ID NO: 476675 - DNA, 606 bp, Homo sapiens
tgctctggcttcctttctgctcttaaagttgccttgcttcctcctgccccagggcctttgcacatgctgtttttaccactgggcatgctctcccactgttctcctttcagttaatctcctgggagggtcttggaaaaatcctccaaatattgccggccactcttttaagaccaccgtgtaatggcgttcatgtgttatatgaggttaataagttctgacrgtattctaaataaagtaaactaaaacctccacttacttctaataaaatgcttgcatatctgtggtgggaaaggggaattattcagtggctaaaggtctttttagtggcagctcatttctgtttcagaattatacttgcttgcttttctgatgtatggatatagaaatgtctctataaatagattaaagaaaaacctgtccatcaacaatccaaactgaggaaggaaagcctgagactgaaagtcatcacaaatctctagatctcttccccaacaaagcgagatgaggcgtcccctccccaaaccctcactcctaaactagttcttctagccaaagctcaaggatagccatctccattatttttcccaaaaagaccctcataactac

SEQ ID NO: 476676 - DNA, 596 bp, Homo sapiens
gtgggtgtgtgatatagtatgttaacgagcatatattgaggtcctagggaaaacctaagtgaaatccaccaccacgatgggtccarttggtcttagccagcttggcccacactcttgttttttcagggtcttatcagcccctagcttctgcagctatttcaacattttccttttgctaatcatgtgaaactactgcctggaattttctattcttctatgaccaccctgtattcttcttgtctcatggggagcaagggagctgaggtataagtaccccagtcattgggtgagggttgctcctgagagaggtgctgattctcatcgcattcagcctgctgcatagatgagcaaaggcctttggctgctggtgcaagttctctggcaaaggaatgcaggtgctgacaggtgcatttggcctgatatgcactgtagggggatggcttccagggcaccctcaatgcctcttaaaatcattctctccttaaaaccagcccattcatctcttgggggcttctgcctctctttcagacaaattattgcagagagtccagtagccaagtagaattgcattgagcaggcacatttgacaatgacat

SEQ ID NO: 476677 - DNA, 596 bp, Homo sapiens
gtgggtgtgtgatatagtatgttaacgagcatatattgaggtcctagggaaaacctaagtgaaatccaccaccacgatgggtccaattggtcttagccagcttggcccacactcttgttttttcagggtcttatcagcccctagcttctgcagctatttcaacattttccttttgctaatcatgtgaaactactgcctggaattttctattcttctatgaccaccctgtattcttcttgtctcatggggagcaagggagctgaggtataagtaccccagtcattgggtgagggttgctcctgagagaggtgctgattctcatcgcattcagcctgctgcatagatgagcaaaggcctttggctgctggtgcaagttctctggcaaaggaatgcaggtgctgacaggtgcatttggcctgatatgcactgtagggggatggcttccagggcaccctcaatgcctcttaaaatcattctctccttaaaaccagcycattcatctcttgggggcttctgcctctctttcagacaaattattgcagagagtccagtagccaagtagaattgcattgagcaggcacatttgacaatgacat

SEQ ID NO: 476678 - DNA, 589 bp, Homo sapiens
cgtggggctcacacacaaaggaagaggttagagagtccgcagaaaagggtgggagctcaaaacagtggttcttaggcgtttgtctgcaggcacgctggtaattcatgctgaccatgcccacaatcagtggcacctagctgtggccccacccctttcctgcccactattgaaagtgactacatggcaaagagcgcctatttcctagactaaatcattctcagacttaagttattagtgagcgytgttagactcaagttccttgatatctacatcacaactgagtagtttatctcagtggtaagtctcgaagtttgacttcgaagttactaagagccttccaataaaagaacagtttaagccaatattgtttcaccattgatagtgatgaagatattaaattcacacacatgtgctgtgtgattttaaacctttctcaaatgtgtatgatttttataagcagaaatataattttaagaaagctttatatctatgtaatagggttcttttttttttgggaaatattgccatcctgtaaattccagtcctatgttcctgagttattccccactaaggaaagcccagctgtggg

SEQ ID NO: 476679 - DNA, 587 bp, Homo sapiens
tgtttgccaatgagtgcagattgagtttgggtgtacaggctgggctgtcaacttgcaggcactcaaggcccctcaagtgcaagacagccagaagtgggaagagaagagaacaggccatgtgtcagggacacagaggtgagctccacctccaccacctccttctaaaaggaacccaaggattctaaaaccaatcttgccttctgggttatttgaaggtatatttctcaaagtagaaagattggcgagtagagcctactttagcagcctattacatagaattgtaacttatacacataggcatatggtgtgcaggcctccgtctgtaccctcacacttcccaatacaaacgttaaagataggcctgcccagactttctagcactccatatcaccaagtggtcagatttgcttctttcattgtttcctcaatatgccaagatatataattgccaaagagttaaggtgaaaagtcatgttattccactttttttttttttttggaagcmgggtcactctgttgcccaagctggagtgccagtggcgtgatcacagctcaccactgcaacctccacctcccaggcccaagca

SEQ ID NO: 476680 - DNA, 407 bp, Homo sapiens
aagacgctgtttaccatcctttgtgaaacgggaatgatgatgatgacccatcactcactggagggaatgaatgcaaagtgcctagcacatgtatgcatccaatacatgccacttcccttcccctattaaatatatatttattcctttgacttacccctgtgcttttcagcatgtccatttcccatggccttggctactgtgggggaagagggcactcacagggtgttttgccttccatcaaaaccaacctcccctgctctctttttctaagkatcctgccttctcttctacttgggatgagttaatcagatgaactaaacagagtcagggcgcgctagccaacaaggttccagaaggtggttaatgtgaacagagggtaactttagtgggagttcccctctctgtgc

SEQ ID NO: 476681 - DNA, 486 bp, Homo sapiens
accaaaaaaataaaaataaaataaaataaaacttcccgaatatgttttatttccttgaatccctgtttactacaaaaaaaaccctratctgtactctgatgctttgaactgagaatggatgaaaatggtatatttttcagtggaggattcttaaagctaaattgttttagctaaagtaagtgggtttctaaggttttctcctgctctgcttcatgcatgtctataaaatcacaaaatgtcagaacaggagggaatcttaggctcatctaattcaacgtcttcggttcacagagttgtaaatcagggctcagagacaagatgggacttcctcgaggtcatgactaggtgacctcatgacaagctggtaggagtctatcatatatttgttaaaagacctcagagctgggacagaaccttggagcaagttcctttgatccaaggcacacaggtagtgggggaaccaagtacacatttcccaccctgcca

SEQ ID NO: 476682 - DNA, 509 bp, Homo sapiens
gaattcagctgtaagaatggagatgtggatgtgaaatgagagaagttctcaagatacaggtgactggatttgatatatttaacatggataattataaaaacaacatctagaagaggttgatgataactcttataagaaatgtagcagccagatggtggagcactstggtaggagaggcgagatgaagaccaaactggataacagcttttcccttcatttcagtttttttgtagtgtttcactttgatctccattaattatactgtagcccttaaaaagaaaaaccatcatccccaatattttaacagtgtgtttctttcaacaaacatgtggacacatttgtggagagcctcctcagaccatggagctgtcccagggcaggaatacagagataaataataaaattcctgcccatgaagaacgcagagacccaaagaaagattaatagtgtagatttcagtagagaaagaactggaccatagtaaaaagacatattctgtgactttgggg

SEQ ID NO: 476683 - DNA, 588 bp, Homo sapiens
aaaaactggaaaggaggagaagagagtgttgaaagaagggtcttaaaatggagaggttagtgaagaagatatcttagtaatttgtttatcctattggtgaaagttctagctgagttacaaatattggcaggagtagcttccatagaagtctctggtgtttacaaaatagctgaggggaagtaaggaacattcagtgtttcagttgccttgtagtttatctagacactaggtcacttgctcctgggatttgtggggatgagttgagatgagtttcactcagttaacatgatcccagggtgaagcagttggcctgttgaagggtagagaggtgtttagaaaacagctttaatttaacaaaaccagaacaaatatcttattggtccttgacctgagcttaggttaatttttgtaaaaaataacaagattacaacccatgctgtggatcatttagctcatattttagaattaatcatagggaacaaactgaaasattgatagacatagtggaaaacataaatgagcaatcagggtcaggaactttggctaagacatatgctgcatgcaaatttaatataataggtatagcga

SEQ ID NO: 476684 - DNA, 457 bp, Homo sapiens
agttcctcttcttttacctccttattattgcaggtaatggtagtatattgggggaagctaggtataagtgtcttagccacaaattcagtttctacaagtattaattgagttattactgtgtgcctgacaccattctagatgttttcacatactacgtagggagtgaaggatgtacaaaacaaactaaaatggagaatacggtgtgagacccaatatctatkgactgcctatgctaagtgagggtaggtgtctcattgaatcctcataacagggctaaggggcagggttattagctctaatgaaagtcagaaaaatgaaccaacatgtgcaatatttttttttttgagacggagtctcactctgttgcccaggctggagtgcagtggcacaatctgtgctcactgctacctccatcccatctcctgggttcaagcgattctctgcctcagcctctcga

SEQ ID NO: 476685 - DNA, 459 bp, Homo sapiens
aaaggttattccgggaaagcgctcctgcctcctgagaagggtcatcatctggggagatcatcgccctttgggaaaagcacgttgtcttcctcctcaccagtggcacatgagactggtcagtatctaatacagagcgtcttggatgctgccccagagcctggcttatagagctagcatggaactcacaccacagcttccctggtccacagaggctctcaccgccattgccaccagtatggtggtatgtactcacaaagattaagaaagaaatgtattctgattagattgtattggtccttctttttatatctctatttatctccccctrttgagtcattctttccttctgcccacagaaatagttggcacttggtcccagctattgtatagacattgcatagagacatttggctgaaaatgttgaaagggaaaaaaacactagacatttttcccctgtgt

SEQ ID NO: 476686 - DNA, 566 bp, Homo sapiens
cctacgaacaaagaggcaacacgttcccctgtggctctcacaagggaaggggagtgcctggattttagggctagattctataccacgaccctgctcccttccccggcctccctcctcgagtcctccgcactctatattcacacacttttatgaagttctcttaaaacatttataaccttttgtgattaacacttgagataccactgatcacatggggtcagaagacattgaggcgagtttaaggaggatggcaggtaagagaagggggcagcaagggatgcctggagtgagatgagactgccgggagtgagccaagtgaagcgggactkggtgaggtcaggggaggcgaggtgcacctgcacaaggggacatggccatcctggagcagcagacacctcagggacgggggcgcagggggaggggggcggggaggctcagcaaacagctaaaccaagtggaaaaaaacttgcagcctttgcagaaagaaaaatctggaaagatagagtctaaaaatagataagttggccaaacagactaggaatttagagaccagcgttctggtctag

SEQ ID NO: 476687 - DNA, 539 bp, Homo sapiens
tgctttttgtcttcatgttctgaaatggatgattgcttaggattcctgctctacgtactcattagcggagacacctgcctttctacatttgaccaaccaaaaacaagcttaacaaagcactgttttgtttcaacaggcctgctgactcatattaaacctatcgtaagattttttttccaaatccacctgtgtttaaatctgctaccattggattgggcgtagtggctcacaactgtaatcccagcactwtgggaggccaaggcaggagaattgcttgagcccaggagttcaagaccagcctgggcaatatagtgagaccccccccccccccccgccgacccccaccaccccatctctacaaaaaatttaaaagttagccagtgtggtggtgcatgtctgtagtctcagctattcgggaggctgaggtcggaggattactctagtaatcctagtatttactcctaggctctagcataggagttcaagggtacagagagccatgattgtaccactgcactccagcctgggtgacagagtaa

SEQ ID NO: 476688 - DNA, 288 bp, Homo sapiens
gctgcagaagcctgtgatggggtcaggaggggaagtggtaagatcactctgagccccttaagtagggtgaccatataactttatattcctaatggagacacattggagagagcaagagggtgttattaagaattactctgagaaacctctaggatatatagccaagcacctgtctagccaagggagcctttcaagcaagggagtgacacaatcaaatttgcttatttaattatttatttatttatttatttatttatwtatttatttatttgagacggattttcaccc

SEQ ID NO: 476689 - DNA, 443 bp, Homo sapiens
aaaggggatctggtgaacttccaatttctttggtcaagcagttgacagagtaaaagagacttggccttggaggtcagttcatctaccagtattaattaaatgtcagttatatgcaggtattgaggaaagactgttctactccagtttattccatgaaccagccacacaccctggccagccggcagccacactctctcttgctgagacactactatttctcctgttattctataaacatgaaaacctcttcttttgtagttcctgcactctgggtagtaagttccaaccacgtacctgccttgtcataagctctgttcataatcaacctttcatcaaatgtgggttttattccctaaaacartaacaggaaagagaaatactatagctgtgggccaagtccagttggtgacgtgagtcctcacactagtgttcttctggttgct

SEQ ID NO: 476690 - DNA, 509 bp, Homo sapiens
gggtcggtcggggagacactcagtacccagcaggcatagcctttggagaccagagagtcactaggtatactggataggactgatttggttgcaagtgacagaaactcagccaaaacttgctccagcacaaagsgggatttattagttccaccttatttcaaggtcggggtcaaggtggtcaaaagaactgttttgctctctctctcatctcagattgacgtcacctttcttactgtctccctgtggcaggaaactaagcgctagcagcccatataaacatccctgcacctcctaggccttcagataagagattgccccttctccacaggctagggactggtctggcctaagccaagtgctcatcttagcaccaaccatttcagcaaggatgtaacagaccataactggcccaaaccagttcatgcaaattaccaccacccccctcactttcatagttcctaagatggagctattaataccaagtgtggacacatgtgctggacaagata

SEQ ID NO: 476691 - DNA, 470 bp, Homo sapiens
ttggagaccagagagtcactaggtatactggataggactgatttggttgcaagtgacagaaactcagccaaaacttgctccagcacaaagcgggakttattagttccaccttatttcaaggtcggggtcaaggtggtcaaaagaactgttttgctctctctctcatctcagattgacgtcacctttcttactgtctccctgtggcaggaaactaagcgctagcagcccatataaacatccctgcacctcctaggccttcagataagagattgccccttctccacaggctagggactggtctggcctaagccaagtgctcatcttagcaccaaccatttcagcaaggatgtaacagaccataactggcccaaaccagttcatgcaaattaccaccacccccctcactttcatagttcctaagatggagctattaataccaagtgtggacacatgtgctggacaagataaca

SEQ ID NO: 476692 - DNA, 509 bp, Homo sapiens
gggtcggtcggggagacactcagtacccagcaggcatagcctttggagaccagagagtcactaggtatactggataggactgatttggttgcaagtgacagaaactcagccaaaacttgctccagcacaaagcgggatttattagttccaccttatttcaaggtcggggtcaaggtggtcaaaagaactgttttgctctctctctcatctcagattgacgtcacctttcttactgtctccctgtggcaggaaactaagcgctagcagcccatataaacatccctgcacctcctaggccttcagataagagattgccccttctccacaggctagggactggtctggcctaagccaagtgctcatcttagcaccaaccatttcagcaaggatgtaacagaccataactggcccaaaccagttcatgcaaattaccaccacccccctcactttcatagttcctaagatggagctattaataccaagtgyggacacatgtgctggacaagata

SEQ ID NO: 476693 - DNA, 510 bp, Homo sapiens
tcactatgactaaaaaattaaaacttgctcctagatgtgctaccaatggtaacccgagggctgaatgactttaataccaaccagaattcaaagaaatcaacctcgggctccaccattccgtttgtctgaatatggactctggagcacaatttaacctcattgctgagacaacctgaaattatttcttgagattttgccaaatcccatattccaaaatacttacttattacctaaagatgacctctgatacttaaatcagatgctgaaataatgcacaaaggatttcaaacctgaagtatttaacacctaaatccatttgactccccttgggtgtgtgggtagtaaaaggtttttgaagctgtatctccaacctttaaagcaagacgacaataatctcaaatttactcayttttacctgtgataccaatgtcaccccttatcaccagtgagcaaaagacacctagatcatttggggaaaatgagagaagtaaaatgccaggttttgtagcc

SEQ ID NO: 476694 - DNA, 627 bp, Homo sapiens
tcatttcagttcccagaagttcgcacgcaagactgttagaacagtcttgaatccacagtctccattagcaatgacgggaactgccccacggtgccttgagcgattcttccgaaaggtcagatataaaccattcattcctgtgtattctaacccccctcctcctagcaccaaacccaattacttctgttttgtatgtcagtatctttattagtactgcacagcagaaagcacaatatactgaggtgacaatttttagctggcggcagatctgattaatgaggcaaggctgaaattaactttttctcatgtcacatagatttcccaagtcatgtaaaattccccttgttacactacccattaacatcttcaccaccaataaacacatggaaatatattgtacttttaactgaaacgggcatccatccatgtcctattatccctgtaartaaaatgtgacacgatttgatattaacacagataaatgtgtccatttagaaagttccttagtcaatacaatattttctgattggatgtctaaataaataatacagataggcattttatgttaaaaatagtaataggtacatcttgatgacaaaatggaatatagagtaaggcagaaatctt

SEQ ID NO: 476695 - DNA, 231 bp, Homo sapiens
tcgtgatgggcagggggccggggcatccactgtgtgattgaccctggtcacctgccctgacggccgggcatccgggctggagcagkgtccacctggatgagtcctggggctgtcaaaacaaaggaccacagccggagatcaaaacgacagaaagttattctctcacagttctaggggcccagtccaaaatcacggtgtgggcagggtcgcgctccctctaggggaggattt

SEQ ID NO: 476696 - DNA, 553 bp, Homo sapiens
ctggccttgtcagcgtttgtaacaagtgtcctggtccctctcctccaccttaaacatctagaaaacgccttgccttcccttgcactccacccgggcctgtgccaccgctaataaatcacgccccaggcctgmggctccagggaacgttaccttgccccccttggcgcctgccttgagcatggagggctctgcgcattctgcatgcagcaaaaggagaaatgccaaagccgcctcagacggttctcctttgaaattttcagcaccgtcctccgtgtggtattgtccacttggcccccacgccaggcaaaagactgtccatacaattggctgggtttgggggaagttctttgggtccctaggacatgaacaggcagggtggtggctcccaggctgtggggggcatagcagggatcactgcccctctgctacggggtccttgcacttgtgggcgagggggattctagggcagtctctggggtcacggggactgttctctgccttggtagaggtgaaggtcccctcaccttcacacgctaaggcctgcgtggagatg

SEQ ID NO: 476697 - DNA, 668 bp, Homo sapiens
accagagtcccgcacatgtttaagaaattttactgattcaagagaagtgctaaactgcaaattttctgggactatgaattcctcaaagaacagctatcattgtaatagatggagctcccctcttaataaaaacagcagaaacaacatcagccaggaggtctaccacaatgaggatgacgtggacatcttattgaacaacgtacgtggatcataccattcccatcatttatttgtcattctcacaacagcctcacatcatgttctgaatgcctattttactaatgaacacactgagaggttaataatttgctgaatcaatattcatactcagtgtcctttggtcccaaagccctggatttttccactacccagaaaacttgagaatagatgctagttttgcataaagtcatttyaactatttttgtatgattatgatattcatctcattaaaattttaggaaaatttttaagaaaaaagataaggaacattgttttaaattctgccaaaaaaaataacactctcccatcctttttgataggaaccagacagaggacgagagtccgcatgctgaaccacttaaattcacatggcggctaagaagacaagaagttcggcagcatagaggctaagaaagtaagagcatcctccgtgcctattcagttcccca

SEQ ID NO: 476698 - DNA, 333 bp, Homo sapiens
ctggagggcagcgtgtgggctcgccctctggctgcccataattgcatcattgtgtctgtgaacttgcagtcgagggcagggttgaggaataacgtggatcttccgagcccaaatgtctgccctgtcttggttcttttcaatcccgctcacccatgctaacccaaggccttgtctgctggccgtggctgcggtctccagcatgtgtctcctccaagctgtctccagccctcttgctccgtgctctcatcctgtctcattcacggacccctattggctcctgctactcaaytgaggctggcagtcctgaattcccaaccgatactcgtctttagg

SEQ ID NO: 476699 - DNA, 566 bp, Homo sapiens
tggttactttggccccagcccaattctcccgctctcctctctgcactgccctcccactccccaactttgctttttctcccaaaagaaaaaaataacgaaaccagagaggcacaacggaatcaaacagaaaaatcccaacttaagagaaaagcgacaaatccccaggggcataaaatcactaggggccttcacaggcgcttgtttgtttgctggttaaagactgacaggccggcgcagagggccacctacaaggaccaggggcaggcaagttagaagctcccatcttctgagtcctcactacctgccagsactttcttttttcttgaggagtagctcagcactcacgttaagtgtggctcagtgagttatcccacgtgtcctggcatgaccatgcccaggtggcaacacagcccactcccagtgcccttgggctccctgctcctccctctcagccagtggcctcttgcagctaactttcatcctcagctttatatccacggactcttaacagcatgatccatttcgtgtgggcttctttcacttgcgacgtctgggtggtccctctg

SEQ ID NO: 476700 - DNA, 635 bp, Homo sapiens
agcaatgctgactacagctgaggagagccaggggcatagccccgtcttatgcaagcccaagcacattctccatccctagcatttggaactgggaatgcagagggccagagggtctagactggtctaagcaaggatgggcaaagataccccagtctgtcacacaaaggaagaagcagagataggagtccgttcacacacatcagctcctactgacaaacagaacaaggtccttccactttaccaatgctacatccactggggaggtgatcagagaggtcctggattggctgtaaggttttctcttagtgaagcagcccagaagaaaacactatgctgaatcaggaaggcagttgagggcctcatacgtgcacttccactgctttaactgcaaggtggaatgagtcacactcggcctggggttaggcaccaccataagtgttcaaatgtctatcaactgaatgactgaaactacgtgctyagtagtcttccagctgagcaaaggacacaagatgtctgagtccctctcacttcgggtgtactttcactctgtactttcttcactcagagaatggcccatactgtgatatgctttaaaacagaggaaaaaggaagcttcagaaaaggtgaaaaaaccc

SEQ ID NO: 476701 - DNA, 424 bp, Homo sapiens
agctgtatgatcttatgcaagttactcaatctctctgccttcatttcttccgctgtaaactgggacagtgataaccccttgtgggtgatgtctgaggagctgggtgagggagcgggactgcacaggctctgactaccattggccctggtgcgatgacactccgccggtgggggcaacacacacgcgtcgtctcccagacattcagagcaacttctattaataccctgcctgcctgggccccagccatgagaactgcccctcactgaggcagagtctggtcttcctcttcttggggagacccagaacttccagagagtgtcctggaccatgaaggtgaccaggaaagsgaataggtgggtggaggccgctgcagtgaagcctcaggccccctctggtctctccagggtcatcctggatcatctga

SEQ ID NO: 476702 - DNA, 498 bp, Homo sapiens
tgattcataatttaataccccgtggggttcatgccacagggaagctccgctgccccacagggtctgggccaggtggaagagagcagcctttttggaccactggcggtgtcctctccttcgccatctaattgaagcccatcttcccaatcaaaagcaggcgaagggccccagcttcttctaacactcactccctggccctcactggcctccctgcctctctctgcccaacttctggcattgtgcaaggtctgagacctctttggacatgaggcatgtggtcttaacctggcccttgttccagacaggtgggcagacaggtaagcagagccggtgctcccagggcaggcgagggagccatgtggtcaggcctcaggaccctgggccccaccgggagatgtgctcctgggctggaaggaagcagaagagagcagggctcgatggcagcccaggcagtcccaagatggcagccctgytgcactcggtctggaagtgcccatg

SEQ ID NO: 476703 - DNA, 543 bp, Homo sapiens
ggggtggccacacctctgcccaggtggtgccaaggagggccaggagcacagccaggagatgcccccggccaggggaggtctctggatgcagcatgggtctgttgggcccgtcaggcgctccgtgcacagcctggctcagccacccggcttgtttctcaggctggatggagctattcacaatctccaggagtcaggctgggctggtggacaaaagaggggggctggtgracaaaagaaggaggctggtgagtgagtaatcagtgtgtccagacagcctcctgttggcgctggcatgaaaagagacaactcccggggatgcctgcctgctccggcctcggcctggccagcccgcccccgacagcaggcagagtggcgtgcactgccccgcggcccctgctaatcattgtgggattattagcacccttggggagcccccagagaccccgctgattggcctggggacattccggtgctgcagattagtgaccgatggccgtgtcctggctgggacagtgtcctccgagcccactgatggcttccgct

SEQ ID NO: 476704 - DNA, 543 bp, Homo sapiens
ggggtggccacacctctgcccaggtggtgccaaggagggccaggagcacagccaggagatgcccccggccaggggaggtctctggatgcagcatgggtctgttgggcccgtcaggcgctccgtgcacagcctggctcagccacccggcttgtttctcaggctggatggagctattcacaatctccaggagtcaggctgggctggtggacaaaagaggggggctggtgaacaaaagraggaggctggtgagtgagtaatcagtgtgtccagacagcctcctgttggcgctggcatgaaaagagacaactcccggggatgcctgcctgctccggcctcggcctggccagcccgcccccgacagcaggcagagtggcgtgcactgccccgcggcccctgctaatcattgtgggattattagcacccttggggagcccccagagaccccgctgattggcctggggacattccggtgctgcagattagtgaccgatggccgtgtcctggctgggacagtgtcctccgagcccactgatggcttccgct

SEQ ID NO: 476705 - DNA, 543 bp, Homo sapiens
ggggtggccacacctctgcccaggtggtgccaaggagggccaggagcacagccaggagatgcccccggccaggggaggtctctggatgcagcatgggtctgttgggcccgtcaggcgctccgtgcacagcctggctcagccacccggcttgtttctcaggctggatggagctattcacaatctccaggagtcaggctgggctggtggacaaaagaggggggctggtgaacaaaagaaggaggctggtgagtgagtaatcagtgtgtccagacagcctcctgttggcgctggcatgaaaagagacaactccsggggatgcctgcctgctccggcctcggcctggccagcccgcccccgacagcaggcagagtggcgtgcactgccccgcggcccctgctaatcattgtgggattattagcacccttggggagcccccagagaccccgctgattggcctggggacattccggtgctgcagattagtgaccgatggccgtgtcctggctgggacagtgtcctccgagcccactgatggcttccgct

SEQ ID NO: 476706 - DNA, 543 bp, Homo sapiens
ggggtggccacacctctgcccaggtggtgccaaggagggccaggagcacagccaggagatgcccccggccaggggaggtctctggatgcagcatgggtctgttgggcccgtcaggcgctccgtgcacagcctggctcagccacccggcttgtttctcaggctggatggagctattcacaatctccaggagtcaggctgggctggtggacaaaagaggggggctggtgaacaaaagaaggaggctggtgagtgagtaatcagtgtgtccagacagcctcctgttggcgctggcatgaaaagagacaactcccggggatgcctgcctgctccggcctcggcctggccagcccgcccccgacagcaggcagagtggcgtgcactgmcccgcggcccctgctaatcattgtgggattattagcacccttggggagcccccagagaccccgctgattggcctggggacattccggtgctgcagattagtgaccgatggccgtgtcctggctgggacagtgtcctccgagcccactgatggcttccgct

SEQ ID NO: 476707 - DNA, 549 bp, Homo sapiens
aattgtttcctgcgtttcctaccaggcattgccaagtgactagacttaaccttctcaggaagactcgaatgctttcccctctcttaccctaccccgtcattaaggcatagcagatcctcgasttgacctttcatactactgactctcacgtcagtctgcccgttggtcagtttatgcttagtgacttgtccttcagttaggagacttatgttttcttgtttgtttttttgagacaaagtctcactcagtcacccaagctgagtgcagtggtgcaatcacggtcactgcagtcttgacctgctggctcaagcgatcttcccacctcagcctcctgagtagctgggactacaggcgtgcaccaccacatccagataaatttttttaagagatggggtctcactatgttgcccaggctgatctcaaactcctggcctcaagtcatcctcccacctcagcctcttttttttccctgcgagttgcaattatagctgagtgaaacaaactgtaaccgaatgaaagcaacgacaacagaatcctccccaggaagca

SEQ ID NO: 476708 - DNA, 561 bp, Homo sapiens
ctccatcaccgccagggcctctggggctgtggcgtccacttatggggcagagtggagctggggtaggtgaaccaaaatctcccttgtagggtgcactggtgacaaggagcctgaaccatggaccccaccttcctaagcttagatyaaagcaggcagcctctccaagacgctcacggacaggctccccacatgcagagactgatggctgccttgggctccctagacagagcaagatctgcagtgatgactcacaaggaccccaagtccctcctccttcttcctcctctactcttcaccttctccccgtctctcctctatgtctgggcccacagcctcctaggtgacaactgcctatgatgggcatgagttctgagaacaaaccctgggtcccaagtatctgcctcctctcgcagcacatctcattcctcaaatcgtagtatggatattaccacttcaagaaacccctgctaccatgcaaattcctgaagccattcatttttaacacgcagacgcaaattaacttcgccgagacaggcagcagcagaaggctcagggaggagg

SEQ ID NO: 476709 - DNA, 210 bp, Homo sapiens
catcctacctgcaaaccacaccagrcacgtccgtaggcacctccatgtacatgacattcctggctcttgatattaggcctcagcggcccccagcccccaggggaacctgcagagactctcgggccgctcactccggctggcagtggcgggaggcagtgtgtgctgctcgcaccctgcgtttccagttttaggagactgaagcatcccaga

SEQ ID NO: 476710 - DNA, 350 bp, Homo sapiens
gctgtggatggggagcacgcactcggctgcaggacccacatcacacgcagtgcaggccgcagccctggggcagcgtggcctgccacaccctggagaccctggctggccaggctawggactgagagcttggtctcacgacaaaggggagtcccttgagggtttcaaggcagtgagtaaagtgacctcccgttttaaaaagacaaccctgcagagggaggggggatgacatgagaagcaggaaaatcagtaagagattgttctcgaagtcagggctgacaaccctctctgccacagcagcagtggtggggacagtgaggtccgaacagaggagaggcactgaggagacagcc

SEQ ID NO: 476711 - DNA, 350 bp, Homo sapiens
gctgtggatggggagcacgcactcggctgcaggacccacatcacacgcagtgcaggccgcagccctggggcagcgtggcctgccacaccctggagaccctggctggccaggctatggactgagagcttkgtctcacgacaaaggggagtcccttgagggtttcaaggcagtgagtaaagtgacctcccgttttaaaaagacaaccctgcagagggaggggggatgacatgagaagcaggaaaatcagtaagagattgttctcgaagtcagggctgacaaccctctctgccacagcagcagtggtggggacagtgaggtccgaacagaggagaggcactgaggagacagcc

SEQ ID NO: 476712 - DNA, 350 bp, Homo sapiens
gctgtggatggggagcacgcactcggctgcaggacccacatcacacgcagtgcaggccgcagccctggggcagcgtggcctgccacaccctggagaccctggctggccaggctatggactgagagcttggtctcacgacaaaggggagtcccttgagggtttcaaggcagtgagtaaaktgacctcccgttttaaaaagacaaccctgcagagggaggggggatgacatgagaagcaggaaaatcagtaagagattgttctcgaagtcagggctgacaaccctctctgccacagcagcagtggtggggacagtgaggtccgaacagaggagaggcactgaggagacagcc

SEQ ID NO: 476713 - DNA, 527 bp, Homo sapiens
ctccagctggttcttgccctcagtgaaaattggttttgggttcttctcaaagcccccagacaggatgccaccctgccagttccgaatataaattcttccatcagcatccacaatagctgaggtggagaaatgacatggagtggggagtggaagaaaaaacaagggtttagaggcaagtcagctttctaaatggacagaacaaccaaacaaaaacacccattaatggctttattaatgaaagaacattcaatgaacgcaggcattcattagctttaaaataccttttgaggtcacgggggaagatcctcccatttagcctttcagtggagactgtttctctgattatcccttacctagaagctttgactagtccccaccacgtaactcccactgtgccaagcgaaagtttaacrgaaagggggattgcagagcccattctaggcatgaagaccgtcaaaaggatgtgagaaccctctcctatagtgcttggaaccacgaacccacctaagtctatcgtttacctatga

SEQ ID NO: 476714 - DNA, 527 bp, Homo sapiens
ctccagctggttcttgccctcagtgaaaattggttttgggttcttctcaaagcccccagacaggatgccaccctgccagttccgaatataaattcttccatcagcatccacaatagctgaggtggagaaatgacatggagtggggagtggaagaaaaaacaagggtttagaggcaagtcagctttctaaatggacagaacaaccaaacaaaaacacccattaatggctttattaatgaaagaacattcaatgaacgcaggcattcattagctttaaaataccttttgaggtcacgggggaagatcctcccatttagcctttcagtggagactgtttctctgattatcccttacctagaagctttgactagtccccaccacgtaactcccactgtgccaagcgaaagtttaacggaragggggattgcagagcccattctaggcatgaagaccgtcaaaaggatgtgagaaccctctcctatagtgcttggaaccacgaacccacctaagtctatcgtttacctatga

SEQ ID NO: 476715 - DNA, 527 bp, Homo sapiens
ctccagctggttcttgccctcagtgaaaattggttttgggttcttctcaaagcccccagacaggatgccaccctgccagttccgaatataaattcttccatcagcatccacaatagctgaggtggagaaatgacatggagtggggagtggaagaaaaaacaagggtttagaggcaagtcagctttctaaatggacagaacaaccaaacaaaaacacccattaatggctttattaatgaaagaacattcaatgaacgcaggcattcattagctttaaaataccttttgaggtcacgggggaagatcctcccatttagcctttcagtggagactgtttctctgattatcccttacctagaagctttgactagtccccaccacgtaactcccactgtgccaagcgaaagtttaacggaaagggggrttgcagagcccattctaggcatgaagaccgtcaaaaggatgtgagaaccctctcctatagtgcttggaaccacgaacccacctaagtctatcgtttacctatga

SEQ ID NO: 476716 - DNA, 527 bp, Homo sapiens
ctccagctggttcttgccctcagtgaaaattggttttgggttcttctcaaagcccccagacaggatgccaccctgccagttccgaatataaattcttccatcagcatccacaatagctgaggtggagaaatgacatggagtggggagtggaagaaaaaacaagggtttagaggcaagtcagctttctaaatggacagaacaaccaaacaaaaacacccattaatggctttattaatgaaagaacattcaatgaacgcaggcattcattagctttaaaataccttttgaggtcacgggggaagatcctcccatttagcctttcagtggagactgtttctctgattatcccttacctagaagctttgactagtccccaccacgtaactcccactgtgccaagcgaaagtttaacggaaagggggattgcagagcccattctaggcatgaagaccgtcaaaaggatgtgagaaccctctcctayagtgcttggaaccacgaacccacctaagtctatcgtttacctatga

SEQ ID NO: 476717 - DNA, 655 bp, Homo sapiens
aggtacccagctgtttcacagaatagaattttagctttggaaaggaattcagagtcattcattcattgcattcattcaacagagattactgagaacttactctctaccagacmctgtgctcagaatggggatataaaaatatacaagcttaattttcggcttcaaaacaaaaatctagtggaggacagatcaacatacaggcaactgtaaccacatattatgagggcacaaagaagagctgaagggatgtttagtccacctccttattttatagatcagtcaactaaactccaaaaggttaagaaacctgcccaagtttatagcaggagacttggggttagtactcagtgcttttgatgcccagactactgtcttttccaccttgcttggtgctagatttaagtccaagtagctgggactatagacatatgtcaccaacccagataatttaaaaaacgtctttgtacagacagggatcttgctattttgcccaggctggtctcgaactcctggcctcatcatcccactttggcctctcaaagtgctgggattacaggtgtgagccactatgcccatctactacatttttaatgtactaaatcctcattatttgacaatggacttacccaacactttttctcataacaaatattca

SEQ ID NO: 476718 - DNA, 570 bp, Homo sapiens
aactaagaaattttagctgactttggtgctatttaaatgaagagctcttcctatataagacaccaccatccatttgtaattactaagacatggactgttttcccaaaagcagtagaggtactctaaatgcacagactcctggtstctattataatcaaggacattcattctgagaatgtcagatgggtataggggctctgaagtgacagtgaaatggactttttctctgggacaagctaactgacctgctgggcagtctcagtactagcaccaagagaaagctaacattcttctctgtgaataacagtcctttactggtctattgttccactgcaaccagccaactcagtggctttgtgtctcttgccacaaagagtaacgtgttgtttgtgtttattactctgcttacttcagacctttcagagaagctctacgtttgataagtgttaggaaagtgcagatcctcttccacacccttccttggtgcacgtaaaacatctgtggtgcttggttcgtgcatataatgcagagagaaatgctgcaggaagatgtaaaagaacttgtgctacc

SEQ ID NO: 476719 - DNA, 570 bp, Homo sapiens
aactaagaaattttagctgactttggtgctatttaaatgaagagctcttcctatataagacaccaccatccatttgtaattactaagacatggactgttttcccaaaagcagtagaggtactctaaatgcacagactcctggtctctattataatcaaggacattcattctgagaatgtcagatgggtataggggctctgaagtgacagtgaaatggactttttctctgggacaagctaactgacctgctgggcagtctcagtactagcaccaagagaaagctaacattcttctctgtgaataacagtcctttactggtctattgttccamtgcaaccagccaactcagtggctttgtgtctcttgccacaaagagtaacgtgttgtttgtgtttattactctgcttacttcagacctttcagagaagctctacgtttgataagtgttaggaaagtgcagatcctcttccacacccttccttggtgcacgtaaaacatctgtggtgcttggttcgtgcatataatgcagagagaaatgctgcaggaagatgtaaaagaacttgtgctacc

SEQ ID NO: 476720 - DNA, 629 bp, Homo sapiens
caaaagacatcaaattacctggaatttcctgatgatactgatgtcaatggcaataatttaatctaacattcattagatgctaatagccaatttcaaattcgctattttttttatttggtaactattcattgagtgcctactacatgccaggaaatgttctgggcatttgggataaatttttggagaaagcaaatrtacctttgtagatttcttattctatacaatggtggagaaataaagcataaaaataataagtgcattgtgcagtatgttagaatgtgataagatctgtagtagaaaattatttacaatgagcaaggtgaaatgtgtcaaattgcagcaggaggtgggctgcagtattaaataaggaggtgattatcttattttgtattcaccaaataatgtgggcatcatcattattttagtttttaagagtaatgaactgaattttacacatatgtgggttacgccatgattacactccttgtaagagttgaagctggattcaaatccaagtaatctggctccagagagtacacttttgaaaattccaatttatatattctgtcccattggcaaatgatgtatataccatttacatttaggaaaatatggtaactacagcaccg

SEQ ID NO: 476721 - DNA, 590 bp, Homo sapiens
tttctgtttttagttacaaatctgtttacagataaaactcactcataaatacacaaccacatgcagaggttgcctttttttttctgctgatagtatagaaataactccagatgaaaaatattaaagtttgtttagaaatataaaatgcattctgcctttctcagtgggggcccatgttttatagatgttcaaggtctttttgtgtccctgtgtgagcctctcttgggaagcacaatcttctcttacctctgtgatttagttctttctcaaactgtcaaaattgttgggttcctaattgaggaattaactccttgcaaaaggcaggtattggccacctaaggaaaagaggtgaagccaagaaatagcttctcgtgcatcaggatcagtatgtttactgttactcgaatgaccgatttaactccccactcttatttgcttgtgggttgcttacactggaaaccrtcaggtaagagattgtgttttcttctcttgtcttcttccatttcttttaagacctagtactgtgtctgacacatagaattcagtcgattttcaaatatattgtttgctgttaattgaattagtataat

SEQ ID NO: 476722 - DNA, 570 bp, Homo sapiens
  misc_feature (1)...(570): n = A,T,C or G
nnnnnnnnnnnnnngaaaacaacagcatcaagcccgagcagagagctccaagggaaaaaagaacaaaaaacttcagatgccaattatagtccatgttgccttgcttgrattactagaaggatctctcccacctcccactccatcaacatcataaatcttttgccttgaattcacagcacttctgtttagaagttcttgctggcatagacactacactgacaagagttgcaaaatatccccttctttctggttgctttatgataaagtttagagactcacagtacatcactacctactatcttttctgtgcaatgtgacaaaatatttgtcctgagtaaagattggttgtctctgcagcagctcagtcggtggtgatttcagaacacaaaaacatggagttatgctgtagaattaacaactttttaaagtgactggagggattagagattgaagagattgttgatccccactcttcctgtcttacaggtgggaagtggtgaagggttgtgccaaaggttgcattggaaattagaggctagagaaaggataagagctttgggttcaatacca

SEQ ID NO: 476723 - DNA, 662 bp, Homo sapiens
atctgtggtcccaaatgcaagatttgcataacatttcgctgatgtgggcggtcttccaatacatagaaattcctattttgtgccaagaagttggacgatttctgagatgagcagaaaaggcacagcttccattcataatttggagaccttcgtcctcagtgatcttattgtcctattgtggagtaattaatccacagagtcttgtgactcatagtgcaagccctgacctgttagcactgaaatactttcagataaattcaggccttcctgataccttgaccccaaggacaatgcttgatccctattgttctgtgagcttccaactggttagcatccattgaacaaatgactatttccgttgtataattcctacctctcaaactgggcaaagggaaacsaaactattctaagagaaaagtaatgatcactggtggtccttttaccaatcaggaaattgaagaaataaaacagttataccagatcccaccctgaatgtcaatgggagaaagaaatactggtccccatacattagtctgtgaccttgcctcagacaggtgagagcccaatgtagtttgtactaatttcactaaatgctcccccttgataagtctgcctccacaaacatcatctatgccacagaatcacagcaagaagtaaataag

SEQ ID NO: 476724 - DNA, 656 bp, Homo sapiens
ctggcgatagagatgagaacggtgattaccttgggaaagggaaagtgggaagaaatggaaagagagtcaacggtcttacaggaccccggaatgttttcatcttgatgatatgggtgttagttacctgtgggtatgcataggtaaaaatcacccagcttactcttgggatttatgcattttrttggatgtagccgtgtgacctttggcaaagtgtttaatttccgtgagcttcagtcagtttctccatcaacaaggatgggtctaatgatacctgccttgcaaggttgctataaacgaagaaggtaagggtaaatactttgcagatgtctgtttgtatggggcagatacaactgaggcctgtctcctgcccccagacatgaggtagtccaggctacccacccagactgaaaggcaaatccaaaacaatagatggctctggaaacattgatcaaaacctggggcctgctatctcaaaggcaggaaaaaaaacaaaaacaaaaacaaaaaacctgggacatccaaaacagacctcaacacatgcttttcagaggaggggctgccaagattcaacctcctgaaaacctcccagaattttgccatccctatgaacattcagaaagacaatgctaaaattaaattctgaatctcagcccacc

SEQ ID NO: 476725 - DNA, 656 bp, Homo sapiens
ctggcgatagagatgagaacggtgattaccttgggaaagggaaagtgggaagaaatggaaagagagtcaacggtcttacaggaccccggaatgttttcatcttgatgatatgggtgttagttacctgtgggtatgcataggtaaaaatcacccagcttactcttgggatttatgcattttgttggatgtagccgtgtgacctttggcaaagtgtttaatttccgtgagcttcagtcagtttctccatcaacaaggatgggtctaatgatacctgccttgcaaggttgctataaacgaagaaggtaagggtaaatactttgcagatgtctgtttgtatggggcagatacaactgaggcctktctcctgcccccagacatgaggtagtccaggctacccacccagactgaaaggcaaatccaaaacaatagatggctctggaaacattgatcaaaacctggggcctgctatctcaaaggcaggaaaaaaaacaaaaacaaaaacaaaaaacctgggacatccaaaacagacctcaacacatgcttttcagaggaggggctgccaagattcaacctcctgaaaacctcccagaattttgccatccctatgaacattcagaaagacaatgctaaaattaaattctgaatctcagcccacc

SEQ ID NO: 476726 - DNA, 419 bp, Homo sapiens
aatggcacatatacacagacaagaaagagaatgagccgttcgtttttttttttttttttgagacggagtcttgttctgttgcccaggctggagtgcagtggcgcgatctccgcacactgcaagctctgcctcctgggttcacgccattctctcgcctcagcctcccgagtrtctgggactacaggcacctgccaccatgcccagctaatttttttgtattttttttagtagagacagggtttcaccatgttaaccagtatggtcttgatctcctgacctcgtgatctgtccgcctcagcctcccaaagtggtgggattacaggcgtgagccactgcacctggccaagccatttgtcctttatgaggcagtgatggagtgagtccgaggtacttggttcaaagcccaactccaacactta

SEQ ID NO: 476727 - DNA, 596 bp, Homo sapiens
gaatactatttagctgttcaaaagaatgacatgtatgtactgacatgtaaaatgtgataaggtgttaagtgaaaaatagctgcagaacagtatgaagactcagatcctagtttttgcttagaagacagtgtctatgtgtgtgtgtgtgtatatagatagatagatagatagatagatagatagatagatatgcacataaagttgagaagaccacacaccaagcttttaacaatgattggcagggcgaagtggctcacgcttgtaatcccagcacattgggaggctgaggtgggcagatcacctgaggtcaggagtttgagaccagcctggccaacatggtgaarccccatctctactaaaaatacaaaaattagttgggcatggtggtgcatgcctgtaatcccagctagttaggaggctgaggcaggagaattgcttgaacccgggaggcgcaggttgcagtgagctgagatcaagccactgtactccagcctgtgcaacagagcgagactccatttgaaaaaaaacaaaacaaaaacaatgattacctctggagagtggaattggagatgtaaaatgaggggggacttctactt

SEQ ID NO: 476728 - DNA, 222 bp, Homo sapiens
ctgggggtcctctatgcatgggacagtgtgtctcccccgctggaaggcttctgggcttggggtttggtgggtgacgagatagtgaggtcccagctttgctgcccacatccctcaccctccacccttgcttcccaggcacctgccaaaccgcatacccagcctgccgttgctccggagcttcttcacagacrgggtgggctgcaagtgtgtgtgcgtgcgcag

SEQ ID NO: 476729 - DNA, 244 bp, Homo sapiens
ctctggggcagggcttttggccctgggggtcctctatgcatgggacagtgtgtctcccccgctggaaggcttctgggcttggggtttggtgggtgacgagatagtgaggtcccagctttgctgcccacatccctcaccctccacccttgcttcccaggcacctgccaaaccgcatacccagcctgccgttgctccggagcttcttcacagacagggtgrgctgcaagtgtgtgtgcgtgcgcag

SEQ ID NO: 476730 - DNA, 495 bp, Homo sapiens
cggggggcgcacagaacccactgatcagagtcatccccagaggcaagttgcagatggaggctggtttcctgtcaggatgtgggacttcatctttttagagtttctctagggaatctctctaagttcagaattctgtgcttaccaatgtcatctctacatatttttaaaatgattattttaatatgaaaacctattctcctatgcacaaaacacagattgatgcttacggagatgaaaagccctcaaccattgtcaccaggatcagagtattgaggaaactcagggatacctggtgagtcttctccagtcagactcagracagaaacctcagtgagattccctgactaggacggtctttaggaattgtgatcacagccaatagagtctgggccagggtcagtgtcatgtagaacctcacagttttcatgcctgacccttctcctgacactaaagtatgcaacttagtatcagcactgatctggggccccttttgct

SEQ ID NO: 476731 - DNA, 375 bp, Homo sapiens
cccgccccaggcagggttggagctttgttccccctctctcactggtttctttcctcagcctttaatttctcatgggstggctgtgtccctctgggcatgttcctctttttaatttttcttccttttttccttgcacccccacctctccctcctcctctccccgtgctctcctcccacccctttctcttctcctccccctcccctcctccagcagacctgttggagatttaaagagtacagtgcagtgtcgcggcctcggtcactaacagtggcgggtgattataagaaggctgggtgggcacagaggcaggcagaatgtcccggactgtgaggaccccacactgacatgccagttacccctgctttttatccact

SEQ ID NO: 476732 - DNA, 546 bp, Homo sapiens
tgccccgccccaggcagggttggagctttgttccccctctctcactggtttctttcctcagcctttaatttctcatgggctggctgtgtccctctgggcatgttcctctttttaatttttcttccttttytccttgcacccccacctctccctcctcctctccccgtgctctcctcccacccctttctcttctcctccccctcccctcctccagcagacctgttggagatttaaagagtacagtgcagtgtcgcggcctcggtcactaacagtggcgggtgattataagaaggctgggtgggcacagaggcaggcagaatgtcccggactgtgaggaccccacactgacatgccagttacccctgctttttatccacttaccccagcagtccatgcccctcccatcctagagccccttctcaggaggaaggaggcactcactgggcccagggccctccccgttgcctggacaccggggcatcgaattgctgcccttctgcagtgccacagaccttgtggcctctctttgccgagtctcaccactgc

SEQ ID NO: 476733 - DNA, 546 bp, Homo sapiens
tgccccgccccaggcagggttggagctttgttccccctctctcactggtttctttcctcagcctttaatttctcatgggctggctgtgtccctctgggcatgttcctctttttaatttttcttccttttttccttgcacccccacctctccctcctcctctccccgtgctctcctcccacccctttctcttctcctccccctcccctcctccagcrgacctgttggagatttaaagagtacagtgcagtgtcgcggcctcggtcactaacagtggcgggtgattataagaaggctgggtgggcacagaggcaggcagaatgtcccggactgtgaggaccccacactgacatgccagttacccctgctttttatccacttaccccagcagtccatgcccctcccatcctagagccccttctcaggaggaaggaggcactcactgggcccagggccctccccgttgcctggacaccggggcatcgaattgctgcccttctgcagtgccacagaccttgtggcctctctttgccgagtctcaccactgc

SEQ ID NO: 476734 - DNA, 571 bp, Homo sapiens
tttacagaacaaaaatgggaaaatatgtggcttgagggaaactttcattaaaagatgaaagcagccaggcatggtggctcatgcctgtaatcccaacacatttggaggccgaggcaggaggatcccttgagcccaggagtccgagaccagcctggacaacatagtgagacctcractctacaaaaaatgcaaaaataaccaggcatggtggggcatgcctgtagtcccagctacttgggaggctgaggcaggaagatcatttgagcctgggaggttgaggctgcagtgatgagccatgatcatgccactgcagtccagcctgggcaacagagcaagaccctgtctcaaaaacaaacaaacaaacaaaaaaagatgaaagcacatatttacttgccaatgggaatgatccaggtgagagacagagagagaggaagagctgggcccagagcccatgaagcagcagtagcctgtgctcctagcagatgcatccccaggtgtagtaggaagagagggaggtggcaggggcacactagcaggcagtgttggcagcaggtcattggggttgttccca

SEQ ID NO: 476735 - DNA, 487 bp, Homo sapiens
ttccttaccacagcccataaggcctcacatgaggtgtcttctgcccaccacactgcactttcccctcctcactcttcttggatttccttcattttccagaacccactggttacgtcccacccagggccttgtgcctgggaccctcagccaccagcacccccaaagcccactcctcacccacccacaaggtctcctctcaaatgtgaccaaccctgctactccccrccacacctgtcactggccttttccttgtgtgctcccagcacctgccttggttgagctcgggtgtctgtgttctgtctgctggctgtcctggcagctcccctgccagacagagccccagccccaaggagtggatgagcagtgcctcacagggagtgcatcctggataggcatctggcggctgaatgagtgctggcctccttccaggtgtgcagcggatggttccgtttgttacttgatcttgaactgtcatgagtgcagtgat

SEQ ID NO: 476736 - DNA, 628 bp, Homo sapiens
tgatccagattgtctccatgctaatcaaatatgggttcactgtgaggaacgcgtcctgtgggtgctggttcttcagtgaaaggacctctgtccacaaagtgtttggaaatggagcagggcatgcatttcctcaagtgggattaggacttggaccatcaccatctcacttttgtatggctgatgtgccatttatcctctctttcttgtcctgaatcaggtcttgagttataaaattctctgaatcatgaatatgcaaatatcatgagatccactgagattaaatatggttattcttgtgccctgagagcatcacccaacaaccacatccctcctctagagaagttgctgagaacacagctcctcaccatggactggacctgaaggatcatttttttggtggcagcagctacaggtaaaggaccacctactccgaaggatgagaggactcttttcagtcaaaaagaatttcatccactcctgtattctctccacaggtgcccaattccaggtgcagctggtgcagtctggggctgaaggaggaagcttrgggcctcagtgaaggtgtcccgcaaagctctggatacaccttcaccagctacgatattcactgtgtgcgacaggcccctgg

SEQ ID NO: 476737 - DNA, 622 bp, Homo sapiens
ctaagatcacattttaactctacacttatctccattatataaaatatcaaaatgttttaatgttttccattttgtgcaattataattttgtgttcatgccagcaatgcatgatagatcttgttcttccgcatcctcattgccatttggcactatgagtattgcgtattttaactattctaatagattagtagtgatatctcattgttgtttaaacgcacatatttctaattaaaattttgtatttaattatttcatataattgtgatgaagtgtctcgtatggtatgtggattattttttattgcattgtttctttttgatcagttgtaagtttccttatatacccattatataagtcactcacgaagttaacaaaaaattgattaacaaatatgtgttttacaagtrtattctccaaattgtagttgttgttttactcccatatcagtgtctgtggcagaaaaatatttatatacatatgtgtgtgtgtgcatatatatatagtgtgtgtgtgtgtatgtgtaaacttacataaaataattatttcatagctcatactttcggcatgatatctaaaaactaattatgaattccactaacaggatttttctcttgtctctaa

SEQ ID NO: 476738 - DNA, 565 bp, Homo sapiens
tgaggaatctcagggaaacctggagagtgttttccaattagactcagagcagagacctccatgggaatctctgattagaacaggccttgagctctgatgggagccaagagagaggctcacccagggtcagggtccttaaaacctgatggttttcacagctrtcccctctcaacttgtaaaactgtgcccatctgactcagactgattcagctgaccctctttctgctgatccattttccatctctgtagacttgattctcacagttccctttcttcttctcttccctgaaaacagaagatgtgttttctgtagtcaaaattccagggcttgggtctgcaggacctgggtaggctgaggggactttctcactcaccattgtctggacactcctgttgtcttctgtgcatggaggcatttggaaaatgtagtggacattagccatgaagagaataatactagttttctccaatgggatattgatgtagagctgatcttgtgcttctcacactatctgagtttggactctcacctgtgactttgagaagagctgaggatgggcactcc

SEQ ID NO: 476739 - DNA, 654 bp, Homo sapiens
taaaccaatacacatattaatagatgattatgaaaataaatattgggaagacgaacacatctccttacagaagtattccaaatatctgaggtgaatagtcctccaatcaagtaggtgaagtttaaacactcatragttgattgtggcctgaggttagacacatagaaaaaataaccactatttggtattctataatgagacttcagatataatgtcaaaacatcatctatgaatgaatacaattttacatgtttttgaatctaaatttgtacaaacacacacatacacacacagacacatgcacacacacacgtatgtttctgcaatacacactgataagggagtaaagacagccacagacttggaaaaaatacttccaagtcacatatttgttaaatgaattcttttaatttgttaaatgacttttataaacaatatgcaagtaaacttacaatgaatcaaaacaaagcaatgcatttaaaatgaaccaaatatcaggagaggcatctcaacaaaagttattggaaaattgttaaatatgaactttttgagggacatgtgcatttaaataaaaattagatcccattactcacctactagattggttaaaacacacaactctcataaggatacatggcaatatgaatgtggaaa

SEQ ID NO: 476740 - DNA, 654 bp, Homo sapiens
taaaccaatacacatattaatagatgattatgaaaataaatattgggaagacgaacacatctccttacagaagtattccaaatatctgaggtgaatagtcctccaatcaagtaggtgaagtttaaacactcataagttgattgtggcctgagsttagacacatagaaaaaataaccactatttggtattctataatgagacttcagatataatgtcaaaacatcatctatgaatgaatacaattttacatgtttttgaatctaaatttgtacaaacacacacatacacacacagacacatgcacacacacacgtatgtttctgcaatacacactgataagggagtaaagacagccacagacttggaaaaaatacttccaagtcacatatttgttaaatgaattcttttaatttgttaaatgacttttataaacaatatgcaagtaaacttacaatgaatcaaaacaaagcaatgcatttaaaatgaaccaaatatcaggagaggcatctcaacaaaagttattggaaaattgttaaatatgaactttttgagggacatgtgcatttaaataaaaattagatcccattactcacctactagattggttaaaacacacaactctcataaggatacatggcaatatgaatgtggaaa

SEQ ID NO: 476741 - DNA, 654 bp, Homo sapiens
taaaccaatacacatattaatagatgattatgaaaataaatattgggaagacgaacacatctccttacagaagtattccaaatatctgaggtgaatagtcctccaatcaagtaggtgaagtttaaacactcataagttgattgtggcctgaggttagacacatagaaaaaataaccactatttggtattctataatgagacttcagatataatgtcaaaacatcatctatgaatgaatacaattttacatgtttttgaatctaaatttgtacaaacacacacatacacacacagacacatgcacacacacacgtatgtttctgcaatacacactgataagggagtaaagacagccacagacttggaaaaaatacttccaagtcacatatttgttaaatgaattcttttaatttgttaartgacttttataaacaatatgcaagtaaacttacaatgaatcaaaacaaagcaatgcatttaaaatgaaccaaatatcaggagaggcatctcaacaaaagttattggaaaattgttaaatatgaactttttgagggacatgtgcatttaaataaaaattagatcccattactcacctactagattggttaaaacacacaactctcataaggatacatggcaatatgaatgtggaaa

SEQ ID NO: 476742 - DNA, 654 bp, Homo sapiens
taaaccaatacacatattaatagatgattatgaaaataaatattgggaagacgaacacatctccttacagaagtattccaaatatctgaggtgaatagtcctccaatcaagtaggtgaagtttaaacactcataagttgattgtggcctgaggttagacacatagaaaaaataaccactatttggtattctataatgagacttcagatataatgtcaaaacatcatctatgaatgaatacaattttacatgtttttgaatctaaatttgtacaaacacacacatacacacacagacacatgcacacacacacgtatgtttctgcaatacacactgataagggagtaaagacagccacagacttggaaaaaatacttccaagtcacatatttgttaaatgaattcttttaatttgttaaatgacttttataaacaatatgcaagtaaacttacaatgaatcaaaacaaagcaatgcakttaaaatgaaccaaatatcaggagaggcatctcaacaaaagttattggaaaattgttaaatatgaactttttgagggacatgtgcatttaaataaaaattagatcccattactcacctactagattggttaaaacacacaactctcataaggatacatggcaatatgaatgtggaaa

SEQ ID NO: 476743 - DNA, 527 bp, Homo sapiens
gtgttgcaggcagggctcagggtgmgcgcagggcacgacatcggctgcaaggtctagagcctgcacctttcccacagggccgggcctggccttcatcgcctacccacaggctgtcacactgatgccagtggccccactctgggctgccctgttcttcttcatgctgttgctgcttggtctcgacaaccagatttgcatggggctctgggacagggagccaggagaggggcggagtgagggctgcgggcaaggaaaggggtggagggtggtgcggggctcggcctgagctagcctggccacagtttgtaggtgtggagggcttcatcaccggcctcctcaacctcctcccagcctcctactacttctgtttccaaagggagatctctgtggccctctgttgtgccctccgctttgtcattgatctctccatggtgactgatgtgagtggggtggggggtctgcctgtgacttctggtggccgtctgccatcctccctgactgggctctgtcccccagggtgggatgta

SEQ ID NO: 476744 - DNA, 310 bp, Homo sapiens
gcaagggtgggtgccaggggctggggacagggtggggagtgttgagtggggacagagtgtcagtttgagaarataaattctagaggtggacggaagaggtggctgcgcaacactgtggctgcacttaatgccactgaattgcacacttaacgatggtgaaaatggctcattacatatacattgatgacactatatatatgtgtgatatacatgcgttttaccatgagaagaggcggagaggaattgaagacagtgagtacagacaggtccttcaaggggcgggacccatgcacaagatgagcatgtggca

SEQ ID NO: 476745 - DNA, 310 bp, Homo sapiens
gcaagggtgggtgccaggggctggggacagggtggggagtgttgagtggggacagagtgtcagtttgagaaaataaattctagaggtggacggaagwggtggctgcgcaacactgtggctgcacttaatgccactgaattgcacacttaacgatggtgaaaatggctcattacatatacattgatgacactatatatatgtgtgatatacatgcgttttaccatgagaagaggcggagaggaattgaagacagtgagtacagacaggtccttcaaggggcgggacccatgcacaagatgagcatgtggca

SEQ ID NO: 476746 - DNA, 310 bp, Homo sapiens
gcaagggtgggtgccaggggctggggacagggtggggagtgttgagtggggacagagtgtcagtttgagaaaataaattctagaggtggacggaagaggtggctgcgcaacactgtgrctgcacttaatgccactgaattgcacacttaacgatggtgaaaatggctcattacatatacattgatgacactatatatatgtgtgatatacatgcgttttaccatgagaagaggcggagaggaattgaagacagtgagtacagacaggtccttcaaggggcgggacccatgcacaagatgagcatgtggca

SEQ ID NO: 476747 - DNA, 453 bp, Homo sapiens
cacccctctcctgcccggtgaatggtcccactcggtagggcagaggtggccagggggagtgggggagagggcagccggcccctgggcccctggaaggttccctccgcacccgcaggggctgcctcatcctgctctgctttcctgccctgggcgcagcgatacgtgagggctgacctgcagctttgcgtgctcctactgcaagcggtcgtactccttggtgaggccctcagactgcttcygcatggccagaacctggttttcagctttctctagttcttgaaatgatgtaaatgaccaagaaaacagaaatgaaaagacaggaatcgggggtaaaaacccagcttctacagacaccagaaactggcccaaatctatctcaaacgaggttatacaggagcctacttctcaaaataaaaccgctctgcttttgcaggcccccaaagtagagggaaa

SEQ ID NO: 476748 - DNA, 419 bp, Homo sapiens
ccaggcctccattgatctaggcaaagaaggaagaagtgggctttggaagtcctctatcgtgtatgcaacattccctcccccagcccaccacacctccaaccccaatcttaacttgccttcaaggaaaagagggatccttgcccatcatgtttaagaaaggctcatggtcaaaaagttaaacactgagttaccaccatatggtccggcaatttcactcctacatacatacccagcggagatgaaaacatatgtccacacacaaaaaaaagggatacacaaatattcatagcagcattattcataatagccaaaatatgtaacaacccaaatgcccattaacttatgaataggtcaacaaaatatggtatattaatgcaatggaatcacacttagccaygtaaatgaatgaagtactgatt

SEQ ID NO: 476749 - DNA, 567 bp, Homo sapiens
tcccagcatttgttcacagagtgtagagcagtgggcaagacaagagatttgtcccagcggagagcaggccagggtgggaagaggtgatgcatttatttccagtgactcctggcagggagttaagccctttagaagatgattctcagacagtacagttctctgtaagcgagagaagggacagaggaccagcggatgcaacacaaccaatttacaggatggagtgatcccacaatggcccgcacagctccccggttcctccacacacgtgtcacatgggtgcaattcttttcatctttcacagtgcttttgtgacagggagcacacccaggacaaacgtgccttgttaagacagtgctctgaaaggcagcctttgtcaaacctggatctcccggggaacctgttaaaactgcagaggccaaactcacccaacccccctgaatctccacttgrttaacaagcatcccaggcagttctgggggaccctgatgagaacacagctctttatcttttatggtcttcccaggagccaggactctggaccccaaccaaattcctagtccccttcat

SEQ ID NO: 476750 - DNA, 622 bp, Homo sapiens
ctgatttcaaactgacctcaaatgatccacctgcagcagcctcccaaagtgctgggattacaggcgtgggccattgcacccagcctatctccatgttttttaaaatttatgtttcttactcgtgagactaagtaaattttcatatgcttaagaagcagttttacttccttttctatggactttttgtattctttgtccacttttcttatcagtttgtwggaactttttatatattagagaaaccatccgttcctctgtgacatagcctgcaaacatctttccagtttgatgttttttttatcttgtttatgatgcatttagctaagtcaattttaacattattggacttattaatattttctcttgtggtttctgacttataagtcatactttagaaagccttgtaaggaaaagatatttcgttatttctttaggatgacatgttaaggggactgagccaggccagaaaccattcaataagaaaatattcaaagacaaccactacttaacttgttcctctttctgcatgtgaagaccacagcacgctaagagaaagatgagaaaacaggtcatctattttcaaggagggtacacaatagagctttccacttgataaactttt

SEQ ID NO: 476751 - DNA, 622 bp, Homo sapiens
ctgatttcaaactgacctcaaatgatccacctgcagcagcctcccaaagtgctgggattacaggcgtgggccattgcacccagcctatctccatgttttttaaaatttatgtttcttactcgtgagactaagtaaattttcatatgcttaagaagcagttttacttccttttctatggactttttgtattctttgtccacttttcttatcagtttgttggaactytttatatattagagaaaccatccgttcctctgtgacatagcctgcaaacatctttccagtttgatgttttttttatcttgtttatgatgcatttagctaagtcaattttaacattattggacttattaatattttctcttgtggtttctgacttataagtcatactttagaaagccttgtaaggaaaagatatttcgttatttctttaggatgacatgttaaggggactgagccaggccagaaaccattcaataagaaaatattcaaagacaaccactacttaacttgttcctctttctgcatgtgaagaccacagcacgctaagagaaagatgagaaaacaggtcatctattttcaaggagggtacacaatagagctttccacttgataaactttt

SEQ ID NO: 476752 - DNA, 622 bp, Homo sapiens
ctgatttcaaactgacctcaaatgatccacctgcagcagcctcccaaagtgctgggattacaggcgtgggccattgcacccagcctatctccatgttttttaaaatttatgtttcttactcgtgagactaagtaaattttcatatgcttaagaagcagttttacttccttttctatggactttttgtattctttgtccacttttcttatcagtttgttggaactttttatatattagagaaaccatccgttcctctgtgacatagcctgcaaacatctttccagtttgatgttttttttatcttgtttatgatgcatttagctaagtcaattttaacrttattggacttattaatattttctcttgtggtttctgacttataagtcatactttagaaagccttgtaaggaaaagatatttcgttatttctttaggatgacatgttaaggggactgagccaggccagaaaccattcaataagaaaatattcaaagacaaccactacttaacttgttcctctttctgcatgtgaagaccacagcacgctaagagaaagatgagaaaacaggtcatctattttcaaggagggtacacaatagagctttccacttgataaactttt

SEQ ID NO: 476753 - DNA, 629 bp, Homo sapiens
ctgacatccaaaattgccagcaagcttgaaagccccagtggagcccattggctgtgctaaaagaatcaggggcttgccgcttgggaargagaacagcccctctcaatggcaggaggagacgggctgggggaaggggggcccgcagagctcagtgaccaccaggaagccagggacagggcaacagcgaatcaagacagatgggggtaagggtcttccattaaaattttaaaccacaggcactccatgaccaggcatacttgaaatgccatccctgggagatggaagccaagaggctgttaaggttattgtgtgaagttgccaaaaatggaagacataatgcatcacttgtcctttggaaattttttgaaaggaaagttctccatgacatagaacccattgtgcaaatgggggcagggaaatcaagcaacattttctcagcagttttcctgagagtaccaccaaagtctcatcatatttgagagggtagagttagaaaaatctctagagttagaaacatgggtgctggagttagaaaattctggatttggtctctggcttcataaactttttcactgggcaggtccattaacctctctgaaccttggttgccccatttgtaaaatgaggct

SEQ ID NO: 476754 - DNA, 547 bp, Homo sapiens
tgaggcacaaggggatttgctatgtctttgttggtttgaagatgcgggcgaccccaggaaaaggaatgtgagtggccttacgttgctcacagaggctcctgattgacctccagcaaggaaacagactccagtccttcacccataagaagccaattctgtcaatactttgagtgagcttggaaatagatgtctccccagagctcccagtagaggactcaatccagcctgtaccttaatatcagtcttatgataccctgagcagagaattcagccataccatgctggacttctgacctacaaaactgtatacgaataaatgggcgttgctttaagccattaaatttgtggtgattagttatrcagcaatagaaaactaatacagcatccagtggcaacaaaacacgcctcccagacctgattcctcactgtgctgagcagatcggcctggactacagccctgctctctctgcatctttgcaggaaattccctgtcaaagatcaaaagttagcccagtgtggttcatgacaggaaaacaattgctccctg

SEQ ID NO: 476755 - DNA, 553 bp, Homo sapiens
agatattattctagattttatttataagagcagtcttaggtttacagaaggaatgagcacaaagtacccaggagttcctatacacccctctaagtccagtgctggcatttctttggtttcaaccctttatttttgtccattcccactaaaaataaaatccaaatttcttatcatagcctttggggctctttctgacctggccccatcttgagtctactccccatctctcttcttcactccttcagtggcagcatcattggttctcttgctgtttcatcacccagtgagaccctgaacagctcacagacccatgcccctctaggtgcaccatgcacacagcatgagtgttgcctcaacacagttccatccagcccctcctgtgaaaagtaaaatactgcctctgggtcttggccttcctctctggcccctcttcttggttctacacttcaccrtcttcctttttatctaccagccctggtttcaggtcttccccacattctctctgctatgcatgattccagttcccatgcaggagagcctcaccctttatggg

SEQ ID NO: 476756 - DNA, 609 bp, Homo sapiens
taaataacactagtggtacacacaaacagcagaggttgacagataggaagaaagatagatattattctagattttatttataagagcagtcttaggtttacagaaggaatgagcacaaagtacccaggagttcctatacacccctctaagtccagtgctggcatttctttggtttcaaccctttatttttgtccattcccactaaaaataaaatccaaatttcttatcatagcctttggggctctttctgacctggccccatcttgagtctactccccatctctcttcttcactccttcagtggcagcatcattggttctcttgctgtttcatcacccagtgagaccctgaacagctcacagacccatgcccctctaggtgcaccatgcacacagcatgagtgttgcctcaacacagttccatccagcccctcctgtgaaaagtaaaatactgcctctgggtcttggccttcctctctggcccctcttcttggttctacacttcaccgtcttcctttttatstaccagccctggtttcaggtcttccccacattctctctgctatgcatgattccagttcccatgcaggagagcctcaccctttatggg

SEQ ID NO: 476757 - DNA, 548 bp, Homo sapiens
tccaccggctctagctgtggagtatcatcaccagcaggccagtgtgagcagctcccaccctggcccttttgtgagaactgagcccaaagctggaccaacgaggggtatcataactccacctgacccaggctgccatctggaatatgccctgggccttttccaagggaggctgtctcctgttccccttgttaaagtgaagggctgagcccttccctcccaccatagcagggaccaaagactatgraaagtgaacctggctgacccctggtaaggactcagccctgtgattgcccggtggacgtgtctgtggccagaaaggctgagtcacctctgaggtcatctgcagatacactggctctgctccttcttcggccaccatggcctgggtcacttgagccctctggttcctgggtggggaggtagtggtcaacgaaatccaagttgggaggcattgtcacaccagccttgtcacgccagcctcgtcatcaccagttgactaagaagacggagggcattcactggattctcaggggacctggacggttgcc

SEQ ID NO: 476758 - DNA, 534 bp, Homo sapiens
aatacccagtaagttccactgggttgctatgagaattaaataaaatatgcttagcacagtacctgaatgagttggctgctgttgtttagtaatagtatttgtatttgcattggaagatatggacctgccctccaggaacttgtggtgggggctggtacatggccttttgcttccctagctgtttctctagcccacagtggagtgggcagctctttctgccatgccctagttgccatcctggtmccctgggccctctgagctgagcccctgggggggctcagtaacatgacctgccctggacccatcccctaactttgccaggaaagggcggatgggcgtcctcattggcaaggatccgagcagggcaagtgttggggttcagaggacaaaggaaagggacatttcaaggaagttcccacttcctcagaaccagagttcctatctccgccgctcatgtgatctattgggacattcttcatgttccaaatgtaagcacatcccggaaaaatgccagtgttggtcttgtgatgaaat

SEQ ID NO: 476759 - DNA, 534 bp, Homo sapiens
aatacccagtaagttccactgggttgctatgagaattaaataaaatatgcttagcacagtacctgaatgagttggctgctgttgtttagtaatagtatttgtatttgcattggaagatatggacctgccctccaggaacttgtggtgggggctggtacatggccttttgcttccctagctgtttctctagcccacagtggagtgggcagctctttctgccatgccctagttgccatcctggtcccctgggccctctgagctgagcccctgggggggctcagtaacatgacctgccctggacccatcccctaactttgccaggaaagggcggatgggcgtcctcattggcaaggatccgagcagggcaagtgttggggttcagaggacaaaggaaagggacatttcaaggaagttcccacttcctcagaaccagagttcctatctccgccgctcatgtgatctattgggacattyttcatgttccaaatgtaagcacatcccggaaaaatgccagtgttggtcttgtgatgaaat

SEQ ID NO: 476760 - DNA, 598 bp, Homo sapiens
atcaaacatataaaaatgactcctcatgaaataaaaacactctgtctctgagggccacatggtttctgacgttggcaaagtagtcttctkttggtaatagagagtgactgaaaaatccacttgtccttgtccccaaccatgcacagagagacacatgccttctcaggactgatgagacacgaggaagaaactcaggtgtcccaggctctctaatattatagctaattgagaagctttagggagagaagtgatttggaagtcatgagctctttctctttgctagttagctgagtagtcacacagcaaagacacacacacacacacacacacacacacacacacacacacacacacacacacttatacataccaaaatcttagttgaaatctttggatggtgggatgatggacaatttttattttcttcttttcgatcatccatattgaaaaaaaaatatctctaatgagcagttaaaggaaagataagaaaggttgtgagtttcttttaaagtctaaaaatgttctacagtcaacattttgggataaggaaatcatatggcctctagagcacacctgagtcattttctttctcatactg

SEQ ID NO: 476761 - DNA, 598 bp, Homo sapiens
atcaaacatataaaaatgactcctcatgaaataaaaacactctgtctctgagggccacatggtttctgacgttggcaaagtagtcttcttttggtaatagagagtgactgaaaaatccacttgtccttgtccccaaccatgcacagagagacacatgccttctcaggactgatgagacackaggaagaaactcaggtgtcccaggctctctaatattatagctaattgagaagctttagggagagaagtgatttggaagtcatgagctctttctctttgctagttagctgagtagtcacacagcaaagacacacacacacacacacacacacacacacacacacacacacacacacacacttatacataccaaaatcttagttgaaatctttggatggtgggatgatggacaatttttattttcttcttttcgatcatccatattgaaaaaaaaatatctctaatgagcagttaaaggaaagataagaaaggttgtgagtttcttttaaagtctaaaaatgttctacagtcaacattttgggataaggaaatcatatggcctctagagcacacctgagtcattttctttctcatactg

SEQ ID NO: 476762 - DNA, 423 bp, Homo sapiens
gccgcgcaagctagaagcgccccagcccggcaagctggctcayccgctggccacccagcacagcccgctggcccctctcctgcagcccatctggcggagcggcggcggcggcggcggcggcggcaggagaatggcatcagaactggcaatgagcaactccgacctgcccaccagtccctggccatggaatatgttaatgacttcgatctgatgaagtttgaagtgaaaaaggaaccggtggagaccgaccgcatcatcagccagtgcggccgtctcatcgccgggggctcgctgtcctccacccccatgagcacgccgtgcagctcggtgcccccttcccccagcttctcggcgcccagcccgggctcgggcagcgagcagaaggcgcacctggaagactactactggatgaccggctacccg

SEQ ID NO: 476763 - DNA, 450 bp, Homo sapiens
cagctgctgcagcaagtcgaccacctcaagcaggagatctccaggctggtgcgcgagagggacgcgtacaaggagaaatacgagaagttggtgagcagcggcttccgagaaaacggctcgagcagcgacaacccgtcctctcccgagtttttcatgtgagtctgacacgcgattccagctagccaccctgataagtgctccgcgggggtccggctcgggtgtgggcttgctagttctagagccatgctcgccaccacctcaccacccccacccccaccgagtttggcccccttggccccctacacacacacaaacccgcacgcacacaccacacacacacacacacacacacacaccccacaccctgctygagtttgtggtggtggtggctgttttaaactggggagggaatgggtgtctggctcatggattgccaatctgaaattctcc

SEQ ID NO: 476764 - DNA, 624 bp, Homo sapiens
tctccctccaagcagcgtctggagactcatcagaccttcgaagcccsctggcatcccattctttcccccgaggtactgtctctgcatcttcgatgtttttctaatccagcggaaccacagaatcagaacttccagaacttctgctttcagcctctcctcatcttatttgtcagtgataaagttgttcattgatgtgtcctaggcattctagtcagcatgtgcagtttgggggaaccgtgttatttagactgttccatctgtttgctctgatctttgatcacttggtagcatcctgacaagaccctagtctaagggcaacaaaggctatggtcatgaaatagcacatgacctgtgctacaaaccatccctgcagatctgtggccccataatagacccagttctcaaatcaggctgatagggttagtgttggagtgttttggtcctgaccctggaagaaaaatacagggtgcaacttggtctctgcctgagagtgggaggtttgacagaggcgtggtgaaatgtcactctgttcaagagaggggggaaataataaggaagggtttctttttatttgttttcgtcctattttgtttgagaggggtaatattagtaataaaaaaaaca

SEQ ID NO: 476765 - DNA, 516 bp, Homo sapiens
ctgcttttctgataatggggtcatggcattgggtaaggcttgggcaatgaccacttcacaataggggagagggaaacttgtactgagattcatgtgcacccctttagaagagaggagtgagtaggattggggcataaacgggtctctgaatctaaagactggtttgtgggactttaaaaacattgatgccgtgcctcagaccacatgaatcaagaacctttagtggccgttggggctcagacatcagtattaaaaaaaaaaaaaaaaattcccagtgattctgatgtacaattaggattgagaactcctagtagaagaaccccagggacacagttatctactgaaacccagaaaggsaagaagctgctggtgaatttcccatattttactctgagttttacaactcagcatgtctgaggtccagtttaaaatggaaagggatgaacagttgctttgcatttcccctgcttcatctgcccttcctagttcttcattaacatcaatgctattctttat

SEQ ID NO: 476766 - DNA, 324 bp, Homo sapiens
tggctgctcttttcctccttacgctcagcatttagcacagaaactcgcacagaacatattcccagtaaatgtttgctggattgactgtcagtagtatgcccataggcatgggctcagaaggaccagttgtattgtatcttctcaattccacatctggggactttacactggtagcatgaaattggccatcgtgggaatatttgcagaagggaatacaaatgctgtaaaatcagagcccgtttccttatcctgacccacccagagagccagttgttaaacacctagcgrcacaccattgcgtgagcttcccagatgaacgatttc

SEQ ID NO: 476767 - DNA, 648 bp, Homo sapiens
cctagagtctgccagacttgatgtccaatccttgtcctgtcagtttctagctgtgtgacttgaagcaagagactgtctctttctgaacttcagtttcctcatctatcaagtgggagaaaatactgcctacctcggaatatttcagaatagtgctctcagtatagggytttcaacatccctgagcctgctaagtttatcagtccattcttatactaataaacacatacctgggactgggtaatttataaaggaaagaagtttagttgactcagagttcagcatggctggagaggcgtcaggaaacttacaattatggcagaaggggaagcaacatgaaggcgggaaggagaagtgctgagcgaagggaaaagagccccttataacagcatcagatctcaggagaactcactatcacaagaacagcatggaggtaaccacccccatgattcagtcacctcccaactggtccccccccccacaacacgtgaagattgtgggacctacagttcaaggtgagatttgggtggggacacagcgaaaccatatcactgagtgaaagggaggtaagggagagttgtgatatcatagtcccaggtcagcagaccttttctgtaaatggccaggtagtcaatcatttaggtttcaagg

SEQ ID NO: 476768 - DNA, 610 bp, Homo sapiens
gtttctagctgtgtgacttgaagcaagagactgtctctttctgaacttcagtttcctcatctatcaagtgggagaaaatactgcctacctcggaatatttcagaatagtgctctcagtatagggctttcaacatccctgagcctgctaagtttatcagtccattcttatactaataaacacatacctgggactgggtaatttataaaggaaagaagtttagttgactcagagttcagcatggctggagaggcgtcaggaaacttacaattatggcagaaggggaagcaacatgaaggcgggaaggagaagtgctgagcgaagggaaaagagccccttataacagcatcagatctcakgagaactcactatcacaagaacagcatggaggtaaccacccccatgattcagtcacctcccaactggtccccccccccacaacacgtgaagattgtgggacctacagttcaaggtgagatttgggtggggacacagcgaaaccatatcactgagtgaaagggaggtaagggagagttgtgatatcatagtcccaggtcagcagaccttttctgtaaatggccaggtagtcaatcatttaggtttcaagggcca

SEQ ID NO: 476769 - DNA, 650 bp, Homo sapiens
tcagggcccggactcttgccctctcccagctccaccattctcaagcttcagatgtaagacatgtgtaaggttcgaggtaccacattttttacaccagcccacccaaaaccagaggcagagagtgtgcagccctttattccttcgtaagagcaaggaatgttttgcagaagtcgcttccccacatagttaataggctgcaattgtcaggcgtccatccctctgtcaatggttggccttggttatgcaattaaccattacaggtttggactggtcaaggttcaccccacacatgctccacagggctggggatctgccagatttccccacagccacactgtctgggcagacctgaataaaatcctgactttcattaacaaagaagatgggtgggtcggaccactgtgggctgccacagggtgctccatgccccgagagttgtcacatggacaaaagaaggcgctgtgggtgacagtactttgtaaacagtgcggcttcttcaggatgtgcccagtggaagtcttcttccatcagggargttatcaggctcaaagatgtattatttctaagtaaaccagtgtgcccagttcatagctacttcccccttgcctatctctgggtccccagttgacactgttgaccttattcggcta

SEQ ID NO: 476770 - DNA, 644 bp, Homo sapiens
tgttagttggcagccagggtgtagatgaygtaaagaaatgttttgtggtctggttagacaatgggcctttaagcctacaaaatgtatttttcccaagggtgataactatatctctgactcctataggtcctggagctggtgagggagttcacttgccatttccttatccttccatccatttattcattcacgggtcacatcatctatgaagaaactattgtttaaggcagtgagatgctgggactatcaatgggaacaaaacaaaccttgtccatgtctttgtactgcttcacaattcgttggtgtagatgagctttacacaagtaattcattacaattatgccaagtaccgtaaagactgggaacagaatggtgtgactagacgtggtctgaatattacatgttttaagttgaatatttagggatgagcaggattatgtcttgagaagttaagggaatagggatggaaagggggaatgttttccaagtagagcaaggaatgtgttagaacgctgaagaccaacaagagctaatagctgcccagtggttttgagcttgcaaacataagtgattgtgagcctggggacaaacggctcatgttgaaccagagatactgttgtgtctactcttggctcgcttgtacc

SEQ ID NO: 476771 - DNA, 591 bp, Homo sapiens
gacaatgggcctttaagcctacaaaatgtatttttcccaagggtrataactatatctctgactcctataggtcctggagctggtgagggagttcacttgccatttccttatccttccatccatttattcattcacgggtcacatcatctatgaagaaactattgtttaaggcagtgagatgctgggactatcaatgggaacaaaacaaaccttgtccatgtctttgtactgcttcacaattcgttggtgtagatgagctttacacaagtaattcattacaattatgccaagtaccgtaaagactgggaacagaatggtgtgactagacgtggtctgaatattacatgttttaagttgaatatttagggatgagcaggattatgtcttgagaagttaagggaatagggatggaaagggggaatgttttccaagtagagcaaggaatgtgttagaacgctgaagaccaacaagagctaatagctgcccagtggttttgagcttgcaaacataagtgattgtgagcctggggacaaacggctcatgttgaaccagagatactgttgtgtctactcttggctcgcttgtacccag

SEQ ID NO: 476772 - DNA, 591 bp, Homo sapiens
gacaatgggcctttaagcctacaaaatgtatttttcccaagggtgataactatatctctgactcctataggtcctggagctggtgagggagttcacttgccatttccttatccttccatccatttattcattcacgggtcacatcatctatgaagaaactattgtttaaggcagtgagatgctgggactatcaatgggaacaaaacaaaccttgtccatgtctttgtactgcttcacaattcgttggtgtagatgagctttacacaagtaattcattacaattatgccaagtaccgtaaagactgggaacagaatggtgtgactagacgtggtctgaatattacatgttttaagttgaatatttagggatgagcaggattatgtcttgagaagttaagggaatagggatggaaagggggaatgttttccaagtagagcaaggaatgtgttagaacgctgaagaccaacaagagstaatagctgcccagtggttttgagcttgcaaacataagtgattgtgagcctggggacaaacggctcatgttgaaccagagatactgttgtgtctactcttggctcgcttgtacccag

SEQ ID NO: 476773 - DNA, 505 bp, Homo sapiens
aagagcatctgtcccaatgggtcacatggtgagctgtttcaatgtgagktttcgcaggttttactgactggaagagtcaaagacctgggagtgatggagactcagctgacttgacccattttgcaactcatggtggaccaagagttgagagtttctgtctttaggggtgtgtctgtctgtctgtctctctctctctctcctttccccctaagctttatgcaggggtgtcctctttcctaatcccccctgaagatcttcattatctactctcttttcctcccttttctccttacacaccatttctttcattctaatattaaagttcattttggtaaatggtcacccattcatcaagccaggggggttattaaacactagggagagtactgggctctgcagatgccctgggggaacaaaagggctcagagttttcaggatttggagagagcagtatgagcttgaggaaaagctagagtggctggaatacagagatggaagtaaaaca

SEQ ID NO: 476774 - DNA, 543 bp, Homo sapiens
tgcagcgcctcctgcaggcagccaacgttcttgcctgtggcctgtgcagacacatccttgccaccacctttaccgtccatcaagcctgacacctgctgcacccactcgctggcttttaagccccgattggctgcattctagaagacaggaagggaagggggagtcagcacagaagatgggattgagggaggaatgcagggaaagaaaggatggaggagccatcacccactccttgccctgggtgatactgctggaggccgagacagactttacggctggtacagggggcggccatggccactgccaggacaggacagagtggcaaagccaggtatcaaccagatgtcttcaccaataagaaggcctgggtaaggggtactggcaaaggtaaccaaccggtgggcagaaaggctgtttcgaatgcaggctgtacacacacaggcctcagccaacaaccttaagacctaacacttcccactggtgcgaggtggtgctgacctggggracttgacacaggcacgtgatcttgccagcctcattgtc

SEQ ID NO: 476775 - DNA, 552 bp, Homo sapiens
tgcagtcttatggttgtttagcagaagttattcttcttagcagagaatattatacggtcattttccagaactgtaaaaactctatcatttgttttaaaccagatgatgtgcttcatttctgtctttgacgtcttcagtttcttctcccctggctttacctcctttgttatcagtttgtgctttggttttgctgccaaccttataggtttaggtttggcggcaaaggcactagactctggtgccttcttttccttcgttgtcttaagcccttcttttcctctgccctcatgccctcaccacttcactcttttgaaggtcataatgaacacaaggtcagagatcccttttttggcgccaagcaccctgggcttttttgagatggagtctcactgtgtcacccaggcagtggcgcgamtctgcccactgcagcctccatctccctggttgaagcaattttcctgtctcagcctcctgagtagctgggactacaggtgcaagccacgacacctggctaatttttctgtttttagtagagacggggtttcaccatgc

SEQ ID NO: 476776 - DNA, 626 bp, Homo sapiens
actggcatcagatctatatttaatacactttgggtattttctgaaacaagatgattttccataaccaattcccaaaacaagaacatgcatgcatctgtgtcyggcagagtggaagtaatgaacatgaatgccacctttgttaaattctgaaatggacctaaaggtgcccgaattctatataaagtcatattgctaagctttgattcatacctaatttcctcaaatgggaagggtggaggattagttgaatgaagggctgctgtagaaagagcaacacatgtcttcttggcgaatgtctgcttttcttccagttattagagttaatgccagcacaggaagggagcagcaggggccagagttgtttttccccttagagcaacagggagaatgtactgcagataagagtcacccgagtgtttggcttttggaaatggaattagaattgctgtatacatgtcaactggatctgggaagcctgacaattcttctccctgcccccatctcttaattctgattactgccagactgagacctatctatcagttctgaacgttaagtgcaagaaaggtttcattgtgaggggagggttggggggaactggccttattttaccaggagaaggctat

SEQ ID NO: 476777 - DNA, 485 bp, Homo sapiens
ctgagatggggtgcatggaagccccagggctggattgctagtggtctaatctccattgtgggcaaagccaatgcctgtctgctttcttgctggatacagtgggctccattccagtctagctgtctgccagatcctgcaaagctcagtgtaataggggctgccagagccaggcaccagtcaatgctgcatgagggctggttagtgctctgtgcttgagaagggttgttctgaaaatctcagttagcctctgtgcccagtgataagggcactctgactgctatggaaaccttggtgctgggctggatttcctgagaaggatctgggtaggtttgggggcacagcgcttcaagcctccatgtattgattccaggagtataatagtatctgctcatcagacaagaccttgagggcagaaaaaaggagctagagagctagcatgcagwgggcaccacaggcccttactcctgacagggtagcagtgatca

SEQ ID NO: 476778 - DNA, 549 bp, Homo sapiens
catggaatcctctgtgctgggggtacattgtcacctcagagacacacatgtgattgacttcctcgcrgcatagtgcaagggaggagggctgacaaacccaggtgttgttccttctgggtggcacacctctccctctctttcagcagggagtgcttgttctccagatccccaccacccagccccagcctgggctggcccgaggccggatatcttgctgagtatcccaccaccctcccagcctgcagattcacccatccttattgcctcacagtgctaacagcaatctgaagagcttagggtcagcattgatgtgtcccaatggcgctggcaactccctggccctgtcattcacagcctccttgggtttctggcccatccttcttctgactctggctccttaggggccggccccccaaccattggtctcatgggcatccaagtggagttttgctcctgtggctgtcactctgaaaagccaaagacctctccaagagatgagggaaagctggggccccttcgctccctacctactgattattcatgtgaaac

SEQ ID NO: 476779 - DNA, 439 bp, Homo sapiens
acgggacatttgagtatgtatcggtgagataatagcgttatatcaaggttgagctttttaagtgtgataatggcattgcggttgcctacagagatacaggctgaagtattcagggatgaagtgtcaggatgtctccaagtaactctcaaatggtgcagtcaagaaaataaaaatacaatgaaatgcgtggcaaaatgtgttgacaactgatgaatccaaatgggagaaataaaggtgtttgttgactgtacaattttaaagcrtttctgtgggtatgaagtttttcaaaataattagctgcgaggaaaaactaatgctttgctcgtggggatgccggctgctcctgcatcccaccacgggcccctcggatgtgtggatttgcaggtctcgttgttttatttatttatttaatttatttatttagagatggagtttcact

SEQ ID NO: 476780 - DNA, 521 bp, Homo sapiens
tgcaaatagcatcacctccagtccaatttaaatgaagtcagtaaattatgcctccagaccctaaactatttagttcaccatgttggagaaggaaaaaggactgtacagagaagcaatttctcaacccaagtatttcattaaaaaacaaatggaaggggcccccatgggaaaatgtggcacttgatctgattgtgggagacactttcttaaaaaatggaataatcaaatggtggctcacctactccagtcagttctcaccattagtaataatggaaggccatgagctgggatgaaattcagcccatagcatgccctggaggagacacagagggacaggaaagccctctgccagcagaagcaataacaccattgttaacagtaagtccctttgtcaactctttggggagagttattatgggggggtgctgttaacatatttcttcctctccattgtttctgacaatggcaataagccygtggataatattttgttagcataacatgcacagccgaaccggccc

SEQ ID NO: 476781 - DNA, 483 bp, Homo sapiens
agtaattcagccagatacgatttgaatatgaagtctgatttcggttggttgagacatatcgagagggggctgcacatggctgttcctatttcaaaagcctggatagactcacagccataaaatttgccttttacagaattacctctctctatgaatctgcagtgcccacttaggccagagttgaacatgagagctgaaatccttytgaccttttcccaagtaagcctgcaagggaaattttaaaaaatgaatgaataaagtaaaaaaaaaaaaaaaaaaaaaaaaagaattgcaagctaaaaataaactctggcagtgaaatttataatttttaaaaggaagaactcaggaagcatatttcacagaatgtaaacatgcccaactcctaataagtagagataaattccaattaattattgtcaatattccaaaagttagggaaaaacaaaccgactataccgaaacattttattgtagtgatat

SEQ ID NO: 476782 - DNA, 537 bp, Homo sapiens
tcctgttcctggtgctcagagtagaagcataaggtaccctagggaacaaagtcttagtaattgcctctaggaataatattattggtcacactgggttccttaaacccaattcaactttgcccctatatcagcaatttagtaggtttaactacattgcttttctgttccaatctgctttgtgaagtgcttaagaaaaggccctttataactctctataataataaattatgaacaacaaaaaaagggcagcagcgtcgccctcctgttcctccaaggggaaagctgagcctaattcatatattctgctctgtctggctatctggtggaaataaaagattgaygcgaactttactgtgtaaaatttgggtctttatccaacagaagacaattgaatattataaaaacatgcagcacacttgaagagacttattttattcaagcactaagaaccttcaccctgagagaaactgctttctgttaaaaatgaaataaattaatatatgcctgcatgagaaatagatttctctgatagttttt

SEQ ID NO: 476783 - DNA, 527 bp, Homo sapiens
agctatgcattaaattatatgatattatatgctaagtactattcctaagaaaatttttaataatttcaataattcatatgataggataattccctttttacaagtgagaaaattgaggctcatattgaagtggtctcagaacaggcaactaggggaatcaagatttaaccccaaatcgatgacctcaaagcctgtgctttcactctggtctgtgtagcttgctattgcaaagagtttcatgatttctagagtagtgcacactcaggactctcatttgacctgagaattttggagaatccaggtcagaggcccctcacccaattttggagaacagaaagctgagggttcaagaaatgcaggggtcttccccaaggcactgcatctgaggagctgcagacctgggatgaagaacatcagtgttccatrcttacagtcctttgcttaggatttcaatctgaactgtgtcaatatacaaatgcaagatgagagcagtgggaacaggaagcaatagggactggggtgcaatt

SEQ ID NO: 476784 - DNA, 644 bp, Homo sapiens
ctaagaagacacgatatatgaaagtaaatgwtatttattttatgcctgtagtgcccagaagtgcagtacatacagaagaattactgctttttccactagagtggatatggatttgagattgggcacagctagctctgttagagaaagtttgacttcctttgtatgtcaaggactctagcagtggtttaattatgggaaggaccttgccaaacttgggaaggtggaaaagaggacaaccaatgaatcatggaagcattgctcatgtgagttatggaagaatattatgcaagttgaaccgttataagtggagggaaataggtggattttaaagtgcaacacatttgaaagagatagacttaacaaattctgttttaaatagaaatctgcaaacacacacataaatgtttgtatgtctagagctatatctacacctctatctatatgaatatatacatagtatgcagataaatacatagatatggtgtttctctttaaaaatccagcagaaagttacaatattaaacccaaaagctagagagagtaataagtaatatttattggatgctaccatatgttaaatattttacatacctgatcttatttcagtctttccaatgatcctattgggattaccctgtttcaca

SEQ ID NO: 476785 - DNA, 540 bp, Homo sapiens
gacttcccatggcagggttcctctagctgctaatacagactgctcactcttgccatggttccaaactggcatttcaagaacaccagttctaattagttccaaacaattctaattcacttccaagaaattagtcacaaaaattacaccaccggggtggggataggaatgaaaaaaatatacttcagggtcaagtagatgtgggaaacactgaattgattacttttaaatggtttatttaactgcaggatttctgattaactttaaaatgctttgtgtttctctaacagggttaggtatggtctgtggggtttctcattcttctttggcctgggggcttttttttctaggcyaccttatatggcttatggagctggtgtttcatggaatgttcactgggggatttttgtttatctttataatttcttttcaacctatttcaaaataaaaactcagagcacattgtaatattcaatataaacttaacgatgggaacaaaaataggataaccccaacccaaaatatgaagatgaatctgtgtta

SEQ ID NO: 476786 - DNA, 540 bp, Homo sapiens
gacttcccatggcagggttcctctagctgctaatacagactgctcactcttgccatggttccaaactggcatttcaagaacaccagttctaattagttccaaacaattctaattcacttccaagaaattagtcacaaaaattacaccaccggggtggggataggaatgaaaaaaatatacttcagggtcaagtagatgtgggaaacactgaattgattacttttaaatggtttatttaactgcaggatttctgattaactttaaaatgctttgtgtttctctaacagggttaggtatggtctgtggggtttctcattcttctttggcctgggggcttttttttctaggctaccttatatggcttatggagctggtgtttcatggaatgttcactgggggatttttgtttatctttataatttcttttcaacctatttcaaaataaaaactcagagcacattgtaatattcaatataaacktaacgatgggaacaaaaataggataaccccaacccaaaatatgaagatgaatctgtgtta

SEQ ID NO: 476787 - DNA, 540 bp, Homo sapiens
gacttcccatggcagggttcctctagctgctaatacagactgctcactcttgccatggttccaaactggcatttcaagaacaccagttctaattagttccaaacaattctaattcacttccaagaaattagtcacaaaaattacaccaccggggtggggataggaatgaaaaaaatatacttcagggtcaagtagatgtgggaaacactgaattgattacttttaaatggtttatttaactgcaggatttctgattaactttaaaatgctttgtgtttctctaacagggttaggtatggtctgtggggtttctcattcttctttggcctgggggcttttttttctaggctaccttatatggcttatggagctggtgtttcatggaatgttcactgggggatttttgtttatctttataatttcttttcaacctatttcaaaataaaaactcagagcacattgtaatattcaatataaacttaacratgggaacaaaaataggataaccccaacccaaaatatgaagatgaatctgtgtta

SEQ ID NO: 476788 - DNA, 606 bp, Homo sapiens
tgcttcgatgttaaggatatcatcataaatggcaaacatatattctgctgtgtatcarttgcccttcagttttatttatgatggtttttgacataagttgttactgttttttatgtgttataatcaagtttgacagacttttcctttatgttttctgcatttggtgtcatgcttagaaaacccttctccatccctagtttctaaaattgttcacccatgttttcagtgtccttatggtttatttttacataaaattttaaaaaaactagaattaattttggggtatggtatgggctaagattctaacaaatttttcccagatgggtatcatgttgtctcaacataatgatgattgattaaaaatgccatatactacattgacttttatagatctatgtcaatttctggaaattttattctgttccatcaatgtgtatgcctttgctacacatcactacagtgttttattacgtctttataatatagtttcctatctattttaatgaatctctcttcttcttaaaactttggtcaaacttgtgttttcctttttctaaatgagattcttaaccaagggtgagcataaaaacaatctgtggaggactt

SEQ ID NO: 476789 - DNA, 606 bp, Homo sapiens
tgcttcgatgttaaggatatcatcataaatggcaaacatatattctgctgtgtatcaattgcccttcagttttatttatgatggtttttgacataagttgttactgttttttatgtgttataatcaagtttgacagacttttcctttatgttttctgcatttggtgtcatgcttagaaaacccttctccatccctagtttctaaaattgttcacccatgttttcagtgtccttatggtttatttttacataaaatttwaaaaaaactagaattaattttggggtatggtatgggctaagattctaacaaatttttcccagatgggtatcatgttgtctcaacataatgatgattgattaaaaatgccatatactacattgacttttatagatctatgtcaatttctggaaattttattctgttccatcaatgtgtatgcctttgctacacatcactacagtgttttattacgtctttataatatagtttcctatctattttaatgaatctctcttcttcttaaaactttggtcaaacttgtgttttcctttttctaaatgagattcttaaccaagggtgagcataaaaacaatctgtggaggactt

SEQ ID NO: 476790 - DNA, 641 bp, Homo sapiens
cagtgctactgtaggaacagaatcgccaggccaatgcagcatgcatctggcctttttgacacaggtgcctatctgaaccttctcaagggggtggcgcctgtggcccaagtccctggtccttagcagtctgcggagacccagcctctgctgctggttccatgtacccatyccccatcagggcttccccctcctgccagctcagccctggctgcttaagtcccagcatgcctcgggctgtagccagcctgagttatgacataactcgcctgaaaatttccctgtaaagggaaaggggccaatccaatgtgaattattcttatcgtaagctccccaaagccagggaccttatatgatttatcttggtataacccacagcactgggaacagggcctggcacacagcacacaataaatgtttatggaattgactgaagttttcagagagacgagggcaacacacacacacgcacacacacaccctggcacacaagtagtatatgcacaagtgcacacacactatacctacaaatccttcacacccacacactctctttacacacaaagacactctgcacacacacacactgattttgtgtgctctctgagtgtgagtttgtgtttgtgatctttctcttcctgtga

SEQ ID NO: 476791 - DNA, 663 bp, Homo sapiens
aggaacctgaggcttaaagggggtccacttgcccaaagtacacctggaataaagggtaaagctgggatacaatctttctactttttctttttgaataaatgaaagctacctcgtggtttgacttcaaatagacatttaaaaaaaactagggcagygaactgatgagacaagatgaaatgcaatcaagtcaaatctataaggacctacacattgggtccaaaaaggcccactgtacaagcacagtatggggtagctgtgccttaatcagcagcacttgtaagaaacatttagagatgttacttggctgcaagtttgagatgtcagcagtgtgatatagccacaagaaaaagataatggagtcttaggtggcattactagaaatagaacttacaaaagagaggtgagagtcctgttgaacttttcaatccatatctgaaattcctcgcgcagtcccaggtgtgagattttagaagagacatagacaaattagcttacatccaggagaggagcctaggatggaattatatgaataatggtcaaaggaagttaggaagctgcaaagtgctgtaactaagagcttgaatcttggagtcaagactgcccgggtttaatcccagctctgccagttactgtgtatatgtttgttaaatcttcttatcactg

SEQ ID NO: 476792 - DNA, 408 bp, Homo sapiens
tctttctcttctcttgcccagggggatgaatgggtctttgtgtccttaaggtttgagtttgtactgtctcctctgtgggaagggttaacagaatttttcttaggctgttggatctcaggagtctaggaaggaagaaaggattttagctccttagtgaggtttgctcaaaagcagtgtctgggtggttttctctgaaaagccagatgctatgggcaggggcttgtgaatcatatgaggatatcctgaggccaggctctgaacggtgggtgacccctgggtttgctggccactaccttctcccaagtgggwaacagaacttatggcacctttgaatactcagtgggaggctaggcactgaatgtgatttggggctttccaggatcacagaaagaggaatgtgggcttcga

SEQ ID NO: 476793 - DNA, 532 bp, Homo sapiens
agtgacatctctcctcttctgcattctgcttgctagaagtcggccactaaataaagcccacacacaagcggggagggaattacacaagagtggggctaccaggaggcagggagtattgaggtcatccaagaagctgcgtaccgaaatgccctgcttgtagttatgtgctgtggttactcagccttgggattcagattgcccaggttcaaatcttagtcctgtcactctgtgaaagtttacttacctgtaatgggcatcaagggcttcttgacccatagaattgatatggggactgtgtttaacagaatgcctgcttgcctctaaaaaggtgacctatgattaatgttgttttaagaaatgatgatgatgattttttttttttgagataggttctctctctgtcacccaggctggggtgcagtgccatgaacatgactcactgcagcctggaccttctggacttaagtggcctcctgagtagctgggaccacacktgaatgccaccatgcttgggtaatttttaaaatttttg

SEQ ID NO: 476794 - DNA, 607 bp, Homo sapiens
gttcctccctttccacctgctttcatccctttctcagcagatgggatcatcatcyattttattgaaataacaataatacccccaagttttgttttgtttcattttgtttttatgagacggactcttactctgtctcccaggctgaagtgcagtggcacgatcttggctcactgcaacctctgcctcctgggttcaaacgattctcctggctcagcctcctgagtagctgggattacagatttgcgccaccatgcctggctaatttttgtatttttagtagagatggggtttcaccatgttgcccaggctggtcttgaactcccgaccttaagtgatccaccagccttggcctcccaaagtgctgggattacaggcatgagccactgtgccccgcaaatacccccaagtttactgacctcttaactatgtttgatgccaatctaagcccctttaatggattatctccattgtcacaataactcctacgaagatagtactgggactatcctattttacatataaggaaagttaggctcagagatatggaatgattgacaaatgtccaacagtagagctgagatgtgaatccatgttaacctgatcccca

SEQ ID NO: 476795 - DNA, 607 bp, Homo sapiens
gttcctccctttccacctgctttcatccctttctcagcagatgggatcatcatctattttattgaaataacaataatacccccaagttttgttttgtttcattttgtttttatgagacggactcttactctgtctcccaggctgaagtgcagtggcacgatcttggctcactgcaacctctgcctcctgggttcaaacgattctcctggctcagcctcctgagtagstgggattacagatttgcgccaccatgcctggctaatttttgtatttttagtagagatggggtttcaccatgttgcccaggctggtcttgaactcccgaccttaagtgatccaccagccttggcctcccaaagtgctgggattacaggcatgagccactgtgccccgcaaatacccccaagtttactgacctcttaactatgtttgatgccaatctaagcccctttaatggattatctccattgtcacaataactcctacgaagatagtactgggactatcctattttacatataaggaaagttaggctcagagatatggaatgattgacaaatgtccaacagtagagctgagatgtgaatccatgttaacctgatcccca

SEQ ID NO: 476796 - DNA, 454 bp, Homo sapiens
atatttgttgttaattaaaaatgtgatgccaatcagattattgtctcccctatactttctatattgatttctttctttttctttctaattcttttttttctctctctctctttttagtagagtttctctgtgttgcccaggctggagtgcagtggcgtgatcttggctcactgcaacctccacctcccaggttcaagcaattctcctacctcagcctccctagtagctgggattacaggtgtgtgccaccatgcttgggtaatttttgtattttgtatttttttttttaatggagtctagctctgttgcccaggctggagagcagtggtgtggtctcggctcactgcaacctctgcctcccaggttcaagtgattttcctgcctcagcctactgastagctgggattacaggcacccaccatgatgcccaggtaatttttgtatttttagtaga

SEQ ID NO: 476797 - DNA, 515 bp, Homo sapiens
ggttcctgcacccacccgccttcgaatcacctgcagcagcactgtccaatagaaaccgtgtgaggagccacaagcatcacctgaaattccttagtagccacgtcacaaaaatgggtgaaattaatttttaacgtttgacacatccaaaatattatctttccaacatataatcaacataaacatctaataaaagtttgcttttttcctagtcttctaaaactggtgtgtgttttaatatttcagtcttgattagctgtatttcacatgcttagcagccacatgtggccaayggctacttggctggacagcacagacctagagtggaggtcacacccgcagattccagccccacccccccaagaactaagatctgcccgaatgtacttggtgaaatcaaacaccaccagttattcttaagcactccaaacactaagaaccactgagtaagcggacgccttgctgggtgcggtcgagtgctagaaagcaaaagttgaggttctctgttcacccaagtt

SEQ ID NO: 476798 - DNA, 523 bp, Homo sapiens
gcagccacagggaaggggcactgcctaccagtccctggggtcctgcacaaggggagggcggctgcagacggcgagatggggcgggggggctgttctcgcctcccctcttcgcttccgggcggcgaggtccactgaacccgggccccccagtatgggaggaaccctggtgccctttttcaacacccagggctggggtgcagggcctcagggagcccggcacccagccccggagaggggcgcacggtggggagccctacgggccgcggcccaaactttccccgggactgcccagggcctggagggaggaaacaggcaagcagcgaggggtcgggaccgccgccgagggcgccgggcgggtcctggcacgctccccagggaggcgacgggcgggcccgctccgccccgcgcctggcccgtgcaatcctggcgyccgcggcccggcggctgccgtcagcgccgccctctaggagcggggcgggaccgcgggaggcgcgcggctgcccgagcgccggccgggccatga

SEQ ID NO: 476799 - DNA, 491 bp, Homo sapiens
ctgcggccgtcctgtggctcttgaaaggaaaggcttggtggtgtcggttccccatcatcagttcactgcagcctccgcctcctgggttcaagtgaccgcacagagccagggctgcagacgccgccttggcttcctgtatatttaactttgaggcacccgtaagttttttccaccggcacagactccatctttragcaaatccagcccagatgtagttgacaggtggcatgacctggaggccggtggtttctctccaccacaacctcctgttttgcactcatcagggccaagggtgggggcccggctgcacgtggccaatacaaacaagtcgcgccctcccctctctcagcgctgtcctctctccacaggcctgcagaggtgccgacatggggcttaagatgtcctgcctgaaaggtaaggcctgaagctctgcccccaccagctctcatggcagagggggtgctgggttggggggcaggagagaggggagt

SEQ ID NO: 476800 - DNA, 598 bp, Homo sapiens
gccgtcctgtggctcttgaaaggaaaggcttggtggtgtcggttccccatcatcagttcactgcagcctccgcctcctgggttcaagtgaccgcacagagccagggctgcagacgccgccttggcttcctgtatatttaactttgaggcacccgtaagttttttccaccggcacagactccatctttgagcaaatccagcccagatgtagttgacaggtggcatgacctggaggccggtggtttctctccaccacaacctcctgttttgcactcatcagggccaagggtgggggcccggctgcacgtggccaatacaaacaagtcgcgccctcccctctctcagcgctgtcctctctccacaggcctgcagaggtgccgacatggggcttaagatgtcctgcctgaaaggtaaggcctgaagctctgcccccaccagctctcatggcagagggggtgctgggttggggggcaggagagaggggagttraagccctctgccctgcagagggagcagggcaccatcccttaaagcagtcctgtacacagcaggtgctctaaaaatgcttgtcctgactctgagcacccctccaggccttc

SEQ ID NO: 476801 - DNA, 493 bp, Homo sapiens
tcccagccacttgggaggcggaggtgggaggatcccttgagcccaggaagtcaaggctgcagtragctgtgatcacaccactgcactccagcctgggtgacagagccagaccctgtctcaaaaaaaaaaaaatgacatcacaaagatcctgttttcaacaatgtcagattcccactcacaggctccggttaggtgtatcttttggagcgggcaccgttcagccctggatacgattactctcactccctggggcctcaacactacacgctgcccagggcaccaggaggagggacccgccaggacccaggccctctgcccctctgctctagccccgcagcctggcccagggactcagacccacccacctgtttccaggtgaccctcctgtaccatgcccccagctccaggcctccctgggttcaaatcccagctctgccgcttaacgatttggccttggagcagggccagcttcacaggcatgtgacctctgcag

SEQ ID NO: 476802 - DNA, 201 bp, Homo sapiens
ccaggaggagggacccgccaggacccaggccctctgcccctctgctctagccccgcagcctggcccagggactcagacccacccacctgtttccaggtgaccctcctgtaccatgcccccagctccaggcctccctgggttcaaatcccagctctgccscttaacgatttggccttggagcagggccagcttcacaggcat

SEQ ID NO: 476803 - DNA, 610 bp, Homo sapiens
gtgacattagaatgtagacaggccaaatggtcctccaaaaatgagacttggtcgtgctattttaaagcagtcatctttcagcaacgatgggatgtgttacccagcatgtgggaaacagtgcttgcaaggtggcccctgagactgagtgcctgcaaggggactgggtcctctgtgggccactcaagcatgtgtctgacttttgggctggcagcacttggggcraggcctgccccccgatgcacctgcacaggtcattgtggggctgagcacctgtgggccacctgcacagaggatgttaattcaacccttaattcaccctcttacagtgaggagaccagcagcctaggaaaataacaagttacagtgaagacacgaggagatgggggagagtctcctcaaactcccagccccatctgcagtagaaccaccggccccacgaccaggcctcctcctggaccaaagaaatcggcacctctaggggcagggccaggggcaacagaattttccagactcctcggccaaggttaggcgccaccactgtggcataaagtgagcccagcctgtctcctggggtctcctgtggggagcttaggggaaagcagtagctagc

SEQ ID NO: 476804 - DNA, 610 bp, Homo sapiens
gtgacattagaatgtagacaggccaaatggtcctccaaaaatgagacttggtcgtgctattttaaagcagtcatctttcagcaacgatgggatgtgttacccagcatgtgggaaacagtgcttgcaaggtggcccctgagactgagtgcctgcaaggggactgggtcctctgtgggccactcaagcatgtgtctgacttttgggctggcagcacttggggcaaggcctgccccccgatgcacctgcacaggtcattgtggggctgagcacctgtgggccacctgcacagaggatgttaattcaacccttaattcaccctcttacagtgaggagaccagcagcctaggaaaataacragttacagtgaagacacgaggagatgggggagagtctcctcaaactcccagccccatctgcagtagaaccaccggccccacgaccaggcctcctcctggaccaaagaaatcggcacctctaggggcagggccaggggcaacagaattttccagactcctcggccaaggttaggcgccaccactgtggcataaagtgagcccagcctgtctcctggggtctcctgtggggagcttaggggaaagcagtagctagc

SEQ ID NO: 476805 - DNA, 655 bp, Homo sapiens
tttttttattttttttttgtagaggtgggggtctcactatgttgcccaggctggcctcaacctcctgaggtcaagtgaccctcctgcctcagcctcgcaaagtgctgggtctacaggtgtgagttactgtgcccaaccccagtgtgatagaattaagaggtgaggtcttgggggagtgattaagtcaggaggatggagaggaaagtgagctgccttgccccttccaccaggcaaggacatggtatgaaggtgccytcttttgaggcagagaacaggccctcaccagactccaaatgtgctggcaccttgatcttggacttctcacctccaagactgtttttactgtttgccatacattttactgttttcacccagcctaaggtatttttgtagcagcaggaacagactaagacagttactcagccaaggcagtccactgtagtaagagtccatgtatatgaagggcgagaacaggatagaggaacccatggtcagggacccaggacagcaatgacctctccaaggtcccagtgaagcccgtggtcagggtcccagcgacgtcctgtctcgctcagggaggtggtttcatggtggacatgcacacacacctgattgagccacaggttgatgtttggctgtacttaattgtctaggt

SEQ ID NO: 476806 - DNA, 379 bp, Homo sapiens
tgtgaaagaagtgcttccatctggctagacaagtagctgtgggaatgggaaatgactccagtataaatacatacaaacatatgtacacatgaagatatgtagatacatttttttaaatggaaaaagagcaaatgtacacaacaaggcacacaaatagaaaaaccagaacagatgttaaggcatagtaataccatttaaaatatagtaaccttttactgggttctaagcactttatatgtgtatttaatttcataataaatgtgatagattattaatgttacccttatttatmaaaagtgaagaaactgaggaacaaagacattttcagtcactccaggattcaagtggcctaccaattttatacagattaaaaaatggc

SEQ ID NO: 476807 - DNA, 517 bp, Homo sapiens
ccccacccctccatgctctttcagaagagtaaagccggtagggcaaggtggctcacacctgtaatcccagcactttaggaggtgaagacaggtggatcacctgaggtcaggagtttgagaccagcctggccaatatagtgaaaccccatctctactaaaaatacaaaaattaactaggcgtggtggcatacgcctgtagtcccagctactcgggaggctgaggcaggagaatcacttaaatctgggaggtggaggttgcagtgagccaagatagcgccgctgcactacagcctgggagaaagagtgagacagagtgagactctgtctcaaaaaaaaaaaaaaaaaaaaaaaarggaagagtaaagcctagggaggcaagaaagagtaaagccctatatcctttcttggtgccatgaagtcctgtcgacatttctgtgaacagtccctttatcaaatgctctaaggagcagagagcacacaatggtgttgctaacattttagatttacagatgggaat

SEQ ID NO: 476808 - DNA, 484 bp, Homo sapiens
atattataaaatgctctgaccagttccataggccataaattcttagtaagcactcctagtgtttaagatggtgaggttgtctgcaagaaaagagcacagaaggcaggctaggtcctctttgcatatggggccccgttctgtactcagaaagtaaaactattacagaggccttttttttttttttaattcaagatagtgtctcgctctgtcacccagactgcagtgcagtggcacaatcatagctcactgcagcctggacctcccaggctcaaatgatcctyccacctcagccttctgagtaactaggactataggtaggcacactatcatgtccggctaacatttttaattttttgtagacacgggggtttggctatgttgcccatgttggtcttgaactcctggcctcaagcaaacctctcaccttggcctcccaaagtgctgggagtacaggcgtgagccactgcccccagccctatcagct

SEQ ID NO: 476809 - DNA, 484 bp, Homo sapiens
atattataaaatgctctgaccagttccataggccataaattcttagtaagcactcctagtgtttaagatggtgaggttgtctgcaagaaaagagcacagaaggcaggctaggtcctctttgcatatggggccccgttctgtactcagaaagtaaaactattacagaggccttttttttttttttaattcaagatagtgtctcgctctgtcacccagactgcagtgcagtggcacaatcatagctcactgcagcctggacctcccaggctcaaatgatccttccacctcagccttctgagtaactaggactataggtaggcacactatcatgtccggctaacatttttaattttttgtagasacgggggtttggctatgttgcccatgttggtcttgaactcctggcctcaagcaaacctctcaccttggcctcccaaagtgctgggagtacaggcgtgagccactgcccccagccctatcagct

SEQ ID NO: 476810 - DNA, 546 bp, Homo sapiens
aaagtagcctatgtacagactgcagaccagcttgtggtccccaagctggctccagaaattacatgatgattcgagagggctgatgcctttgggtacttgacaaaaggtaatttaaaaatcctctttggaggaaaataataccttaggcctcgaaatgtctctaggaaatttgaagatgtgygtacccaatgattcccccactccaggtttgtaacttcaaaaaactgtagcatggtgcaccagggaacgtgagcaaggatgctcattgcattatggcagtgactgaaaactggaaacaactcaaatgttcatcaacaagatggaatattcatatgattggacactatagagcagtaaaaataagtgaactattgctacagtaaaaaatgaacattgctacatcaatatagataaatcttgcaaatataattcagcaaacgagcatgtagcagattatatatagtgtgataccaataatatgaagtcgaaagcaagccagacaaagaatattgtttagtaatatatacacttggagtcaagtttaaa

SEQ ID NO: 476811 - DNA, 546 bp, Homo sapiens
aaagtagcctatgtacagactgcagaccagcttgtggtccccaagctggctccagaaattacatgatgattcgagagggctgatgcctttgggtacttgacaaaaggtaatttaaaaatcctctttggaggaaaataataccttaggcctcgaaatgtctctaggaaatttgaagatgtgcgtacccaatgattcccccactccaggtttgtaacttcaaaaaactgtagcatggtgcaccagggaacgtgagcaaggatgctcattgcattatggcagtgactgaaaactggaaacaactcaaatgttcatcarcaagatggaatattcatatgattggacactatagagcagtaaaaataagtgaactattgctacagtaaaaaatgaacattgctacatcaatatagataaatcttgcaaatataattcagcaaacgagcatgtagcagattatatatagtgtgataccaataatatgaagtcgaaagcaagccagacaaagaatattgtttagtaatatatacacttggagtcaagtttaaa

SEQ ID NO: 476812 - DNA, 546 bp, Homo sapiens
aaagtagcctatgtacagactgcagaccagcttgtggtccccaagctggctccagaaattacatgatgattcgagagggctgatgcctttgggtacttgacaaaaggtaatttaaaaatcctctttggaggaaaataataccttaggcctcgaaatgtctctaggaaatttgaagatgtgcgtacccaatgattcccccactccaggtttgtaacttcaaaaaactgtagcatggtgcaccagggaacgtgagcaaggatgctcattgcattatggcagtgactgaaaactggaaacaactcaaatgttcatcaacaagatggaatattcatatgattggacactayagagcagtaaaaataagtgaactattgctacagtaaaaaatgaacattgctacatcaatatagataaatcttgcaaatataattcagcaaacgagcatgtagcagattatatatagtgtgataccaataatatgaagtcgaaagcaagccagacaaagaatattgtttagtaatatatacacttggagtcaagtttaaa

SEQ ID NO: 476813 - DNA, 619 bp, Homo sapiens
ggtggcccaggctggagtacgatagtgtgatcttggctcactgcaacctgtgtcctgggcttaagtgatcctcccacctcggcctcccaaagtactgggattacaggtgtgagccaccatggccggcaaatgttctatttcatatcctgtatggtggacacatagatgttctcttttttattattccttgaacactaagtatatgtttatttatattctctgtggaatacctccttatttctcagtcaattcaggatacctccttacccccatcccctttttacttttcgtcatgtcatatagtatctgaaatatagaaaagcttacatattatcctgtcatcaaagcggcatggaggcataggtagaataaatattatttgtcgattattcatcctttcctttcacttatacagagtcaatcaaacacyaggtcatgttaattttactgtcacgcacatatcttgaatttgcctccttatctctatttccactattcagttcagaccttgataatcactcatctgcattgtagttgcatttttctaattattctgtttctagtcttgttttaaaatctttttttcctcccacaatgcagctagagtggtcaatttaaa

SEQ ID NO: 476814 - DNA, 550 bp, Homo sapiens
gcacagtattgttcaccttgatgacaggatctgggtagtggatagttccagtatcatgagtcaccaggcgttggattcccttcatccccatagtcaccttcctcactttgcacaggttgtactttgcctcttcgactgtaacgcgatcaacagcaacacagcccttgggwcacagaccaggcagaaatgctcacctgtcttgatgccgatgacatccgtgaatccagcagggtatgtgatagccactcgaaccttgccatcaattttaatgaagcattgcatacatatctcctttacgtcatctccggtcaatgcatacttgagtctattcctgaggaagacgatcagcggaagacattccctcagcttgtggggacctgtcgatggacgaggtgcaaatataccctttagtttgtcgagcatccaatgcttcggcactgcagcacgcttcaagtgctccttagggccccaggccatggtgaaaccctgcgacggaagatcagcgctcttttgaagtgccttgtaatcctcataaaccacagtgctttta

SEQ ID NO: 476815 - DNA, 529 bp, Homo sapiens
gaggggtgccctggtgagacaccagtgtctctgaggggcagccatttagcagaatgggtgatcacagcaggtagacaaatgaccccctgcagtgggtcagccgctggggatgctcagtggtggctccgtgtggtctcaggaggcccagtgctgatgactggaaccacattctgacagtagtgacgggactaggatcagccatgacagtcaacaggcattgcttttctgcccttggccgtgtacgcggcttgagttctctcattcggcagtcagataacccatgagagaaagtcaccattctcgtcttataaatgaagtaactgaagttcagagaggttaaagaattttcaaggtgcgtgatgtgctacaatactaagaatacgagaagttaaggctgtattagagcaaccactgaagaaaaaaagsaacagtatatccaaaacactagtagataaattaaaactgaaatcaaacatttttaggcccagtgcagtggctcacacctgcaatcccagcacttcgggaggcc

SEQ ID NO: 476816 - DNA, 507 bp, Homo sapiens
cattaagtcctgtatcctaggagagtcctcccgaactratacccccacctttctccagcttcatgggctttccccttggttcagctctctcagcacccagttctcatcacgtgtgccccgtccctgcaagcgctttttggctccattctgcagctcccttggtacaaggtccttttcctctcttaccaggcctggtgccatcatggccaggactggaaaggagagagatgctggggttaatgtcctgcaggagggaagcctccgtctcctgtgaggaaggtactctcgccccggtgggaagagtggggccacttctgtgcactccgggcttacgggctcgggggatttgaggttttgggagtacatcaacccagatgtctgcatctcatgcatcagagccctgcatctggcacagcagcctgtctaggtggagcatttaaccttcttgggagcttggctgatcttacaactaaatcctgggtctagtcctcagctttctctaccttg

SEQ ID NO: 476817 - DNA, 592 bp, Homo sapiens
ctgccttgggagccctggacgtgctgtggctgtccccaaactccttctctgggtcaggcggaagctggtgtcggcgagtggtaaggggagatgctgctgctccaaggagccttccctggttgcctgaagggacaacccaggagttctcaggagcagggccagcccaaaccaactgcagagaacactgcaggtatcactgctgaccaaaaccctctctgccaggcctggctcatatctggcctgcaccctttcacccagcaaatatgacctcagcacccgcaagccagcacaaggtgggagctgggagaaaatggcaagaactcctgttctctgcccaagaccccagggttgggggcagacaaggaaatgggtaatagtgccacacttgtcactaagttcacaataataagaacagcacagttcctccctgcgggaggcagagctctttcccacacagccaccagctcatttaaccctcaaaacaaccccataagacacgattacctccatcttactmgacaggaaaaccaaggctcagaagctccctgacagcccagggtcactgagtccagaagcagcagaggccgacccc

SEQ ID NO: 476818 - DNA, 503 bp, Homo sapiens
tcaacggcccctcctcgcagccgaggaaactgaggctcggaggcagggcgcagaggcccaaggtgacacagcaggcggccgtcggccggggagcgcgggccccgccagccactttcccgacacaggaaccctcctaccggctggcggcccccgcgcccggccccgccaacgcmcccgaggcgcacaggctccggagcccccgcggttcctgcctcccggcttcccggccagggcagaaggagatcccagggccgcggaccccggccggcggttcccaggccccgcaggtccggcaggaaatgccgctcgctaaccccttccagcccgctgccgcctccaagcccgtacgcggcccggccccacctggcgccctcaccaggtggttcatggtgtccggcgggcctggggccccggctctcgcgggggcgcacaccgagctgcccgggccgcgtgccctcggggctccgagcgcgccgcagccgccccggtgccgccgcgcagct

SEQ ID NO: 476819 - DNA, 466 bp, Homo sapiens
tttttgttgagaaattagctgtcaggttttttgtacctctgaaggcaatacctgttttttcctctgggtttttttctgagacagagtcttgctctgtcacccaggctcaagtgcagtggggcagtctgggctcactgcagcctccacctcccaggttcaagcaattctcctgtcccagcctcccgagtagctgggattacaggcgccctctaccacacccggataatttttgtatttttagtagagatggggtttcaccatctttgccaggttggtcccgaacrcctgtgatccgcccacctcggcttcctaaagtgctgggattacaggcctgagcctggccacctctggggttttaaatcagttttgttatatgctgagtattttttttttttaatgtacttattgtacttggggttgctggttttaaaactatagcctggtgtggggtgtgttggaaaattct

SEQ ID NO: 476820 - DNA, 628 bp, Homo sapiens
aactctgttaaatttttacaaatatacaataagacaacagtggagataaaatgtaattataaaaaagacccacttaagacaaaagtagacagaaaaaaaggtaaacagaaacaaagaccaaataagaaaaacagaaaaaaaccagcaagatggtagactttaacacaactatatcaataattggcataaacacaccaattaartaacagaggtcaaattatataaaaaaagtaagaccaaaccatgtgctgtctataagcagtttgtttaaaatataaaaacatagctacattcaaagtaaaaggatgatcagttgtaggagtcaggaaattaaaaaaaaaaaagataaaagaatggaaaaagagggtcaggcacagtagctcatgcctgtaaacccagcactttgggaggcaaaggtgggtggactgcttgagcccaggggtttgagaccagcctgggcaacatggcaaaacctcgtctctacaaaaaatacagaaaattagctgagtgtggtggctcacaccttgagtcctagctactccggaggctgaggcaaaaggattagggcgcacacctgcagtcctagctactcgggaggctgaggcaaaaggtttgaggttgcagacag

SEQ ID NO: 476821 - DNA, 628 bp, Homo sapiens
aactctgttaaatttttacaaatatacaataagacaacagtggagataaaatgtaattataaaaaagacccacttaagacaaaagtagacagaaaaaaaggtaaacagaaacaaagaccaaataagaaaaacagaaaaaaaccagcaagatggtagactttaacacaactatatcaataattggcataaacacaccaattaaataacagaggtcaaattatataaaaaaagtaagaccaaaccatgtgctgtctataagcagtttgtttwaaatataaaaacatagctacattcaaagtaaaaggatgatcagttgtaggagtcaggaaattaaaaaaaaaaaagataaaagaatggaaaaagagggtcaggcacagtagctcatgcctgtaaacccagcactttgggaggcaaaggtgggtggactgcttgagcccaggggtttgagaccagcctgggcaacatggcaaaacctcgtctctacaaaaaatacagaaaattagctgagtgtggtggctcacaccttgagtcctagctactccggaggctgaggcaaaaggattagggcgcacacctgcagtcctagctactcgggaggctgaggcaaaaggtttgaggttgcagacag

SEQ ID NO: 476822 - DNA, 628 bp, Homo sapiens
aactctgttaaatttttacaaatatacaataagacaacagtggagataaaatgtaattataaaaaagacccacttaagacaaaagtagacagaaaaaaaggtaaacagaaacaaagaccaaataagaaaaacagaaaaaaaccagcaagatggtagactttaacacaactatatcaataattggcataaacacaccaattaaataacagaggtcaaattatataaaaaaagtaagaccaaaccatgtgctgtctataagcagtttgtttaaaatataaaaacatagctacattcaaagtaaaaggatgatcagttgtaggagtcaggaaattaaaaaaaaaaaagataaaagaatggaaaaagagggtcaggcacagtagctcatgcctgtaaacscagcactttgggaggcaaaggtgggtggactgcttgagcccaggggtttgagaccagcctgggcaacatggcaaaacctcgtctctacaaaaaatacagaaaattagctgagtgtggtggctcacaccttgagtcctagctactccggaggctgaggcaaaaggattagggcgcacacctgcagtcctagctactcgggaggctgaggcaaaaggtttgaggttgcagacag

SEQ ID NO: 476823 - DNA, 594 bp, Homo sapiens
tcgtaacactgagaggcaccttgattgagaagctgacatgtattttctaactgcagccaagtactatttctaagtaaagtagttctcttctttgctcaagaagtatttgcaaattatctgataacattccacgaaagtgtaaagagtcctattaaaaattctaaatgatatttcctttatctgtaactagaatgttctcctcacatttacaaagcaggtaacagccttcttcaaagtcctttagtgtgtttcctggaaggaagatgaactcctctgaaaaaaaaaaatcacataggaagaaaaagcaattgtagacatcctctttcctgaagccagttgtcatctgcactgttatagctacaaaagaaggatggacaaaagtgttgagcaacaggttcctataagccaagcaatgaggatagtgatctactggaaaataactccatcagccacttttgagtctccggagtccactttctgaatcacctggyctttgacaaagctggtaaggtcggaatgcagaagtatgttggactggacatgtctttggtagctttattattgggccaaatgggaaaccttctgaacacctgg

SEQ ID NO: 476824 - DNA, 646 bp, Homo sapiens
ttgctttgctcaccatcatgtacttgggacttcttagtccccattgggctaatttggattttggaaagtggacaatttccaatgcttgttcagtacttcccaattgacaaaaatatttcttctaatgggagtttggagtacacctcaccttaaaatgctcttgggcaatggagaaaagacccagacataaaaataaaatgacaaatataaaacagagagtcacagatgctcatagttgayagtgggaatcttctatttaaatacatatgtacatgtaggcatatgtacatacccacataaatacatagaataatatggttgttatgagcagaggctttgcagacagaatttagtttcacatttttgtacaattattaatgtatagctttggaaaagttacttaatattactgtgtctcagttttgtcatctgtaaaagaggagtatgaaatttaccaccttctgttattttgaggtttaaatgaggaatatatgtaaagcattaagaagtggattattgaatgcactatacacattagttattatctttaatactttcaaattataagtgagggacatcaaatcccaagtgtttcaatgaattatcattttcaaatagcataacctttccaagtttcattgtcctg

SEQ ID NO: 476825 - DNA, 651 bp, Homo sapiens
agctttattcaaaatacagaacacttgaaaatggtatctatgattaaaaggaggggaatagacasgtaacttatggcatgctgatacaaataaatactatgcaaggattaaattcatctttgcatactattgtaatattacaggaacgtacttgctttttatcacatgaaaagatatatacagctgacccttgaacaatacaagtgttaggagtgctgactctccatgcagtcaaaaatttgtgtataacttttgattcccccaaaacttaactactagtagtctaatgctgactgcaagctttacaattagtccattaacacatgttgtatattatgtgtattatatattatattcttacaataaactaagctggagaaaagaaaatgttaagaaaaccataagaaagagaaaacgttttactattcacttagtggaagtggacacaataaaggttttcatccttgtcatcttcatgctgaagaggaaaaagaggaggagttggtcttgcagtcttacatgtgtcagagggggaagaggtggaggaagtggaaggggaggcaggagagacaggcacactcggtgtaatttattgaaaaaatactgcttttaagtggacccacgcaattcagacctgtgttgttcaagggt

SEQ ID NO: 476826 - DNA, 672 bp, Homo sapiens
ctgacccttgaacaatacaagtgttaggagtgctgactctccatgcagtcaaaaatttgtgtataacttttgattcccccaaaacttaactactagtagtctaatgctgactgcaagctttacaattagtccattaacacatgttgtatattatgtgtattatatattatattcttacaataaactaagctggagaaaagaaaatgttaagaaaaccataagaaagagaaaacgttttactattcacttagtggaagtggacacaataaaggttttcatccttgtcatcttcatgctgaagaggaaaaagaggaggagttggtcttgcagtcttacatgtgtcagagggggaagaggtggaggaagtggaaggggaggcaggagagacaggcacactcggtgtaatttattgaaaaaatactgcttttaagtggacccacgcaattcagacctgtgttgttcaagggtccactgtacttacatatctagcatgagctcagaattacatacagattaaaacatgattaaattacatacaaattaaggcatgaaagaagtataccaaaaatgttaatttttatmaatgattataactgatgttatggatactctattttctatgttccaaatattttctgggtgcacatcagtgtttaaaattgataaaaataa

SEQ ID NO: 476827 - DNA, 548 bp, Homo sapiens
tatgcttttcttgtggacttttggcatgtttaaattctgttccagcaatgagccctgtaagagtccggaggtagggagcctctcaatattagggcactgagtgttagaaatcacatgtagcaaatggggaaaaagttaaaaaaccaaaccaaaacaaaacaaaagaaaaaaaactatgttcaaaatatttaggccgggcacggtggcttacacctatattcccagcactttgggaggtgagggagggagggtcacttgaggccaggagtttgagactagcttggccaacatagtgaaaccccgtctctactacaaatacaaaaatyggccaggcgttgtggtgggcgactgtaatcccccctactggggagcctgtcacgagaatcgcttgatcccaggaggcagaggttgcagtgggccgagattgcactactccagcctgggcaacagagcaagactatctcaaaaaaaaagaaaaaaaaaatctcattaaagacatcctcacagaaacattcagaataatttttgaccacattatctgggcacag

SEQ ID NO: 476828 - DNA, 548 bp, Homo sapiens
tatgcttttcttgtggacttttggcatgtttaaattctgttccagcaatgagccctgtaagagtccggaggtagggagcctctcaatattagggcactgagtgttagaaatcacatgtagcaaatggggaaaaagttaaaaaaccaaaccaaaacaaaacaaaagaaaaaaaactatgttcaaaatatttaggccgggcacggtggcttacacctatattcccagcactttgggaggtgagggagggagggtcacttgaggccaggagtttgagactagcttggccaacatagtgaaaccccgtctctactacaaatacaaaaatcggccaggcgttgtggtgggcractgtaatcccccctactggggagcctgtcacgagaatcgcttgatcccaggaggcagaggttgcagtgggccgagattgcactactccagcctgggcaacagagcaagactatctcaaaaaaaaagaaaaaaaaaatctcattaaagacatcctcacagaaacattcagaataatttttgaccacattatctgggcacag

SEQ ID NO: 476829 - DNA, 548 bp, Homo sapiens
tatgcttttcttgtggacttttggcatgtttaaattctgttccagcaatgagccctgtaagagtccggaggtagggagcctctcaatattagggcactgagtgttagaaatcacatgtagcaaatggggaaaaagttaaaaaaccaaaccaaaacaaaacaaaagaaaaaaaactatgttcaaaatatttaggccgggcacggtggcttacacctatattcccagcactttgggaggtgagggagggagggtcacttgaggccaggagtttgagactagcttggccaacatagtgaaaccccgtctctactacaaatacaaaaatcggccaggcgttgtggtgggcgactgtaatccyccctactggggagcctgtcacgagaatcgcttgatcccaggaggcagaggttgcagtgggccgagattgcactactccagcctgggcaacagagcaagactatctcaaaaaaaaagaaaaaaaaaatctcattaaagacatcctcacagaaacattcagaataatttttgaccacattatctgggcacag

SEQ ID NO: 476830 - DNA, 548 bp, Homo sapiens
tatgcttttcttgtggacttttggcatgtttaaattctgttccagcaatgagccctgtaagagtccggaggtagggagcctctcaatattagggcactgagtgttagaaatcacatgtagcaaatggggaaaaagttaaaaaaccaaaccaaaacaaaacaaaagaaaaaaaactatgttcaaaatatttaggccgggcacggtggcttacacctatattcccagcactttgggaggtgagggagggagggtcacttgaggccaggagtttgagactagcttggccaacatagtgaaaccccgtctctactacaaatacaaaaatcggccaggcgttgtggtgggcgactgtaatcccmcctactggggagcctgtcacgagaatcgcttgatcccaggaggcagaggttgcagtgggccgagattgcactactccagcctgggcaacagagcaagactatctcaaaaaaaaagaaaaaaaaaatctcattaaagacatcctcacagaaacattcagaataatttttgaccacattatctgggcacag

SEQ ID NO: 476831 - DNA, 624 bp, Homo sapiens
tataactccatcctcattttagcttacattttagaggactttgacaggatactcatgatagcctgaggtttcacggaatgtttattactattaactgaataatgagtatttgaccatcaaaatgagcatttcgccaggattacttttcatttctctagagtcctaaaactagtgtgggcagaggaaatataaaggtaaagaaaaataygttgaatattgaaaaaagggaaacagttaactatattccagtaaacagaacagtgtccttaactttagcattctcctgactttcttcccctatacttgactctggaggctcatagttttcaaatagaagagacttttagggattggattttgaataagttattgaaactctctgaatctcaatgcctccatctaaaaaataattaagtataacaacttcatcagtacttgttgaagagacacatggtaaaatctcacgtaggtaccctacacatggtttagtgcactataagtgctcaataaacatcatttcctctgagccattttgatcaattttttttatttttttgagacggagtttctcttttgttacccaggctggagtgcaatggcgccatctcagctcactgtaacctc

SEQ ID NO: 476832 - DNA, 427 bp, Homo sapiens
aaatggttggttttactagatatctttttgacatttttgagcttgaacatgatagtttaccttggtgaacctcaagctcttggtttattgtaagagatactaataacgattttctaaaatttttgtgagaatcacatattacaatactattcttcctaattttaatttctaactgttgattgacaaaggatgtgcaatgatgtattaagtgcttsatatacaacatcaagtttaatccttactcaaaaaatagaaataggtggaattatcccagtaagaatattgagcaagattgaatactgtgctcatgtgaatatagctagcaagtaatagaatcaaaggtatctattatgtcattgcttttgttttgctttattttgcttctatatttgctcatataaatatgagtctaaagtgccagaaatgg

SEQ ID NO: 476833 - DNA, 641 bp, Homo sapiens
acagctgcaactacattccctcagggtgagaaacccaaggtatacacagagaactgagggacatatttacagtctcctaagttcccatcttttctcccgtatcagcatttatcatttttgtggtgagacgtattttgggaagcatggcggtaattccctcaaagcaacagttccaggactccacagagccttaggtggcmatccgtggtctgtagattctgaagggtgaaagaaaatctgagcttactcgcagttaaagtgatggaagtggcagctattaaagctattagttactattttctgtcctgaaagaaaaggagagaggatattaacactggggacaaaggaagatgtattgctgagcttcgagcttccgaagccttgccctgcaatctgtgctgctgctcccacacagtttggcaggggacaaacagtgagtagtgttctatttttaattttaaacttttaagcagaaggccatcaagaataatctgctcagtaaacatttggtctcgagtcttagcatttctttctgttcagcaaacagtatcacaaatgttaaatgttagagaagaaccaatggcatgtgtgttttagcaagtcgattctttgccaagaatatctctggatttttactatcc

SEQ ID NO: 476834 - DNA, 666 bp, Homo sapiens
aaaaatacatgctggatatgtatgtgatgctgccagactttagctgttgagtctcactttcaagccacccctgttctagctacatggaggagacacaagctgtcccaattgagccctgccccaaattatagatttatcagcaaaattaatgctattgttgttttaagttactaagctttgtggtgatttgttacatggcaatagctacctaaaacactcatcatgaaccatatcactcctgtgttctgtgctctagccacactggccttctttcagatcttcatggcttctctgttcttccttgctttcacaaactgttttctctgcataggatgctttgtctctctcctgcttaacttcatcaatcaattcatttttatcctgtaggtctctgctcaaacttcacttygagaaagccttctcggacttccagcctagttcttagaccttttattccctgttcccctcacagttatatttttttcttgttgaaattacaatttgattatggtctatctcacagactagactaacatcctcaggagggccagtctctttgatccgattggcatatcccagatcctgctatagtgtgtggcatataccaaatattttataagtattttccatattaatgataaaaatgatttaataatgattcaaaat

SEQ ID NO: 476835 - DNA, 671 bp, Homo sapiens
cagccaaaaatacatgctggatatgtatgtgatgctgccagactttagctgttgagtctcactttcaagccacccctgttctagctacatggaggagacacaagctgtcccaattgagccctgccccaaattatagatttatcagcaaaattaatgctattgttgttttaagttactaagctttgtggtgatttgttacatggcaatagctacctaaaacactcatcatgaaccatatcactcctgtgttctgtgctctagccacactggccttctttcagatcttcatggcttctctgttcttccttgctttcacaaactgttttctctgcataggatgctttgtctctctcctgcttaacttcatcaatcaattcatttttatcctgtaggtctctgctcaaacttcacttcgagaaagccttctcggacttcmagcctagttcttagaccttttattccctgttcccctcacagttatatttttttcttgttgaaattacaatttgattatggtctatctcacagactagactaacatcctcaggagggccagtctctttgatccgattggcatatcccagatcctgctatagtgtgtggcatataccaaatattttataagtattttccatattaatgataaaaatgatttaataatgattcaaaat

SEQ ID NO: 476836 - DNA, 671 bp, Homo sapiens
cagccaaaaatacatgctggatatgtatgtgatgctgccagactttagctgttgagtctcactttcaagccacccctgttctagctacatggaggagacacaagctgtcccaattgagccctgccccaaattatagatttatcagcaaaattaatgctattgttgttttaagttactaagctttgtggtgatttgttacatggcaatagctacctaaaacactcatcatgaaccatatcactcctgtgttctgtgctctagccacactggccttctttcagatcttcatggcttctctgttcttccttgctttcacaaactgttttctctgcataggatgctttgtctctctcctgcttaacttcatcaatcaattcatttttatcctgtaggtctctgctcaaacttcacttcgagaaagccttctcggacttccagcctagttcttagaccttttattccctgttcccctcacagttatatttttttcttgttgaaattacaatttgattatggtctatctcacagactagactaacatcctcaggagggccagtmtctttgatccgattggcatatcccagatcctgctatagtgtgtggcatataccaaatattttataagtattttccatattaatgataaaaatgatttaataatgattcaaaat

SEQ ID NO: 476837 - DNA, 212 bp, Homo sapiens
gctagaggctgggcacggtggctcacatctataatctcaacactttgggaggctgaggtggcaggattgcttgaacctaggtttcaagatcagcctaggcaacatagcaagaycccatctctattaaaaaaaattactagagagacaccaggagatctgaagcttttcatgttttccgccaatgtttgattgcttactctgtgccaggcttt

SEQ ID NO: 476838 - DNA, 604 bp, Homo sapiens
ttcagttaacaaacacttgtctacccaaatacacaggaataatagtcatctcttctactttcattgctttttaacttagaaaatgtcatcccattcactgtcttggtcttcacaaaaycctaaagaggtagactcaaacagtggtgataacctttatgttatagtagagaaggccaaggcccatagaggtttagcaatttgctaaggccacccagcaagaacatggcagaatctggttttataatccagtcgcagaccctgggtccagccctttttccttgtctctgtcttcccatcatttattacggctccccctgctcaccccatcctttccttcaagttgcggaagtgagttgtagacccagtctaagggctgagaaggtaggggttggggcatggtggtgattttttatttttattttttaaacaaactgggagggagggtcaggtgggcgactctttgaatgacacagctcccttcgtatgaacgagctcttcctggtttcgttgctcagtttatttgccaggtagcagactcctagctattgcatggggtagcctctgatctcagtcttagagatcaagactggagctggagaacctt

SEQ ID NO: 476839 - DNA, 604 bp, Homo sapiens
ttcagttaacaaacacttgtctacccaaatacacaggaataatagtcatctcttctactttcattgctttttaacttagaaaatgtcatcccattcactgtcttggtcttcacaaaaccctaaagaggtagactcaaacagtggtgataacctttatgttatagtagagaaggccaaggcccatagaggtttagcaatttgctaaggccacccagcaagaacatggcagaatctggttttataatccagtcgcagaccctgggtccagccctttttccttgtctctrtcttcccatcatttattacggctccccctgctcaccccatcctttccttcaagttgcggaagtgagttgtagacccagtctaagggctgagaaggtaggggttggggcatggtggtgattttttatttttattttttaaacaaactgggagggagggtcaggtgggcgactctttgaatgacacagctcccttcgtatgaacgagctcttcctggtttcgttgctcagtttatttgccaggtagcagactcctagctattgcatggggtagcctctgatctcagtcttagagatcaagactggagctggagaacctt

SEQ ID NO: 476840 - DNA, 495 bp, Homo sapiens
agtacgcccaaatcaaatgaatgaatgagtggatcaatcaatcagccaaccagccaaaaataaaatgaaaaattgacagttgggtttctgcttttgtattyggtaactattttaaaattttgtatttaggtagctatttttttaaaccacatgaaagaaagggatgtttgttctgcacagcattctctggagtgattaggtagcattggtatttgtgcttcatgtgtctacaatctattgccatgcatttctaataacataatattccttttcaatatactgacttgtttttctttttcttttcttttttgtttttactggctaaatgctatagcattgtctttgaatattagcaaataatggaacatgggccaagggtgaaccatgacgaatttgtgttccagcagccctgcttctttagaattgacagtctggcttcgtggttaattcacagcatctgaggaatacatccgaagagggtgatactgtggcatg

SEQ ID NO: 476841 - DNA, 538 bp, Homo sapiens
ggacttatcatttacttcagcctaaggaaggcaccaggaggagayaggaaagccagggagagaggctgggtgtttcctccctaccaaatgccacctttacccaaggccatgaagatactgccctttgtcaccttctgaggcattgttttccctccctatttacacctgctgtccacctggaaatgatttcccctctgatttttattatgaaagttttcaagtctaccgaaacattaaaaatagcttaatgaacactaatatccttccactaaattcaccaatagttaatgttttgccacattttttcaaaatatagatgtaaataggtagacagatcgtacattgagctgtacaattttgttttattccgaaccatgtgaatgttttaaacattttgacatttccctcctaaatatttcagtgtgcttctcctaaggataaagacattatcctaacaatgcaaaataacatcaattcaataatatcacccaattacacttttttgcttaaaatatactttcttaataatctccaatat

SEQ ID NO: 476842 - DNA, 586 bp, Homo sapiens
ccatgaaggcagcaacagcagtagggaaggactgcttcctctgaagagttgggctgccaggctcttagggagcatgaaggatgcagatggagctggagctgtgrcctggggcctggatgtccccatcctgcacatgaaggcagtactctggcaggcctctcgctaggctaggagggagacaggattcaggaaccatgcctgggaggccctgagtgggataggccttcagatggacatggccctcagatggcctcttgttggctgtagaagtggtgcttagtttttgcagtttgaaggtctttaggtgcaaaaagccctctctgtttgcccatagtccccacacatccctcttggtcaacacctttgcccatccacatttccatcacctgcctggcctctgaaggcatttgtttttgagcacctggctttagcaatttcaagttcttcatgtaagaaaaacaaacaaaccttgtcaatggcctctcctaggaaaactcctatgtgcagtaggctaacaacatctctatttctttaccttaccaaacagccccctttccgccaggatgaggctcattcattcattcaa

SEQ ID NO: 476843 - DNA, 464 bp, Homo sapiens
cttgccaatcagaggccagaacttgcacggggaaacccttccttgctaacttttcacaaggggcaaggaaattggttattaccctctgcagagcggaaatgaaacaggcagacagattgcacctaattataatgtaatactaagtcacgggtgtggaatttggagcaattatacccatcatcttctagaagactcccatatcaaggggcttctggtgacctataagagttcccctttctttctgtcacctcatgtaatgttctcacgcrggtggggctttcagtttttcaaaaggcatcttacatatgtgaatcatagagcagaccctgccagtagtgggctgttgcctcctggaaactgaaggctgtgaatgccaattttcagcctcctggagacctggcagttttgggggaagaccccagggtagacaccagtgttcctctaagtgtgcccacccgtggact

SEQ ID NO: 476844 - DNA, 450 bp, Homo sapiens
tatcatagcacctgtgacatgtggtgttatgtatttattggtatggcttggaacttgcctttggagaagagagagacaccctacaaggatttatcccccatatgcttgttacccttcaaagcaagtccacggtgccactattttacaacttacagttgattttggctcattcagacttgccaggagagtgctccatgattatataccctgtgcagtactcttgatgtcasagaacaggagaaaactcacaacactcaataaaggctgaatatttgcaactctatcttgcttgatctctttccaaaagcaccaaataaagtacagtttgccatgcatgcccctggctgtcctttccctccatgcctttgctcatggtgcttcctcttgctggaatgcccttcccttctcccgctccctcaccccaggttaactcctacttttagacccagc

SEQ ID NO: 476845 - DNA, 457 bp, Homo sapiens
ctgccatctcttgctgccatggggattgtcaccccgggccaggaatgtctcaggcctcttctaggaatgcyctggggtcaggcccaggctgagagggcagaaaataaagtaacatggtcactcaagcactttgggcagggtccaggcttggatcagggcaaggccactaacaacatgtgccctgaacagaaggatcccacctggactccaggcccagggagggcagcaccttgcctgggtcacacagttgggctcaggctcctcaacgagaaatcagatggggcgcaaaggctgacatggattgttcctgccccttggcccggggtgtcccccccaggtacactggagtgggggtgatgtgcactatcacctggagagccatcccccgggaccctttgaagtgaatgcagagggaaacctctacgtgaccagagagctggacagagaagcccaggct

SEQ ID NO: 476846 - DNA, 622 bp, Homo sapiens
ccatctcttgctgccatggggattgtcaccccgggccaggaatgtctcaggcctcttctaggaatgccctggggtcaggcccaggctgagagggcagaaaataaagtaacatggtcactcaagcactttgggcagggtccaggcttggatcagggcaaggccactaacaacatgtgccctgaacagaaggatcccacctggactccaggcccagggagggcagcaccttgcctgggtcacacagttgggctcaggctcctcaacgagaaatcagatggggcgcaaaggctgacatggattgttcctgccccttggcccggggtgtcccccccaggtacactggagtgggggtgatgtgcactatcacctggagagccatcccccgggaccctttgaagtgaatgcagagggaaacctctacgtgaccagagagctggacagagaagcccaggctgaggtgatatgaasggggagccagggatgcaggctgggggtgcttggtcagtgtccagttggcttttgggggtgtcacaactacaacagaggctgaggcagtgggaaagagccccgaagagctggagctggcccaccggaaggaaactcagagccaggcaaggctgga

SEQ ID NO: 476847 - DNA, 492 bp, Homo sapiens
ctggtttgtgaattatatgctaatgggtcttacccataataataatatatatgtgtcttctatttgatttatcattaagcacctacatttaagtggaaatgagtacctaaattttctctctttatatgcctcaccaatcctttttctctttatttcaatgatgttgctatcttttcatcctacactaatcggctgtacttatatctgctgatgttcaagtcactgcaaaatgccttgccattttggaaatgcattaaattcaaatcaaaataaaaaagttcctaagtatcccagcaatcacgwaggaagagtctttgtggctacttcaccgagagcatgtggaagaaaaggggcttattttatgcttgtcacaaaaactgaaatggaacgagaagaggataaagacaagccccttatcttttcctcaagtttcaccaatttatatgttattaagggtccagacatcaactatgacctgtcttacttctgact

SEQ ID NO: 476848 - DNA, 274 bp, Homo sapiens
tgtggtacctattccacacgttttcattgaaaggagcacagtgtgctcctgggatggctgggcaaggctggaaggcgccagcagaactggagcactgatcacgaattcgcggtggcccgagtgcctcccgtagctgtggaggagcctcgtgtcacccgccttgctcatgtcacctcccactgtggcaaaagccaggaaaacactgagcgcatgacraatgccttggggagcttgacagtgctgactcctggtggtttcctgacaccaaaagtac

SEQ ID NO: 476849 - DNA, 274 bp, Homo sapiens
tgtggtacctattccacacgttttcattgaaaggagcacagtgtgctcctgggatggctgggcaaggctggaaggcgccagcagaactggagcactgatcacgaattcgcggtggcccgagtgcctcccgtagctgtggaggagcctcgtgtcacccgccttgctcatgtcacctcccactgtggcaaaagccaggaaaacactgagcgcatgacaaatgccttggggagcttgacastgctgactcctggtggtttcctgacaccaaaagtac

SEQ ID NO: 476850 - DNA, 507 bp, Homo sapiens
aatttgctactgtgtttattttaatgcaaacaaaaaacacacacaaaaggcttaagttttctatgatgacacgagtaatacatcttacaaaagaatgtcttaagtggttttttaaatttctattcaaactacataaaaggttgaaattttctccactctaaatactacattctgtctagcctgcattgccctcaagtatctgtctgacatyactttctttttacaaaatcaattatttacaaacagtgagggaaggcccaaaaatgctaaattccatctcaaactgtattaaataactctcagaaaagggcagcaacaaataattagataaaacactctatacataactacattctacataatatccaatatgtaatgactataaaataaaaaatggtaatagttaaatacagaaacttaaaaggataacagtaatgatttacatagaactttaataagtaactctataaaacaaaaccatcaaaaggcactaaggtttatgaccag

SEQ ID NO: 476851 - DNA, 507 bp, Homo sapiens
aatttgctactgtgtttattttaatgcaaacaaaaaacacacacaaaaggcttaagttttctatgatgacacgagtaatacatcttacaaaagaatgtcttaagtggttttttaaatttctattcaaactacataaaaggttgaaattttctccactctaaatactacattctgtctagcctgcattgccctcaagtatctgtctgacattactttctttttacaaaatcaattatttacaaacagtgagggaaggcccaaaaatgctaaattccatctcaaactgtattaaataactctcagaaaagggcagcaacaaataaktagataaaacactctatacataactacattctacataatatccaatatgtaatgactataaaataaaaaatggtaatagttaaatacagaaacttaaaaggataacagtaatgatttacatagaactttaataagtaactctataaaacaaaaccatcaaaaggcactaaggtttatgaccag

SEQ ID NO: 476852 - DNA, 578 bp, Homo sapiens
aattttgggtacttgccaacactgcaaatctttgggaatcaccataacaaaaaatgaccacacacctctggagackctaatagccagagaatatatggtttggatccactcttacccaaagaaggaaattcctttttacctctattctctaagcagtttcaaattctctagtttacaaaaactaattttattcttcatgcctgcatcaagagtttatgccattccataagtcaagactcagttatccagtgagactagtaaattaaaaaaataaaatattccagccaggcacggtggctcatgcctgtaatcccaacactttggaaggctaaggtgggtggatcacctgaggtcaggagttccagaccagcctggccaacatggtgaaaccctgtctctactaaaaatacaaaaattagctggcagttgtggtgcatgcctgtagtcccagctactcgggaggctgaggcaggagaatcacttgaacccgggaggtggaggttgcagtgagctgagatcgcaccactgcactccagcctgggcgacacggtgagactctggctcaaaaaataaatatt

SEQ ID NO: 476853 - DNA, 578 bp, Homo sapiens
aattttgggtacttgccaacactgcaaatctttgggaatcaccataacaaaaaatgaccacacacctctggagacgctaatagccagagaatatatggtttggatccactcttacccaaagaaggaaattcctttttacctctattctctaagcagtttcaaattctctwgtttacaaaaactaattttattcttcatgcctgcatcaagagtttatgccattccataagtcaagactcagttatccagtgagactagtaaattaaaaaaataaaatattccagccaggcacggtggctcatgcctgtaatcccaacactttggaaggctaaggtgggtggatcacctgaggtcaggagttccagaccagcctggccaacatggtgaaaccctgtctctactaaaaatacaaaaattagctggcagttgtggtgcatgcctgtagtcccagctactcgggaggctgaggcaggagaatcacttgaacccgggaggtggaggttgcagtgagctgagatcgcaccactgcactccagcctgggcgacacggtgagactctggctcaaaaaataaatatt

SEQ ID NO: 476854 - DNA, 578 bp, Homo sapiens
aattttgggtacttgccaacactgcaaatctttgggaatcaccataacaaaaaatgaccacacacctctggagacgctaatagccagagaatatatggtttggatccactcttacccaaagaaggaaattcctttttacctctattctctaagcagtttcaaattctctagtttacaaaaactaattttattcttcatgcctgcatcaagagtttatgccattccataagtcaagactcagttatccagtgagactagyaaattaaaaaaataaaatattccagccaggcacggtggctcatgcctgtaatcccaacactttggaaggctaaggtgggtggatcacctgaggtcaggagttccagaccagcctggccaacatggtgaaaccctgtctctactaaaaatacaaaaattagctggcagttgtggtgcatgcctgtagtcccagctactcgggaggctgaggcaggagaatcacttgaacccgggaggtggaggttgcagtgagctgagatcgcaccactgcactccagcctgggcgacacggtgagactctggctcaaaaaataaatatt

SEQ ID NO: 476855 - DNA, 578 bp, Homo sapiens
aattttgggtacttgccaacactgcaaatctttgggaatcaccataacaaaaaatgaccacacacctctggagacgctaatagccagagaatatatggtttggatccactcttacccaaagaaggaaattcctttttacctctattctctaagcagtttcaaattctctagtttacaaaaactaattttattcttcatgcctgcatcaagagtttatgccattccataagtcaagactcagttatccagtgagactagtaaattaaaaaaataaaatattccagccaggcacggtggctcatgcctgtaatcccaacactttggaaggctaaggtgggtggatcacctgaggtcaggagttccagaccagcctggccaacatggtgaaaccctgtctctactaaaaatacaaaaattagctggcagttgtggtgcaygcctgtagtcccagctactcgggaggctgaggcaggagaatcacttgaacccgggaggtggaggttgcagtgagctgagatcgcaccactgcactccagcctgggcgacacggtgagactctggctcaaaaaataaatatt

SEQ ID NO: 476856 - DNA, 487 bp, Homo sapiens
ctgcccaccttggtcagcaggcggcgcagctcggcctttccctgaaggctccgcagcccggcagtgttggggctggacacattcaccaccaggtagtcggccagggggcccagtacgcgcaccccttctgcgtagtcctccgcggcgtccactgaggtcttgttcttccccaagttgacccccagaggcagtccatctgcaaacatcgctggtcaggcctgcaccccgcacaccmtttcctgtgccaccttctgaggctgcccttgaccaaaccacctgtggacagccgcgcaggccttccctccaaacctgacctgcccgacaccggctgacaggtgctcaactgcggcctgggcccgcctgctgaccaaaaccactcactggctttgtctagcaaagtctgggcagctacgaggatgttttgctgcattttgccctttttatttttaaaattttcatggaaaatggacaaattactgcaaatact

SEQ ID NO: 476857 - DNA, 602 bp, Homo sapiens
ctcggggagcctacctggaggaccagctagcctgggaytggggccctgatggggaggagactgagacacagacttgtcccccacacacagagcatggtggtgagcaggacgcttttgggccctaggggctcctgggagtgcacagacccatggcaggggctcaggggtcagccatggggccccaactgaggtggccacctcctctccctagcctgtggcctgcggctggaggctgctccagtgggggtcctgtggccctggctggcagaggtgcatgtggctggtgatcgagtctgcactgggatcctcctggccccaggctgggtcctggcagccactcactgtgtcctcaggtgggtctcactcgtctcctaggcgagagacgggaggggagaatggaacagagccaaagacttgtttttgttatttgtttgtttgtttgtttaaaaaaaattaacaatgagatcttgctgtgttgcccaggccagcctcaagcaatcctcctgccttggccaacgtactaagattacaggcatgagccactgtgcctcacccaaaggactcttaaaatagtgggatattctcctttaagcatcttacag

SEQ ID NO: 476858 - DNA, 562 bp, Homo sapiens
ctgctgacttaaggctaacaaacacctacttcctttcctaacctcactttaattttatcttggaggaattcttttccctatcccattaagttatgggagatggggccaggcatggtggcttakcaatcccagcactttgggaggctgaggtgggtggatcacttgaggtccagagtttgagactagcctggccaacatagtgaaaccacatctctactaaaaatacaaaaattagccaggtgtgatggtgggcacctgtaatcccagctactccagaggctgtggcatgagaattgcttgaacccaggaagcagaggttgcagtgagctgagatcgcaccactgcactctagcctgggtgacagagtgagaatctatctcaaaaaaaaaaaaaaaaagtcatgggagaggatggtaaagctaagtatcttttgcacctactccccagccccaccactgcagaagctgaaggggttcctagaggcttcttctgccgtggagcggttcccactggcccctagctagaggtgggtgtaagactttgaaacatgaacaaatggagc

SEQ ID NO: 476859 - DNA, 464 bp, Homo sapiens
gtttgcatggatgatggtgtgggtcagagtgtgggtgtgaatgtgtgtgactagatgaatgtacccatgtgtgtttcagtcttcatgtgtgtggcacggccagagcttgcgcttckggctgtgtgtgtgtgtgtgtgtgtgtgtgtgtgtgtgtgtagatgaaccacttactcatttactgatgggcttggatgttgtgggggtggggagcagggtagtcacatctttaactctcaagccacagcaatgacctagggtccgagtggatgccctcagggtgaaggtagcttcaggttgctttgtgcctagcctgcctggcctgcgaaaggcccagtaagtggggaattcacaactatgtggagccttcttcagcccttctgaggtctcaggtctgaccctgacatactcaccagtgccctgcccttcccattttatcagaagctttatcctactgtaataggctg

SEQ ID NO: 476860 - DNA, 320 bp, Homo sapiens
tctgtgtactttcattctctcttgttktgttgtaacttcagaaaaccttagaatgattattatattatatagtccacgtttgcctagctctacccacgtatttaccagtttcgtagctcctcacaccttcttgcgtcctagatcttccatctgggatcacttcccttccacctaatgtacatcctttagaatatcatttaataagagttccctaattataaattctcagtttttgtttttctgacaatgtgtttgtttggtgctcatttgtggaagatattttcactggataaagaattctagggtgtcaggtcatccct

SEQ ID NO: 476861 - DNA, 320 bp, Homo sapiens
tctgtgtactttcattctctcttgttttgttgtaacttcagaaaaccttagaatgattattatattatatagtccacgtttgcctagctctacccacgtatttaccagtttcgtagctcctcacaccttcttgcgtcctagatcttccatctgggatcacttcccttccacctaatgtacatcctttagaatatcatttaataagagttccctaattataaattctcagtttttgtttttctgacaatgtgtttgtttggtgctcatttgtggaagayattttcactggataaagaattctagggtgtcaggtcatccct

SEQ ID NO: 476862 - DNA, 547 bp, Homo sapiens
tggaatcctctgtgctgggggtacattgtcacctcagagacacacatgtgattgacttcctcgcggcatagtgcaagggaggagggctgacaaacccaggtgttgttccttctgggtggcacacctctccctctctttcagcagggagtgcttgttctccagatccccaccacccagccccagcctgggctggcccgaggccggatatcttgctgagtatcccaccaccctcccagcctgcagattcacccatccttattgcctcacagtgctaacagcaatctgaagagcttagggtcagcattgatgtgtcccatggcgctgccacctccctgcccctgtcatcacagcctccttggtttctgcccatccttcttctgactctggctccttagggcccgcccccccacccattrtcctcatggcatccagtggagtttgcctcctgtggctgtcactctgcaaaagccaaagaccctctccaagagatgaggaagctgggccccttcgctccctcctactgattattcatgtgaaaccttggaac

SEQ ID NO: 476863 - DNA, 583 bp, Homo sapiens
ataaatgtcaataaataaataagggaagaaagaaggaaagaaagagaagaatatgacaaaaatcacacyaatgatgaagactaaattaaaaggtacccaaaggagaacagatttgaatgaaaattcagggataccactgaagaagagcagaaaatcaaccatggcaatgaaaatgagatgatgtaaaaaagaaagagtgtcaaagataaagtggttgaaacagaagacaggagaagagacactgtgtataactgaagtcatggaaaagaaaaatgtaatgcaagagaactctcagagatagaagacctgaatcagtctatgcaaggatccaccaggtacctggggcaatccatttggaacaagtgattccgaggcatagctcagtgagactattagacattacatataaagcaagaaatcctcaaagatgaagaaaaaaaaaatgcttgggtcctccagacaaaaatatcaggcaactttaaaaggacaaaatatatataaattttagcctagcatcaaggaataaacaaagcaaggcaactgaattccatttgcaggaatggagaagtcatccctacaagac

SEQ ID NO: 476864 - DNA, 524 bp, Homo sapiens
gcttccctgtgaagatttaagggctttattctgacctcatcctgctttctcaccactgccctgatggccaggccctgtgatccccactggcagagccataaagcactgtgaaatcatctggccagtgaaggcattgtgctgtcatgaaccagaatccacaccaaacacagaaagggaaaaaactcagagtatcaacagtgccctcatcaacaacgaggttcaggcaacatacccaccccatctgtccatccacccacacattcatctgcccatccaaacatccatctactcattcatgcatctggccacccatctatccatccatccacgcatccattcatccacttacctacctatccatccacccatccatctgtacatctaccattcctgcatccgtccacccatccattcgtcyacttacccatttatacatccacccatccatctgtatatctatcatccctgcatccatccacccatccattcatccatctacccatcgacatatctgcccacctatc

SEQ ID NO: 476865 - DNA, 599 bp, Homo sapiens
atgagacttgaactcaggagctgtcatataaaatttaaattcagatactttgggaggctgaggtgggtggatcacgaggtcaggagttcaagaccagcttgaccaacatggtgaaaccctgtctctactaaaaatacaaacattagctgggtgtggtggcacgtgcctgtaatcccagctactcaggaggctgaggcaggagaatcgcttgaacctgggaggtggaggttgcagtgagccaagatcacaccatcgcattctagcctgggtgccagaatgagactctgtctcaaaaaaataaaaaatraaaaaataaataaataataaattcagaatctgttgtatagcatggcagataataggcaagcagtaaaatttcagtgaacttgctagctgtcttttcattctgactttttatatcaaagtaattggtggacatttgctagtagatgaaactaatctggatagctaagcttacttattacagaatatgctttttacatatctcagcatttccaaatttcataaatgttaatgttaattaaatacatactttgaaggaaaaggaattcccttagatagcatatgttacagttcag

SEQ ID NO: 476866 - DNA, 622 bp, Homo sapiens
gtatctgtagatcttctaatgtatatatgtgtatatatagatacagatatatgcttatatctatatatacataaatgattatggatgtttgtaacaaaaatgtatttttctccttcaagatgtaattagtttgaatttttaatatgtttttagctccttgggagtgttctttatataagatcttgcttgaattacagttctctaaagaatatagctatgaatagagagtagagaaactaggatccttatcttgcatggcccttcagagttatgaaaactctccatttctcagcaacttttccaataaaatataaagtatgaattattttttytcccttacatcacttttgttcaaaacatggttaacaaaaaggaatacgatatgtgaatcacattcatgtggtcaagggggaactccacacttctctctcagggatatgtccaggtaggaaaggctaccttaccattgattaagctccttcatggagttagtatataaagaaatagctgactgattataaatactgttctaatttatagataagacacagattaattaaaatgagttaagtttccacatttgctaaatgaaaaatttcatttctacttgtgcattagaata

SEQ ID NO: 476867 - DNA, 622 bp, Homo sapiens
gtatctgtagatcttctaatgtatatatgtgtatatatagatacagatatatgcttatatctatatatacataaatgattatggatgtttgtaacaaaaatgtatttttctccttcaagatgtaattagtttgaatttttaatatgtttttagctccttgggagtgttctttatataagatcttgcttgaattacagttctctaaagaatatagctatgaatagagagtagagaaactaggatccttatcttgcatggcccttcagagttatgaaaactctccatttctcagcaacttttccaataaaatataaagtatgaattattttttctcccttacatcacttttgttcaaaacatggttaacaaaaaggaatacgatatgtgaatcacattcatgtggtcaagggggaactccacacttctctctcagggatatgtccaggtaggaaaggctaccttaccattgattaagctccttcatggagttagtatataaagaaatagctgactgattayaaatactgttctaatttatagataagacacagattaattaaaatgagttaagtttccacatttgctaaatgaaaaatttcatttctacttgtgcattagaata

SEQ ID NO: 476868 - DNA, 567 bp, Homo sapiens
ctctgagtctctttagagttattaatgtaatattggatttccctcattacataacccatttatttattcttttatcctcagctactatttcttctatctttttttagaccccaaattgtccaccattggaagggacattacattcaggagtgtacagggagtctaaattgcaggtagtaatattagtctagcaagtacctccctctcattccattcttattcaaatagtgtaaagttacayaggtgaagaactagtgggctatttagccaaatttactgttgaaaattgcacttaattttttgcttagaaatcatacctgcttccaacacttgtaattgcagtcctgagactaccacatcaaatgggaaaaaaaaatacttttaggggatgtggataagaaagaaaaaaaatatagtcattaaaccagtgtcctccctccctggcaaaaattgcatagtcataccagcatcctttttcaccctctcttccctatatctaccaggaaaagagaggaatttatctagcaagaacactcccttcagccaacacctgttgagtgtgagaac

SEQ ID NO: 476869 - DNA, 469 bp, Homo sapiens
ccgtgtgttcctctgctaatgtgcttctcttgaagtccagccgcctgtgtgtctgcctactagggtctcggggttttcatcggcaraggatgggggcgtggctggccagggtggtcttgggacatgcaacatttgggcaagaaggcaggagtgcctgtcctcacctaggttcgtgggcacaggcccgggagtggagccctagccaggtaccacgccttcctctacccagcactttcctgctccccctcctctgtatcactgggaataattggagttctaatcaaccatataaagagatatcactgaacacccagtcattcaagtaaaatcccagaaaagcctttctttataaatagagctgatatagccttagaataagagtaactctagatggttcctaataaaacctaaaactagcctgagtataattaagctgatcaaacagtaagttaaatgcttgacagaacaa

SEQ ID NO: 476870 - DNA, 623 bp, Homo sapiens
gctgttaaaactacagtatttaagaacaaatgtgagtaatgaaccataaagtgaaatatgtaaggcagggaaatatttctggcaatacatatgctctacataaattttacttacgtataaggatactgaagtgtaggctgaggctacctagagacattgattagaaaatmagcaataccactttgtttatacattagtgcttgtgtagcactttctgaagagttgcagagttgtgttgtgtcatgaaatagtaactatgtaacttatctcctttcttcctttctattttttttctccttctctctctcactctccttctctctccttctttgcactggctaccagggagcacagagcgtgatatactgagcaaatggctcagctctgccttggaatgaacttaacactttcttattaatgatacctgtttttctatttttttctatatccttgcataccatttacagtgttatacaactgattttattatgaacaatttcaagtaccttttagagaagcagattgctaattcaaagcaaacatgaaacagatactagcatttgtaattaattttgaataaatttcaaagaatacagcaggatggtgatctgattcttttcctt

SEQ ID NO: 476871 - DNA, 638 bp, Homo sapiens
ctgccagaactgagatagattattgatctggcctgctccccaaacatctttgtcaaactatactcaaaatacttaagattatctcaaatataacttattctgtacactttaaaattaggtactccccatttttcttaacttaggcacattcatggaatctggtgatgactgaaaagtctatttttcattcactgtgttttctggacatccttgctcatctataagagccataactaacagtttatatacactcctaatatgtatccacatttttggttgaccattacaaagtcatcctaatamaaataatgaaaagatcatatcagtgcttccctacaagtccaatgtgctgtggcaaaacaccatcacttacaagccagatgaaatgattagaattcagtcaatcatgatgtaagaataaacaaatgaagattggtgacaggacaagataattgaatagaagcctccactgatcatcctccctgtaggaacaccaaattgaacagctaaaaagcatcttcataaaaaccaaaaatcaagtgagtcattacagtaccttgttttaacttcatatcactgaaaggggcactgaaaaaagtcttaaattgcatatgccaccccttgcccatccccagcag

SEQ ID NO: 476872 - DNA, 638 bp, Homo sapiens
ctgccagaactgagatagattattgatctggcctgctccccaaacatctttgtcaaactatactcaaaatacttaagattatctcaaatataacttattctgtacactttaaaattaggtactccccatttttcttaacttaggcacattcatggaatctggtgatgactgaaaagtctatttttcattcactgtgttttctggacatccttgctcatctataagagccataactaacagtttatatacactcctaatatgtatccacatttttggttgaccattacaaagtcatcctaataaaaataatgaaaagatcatatcagtgcttccctacaagtccaatgtgctgtggcaaaacaccatcacttacaagccagatgaaatgattagaattcagtcaatcatgatgtaagaataaacaaatgaagattggtgacaggacaagataatygaatagaagcctccactgatcatcctccctgtaggaacaccaaattgaacagctaaaaagcatcttcataaaaaccaaaaatcaagtgagtcattacagtaccttgttttaacttcatatcactgaaaggggcactgaaaaaagtcttaaattgcatatgccaccccttgcccatccccagcag

SEQ ID NO: 476873 - DNA, 598 bp, Homo sapiens
agggattgagttgttgatttaattctcatcttggttgttgttggcctatagccatgctgctgatttttgtacattgatttttgtcacctggcactttactgaatttgtttattaaatctaggagccttgtgaatgagggttttcaaggtatacgatcatattatcagtgaagagcaaaagtttgactttctcttttccaatttggatgccctttatttctttttcttgcctgactgctctggctaggactcccaktactatgttgaatagaagtggtgaaagtgagcatccttttcgtgttctagttctcggggagaatgctttaaacttttccctatccagtaggattaaaataagttttgtgttctgatgccaaaagtcccacttttataaagtttgcaacatttccaatagttcagatgccagcatgtcctgaccattggacctaattgactataataaagaaggcatactgtaaattttgccataaactaaattgttattaatattagtgttagtagaaccatgagagcctgcctaaaattatttagaataagggaacaagtgtttggctaggcttcttcccttgattgcaaaa

SEQ ID NO: 476874 - DNA, 569 bp, Homo sapiens
ctgggaccataggcacgtgcccccatgcctggtggattattttaaatttttgtagagatgggggtctccctatgttgctcaggctggtctcaaacttctgggctcaagcaattctctcatcttggcctctcatttcccccagtgggatcctacctcttaattaccctttttaaataaagaacttttgaaatatcactgtaataaaactgctttggtaaatataagttggagaakcacagggaaagtgagggtaggagaacgagtggccaatttgtcccaccttgtagtgaagatttggtgttactgattaaactgtaagtttagttctttacagacagggacaaacatctcttagtgactgctgtactgtgaattccatacatagtgcctggcacatagtaggtggtcgataatctgtgatgcagcaataaatggttaaaaggtagaaattatctctgtgtgggttataccctgaattatggtccctttcatttacctttcaggtaatggttggagctagaggtaacctaaaaggagtaactacacttgaaggtctatgccttaagttt

SEQ ID NO: 476875 - DNA, 476 bp, Homo sapiens
tctatgccatcgccaaaggtgatcttcagtatgcaaatcaaatactatctctttccttctctccctctctctctacacacccatgcctatacccactttaaaacaccctagtggcttcacatcacacttagaactgcctccacttactcttcctctgcctcctctcaacctcacccagtgaccctctgaccccatcactgccttccagtcatgccactcttctattcctcagacacaagttaatttctgcctttgcatttgttttkctgtctgcctgagcgcccagatctttgcatggctgataatccttactcttcaggtctcatcataaatgtcacctcctcagagaggcctccctgattatctttggtatttactgtctgtctagattatgaactccatgagtgcatagactgctattagacatccatgtaagtaacaaaggctatgacaaagatgtccccaaatagagcagc

SEQ ID NO: 476876 - DNA, 476 bp, Homo sapiens
tctatgccatcgccaaaggtgatcttcagtatgcaaatcaaatactatctctttccttctctccctctctctctacacacccatgcctatacccactttaaaacaccctagtggcttcacatcacacttagaactgcctccacttactcttcctctgcctcctctcaacctcacccagtgaccctctgaccccatcactgccttccagtcatgccactcttctattcctcagacacaagttaatttctgcctttgcatttgttttgctgtctgcctgagcgcccagatctttgcatggctgataatccttactcttcaggtctcatcataaatgtcacctcctcagagaggcctccctgattatctttggtatttactgtctgtctagattatgaactccatgastgcatagactgctattagacatccatgtaagtaacaaaggctatgacaaagatgtccccaaatagagcagc

SEQ ID NO: 476877 - DNA, 581 bp, Homo sapiens
ctgtggctaggggtagcatttgatcaggagcctaaacaaagtcaccaagtttcttctcctttgtgttgcttggaactgtcccctccatgcttgttcttttccttcttagtgtgccttcttagcgtcatgaaatgcgtacagcagctcagattctatgttgtctcactacagatgctctaggaaagagagaacattgttttcacagaagtccccgcaaaagtcccatgggaacccagtgggtcasgtgttcacccctgaaccaatcagggtaacgtaggagggatgcaagatgctgattgggctgagcctggagtcagccctgcccaaagcacattaatggaaatgggaagagagaaatatttcaaaattgctgccttcgggtgaggaatgaatggatgctggaagtcaaaaggcaatgaatgtccactgagctgtctgtctagatttgtggctgttgatgaactaaacaggaatgttccagtctcttccttggtgtatgctgtgtatgctgctaggctcctatcagtaagtgaggcctatgaggtgagaaacagggatgtccaagactttctttgattaca

SEQ ID NO: 476878 - DNA, 581 bp, Homo sapiens
ctgtggctaggggtagcatttgatcaggagcctaaacaaagtcaccaagtttcttctcctttgtgttgcttggaactgtcccctccatgcttgttcttttccttcttagtgtgccttcttagcgtcatgaaatgcgtacagcagctcagattctatgttgtctcactacagatgctctaggaaagagagaacattgttttcacagaagtccccgcaaaagtcccatgggaacccagtgggtcaggtgttcacccctgaaccaatcagggtaacgtaggagggatgcaagatgctgattgggctgagcctggagtcagccctgcccaaagcacattaatggaaatgggaagagagaaatatttcaaaattgctgccwtcgggtgaggaatgaatggatgctggaagtcaaaaggcaatgaatgtccactgagctgtctgtctagatttgtggctgttgatgaactaaacaggaatgttccagtctcttccttggtgtatgctgtgtatgctgctaggctcctatcagtaagtgaggcctatgaggtgagaaacagggatgtccaagactttctttgattaca

SEQ ID NO: 476879 - DNA, 649 bp, Homo sapiens
agattgtccaaaaaacagggaggaacccattatgtctgagatgactggaaaaagagaaagtgaaggacagacctgtggccagtgaggcatatattggttgagtttttaagcattcaagtgccaaaagaaaggagccagcagtgtccatgacagtccaagatggccctttgattggatcaggatgmtgagctgtgcatggcaccgtggggatagaagcctcccgcagttgaccatcataacctggtaatcacactgacagccccagtatatgtagtaggggaaaaagtacagcctggaaatttgagttgagcttgcatcgtgttatggggttagcacacgggctttactgacccccagctagccactccagggagctctgagcttcctatttgtgtttatgtgccacccaaatgacaccccattaatggcacatgtatgtgccagctttgccttgtccccactgccctgaagctctcacatgtcttaaacctgcctcccatatgctcgaaccttcattaatacttttgttcagggagaacgcagtctgctaaaaaataaaaataaaaaaatcaaatggctttgatgagaggatgcatgtgacttgtcagatgtagccgttctgactcccgaagctgacacccaggtgaaa

SEQ ID NO: 476880 - DNA, 555 bp, Homo sapiens
ttgagtttttaagcattcaagtgccaaaagaaaggagccagcagtgtccatgacagtccaagatggccctttgattggatcaggatgctgagckgtgcatggcaccgtggggatagaagcctcccgcagttgaccatcataacctggtaatcacactgacagccccagtatatgtagtaggggaaaaagtacagcctggaaatttgagttgagcttgcatcgtgttatggggttagcacacgggctttactgacccccagctagccactccagggagctctgagcttcctatttgtgtttatgtgccacccaaatgacaccccattaatggcacatgtatgtgccagctttgccttgtccccactgccctgaagctctcacatgtcttaaacctgcctcccatatgctcgaaccttcattaatacttttgttcagggagaacgcagtctgctaaaaaataaaaataaaaaaatcaaatggctttgatgagaggatgcatgtgacttgtcagatgtagccgttctgactcccgaagctgacacccaggtgaaaatg

SEQ ID NO: 476881 - DNA, 391 bp, Homo sapiens
tgcttgggaggcttaagtgggacgatcgcttgagtccaggaattccaggccaccctgaaccatgatcatgccacggcactcatcctgggtgacagagagtgaccttgattcaaacaaaaaaccaaataaaataaagataaaaataaaccttaaggaaaccctgcatgctggatgaccttattttataaaaccgtaatacacatatatgtgcacaaaaaaaagtggaatatatcaaaattttaagtggctttctgggtstttaattttctcactgcgctcttctgaatggtccaagtcaacaaagagcatgtataacaatcataaaaacatttttttttaatacagtggaactgaggcttcccaaatggagtgacgtgatgcgaggacttct

SEQ ID NO: 476882 - DNA, 333 bp, Homo sapiens
agtgacacaaagacagcggctgtctgccacctgccccctacccaggaggggtttgactcattcatgctgtcattcaacacacactgattggctttcctgtctgcctccttctggggcacggcgccgcctccttcaggatgtgccgactctcacccagcttttcccagccctgtgttgggctggcgcttggggagcgggcacagatgtcacggggggacatgcccctgcrccctccttcacctttcaggaccagagccagagagtttcccgaacactcatagccagcccggagactccaggtgagaaactcgggaggccgaggcaaatagttgg

SEQ ID NO: 476883 - DNA, 382 bp, Homo sapiens
gagaatgtagggctctcccaggaaagcccatggacaagaaatgaggctgaatgatttgaaacaaaggtcacaatagcatcccatgttcccaaaaatcactgagggagcttgcaaaatatgaagattccaaggcccccataagatattttggggcaataagaatgtaatgaggtccagggttgtacattaccttgttgcaagatgtactatttgggatgaggatgaagaatccatttagccaggtcacaggtaataattgtgtctcaccgaagaaagkgataagctagtcattcagagtcacagggaatgaaaacagacaaaacttggaataaaatgtcttcacaattatacacctattagaatggctaaaatagaaaacgct

SEQ ID NO: 476884 - DNA, 597 bp, Homo sapiens
ctacgggagccaaagttctggctgccaggtcactgcccctgcttttggctactagcctggtccagctttggccagtcatctctagtagcttgatggaattgccttttcctggggcttcactcctgcgacattaattgacatctgatttcttcctgagattttgactggcaacccattcccgagtttagcttcaagtgcttctctaggaagcaggagcgctcaccccagccctacttatccacaagggatgttttctctttacagaattaattgcaattyagggaccacgttgcagttattgatctccagatctgtgtgtctgaagtttgatatctcctttgtctttgcttctctttccctgtgtacattttcctagaccaatataggtttctaattaaaggaatcgtattattccttagttcccggcttactggatgcagcagtctcctctggagctcatgcctagaaggcgtttagctgagtctagttagtgtctccacagtaaattgatcacattctgccaatgttcattttccataacccacttgtattcagggttgatctattttaaaaatgtgaaatgacgatcatttaaca

SEQ ID NO: 476885 - DNA, 452 bp, Homo sapiens
tatagtatacctgatttatattttaagtatcccattttggataatracattcataatcaccctattctgatgaaatgatctcaagtcaatagtacatggcctaaagagcaatcatccaaagtctacgagggcagcactccctctattaagcctgaagaattcagaaagaactgtaggacaatttcacaatgacgctttttagtatagccattcttaaccttgactgctcattggcatcatgtggagagtctttaaaactcctgacaattaaatcagtaacttttaaagctctccaagtgaagcccatgtgcgaagggctgggaaccactatgttcaccccacctccctgagactatatggacttgccacgtcacactgttattatgacggtgtttgctgcaattatctggacattcttagtttccttagaacagtcattaacttatttgctg

SEQ ID NO: 476886 - DNA, 452 bp, Homo sapiens
tatagtatacctgatttatattttaagtatcccattttggataatgacattcataatcaccctattctgatgaaatgatctcaagtcaatagtacatggcctaaagagcaatcatccaaagtctacgagggcagcactccctctattaagcctgaagaattcagaaagaactgtaggacaatttcacaatgaygctttttagtatagccattcttaaccttgactgctcattggcatcatgtggagagtctttaaaactcctgacaattaaatcagtaacttttaaagctctccaagtgaagcccatgtgcgaagggctgggaaccactatgttcaccccacctccctgagactatatggacttgccacgtcacactgttattatgacggtgtttgctgcaattatctggacattcttagtttccttagaacagtcattaacttatttgctg

SEQ ID NO: 476887 - DNA, 655 bp, Homo sapiens
gcaggacacatggatatatagaagagcaatgcaacagtcctgaaaggggagtatggttcagacatttcaaaatgatcacaggctgtgtgactagagctacctaggaagagaggtgggagatgagaccagtgcgttagtaaggggccaggtcatctattttagaagccagggtgaggacatcagaattaattatgtgcaagagagcaagtggttggaaggttctgaaaaggagagttacataatctggctaacgttctagaaggatcgctcaatgaggcttacacattgtgaggccaggcragagtgtaagcaagtcaccagctaggaagtgaccccaagggtccagacaccacaagactggggactgggatagctttgtaacaaatagaggatgtctggaaaagtgaagagattataaaagtatgtcattctccagtcagacatttttttaattttatctaatcccgaggctcttggatttctttgctcattgccttctctccaattggctctcccctccattatttttcagagttaacagtttaaatttaaattagtgttttagctttttactagtaaatatcatgcagttaatccttatgtctaatatatttctatttcagattatccttctgtgtgtcctgtttgtatgcaa

SEQ ID NO: 476888 - DNA, 622 bp, Homo sapiens
gagaaagctacagtctgcatctggaagaggaccctcactagaacctgagcgggctggaaccctgatgttggacatccagcctccaaaactgtgagaaatgtatttctgttgtttttaagccatttggtcaataatatttttgttacagcagtccaagttggctaggatgcctaccctgatgcataaaaacagatctgctgtagcaaaacagtattgttcaccatgcagcactctttctttcagtctctttcatagtagagttaaggtcatgtggctagtctggccaatgggctatgagcaaaattggtatgaattattcttggcccaaggtagttagaaaaggatgtaatttctttatggtctctyagacgttttccattattttcatggctggaagtgaagagcaccaccattccagagttgctgaaatgaagcagccaaggcccagcttagatgtcccaattgatgatggatgagagtgttaaacctccatcctgcacaggatggaacaccaggagccccaaatctacgtgtaagttaacattagtatgaaattaaatctgacatgttcagccactgaaattttgggtgtttgtgttactgcagcacatatatcctattc

SEQ ID NO: 476889 - DNA, 618 bp, Homo sapiens
ttaaactacccaatcagttatattcagttatagaggccctcagttgactactaccagttataaccattctgtttagrtatttttttttgtatgtaaatgtccaattgttctagcacaatttttggaaaatgctatcatttctcaattgcattattttagctcctttgctaaagatcaggtggctatatttctgtgggtctattgctagtatttattttgtttctttgatttgtttgtctattctttcataaataccatcttgtcttgattactgtagctttatagtaaatcttgaaactggagagtgtcagttctactttaatattgtgttggctcttctaggtcctttgcctttccatataagctatgaaatcagtttgtcaatattcataaaataatttgctgagattttaattgagacttcaatgaatagttcaaattagaaagaactgacatcttgaaaatattgagtcttcctatttacaaacatgaaatatccctctatttatttagtttacctttgatttctttcagcagcgtttcaatgttctcttcatatagatattacacatattttgttggatttatacctaagtatttttattttgggggatgcta

SEQ ID NO: 476890 - DNA, 598 bp, Homo sapiens
gacataactgaaagcaagaagagcaattaggaagttattgcatgaggtctagaaacacgataaatcctgaacttggtagtttcagtggtaatggggaagaatgaactttaggcaggatttcaaggtagtagggtttacagagtgtggtttctgattgaaagtgttggacgaggaatgtggaggggactaactgaatccccaagtycctgccttggccatacctcatttagctttcccttattttcaattccatagtgtttccctggacaagttctgcgaactagatacaaattgagcaagacattactttcctgtattctaggcctggttatctccccagagcaatcatcttaacatcaaggtcctgagcaatgtgtcatagaattttccttccagtttaaaactagttatatttctcatggcaaataaccaagcacatttggcaaaaaaaaaaaaaaaaaaaaaaaaagcatgtacttaaaagtgaagctaccacagtgattattttcccttctattttaaagtacatttacatttggggaaaaaatagcaggtaaagttctaactgtaatttaatgcatggtctaatacttccatt

SEQ ID NO: 476891 - DNA, 598 bp, Homo sapiens
gacataactgaaagcaagaagagcaattaggaagttattgcatgaggtctagaaacacgataaatcctgaacttggtagtttcagtggtaatggggaagaatgaactttaggcaggatttcaaggtagtagggtttacagagtgtggtttctgattgaaagtgttggacgaggaatgtggaggggactaactgaatccccaagtccctgccttggccatacctcatttagctttcccttattttcaattccatagtgtttccctggacaagttctgcgaactagatacaaattgagcaagacattactttcctgtattctaggcctggttatctccccagagcaatcatcttaacatcaaggtcctgagcaatgtgtcatagaattttccttccagtttaaaactagttatatttctcatggcaaataaccaagcacatttggcaaaaaaaaaaaaaaaaaaaaaaaaagcatgtacttaraagtgaagctaccacagtgattattttcccttctattttaaagtacatttacatttggggaaaaaatagcaggtaaagttctaactgtaatttaatgcatggtctaatacttccatt

SEQ ID NO: 476892 - DNA, 575 bp, Homo sapiens
tggcttttttaaatgagtccaatttaataacattttcaaaaatattgagtcagcagtgacggtgacttgctgatagggcagaaagctggagaatgaggcaggaaggaatgcgatgctggwgccttggatgggaaaccaggaggggagtctaactggggacacattgagttgagtctgaaaggccagtgacccagaggttaggtaggggtaatccagttgttccctgcacagaggaaaatcaggcaggatctggctcagggagaaggtggctcgggaaagcaagaaggggtttgaggactgagtccttgggaacattggcacctaaatgttgggtggaggaacaggaccacagttggagacagaggagggatcacagtggactgaggtgaaccggcacccacggggctgggcgcccagagaagaggagaagtgggcgtgatggagagggcactgcgagccctcatggagtggagagggaggcagcaagacagaaggaggaggaaggggaggacagtggcttcacggggaggccagctcagaggacgggttaggatggaggggccagagacccccac

SEQ ID NO: 476893 - DNA, 575 bp, Homo sapiens
tggcttttttaaatgagtccaatttaataacattttcaaaaatattgagtcagcagtgacggtgacttgctgatagggcagaaagctggagaatgaggcaggaaggaatgcgatgctggagccttggrtgggaaaccaggaggggagtctaactggggacacattgagttgagtctgaaaggccagtgacccagaggttaggtaggggtaatccagttgttccctgcacagaggaaaatcaggcaggatctggctcagggagaaggtggctcgggaaagcaagaaggggtttgaggactgagtccttgggaacattggcacctaaatgttgggtggaggaacaggaccacagttggagacagaggagggatcacagtggactgaggtgaaccggcacccacggggctgggcgcccagagaagaggagaagtgggcgtgatggagagggcactgcgagccctcatggagtggagagggaggcagcaagacagaaggaggaggaaggggaggacagtggcttcacggggaggccagctcagaggacgggttaggatggaggggccagagacccccac

SEQ ID NO: 476894 - DNA, 639 bp, Homo sapiens
ctcctggtcctgggccccctcttgcctggcccaggttccagtcagctctgcctaaaagactccccagggcagcctggmtctggtgccaggacccttcaccctcctcgttcctccatctcacccgcaacagtgtgtgactgatcgactcctcctgccactttgtcttatcacgaagattagcagggaggaagctgggatgtggagtcagaagacctgggttggagccccagcccggctacttgctggcctgtgaccttgagcaggtcccatcctttccacacttctggaagatgggagaagagaatctttattctttcttcttaattgggcaagtgtgattaattgtaatgcaatgcagagttgcctgatgagaagcttttaaagcaagccagaggtgtgtttgagtgaaagatgaaaatattctttacagccctgtggggcgggtgttggtcactcttcatctgtttggtgttggtaggtgaaagcaggccagctcactgggccactcttcagcctccatgctgagccctgttacctactgggtccctctcaagttcagtccctgtgggaggtatgcacagacatgtgtagccaggatttgacccgatgggccatgcactttgccatcacatggaagca

SEQ ID NO: 476895 - DNA, 477 bp, Homo sapiens
ccacagccgcctggaacatgagcccatgttttcagactctcaggtcaggattctactttttaaatcttaaaaaaaaaaaaaaaaaaacagcatatctaaagtcccaaagacatagctcttggattctcttgcccatggtggcacgatgtgaagtcacacttagctggcttggtaaaactaagaaactcagtactggcaggctgttgcccatgctggattttgatgaagccacaaagcttcaagttcactgccaaaaagctccaccacattggaagagagaattttctacttcaccagtgggaagtgggagaaatagcctcttgagttttggatggatcatgagtgcctgagtcaggagggtattattctatttaccactccagactcacccttcattttccstccttctccgtcctaccgtctgtgccatgagactggcctctccagactgcatcacctagatttgcttgtcttcag

SEQ ID NO: 476896 - DNA, 647 bp, Homo sapiens
ctggcagcttccttgccctgctctggaactagactatacacaccctgactttagtctcattccattttgcacatcaccagtgcctaagaaagtgcttggcacatagtaaatgctcaacaaatgcttcgtggttggttatgtcgattaacctatgaatgatggagccagygggtaagagatgagtgggtaaaggaaagaatcaaccattgacagtactgtctctctagttgatacattatttctttccaaatggggctgggaggagtgggtgggtaattgccaccagagggaccctgtatgatgaggtcactgggccattttcagggattcactactgtctcttgggattcctcatcctgtctccctccctctgtcttcctgccttccctctgctctctgactcttcgatccatttcttaattctttttgctgagtagttcttcagtttttatttctgttatagggaggccactctcacatttttgagaataaaagatagcgctgggaataatcaaaattacgtaatttaaaatattagcgtattcaccaatacactgactttacgatattcgtggacttacaaaataattttatttaaaacctagtttcaaaaataaaattccttctaccaaataaatgtaacatat

SEQ ID NO: 476897 - DNA, 647 bp, Homo sapiens
ctggcagcttccttgccctgctctggaactagactatacacaccctgactttagtctcattccattttgcacatcaccagtgcctaagaaagtgcttggcacatagtaaatgctcaacaaatgcttcgtggttggttatgtcgattaacctatgaatgatggagccagcgggtaagagatgagtgggtaaaggaaagaatcaaccattgacagtactgtctctctagttgatacattatttctttccamatggggctgggaggagtgggtgggtaattgccaccagagggaccctgtatgatgaggtcactgggccattttcagggattcactactgtctcttgggattcctcatcctgtctccctccctctgtcttcctgccttccctctgctctctgactcttcgatccatttcttaattctttttgctgagtagttcttcagtttttatttctgttatagggaggccactctcacatttttgagaataaaagatagcgctgggaataatcaaaattacgtaatttaaaatattagcgtattcaccaatacactgactttacgatattcgtggacttacaaaataattttatttaaaacctagtttcaaaaataaaattccttctaccaaataaatgtaacatat

SEQ ID NO: 476898 - DNA, 647 bp, Homo sapiens
ctggcagcttccttgccctgctctggaactagactatacacaccctgactttagtctcattccattttgcacatcaccagtgcctaagaaagtgcttggcacatagtaaatgctcaacaaatgcttcgtggttggttatgtcgattaacctatgaatgatggagccagcgggtaagagatgagtgggtaaaggaaagaatcaaccattgacagtactgtctctctagttgatacattatttctttccaaatggggctgggaggagtgggtgggtaattgccaccagagggaccctgtatgatgaggtcactgggccattttcagggattcactactgtctcttgggattcctcatcctgtctccctccctctgtcttcctgccttccctctgctctctgactcttcgatccatttcttaattctttttgctgagtagttcttcagtttttatttctgttatagggaggccactctcacatttttgagaataaaagatascgctgggaataatcaaaattacgtaatttaaaatattagcgtattcaccaatacactgactttacgatattcgtggacttacaaaataattttatttaaaacctagtttcaaaaataaaattccttctaccaaataaatgtaacatat

SEQ ID NO: 476899 - DNA, 647 bp, Homo sapiens
ctggcagcttccttgccctgctctggaactagactatacacaccctgactttagtctcattccattttgcacatcaccagtgcctaagaaagtgcttggcacatagtaaatgctcaacaaatgcttcgtggttggttatgtcgattaacctatgaatgatggagccagcgggtaagagatgagtgggtaaaggaaagaatcaaccattgacagtactgtctctctagttgatacattatttctttccaaatggggctgggaggagtgggtgggtaattgccaccagagggaccctgtatgatgaggtcactgggccattttcagggattcactactgtctcttgggattcctcatcctgtctccctccctctgtcttcctgccttccctctgctctctgactcttcgatccatttcttaattctttttgctgagtagttcttcagtttttatttctgttatagggaggccactctcacatttttgagaataaaagatagcgctgggaataatcaaaattacgtaatttaaaatattarcgtattcaccaatacactgactttacgatattcgtggacttacaaaataattttatttaaaacctagtttcaaaaataaaattccttctaccaaataaatgtaacatat

SEQ ID NO: 476900 - DNA, 605 bp, Homo sapiens
  misc_feature (1)...(605): n = A,T,C or G
actctatttaaatcacccagcctactgtccttyccttatgcgaacattcatgccaaccccttactatggttcctggcacagcagagctgccaggatgctagtttttctgnatatatactttgctaatgaataaggctgacgtgantttacntggaagagtttacaaactgaaatgacagattttgaaactttcatttgcttttcttctgaagttttcaaaatcagttgaccatccccttttgcacagtgagttgcctggaatttttgttaaccacctctgcttctatattttcaatggtggatgtctgaattgccacatctaaatattgtaagtttgtttaataaaggatagagtttcatcagaacaggaacgaggtagatgcaaggacaaaacaaaaggaggggaaattcaggaagaagtgaaagagaaaagactttatccatctcctttattttctttatttgcctttctttccttcagaatatacatatgaaaaaaaaaaaaaaaacccagcttccattccctgccccctacccccagcactgtgtaaattgcagtgaaatatgccaaggatccagggtgaggggccatttgcaaggctgat

SEQ ID NO: 476901 - DNA, 503 bp, Homo sapiens
gcagctgattgcaattcttgacctaaacaattacacattgctgaagttcttgcttcccattccaggctcttctgcctccactctgtccttgcaccccaaacccctgccatacaagtcacgaaactcattccactcatccttcatccatgctattaccttggctggagatacctttctcagccttgacatccagctacttctgcccttctgccagaaacaaacgtagtcatcacctcctcctggaagcctctctgggctgcactcctgagacatcccaggcatgctcctgcactctgttatatgatcacctgttaacacgcctgcctccttcaacctgtgatcagcttgagggagggcactgtgtgttctttcttcctcagtctgtcatcctgtgycaccatgcctcctatatggtgacatagcaggcatatgtaatgggaaatgattgaatgaatgttgaaactcaccaaataggggagggtcctggaaagcctctgggagga

SEQ ID NO: 476902 - DNA, 572 bp, Homo sapiens
aaaacaacacaaaagctttggatctttcaatctatccatattgtcaataaaattagcagcttgaagggaaaaaattatattcaaaaccataacttcccattaactaccgcaagacacaacacatcgttgcaaaagagagagagcttcgtagctaaatcctttcttgttctttcttttcctccgcyccctcttccccctccatggggttagaattcaatgaacaaacttgaaagtgaaacatcccctcctctgaatgtggatcagcttagggtctgggggctggctgtgcacatctgaggcccgatccctccgagggtgaccccggaggaagagaacgcgtgggcccctgctccaagtgccagcgcacgcctggcccagaggtccatcgggctgccaggacaaatgcgtacgcatagacacgtgcacggagcctccgagagagagcgagagaccaagagcgagcgagtgagagacagagagagagagaaagagagagagagagagagttcctcaagagagccgggagccagggtagggaccaaaagggctggaagaaaagatgagaaggaggt

SEQ ID NO: 476903 - DNA, 572 bp, Homo sapiens
aaaacaacacaaaagctttggatctttcaatctatccatattgtcaataaaattagcagcttgaagggaaaaaattatattcaaaaccataacttcccattaactaccgcaagacacaacacatcgttgcaaaagagagagagcttcgtagctaaatcctttcttgttctttcttttcctccgctccctcttccccctccatggggttagaattcaatgaacaaacttgaaagtgaaacatcccctcctctgaatgtggatcagcttagggtctgggggctggctgtgcacatctgaggcccgatccctccgagggtgaccccggaggaagagaacgcgtgggcccctgctccaagtgccagcgcacgcctggcccagaggtccatcgggctgccaggacaaatgcgtacgcatagacacgtgcacggagcctccgagagagagcgagagaccaagagcgagcgagtgagagacagagagagagasaaagagagagagagagagagttcctcaagagagccgggagccagggtagggaccaaaagggctggaagaaaagatgagaaggaggt

SEQ ID NO: 476904 - DNA, 439 bp, Homo sapiens
gattgatatgccatccaaactctggaaataattttgccccattcctcttctctgaggtggtattttgctgcctaatcaaaactcgaaaatctagttagtcaacaggacttgcccaccccactcctgaaaaaaaattctgcttwgcttgggaaaacacagatggtcttgtctgtccttccatatgacagcaagtagttggtgtcacaatgcgtcccgggagcaggagttcagtaacaagggtcagcatttctttattaatagcatgaaaatgcatcccaagtgaccttcaaaatagaagaaagaacaggccaggcacggggggctcacacctgtaatcccagcactttgggaggctgaggtgggtgaatcacggggtcagagttcgacaacagcctggtcaacatggtgaaaccctgtccccactaaaagtacaaaaagt

SEQ ID NO: 476905 - DNA, 364 bp, Homo sapiens
cattcactttctgcttaagtccytgggagatgagtttctgtcacttacacccaagagtggtgattagatagtgacagtgaaacccttggtggggtgaggtgggaagggtgcaggggcagagcttctgggggctggccctgcgttgtttctctctgacagtgctaattacatgggtgtgttcagtttgtgaaagttcaccaagctgtactttcattatatgtactctgaagaatggcatacttcaataaaaagtaaagaatcctgactgaagaagatagtaagagtcatgtcaaggaatgtcccaaacaacaaatgagtagaggacatgaacaaatacttgccattgcactcagatactctgtgg

SEQ ID NO: 476906 - DNA, 638 bp, Homo sapiens
gagcttgttgtaaaatccagtttgtccccctcttgctcccatactgtcttgccttttcaccttctgtcatggatgatggtgcccaaaggccctcactagatgcttgcaccatgctcttggacttcccagactccagaactgtgagccaaatacatttattttctttatgaattaccaagtctatagtattctgctattgcaatacaaaatggactaagacagaggtggaatgggcttgaaaacagaagtaaaactaggaaccccatataagaggtggtgagaccactgtagagattgtgtttttcagagatagccactacaaatatctcccattccacatgctattccacagtgtgactgtgacattcctcctcttgagagatatagtctaggtcccctccccttgagttgaggcaggctcaattcaagtgactcatttgtaacaatagaattcagtggaagtgatggtgcataatttccaaggctggaactctcatgctaaaactataaatctctatgtgaacagtttgactgccctgacactgccatactgtaaggaagcttaaaacagctcatatggagaaaccacatggagaagacctgagacttcagagaamgagagatagatgctttgccag

SEQ ID NO: 476907 - DNA, 343 bp, Homo sapiens
tttaaaagttgaggtataaattctctaccaaaaagaaccaggaatgtttggagaaatggctgattccagatttggacgagggaaatacagatgtacatctagcttgccaaaagtaagtgagtacacaaaaaatgatgggaacatgtcaaaaggacacaggacccagcttgaaggggctcccwttggcccaatttggcacaatttgagcatcaaatggaatagtggtagtaagagattacagcttatagcataaaattttttatcgatactgataaaaataagtgtagaatcctgactacgaaatgtaaaagaatgatggaattagaaaaatcatcatttgaca

SEQ ID NO: 476908 - DNA, 615 bp, Homo sapiens
tcctggcttttggcatgttggagagagacctgtgcttattggatggagtgagaaactaatacccatccaggcctgctgttccaaactttttcagttgggtcttttccttagccctgcgattagcacgggatgaattcatctgctttttggactcactgaccatctcagactgtttttaacatgcttggggtttgataaaactggaaagatatttgccaagcccctttcyccttcatttttaaacccatgtggattttagggggaatttaatccatatgtttctgatccatgtgctcttaactcatcagaaccttatttcaaaagctatttggtgtccaacgagtttttggagttgggttttaaatcttttaaagtcttcccttcccggctttgaaacgagatgttgccttttgccaagcataaatgagctcccaagtcgaaaagaggttcatgtttggttcacaattagagaaatgtgaattctcagtgggctgtgatatgggcgagacctgctctgttttgaagacctgtcagggcacgcccccaaatcaggaccacagcctttggggcaaggagccatctcactggctgggtgaacagcatttggggccagga

SEQ ID NO: 476909 - DNA, 615 bp, Homo sapiens
tcctggcttttggcatgttggagagagacctgtgcttattggatggagtgagaaactaatacccatccaggcctgctgttccaaactttttcagttgggtcttttccttagccctgcgattagcacgggatgaattcatctgctttttggactcactgaccatctcagactgtttttaacatgcttggggtttgataaaactggaaagatatttgccaagcccctttctycttcatttttaaacccatgtggattttagggggaatttaatccatatgtttctgatccatgtgctcttaactcatcagaaccttatttcaaaagctatttggtgtccaacgagtttttggagttgggttttaaatcttttaaagtcttcccttcccggctttgaaacgagatgttgccttttgccaagcataaatgagctcccaagtcgaaaagaggttcatgtttggttcacaattagagaaatgtgaattctcagtgggctgtgatatgggcgagacctgctctgttttgaagacctgtcagggcacgcccccaaatcaggaccacagcctttggggcaaggagccatctcactggctgggtgaacagcatttggggccagga

SEQ ID NO: 476910 - DNA, 615 bp, Homo sapiens
tcctggcttttggcatgttggagagagacctgtgcttattggatggagtgagaaactaatacccatccaggcctgctgttccaaactttttcagttgggtcttttccttagccctgcgattagcacgggatgaattcatctgctttttggactcactgaccatctcagactgtttttaacatgcttggggtttgataaaactggaaagatatttgccaagcccctttctccttcatttttaaacccatgtggattttagggggaatttaatccatatgtttctgatccatgtgctcttaactcatcagaaccttatttcaaaagctatttggtgtccaacgagtttttggagttgggttttaaatcttttaaagtcttcccttcccggctttgaaacgagatgttgccttttgccaagcataaatgagctcccaagtcgaaaasaggttcatgtttggttcacaattagagaaatgtgaattctcagtgggctgtgatatgggcgagacctgctctgttttgaagacctgtcagggcacgcccccaaatcaggaccacagcctttggggcaaggagccatctcactggctgggtgaacagcatttggggccagga

SEQ ID NO: 476911 - DNA, 577 bp, Homo sapiens
catgcattttctgtctggatccacggttacaaggaacagatgttgcagggcggggagccggtttcatcgtgaccaagccacggcaggaaggaggggcaagaacagccagggagggagatgcttttccagggacgccctcgcccctggtcagaggggarccccaatcatctttccttcttatccagctccctcctgtgagtcagaagccaaaaactcttttcttcactcacgcgatgcactggttactagggtatgaaccaggggagcccatttacaggtgagaggaaagctgccttgctgctccctgcctccacctgcttttgagaaatgtaagctgtggccagactgactttcattctgcccctcacacttctggccctgccctaacctcgaacattttgcacagctcgcccctttgcccagaacacccgctgccatcactgccacccatctgttctcacacattcgtcactcatgtaggacttttcccaaactttcccatgtggtcattgatacggcgtagctctgtgtccccacccaaatctcatctcaagttgtaatccccacgtgtcgaggg

SEQ ID NO: 476912 - DNA, 577 bp, Homo sapiens
catgcattttctgtctggatccacggttacaaggaacagatgttgcagggcggggagccggtttcatcgtgaccaagccacggcaggaaggaggggcaagaacagccagggagggagatgcttttccagggacgccctcgcccctggtcagaggggagccccaatcatctttccttcttatccagctccctcctgtgagtcagaagccaaaaactcttttcttcactcacgcgatgcactggttactagggtatgaaccaggggagcccatttacaggtgagaggaaagctgccttgctgctccctgcctccacctgcttttgagaaatgtaagctgtggccagactgactttcattcwgcccctcacacttctggccctgccctaacctcgaacattttgcacagctcgcccctttgcccagaacacccgctgccatcactgccacccatctgttctcacacattcgtcactcatgtaggacttttcccaaactttcccatgtggtcattgatacggcgtagctctgtgtccccacccaaatctcatctcaagttgtaatccccacgtgtcgaggg

SEQ ID NO: 476913 - DNA, 577 bp, Homo sapiens
catgcattttctgtctggatccacggttacaaggaacagatgttgcagggcggggagccggtttcatcgtgaccaagccacggcaggaaggaggggcaagaacagccagggagggagatgcttttccagggacgccctcgcccctggtcagaggggagccccaatcatctttccttcttatccagctccctcctgtgagtcagaagccaaaaactcttttcttcactcacgcgatgcactggttactagggtatgaaccaggggagcccatttacaggtgagaggaaagctgccttgctgctccctgcctccacctgcttttgagaaatgtaagctgtggccagactgactttcattctgcycctcacacttctggccctgccctaacctcgaacattttgcacagctcgcccctttgcccagaacacccgctgccatcactgccacccatctgttctcacacattcgtcactcatgtaggacttttcccaaactttcccatgtggtcattgatacggcgtagctctgtgtccccacccaaatctcatctcaagttgtaatccccacgtgtcgaggg

SEQ ID NO: 476914 - DNA, 536 bp, Homo sapiens
tgccagtgggaacgaagtggttttcaaaccctaagggaggtgggaggagaggccagataaaaggatcaatgctgaccttgggtatataacaaaatatttaaaatatgttgcggtttatgcttttttaaatagcgggtcttatacatctacccatgtcagggatagaatttttgcaggtaattaattgctaactattaggaaaaaatccccaggatgagaattaattggcactggggtagagaaatgcagagcacatatgaaaaccaagtgaaccacagaaattmcttttaaaaaggaataggcgctaggatctctgtgtgatcaaattggttaaagatttggtgtattgcaaacattgagaaaatacgtttcaaaataaaaggactatgaactttgagtggttactttatgttttcgcctccatttgatttttaaattctagagggtagaaagcttgctggctggtaacaaggtgagcactgagtggcaaggtgagaggcaaaaataatcatcgctaagacggggataacgcgctt

SEQ ID NO: 476915 - DNA, 565 bp, Homo sapiens
ctgccagtgggaacgaagtggttttcaaaccctaagggaggtgggaggagaggccagataaaaggatcaatgctgaccttgggtatataacaaaatatttaaaatatgttgcggtttatgcttttttaaatagcgggtcttatacatctacccatgtcagggatagaatttttgcaggtaattaattgctaactattaggaaaaaatccccaggatgagaattaattggcactggggtagagaaatgcagagcacatatgaaaaccaagtgaaccacagaaattccttttaaaaaggaataggcgctaggatctctgtgtgatcaaattggttaaagatttggtgtattgcaaacattgagaaaatacgtttcaaaataaaaggactatgaastttgagtggttactttatgttttcgcctccatttgatttttaaattctagagggtagaaagcttgctggctggtaacaaggtgagcactgagtggcaaggtgagaggcaaaaataatcatcgctaagacggggataacgcgcttgttatttacattgctaggagcgctccaa

SEQ ID NO: 476916 - DNA, 565 bp, Homo sapiens
ctgccagtgggaacgaagtggttttcaaaccctaagggaggtgggaggagaggccagataaaaggatcaatgctgaccttgggtatataacaaaatatttaaaatatgttgcggtttatgcttttttaaatagcgggtcttatacatctacccatgtcagggatagaatttttgcaggtaattaattgctaactattaggaaaaaatccccaggatgagaattaattggcactggggtagagaaatgcagagcacatatgaaaaccaagtgaaccacagaaattccttttaaaaaggaataggcgctaggatctctgtgtgatcaaattggttaaagatttggtgtattgcaaacattgagaaaatacgtttcaaaataaaaggactatgaactttgagtggttactttatgttttcgcctccatttgatttttaaattctagagggtagaaascttgctggctggtaacaaggtgagcactgagtggcaaggtgagaggcaaaaataatcatcgctaagacggggataacgcgcttgttatttacattgctaggagcgctccaa

SEQ ID NO: 476917 - DNA, 532 bp, Homo sapiens
ctggtctcagcctggggccgggtcctagtaactgtctctctttgctttccagccagtgttttggggtttgaagttggaatcttcagctactgtcaagaacagccacaaaaatgtgtcacgatcaagatctttgagagtccaccaatcaggaggcgtctgtgacagtcgctgtcttctcagaacagaatccacacscaggattcaacccaaatgatttctcatcaggtgattcttggttgtagcaaagttcatgtgaatgtgggtgagtttctgttatgaatgtggtcaataaatgttatttgtgaaactctaaactggccacctcttaaatgatgacctctgatttcccttcattaaggggggacttgtccccatgtccgtgtccctgggggagggcagctatttccgagtgtctcttcagggacagcagacccactggatgagggcccgaaaatggtttcagcacctgtgtcaggtgggtctccctttaagtagcataacattgtatatgtgaattgaattttaaaatctg

SEQ ID NO: 476918 - DNA, 532 bp, Homo sapiens
ctggtctcagcctggggccgggtcctagtaactgtctctctttgctttccagccagtgttttggggtttgaagttggaatcttcagctactgtcaagaacagccacaaaaatgtgtcacgatcaagatctttgagagtccaccaatcaggaggcgtctgtgacagtcgctgtcttctcagaacagaatccacacccaggattcaacccaaatgatttctcatcaggtgattcttggttgtagcaaagttcatgtgaatgtgggtgagtttctgttatgaatgtggtcaataaatgttatttgtgaaaytctaaactggccacctcttaaatgatgacctctgatttcccttcattaaggggggacttgtccccatgtccgtgtccctgggggagggcagctatttccgagtgtctcttcagggacagcagacccactggatgagggcccgaaaatggtttcagcacctgtgtcaggtgggtctccctttaagtagcataacattgtatatgtgaattgaattttaaaatctg

SEQ ID NO: 476919 - DNA, 505 bp, Homo sapiens
gggttttcttacccagttgtcatgaaacatgagaacaggaacmtataacatatcttcttcctgcccctaatttctaatccactgaacccccttctggtcataattttgtttcttaaaataagtttgccattattaggaaaagtatttaattttctaggcaattatatgtcacagtatatataaaagcacagatattcagttccacatattcatctcttctgagcatctttttttttttgagtttgaaatactaaatccatccacactgattcacttgtaggataaagtttctgagtcagtaaggcttcaggtccacaggctctggagagaaataaaatccataattttgctccgttttgggaggcttctactcagccacacagcaactaaatgtatttttcctcatttgctcttacagaaggtattatcccactttgcagatgaatacgttatggctaagatggtaaaggaacttgctgactgtcactcagttgttcagttggaa

SEQ ID NO: 476920 - DNA, 505 bp, Homo sapiens
gggttttcttacccagttgtcatgaaacatgagaacaggaacatataacatatcttcttcctgcccctaatttctaatccactgaacccccttctkgtcataattttgtttcttaaaataagtttgccattattaggaaaagtatttaattttctaggcaattatatgtcacagtatatataaaagcacagatattcagttccacatattcatctcttctgagcatctttttttttttgagtttgaaatactaaatccatccacactgattcacttgtaggataaagtttctgagtcagtaaggcttcaggtccacaggctctggagagaaataaaatccataattttgctccgttttgggaggcttctactcagccacacagcaactaaatgtatttttcctcatttgctcttacagaaggtattatcccactttgcagatgaatacgttatggctaagatggtaaaggaacttgctgactgtcactcagttgttcagttggaa

SEQ ID NO: 476921 - DNA, 540 bp, Homo sapiens
ctgagtagatagtggtagaagatcctcttctggagattctgaccccttctcttcaatgcagaccatcaaatctcctgaggtttataaagctccaagccgaatcccactccattcagtagtgtcagatttcccttcaagagaggaataaaaaggaaaacctctgtggagtcaaatatatgcatctctctcaagatacactttagagctaaaatgttccgcccctgattcaacagagaggcctgttgtagggctttctagaagcaatggctctgtgaatacctgttctggttcttgtaactttctatgtgaaactttctggcattgactggttttagtcatttctatccctgcccwgcccaaccacagcgacttgcaatgattttttttttttctagtcactgattagttcagctaggatgaatctgatttttgcttagttttgtgcaaatttcctcctgtgaactgctgctggtctgttgggtccctgccaaggacacttcctcacctggaatcttgtttaaggtttcaggcagcaagttg

SEQ ID NO: 476922 - DNA, 594 bp, Homo sapiens
tgtttgctgtgggctgtactccagctctccctgctggctcagaaccacttgctccttgggacaatgctggcagggggaggaagatattcaatactttaaacttactctcaccccttttatgaatatacagggattaagattaagttgctgcctcctatgtggaatctggggagtcagttttgattattagacgctggsttattggaatggactgttgactaccaggataattttgagtctataaaatctttcttattccataatcttagcctggttagtagcactcttctcaattctttatccccttctttccttctctctctctcctttctcattctctctcttgtctattcatttaacaaacatttctgacagtttttctaccattatctatgagaatcataaaggactttcacagatacattaaaacacaatttcctaataaagatgtcatgatatatgggaaattatatggaatatcacttattggttagctgttgggatgtctttggaagatatctaggacctcttcagaactggaattagaaaagccacaaagagcccaggaaatcctaaatctttattctcctcttc

SEQ ID NO: 476923 - DNA, 529 bp, Homo sapiens
tccagggagaagtggtatacatgggaatttacattatgaagattcgttgagttgcacaattgtaatttttgccctttcattgtgtattttataattcaattaaaattttaataaaaccaagaaaccaaaaaaaaaaaaatgttaagaatgatggccacaggccaggtgtggattgatcacatcccagaccagaaggtataaraataaataagtagattaaagtgatactctaaggacattaagaggctcaatgattggtcactgaggaatcaggaggagtcagataattgttagaattttgtgtaaatttactctctccctctcttttgcaagcttcttaaaggtgtgtctgtatctcgttcctattatccccacagccaaacactacaatggatgtggaataaatgagcaacaaatattgaattaataaataaacatcgcactttctgatgaggctggaggctctcacttgatagcagaggataaagagaagaagaaaagcaggtcagtaagctgtagtgctctcagc

SEQ ID NO: 476924 - DNA, 619 bp, Homo sapiens
aattaaaataacagtgacttttgaaatacctatgagagtggcataaattaagaagaaaagaactataattccarttactggctaaaatgcaaggatatactttgctaatggaaatatcaatttgtctatttctaaagcaatctgcaaatatctagtaacattagtgacattgaaagtacaattttaagtgattgcttttatacctttgtaagccttttaatagaaatcattttaaatattgatttaaaaatctttagacaaaaaaatcttgatggactacaaaacctgattgtgtgtatgcaaaagaatgcacgtgtgcacatatactcacacaggtgttttttgtatggacttaaaatttggagaaagaaatgctcagtaattctggctttggtactaccaccctgttttaattgtaaatttgtcatatttgttttatatattattatgtacatataattatttatacatatatatattccaaacaagtattttattttgcataacaattcaagcttacaaaaatagacttaataatttttgtttaatgtcaatattcttatggtataatgtggaaactgaggccccaataaatatacaaatttacatagcgaataac

SEQ ID NO: 476925 - DNA, 570 bp, Homo sapiens
cttctttaaggcacttggccctgttgagtttgtaaaatgggacttgctgtcccatcaggcctctttcatctgacccatcctgtccccgccagtgctgctgggaggcctgagccgggtcttctcaccccattccagggacctgtggcattgggagacatcccattctatttctcccgggaagaatggggcaccctggaccctgctcagcgggatctcttctgggacataaagcgggagaactcccggaacaccaccctgggtaagcacccagggcctttgggtccaggctggccgcccccgattctgctggaacttcagtcttgtttcccaccccatccttagctggttccaaagcaggctctccctaggtcttgccaggagcctgagtaactcctttcttggctgatgatcagtttttgtgcgtttccacatgcagcatgggacggcgccggcgctgcccagccctgcagttgctctaagggcaacttctcctttgagtctcacaacctagtgcatggaagtattgtccccattttacrcataagggacctgagactcaggtcagtggat

SEQ ID NO: 476926 - DNA, 544 bp, Homo sapiens
ctggtttctgcagaggattgtccttggagcgtggggtgtccactgtggttccagccgcagccctggtgcccacacatgaagatgccctctacaggacagaaagagaaataccacctgatgttggctgggatatgggcactgtctttgttccaaagaaccaaagcttttcttggcaaayggcctgtcagtcatttcagtttatctcaactgcatttttaaaatttcagtttctgctctggagcttcagaggaattgagacatgagacaattatgccctaaagaacagtctgtctgcataaatgttatgcctgcagtgtgtgtgtgtgtgtgtgtgtgtgtgtgtgtttggagataggtctgggacgtgtttccttcggtactggctcaaggttccttatttgacttgctaatttaaacttattctactttggaaacctcgaatattttttctctatgggcagagtctgcttttaaaaatcatttgtttaatcttctgcaccccagtgaaacaaagtctcagctaataaattttttaatttttctg

SEQ ID NO: 476927 - DNA, 503 bp, Homo sapiens
agcgctgggcttgcaggcatgagccaccgtgtccwgccaggccaggtttctaagaagcgggacctgagatatggattcctgtgcagtggtttattgaggaggggctctcaggagacatgtatagggagaagagggaaatagggcatgacaaggcagggagaaagcctggcacagacgcgtcgctgcaggatcctggcctcagcctgatccccagggagctgtggagcatggctagggccacacgcttgacctctctaccttgaggcaagggagccagacctttataccctgctgatggccagtcacggctgcacgctgccctcggcaaccagggagcgaggctggaagctttcaggcactttcagtattctcctacccaaggggctggaaagtcccagcaggcaggagatgggtgcaggggtccagaactagggatgtgggtgaggcctggacagcatcctctgcttgtggcttgcaagtgataagaaaaaggagcctctcag

SEQ ID NO: 476928 - DNA, 550 bp, Homo sapiens
accctcaggcccctgaatttattctcggttgtacagcttccaaaataacccctgatggtatcactaaagaagcaagctatggctccatcgactgccagtacccaggctctgccctcgctttggatggaagttctaatgtggaggcggaagttttggaaaatgatggtgtctcaggtggtcttggacaaagggagcgtaaaaagaagaaaaagcggccacctggatattacagctatttgaaagatggtggcgatgatagtatctccacagaagccctggtcaatggccatgccaattcagcagtcccgaacagtgtcagtgcagaggatgcagaatttatgggtgacrtgcccccgtcagttacgcccaggacttgtaacagcccccagaactccacagactctgtcagtgacattgtgcctgacagtcctttccccggagcactcggcagtgacaccaggactgcagggcagccagaggggggccccggggctgattttggtcagtcctgcttccctgcagaggctggcagagacaccctgtcaaggac

SEQ ID NO: 476929 - DNA, 572 bp, Homo sapiens
tcctgtgaaatcaggactttggtcagtcagctaattgtgaatctaaaaagtcagttaagtcagggagacaccttaaattcatttatatcgtatatctttttcttgccctagtatttatgagtgtgtcctttctttgagagcggcctggctgaaataggcgttgtgtctctcttctcccatagaccacawccgtaacccttctgctacaatttcccacttcctattctttacacaaagacactttcaaaatcatatatgtgcagaatcattccagggttcacaattccctccacccagccttccccagtttctgcaattaattcggtatcagttgtcttagttacatcttgaagtcatccaaagtttcatctgagttttatagcgattatattccttctgtttatcctcatgttcccacaacttaagtcacatttaattaaatcaattaatgaccataatcaacacaactgccacgaacagttttgggagcaaacgcggctagttctagataagcacagagcccgggtggttagggaagatgctcaggaggaggcttcagcacactgtgtgca

SEQ ID NO: 476930 - DNA, 582 bp, Homo sapiens
attgtgcttcagtggacgaaatacagactgacacaaggagataacagttcattcacagagacataggtaaatgagaattactatgaaatatgaacagtgctttggcagaaatagggtttagaaacacttcctgaggaggtgatgcctgcgttgagctttgaaggacaagtaggacttcttcagagcatgggggaagagggagctgcctgcacgaaggctgatcagcagaataatgaataaatgcagagttactgggatcttaggtgcacgaccttcggcaaggttggtaggcagagacgcccattacaccaagttgaagagtgaagattctacctttatatacaccttacaattacatggggagtgaccgcatgtcctggtctaaacttatcccagcataattcatcataatgatcctttcactctgagatatgcctctaatttggatgataaatggttacgcaacttaaaatagaagtccagagccatagggacagtcactgtgatagcagtgtgcttgcttcatagtagagcttygggattacatgagatagagcatagcagtgcttctcaaacttaaaa

SEQ ID NO: 476931 - DNA, 507 bp, Homo sapiens
ggtaagctcaggtcagatgtccactcctgtgactgaagaagggtaaaagagtggactactaagggcaggaaaaacaaactaaccacagtagctatcacattccatcccaccccactgcccactgacatgggtacaactccaagttaaagcctctaaggctgctgaaaatgtggtatggacagggatcagtcccactttccgtattcagaattctattattctgcctattcagttttttccagtgtggctacctcatttcctaccatactgatctatttrttgggtccatctttagcagagaggaagcaggaggtaaagaaaataccgcagtgttttcaaaatgcaaaacatagttatatctacatagtcagccaacatcaacccctttttctttcatccttcactccacatgctatttccaactcaaggtatcatcttgccttcctctcctcttcacctcttcgcatttctccgagaggacttgccttacagggacctcaaaacaga

SEQ ID NO: 476932 - DNA, 465 bp, Homo sapiens
atatgccactgatagaattacatttgattagccacttacacaatgtcaaacggtgtgttttgagtatcttatgaarcatacacaatttttaagcaatttttaaaggaagaaattaagttacaataaacaatatttgatgtgttgctaattgtggtggccatgtactatcattagatggtatctccaggtacaagttagacatagagaaaaaattttgattaataagaatgggtataaatccatattccaaaccattttatgataatttcctttgaatgggtggtgggcagtgttttgtcagcatggatcatatcatcatttattttgccttttaaggtggtgcatgaagaaaccaaacagaagtggaagaagggtgagttccatcatttttcggctgctcacttatatttatctattagtactttaataaatagattcttagcaagaatgtcttttaagtcataa

SEQ ID NO: 476933 - DNA, 473 bp, Homo sapiens
ctgtgaggaaaggctttaatattccttaatgttcgtttattacacaagtcactcatacacacaaaattaggataaataaaactggatgatcacaaagaacatttaaaaatcactatctggtgatagtaactattatcaagatggtgtttcctacatttatatcttaaaacaattaaccatactgtacctgctgtttgggatgagctttgttctttcaacaatatataatgaatggatgtctttccttatcaatgaatatgcagccatrttaccatttctaatgacttcagagcattcattgggtggcttcatttaagccctctttatttaagcatgtcctatcattgaaaattcagataatttctactttgttgctattaaagaattttatgatggacatccttgtaattctccccttgcattcatttaggatcctttcagagcctccaggtgtcgttggtgtcttacaggga

SEQ ID NO: 476934 - DNA, 682 bp, Homo sapiens
ctgcctttcatcccttcctctcgtagcccccaaggtggttgtctggaacctcaaggtgtaaagaggacttccctgatctgcatctcatcccaagggcctcagggcaaatgaatccacctcttgctcgtgatttgcgtgtggagctgtcttctgtccagttctctcctaaaaatgctaggaaaatgcctgtggcccaaattgacagcagtccctgtcttctgggaatttgccttttccctgagttaatggaagaaaaaaatagtaagaaagagaagtctacttcatgttatatggcataagaactatgaacaaaagcagaacagaactaggagatagaagcctgtggaagagacagtggcacartattcaagagggtgaccagagaaggcctcactagaaagatatttgagtgaagggggccagccctgcagatatctgggggaggatactttctggccttggggagagcaagtggagtggccagaacgacagccaccctcaggtgagaacaggcctggaggctttgagaaagaaggccagggggctgaagttctggggagcagagtgggagaagaggccggcaaggtaacagggcaggtctgaaggaccttgtgggccattttgccctgagggagatgggaaaccactggagggtttggaaccagaaagagccatgatctgt

SEQ ID NO: 476935 - DNA, 619 bp, Homo sapiens
agatcttggtgtgctggaaaagtcagctttcagaacctctaagattgagggctcagcccctggggctagtaaaaccatcagaggaatgaattccacttcatgagaacttttgacwcatagactaccagtttcttggtggttgacctgcacttgcactgcggagcctatggccatgtttccagaaatttcctttgtatggaacatctgatttttacctgtactctcataagacttccttgctggtgagctgacgttaatttaagaattttagctctttcagtcttaggtatcatcaggcatgtcacactttctgtacatttgccttttgtagctagggaagctgtaaaatgtttaggccttaggtctactgaagactaaccaatgacccaatgtaatatttttaatttgtcccttgacaactttatgttgagatttctaatttccttatcagatacaaggccacagtaaaaacatcacctgttaggtcaagtctaaactggaatctatgtcatcaagctgccgtatttaattaccaatgtccataggcgttgtggttcctgattctattcctcttacaccctcttgaaatcagctccatgctgggggtttctcatactac

SEQ ID NO: 476936 - DNA, 568 bp, Homo sapiens
ctgggcatgcaaaaacagcagatgcctaccagagggtgtgaggcaggagcactgagacttggattcttgcaggttctaagggaagccagagagacagaatagaggtttctgtctcaccagcagagacagtgaacaaaaccaaaaaaccgttcccctccatccttttgtggttcctaagtgtgatgattgggttttcatactcatgtgtgaaatgtacctccctcaagccttgttatgatgtggcgggcacattacccttacccatctgatgaaaagaaaaggaaaaacaaaaacttggaaatcagttataggcagcggttatggggtgaattcaaggtcttgttgcgatctgatggagaaagacaggtgtgaaarggacaggaaaataaaaaggaaggatcccttgcttgctggatgggagaaacaagaggaccatgagaatgatccctttggataaatgtgacctgatgacacctccagaccctgagctccttcctggggtaggcctggctgtttgccgagaacagactctgcagagcagtctttgcaccccagcggagctcagtct

SEQ ID NO: 476937 - DNA, 655 bp, Homo sapiens
tggtcctttaaaatttagccattctagtatgtcattgtgcttttactttgcatttccctgatgactaatgaatttggcacattttcttatgtttatcgaaccttgcattttgaataactacacatttattgaccagagcatgtactcccctgaagtttgtagactgcctttggacctgtcctttttttaatgaaactttctctatgtttcccatgggttgtagtcatcactatccatatatgaatgtagactagaaaccttaaatctgtctttccttcgccactgtgctcaagargtcacaaagtcctatggacccagaaatatctcctgaatgtgtttgcttctcttcattcccattgtgatcaccttagttcaattttatcatctcttgtccttactagcaggagaatgtcactctccacattcccttacttgaagaatgggttccatttttctgagaatgttttcttctttgaatccacaggcaacacaactagagagagaaataagaatcatgactactaacatctttagaatgtttagtgtctttcacgacttttacaagtttattatatgcattatctttgaagtaggtactctttttttttttatacccccatgccatcagccactgcctcgctacctgctgatggca

SEQ ID NO: 476938 - DNA, 332 bp, Homo sapiens
tgacaacctcatttagatcacgttcacaggtcaggccctggtaagygttcttgtgaccttgcattaaggctccacagtgctccccctccctctctttgctccagacccaccagtcaccttgccattccacttgccacctgcccttgcccttgctgttccctcctgctgcaatgttcttccccatgcatgacaaggcttgtcccccaatgcctttctggtctctcctccagtgtctcctccttggagaggatgctatctgcagtagcttccactgcctctgcagactggcccttttcccctcttacccttttcctgttctaagttttttacag

SEQ ID NO: 476939 - DNA, 535 bp, Homo sapiens
gttcacaggtcaggccctggtaagcgttcttgtgaccttgcattaaggctccacagtgctccccctccctctctttgctccagacccaccagtcaccttgccattccacttgccacctgcccttgcccttgctgttccctcctgctgcaatgttcttccccatgcatgacaaggcttgtcccccaatgcctttctggtctctcctccagtgtctcctccttggagaggatgctatctgcagtagcttccactgcctctgcagactggcccttttcccctcttacccttttcctgttctaagttttttacagcatttatcacaataagattatacatttaatatacatatagtttattgttaattatttgktttcatcactagaatgtgagctccatgaaagcagaactttgtccatttttctcacttttttatctttagcatcttgaacagtgtctgcaacatagtgaggcttaattattatgtatgaaatgaataaatgagattgtaaatgaacgaatgactgaatagaataaa

SEQ ID NO: 476940 - DNA, 535 bp, Homo sapiens
gttcacaggtcaggccctggtaagcgttcttgtgaccttgcattaaggctccacagtgctccccctccctctctttgctccagacccaccagtcaccttgccattccacttgccacctgcccttgcccttgctgttccctcctgctgcaatgttcttccccatgcatgacaaggcttgtcccccaatgcctttctggtctctcctccagtgtctcctccttggagaggatgctatctgcagtagcttccactgcctctgcagactggcccttttcccctcttacccttttcctgttctaagttttttacagcatttatcacaataagattatacatttaatatacatatagtttattgttaattatttggtttcmtcactagaatgtgagctccatgaaagcagaactttgtccatttttctcacttttttatctttagcatcttgaacagtgtctgcaacatagtgaggcttaattattatgtatgaaatgaataaatgagattgtaaatgaacgaatgactgaatagaataaa

SEQ ID NO: 476941 - DNA, 615 bp, Homo sapiens
acttgggacacgtttatccttagaagattctcatttgcccccatcctgagactttccccagagtacagtatagaaggatcctttctgctgtcataggggcctgagaagttcaaggataaagggatccctacstgctgctccgtggtactgctctctcatctgacatcattctcttttcaaatgggtccttctaatgagggaactctagaactcccctccagagaaaggagcgagatgggacaaaacttctctcaaaggctgctaaaacctagatcactgaggcttcactctgtgcctagcacgggggcagaggtgggaagagtaagcagggcgtggaccccatggagctcagggttaaagggaatttagatggaaaaaaagagagactgatgttggaggggggggccgtgggatacctgggggaaccagaggtttattttagatagtctggtggggagaagttctctcacctcaccctggactcagcttgactaatttgaactagcaaaaactgttgaaataaacaaattaatggtaatgggtaccatataaatgcttaaacgctggcttttaaaaaaaggaagaaagaaaggaaaagtaacgtttaaaccatct

SEQ ID NO: 476942 - DNA, 587 bp, Homo sapiens
tcaccagcaccactcttgaggaacaaggtgagctgttagaagccagagactcagcaagatccaagcttgagaatgaattttatgatatttttgagttttaaatactatagctacacatggggcactacatagaaagagtcaccaaataaaagscttctctaagtgatctgtgtccatttcaggatcttatgaatcaacagaactgactggtctccttgggactgtgttaaacctgaataggatcaggtcatccatccctccttaggtcccctgcagggctgaaggtcacaccagggcttctttccatgatctgctcaggagccacacagaagggatacatgcctaaacagcatggagacaggacccccaggggtgttggggaacacagcagaactcaaggacttatagcaggagggaaaccctctctctctgccctttgaatggagtccaagcagtgttttccagtgtggtgcacagatgattcttagaattttgttttaaattacttaaaataatttcatccttttaaaatgttttgcatgtttttaatatgcaaggcatattaccatagtggtagaataaagaag

SEQ ID NO: 476943 - DNA, 639 bp, Homo sapiens
tgagaaccctgctgggggcaatgagagtctggtcagtgaggagattgagaggtctgctctttcagtgactatttttgagaaatattgagttttatcagccacagatttgtcagtgtagctgtagtggcagtgaacatgggagttctggattaatgtaaatttagggtttcccaagacaaggctgtctcctgttgtacataactaccgtgttgattagagtattaggcattgtgcaatgtggcctgtgccttttctttcctttgtttcccctttgtttttgggctgagttggcagcttgtgagtacaagcctttgggtctctctgttattatggcctcttgctgatttctgcctctgagctctgggcatgatctggtagcagcatcttgaaggtgtgatgatctktgtgtcttttcattcagggaagggggcattgcccccagtgagctactagtgtagcaggtgcttcagcatgctggaaggactgctgacaccagccgtggacgtcagcaggcttcgggaattgcctgggctgaagagcaccatgtcacccaggacagttcacatccaataactggttgatgcacgagctagaaaggcctggcctctcacactgtcttgggacaatgctgaagagcca

SEQ ID NO: 476944 - DNA, 479 bp, Homo sapiens
accctgctgggggcaatgagagtctggtcagtgaggagattgagaggtctgctctttcagtgactatttttgagaaatattgagttttatcagccacagatttgtcagtgtagctgtagtggcagtgaacatgggagttctggattaatgtaaatttagggtttcccaagacaaggctgtctcctgttgtacataactaccgtgttgattagagtattaggcattgtgcaatgtggcctgtgccttttctttcctttgtttcccctttgtttttgggctgagttggcagcttgtgagtacaagcctttgggtctctctgttattatggcctcttgctgatttctgcctctgagctctgggcatgatctggtagcagcatcttgaaggtgtgatgatctgtgygtcttttcattcagggaagggggcattgcccccagtgagctactagtgtagcaggtgcttcagcatgctggaaggac

SEQ ID NO: 476945 - DNA, 607 bp, Homo sapiens
ctcttttgcttgtgtggtacacataaataggaggtacattctctgtaggagggtgctgtgtcctaggaagatgagatttccattactaccgcagcatttatatatagccagggcccgagaaaccattcatagagcgagaaaagcatattatttaacttttggcatcattcttttcacacatagctttatatttaaagtcaactctaagtctgctgccattttttcctacttcctaaaaaaaagaaattcctcaggggccatgtgtcaggaatatgtaggtattcatgtccaaaacttagcccctattttacattttgaacagattatattacmtgtagcttttgaactcattttcaattacagatctgccttcaagcctgtcggacttcccctctccccagcagccctccagttagtcgtttagattttgatttggtcccttcaagaggttaatttttcaaaaaacacaacaaatgggctcaaataccaaattgctatcaaactccaggggagtaaagctgtgccctttcccctgaagcactctgttcccacatgactgtggccttacagacagaagacctcagtatatataggtttttcccaggga

SEQ ID NO: 476946 - DNA, 628 bp, Homo sapiens
ggcagctcagcctagcgattaatcatgaggctgtgggttcagacatcctgcctggttcaaatcctgctctgtctctgcacccagtgcaaatgaatccatctttgtgctttggtttgcccatcagcgaagtgggattaacaacttcggagataagactcatatagctctggctcacagcactcaacagtttctagctggttctcttgcctgcagcatgtccttgaatgaacacaacagccctgggtggtcagaactatcattggcctcattgtacaagtgagaaaatccaaggttgagaacattagggacttatccaaagtcctaaggctaaaaaatagcaaagctgggattgaacttcaaaggttatgaagctcttggggaaaagaaatcattgaaaaaagctgtgctgtattatcccacaccctctcctcactccctagaatatcatagccaactgaaaattaagcctagaagaatatttaaggtttaatttcacaggcaaaagaaacaagcccagaatcagmggagccactgtctcccacagcaagatgagggatgctctggggatgagaaggaccctgggggagccagacaggctgggtggggacaaaccaaggcagaggctgcc

SEQ ID NO: 476947 - DNA, 616 bp, Homo sapiens
gcccctgcatggactgacctgggaggacctccccacccggtttctctgctctgtccttccagggcgtgggctcgcccgtggccgcctccccgcaactgcactgcgcggctctgcctggaggcccttctttgctttaccttggtctgggcaaccctctctagatttgtctctagttttccactgtccagagaagcggcgggaatggagcttgcatctccgcggccttgctgtgggtggggcttgtaccaggaactttgtaagtgcactcctggctaggaggttctgaggctcctgctctgaaaaccagaccagacgagccaaaaagtgattccaggccgggcgcggtgggtcacacctgtagtcccagcaccttgagaggctaaggcaggtggatcacttgagatcaggagttgggagaccagcctggccaacatggtgaaaccccatctctactaaaaatacaaaaaattagcccagtatggtggtgtgtggctgtggtcccaactgcttgggaggctaaggcaggagaatagtttgaactcaggaggcggagatcacaccactgcactccaggctgggttagacccagtcttggraaaaaaaaaaaaaaaaaggc

SEQ ID NO: 476948 - DNA, 544 bp, Homo sapiens
acagcactcctgatgcacgggacgagggagcggcacgagcaaaggccctgaaacaggagggagcgcggtgagtgccttgcccagatccctgggccgtcgtgggacttgggccttctgtgcgctgcggggagccgtgcagggctgcggcgtgggatgctggactcgccctgggtgtcgggggaaggagatgggggaggttgtactggggccatacagtcattgtagaacctgttccccccgagggccgtctgtcgggtcccagagccaggaccacggttgggacaatttgagcgcccacctgagcaccgttgtccctgtgcgaatgtgctttggtgaaaactgtgcctccttctctagaggaaaytagataccccctacccgcaaatcaggccaagcccaccatgttattcctggtaagctcctagccctggggaggctccgagtgatggcagtgggaggccaggtgagaggtacaaagctggcatccaggtggaactggccacacccaccatggcccagcatccaccaggcaggtcctgtggcc

SEQ ID NO: 476949 - DNA, 587 bp, Homo sapiens
tgtgtggctgcagggtttgagatgtttttcctttcgaatcatagctcacatgggcatctccaccagggtctgccctctcatctgacccactccattcccgactcctgccccaacccaggaccactgcatttccccttggtgatccctcaggcccacaggagtgacagccctgcagctaaccccaccacaggacaggctgcacctcattgttccccagacctcacctcacccmctagtagcccactgaaattaaatctctgagtatcaagacagctcatcttcagaacccacgtactctcttgctggctggatttattgtctgtctctctccatttcctgaatttgggtctccagcaggcctgtccccaacctgctgccacccaccccaagccgagtaagtgaaagcatgaatctgtggttggattattttttcctgtcatcattgtacgtctgactgtacaagggtggcgtgtattgtgagtgcttgcctacatgtgtgtttcctgtgggaagggtcaggggaggtgactgagagccttcatgcacatgtaggggtgtgtatgtgtacttggggtccacatgtgaat

SEQ ID NO: 476950 - DNA, 558 bp, Homo sapiens
caggtgtgtttaaaaaataacaaaaaattggccaggcacggtggcttacgcctgtaatcccagcactttgggaggccaaggcaggcggatcacgaggtcaagagttcgagaccagcctggtcaatatggtgaaaccctgtctctactaaaaaaatacaaaaaattagccaggcatggtagggtgcgcctgtagtcccagctactcgggaggctgaggaaggagaattgcttgaacccaggaggcagaagttgcagtgagccaagatcaggccactgcactccagcctgggtgacagagtgagattccatctcwaaataaataaataaataaataaataacaaaaaataagcaaaaaaaaaaaaaaaaaaacaaagccacccttgttgtgttagaaacttggaacttcccaaggaacaacattccccatctagacctcactgttctgaaacctactcctcctgcccttttcctttcctactttcccatttaaagtagggtgcagaggaccctgcttgccaaagccatttgactgactgtgagactgtagccatgaccat

SEQ ID NO: 476951 - DNA, 552 bp, Homo sapiens
ctgtatggccaggaaagcacagccatcttgtaggaccaggagcagttcaaataatgagccaacggctggcaccctttctccgagcacagcgatgcaccagaatgctctccctcctgtgacaggtgatgtgcgcttcagctcaggcccagaagagccacaaaagagaagctccagcagttctgtgtaggaggcaggatgtacttctatccatagaagggctctcatgattatttattaattrtgaaagggaagaaaaaactaatagagtttcccagaaagggataaaagttcaatatgataaactcccaaaaagcaatcaaaggccaaagagggcagaaaaataaaggacagggagaaagagagatggtgaatcaaagtggccagtatgttagcagaggccaggggaggggccaggcttcacagccagggaggtgtggggctgtcggagcacaagtcaccagtggtggtgagtcagccaggcagcgggacttgaccccatggggtcactgaggccctggggatgagctgataacaggaatggatggaaccggt

SEQ ID NO: 476952 - DNA, 552 bp, Homo sapiens
ctgtatggccaggaaagcacagccatcttgtaggaccaggagcagttcaaataatgagccaacggctggcaccctttctccgagcacagcgatgcaccagaatgctctccctcctgtgacaggtgatgtgcgcttcagctcaggcccagaagagccacaaaagagaagctccagcagttctgtgtaggaggcaggatgtacttctatccatagaagggctctcatgattatttattaattatgaaagggaagaaaaaactaatagagtttcccrgaaagggataaaagttcaatatgataaactcccaaaaagcaatcaaaggccaaagagggcagaaaaataaaggacagggagaaagagagatggtgaatcaaagtggccagtatgttagcagaggccaggggaggggccaggcttcacagccagggaggtgtggggctgtcggagcacaagtcaccagtggtggtgagtcagccaggcagcgggacttgaccccatggggtcactgaggccctggggatgagctgataacaggaatggatggaaccggt

SEQ ID NO: 476953 - DNA, 552 bp, Homo sapiens
ctgtatggccaggaaagcacagccatcttgtaggaccaggagcagttcaaataatgagccaacggctggcaccctttctccgagcacagcgatgcaccagaatgctctccctcctgtgacaggtgatgtgcgcttcagctcaggcccagaagagccacaaaagagaagctccagcagttctgtgtaggaggcaggatgtacttctatccatagaagggctctcatgattatttattaattatgaaagggaagaaaaaactaatagagtttcccagaaagggatamaagttcaatatgataaactcccaaaaagcaatcaaaggccaaagagggcagaaaaataaaggacagggagaaagagagatggtgaatcaaagtggccagtatgttagcagaggccaggggaggggccaggcttcacagccagggaggtgtggggctgtcggagcacaagtcaccagtggtggtgagtcagccaggcagcgggacttgaccccatggggtcactgaggccctggggatgagctgataacaggaatggatggaaccggt

SEQ ID NO: 476954 - DNA, 559 bp, Homo sapiens
tagtgggttaaaagtgtccccaaagagataaatccacgttctaacccccccagaacctgtgacagtgaccttatttagaagatgggtctttgcagatgtcattaaatttaggawctgaggatctggaaacgagaacatgggtggaccccaaatcccatgtgaggtgtccctggaagagagaggcagagagagattttggacacagacacggaggcgaggaggccctgtgcagatggaggtggaggctggaatcacacagttccaagccaaggaatgcctggagccaccagaagctggaagaagcaaggaaggggcctcccttccatcttctggaggaagcagggccctgctgaaaccttgacttcagacttctggcctccagaactgtaagagaatcaagttctattgttttaagccactgagttcatgacttgttgcttgtggcctcgggaaactgacatcctgggtaaaactcctcccctctctaggcctgtgtctcttcacttctgtgcccaccatgcagctcctgggtcccctgctcactggtccctgacaccag

SEQ ID NO: 476955 - DNA, 552 bp, Homo sapiens
ctgtatggccaggaaagcacagccatcttgtaggaccaggagcagttcaaataatgagccaacggctggcaccctttctccgagcacagcgatgcaccagaatgctctccctcctgtgacaggtgatgtgcgcttcagctcaggcccagaagagccacaaaagagaagctccagcagttctgtgtaggaggcaggatgtacttctatccatagaagggctctcatgattatttattaattatgaaagggaagaaaaaactaatagagtttcccagaaagggataaaagttcaatatgataaactcccaaaaagcaatcaaaggccaaagagggcagaaaaataaaggacagggagaaagagagatggtgaatcaaagtggccagtatgttagcagaggccaggggaggggccaggcttcacagccagggaggtgtggggctgtcggagcacaagtcaccagtggtggtgagtcagscaggcagcgggacttgaccccatggggtcactgaggccctggggatgagctgataacaggaatggatggaaccggt

SEQ ID NO: 476956 - DNA, 623 bp, Homo sapiens
aaaaagcccggtggctggatgcagtggctcacgcctgtaatcccagcactgtgggaggccaaagcgggcagatcacctgaggtcaggagttccagaccagcctggccaacatggtaaaaccctgtctccactaacaatacaaaaataagctgggtgtggcggtgggtgcctgtagtcccagctacttgggaggctgaggcaggagagtcgcttgaacccaggaggcggagcttgcagtgagctgagatggcgccactgcactccagcctgggtgacagaacgagactccatctcggggraaaaaaaaaaagtgagcccttttacagaaaactactaagtaaacaatagtacagtggtacctgagtgactgatgtttgggtactttttcctgatgttctaaaatagagctgcactgtccaatgtgattgtcaccagcctcatggagctgtggagtacttggagtgtgctggtgtgatagacagagtggccaaacttagtaaataaaagtgtagggtgcctcccattccaccagtgtgggctgtgcacagtgacttccttccagaatggaaagggggatgaaagagtaactttacggtggtgaaacctgacaaactgcctcagcc

SEQ ID NO: 476957 - DNA, 497 bp, Homo sapiens
gtttttcactcccacatccattcatgcactcatacttcctttgtctttttattctttccttttttttttatcctccasacagagtttcgctctatcgcccaggctggggtgcatgatctcggctcactgtagcctccacttcccgagtttaagtgattctcctgcctcagaagtcagggagtggtttctccagctggttctggctcagcctctcccatgaggctgcagttaggatacgggcaggggctattctcctgaatagctgggattacaagtgtgcaccaccatgcctagctaatttctgtatttttcagtagagatagggtttcaccatgtttcccaggctgatctcgaactcccgacctcaagtgatccactcgcctcagcctcccaaagtgttcggattacaggcgtgagccaccatgcccagtccactcatactttcaataagcattcattatgtacttactgtgctcaggccccttggaaggagcaag

SEQ ID NO: 476958 - DNA, 497 bp, Homo sapiens
gtttttcactcccacatccattcatgcactcatacttcctttgtctttttattctttccttttttttttatcctccacacagagtttcgctctatcgcccaggctggggtgcatgatctcggctcactgtagcctccacttcccgagtttaagtgattctcctgcctcagaagtcagggagtggtttctccagctggttctggctcagcctctcccatgaggctgcagttaggatacgggcaggggctattctcctgaatagctgggattacaagtgtgcaccaccatgcctagctaatttctgtatttttcagtagagatagggtttcaccatgtttcccaggctgatctcgaactccygacctcaagtgatccactcgcctcagcctcccaaagtgttcggattacaggcgtgagccaccatgcccagtccactcatactttcaataagcattcattatgtacttactgtgctcaggccccttggaaggagcaag

SEQ ID NO: 476959 - DNA, 299 bp, Homo sapiens
ctcaaaaatccaaagtctctctgaatttttaagtttttaaatgttttcatctgttgtgatgatggtattatttttcttccataatctgytcatgtgattattttaaaacattgtgattttagaaaaatccaactagcttatgacataccctttttatgtatttctagattagaggtgccagtagtttaagattttggtatctatgttcatgactgatattggcttcatttattcctttattaaatgcttgaaatttaaagtgactctgcctggctctgacattattttcatggaaacat

SEQ ID NO: 476960 - DNA, 652 bp, Homo sapiens
catcctctctaaaatcattttgtttccatggttttccctcatgtattgtctgcattgcccgctcaactgtaaaggttgttaaggcagaaggtttatctcagtcaccactgagtcctctctcctgccttgcacatgggaggcactcattaaggctttgggaaagygagcaagaaatggacaagtgaatccagtgagaagacctctgagatctcagacctgcccacacatcagagtaaggctgttcagggcctcccagggcaggacccatagacctgggggtacctccttggcacctacctaggctcccaactgcctgaacattccttgagacactctggctttttcctagagtctgtaccaccctcatatgtgggtttctcactggctcctttgtgtccagcccctgccagtgagtctcaagattctatgtcagtggggatcatggggatgaatggtaaggccagttgcaggtaaaagaggaagaagatgcttaaaaaaagatagatggttgggtagcaaatcgcttgctgaaccacagttgagcagcaaagagcttaagggtttttgtgtttaagaaaaggcctctgaaccccagggatcgaggccatttgactggtttgggtaattcctagtgacgaggccgccatgcaga

SEQ ID NO: 476961 - DNA, 623 bp, Homo sapiens
agggtggctggctgtccccagagccagaagaaggtccttcctcagagcccacagagggaaccaaccctgcagatgccttgatttcctatgtctggactccagagtgatgaaagaatacatttctgttgtttaaagccatttgttctgtgatacctggttatgacagtcccaggaaggaaacgtgggaagaggctcataaatttcatgccaccctctccaaaagtggcctgtatcccatgactggccagtgtggggaggtaggtggctgggtgtaaggcccagccccctcgcccaaccccagggcaccccagaaggctcttccagcttcagaacccaccaggaggttggctgaggctctccttgagactatgtcccagccaacttcttccctgggctcctactccctttccacggacgtggccccaagagcataacctgataaacctcctgcctgcagatctcgaacccaatctggaaatactctttccagggaatagacgaaagctgccccgtctccatttcttcatttgcaaaaaggaactaatgaaggaggctgcattacagagctgtccgtccactgtgagggtcracaggaccatgtataagacaccacaagatcaatt

SEQ ID NO: 476962 - DNA, 595 bp, Homo sapiens
tggagaagagggaagggagaatgattaaygaccccaggcatagtggggtgcctgaaactgtattgagacaaatctgggcctccagggctcatattctccatgttcggcacatgctcgtggcgggagacaggaggacttcgagaagtggaaagagtagtagagtgacatgatgaggcgcttggagaagggaaagctcatgtgagatggtgtagtcacctaaggcttcctggaggaggtggagaccttgactggatcttggggaaggattaggaattaggaggaggaaggaaattcctggaagaaggctcagcatgagccgaggctcacaggcagaagtggtgcatctaagagctgcttgggagaccagacctggccagaggggaggcattgaggaggggtgagagactcttctcagattttattgactcctccatgctcttctctggtgcaacaggatgatttaaccctcaactgtagttagtagcactttggttctacaaccatagagagattgccaatatgtcatctgattttatctccaccatgtcccaagatgtcataggagccagcactgtgacatccacataggagggtc

SEQ ID NO: 476963 - DNA, 595 bp, Homo sapiens
tggagaagagggaagggagaatgattaatgaccccaggcatagtggggtgcctgaaactgtattgagacaaatctgggcctccagggctcatattctccatgttcggcacatgctcgtggcgggagacaggaggacttcgagaagtggaaagagtrgtagagtgacatgatgaggcgcttggagaagggaaagctcatgtgagatggtgtagtcacctaaggcttcctggaggaggtggagaccttgactggatcttggggaaggattaggaattaggaggaggaaggaaattcctggaagaaggctcagcatgagccgaggctcacaggcagaagtggtgcatctaagagctgcttgggagaccagacctggccagaggggaggcattgaggaggggtgagagactcttctcagattttattgactcctccatgctcttctctggtgcaacaggatgatttaaccctcaactgtagttagtagcactttggttctacaaccatagagagattgccaatatgtcatctgattttatctccaccatgtcccaagatgtcataggagccagcactgtgacatccacataggagggtc

SEQ ID NO: 476964 - DNA, 589 bp, Homo sapiens
ttcgttgcgtgcttgcctcagccatccttgctgtgtgacctccagccagttactccccctctctgggcccgcaggcttttatgtgcagaatgaaggggcctccagccgcagtggttcatgcctgtaatcccagcactttgcgaggcagaggcaggcagatcatctgaggtcaggagttcgagaccagcctggccaatgaaaccctgtatctactaaaaatacaaaaattagctaggcawggtggcatgtacctgtagtcccagctactcgggaggctgaggcaggagaatcgcttgaacccgggaggcggaggctgcagtaagccgagattgcgccattgcactccagcctggacaacagagcgagactccatctcaaaaagaaaaaaacaaaaaaaaatgacggggcctctaatgctgtctccatttcagacctatatgaggtgcttgacttagtgtgagtgttttagatttagccacttcacatatttaaaaagtccttttcataatatttctcaccttcagatcctgcaaccatttcttatgctattcattctagccaaagccatttccaaagcatctataagctt

SEQ ID NO: 476965 - DNA, 589 bp, Homo sapiens
ttcgttgcgtgcttgcctcagccatccttgctgtgtgacctccagccagttactccccctctctgggcccgcaggcttttatgtgcagaatgaaggggcctccagccgcagtggttcatgcctgtaatcccagcactttgcgaggcagaggcaggcagatcatctgaggtcaggagttcgagaccagcctggccaatgaaaccctgtatctactaaaaatacaaaaattagctaggcaaggtggcatgtacctgtagtcccagctactcgggaggctgaggcaggagaatcgcttgaacccgggaggcggaggctgcagtaagcygagattgcgccattgcactccagcctggacaacagagcgagactccatctcaaaaagaaaaaaacaaaaaaaaatgacggggcctctaatgctgtctccatttcagacctatatgaggtgcttgacttagtgtgagtgttttagatttagccacttcacatatttaaaaagtccttttcataatatttctcaccttcagatcctgcaaccatttcttatgctattcattctagccaaagccatttccaaagcatctataagctt

SEQ ID NO: 476966 - DNA, 589 bp, Homo sapiens
ttcgttgcgtgcttgcctcagccatccttgctgtgtgacctccagccagttactccccctctctgggcccgcaggcttttatgtgcagaatgaaggggcctccagccgcagtggttcatgcctgtaatcccagcactttgcgaggcagaggcaggcagatcatctgaggtcaggagttcgagaccagcctggccaatgaaaccctgtatctactaaaaatacaaaaattagctaggcaaggtggcatgtacctgtagtcccagctactcgggaggctgaggcaggagaatcgcttgaacccgggaggcggaggctgcagtaagccgagattgcgccattgcactccagcctggacaacagagcgagactccatctcaaaaagaaaaaaacaaaaaaaaatgacggggcctctaatgctgtctccatttcagacctatatgaggtgcttgacttagtgtgagtgttttagatttagccamttcacatatttaaaaagtccttttcataatatttctcaccttcagatcctgcaaccatttcttatgctattcattctagccaaagccatttccaaagcatctataagctt

SEQ ID NO: 476967 - DNA, 468 bp, Homo sapiens
ctgggattacacgcatgcaccatcacgcctggctaattttgtatttgtaatagagatggggtttctctatgttggtcaggctcgtctcaaactcctgacctcaggtaatccacccgcctcagcctcccacagtgctgggattataggcgtgagccactgctctgttcctggttttgtcttctttctcttaaacaggaccccgcattttatgagcgtcaagcctcacccagcctaactccgcccttggtttgtcctcttagagtctcagtttccccaggtgtacgacaggcagtgtggtggctgtaatgggcttccatcagtgcctgccacatgggcgtggggctcggtaggtgctgccgctgctgctgccraagctagaagagcccccacagggcatagagccattccctggatccctggacctggtgggctgtttccagctccacaaggcagccaattccccggtag

SEQ ID NO: 476968 - DNA, 496 bp, Homo sapiens
tgctgtccagaatggggctgacacattcattttaaacaggccaggaagatgcagatttggcaagctctgaaatttgccgacaccccaagtcgagggtaagcaggagaaccagaaaagggcagcttctcatgtggtcaggttctcctgatgcaagcgtcctggtggatttgggtttcccaagggtcctgactccaggagacccccaggaccgacaggaagggccacccctccctctgaaactctgaagccaggccacccggtgctgaaatgctgtgtgaactcgggaaagttccttcgcagggactgagcctccctttcctgtctccaacagactggaacactgcctcccattgtatgggtgaaatacctcgcggacatgtcttacggcgccccatgaaagcatcaccattaatctgaccagtcaccgcagcattagtatcttcagggcacagatgaagccrtgggcaccagtgataaggagttgccactgctggct

SEQ ID NO: 476969 - DNA, 514 bp, Homo sapiens
ctgaagcaatttgctactgtgtttattttaatgcaaacaaaaaacacacacaaaaggcttaagttttctatgatgacacgagtaatacatcttacaaaagaatgtcttaagtggttttttaaatttctattcaaactacataaaaggttgaaattttctccactctaaatactacattctgtctagcctgcattgccctcaagtatctgtctgacatcactttctttttacaaaatcaattatttacaaacagtgagggaaggcccaaraatgctaaattccatctcaaactgtattaaataactctcagaaaagggcagcaacaaataagtagataaaacactctatacataactacattctacataatatccaatatgtaatgactataaaataaaaaatggtaatagttaaatacagaaacttaaaaggataacagtaatgatttacatagaactttaataagtaactctataaaacaaaaccatcaaaaggcactaaggtttatgaccag

SEQ ID NO: 476970 - DNA, 547 bp, Homo sapiens
tctttttctctctaatacttacaagaatggactgcaaggctacatttagtcaggcgataccatccccagcacatggtggcttgttggtgtgaggtctaaggattccggtcatttgaaacgaatggcctcctagatttgtggcatttttctgtatattgagaataggtaactaaaataagtggtaactrtatttgcatgtgatttgtatgttatagttaacatttaaattctcttatgtactaaaatttttttggttgccacagtaagcctctttatcctgtaaggcacagagtgtctttccacctcaatttttgctttaatgtatgaaccctaatgggaccatagttcaactaaaggcacctaactcatgaatgatatttgctccatgtttgaacaacaaatgttttaacccactgtcttcactaatattgtaactactgtcttacagattgacttgatgcacaacatcacaaaggcgatttttgaggtatgagctttagaaacttacctctcatgtggcatgtacatcaggctttaacttcagttt

SEQ ID NO: 476971 - DNA, 547 bp, Homo sapiens
tctttttctctctaatacttacaagaatggactgcaaggctacatttagtcaggcgataccatccccagcacatggtggcttgttggtgtgaggtctaaggattccggtcatttgaaacgaatggcctcctagatttgtggcatttttctgtatattgagaataggtaactaaaataagtggtaactatatttgcatgtgatttgtatgttatagttaacatttaaattctcttatgtactaaaatttttttggttgccacaktaagcctctttatcctgtaaggcacagagtgtctttccacctcaatttttgctttaatgtatgaaccctaatgggaccatagttcaactaaaggcacctaactcatgaatgatatttgctccatgtttgaacaacaaatgttttaacccactgtcttcactaatattgtaactactgtcttacagattgacttgatgcacaacatcacaaaggcgatttttgaggtatgagctttagaaacttacctctcatgtggcatgtacatcaggctttaacttcagttt

SEQ ID NO: 476972 - DNA, 431 bp, Homo sapiens
agtcatgtaccccactcttaggctcaagccatcctctctcctcagcctcccaggtagctagcactacaggcacatgatactgtgcctggccaatattttaattttttgtagagacagggtctccctgtgttgcccaggctggtcttgagctcctaggctcaagtgatcctcctgtctcggcctcccaaagtactgggagtacatgcgtgagccaccatgcccagccaatagtacggattttgtgggacccttgtgagcattcaacgtgaagacactggaccgttctggagctacgtctggggtggggctgacagtggggctgacagtggggctgtgcctgtatctcgtcccttcttggctggsagcaactggaggaacagcacctgccacacctgctactgtctccccagactccgtggctcagctgtgag

SEQ ID NO: 476973 - DNA, 638 bp, Homo sapiens
gcttcccagcagggcccgtgagtcacttcggcagctctgagcccagagtttcccctgtggcggccaaaacctttgcctcttggcccagcttctgtcctgtgaccaaaggcgggtcttctgaggccttcctcaagaggaagccaggaggggcaggccccaggatcctgaagacacacgggaagacagatcccaccgcacttccttacttcctcrggcttctgggtttggggcaaggagtgtcgtgatttgggttgacactttccgggcctcggttttctcacctgtgaatggggatgttgtgagaacttgatgaactattagaagtgggagcaccctcccctttcctctccccagcagctcaggtagcaggtcaaatggttcagagccactggtaagaggatttgaccacatccttcctgtgggtacgtggatggccactcactaacatcaggaccaaggaggcctcaggaggaaaagggacagcactcctgaagaccctcaccccaggtgaagttcaagaatgtaaaagcctgtttgtagcaggggtgacccagccgagttcatcctcaaatggaccccggggtatccgggcagcactcgccacagggcacagacttaacccaggcaccaagcactgc

SEQ ID NO: 476974 - DNA, 594 bp, Homo sapiens
cagaaccaggtacctggggaggctgggatgggcagaggccactgcccactatggagcaggtcagaggacatcacctgggcacctgaccccaccaggctactggtgtaagaggagatagctggggtctcgtttcctggaatacgctggagggtagggtggtgagagtcagaggcctcccatcctggaggatgcgcttttgagatgcagcatttctttcagcttgcagaggcctcccatcctggtcctccttgtgccccatctccttgcggttaccaggggccaggaccttccccactaggaggtgacgtagatgtgagtggagcaggaaggtgcggggtgcttcccaccctgagtccaccccatcttygacggtgccctgcactgggcagcctgagcggacaaaactcatcagatggtcaccccacaggagattggcatgacgtttcttgttcttttgatttctcgttaaaggtggatgctagtttgagtgcatgttggggaagggatctctcaacctctggaagccagggagagccagggttcatgcaggtcagcgttgtctccttcattggctgggcaggacttttgggtacc

SEQ ID NO: 476975 - DNA, 617 bp, Homo sapiens
ccaggtacctggggaggctgggatgggcagaggccactgcccactatggagcaggtcagaggacatcacctgggcacctgaccccaccaggctactggtgtaagaggagatagctggggtctcgtttcctggaatacgctggagggtagggtggtgagagtcagaggcctcccatcctggaggatgcgcttttgagatgcagcatttctttcagcttgcagaggcctcccatcctggtcctccttgtgccccatctccttgcggttaccaggggccaggaccttccccactaggaggtgacgtagatgtgagtggagcaggaaggtgcggggtgcttcccaccctgagtccaccccatcttcgacggtgccctgcactgggcagcctgagcggacaaaactcatcagatggtcaccccacaggagattggcatgacgtttcttgttcttttgatttctcgttaaaggtggatgctagtttgagtgcatgttggggaagggatctctcaacctctggaagccagggagagccagggttcatgcaggtcagcgttgtctccttcattggctgggcaggacwtttgggtaccattggctcatgagctgcacgtcccatgg

SEQ ID NO: 476976 - DNA, 608 bp, Homo sapiens
aaatactcaagaaatcgcagttcttaggcatttaaggaacagagttggaacaaaatcaagattcaaaattatttctctaagccttctttgggccacagtctacaaagagattggggaagtaggctgtcagaactttaatggttctgaaatcaccgaaaatgatgtaactggaacactttcatttcacaagattacagtgttacattttctaaagaaactgtcatttgccttctgaactagaaacagggatttgtaaaataatgtgcagtgatggcgtggaaaactaaccagcagcactcctgaaatgctgccttcgtgttcccctgggactgctcgcctcaccccaaaactatttctactgccttccccttccatgctacaactagtctccaaaggtagttttctctactaacaaagcaaacagatcatatgaacggacatcagactttcttaggagatttctgaaaattctctcttctgggggaataaattgtgagcatttcgattcaaacattcctgaaagaataaccaggcaaccgaaacactcastgacctaactgtggtaggctggtcacttcaaacttaacagaacaataaaacatatacta

SEQ ID NO: 476977 - DNA, 466 bp, Homo sapiens
gctcatctccaggacccatagagggagatgayagcagtgaacttcagccctgctgagtctcacaggggctgcgggaggacggtgcgggaggacggtccatgagggagaggccaagagcctacgcatcctctctccaactgttccggagccagactccagcaagcagcagaccatgagaaacagctctgctcccacagcctgcaggactgagtcacagcctcctcctctacttaatcatcctcatagcccgaagtccttactacatctgccctaagttcctcatgctgcagcaaggctgcaccaggctcacatgactgtacctctgctgagacatcttcatcaggaaggactcaatcccctcagaacacaccccttcttttctcccctccctcatagcaacatgacccttgatgaagggtccacagagaccaaatgctctttccctcggaaacataattcctttgcc

SEQ ID NO: 476978 - DNA, 466 bp, Homo sapiens
gctcatctccaggacccatagagggagatgacagcagtgaacttcagccctgctgagtctcacaggggctgcgggaggacggtgcgggaggacggtccakgagggagaggccaagagcctacgcatcctctctccaactgttccggagccagactccagcaagcagcagaccatgagaaacagctctgctcccacagcctgcaggactgagtcacagcctcctcctctacttaatcatcctcatagcccgaagtccttactacatctgccctaagttcctcatgctgcagcaaggctgcaccaggctcacatgactgtacctctgctgagacatcttcatcaggaaggactcaatcccctcagaacacaccccttcttttctcccctccctcatagcaacatgacccttgatgaagggtccacagagaccaaatgctctttccctcggaaacataattcctttgcc

SEQ ID NO: 476979 - DNA, 466 bp, Homo sapiens
gctcatctccaggacccatagagggagatgacagcagtgaacttcagccctgctgagtctcacaggggctgcgggaggacggtgcgggaggacggtccatgagggagaggccaagagcctacgcatcctctctccamctgttccggagccagactccagcaagcagcagaccatgagaaacagctctgctcccacagcctgcaggactgagtcacagcctcctcctctacttaatcatcctcatagcccgaagtccttactacatctgccctaagttcctcatgctgcagcaaggctgcaccaggctcacatgactgtacctctgctgagacatcttcatcaggaaggactcaatcccctcagaacacaccccttcttttctcccctccctcatagcaacatgacccttgatgaagggtccacagagaccaaatgctctttccctcggaaacataattcctttgcc

SEQ ID NO: 476980 - DNA, 418 bp, Homo sapiens
agaggaaaacggctctaaattgatttttgcagcacattttttagtttatttgtttggtttttttgtgttttgagatggagtctcgccctgtcacccaggctggagtgcagtggtgtgatctcggttcactgcaacctccgcctctcggttcaagcgattcttctgcctcagcttcccaagtagctgggattacagacatttaccactacacccaactaatttttgtagtttttaagtagagacggggtttcaccatgttggccaggctggtcacgaactcctgacctcaggtgatccacccgcctcggcctcccaaagtgctgggattataggcatgaaccactgctcctaaccaacaaatgttttttgaacccartgatgtgctggggggctgtgcccctgcctgacagaggtaggc

SEQ ID NO: 476981 - DNA, 573 bp, Homo sapiens
gtttagttaactagttgattaccaggacaaattaaagtatgtaatacagtcagtctggctctgactcaccatgaattcccatattgggaggactgcttgagcccaggagcttgaggctacagtgagcagtgattgtgccattgcactccagcctgagcgacagtgagaacctgtatcaaaaaaaatttttttttgggccgggcatggtggttcacgcctataatcccagcactttgggatggtgaggtgrgcggatcacttgaggtcaggagttcatgaccagcctgcccaacatggtgaaaccccatctctactaaaaacacaaaacttagccaggcctgatggcgcatgcctgtaatcccagctactcaggaggctgagactggagaatcgcttgaagccaggaggtggaggttgcagtgagccaagatggctccactgcactccagtctgggtgacagagggagactccatctcaaaacaacaacaacaacaaaaatttcccacactattctctgagaacagagaatgttctagttgtcctggacattcttctccctttttaacctgtct

SEQ ID NO: 476982 - DNA, 455 bp, Homo sapiens
cagggcctgcagccccagctgtcctgatccttttctcctgaagcaaaggaagatgtgttcatagtgtacccactgctgatctttctcctctgtccaaacatctccagtcctgtgctactgccctggacataatcgtttattttgtttttttgttcttttttttttttttgacacagagtctcactcggtagctcaggctagagtgcagtggcatgatcttggctcactgcaacctccacttcccggattcatgtgattctcttgcctcagcctcccgagtagctggaattacaggcacgcaccacctcacctggctaatttttgtatttttagtacagacggagtttcaccatgttggccaggctggtctcaaactcctgacctttggtgatccacccaccttggcctcccaaagtgctgggattacaggcatgagccaccgygcccggcctgcc

SEQ ID NO: 476983 - DNA, 365 bp, Homo sapiens
agtgcaggcatagagtacattgtcagtaggamatttttaaacactaatagaatcactaagattttatctgctttatattatcaccatgcacaagcaatttgaaacaatgtcgatgataaaatattcttccctgccaaagtgaaccatttccatttcacaccccctttgatttaacactgaatggttgctaaatgaatgaatgaacgagttgatagaattgatgataatgagagtgatgaagatgtagcaattgacagagaacaagccaattacttccatgactttcaattaaagcaaagcctatagcctggtttgacacgttgcttcccttgggtaatgtgggcgaaatgtgaggggaaaccagc

SEQ ID NO: 476984 - DNA, 570 bp, Homo sapiens
actggcattcaggaaaggaagaaaatagtccgcttttcatatacaatggggcttgcatcactcatcaacctgagatgtggggacagagaaatatctcaccctggtgccctgcctatgccaatggccagagctatagaaatgtaaggagcattcgggaaggaactgggaacctgaattgataaagacaccactgggcaatgagccaagtttaaacagcccactacttaccaaactattacttttttcaagaaaatgagaaatgaaaattatggacattccttgtgagcaaattctctttcttgagcctttgattataatcttatggacatttcatcatgagagaggctaggaatttcaacatttgcacactttcctccacatcaatgaaaatccctttatacttggtagaaatcaagatccagaaaaataaaaacatatctaagattccacctagctctrtagtcccagtctgggggactgctcaccttatttgtctacgttttggcctccttggactagattgtgagtttctggaatgtagaggcaatatctcattcctctttgcttttt

SEQ ID NO: 476985 - DNA, 453 bp, Homo sapiens
ctggctctaggccatgttacctgtctcttgatgagacatcggcttttatcaacacaagcctttatgttttagaacctatatctatgttggagctcttccttttttttttgtctaatcctttagacaaaatactattagctcttccttaataattatttatctttctttcttttggagtataggtatcgacatagacatagatatatagatatatagacatagatatagagaaatagtctcaactaggtctaagtgttttgaagaaaaagagggccatgccagttgagtctgcaatgytgccagttgagtccaccatattggtaaggatatccttctcaatccaccacaatcagaatgatacttctacaacacaagtcttgtcctattacctgccccacaaacacacacatttgggacaccttcctgcttaccttcactttatgtcttcccttt

SEQ ID NO: 476986 - DNA, 399 bp, Homo sapiens
gctgtggccccagctcaaatcaccactaagaaaacagttttatttcagcaaacagcaaaaatacattgggaagaacgccggtatgtaaacggatgctgtgtcgcaaactgcgattgcatctagggtgggggattaggaaaagctaggtctaaactctaatgtacataagaatcacccaggaggtgcattttaaaaatgaatactgggacacgacactcagatgttctaattccttaggagtgagtgggcccaggatctacatttgtaacaagcgtctccagtgattctgggtcaagtcctcaagcccctctttgaggtctggaccctggycctgttgtgacgtacttttcttttgcggttttaggaaaccccagtttcctcatgtataaaagcagaaaa

SEQ ID NO: 476987 - DNA, 628 bp, Homo sapiens
gggcagctggagtcccagcccttttccccaaacacttgtctcccatcaagagagtttcagaaggagcatatggcaagataggatcatttttcagatgttggtctgggcctcagtccttaccaagcagggtttttggtgtcaaggagactcatctcactggctgagggcaccacttccccacatttattccactccatcccttcaccacagcagtaaatatccctttgcctagaacacctgctgctgctggtggtggatgaaagggtgttgcacttccgtcactgagggtagagaaggcactgacgtcagacatcagagctgttggagttacataatcccagaagctgcttgagcatggaataaggccatatttaacctcgggggagctaaaaataggcaaatagaattttatttccccataaactttttagacttaaartttttttttttttggtgattctaggctaggattgtgtgtggcctcaggcaatttttcaatgttgaattatgatccctgggaaataagtatggtctatatgcagggtatagtcatgatgtgtgtgtgtgtgtgtgtgtgtgtgtgtgcttgtgtatgtgtgagagaatgaggatgtgaagagtgggtgtg

SEQ ID NO: 476988 - DNA, 590 bp, Homo sapiens
caggcatgtgccaccatggctggctgatgtttcttttttgtaaattttggtagagatgaggttttgctttgttgcccaggctggtctcaaactcccggcctcaagcagtcctcctgcctcagccttccaaagcrctggggttgcatgcatgagtcatcatgtcccgcctccccttgttctctaacctcctttatcaggtataactggattcagttgcttctaggagaaactccaaataacagtaaattaaggtgaagtttatctttctctaatgtaaaaaagatccagaaacaggtaggctttgattagtgtggtagctcgatgaaggtattgggagcccatctctctccttccaaatccgttatgcatccatggctcctgttctcgtggtacaaaatagcccctggagatccagccatcgcttacatgttccaggtggtatgatgaataaaggagcaaagaaggctgtatctcctgtctttaagattttccagagatctcacatcatacttacactcatatatagttggtcaaaacatagtcacattcactctttatacctacatccttggcaagatccacttctcatc

SEQ ID NO: 476989 - DNA, 646 bp, Homo sapiens
caggcatgtgccaccatggctggctgatgtttcttttttgtaaattttggtagagatgaggttttgctttgttgcccaggctggtctcaaactcccggcctcaagcagtcctcctgcctcagccttccaaagcactggggttgcatgcatgagtcatcatgtcccgcctccccttgttctctaacctcctttatcaggtataactggattcagttgcttctaggagaaactccaaataacagtaaattaaggtgaagtttatctttctctaatgtaaaaaagatccagaaacaggtaggctttgattagtgtggtagctcgatgaaggtattgggagcccatctctctccttccaaatccgttatgcatccatggctcctgttctcgtggtacaaaatagcccctggagatccagccatcgcttacatgttccaggtggtatgatgaataaaggagcaaagaaggctgtatctcctgtcttwaagattttccagagatctcacatcatacttacactcatatatagttggtcaaaacatagtcacattcactctttatacctacatccttggcaagatccacttctcatcaagcctgagctattacagtatttccctaaattgtttcccagactcagtctctccct

SEQ ID NO: 476990 - DNA, 655 bp, Homo sapiens
taatttttcatttttttgataataggcattgtaacaggtatggggtggtatttcattttggttttgatttgcatttccctatgtktagtgagctgtattatgggcttaaaatttgctaagatttccctttgttaagtgttcttaaccacctccatgttaagatctcatagtaaatgttcttaaacaccctctaccccactccacatgtccaaataaagggaaatttttggatgtgaaagataggtctgttcctatgattgtggggatggtttcacaggcctatgcttatgcccaagctcatcaaattgtatacgttaaatatgtgcagtattttgtgtgtcaattatacctccataaaaccataaaaatctataatattcttatgtgaaaggctagtgtatttatggacatatctcagacacattttgtgactagttatgatgagtcagaatttgcatctaatgaatttctttaccagtgttgtaaattctcagaattagttacataccctaatatctaatgggggttggccacaagttgataactaagccttcatcccttaatatcatctactccactgacttccagggctgagatgaactactcacagcatgcatatttaagacaaaaatgactctgatgagcaggtattagg

SEQ ID NO: 476991 - DNA, 655 bp, Homo sapiens
taatttttcatttttttgataataggcattgtaacaggtatggggtggtatttcattttggttttgatttgcatttccctatgtttagtgagctgtattatgggcttaaaatttgctaagatttccctttgttaagtgttcttaaccacctccatgttaagatctcataktaaatgttcttaaacaccctctaccccactccacatgtccaaataaagggaaatttttggatgtgaaagataggtctgttcctatgattgtggggatggtttcacaggcctatgcttatgcccaagctcatcaaattgtatacgttaaatatgtgcagtattttgtgtgtcaattatacctccataaaaccataaaaatctataatattcttatgtgaaaggctagtgtatttatggacatatctcagacacattttgtgactagttatgatgagtcagaatttgcatctaatgaatttctttaccagtgttgtaaattctcagaattagttacataccctaatatctaatgggggttggccacaagttgataactaagccttcatcccttaatatcatctactccactgacttccagggctgagatgaactactcacagcatgcatatttaagacaaaaatgactctgatgagcaggtattagg

SEQ ID NO: 476992 - DNA, 655 bp, Homo sapiens
taatttttcatttttttgataataggcattgtaacaggtatggggtggtatttcattttggttttgatttgcatttccctatgtttagtgagctgtattatgggcttaaaatttgctaagatttccctttgttaagtgttcttaaccacctccatgttaagatctcatagtaaatgttcttaaacaccctctaccccactccacatgtccaaataaagggaaatttttggatgtgaaagataggtctgttcctatgattgtggggatggtttcacaggcctatgcttatgcccaagctcatcaaattgtatacrttaaatatgtgcagtattttgtgtgtcaattatacctccataaaaccataaaaatctataatattcttatgtgaaaggctagtgtatttatggacatatctcagacacattttgtgactagttatgatgagtcagaatttgcatctaatgaatttctttaccagtgttgtaaattctcagaattagttacataccctaatatctaatgggggttggccacaagttgataactaagccttcatcccttaatatcatctactccactgacttccagggctgagatgaactactcacagcatgcatatttaagacaaaaatgactctgatgagcaggtattagg

SEQ ID NO: 476993 - DNA, 609 bp, Homo sapiens
gctccagctgtgactgcatgatgcccaaggactgcctgtaaccaggcaggtggtccaaccgctccctcaaaatcatactcagagcgtgagcctagataaagaggccagagatgccctgggcaacccagggccttgagactccaaggagacaaacaacaaaacaagagccagattgcaccagtgcagaaatctagcgaggctcttacacaacgataaagtaatactgcaataaatagaaacaagtgccttgttttccttttgtggctctaatgggctcagcatcacttctcagagcaactcaagctatgcagcaagagctccctaaccactgcacacattgcctcccaccctcccttgtatcttgcaaaggcagcaraagaggccatgtgcacagtgatgagcatcaggggctgtggactcagactgtcaggttcaaaatcttggaagtgcctcttacctgctgttgtgtccttggacaaattgcttaacgcctgcctacaccccactctctatctgcaaaatggggatctgaaaagcactaacctcaaagtgtgtgagaagcatcaaatggaataattcattatttccatatggggcttctgctgtgtg

SEQ ID NO: 476994 - DNA, 297 bp, Homo sapiens
gctcagcagaccatgtgcgagggactcaggatctcagtttgcyatcatcgctgggttttctatatcatgctgtggctgtgcttaggtgctgctcttcataacaattatgtgaatactgctagcattgtcatccctgtttagtggatgtagagacagaggcagagagagaaaaggggaagctattttggaaggcctgagaagaagccaaggttcaagtcctcgtcttgagtttagattctttgtctaccatgtgttatacagtgtttcttaaatatcaggtgttcttatgctgctgga

SEQ ID NO: 476995 - DNA, 297 bp, Homo sapiens
gctcagcagaccatgtgcgagggactcaggatctcagtttgctatcatcgctgggttttctataycatgctgtggctgtgcttaggtgctgctcttcataacaattatgtgaatactgctagcattgtcatccctgtttagtggatgtagagacagaggcagagagagaaaaggggaagctattttggaaggcctgagaagaagccaaggttcaagtcctcgtcttgagtttagattctttgtctaccatgtgttatacagtgtttcttaaatatcaggtgttcttatgctgctgga

SEQ ID NO: 476996 - DNA, 597 bp, Homo sapiens
agcagtgccccgggaggattccgatggaagtggtgtggggtgggggtggggggcttccactgtctgtttgggtcttcgtatatccgtcccctcggagcctccctccacccctggtacctgcctcacgctggccatgctctgggggrcttttagacatttggccagggggtggcagaactagatcaacccgtaccaggtcttaaccacgcccacctagggacatcgtgggaatgtgcctgctccagtggacagagaacaacgtccaactctgtcttggggatgttctgagctggtctcagagaaaatagacgcagctactgagcgcacatcctgagggcagcagacaggactccccagcagggagctgggccctctccccattctctcctgcggtctgagcccttaggggtctgtcctggccttgtggtgtggtaaggtaagacaccttacccacagagtgacagcatcatccctcctttctcccctctcctgctacggagtgactgagacatgaattggcgatctttaacatgtgctaatgagtgttagctgaaccaccttccaagaggagagtgaaaggcaaggaggtaagtgaga

SEQ ID NO: 476997 - DNA, 477 bp, Homo sapiens
tagatgtgctcaataaatattttttgctcaataacatttgtcaattwgtgaatgtcaacctggagaatggtctctagtggctacagtgttctgtccttggccttatccaaaatattaactctgacagaaaagaagaaagataacaagaaaattgattctgattcccagtcaagaaaacatttatctttattattgttattactatcatcaccattacctaccatgtgataggcactgtattctgctctaacactattggagatgctcacaacaaaactaagaggtagaaattatcatcttcactttgagatgagcaaaactgggttcagggagtttaaataagtggctaacatcagacagcagttacgtgatgaagctgggattaaaattcgagatctgtctcactaaaaattgtgttcttttttttacaagatgatgataacacttataaaaacatgagaaacctaccttaatttg

SEQ ID NO: 476998 - DNA, 469 bp, Homo sapiens
gtctcaacagaactctcatcctgctttaagtggatatgtccttggcattgctgttgtggstagtatagtgactatctctgaggaacagcacccaatttctctttaaagaattaccctcccccattgtgtatagtcttcttgaaattgtaaatcaggtcctgccctcccttagctgagacataacaaaactctctccttgattttgaaaacttgagtaaagtgtccaaagagcagagaaatcaattggtgctcaccattcttgctgtgtcattaagttccttggaatgccctggtttctgttcttttaacttagccttgttatcaagccttctcaacacctatgaactacccagtatccttctaaatcaccattttgtttaacaagtcttttcaatatctggtacctacaaacagacaaatgaacaaaaactaatacttaatataccaccttcattgtctcattgcataa

SEQ ID NO: 476999 - DNA, 469 bp, Homo sapiens
gtctcaacagaactctcatcctgctttaagtggatatgtccttggcattgctgttgtgggtagtatagtgactatctctgaggaacagcacccaatttctctttaaagaattaccctcccccattgtgtatagtcttcttgaaattgtaaatcaggtcctgccctcccttagctgagacataacaaaactctctccttgattttgaaaacttgagtaaagtgtccaaagagcagagaaatcaattggtgctcaccattcttgctgtgtcattaagttccttggaatgccctggtttctgttcttttaacttagccttgttatcaagccttctcaacacctatgaaytacccagtatccttctaaatcaccattttgtttaacaagtcttttcaatatctggtacctacaaacagacaaatgaacaaaaactaatacttaatataccaccttcattgtctcattgcataa

SEQ ID NO: 477000 - DNA, 635 bp, Homo sapiens
gtgtagctccctttcagtggtatcctcacccagatattccagccaccgccataaccccaaacttcagtttgtgcctttatttttttcaactaaakcctcaatgaaacagtttgtctcttaagctcagcaagacagggttttgtgtgagtcccccactccctgctccacaatctggaaattgcctccaggcagaaagctccgcattcatggggtctacttcatttgattttcttctctcaggcatcacagtcatatgcttggatttgttcattatctgaaaatggtcattttatattttgtcctgttttatataattatggtgcaggaaagctagttccataccaattactcccctacagctagggatggaataacctgctttattttcatccattgtgtgatataaatgtttcatgtttcattcattatttggcccctctttctatagactgtaacctccaggagagcagaggctccttttttttctttttttttggaggtgagtgtttcacactgtcacccaggctggagtgcagtggcacaatcttgactcattgcaacttccacttctgggatgcgagcagttctcctgcctcagccacctgagtaactgggactacaggcatccgccactg

SEQ ID NO: 477001 - DNA, 635 bp, Homo sapiens
gtgtagctccctttcagtggtatcctcacccagatattccagccaccgccataaccccaaacttcagtttgtgcctttatttttttcaactaaagccycaatgaaacagtttgtctcttaagctcagcaagacagggttttgtgtgagtcccccactccctgctccacaatctggaaattgcctccaggcagaaagctccgcattcatggggtctacttcatttgattttcttctctcaggcatcacagtcatatgcttggatttgttcattatctgaaaatggtcattttatattttgtcctgttttatataattatggtgcaggaaagctagttccataccaattactcccctacagctagggatggaataacctgctttattttcatccattgtgtgatataaatgtttcatgtttcattcattatttggcccctctttctatagactgtaacctccaggagagcagaggctccttttttttctttttttttggaggtgagtgtttcacactgtcacccaggctggagtgcagtggcacaatcttgactcattgcaacttccacttctgggatgcgagcagttctcctgcctcagccacctgagtaactgggactacaggcatccgccactg

SEQ ID NO: 477002 - DNA, 630 bp, Homo sapiens
agctgctctttctcgatccttgcagtttcccttttgacctgtgggtacacatggtactgacgcrattggcacctcagatggttcttcctgacagctacccttgcaactgactcaggatacaaactacctttttttttggagacagatctcactttatcacccagtctggagtgtaattgacgcaatcctggctggctgcagccttgaccttctgggcccaagcagtgttcccgcctcggcctcccaaagtattaggattacaggcatcagccgtcatgcctggcacaaactgcctttggaagtgaatcagtcagttgcctagtaggcctaaggagaccatgatccatgtaaaccatggaatattttaagcagaaaagaacgtattccccttcaaggacaaagtgctggaataattgacatccaggttatcacagagccttcctatagtgttgattctgatcactcaaataatcttagtgttaaagggtttatttttatttttctaccttcttttaccaccccttactcccatcagagcaccatcagtcttttgggaataaaataattcctcagatatattaaaaagctatagaagcagaagttaacgtacatgcaaaaatctctacattt

SEQ ID NO: 477003 - DNA, 630 bp, Homo sapiens
agctgctctttctcgatccttgcagtttcccttttgacctgtgggtacacatggtactgacgcaattggcacctcagatggttcttcctgacagctacccttgcamctgactcaggatacaaactacctttttttttggagacagatctcactttatcacccagtctggagtgtaattgacgcaatcctggctggctgcagccttgaccttctgggcccaagcagtgttcccgcctcggcctcccaaagtattaggattacaggcatcagccgtcatgcctggcacaaactgcctttggaagtgaatcagtcagttgcctagtaggcctaaggagaccatgatccatgtaaaccatggaatattttaagcagaaaagaacgtattccccttcaaggacaaagtgctggaataattgacatccaggttatcacagagccttcctatagtgttgattctgatcactcaaataatcttagtgttaaagggtttatttttatttttctaccttcttttaccaccccttactcccatcagagcaccatcagtcttttgggaataaaataattcctcagatatattaaaaagctatagaagcagaagttaacgtacatgcaaaaatctctacattt

SEQ ID NO: 477004 - DNA, 295 bp, Homo sapiens
tggtgggtgatctccactgaactcctattcagaggctcagtttctctgcaggacagaaatgagaggcacaaaatttcatagctgtcttgcccctyctgtggtctgtaagaatgggaccaggactcctagttgtgaacccgaaaggatttccattaggatcaggaagtgtgagttggcttagaaaaagtaaagaaagaacagtgctgtttcatttatttatcatgtgtaagtaaactgggatttattttattttattttttattttttgtttcagtttcggggggtacatgtgtag

SEQ ID NO: 477005 - DNA, 350 bp, Homo sapiens
cactagttttagtcagaatttgtacttcttaacatgcatactataccattagtatatttttacattctctaaagtgtgtctgcaatgcagtgttstactttctgcagataccatagtttctttcatcaatcttttataacattgtgttgattgtagttttttctatctttaagcaatattgtaatgagtatacatgttgctacacacatacacacacaaccacacacgcacatatcaggctaaatttctacaagtgaaattttcaaagcttgtgatgggtgttaacaaattgcatttcggaaagattttttcatgtaattgataatatatgagagtttatttcctcataa

SEQ ID NO: 477006 - DNA, 630 bp, Homo sapiens
ctggaagtgtgcacgttaagaagctgctctaagtcatccctgtccatggggtttttccttacagcatgagacagtccggctatgccttgtcctaattgcaactcaaaggataaggtcaaactacattttaaaaagggcaaacatcaccaggaggaaattttctagagttagaaaaactgtaaccaggaatctagagatgacatttatcttttaaagtatcaatcagagatgcattctgtttcaggcaacaaaatagcaatcagcacagcttaaacatcacaggttgattttcctcgtatttctagaagctgggagatgggtggctgcttcttgtgcttcattgacttgatagttggcatctctgtgagtctttggactttcctttgtggctccaagaaaaagaaaacatataaagcagtatttawatatgtgtaagcacatatgtgagtatgcatgtgtgcaagtatgtgtgtatacatgcattgtgggctagggaggaaggaatttggaatggatttggggttagcctgtgagtggtcctcacactgtacccaaaagttaagagaccactaaatgaagaagaaaccagcatttcccaagcttttattatgaatttgagaattagttggt

SEQ ID NO: 477007 - DNA, 580 bp, Homo sapiens
ccaacattttgattgttttcttgtgggattcagtcctagtattgagtgcccactaacaactgccaaatttagtcatccaaatcaccacgacaataagctccaggtattgaaacatcaagactgaagccaccacttacgatccartcaacctttttaactgtcagtgcttccagtctttgccgaaatacacagcattaaaattcataagtcaacccatgtccgtgcgtgctttttctctcccatatccagttggtcacttgcttcatgctgatccatccatagcggtcgtggtccacactccagccctcctttacatcctccagacagatagggttctttctatggcttaaaggtgccaacctcattcctgtctcagggacctcacacaattgctcctttagcctgaaacaatcacccactaatctctgcatagctgagaccaccttgttattcaggtcttacctgaaatgtagcttcctcagagaggtcttgtctggttaccccactgaaattagcatccccctttactgtgttccattaaacctcccacttttctttcttttgaagcatttaccatcat

SEQ ID NO: 477008 - DNA, 580 bp, Homo sapiens
ccaacattttgattgttttcttgtgggattcagtcctagtattgagtgcccactaacaactgccaaatttagtcatccaaatcaccacgacaataagctccaggtattgaaacatcaagactgaagccaccacttacgatccaatcaacctttttaactgtcagtgcttccagtctttgccgaaatacacagcattaaaattcataagtcaacccatgtccgtgcgtsctttttctctcccatatccagttggtcacttgcttcatgctgatccatccatagcggtcgtggtccacactccagccctcctttacatcctccagacagatagggttctttctatggcttaaaggtgccaacctcattcctgtctcagggacctcacacaattgctcctttagcctgaaacaatcacccactaatctctgcatagctgagaccaccttgttattcaggtcttacctgaaatgtagcttcctcagagaggtcttgtctggttaccccactgaaattagcatccccctttactgtgttccattaaacctcccacttttctttcttttgaagcatttaccatcat

SEQ ID NO: 477009 - DNA, 640 bp, Homo sapiens
tgcttttctctcctagtttttggaaatgtgaggcttcttagaaattcaaatgttgtgtcataacctaacatagtttgcataattgcagagaactcaccagatgactgttgtatcttatgaggcccctccccagaactcctggagagacctaaagtggggggcagatcctatcaccacagctttgtattacaaaacttcattaaatatattatgcaatgcattactgctgtatgcatcataaatagacacaccatccttcatgtctcaaatattgattatctaaactatcccacatcatctatttggacctagggatatgaagatacaaagatgcagtctgttggcagaataaaattcttaaacagatcttagaatagtgtgagttgttcctggaaggtacagagtgccrtgggaactcagagaacagattcccaccccagtaagaattctgggatcactccaccccaaaagaatgagggttatgttgtccttagtgggaggtggtagttgtggattaggtcctatcatttcacacactgaccatctctgcccagtaccctgaatgagtgctccatgacatcatcctctttgacctctggccaccttcccttctcctagccttgctcctcaccaggtaatc

SEQ ID NO: 477010 - DNA, 411 bp, Homo sapiens
cccacccccaacccttcaccctcaagtaggccctggggtcttttgttcccgtcttagtgtctatgagtgagtactcatagacatagtagtgtctattagctcccacttataagtgagaacaagggcatttgcttttttcttcctgcaagttcccataggtggcagctggataaagaaaatgtggtacatacacaccatggaatactatgaagccacaaaaaagaacgagatcatgtccttcatggcaacrtggatggagctgtggaccattatcctaaacaatatgaattcttaagaagccaacagggaggcccatttaaaagcagccacaaaggggtacataaaagtgaagacaggttttaatgacataggtttcaagttaactactgtttgttgatctcttgtggtttc

SEQ ID NO: 477011 - DNA, 596 bp, Homo sapiens
ctggatggattttaaccaagtgatcccacctctatagccagcacccagattaagaagcagaacaagactcttcctcttatagccccttctaatcaccagcttctccccagagggaaccactcttctgacacttaactgtacarattagattggcctgtttggggactttctactgatggacccatgctgtgtatactcttttctgtcaccttctttcagtcatcatggttagtcagatgcatgttgttgttgcatatcgtttgttcattctcctccttgctgctgtgcaatataccattacgggaactaaccacattcaattctattttaattgttagtatttacaatggctccctaactgggatctcttttcaaacaattcactcttcagtccctgatatgatttggtgctgtatccccacccacatctcaccttgaattgtaataatcccctcgtgtcatgggaggcatccagtgggaggtaattgaatcacggggggcaggtttttcccatgctgttctcatggtagtgaagaagtctcacgagatctgatggttttataaggggagttcttctgcacacgccttcctgcctg

SEQ ID NO: 477012 - DNA, 596 bp, Homo sapiens
ctggatggattttaaccaagtgatcccacctctatagccagcacccagattaagaagcagaacaagactcttcctcttatagccccttctaatcaccagcttctccccagagggaaccactcttctgacacttaactgtacagattagattggcctgtttggggactttctactgatggacccatgctgtgtatactcttttstgtcaccttctttcagtcatcatggttagtcagatgcatgttgttgttgcatatcgtttgttcattctcctccttgctgctgtgcaatataccattacgggaactaaccacattcaattctattttaattgttagtatttacaatggctccctaactgggatctcttttcaaacaattcactcttcagtccctgatatgatttggtgctgtatccccacccacatctcaccttgaattgtaataatcccctcgtgtcatgggaggcatccagtgggaggtaattgaatcacggggggcaggtttttcccatgctgttctcatggtagtgaagaagtctcacgagatctgatggttttataaggggagttcttctgcacacgccttcctgcctg

SEQ ID NO: 477013 - DNA, 616 bp, Homo sapiens
ttcttttctctttacacttgcatggcataatatattaataaaaattaagaaatttttagtgaaaccaatgaatttgctttcagaaaacagcattttacaatatctattgggtaattatatcaaatactcgattccatggttkctggtattggataaatgactaaatttgtaattaaacacatcttttggactaaagttactaaacagatagttgagtcaattacataacagcaatgggcattacattagattttatcacaacagtaattactgtgtgatgttagattctattttgaattgctctttctaaagatgggttatcagcaacagaatatgcattgggcttttatgagcggtctttgcactactcatatctgataagggccaaatcctatgataagaggtcagagactggtctggcagtaaagagccttcattaaattatttttaatagtaagcatttattgaagcttattacgttagaacctgaagagtcacagacatgtaaccttccccatgccttctggggtccttgctctaatttgggagatacaacacatagagaaaaaggtacatgaggcagccttgccaccggaagaaaatggcactcaaattc

SEQ ID NO: 477014 - DNA, 605 bp, Homo sapiens
tcctaataaaagaagaaccttgccaggtgcagtggctcacgcctgtaatcccagcactttgggaggccaaggcgggtggatcacctgaggttaggatttcgagaccaacctgaccaaaatggagaaaccccgtctctactgaaaatacaaaattagccaggcgtggtggtgcatgcctgtaatcccagctctcgggaggctgcggcaggagaatcacttgaacccgggaggcggaagttgcagtgagctgagattgtgcattgcactccagcctgggcaataaaactccatctcmaaaaaaaaaaaaaaaaaaagaatcttgggagacagtgtgcctccacttttttgtctattggttgtattacaagttctttttcattttctgcccttgattgcacaatctccttctctccctggtctgcccagtgcagacagatacagatgagccggctcagtctgtgtccatacagatgcggaccagctcacagtactgctcttatgtgagctgctcagagttctgtgattgaaggacagggaaaaactgccaactaaagcaatagaatcattggatggacactggccatattttgcaaatctaaaagctg

SEQ ID NO: 477015 - DNA, 555 bp, Homo sapiens
tccctctcagattgacattccctgagggcaaataaggaatacaaagcacgtgtgtccaggaagaggacatcatccttttacgtaaatgtaaggtcaccgtcttgggagaacaaagactgccccgtcctcagcctccctgctctctgaattattatctaaacggaaacacagacactctctgggcagyacctcagcctgtctctgggcacacacacaaagatgctttcactaaggagaaagcataaagatattgtggctgggcccgggcataaatctctcttgtcccaggaggagacgtggctgcctgatcctcggctgaaactttggctgcgcaggtctgcgggcccacctctcccctctaatttgatttcctgagtcactgttaagccaggcctgggttcataccctgcgtaattttcaaagcattaggttttgaaaagatcttggccgtctgcgcaaccgaaatcctggctcctacacaatttctcccttctctggaaatctgtaagaggaacaggcttgtgagcatccaggggcctttctttattaactggg

SEQ ID NO: 477016 - DNA, 555 bp, Homo sapiens
tccctctcagattgacattccctgagggcaaataaggaatacaaagcacgtgtgtccaggaagaggacatcatccttttacgtaaatgtaaggtcaccgtcttgggagaacaaagactgccccgtcctcagcctccctgctctctgaattattatctaaacggaaacacagacactctctgggcagcacctcagcctgtctctgggcacacacacaaagatgctttcactaaggagaaagcataaagrtattgtggctgggcccgggcataaatctctcttgtcccaggaggagacgtggctgcctgatcctcggctgaaactttggctgcgcaggtctgcgggcccacctctcccctctaatttgatttcctgagtcactgttaagccaggcctgggttcataccctgcgtaattttcaaagcattaggttttgaaaagatcttggccgtctgcgcaaccgaaatcctggctcctacacaatttctcccttctctggaaatctgtaagaggaacaggcttgtgagcatccaggggcctttctttattaactggg

SEQ ID NO: 477017 - DNA, 587 bp, Homo sapiens
taggatttattgttatgcccattgtacagatgaggaaactgaggcagagagctccagtaactggcccaagtgcttggcaattgaaatagagatttgaacccaggcagtctgactccagagtcctcctcttaccactacactctagagacaccccagatgagtccacacttcctcaagaaagctctccactrccaggcaaggtttgctgcctccccctctgagctctcacacggctggtgctctgatcatagcatctaacttctgcatcataatcgcctgcctcgaagattgtctccaaatagggccaccgaaaattcctcctaatcctgtatgcgcctgccagtccggacaccaagaatcggtgctcttctctcctctccttggtctggccttgtgacttgccttgagcaatagaattcagggagcccaggccttagaagacagcagctctcatctcctctctcagaccccggccgccatgctgtgaggaagtccaggactactaaaccatgagatgctctgtggagacgcctcatgggcgaggccaccctggacgttccagacccagtggagttgctgacaaactc

SEQ ID NO: 477018 - DNA, 619 bp, Homo sapiens
tggctgagcctagtgacagaaggagagccagggacacgctgcttgcaagaggcagtcccttgtgatgtcctgcagagcaggagtgggggaagggaagaagcgacagcagactcaggaccagcacgtgtattcactgcaaaatacatgccctcccgcatcaaaaaggttaccatctttatttcctctctgcctttcttcttcctttccatcccaactggatcaaaagctgatagattcaaaagtgatggcggaaattttccattcatttattaagtaaatagttactgggcatctgccatgtgctgggtactgagactcagagaggtcagagacaaggtcgctgctcccttgcactagggatgcactagaatgcactagtttgcattctsctggggggtggggatgtcacacggtaaacaagaaagaaatgaatagaacaagataatcccgcacagtggtggagtagctatgaagaaaattgaaacagagtggcgagcgatgagaacgggcttgcgtagggtggaggccagagaggccctcccagagcagctgacgtcctagtcaagactggaaggatggaaaggaattctcttgcagagagaagtaaaggcatatccag

SEQ ID NO: 477019 - DNA, 626 bp, Homo sapiens
aattgatcttgtggtgtcttatacatggtcctgttgaccctcacagtggacggacagctctgtaatgcagcctccttcattagttcctttttgcaaatgaagaaatggagacggggcagctttcgtctattccctggaaagagtatttccagattgggttcgagatctgcaggcaggaggtttatcaggttatgctcttggggccacrtccgtggaaagggagtaggagcccagggaagaagttggctgggacatagtctcaaggagagcctcagccaacctcctggtgggttctgaagctggaagagccttctggggtgccctggggttgggcgagggggctgggccttacacccagccacctacctccccacactggccagtcatgggatacaggccacttttggagagggtggcatgaaatttatgagcctcttcccacgtttccttcctgggactgtcataaccaggtatcacagaacaaatggctttaaacaacagaaatgtattctttcatcactctggagtccagacataggaaatcaaggcatctgcagggttggttccctctgtgggctctgaggaaggaccttcttctggctctggggacagccagccacccttgg

SEQ ID NO: 477020 - DNA, 626 bp, Homo sapiens
aattgatcttgtggtgtcttatacatggtcctgttgaccctcacagtggacggacagctctgtaatgcagcctccttcattagttcctttttgcaaatgaagaaatggagacggggcagctttcgtctattccctggaaagagtatttccagattgggttcgagatctgcaggcaggaggtttatcaggttatgctcttggggccacatccgtggaaagggagtaggagcccagggaagaagttggctgggacatagtctcaaggagagcctcagccaacctcctggtgggttctgaagctggaagagccttctggggtgccctggggttgggcgagggggctgggccttacacccagccacctacctccccacactggccagtcatgggatacaggccacttttggrgagggtggcatgaaatttatgagcctcttcccacgtttccttcctgggactgtcataaccaggtatcacagaacaaatggctttaaacaacagaaatgtattctttcatcactctggagtccagacataggaaatcaaggcatctgcagggttggttccctctgtgggctctgaggaaggaccttcttctggctctggggacagccagccacccttgg

SEQ ID NO: 477021 - DNA, 598 bp, Homo sapiens
agactccatctcaaaaaaaaaaaaaaaattctagttataacctgatgactctttcctctctcttttttcttctgaggacattgagtattttaaaataaattccattatgtttatacaggagtacgttcttaagggaccagcagcaaccctgtaactaactacacttcatcttgctttctaaattcctatctctgtttctgtgtgtatgcttttcatctctggatttcatgtttctctctcacttcaatacctctggcctctctcttctaatagaaacacagatactcctctccttacaatgggggytatgtcctgataaaaacccgtcttaagtcaaaagtgcatttaatacacctaaccttctgaacatcatagcttagctagttgaccttaaaaatcccagaacacttatattagtctgcagttgggcaaaatcatctaacacaaagcctattttgtaataaagtgttgattatctcatgtaacttattgaataccgaaagtgaacagagtggttgtatggatacgtcaagtatagtttctactgagcatgcatcgttcgccgttgtaaagttgaaaaatcttaaggcaaagcatc

SEQ ID NO: 477022 - DNA, 245 bp, Homo sapiens
taccactatgcctccttaaagccctcggtgttttgtattcwatcataaaatgaagacctccaaactatgccagaaagaaaaagacatgtccatagattcaaagtttaatgacatgaagacacacagacatcagtttaactttctcacatccatacattctatgtatatttatcagggaccaaagagaagactcaagtttataccagagactgcagatgctaatggggagaaaactgtgtgtatcc

SEQ ID NO: 477023 - DNA, 245 bp, Homo sapiens
taccactatgcctccttaaagccctcggtgttttgtattctatcayaaaatgaagacctccaaactatgccagaaagaaaaagacatgtccatagattcaaagtttaatgacatgaagacacacagacatcagtttaactttctcacatccatacattctatgtatatttatcagggaccaaagagaagactcaagtttataccagagactgcagatgctaatggggagaaaactgtgtgtatcc

SEQ ID NO: 477024 - DNA, 245 bp, Homo sapiens
taccactatgcctccttaaagccctcggtgttttgtattctatcataaaatgaagacctccaaactatgccagaaagaaaaagacatgtccatagattcaaagtttaatgacatgaagacacacagacatcagtttaactttctcacatccatacattctatgtatatttatcagggaccaaagagaagactcaagtttataccagagactgsagatgctaatggggagaaaactgtgtgtatcc

SEQ ID NO: 477025 - DNA, 527 bp, Homo sapiens
ttaagaaaattgagggccagagtacaaggcccaggcagtgtrtacaccttggagaaaacaccttttgcattctgatgctttgcatacaatttcattatttatgtaatcctatcaaaacatatacaatgcccaaatggatgtcaggaaagttattgacattactaataatggtgcttttcatttatagagagtgcctttttctgagacagtgaactatttttacattgggcatgaggctttttaggagaattaatgcttaaaatatcccttcagtgtagcatgtgggaaatgttatagatggagaagaaaacagattaatataaaaaatgtcaagagtgcataataaaaggcatcccattcagttccctggcccattaccaccagcccacacagaccacgtgggcacagccacagccgtgagccatagcctgtgcttcctgacataactactttccccaggaatgaatcaggagtcccctgcgtgaccccttggctgggccagtcagtgccacccagttccaacatcc

SEQ ID NO: 477026 - DNA, 527 bp, Homo sapiens
ttaagaaaattgagggccagagtacaaggcccaggcagtgtatacaccttggagaaaacaccttttgcattctgatgctttgcatacaatttcattatttatgtaatcctatcaaaacatatacaatgcccaaatggatgtcaggaaagttattgacattactaataatggtgcttttcatttatagagagtgcctttttctgagacagtgaactatttttacattgggcatgaggctttttaggagaattaatgcttaaaatatcccttcagtgtagcatgtgggaaatgttatagatggagaagaaaacagattaatataaaaaatgtcaagagtgcataataaaaggcatcccattcagttccctggcccattaccaccagcccacacagaccacgtgggcacagccacagccgtgagccatagcctgtgcttcctgacataactactttccccaggaatgaatcaggagtcccctgcrtgaccccttggctgggccagtcagtgccacccagttccaacatcc

SEQ ID NO: 477027 - DNA, 377 bp, Homo sapiens
ttaaaaataaataaagacaaaacaaaggtaaaaattccacatatgcccagatcaatcaagtttagcatacacatccacaggggggtgtagcttttcccttccttctaggctttaatgaccactttatctcaaattcataagaattacattaacatggacccacaaaaattgagtccctttcttcagcccacttgaagatgtctaatgcgtttcactttgcaaaccaactcgagataatcctgaagaaaagaaggaggcaggagctgtgtagactgtcccaggactgcagtgccaggatgggacagtgatcagtaccaaacagtgctccccagggagtcacccaccacgtaccyctcagcaccccacacgtgggctct

SEQ ID NO: 477028 - DNA, 543 bp, Homo sapiens
gacagtaaacaatgtttgatgaatctacagtctttatactagcgggagagtccaaagaccaataaatccagggtacaattaataattgagattcctggaagctctaaaaggaaatattaaaaatgcaaaatcttgttgaaaagcataattaagcgcatcaatgcctaaagtttaaaggacaagcaatttctcattaaagttaaaaatgtcaattttatataagaatatattaccctaactttctttgtggggtaggaggaggatatagaaaaacagtttttatagacttcattttaccctaacttaaaggagcatcctgttccatttccaaagtcctcactgccccaagatcctaaaatagtataacttcagatgagtaatagctaaataaatttatcacacatcagaaccctttactggtgcacasatgttttgacaatggtgctgatggacatgatgggtttactgtgtatgtggaggaaattaacaggcatgtagactgcatacctttttcttaatggctgatgtgcgtctcttccccat

SEQ ID NO: 477029 - DNA, 543 bp, Homo sapiens
gacagtaaacaatgtttgatgaatctacagtctttatactagcgggagagtccaaagaccaataaatccagggtacaattaataattgagattcctggaagctctaaaaggaaatattaaaaatgcaaaatcttgttgaaaagcataattaagcgcatcaatgcctaaagtttaaaggacaagcaatttctcattaaagttaaaaatgtcaattttatataagaatatattaccctaactttctttgtggggtaggaggaggatatagaaaaacagtttttatagacttcattttaccctaacttaaaggagcatcctgttccatttccaaagtcctcactgccccaagatcctaaaatagtataacttcagatgagtaatagctaaataaatttatcacacatcagaaccctttactggtgcacacatgttttgacaatggtgctgatggacatgatgggtttactgtgtatgtggaggaaattaasaggcatgtagactgcatacctttttcttaatggctgatgtgcgtctcttccccat

SEQ ID NO: 477030 - DNA, 581 bp, Homo sapiens
ctcactaagtgcttgtaaaagagaatcagataatcagataaatataagttgaacaaaagtaggaaaccaaaaatagcatagtaagtagccttggaatagagcaaaactaactcgaatccacttactagttgtgtacactccagaaagtgactcaatttctatgccttggttctttcatctctgaaatcagggccgaaatgtcccctttgctgcagtgacacatgattaataaactattcaaagtctwaggcactgagtagctgctcaaaaagcagtggctaggagttgggttgtttttgccaaatctggggaatcttccaggtgaaaacatctctggaattgaaaaatcttagaaggatctggagcaacggctggatttccctgaactgaatgtagcaacatttacatttttcataccacggaaaattgagggacgatccaggaaaacatagacagcttgagaaaatttaaaggttccacagtgtttttccattcggggacaatagaaaacaggaaaacattaataacatgtcactgcccgactgccagcagaaccaccccaggaaagcatcttttggtat

SEQ ID NO: 477031 - DNA, 563 bp, Homo sapiens
ctttgcaagcatagcagcttgctcaattctaggcatactcaagacccattattcttcctttcgcttctgaagtcctaggatactgaggttcagagaaggtcaatgacttgcccaaggtcacacgttaatagacaaattatcaaatttctctctcaacttgataagttccaaagctcaggtcaggactcactctctccaaccaccttcccagatgaggtcgaagcccccatgataggyacagtcttgtgtgtccccctcctccttcccatgtaccatggttgcaccattccatttcttcctttgaaaatttgatgggtgccaggagcggtggctcacacctgtaatcccagcactttgggaagctgaggtgggtggatcacctgaggtcaggagttcaagacaaggctggccaacatggggaaaccttgtctttaccaaaaatacaaacattagtcaggtgtggtggcatgtgcctatgggctgaggcaggagaatcgcttgaacccaggaggcagaggttactgtgagccgagatcgcaccactacactccagcctaggtgac

SEQ ID NO: 477032 - DNA, 508 bp, Homo sapiens
tctggtgagttttagtggtccggtgagtttcagtggtcaggtgagttttggtgatctggtgagttttagtggtccggtgagtttcagtggtcwggtgagttttggtgatctggtgagttttagtggtccggtgagtttcagtggtctggtgagtttcggtgatctggtgagttttagtggtctggtgagtttcagtggtctggtgagtttcagtggtctggtgagtttcagttctttgatactttttttgagaggctaaaggtcctttcctgaggaagggactcagatacaacaaatacaaagaaaggtaaatgtctatgtttatccaaaagaacagtttatgggagcactgggccagtttcaccaccataaattgataactttgtttggcctggtacatccagttacatcctcaaaacctatttcttcaggacttctgcttccatatgtaaagaggctaagttatttggaataactatttcttaatgtaaatttatgtaatgcctac

SEQ ID NO: 477033 - DNA, 508 bp, Homo sapiens
tctggtgagttttagtggtccggtgagtttcagtggtcaggtgagttttggtgatctggtgagttttagtggtccggtgagtttcagtggtcaggtgagtttyggtgatctggtgagttttagtggtccggtgagtttcagtggtctggtgagtttcggtgatctggtgagttttagtggtctggtgagtttcagtggtctggtgagtttcagtggtctggtgagtttcagttctttgatactttttttgagaggctaaaggtcctttcctgaggaagggactcagatacaacaaatacaaagaaaggtaaatgtctatgtttatccaaaagaacagtttatgggagcactgggccagtttcaccaccataaattgataactttgtttggcctggtacatccagttacatcctcaaaacctatttcttcaggacttctgcttccatatgtaaagaggctaagttatttggaataactatttcttaatgtaaatttatgtaatgcctac

SEQ ID NO: 477034 - DNA, 508 bp, Homo sapiens
tctggtgagttttagtggtccggtgagtttcagtggtcaggtgagttttggtgatctggtgagttttagtggtccggtgagtttcagtggtcaggtgagttttggtgatctggtgagttttagtggtcyggtgagtttcagtggtctggtgagtttcggtgatctggtgagttttagtggtctggtgagtttcagtggtctggtgagtttcagtggtctggtgagtttcagttctttgatactttttttgagaggctaaaggtcctttcctgaggaagggactcagatacaacaaatacaaagaaaggtaaatgtctatgtttatccaaaagaacagtttatgggagcactgggccagtttcaccaccataaattgataactttgtttggcctggtacatccagttacatcctcaaaacctatttcttcaggacttctgcttccatatgtaaagaggctaagttatttggaataactatttcttaatgtaaatttatgtaatgcctac

SEQ ID NO: 477035 - DNA, 372 bp, Homo sapiens
gctcccacagtgcacagctgcaaccacaccctgaagttttccccagagcctccttcaagtaccttcccatgaacagctttctcaggcatcttagagcagcagtccccaacctttttggcaccagggactggtttcgtggaagacaatctttccacagaagggagttgtggggatggtttcagggtaaaactgttccacctcagatcatcaggcattagattctcacaaggaacatgcaacctagatccctcacatgcccarttcacaatagggttcgcgctcctatgagaatctaatgccaccactgatctgacaggaggcggagctcaggcaggaaagctccatcaccagggcctcacctcccactgtgtg

SEQ ID NO: 477036 - DNA, 440 bp, Homo sapiens
gaaatttatgctcaaggacacactagcgtcattggtggtgcacaagggtagactcatgcagtatgtacattttctagccatttaaagtccttttatatgcatagatctagaaggatctccatcaagatgttaagaggaggtgatgggatgacaggcaggaattttttttttttttaatctacattcagggatgtggtgacagagggaatcttgggtaaattactcgacacctctagacctcatttcagtgtcctcggctgcaaaataatagcgcctacctcatagtttkttttgttttgttttgttttgttttgttttgttttttgagagagggtctcattctgtcactggagcatagtggcatgatcacagcttgattacaactcgctgcagcctctatcttccaggctcaagtgatccccccacctcggcccctcaag

SEQ ID NO: 477037 - DNA, 473 bp, Homo sapiens
tgttcccaagcaatacccccacccccaatcaggcatctcccagccctgagcaatgtccccacaacaggygcctcccagccctgagcaatgtgcctccccacacacaggcgcctcccagccctgagcaatgtgccccccccgacacacaggtgcctcccagccctgagcaatatgcgctgcaggtgctttccagcagagcaatgtccctcctacaagtgtctcccagccctgagcaatgtcccagacaggtgactcccagccatgagcaatgtcccagacaggtgactcccagccatgagcaatgccttcatttgcacacagccccaacgcctgctaatggggttccagggggcagaggagctgggacacccaaggacacactgggtgggttcctgcccctggcggctggacacgcagatgcccgtgcacacaggccagtgcatgttgaggacaagcaggtgacataaggaaca

SEQ ID NO: 477038 - DNA, 469 bp, Homo sapiens
cctgcagcgacggcagatcttcagccagaagctggtggagcaygtcaaggagcaccacaaggtgagcggcccccggccccgctgtgtgaagatggtggcaccagcactgcctcagcacctaaccctgtgcttggagcatccctgccactcacagcttctcccgggatggaactgggctgggttcaccctgagctgagggctggtgtgctcagggtgcagccgcaggcactgaggaggtccccaaggcgttcagcgagcgcggaccatgggaggccttgtgctctccctccaagctgagcactgggcagaggctgagtgacttgcccgaggcggcccggctgggacgtaagcacaggcctacctcacatgcagtctgcccttgtctcagatgtgcccagggtcacccatctactccttctccccaggccttcctggcctccctgagccccgccatggtggtgccggagga

SEQ ID NO: 477039 - DNA, 576 bp, Homo sapiens
ctgcccaggggctgcaggaggacatggtgctgtcctccccctcacggagcccccgttctgggtttccgtccccttcctctgccagctcaggtgggtagagccaagtccatgagagggacgaggggtggggggaaaaggcccgcggcacaaagctggaatgggccatgtttcgcacgttgccatatttttatattggggattggggacctcggaccttcacatgcaaaatttatgcgaaatgagaggcaaaccaaggccctgctgctctgaaggtctggcctcttgtgtctcctaatggtgacccctgggccccccagccgcttgtgtctaaagtaagagcacgtgtgcgttggggcaggaaacagggaaaaggcgccaattttactaaaatgtactaagcaggcaaatgcgccagacacgccacaaagtactttagggaaaggcaaagcgggcgggggagggggcctgccggcagagaaagtgcggagagggcagagcagcggctcggggcgtttctgcaggtggacatgaaacgcacratatgcaaatgaatgcaaagtgtatgcaaatgacctg

SEQ ID NO: 477040 - DNA, 575 bp, Homo sapiens
ctacagcagcctggcaccaagcctggccaatggaaagcatttgacaaacgaatggattaacctgcaccggagttagctccagcagagacagtgagtcccacaggtttaggttatctgtgtgacttatcagttctgagtcactaccccgcaaagccccacttccctatcacctgccctgagccctcacaggtggagatgacctctcctcaagtcctccaggggatctgatcaatagggagctgtgtgytcccccaccccgtccccatgcaccctgtcactcgatcatacaggaatgattcatagaggtctaaccaaagttattctacagccctgcataccagatacacagaatattaccaaagcattaccaaagcatgcaggtaatagcacctgttgagcattgactctgcttcaaatccgctagggccctttggatgtgtctccagatatgtgcaaggtacagcaagtgcctctgtacagcaggccatgaaggacatgcccaccatcgcatcttatctcctgtgagtaccagccccacaccttccctaatttcaggatagttgctttcagggaga

SEQ ID NO: 477041 - DNA, 458 bp, Homo sapiens
aatgcccttaactagaagaggtagccgagtagtaacgagaacatttttttaaaaatcatttgtttgtatgtacttcactcctgacaattctggatagggtcctgyttctgtctattaaaaaaaagtgtcctaggtgattctgatgtgacgtctagttaagaacttctgtgcaatgggaacacagtgaagtaacggttaattttggaggtgcagagcattgagaatgctacagaggaggaggcatctgaaggatcattaggagcttactaggcagacaaggtagggaaggatgaggtaacctgaaagagggaagaaaatgagttagagaggagtgcaggtgaagaacccaaggaaacgcagcctgatgtagtttaagaagggattaggttggaagggatgagatgggtcctgtctcaccagcaaaaaattcatgactaaaatgttaccttatgggcact

SEQ ID NO: 477042 - DNA, 550 bp, Homo sapiens
ccctttgaaatagacagtggaagggggaaaaataggaaaatatgaactgggaaaatgtatcattaaactcccctgctttcccagtcatgaagatgtattctaaatattttctgaggtgtctgtgtatatcctaaactggaatgaccttttttttycttttcttacacatggtataaaaattttaaagtgcaaagagtatgtagtaaaaataagcctttttaggtatcctttcagaaataacctatacacatacaataaaacatgtgtgtcatgtattttgaattcttattctttgcctgtatgaagcatggcctcttggatagcagtaacgtttttgttgtttaaaatggttagattttatacagagaatgaaaggctagtggtcgcatatatttgcaaagccttctataatatttgaaggccttctacataacttttctcctgatgcttataatagccccatgaggtaggtaaagcaggatttacctcttttatctacacaaaatttgaagcttaaagaatgttatgtgataaatgtgcagtggaactg

SEQ ID NO: 477043 - DNA, 550 bp, Homo sapiens
ccctttgaaatagacagtggaagggggaaaaataggaaaatatgaactgggaaaatgtatcattaaactcccctgctttcccagtcatgaagatgtattctaaatattttctgaggtgtctgtgtatatcctaaactggaatgaccttttttttccttttcttacacatggtataaaawttttaaagtgcaaagagtatgtagtaaaaataagcctttttaggtatcctttcagaaataacctatacacatacaataaaacatgtgtgtcatgtattttgaattcttattctttgcctgtatgaagcatggcctcttggatagcagtaacgtttttgttgtttaaaatggttagattttatacagagaatgaaaggctagtggtcgcatatatttgcaaagccttctataatatttgaaggccttctacataacttttctcctgatgcttataatagccccatgaggtaggtaaagcaggatttacctcttttatctacacaaaatttgaagcttaaagaatgttatgtgataaatgtgcagtggaactg

SEQ ID NO: 477044 - DNA, 600 bp, Homo sapiens
agctggccagtcaaacattggaaaccagatgtattttggctctaaagtcttgtgggttttctttgaacccacaactactctctatagattggggacgctgtgccaagcagctttgtagactaccaattactcagccagcctgggaatcgctgcagcattattgacaatagccaaaaggtggaagcaacccacgtgtccatcagtgaatgaatgaagaaagaaaatggtgcatccaagtaatggaggattattcagctttaacaaggaatgaagggtgggcacctgctacaacatgaagcttggggacattctgcaaaagagmcagtcaccaaagacaaacactgtgtgattccactttgataaagcacctagagtaggcagaatcatagagacggaaagtagaaggcaccggacgcagcggctcacgcctgtaatcccagccctttgggaggccgaggcaggtggatctcctgtggtcagaagtttgagaccagccaggccaacatgatgaaacctcgtctctattaaaaatacaaaaattagctgggcgtggtggcatgcgccagtcatcccagttactcaggaggctgagacaggaga

SEQ ID NO: 477045 - DNA, 546 bp, Homo sapiens
tgtgagacaacatgtttccattgctttaagacacccagttgtggtgttttgttatggaagccccgggacactcacacacagggtttgactgcgtcttcctgagtttaatcacccaggcttgaaataccccacatgcaggcaaattctgtgtttctcatcggaaccacaatcacatcttcctggcctggacatcaaaggcattttggtggggacaggatttgctctgcggcggcccccagctttgaccgtagttataatccgaacgttcggcatttggggggaaataaatgcacccacataattaattayagaaaggccactagggaggctctgagagtttctagggtttgagtttgtcttgggttccaaaaaagggctctgaaaaactggatgtccttccaacacaatagatccctgttctttcatgtagcacaaagtttgagaacctgtcactgagatcattgattctgggagaacatgtttgttacatcctcagggaattcttggtcctcatttccaggtagggaaaccaaggttggtagaggc

SEQ ID NO: 477046 - DNA, 573 bp, Homo sapiens
aatctcctgcttcctgcacagactcccacactagctgggctccagagacccctgtgccagcctttcagagaatgaacgagcctccatctgctgccaaagttggggcacctggctgtctgcagcagagaaaaaagctgaggccctgcttctccccactcctagaagcacctggtgctacccattcctgagcctttaggggttctctgccccacatsgagggatggagttttccccttctctaccaaggctgcattaggattcaacttcccgggggcaggcgggaggcgaggtcagttaacactcctccaggggcctgtagcttccaaatttctctgcagtttccacctctcttgttgcattcccaggtttgtgccttaaacaaagtcccttcagtgtcatctagcgatgcttcaggaagaagccccctgctacccccaacaacagcctcagctctggagacaccgcccctctccccgtgcccaccggcacccactcctaatgtagagaggcagagcatgcgtccaagaataaggactgtctgctccgaccttgatgcctctcacagcaccacca

SEQ ID NO: 477047 - DNA, 573 bp, Homo sapiens
aatctcctgcttcctgcacagactcccacactagctgggctccagagacccctgtgccagcctttcagagaatgaacgagcctccatctgctgccaaagttggggcacctggctgtctgcagcagagaaaaaagctgaggccctgcttctccccactcctagaagcacctggtgctacccattcctgagcctttaggggttctctgccccacatcgagggatggagttttccccttctctaccaaggctgcattaggattcaacttcccgggggcaggcgggaggcgaggtcagttaacactcctccaggggcctgtagcttccaaatttctctgcagtttccacctctcttgttgcattcccaggtttgtgccttaaacaaagtcccttcagtgtcatctagcgatgcttcaggaagaagccccctgctacccccaacaacagcctcagctctggagacaccgcccctctccccgtgcccaccggcacccactcctaatgtagagaggcagagcatgcgtccaagaataaggmctgtctgctccgaccttgatgcctctcacagcaccacca

SEQ ID NO: 477048 - DNA, 542 bp, Homo sapiens
tgggatgtgtgatatagaaaagtgtgagcagtttgggtgtggtgagtcacacctgtaagcccagtgctttgggaggccgaggaaagagcattgcttgtggccaggagttcaagaccagcctgggcaacatagcaagaccctatctctattaaaaattaataaaaagaaaagtgttagcttctttcttactagcaactgtaattgcaataagtgctacaaagaagggatgtgcttgctggtatccgagggatttggcctatttggggttccaggaaagctttcctgagcaaattgcctttaaactgagacccaccagatgaaggagacagagggttagggagagcatccaagacaaaggaaacagcacatgcaaaaagcctgaagtcacatacataccagcgcctttgcccagtggtagccaggctttgaagatggtcccagtgatgccagactctggtattcgtgccctggtgyaatcccctccccttgagcacagcctggacctagtgacttgcttctaaagaacagaatactgaaacagg

SEQ ID NO: 477049 - DNA, 453 bp, Homo sapiens
tcttctggacaatgggagcccaacaatgaacacagccttcagggcagaggggrgttctgcccaactatgccagttaggactctatctggaataatttaagcaaaaaaggaaatgattggctcataatggcttcaggcatggctggatccaggtgttccaagatattgtcaggctccatttcctttgtgattattttatttttgggctcttctcacggagccaaaaagctttagaaactcactcagcttcacattctctcaggtacaagtccagatggaaagactatctgccattctcccagcattcccagcaaaagtatcactgattctctttggttggtggctgtgtggcccaatcagagccaattactgtgactaggtaggtggaatggcctaggagctcacagatgggacatacgccatcaaaaccatatggactggtaataaggagggg

SEQ ID NO: 477050 - DNA, 506 bp, Homo sapiens
ctgtgcttccttctttttaaataaaagctgtttttcataggccttcacacaatgcttcacttgaagaaacgggtctgctaagagccagtacatatagtacacacagcacagtgcaaaagggcatgggcttaatggccaaaccgctcaggttcagaatctagctctgccacgtactatccacagcatcttgcaagtttcttaaccattctgtgcttggtcttttcatctggggttcaataaccagaacatggagaaattaacagtactatatcccattgggtrtaactgaggcctaatgaagttaacatatatcaacagggcctgacacacagaagtacgtaataaatgttagctctatataaaaattgtatctttattatatataaatgtataaagtatgttgaatctgaagttcagaaactacggagttagcccagtcttccaccatgcaaccttttacaacaaccctgttaagagttcctcttccacataaaaactattcagat

SEQ ID NO: 477051 - DNA, 353 bp, Homo sapiens
acagccaaacttcacccctctgaaggaatcctccttccctccgaggccctgagctcagggcctgattagaggcactaaaatgaatcacccaagccccaggatccccagaggaggagagagaaagccagagcactatgcatcatctatatttttctgccctgtagctgtgagttgctgagaaaacagcycagggaagtccctatatcagaggggctgacggcctcacgtccctctggttcccagggaaatcatgctttggttgatcatgggattttcttggaacatgagcctaggcataaatacacagcagaaaggccatcctggaagatgtacagcattttcctggggctagc

SEQ ID NO: 477052 - DNA, 353 bp, Homo sapiens
acagccaaacttcacccctctgaaggaatcctccttccctccgaggccctgagctcagggcctgattagaggcactaaaatgaatcacccaagccccaggatccccagaggaggagagagaaagccagagcactatgcatcatctatatttttctgccctgtagctgtgagttgctgagaaaacagcccagggaagtccctatatcagaggggctgacggcctcacrtccctctggttcccagggaaatcatgctttggttgatcatgggattttcttggaacatgagcctaggcataaatacacagcagaaaggccatcctggaagatgtacagcattttcctggggctagc

SEQ ID NO: 477053 - DNA, 467 bp, Homo sapiens
acagagattagtggtgctggagaaggtttcccaaggagaatgccacttgtgtcaggtcaagaaggatgagagggggttttccaaataactagaataggaagaatctgccaaaaaaaggaacatattctatgctgtaagtgtggaaaaggactgaccatcaagaactcatcttttccttggataagatcagttacattgatgttgttcacagacccctggggcagccaggaaagctgataggggagggaaaggacactaaatgtaattcttgcccctcaaccaacctgctgaggtyctgccctttagggattgatatggtaccagcaccaaagggtgatagcaggagtaaaattttattgttcaaaactgatgtaccaccttctaccacacttatctcttctatccacatttatctaccccaattatttaccactggctactgcagagaaaagaagtgggaacagtga

SEQ ID NO: 477054 - DNA, 625 bp, Homo sapiens
tctccctccaagcagcgtctggagactcatcagaccttcgaagccccctggcatcccattctttcccccgaggtactgtctctgcatcttcgatgtttttctaatccagcggaaccacagaatcagaacttccagaacttctgctttcagcctctcctcatcttatttgtcagtgataaagttgttcattgatgtgtcctaggcattctagtcagcatgtgcagtttgggggaaccgtgttatttagactgttccatctgtttgctctgatctttgatcacttggtagcatcctgacaagaccctagtctaagggcaacaaaggctatggtcatgaaatagcacatgacctgtgctacaaaccatccctgcagatctgtggccmcataatagacccagttctcaaatcaggctgatagggttagtgttggagtgttttggtcctgaccctggaagaaaaatacagggtgcaacttggtctctgcctgagagtgggaggtttgacagaggcgtggtgaaatgtcactctgttcaagagaggggggaaataataaggaagggtttctttttatttgttttcgtcctattttgtttgagaggggtaatattagtaataaaaaaaacat

SEQ ID NO: 477055 - DNA, 641 bp, Homo sapiens
taagagcagtttacctaatcctcaaaggaagcttacaaaggaggggatatttttgttgttatcatcatcaccaacaaatgagaaaagtaaaactgaagctgagaaagatgaagcggttggcccacactgtccagagaggaacctgggatcaaattttggatgtttctttccaaatctgctttctttcttctagttctagacccttacagtcagtacactgaagagggtgtgcctgacaactggtcacagttttcttttctttctttcttttttttaaattatactttaagttctagggtacatgtgcacaacatgcagattgttacatatgtatacatgtgccatgtggtgtgctgtacccattaactcgttatttacattaggtatttctcctaacgctatccctcctccctccccccatcccatgasaggccccggtgtgtgatgttccccaccctgtgtccaaggtaggtggtactggcagtattctgtaaatcacaggtttggtggataaaaggatatcgcatgtaattcatcaacactcacctgtatgtgagtgcttagctttggggcattgcattccaggacagctttctgacactatttttggagtgagactcaagtcttttaaattcagatgc

SEQ ID NO: 477056 - DNA, 545 bp, Homo sapiens
ctgagaaagatgaagcggttggcccacactgtccagagaggaacctgggatcaaattttggatgtttctttccaaatctgctttctttcttctagttctagacccttacagtcagtacactgaagagggtgtgcctgacaactggtcacagttttcttttctttctttcttttttttaaattatactttaagttctagggtacatgtgcacaacatgcagattgttacatatgtatacatgtgccatgtggtgtgctgtacccattaactcgttatttacattaggtatttctcctaacgctatccctcctccctccccccatcccatgacaggccccggtgtgtgatgttccccaccctgtgtccaaggtaggtgrtactggcagtattctgtaaatcacaggtttggtggataaaaggatatcgcatgtaattcatcaacactcacctgtatgtgagtgcttagctttggggcattgcattccaggacagctttctgacactatttttggagtgagactcaagtcttttaaattcagatgccc

SEQ ID NO: 477057 - DNA, 627 bp, Homo sapiens
taggtgcctagaattattctagacactgacttcctcttgaaaaacaggggaattgtctgttgtgcacccccagcagtgtggtgaagatttaattaatataaatcagtaattgtctgaataatgcagaacggtcagacacctggcaattggaaactgtgtaaatgttacacaggatgagtaataacagctaatggttgatggacaaatttccagcaaatttcaagtctctgtcaacctgttaagtgaatgaaagcagcactttcttgatagtttataattgatgcttttgtttttctggctgcctaggcgggggagagagacagagaagtgagcagcctgaacagcaagctgttaagcctgcaacttgacatcaagaatctgcacgatgtctgcaagagacagaggaagaccttgcaggacaatcagctctgcatggaggaggcaatgaacagcagccacgtaagggacttggcagcagcygctcacccctgctctcttgacttctgcctctgctcccttgggcgggaataatagaaagttcttccactgttcattcaggagtacttattaagcaagcaatgagagagaattaagagaattaaacacacacaccccaacgcacataca

SEQ ID NO: 477058 - DNA, 602 bp, Homo sapiens
tgactgaaaaagtgagttagtcctcatctgtgctaatggttgctgctgctaccttgtgaacaaggagaaactgattcaaaagccaaataacccctcatgcaattcagctcaaagtttgaagacttcctagattgttctatagacctcaacaccaagaatacatatcacaaatttaatagatcatgctgtatcaaaaggtcaaatatgaagcacttagaatttttcaactatacaaatgtattctctgggttctgctatggcccggacagtgttaacttcctttttctattgtgggttttggtcccctccccaggaaattaattcagtttgatgtatccaagtcttaagtttctcaataaagaaaaatatctccattaaaaaaagatagtgagacttttcggttcttaaatgaaaaaaaaaatcattagggattcagttatcagaacaatgccaacctagtcagcgcaaactagaacagggaataaaatggttaaaaagtattttgaaaagccagctttaggcaaatcagcagggcctgatgacatacttcgaagagtacttaaggaattggcargtgttattacatagctgcaagtgattat

SEQ ID NO: 477059 - DNA, 513 bp, Homo sapiens
aacacccttcggcagtgggaggaaatgactgttcatcagaaagtattttccaacataacaatagcagtgcccatatgtaaccacctcactctcccttcccttccacgacttgatcactgaagaaccgctataggaaaaaggctttgcaatataaacrggttcaatataagaagtctcaccactccccctccaaaatcagccctaccatcatctcacctttgctctttagggttacaagtgaagtgtttggcaaatcaccctacagggtacagggtggatcccagtataatattagataatatcatgtagacattgtctagaccaaaaagcttccccatccctatgacttgactagtaccccagacagctttaacccaatgagttgaatgtggacagatcttggagcccactgtaaccaaatctataatctgcagactcatctaaggatggaagatactggaccattcaaaattgtagtattgtcctaatgattattttaaatcgcatccacta

SEQ ID NO: 477060 - DNA, 532 bp, Homo sapiens
actgaggcacagacaggttgagtatcttgcccaaattcaggcagcctgtaagaggcagagtcaggatttgaaccctgagccctccctgtactgcttggctgtgaccgccatsaccacagtgtgttctgctgggcttaactggtgtccaggcacttggcttccagcacagcactctttcccttcctccttctcatattctctctcctttctcccttcctgtctgcctcctttcttcttcttctttttaattcttctccttaaatgccttctcactctgctctgggtgcagacttgacttttcctttggctcatttcttgccttttgtttcaggagtatacaccttaaatgataagaagcagtggataaataaggctgttggagataaacttcctgaatgtgaagcaggtgggtgctgagcactgagcacttaagagagcaggcaggcgtccagcggggaacgtcctagaggcacagccttccagtgcggcttcctctgagcacacaagagccaggaggagggatgtgggagaa

SEQ ID NO: 477061 - DNA, 532 bp, Homo sapiens
actgaggcacagacaggttgagtatcttgcccaaattcaggcagcctgtaagaggcagagtcaggatttgaaccctgagccctccctgtactgcttggctgtgaccgccatgaccacagtgtgttctgctgggcttaactggtgtccaggcacttggcttccagcacagcactctttcccttcctccttctcrtattctctctcctttctcccttcctgtctgcctcctttcttcttcttctttttaattcttctccttaaatgccttctcactctgctctgggtgcagacttgacttttcctttggctcatttcttgccttttgtttcaggagtatacaccttaaatgataagaagcagtggataaataaggctgttggagataaacttcctgaatgtgaagcaggtgggtgctgagcactgagcacttaagagagcaggcaggcgtccagcggggaacgtcctagaggcacagccttccagtgcggcttcctctgagcacacaagagccaggaggagggatgtgggagaa

SEQ ID NO: 477062 - DNA, 519 bp, Homo sapiens
atacgtacagcaaatccctgtgacacgcaatttacccttgaaacaaacctgcacatgtaccttcttgaacctaaaataaaagttggaaagaaaaaaaagagaaaatctgcttttgaatggcagtcctgatcatgtgctgctgttgaaagttctatccactcactttccaggacatcaattccttgatgctaccatcttctcgaatacacacacacacacacacacacacacacacamaaaggtgaataggaaagagaagatgatcagtgggaaaatgtgattaagctttcattgtattccagccactagacaagaatatttatttaaatatttttgtgtatttcaaagaaaaactattgtgtaacctcatttataactgaaagatataaggcccacaaaagctatcattcacaagttaagatgtcttataaagtgtcaaagtcactgcaccaagccatctcctccatgtattgttaaatgtatttaatagtctttggattattgaaaacagctgattaa

SEQ ID NO: 477063 - DNA, 580 bp, Homo sapiens
ctgctctatatccttgtcaacactaggtatggtcagtctttttaatttaagccattctagtgagtgtgtagtagtatctcattgtaattttaatttgtgcttctctaatgaccaatgatgttgagcatcttttcatatgcttacttgccatccaaacatcttgtttggtgaagtgtctcttcaaattttttaccctttttattggttttgtttttgtattttgggacagtttccctctgtcacccaggctggagtgcagtggcaccatctcagctcactgcaacctctgcctctgggttcaagtgattctcgtgcctcagcctcccaagtagctgggattacaggtgctcaccaccacacctggctaatttttgtatttttggtagagayggggtttcaccatgttggccaggctggccttgaactcctgacctcaagtgatccacccacctcggcctcccaaagtgctgggactacaggtgtgagctactgcacttggcccatacttcttcatttttgtagcagcgcattttgaagcacaaaagttttaaatcttttttatttttattttatttatttt

SEQ ID NO: 477064 - DNA, 570 bp, Homo sapiens
actgactgttgggctggggcaggtggacggtccaagtgtccttcagcggccctccctgattgcctgtgctaatgcggcccttgcccttgggccctgcccctccaggtctccagttaaaggcctcagctctggaaatcaaagctgtgaatgggaaatggagaagcccaggggtgcaaagtgctagtgattggcatgtttgtcacaagagagccctgaaaagagtaagagtggctcacaacagaaggwagaaatgcacagtgtgttcctcagttcaacagaggaaaagtctctgcttgacccagagatgggactctttccaagatgtctgaactgactgcaattttctcctgaaattcaacgctaaggcaaagaagaaaaacccaaaaagctaattatagcctccaggaactctcagacctttccacaaactagtccctgacaattctgcaggagctctgaagatacggaactgtgtagagcaaaactggaaagaaccgttgtctctgagggaaaagcacacaagcccgcaggtgtccgctgggctctttcaaaaggtcctaagacgttccc

SEQ ID NO: 477065 - DNA, 570 bp, Homo sapiens
actgactgttgggctggggcaggtggacggtccaagtgtccttcagcggccctccctgattgcctgtgctaatgcggcccttgcccttgggccctgcccctccaggtctccagttaaaggcctcagctctggaaatcaaagctgtgaatgggaaatggagaagcccaggggtgcaaagtgctagtgattggcatgtttgtcacaagagagccctgaaaagagtaagagtggctcacaacagaaggaagaaatgcacagtgtgttcctcagttcaacagaggaaaagtctctgcttgacccagagatgggactctttccaagatgtctgaactgactgcaattttctcctgaaattcaacgctaaggcaaagaagraaaacccaaaaagctaattatagcctccaggaactctcagacctttccacaaactagtccctgacaattctgcaggagctctgaagatacggaactgtgtagagcaaaactggaaagaaccgttgtctctgagggaaaagcacacaagcccgcaggtgtccgctgggctctttcaaaaggtcctaagacgttccc

SEQ ID NO: 477066 - DNA, 570 bp, Homo sapiens
actgactgttgggctggggcaggtggacggtccaagtgtccttcagcggccctccctgattgcctgtgctaatgcggcccttgcccttgggccctgcccctccaggtctccagttaaaggcctcagctctggaaatcaaagctgtgaatgggaaatggagaagcccaggggtgcaaagtgctagtgattggcatgtttgtcacaagagagccctgaaaagagtaagagtggctcacaacagaaggaagaaatgcacagtgtgttcctcagttcaacagaggaaaagtctctgcttgacccagagatgggactctttccaagatgtctgaactgactgcaattttctcctgaaattcaacgctaaggcaaagaagaaaaacccaaaaagctaattatagcctccaggaactctcagacctttccacaaactagtccctgacaattctgcaggagctctgaagatacggaactgtgtagagcaaaacyggaaagaaccgttgtctctgagggaaaagcacacaagcccgcaggtgtccgctgggctctttcaaaaggtcctaagacgttccc

SEQ ID NO: 477067 - DNA, 618 bp, Homo sapiens
agggtggtcctccacccaaagtcgggtggcttctttctaagtgtggctgggtctgggacttttatgggctcagaatggggagtgcaygctgatggtttgtgattgtgcagaaaaggctaaaacaaaggtaccaaccaagggtgggcacgacagtgtatataaaaccaactagggaagggtaggtatatgtaaaataagtaaagtttggggatcaagcggaggaaagcatgccaaacaggaagaggttctcagtcccatctatggatttacctgggacttgtaccttgactttcaagctttagattgtctttggtttgaaggtcgggttttcactggggacctgctcatgtctgcctagggatttgtctgcctcctgctgctgtcaagttcatcaaatatttattgatggcctcaccaggccacctatttcattgtgagacagtgttgggtgtgacagtgctctaccttatggtgagataaactctatctgtaccttctattcataggcctgtatctgatcattagagccaggagaaaaaaagaaacaaaaccctgcctatttgaatacaggtgttagtgttttaataatctcttctttagcccatggcatgagaaaca

SEQ ID NO: 477068 - DNA, 615 bp, Homo sapiens
tgcctgaagatgatttagaagttcaggtttggaagcacctgagtagtaacatgtaccgtggtgtgcaagagaattctgtccccaaacatgagcatgcagtcaagaatctgtacacattggagaaatgtgtacagaaggaaagaaagactatcttaagtgaaagaaagaaccgttgagggctgggcctttccaccgtggctgtctcctggcgcagccacttgcaaccttggtattagaaaattctttcttttttgaacccatttccttctgcaagtaattttgaaagttgccttctaaactaaaaggtcttaatcttctccataattcattctttctcctcctttccatgcctcctctccccaccctcagtgggacttgttttgtctttactctgggatcagagtaagaaatgagccaggcacagtggctcacacctatagtcccagcactttgggaggcagagcctggcagtcgcttgagctcaggagtttgagaccagcttgggcaacawgatgaagccctgtatctataaaaaatacaaaaattgggtgtgatggcatgcatctgtggtcccagctactcaggaagctgaggtaggaggtttgcttgagccca

SEQ ID NO: 477069 - DNA, 485 bp, Homo sapiens
acagtattattctttttgatatatacatatacatatataaaagcattttttaaaactttaaaaaattatttacttttaattgacaaataataatttgatatatttatggggtacaacatacaaccccataaacacactatttgttttggtgagtgtctgatatatgtttaaatcatctcatataaggaagatctttttaatagacaaagctctttcaaattcaaggtcttagttggttttctccccagccttgggatgtaggmattggtgtatgtggtgaaagctggggtgcattgtccagatgccctcctcaggactaaggcacccctctccacagttgctgggagtgttgactgcagatagctctctcagggtcaagtccctccccagggaagcctgcatccaaaacctggtctatttgggagcaattacaaaggcttgcctgccttgccccaattagagacaactctacaagtccatcccag

SEQ ID NO: 477070 - DNA, 628 bp, Homo sapiens
catatatcaggctccacccagagttatgcaatcagaaattctgggggtggggtccaggtatttttgttttaacagccctctgggtgatttgatgtgtactcatttgagcatcacagccctaatggagaggaatggaagcaactcacaaacatgcctgtggcaatccttggggacccaaccctcccrtttcacacccacttctgtctctccatcctccctcctcacacttatagattgtctttctcttcttcaaaactgatcacaagccagtttggagcatcaatttctgcatcaagtttttttggatacaagtggatttgttaagagttgtgggcacgtcaggtgtctctgctattttctttccaagcccatggctttatggcactgttctgcctgtgtcactgaatcacaatgcattgtcacaataagctctactttgagtattcatcctataaatacttcatatggcttgtttcttttacccctcataacaatgtggtttgatatctggtttgacatctgtcaaaagaggatgatacttatgtggtaggtgtcattatcatcccttttgatatatgggtaaactgaggtgcaaaaaggaaaagagtatctgaaaccacagagctag

SEQ ID NO: 477071 - DNA, 628 bp, Homo sapiens
catatatcaggctccacccagagttatgcaatcagaaattctgggggtggggtccaggtatttttgttttaacagccctctgggtgatttgatgtgtactcatttgagcatcacagccctaatggagaggaatggaagcaactcacaaacatgcctgtggcaatccttggggacccaaccctcccgtttcacacccacttctgtctctccatcctccctcctcacacttatagattgtctttctcttcttcaaaactgatcacaagccagtttggagcatcaatttctgcatcaagtttttttggatacaagtggatttgttaagagttgtgggcacrtcaggtgtctctgctattttctttccaagcccatggctttatggcactgttctgcctgtgtcactgaatcacaatgcattgtcacaataagctctactttgagtattcatcctataaatacttcatatggcttgtttcttttacccctcataacaatgtggtttgatatctggtttgacatctgtcaaaagaggatgatacttatgtggtaggtgtcattatcatcccttttgatatatgggtaaactgaggtgcaaaaaggaaaagagtatctgaaaccacagagctag

SEQ ID NO: 477072 - DNA, 575 bp, Homo sapiens
ctgctctgttgtgagctgccctacggagagaactacttgccagggaactgagggtagcctacacctgacagtctacaaggaactgaatcctgacattaccacaccagggagtgtggaagtggattctccccaagttgagccttcagatgactgcatcacagccaggaccttcactgcagcctttgagaggccttgagacagagcacccagttaagccatgccaagattcctgacactccgaaactgtgagatgatgaatgtttgttgtcttaagccactaagtgtgggaataatgtgttatgtagcaatcaataacaaatacaccagatcatgccaataaratgcagtagacattgatgagtgcctatggacaagaaaagtaaataactgacattaacatttcaccctatactttccagagcactttaacagatctgctcatttcagtctcatattcagtactattgaccttccacagggtatggggataatatccccatttctcagataaagagaagaagctcagagaagttgagtgatattccagagaggttaagtgacaccactagtaagta

SEQ ID NO: 477073 - DNA, 604 bp, Homo sapiens
gtctcaaaagcagatccatttcaatgccacatactctttcagagtgggaagcacatttcctgctgatgtcccaaatgtgccacttatctctctgatctcatctatgctcagatattatgagccaaggattgctactgtagcatggttgaggtgagtagcatttccctggtggtggcttcacacattcctattgcccttcccagccacaaacaggaccagcatgtcagcaaggcaggggctgagtgaagaagtgagaccttagttctgagattacaacttctcctgrggattttggttgcatctttaacaccaaatggcaattaattctctgaaaaggtctcagatgttaatcccctaggaaatgttaattaactcttattaggattatactagttctgaaacttgggagaaaacaacagacacatctaaggaatgatgaattgtgaatgtgtcatctttcatacaaagggctcactatcctttcattcctccagccacccatccatccatacacctatctacctatccattcttccatccatccatccacccatctacgtatatatctatcaaccatccatccatcctccacctacctatccac

SEQ ID NO: 477074 - DNA, 540 bp, Homo sapiens
tgttcacaatacaaagaaagattatgtagttataattttttaaacctaagaaattatcctaagcactaatatagaaagattctccaaatactttgagtgaaaaaaatcagtgtgctatattttatttgggagaataagaaaacaaacttatattcatctgaatgtacaaaagacatttggaaggcacacragaaacaaataaaagtagatgtctggagggatgataagaactgaatagactggggacagaattagggaaaaaagttactatattttaaaaaatagtttactttgtgaatttgtcagtgtatgaacgcaataatatttgatgatgcattaaaaattgagtatctaatgagaaagtagagaatacaacactgtccaaatatatttgaccaaaaaaccttttcttctggaatacttatggaattgctgctctagatcaatcatggatccaaatttatgcagttttggacagagatgacctttttattcaagagctcagtgtcatctgccttcagaaggaactatgagatttct

SEQ ID NO: 477075 - DNA, 540 bp, Homo sapiens
tgttcacaatacaaagaaagattatgtagttataattttttaaacctaagaaattatcctaagcactaatatagaaagattctccaaatactttgagtgaaaaaaatcagtgtgctatattttatttgggagaataagaaaacaaacttatattcatctgaatgtacaaaagacatttggaaggcacacgagaaacaaataaaagtagatgtctggagggatgataagaactgaatagactggggacagaattagggaaaaaagttactatattttaaaaaatagtttactttgtgaatttgtcagtgtatgaacrcaataatatttgatgatgcattaaaaattgagtatctaatgagaaagtagagaatacaacactgtccaaatatatttgaccaaaaaaccttttcttctggaatacttatggaattgctgctctagatcaatcatggatccaaatttatgcagttttggacagagatgacctttttattcaagagctcagtgtcatctgccttcagaaggaactatgagatttct

SEQ ID NO: 477076 - DNA, 569 bp, Homo sapiens
gactcagacagaggaggtttttcagggagcagcakcctctaaaatggggaggagatgagagcccttctgaccatggattacatacagcacagaaagaaaagaaatcagcctgccgtcactggccagtgtagaacccccatccccatgtccatagttattttcaatgtttgtcctagaattgaatggtggatccatttttcccaataatctgggatttgtcaaaagtgttgatgtgggtccggggcttctcccatcagaggtcggcctatttcccctcaccttgccgctgggctggcctagaacttctttggccaataaagtagagtggaagtgacactatgccagttctgggtatagcctttaagaggactggcaatttctttttgtttttcttcaagccttgagcctccatgtaagaagtctagctaatcagctcaagagaccatgtggagaggccctgaaaccacatggaaaggggaatgggtctggtggacccagccttccaaccataccaccaaggtgccagagatgtgggtgaaccatcttgtctcctacagaccagccagttg

SEQ ID NO: 477077 - DNA, 594 bp, Homo sapiens
tgaacatcactgagggattccagccaatggtgaaatgaaggcgtctctcacctgaactcatccagggctaatggaatacaacagagaatggggttggaaaatactagctcaccgctacgtcaaatagcccttgaactccagcaaccatggagcgtcaaatcattccctgggaaatccccccctcaagaaacttctgtgggtggcacagagcaccttggctggtacggacctcagtaatgtgggaagtgaccaggctcatctgagactcttgccacaaacctggaatgcatgtcttcatttattttgaaaagcttcaggacattttctctcccagatgttaagcattacatggcaaggatgatagaaacaggcctaatgagcctttgattgttgtatacgccatgatgctgtgctggaggaggttgaagatgggagactgggtcctcaaagaaatactcacaagtcctccccatccttccaggaagagcccacccctctctcaaccatcagcaagcccaactgyttttaattccaacaagttgttttcttttatcattaattttgacagtagaaaaaaaccctttgatatcaaag

SEQ ID NO: 477078 - DNA, 607 bp, Homo sapiens
taatcagttggtagtgacttccttgagtgctaacttggaaataatcctgaggccgtgtccggctcaatcatcaatgtctttcaagggcacaaaatgggaaagggcaatatcagagtagatatttgaatatttgctgattacttccagttttaaaattccatatttgaaacaaacaaaatatatgatagtctgtctaattgttatgtcatctcagcttcatgacatccctgtatttayttttctccactttatgggagaggttaaatggcttgactcaaatcactcagccagcaagcgtcagtactcaaacttgaatatagatcactgcccctaaactcaaggctgtttagactgtagggtatgaattgttctaattgacatcatagccctgagtttatactttcatgcaccatgaaaattcacttcatttatgtcaattggaatatttatttaaaacacagtaaagtacactatagtcaaaagcacatatgcacattgcccacatacacacaacagagaagcatgaaatcaaagaacttgcttttagttctttccttctataattctccatgtgggcaactgggcatgtgccattgtcattgctata

SEQ ID NO: 477079 - DNA, 548 bp, Homo sapiens
catctgtgaaaagggggtgagaaaacctgccccatataacccccagagtgacagggagagtagcagagagcaagttatgaaagtgttatacatgtaacaggtaatatgagaagatttcaggcaactgaaatgctgatgttccaaaattccaacctggctatactccctcctccagccccatcatccaatatttatgagaggtgtatttgcatggtcatttggacgttaactgtggcactaggtgaaggtaaatgtgtaaaatatcagcagagtgtccaaaggcattggtgtcaagaagactgtaacatctatttgaatgccccaactttgtcattttctatacagatatttggtattgcatagacataaaagggcagagaaagccaaccatgtgatatagaaggawcatggcagctcagatcaactacacgttaggtgaggtcatgatttttgaaatcacattatcttggcaattaagcacttaatgtgaaacgtgttattttctgaagacttggaagccagcagcttgagctcaaagcctagattgt

SEQ ID NO: 477080 - DNA, 468 bp, Homo sapiens
agaggagtctctggtttgtggcttaagctccttgagcattctgcagaatgtgtttttaaaacggggtgtggggacctagagatgtcatgctaaagagatcagtgtaaggtgctagtggcaaacttggagttgaggtacgccccgtccaggaccccagaccttgccccgcctcatacaagaacccagagccgttgctatcttctgggccacaggctctcgcgtttcaactagaaaataaaactgggcccttgaaccaacccctatggctccttggaggagttgcagcaagagcctggtgcaactttaaaagtataaagcgcttttaaaagtataamgcgcggtgaccccggtaagtgaaaggcaaggctttctgaggtttctggcctgcaaatcccactggatccctgcagtgcccaccgaagaccttcccctaccagaccgacagtcccttttcacccctagacgtcg

SEQ ID NO: 477081 - DNA, 468 bp, Homo sapiens
agaggagtctctggtttgtggcttaagctccttgagcattctgcagaatgtgtttttaaaacggggtgtggggacctagagatgtcatgctaaagagatcagtgtaaggtgctagtggcaaacttggagttgaggtacgccccgtccaggaccccagaccttgccccgcctcatacaagaacccagagccgttgctatcttctgggccacaggctctcgcgtttcaactagaaaataaaactgggcccttgaaccaacccctatggctccttggaggagttgcagcaagagcctggtgcaactttaaaagtataaagcgcttttaaaagtataacgcgcggtgaccccggtaagtgaaaggcaaggctttctgaggtttctggcctgcaaatcccactggatycctgcagtgcccaccgaagaccttcccctaccagaccgacagtcccttttcacccctagacgtcg

SEQ ID NO: 477082 - DNA, 483 bp, Homo sapiens
ttgtcatttagaacaactatatctaccctctctacrtagtttgggattcctcataatgatgactagattgcaaagatgagcttatcagagagagagacagacagacaggcagacaggcagacaggtggaagaggtgtcacctttcataacccagctaagctgtcacatagtgtcattgatttccatgatacctgattagttaaaccactaacaaaagtatacccaggttctaggggaggagacatacatttcaccttttgatggacataggaaagtatgtgggattaaaaatagttttatagccatttttggaaaataaaatctagcactccctcttagaattgcttattagaaccatttgggttcactagatgctataattctgagtttatggtgcctattggccaaaatgtctccaaatgcttaactcttattcaacaaccattccttagacttgtgtcattttgtttaatccactactac

SEQ ID NO: 477083 - DNA, 483 bp, Homo sapiens
ttgtcatttagaacaactatatctaccctctctacatagtttgggattcctcataatgatgactagattgcaaagatgagcttatcagagagagagacagacagacaggcagacaggcagacaggtggaagaggtgtcacctttcataacccagctaagctgtcacatagtgycattgatttccatgatacctgattagttaaaccactaacaaaagtatacccaggttctaggggaggagacatacatttcaccttttgatggacataggaaagtatgtgggattaaaaatagttttatagccatttttggaaaataaaatctagcactccctcttagaattgcttattagaaccatttgggttcactagatgctataattctgagtttatggtgcctattggccaaaatgtctccaaatgcttaactcttattcaacaaccattccttagacttgtgtcattttgtttaatccactactac

SEQ ID NO: 477084 - DNA, 537 bp, Homo sapiens
ctttaatattcgaaggccaggagccacgaatgaacgacccagacagtaacgggtaggacctgctgcccatggccccgcgcagcccactgtcctcttcctgtccctcccacagctcaggccagagcgctggaggctggacctgggcctctaacccacacacggcaggcgtacctggtcaggtgggctgcacagccaccgcccagcggacaacaaaaacagcatgtgagggcagttctttacgccactctgcctgcacccaaataagcccccacctacttctgcctgccactcgggcagccctggagccagttttgggaccgctctgagagccgccacctcatggctaaatgcttggaaggcatcacccacggagctcaggacgggtgccagagccgggcacggcactgtgactcgtacctatggagggaccctgcctgtggagctccagcgtcatttcatccagctcctcctctacagggacattccatccagctcctcctctacagacasatttcatccagctcctcctctacagac

SEQ ID NO: 477085 - DNA, 526 bp, Homo sapiens
catccttccatccatctgttcatccatatttccttccattcatccttccattccttcatccacacattcaaccatccatcatccttccattcacccttccttccttccatccatctacccatttatttatctattcatgtatttatccatccatctgtccattcacccattcatctgcccatccatccatctttccatctatgtgtccatccatctgtccctccatttatccatccatccatccttccactcacccacccacctacccattcatccgtctatccttccttccatccttccattcatccatccacccatccatccattcatccatccatcccatccatccattcatctgttcatccatccatccttccattcatccatctacccatccatccattcrtctgttcatccatccatccttccattcattcatccatccagctgtccattcgttcatccacccatccatccaatggctgccctaggtgcaggggctacacaatccctgacagacaggaaa

SEQ ID NO: 477086 - DNA, 561 bp, Homo sapiens
tcactccccccagcagagacctggggaggccttctctgaccgtgctgctgagaccactggtgcaggcacactcctgagccgcacttagctttcagaatgtttccttctgtggccacctcatcayctgtaatgattacattttattaattatttttattgtttttgagacagggtctccctcttttgcccaggctggggttcaagccaaaaggcattctcctacctagccctaaagcctcctgagatgtttgatgttttaattttttaagatagggtcttgctgtgtgacctaggctggagtgcagtggggtggtcatggctcactgcagccttgacctcctgagctgagagaatcctcctgtctcagcttcctgagctgagactatgggtgtgcaccactccttggaaagtttttttttggtagagatggggtcttgctatgttgcctaggctggtctccaacttttgggctccagtgatcctcccatctggacctcctaaagtgctaggattacaggtgtgagccactgcactcggccctagcgttactttaaagactat

SEQ ID NO: 477087 - DNA, 561 bp, Homo sapiens
tcactccccccagcagagacctggggaggccttctctgaccgtgctgctgagaccactggtgcaggcacactcctgagccgcacttagctttcagaatgtttccttctgtggccacctcatcatctgtaatgattacattttattaattatttttattgtttttgagacagggtctccctcttttgcccaggctggggttcaagccaaaaggcattctcctacctasccctaaagcctcctgagatgtttgatgttttaattttttaagatagggtcttgctgtgtgacctaggctggagtgcagtggggtggtcatggctcactgcagccttgacctcctgagctgagagaatcctcctgtctcagcttcctgagctgagactatgggtgtgcaccactccttggaaagtttttttttggtagagatggggtcttgctatgttgcctaggctggtctccaacttttgggctccagtgatcctcccatctggacctcctaaagtgctaggattacaggtgtgagccactgcactcggccctagcgttactttaaagactat

SEQ ID NO: 477088 - DNA, 506 bp, Homo sapiens
gccccatggattgttaacctaaagacagtccgccactcccttctccaaggtcctgggtgcctgtacaataggaaagtggaaagagaaaacttctgggagaaacactgtaaccgaatttcctctcacctgggcaggtaggaggcaaactggaaaagaacaattcaagttacattccatttaataaaggaatcactgaatgtgaggtttctagccctctgtgatgggctcctgccctagccaccactgtatgatcaattttgaatccaataaccagaatgagactgaaaacctgtctctctactcaatcccctccataccttcccaaaggcctcagaagatttcactttccaccaccttcaaggatcactgtgcagcaacctggagctcatggttccatccctgggagggctgcagaaagagccaggagggaagaggatgcagagaagccaggggcaggaaggaggratgggagagaaggaagtgtgcctgccctaaccaagcccagt

SEQ ID NO: 477089 - DNA, 528 bp, Homo sapiens
gataataattccaaaattatggaatcatgacctcaacagcaagtcatctgttaacaactggttgaacaaatcaaatatcctcaygcgaaggtatcaataacttctcttccgtatatttgagccttcaggcattatgaaagaaaaattcatttgctttgtgtcagtcacctcactcccaggaatttgtcctaataaaatattcagagataagaccaagactgctgtgatgaaggattttatggctgcattatttataagggtacatattaaagacaccagaacatccaacataaggaaatgatagtattaattacaatgtcggttcatttacctagtaaaatattagataatgattaaaaatcatgtatttatgagaacacatggacacagggaggggaacaacatacactaggacctgtcgagggagggtggaggcagggagagcattaggagaaagagcttatgtatgctgggcttaatatctagatgatgggttggcaggtgcaggaaaccacaactgcacatgtt

SEQ ID NO: 477090 - DNA, 528 bp, Homo sapiens
gataataattccaaaattatggaatcatgacctcaacagcaagtcatctgttaacaactggttgaacaaatcaaatatcctcacgcgaaggtatcaataacttctcttccgtatatttgagccttcaggcattatgaaagaaaaattcatttgctttgtgtcagtcacctcactcccaggaatttgtcctaataaaatattcagagataagaccaagaytgctgtgatgaaggattttatggctgcattatttataagggtacatattaaagacaccagaacatccaacataaggaaatgatagtattaattacaatgtcggttcatttacctagtaaaatattagataatgattaaaaatcatgtatttatgagaacacatggacacagggaggggaacaacatacactaggacctgtcgagggagggtggaggcagggagagcattaggagaaagagcttatgtatgctgggcttaatatctagatgatgggttggcaggtgcaggaaaccacaactgcacatgtt

SEQ ID NO: 477091 - DNA, 528 bp, Homo sapiens
gataataattccaaaattatggaatcatgacctcaacagcaagtcatctgttaacaactggttgaacaaatcaaatatcctcacgcgaaggtatcaataacttctcttccgtatatttgagccttcaggcattatgaaagaaaaattcatttgctttgtgtcagtcacctcactcccaggaatttgtcctaataaaatattcagagataagaccaagactgctgtgatgaaggattttatggctgcattatttataagggtacatattaaagacaccagaacatccaacataaggaaatgatagtattaattacaatrtcggttcatttacctagtaaaatattagataatgattaaaaatcatgtatttatgagaacacatggacacagggaggggaacaacatacactaggacctgtcgagggagggtggaggcagggagagcattaggagaaagagcttatgtatgctgggcttaatatctagatgatgggttggcaggtgcaggaaaccacaactgcacatgtt

SEQ ID NO: 477092 - DNA, 564 bp, Homo sapiens
gatcgatggaaagggaatgttcgggtgaagataaatgattgtggagacaaggttcttttgaagtctcatagtggctgcccttagaggcaatagatgacaaatgttttctattcagatctttgaaaggtgctaaactcttagttactctcttcaggattgggagggcctggaagaaaaatatctagctatgttaatagagattttttacagatgcagattttcccctacaaaagacarctttgcagggccatttcaaaatatggcaaagaaacatgttttggggtaaaatattttgattttcttccttgtctcgtaatgttatgccagggtcaggttggaaagtaagtcatgatatagagggttaaataaaacccatctgatgagaatttatggttgtatggcatgactccccagactccttagataggaatttggacacgattaaaaaatcagagcttagtcctcatctccaacaccagaatgctggaagtaccccagtggggaggcttaaaaaacccaggctttggagccaacctgggtcttaatcacatctgcatttgccag

SEQ ID NO: 477093 - DNA, 564 bp, Homo sapiens
gatcgatggaaagggaatgttcgggtgaagataaatgattgtggagacaaggttcttttgaagtctcatagtggctgcccttagaggcaatagatgacaaatgttttctattcagatctttgaaaggtgctaaactcttagttactctcttcaggattgggagggcctggaagaaaaatatctagctatgttaatagagattttttacagatgcagattttcccctacaaaagacagctttgcagggccatttcaaaatatggcaaagaaacatgttttggggtaaaatattttgattttcttccttgtctcgtaatgttatgccagggtcaggttggaaagtaagtcaygatatagagggttaaataaaacccatctgatgagaatttatggttgtatggcatgactccccagactccttagataggaatttggacacgattaaaaaatcagagcttagtcctcatctccaacaccagaatgctggaagtaccccagtggggaggcttaaaaaacccaggctttggagccaacctgggtcttaatcacatctgcatttgccag

SEQ ID NO: 477094 - DNA, 593 bp, Homo sapiens
tggctaccagtctaatgacacacaactgtgttaaggaagtcactttcctctattgtcttttttttttttttttttttttttttttagacgaagtcttgctctgtcacccaggctggagtgcagtggtgcracctcaggctcactggaactcctccgcctcccgggttcaagtgattgtcctgcctcaacctcccgagtagctgggactacaggcatgtgccaccatgcccaggtaatttttgtatttttagtagagacggggtttcgccatgttggtcaggctggtcttgaactcctgactttaggcgatctgcccgcctaggcggcccaaagtgctgggattacaggcgtgagccacgacacccagcccactttcctttattgtcttattcagctcctcaatctccctccattactgttgccatattctgtggattctaccccagcaatagatttcatattagtttccccatgccggaagttcttcccactgtcactgacttattagttcaggctgtatatcatctctcatagggattgccatcatagtccttaactggtctcctggtctctcgattctaaattctctggat

SEQ ID NO: 477095 - DNA, 593 bp, Homo sapiens
tggctaccagtctaatgacacacaactgtgttaaggaagtcactttcctctattgtcttttttttttttttttttttttttttttagacgaagtcttgctctgtcacccaggctggagtgcagtggtgcgayctcaggctcactggaactcctccgcctcccgggttcaagtgattgtcctgcctcaacctcccgagtagctgggactacaggcatgtgccaccatgcccaggtaatttttgtatttttagtagagacggggtttcgccatgttggtcaggctggtcttgaactcctgactttaggcgatctgcccgcctaggcggcccaaagtgctgggattacaggcgtgagccacgacacccagcccactttcctttattgtcttattcagctcctcaatctccctccattactgttgccatattctgtggattctaccccagcaatagatttcatattagtttccccatgccggaagttcttcccactgtcactgacttattagttcaggctgtatatcatctctcatagggattgccatcatagtccttaactggtctcctggtctctcgattctaaattctctggat

SEQ ID NO: 477096 - DNA, 584 bp, Homo sapiens
ctgccatcttgcttaatagaacttctaaaaggagaagaagaagaaaagtaaaacataaactatttgcagactgggwtgggggaaggcttatagtctccatgctcatcagaagtgggcacaatccatctaccaaacccctctcctctggtcccccaacaaaaggccgttccttaccaccctttaaaatcagcaccttgctctgccaactcgcagctcaaaatgcccagtcggagtgtcttatgagcgcagtgaattaactgccgagtcgagaagaacaggcttattgaagtcgtcaaagctgaaagcctgtttgaaccgtgatgtgtccttgccgagcattttatgaatatgcagaatcaaataggagctagtagaagccagagggagcaggcagaaaggatctctttaaaatcccagccaaggcaggcacacatttcaactcattaaaacacacaacagactgttacagacactttcaaaaagagctttctactgagtaatatcctagaggatgtatttttttttttttgtagaaagtttcccggggcaataccaaatgtcctaaggcaggtgtttgtctcaaa

SEQ ID NO: 477097 - DNA, 584 bp, Homo sapiens
ctgccatcttgcttaatagaacttctaaaaggagaagaagaagaaaagtaaaacataaactatttgcagactgggatgggggaaggcttatagtctccatgctcatcagaagtgggcacaatccatctaccaaacccctctcctctggtcccccaacaaaaggccgttccttaccaccctttaaaatcagcaccttgctctgccaactcgcagctcaaaatgcccagtcggagtgtcttatgagcgcagtgaattaactgccgagtcgagaagaacaggcttattgaagtcgtcaaagctgaawgcctgtttgaaccgtgatgtgtccttgccgagcattttatgaatatgcagaatcaaataggagctagtagaagccagagggagcaggcagaaaggatctctttaaaatcccagccaaggcaggcacacatttcaactcattaaaacacacaacagactgttacagacactttcaaaaagagctttctactgagtaatatcctagaggatgtatttttttttttttgtagaaagtttcccggggcaataccaaatgtcctaaggcaggtgtttgtctcaaa

SEQ ID NO: 477098 - DNA, 625 bp, Homo sapiens
cagctgcatgacccctaagccataatttctaatcttgtggctaatttataagtcctacaacgcagtctagtcctcagtcaagaaggaggtttgttttgggaaaaggctattaatgtctttgttttaaactatttattaattataaactaagttcctcccaagttagttcagcctacacccagggatgaacaaggacagcttggtggttagaaggaagatggagtcagttaggttagatctctttcactgtctctgtcctagtttttcaaggcagtttcaggtccacataagaagctgggattagaccagtcttggaagaaacagcaaactgggcatgaagtggctctaagtctcttaatratgatctttttcctcaggaggcagaagggaggaaaggaggcaggaaatggatgagataatacgtgtgttgtatttttagttagggctgctgcatttttcaagatatctgttccctggcccccacactgtctctgttggaacctgtgtttctctttgaatactggttcttctttgaggaaggcctggcaactaagtcttttggctttgtcttttgggtgaattggtacttaagaaagttattcacacttgaatgtggatccaagag

SEQ ID NO: 477099 - DNA, 625 bp, Homo sapiens
cagctgcatgacccctaagccataatttctaatcttgtggctaatttataagtcctacaacgcagtctagtcctcagtcaagaaggaggtttgttttgggaaaaggctattaatgtctttgttttaaactatttattaattataaactaagttcctcccaagttagttcagcctacacccagggatgaacaaggacagcttggtggttagaaggaagatggagtcagttaggttagatctctttcactgtctctgtcctagtttttcaaggcagtttcaggtccacataagaagctgggattagaccagtcttggaagaaacagcaaactgggcatgaagtggctctaagtctcttaatgatgatctttttcctcaggrggcagaagggaggaaaggaggcaggaaatggatgagataatacgtgtgttgtatttttagttagggctgctgcatttttcaagatatctgttccctggcccccacactgtctctgttggaacctgtgtttctctttgaatactggttcttctttgaggaaggcctggcaactaagtcttttggctttgtcttttgggtgaattggtacttaagaaagttattcacacttgaatgtggatccaagag

SEQ ID NO: 477100 - DNA, 613 bp, Homo sapiens
ctcgtggggatgcagtcctgttagactgcaaagggtggaggcgatggctccatttctgggctccatacctggagttccacgggtctctcaggagaagtatctggccgtggatgaggcaaatgggaccccacctcatctgaacccccactgcatctccagtgccagtgggcacacagtaggggctctatcaacttgttatgccccccttctccttgtgtccatcagaactcaagatttcaggtcctttcccaggcccgcctccccagcctcagtcagcacctgcccactccagatccaagtgccaggacttgaagatcaaagctctccrtcctctgttctgtatcatagctcctggggagctctaaatctaatccagccctgccaccccctcaaggcccagtgcggcaccacagaaatgtcagccctggtaaatggctcaggggaacagggcctttcaggtgactcacagagcactgggcacagtgtgggacctggggaggagggggcccacagaggccagggacatctccaaacccctggcttcctctggaccaacagagtcatctgacctcaaagtaaaatctctttcttggcctgcaaaaccgtggccaac

SEQ ID NO: 477101 - DNA, 625 bp, Homo sapiens
taaagcttcggacagcacctgcagccatgcaggccaaccacacacctgcccaccccatcccttgccctaggatcccaagacccccactgctcatctccaccttgagggaacacatcagtctggaggtcagcaactgtgcctgagaaaagttgccaaatcatctagaacatggagggtagccctgtgattcaggatcagatgtcaggggctagtgcaaggccagggtccaagggtggtttcagtccagagaaagcccacaatccagtcaccagagactgtaagctcttgtcccttgggtgcaccacctgggtgctcagaggtcccaaggctctggagtrtatgaggtgcatagctggatggcgctgctgggacactctggcaaggagaccctccacttccctgccccagcctcctcttccctgccccagacctcctccaggcatgaggtctcctgaccttgagctcctgacaaagcctgaggtacctgacagtgggggtggggagcatagacgtatgtccttttcacctcagtgccacgttcagcacagcatggtacatgtgagactggcctgccactagcttgttgtgtgacctgggacaggtacttcagtctctcagccacaga

SEQ ID NO: 477102 - DNA, 527 bp, Homo sapiens
ctgctttgccctgttcactgtggctcactccaggctgcccactctgccaacacctttatcactacatgaatgggacaggctctgctaaaatctcctgccaatgatcagtggtcacttgtacctgggagtgaataattctaacatctgagcatgagtgggcatcagtatgagttgtgtgtgaccatggatactgctctggggacactcagaaataattgagggatggtggaggggcatggacgtgtgtgggtcagagcaattcctgtaatgttccwattgctataattacatttgaagaggggtgagttacagaatacaaatcaatgggggaaaggatcaattcttcactaatagtgatggggaaaatggctttttaggaacaaaacaaacaaaacaaaagctggttgagatccctgcctcatgcttaatcacaacaaaattaattccagcttgattaaaagctaaattaaaaaaaaaaagcccaacaactagaagaaaagtttaaatacttatcctctcattgaatg

SEQ ID NO: 477103 - DNA, 549 bp, Homo sapiens
ctggggctagagctgccatctgattccagagctcaggctctcaatcactacgctacactgccgaggaatggcagtttaagaggtggaagtcgtgtgacatagtaacctagaaaaagagaggtaagttatttgaacacctggacattttgtttttccatcaaccaggaagaaatattgagataatggatatacaatcatgcatcacttaatgatggagacacactcccagaagtgtgttgctagttgatttcatagttgtgcaaacatcatagagtgcacttacacaaacccagatggcatagcctactacacacctaggctacatkgtttggccttttgctcctagagcacacacctgtacagcatgttattgtactgaatagggtatttgtaacatagtgatatttgtgtatataaacatagaaaaggcatagtaaaaataccatagtataatcccatggaaccatcactgtatgtacagtgtgatgttgatggaaatgttgttatgccgcacacaactatacatttatccatcctcaaacgctaatc

SEQ ID NO: 477104 - DNA, 618 bp, Homo sapiens
ctgctttagaggtaagccttatagtttacaaaggcatgcatgtaaatttccactttggtatcatttttgttacttccttaaagagttaaggtgtggcagagtttataaagagaggaaaggaaaggaaagagggttctgaataacacaaatcaagtcttattttctaattgtaggaccacaactaagtaaacagaataaagagacctttcataatataattatacaaactcaagtaaatgttagaacaaaagttttgatgtgactagttgtagaatagaattacagaattttagaaagcttttcaaaagatcttctagtttacttctctggccagaggcatgcaaacatttagccatctatggctaatttatgttttcttcaattgtgaagatcaaaggttctttgctctgtcttggtagttttataaaaataaaattcttaaactcaacctaaaacagaaccataaaamattttaatatatcgaaaatatttcccttgcttttaataaaattccctttcttcctggaacaaaaatcaatttactttcatccttaccaagaagtcttcatttatcacaaggaattttggaatgctgagtcatattcagtggtcaaatat

SEQ ID NO: 477105 - DNA, 647 bp, Homo sapiens
gagtgaatgaatcactgaattctatttttcctctaagaggaaagaagaacctataaattaaaagatattttaggccgggtgtggtggctcatgcctgtaatcccagcactttgggaggccgaggcaggtggatcattaggtcaggatatcgagaccatcctggctaacackgtgaaaccccgtctctactaaaaataaaaaattagccgggcgtggtggtgggcaccggtagtcccagctacttgggaggctgaggcaggagaatggcgtgaacccaggaggtggagtttgcagtgagccgagattgcgccactgtactccagcctgggagacagagtgagactctgtctcaaaaaaaaaaaaaaagatattttaatccaatttagcaatgttccaaatttgactcacattaatttttttccttctaaagttttgagctcaaggcacacttgcatgggaaatgaggtgagacaggaggaaaacatattttactaagttcaagtaattgctgcttgatttttagaatttgcctaaatttcatgtaaaaaaatattagctaaacagatgtgcttcctccctatgtttaggacaacttagaaaatggaccttttaccttatgaaatcttcttcctcctctctttttggcc

SEQ ID NO: 477106 - DNA, 443 bp, Homo sapiens
ttattctctgctctaaacaactttgatgagctgtcaagtcatttggtatttaaccaaatcaaagatcactctgtgccatgcccttcaccatgcctctctggattcaatacaaatcaggtaakgaatacaggtgtgtccctctttgaaaaaccccaatgtaaaatagtcctgactcataaaacaaatgaaccaaagagcgattattgacaagcctttcccttctacgctacttattcctaggtggcctattattggaaagtctcctcaaaaactcactttctctgtgaagaatttgttgactatgtcagcctacaatgatctctccctttggaaacaaaacaaacaaaacccctccttttgcacttatccataacttcccaattagcactctgtctaatacaatggggtgggcaaaccatgacctgtgggccaaacctacccat

SEQ ID NO: 477107 - DNA, 443 bp, Homo sapiens
ttattctctgctctaaacaactttgatgagctgtcaagtcatttggtatttaaccaaatcaaagatcactctgtgccatgcccttcaccatgcctctctggattcaatacaaatcaggtaatgaatacaggtgtgtccctctttgaaaaaccccaaygtaaaatagtcctgactcataaaacaaatgaaccaaagagcgattattgacaagcctttcccttctacgctacttattcctaggtggcctattattggaaagtctcctcaaaaactcactttctctgtgaagaatttgttgactatgtcagcctacaatgatctctccctttggaaacaaaacaaacaaaacccctccttttgcacttatccataacttcccaattagcactctgtctaatacaatggggtgggcaaaccatgacctgtgggccaaacctacccat

SEQ ID NO: 477108 - DNA, 612 bp, Homo sapiens
tttctacccaaccacactgtccactctagtcactgtgatttctcaacctttctcccacgcaccatggtcgtccatgctgctccactgcttgctcgtcctgttcagtctggtagaaatttcctcaatgagcataccgagggtcaacaagctgcctagccccgtgccagctctgatgtctgccatcagcgagtgcaggcttctcctcctctcactctttcttcatgtccagcatgagttctagctcctctctgaagttgtgaaaggggtgtgctaaaggtaacatgcttatgtcttaaatcaactcaaaccaactgagcctctaacactagggaagaggttttatttgtattctctgccaggcccaacacaaggcagagagcctccttatcccccacctccaagaaaaaaaaattgattaatgaactgatagtaaattggaacagagagaaacttccgaaaactgcgatttccaatctttaaattattattttgggacacatgagctgctggwtggatctcaggacagaggacaggcaaggggagggaagcactctgcttggaagtaggcaactcatgggccaagtgcctgattcctaatgaggagcagtacag

SEQ ID NO: 477109 - DNA, 627 bp, Homo sapiens
tatagacaggcccatatccgaaataggttcaagactgtctacagggtctacaaacaccgaagggacctagaaattcattagttcaatcaactgactttacttagcacacctaatgtaccaggaaatttgttctcctaggccttacttccccaaatgagagttaaacccttcatttggtgacctgtggaaaggcttaactatgcacttcaaagggcatcaaagaggacaccccagcagccagtcagcattatgggaatttccccagtttgctttgtgatagtgtggtatagtggaaagcacacaagatggggagacagaggacttggactttatcagctactcttgtcatatgmagctgaggattcacagatgaccatgtcatatgtgtgaccatgtcattcacagatgaccaagtcacttttcctctgtgaatccatttcgtgaactgtaaaatgcagctgataatgtcagctttgtctacgtcacagtgttgagaaaatcaatgagataatggaagtgaaagagctttggaaattctacatatccacatacaactatgagagttaccatttgtgtagatgacccagctttgggtggcatatgctattcaaaagcaaaatattattt

SEQ ID NO: 477110 - DNA, 630 bp, Homo sapiens
tcagtaacatttacaaactggatgccaagaagagaattaatcttagcaaaattgataaattctttaaggtcagcaactggggctggggctgggcagagggctgaggttaccagcgccaagatgtctttgggggaaagggatgaaatgagccagaaaactgtcaggtttttttaattgagctgtagctccaaagatcccaagagtaggaagaggaggagaatagaatggcagggcctccagctgccattgatggaggcatttatgccctagaaggctgctgcatgaaagccacacatcgttccaagttgcaggattcagctgggatttggctaggaggaggccctgtgattcttttytgaatgctgcttttttttttttttcctgaagtcccttgtcacttaaagaggtacatcccagaagacagcacctgctctaatttccagtataaatcagagctcgcagaagtagaatgattaaagactggattttaaattggttcacatttgcaaaatcacagcctctcacctggtacaccagggaccacctcagcttgcccttacctctggatagaatgcctcagcaacgttcatcatatactcactgtgtttcagtgcctctgagagttgatct

SEQ ID NO: 477111 - DNA, 556 bp, Homo sapiens
cccaggtggacgtgcacccagagcagcatcagcccccagtacaatatctgcgagcagatggttcagatccgggatgaccacatccgcttcatctccgagctcgctcgctacagcaacagtgaggtgagcatgcaggctgctggggcacaggcccgtgggcccasggccagaaggggtaaggagcagccaggaaagaacatggacccacggaacactggagagtagaagggagggaggcaggagggtaaagtggccaacagcaggggttttggagccaggcagactggggtgaattctggtggtgctgctgccctttgtaagttattcaacatctctttgcttcaatttcctcatctgtgaaatgagggtgataacagtatctatcctgaaaggttcattgagaggattaaaagatatggcagataataagggcctggtgatggttagttctgcctgtacatgataagtgatgcaaaccatctccaacctggatggcaagaaaacagaacactcgtactcataacgctacctaaatgttttaaaactaaacagtaat

SEQ ID NO: 477112 - DNA, 526 bp, Homo sapiens
ggcagccgcctcgggcacacagaacgtgtgatgggtggggcgaggggcgcagcgtcgatgtttgggggcggagggctttgatgagagaggagcaggtctgacccgcttggaagctttctggcctacactagcatcgctcaccaagctggctgcgggcacggtggaagtgggggaaggggatgagtgggctgactcctgggggaaaaggtggtttttttcttgagctctgaagaaccaggaagatgcttgcctgtctgttgtggcgtctacttttcaggwcagccctacccctcaccccaaagaacagcccacctatgtgcaaaagaagaggaggaggtgctctctgcttggggatgggggcaggtagcatgttccacataagtatggccctctatatccagaacccggctggaaaggacactgacagcccaggtgcctccccagcacagggaatctgattttgacctttgcttgcctactttccccagcacagtggaaacactcaccagggctgatgagccatcag

SEQ ID NO: 477113 - DNA, 462 bp, Homo sapiens
tgaaggtagcaaaaaaaaaattcagatcaacaacctgataggaattagaaattagactcagtgagaagaattcacaactactgttaagacaactgcggtgcgaaatcaaatagtttcaccgtcaagtctcccatctctcccttggtatccgctgaagggttaaagtaaatactccaactaccctgtcagtgaggacaggtgcttgcaaaaccccatctgcatgcacatccatcatccttacccagagactccatcacaaccttcccatggagaaaactcacagactgaggtgaggtactgccgggtctccataagagatgatctggcttgcattcaattgtgccagcaacgctaatgatcaggagaggtgggctcaccatcggygtaagctgggagtgggccgctcttcgttttgtgtttccctctaactacagaaaaatcaccagcagtcccagtctgaca

SEQ ID NO: 477114 - DNA, 634 bp, Homo sapiens
aaaacaaaggttctttttcaatgacttaccaaaccaatacaccttaaccaaggttatgtctaaaccaaggatcaactaggcatttccaaagagtggcaaagtagtcctcacaagatccagaaccaaagacagctcaaagaaacaaatgtcttgctcactgcaaatagaatacaacccatatttctgtccagccgtattttcaaggatctcagcttctctgttgagcacctactcacggaggccccaaagccctatatgccccacagatagagacaggaaatcaaaagctgtctctggaagggaaaagaatcaataacaaatgggtacctcagaaggtcaagagttatacaaatgattttaaacaaayaggactgctttcctgactgggaatcaaacctgggctgcagtcatgaaagcagaatcttagctggtagaccacagagtggagtgcttttttgtaaatccttcaggagatccaagcaggcagtttgagcatataaaggatttcaactcatttcagatctgatcacagctggaatgctgtttagctaatttcctgcatgttaatatttcaaagatatgatgagatttgtatctgcaagggattgtgaagtccagcagggcatttgaagga

SEQ ID NO: 477115 - DNA, 423 bp, Homo sapiens
tggaatgctgtttagctaatttcctgcatgttaatatttcaaagatatgatgagatttgtatctgcaagggattgtgaagtccagcagggcatttgaaggatattgtctgggccgggcatggtgacttaaatgtgctggcttaaaatcccagcactttgggaggccaaggcgggtgaatcacttgaggtcaggagtttgagaccagtctggttcacatggtgaaatcccrtctctactaaaaaatacaaaaaattagctgaatgtggtggcacgtgcctgtaatctcagctactcaggaggcttaggcaggagaattgcttgaacctgggaggtagaggctgtagtgagctgagatcacaccactgcactctatcctggtgacagagcaagactctgtctcaaaaaaaaaaaaaaatactatc

SEQ ID NO: 477116 - DNA, 621 bp, Homo sapiens
gaaaaaataaaaaagattgaggatctcaggacaactactagcctagataatttataaagattagataactgactcatttttattagtttctttcctaataaggcaatatgtattagatatatcagagtagaaggaaatatttttcttacatctatttggctttttaaatataaacatatataagtaaaaaccaaaatgatttataatcccaccatttatgtaactatcttattttcaaaaaaaattatgcaaatactagcatttgtgtgctttttttccttttgtgtttgtgtgtttatatcctttttaaatatatcctttttatgtacctaagcagctgtatactatactgcatactatagtgtgaactttgttcttttccttcgtctttacaacatattgtggaaaacgttccatatcagaatatagatatgcctttttgtagccattgaaatgcaaagaaaaaaagaatatagatctgtctcattttttaaaaatgctgtataatctgtagcacgaatttactataatttattcscatgctcccttatcgatgggcatgtaaattgtgttaattttatatgatataatgagtatccttatatgtatatcttggcacag

SEQ ID NO: 477117 - DNA, 498 bp, Homo sapiens
gtggtactttgttacagcaggccaagcagactgagacaggaaatttcacaggtagattcctttgtacagaagaattgactgaaaaatcaattaactcctttcttctgtgttaatttcattttaattagtttcattcaattgcaaaaatctaagtgacaattcaattatagttaacatttcagtagcttttttataaaacagcaagtgatttgtattaagaaactgtrttcattcatcttaaattagtattaaatagactattgaaaaacttttttaaaatgaaacatttaattctgctaatggtgattttcaatgaatgttttaaatcaagctcaaataatttttgaaattttggtcacttaactcttgtgattttctgagcacttgctctttacttaatgtcagtgtcttattaaattacgtcctacgggatactgccccagggtctggagcgctctcgcagtttctttgacacatccattctttcatttgaatatc

SEQ ID NO: 477118 - DNA, 636 bp, Homo sapiens
acacaggtgattttggcttgtccttggagctgatagccagggtcacactggaatgtgacggtgtctccagcctctctgctgtctccatagcgggtgccattttggggcatacctggatcgttacaggtggctgcaattgaggctgcaaacaaaagagaaggcaaggtcacaggctggaaaacatggtttccacattcytgtcggtgtggttgttcttgtgggttgaagcactcttcattggcctaataagtcatttgtctacacatgaacatacgaaaatagtttcttttcccaggggtacattcaataacatacatcttcattgtgcttgcattgcataaactctagcaagattctgttgaaaatgcaaccaatgatgaaatatatcaagggtttttttaaaacaaaaattacattatccttagaataaatacatacatacacacagactgattttctcttcagcaatattttaatgaaaccccatactgcaaattacataaactagttaaagtacaccaacctcaaggaaaacaaaataggaagaatttccttaaggtctgtgccttcaaaggtgatccaataacctttgttgagatgccaagggtggaaggtctagaggagatgaccagtgag

SEQ ID NO: 477119 - DNA, 623 bp, Homo sapiens
cacacaggtgattttggcttgtccttggagctgatagccagggtcacactggaatgtgacggtgtctccagcctctctgctgtctccatagcgggtgccattttggggcatacctggatcgttacaggtggctgcaattgaggctgcaaacaaaagagaaggcaaggtcacaggctggaaaacatggtttccacattcttgtcggtgtggttgttcttgtgggttgaagcactcttcattggyctaataagtcatttgtctacacatgaacatacgaaaatagtttcttttcccaggggtacattcaataacatacatcttcattgtgcttgcattgcataaactctagcaagattctgttgaaaatgcaaccaatgatgaaatatatcaagggtttttttaaaacaaaaattacattatccttagaataaatacatacatacacacagactgattttctcttcagcaatattttaatgaaaccccatactgcaaattacataaactagttaaagtacaccaacctcaaggaaaacaaaataggaagaatttccttaaggtctgtgccttcaaaggtgatccaataacctttgttgagatgccaagggtggaaggtctagagg

SEQ ID NO: 477120 - DNA, 524 bp, Homo sapiens
atttttggggccatcaaaataagaaataacaggtcagtgcagtggctcatgcctgtaatcccagcactttgaggggccaaggcggacagatcacttgagcccggagttcgagaccagcctgggcaacatggcaaaaccctgtctctacaaaaaaatacacaaattagccagacatggtggcacaggcctgtagtgctagctactcggggagctgaggtgggaggatcaattgagcccaggaggtcaaagctgcagtgagccaagattgcgccactgcagtccaacaagacyctacctcaaaaaaagaaaagaaataattcaaatgaaactgtttccttttaaagcatcattgagaaagccacaaaacaaggcctatcagtgtggctagctcaacctgctatgttttgttaaaatgtttttcttgagataaactgggtgcagtgtacatcggtagttcaccaagcctgtaataccatgatatctaatttatgatttccttttgagctgctgtttcttggccagca

SEQ ID NO: 477121 - DNA, 618 bp, Homo sapiens
aaagtggggatggcggatgagatgttggatgtttgaggagagaagagaaagtgtgagatagggctctggaaagtgaagagtgagtggactaggaatgtagtggaaatgcccattctgtggtcatgctttgaaagtgagatcagtcagcatgattatgtgtatttcttcagccctatttagtagcccaggtgcaagcatggagtaggtagaatgttggatttaactgagtgataaataaaactaaatattcactttgaaagctgtttttaggaggtcggtgatgtgaatggtatttagaattttagctttttaattatacccattttggaaggctaaacttagtgartgacaggtcattaaaaaagcaaaaaagaaacggcattgttccaggaaaggttcttggttgaaaattacagaccttaattccagccaacttaagcagaaaatgaatttattggaaagttgtcaagtacctcacagcatggatggaaagactggagaatctggttcagaaaataggcaagaaccaagggaatccaaatatctgtaatcatggctgaagtcatgcccctaggggagtctggttccggatgctgttgccaccatttttgaaccctg

SEQ ID NO: 477122 - DNA, 589 bp, Homo sapiens
ttcttgagggcaaggaccaagtcttaccaactttctgcctgataaccattagcatgtcctcaatatttgttggatggctgctactaatcttgagggcatcatgccaatattgactgatgtatcaatcaatgctactggcatgtggtatttacagcaaaaaactaagtgtgctcatttagctataacatgtctttagcagaagagataagtcagatgttaacatttgatacctgcatctatgggaggtgaagtagagaatgctgttttctctagttacattcctttgtttcttcttacacttatttatagggtgaccatatgtcctagtttgcctgatacagtctggktttccaaagtctaatagtgccccttttcattcacagaattgtcctagtctaggtggtaaattaaatggcagtattacttacataacatttaatgtatgccagactctcttctaaacactttacatacattctcacttaatcttcatgataaccctgggaaacagtttctattattctacccatcttacatatgggaaagttgaagcacaaagaggtcaagtgacttggctaaaatcatgcag

SEQ ID NO: 477123 - DNA, 657 bp, Homo sapiens
ctgtaccataagttagaataaagtggaaagttccgtgctcaactgaaattagacaagttgatgagaaatggccttgtagcagtctcccaaaaaatagggatsagaaactgccttacagtagctccttaccgggcatattgccttttgcatcaggagcaatcacagggcattctactgaaaagtggggaaatagattttgggggtgcctgactgcaatatacatgacctacatggagacgtgcatggttgccaagatgccgtggcagaccattcctacactcatcatatgccataatgacattttttcttttcttttctttttttttttttttagatggagttttgctcttattactcaggctggggtgcagtggcactatctcagctcactgcaacctccgcctcccgggttcaagtgattctcctgcctcagcctcctgagtagctgggattacaggtgcctgccaccatgcccggctaattttttgtatttttagtagagatggggtttcatcatgctggccggactggtctcgaactcttgacctcaggtgatccacccgcctcagccttccaaagagcagggattacaggcgtgagccactgcacctggcttccataatatcttaagtcacatgccataacaacaaaaatgca

SEQ ID NO: 477124 - DNA, 657 bp, Homo sapiens
ctgtaccataagttagaataaagtggaaagttccgtgctcaactgaaattagacaagttgatgagaaatggccttgtagcagtctcccaaaaaatagggatcagaaactgccttacagtagctccttaccgggcatatygccttttgcatcaggagcaatcacagggcattctactgaaaagtggggaaatagattttgggggtgcctgactgcaatatacatgacctacatggagacgtgcatggttgccaagatgccgtggcagaccattcctacactcatcatatgccataatgacattttttcttttcttttctttttttttttttttagatggagttttgctcttattactcaggctggggtgcagtggcactatctcagctcactgcaacctccgcctcccgggttcaagtgattctcctgcctcagcctcctgagtagctgggattacaggtgcctgccaccatgcccggctaattttttgtatttttagtagagatggggtttcatcatgctggccggactggtctcgaactcttgacctcaggtgatccacccgcctcagccttccaaagagcagggattacaggcgtgagccactgcacctggcttccataatatcttaagtcacatgccataacaacaaaaatgca

SEQ ID NO: 477125 - DNA, 657 bp, Homo sapiens
ctgtaccataagttagaataaagtggaaagttccgtgctcaactgaaattagacaagttgatgagaaatggccttgtagcagtctcccaaaaaatagggatcagaaactgccttacagtagctccttaccgggcatattgccttttgcatcaggagcaatcacagggcattctactgaaaagtggggaaatagattttgggggtgcctgactgcaatatacatgacctacatggagacgtgcatggttgccaagatgccgtggcagaccattcctacactcatcataygccataatgacattttttcttttcttttctttttttttttttttagatggagttttgctcttattactcaggctggggtgcagtggcactatctcagctcactgcaacctccgcctcccgggttcaagtgattctcctgcctcagcctcctgagtagctgggattacaggtgcctgccaccatgcccggctaattttttgtatttttagtagagatggggtttcatcatgctggccggactggtctcgaactcttgacctcaggtgatccacccgcctcagccttccaaagagcagggattacaggcgtgagccactgcacctggcttccataatatcttaagtcacatgccataacaacaaaaatgca

SEQ ID NO: 477126 - DNA, 493 bp, Homo sapiens
ttcagtctaggaatacatttatgttggaaaattacatttaaataagcatggctattttgagttataggagtgcagtggatatgagcagcttaagtaatgcagaagcacacagcagtatcatgattcttatcctagctcatactacccatcagattaatagcacttttgcactttttataacatattttctatattgatgatttcacatgtaactcctcaataaatcaagatatgcaactgtgcctctgtggaaccactttgcacatagactgtaaaaatgttytgtagtatataatcataggcaaacatcattagaaatagcaagaatagtgtgcaatgctatgttttgtagagagatggatagatcacattttattatatcacaaggatttcctatagaaatgtaaactattatataatggtggtgttaaatacagttatataatgtttatcaaaaattgtttgcactcaggctgtcttaagcacaaataat

SEQ ID NO: 477127 - DNA, 493 bp, Homo sapiens
ttcagtctaggaatacatttatgttggaaaattacatttaaataagcatggctattttgagttataggagtgcagtggatatgagcagcttaagtaatgcagaagcacacagcagtatcatgattcttatcctagctcatactacccatcagattaatagcacttttgcactttttataacatattttctatattgatgatttcacatgtaactcctcaataaatcaagatatgcaactgtgcctctgtggaaccactttgcacatagactgtaaaaatgttctgtagtatataatcataggcaaacatcattagaaatagcaagaatagygtgcaatgctatgttttgtagagagatggatagatcacattttattatatcacaaggatttcctatagaaatgtaaactattatataatggtggtgttaaatacagttatataatgtttatcaaaaattgtttgcactcaggctgtcttaagcacaaataat

SEQ ID NO: 477128 - DNA, 634 bp, Homo sapiens
tattggctttattaacaagttcattttggttagaaaaaaatatatatatgaataaatacatttgttaaaatattattcattgtaaataaccattaaatttgttackataatacaccaaaatttacttgttgatggtttcatacattgaaccacatgatcaaaatagtcacatgtttagcaacattaaagcattgctgagtgttttaatcctgtgtgcacactcttcaaattgcagctttctaagagtattatatgattttatttgaaatgtttgtaataatacataaattatgctaaaggtatttcaaataatcttctgaaagtattgctttataaaaataggatgcatcattcaagtatctagattttgcagtgtttttgcaatctctcaaacaaaaaatagaatcaattttcatgtctttttaaaaaattgtcttctttctgtaaaaattatctaatgtgtcaagaaaaataccctcttgtctagaatccttgtcatgattctctgcactatattgcctgtatagatgctgcttgacattgtaaataacttttacaatactatcataagtaaacaaaacaagatacatgaatttattcttgctggatgacccacttttattacataaatgac

SEQ ID NO: 477129 - DNA, 634 bp, Homo sapiens
tattggctttattaacaagttcattttggttagaaaaaaatatatatatgaataaatacatttgttaaaatattattcattgtaaataaccattaaatttgttacgataatacaccawaatttacttgttgatggtttcatacattgaaccacatgatcaaaatagtcacatgtttagcaacattaaagcattgctgagtgttttaatcctgtgtgcacactcttcaaattgcagctttctaagagtattatatgattttatttgaaatgtttgtaataatacataaattatgctaaaggtatttcaaataatcttctgaaagtattgctttataaaaataggatgcatcattcaagtatctagattttgcagtgtttttgcaatctctcaaacaaaaaatagaatcaattttcatgtctttttaaaaaattgtcttctttctgtaaaaattatctaatgtgtcaagaaaaataccctcttgtctagaatccttgtcatgattctctgcactatattgcctgtatagatgctgcttgacattgtaaataacttttacaatactatcataagtaaacaaaacaagatacatgaatttattcttgctggatgacccacttttattacataaatgac

SEQ ID NO: 477130 - DNA, 634 bp, Homo sapiens
tattggctttattaacaagttcattttggttagaaaaaaatatatatatgaataaatacatttgttaaaatattattcattgtaaataaccattaaatttgttacgataatacaccaaaatttacttgttgatggtttcatacattgaaccacatgatcaaaatagtcacatgtttagcaacattaaagcattgctgagtgttttaatcctgtgtgcacactcttcaaattgcagctttcyaagagtattatatgattttatttgaaatgtttgtaataatacataaattatgctaaaggtatttcaaataatcttctgaaagtattgctttataaaaataggatgcatcattcaagtatctagattttgcagtgtttttgcaatctctcaaacaaaaaatagaatcaattttcatgtctttttaaaaaattgtcttctttctgtaaaaattatctaatgtgtcaagaaaaataccctcttgtctagaatccttgtcatgattctctgcactatattgcctgtatagatgctgcttgacattgtaaataacttttacaatactatcataagtaaacaaaacaagatacatgaatttattcttgctggatgacccacttttattacataaatgac

SEQ ID NO: 477131 - DNA, 607 bp, Homo sapiens
agcacgcacagccttagactgactagctaacgagaaaaaggtactaatttaatggtcatccttaagcatagcttccttgagagggatacatctgcaaggctccttcacactccatccggaataggtaatggcctcacgtctgtaaaaagcatctggaactgtaagaaatgttgagaattcttcccttacttctcccacattttatttcagaaatgttaactcggatggtaggatggtcccagaaataccttgacacaaatcttcaggacagcaattgaagagacaacattcagttgattaattggaaaaatggattttctgatttcaataatgaygtggacctagtgttaaactttggttttgttttagccctatttcaattatctttaacgaaaaccttttaatttgactcacactaattagaaggtatcagtcagcattttgcttcctcatttcactaagagaagatggagaaaaaattttaatcactttatatttgcagatttccagctttcttcagatttactctgatcaaagcccaacatacctcttttgatcaacatcagtgaaataagttcctgtgaaaacatcaaggtagatgcatcat

SEQ ID NO: 477132 - DNA, 607 bp, Homo sapiens
agcacgcacagccttagactgactagctaacgagaaaaaggtactaatttaatggtcatccttaagcatagcttccttgagagggatacatctgcaaggctccttcacactccatccggaataggtaatggcctcacgtctgtaaaaagcatctggaactgtaagaaatgttgagaattcttcccttacttctcccacattttatttcagaaatgttaactcggatggtaggatggtcccagaaataccttgacacaaatcttcaggacagcaattgaagagacaacattcagttgattaattggaaaaatggattttctgatttcaataatgatrtggacctagtgttaaactttggttttgttttagccctatttcaattatctttaacgaaaaccttttaatttgactcacactaattagaaggtatcagtcagcattttgcttcctcatttcactaagagaagatggagaaaaaattttaatcactttatatttgcagatttccagctttcttcagatttactctgatcaaagcccaacatacctcttttgatcaacatcagtgaaataagttcctgtgaaaacatcaaggtagatgcatcat

SEQ ID NO: 477133 - DNA, 607 bp, Homo sapiens
agcacgcacagccttagactgactagctaacgagaaaaaggtactaatttaatggtcatccttaagcatagcttccttgagagggatacatctgcaaggctccttcacactccatccggaataggtaatggcctcacgtctgtaaaaagcatctggaactgtaagaaatgttgagaattcttcccttacttctcccacattttatttcagaaatgttaactcggatggtaggatggtcccagaaataccttgacacaaatcttcaggacagcaattgaagagacaacattcagttgattaattggaaaaatggattttctgatttcaataatgatgtggacctagtgttaaactttggttttgttttagccctatttcaattatctttaackaaaaccttttaatttgactcacactaattagaaggtatcagtcagcattttgcttcctcatttcactaagagaagatggagaaaaaattttaatcactttatatttgcagatttccagctttcttcagatttactctgatcaaagcccaacatacctcttttgatcaacatcagtgaaataagttcctgtgaaaacatcaaggtagatgcatcat

SEQ ID NO: 477134 - DNA, 600 bp, Homo sapiens
aaatcatacaaccagctaatgatagaagtgagactaagacgaaagtctctagacttccaagtttcatacttcttctgctctattccacttttactttgaagaggggttgccattgtctggacaaaaatcctaactctcctttatgtctctaaaatacttttgggggcttagagtgtgaaagttctgcaatgataataataggagcacaccgtcttgagaacttattatgtgccacgcacttccaatgtatgatatcatttaattctctaaacaactctgggtagtgggcactattaatattttcattttctagatgaaaaacaaaaaggtttggaggagaattagatgtcacacctgagaagtcgtaaatccaaggttcaaatctagcttgactgagtacagagtcaaagattataactaggaaactatagactatgggtttgttagaaaccatttgcccttatgtagcagaaatggtgttttatttagatctttttggtattttcatattaatcatgtatcaayatgtcatttgacctctactatctaaaggacatgctgattttccccaaatgataaataaaacaataacaaaagtag

SEQ ID NO: 477135 - DNA, 531 bp, Homo sapiens
tgttcaggctctttaggagactcagacttagacctgatggcagagagaagagagattttaaccatgcttcttcggcggcatccatggacagaaaggctatgaaagtattttaagcaaataaatgtattataaatatttacacaacacaagaatttttactattatcagaggatgtgaaaaatatattaaatagacatgatatgatcatttcatttgaataaagaaagcacagtaaagtatcccaagaaaaagttgaagaaacaaaaatattaactgtcaaaacttactaaggttgagtgacaatacaatgttttttcttggtaactttgygataatgtattttgggcaatttctattgagatacactataaaagtttgattttatttataatttttataataccctcttcccccacacactttctggatgaaaacagcctgaacttctataatgttttctttcaaggaaatatttagcacagacatacacaaaataaataaaacctaaaacctactttaaaaagcttctgt

SEQ ID NO: 477136 - DNA, 435 bp, Homo sapiens
tttactttctgtgaccccacttttgaacagytgttaaatctaaattttatatttaggtgaatgccgtgtctgcacttaatcctgttaaaaaaaaccattaaatttcctgaggttactgggaaattccagacttgcagaaatttttttttacaatgtagaaatgttaataatgtatgtttctttattacctttctacatgctgctgtgttgactaatctgtgtaataggtatgaacacaacatatcacatttttttgaggctatttcttctatcatgttaatcagtaatgtccagcaggaggaaattagcaaattgtatcccctagaaatgtatactctgctcttctctaaatcaggatcagaggctgtcgtctgtcaacccttttctttctttggggttcttattggtaaaagatgtttgtatgaagcagcagcc

SEQ ID NO: 477137 - DNA, 574 bp, Homo sapiens
agcatttaaaagccttgctgccaggcgcagtggctcacgcctataatcccagcactttgggaggccaagccagggggatcacctgaagtcaagagttcgacaccagcctggccaacatggtgaaaccctgtctctactaaaaatacaaaaattagcccggtgtggtggtgtgcacctgtaatttcagctatttaggaggctgaggcaagagaaccactggaacctgggaggtggaggttgtagtgagccgagatcacgccactgcactccagcctgaggcatagagtgagactctgtctcaaataaaaataaacaaataaataaaattaaaaagccttgctgctcaaaatgtggtgtggagacagtagcatcagcaatacctgggagttggccagaaatgtcaaytcttaggccccattccagacagaccacattttgacaagatccccagtgattcctgtggcatttgagtcgcactgcctacatttaatagctgaaggctgggacttcatcaagtttacagaccaggttatatggatgctcttttcttttttttttctttttggatgccagt

SEQ ID NO: 477138 - DNA, 519 bp, Homo sapiens
cttctgcaaggatgtgttgctggctattgcttttcagcactgcaccaccaaacatgccgcaaggaaaagtgaaatctggcagcaaactctcaccttctggagtctgtctaatgttctgcttggatttgtgtataaagacacaggcactgtattgcttttctcagatgtgctgtctgcctttgacttgtacttcttcgatagaaggaactttccttttctccctgttattcttcctatgaccttagattcaaggagaataaaggaatataatttggaacaataaatccttctcatctttcaggtttggttgaaaagcttacctcgctattccctaaacacctagctattataaactcttattgacctgctattgtctgtaccctgttagatccttattcacttttatgtgtttgtatctcatctttccaactagaccatgagctccttgaaggcaaagactgcctcacactgttatgcacctccacmgtccctaatctcagcaccttacacatagtaggc

SEQ ID NO: 477139 - DNA, 599 bp, Homo sapiens
tggtatttaccctttgatggattaatttatcaggaggagacactgctgattacaaatataatctccaaatgagagccactgtgtcttagattgtgcttgtcacacttgaatgtgcatatcacttatctggggattctggcaaaatgcggcttctgcttgctaaaactgcggtggtgcctggattctgcatgcccaaatcccaggcgatgccaatgattctggtttagggaccccattttaagaatcaagaccttagacatgaagaaaattagaygtgaataaatcatttagaagtcatttctttgctttttacattttacagagccatacctagatcacacttctggttgatgtgaatctaaccagtttagagactttcagaaatattcaataaccaattaagggtcttctacacaataataatagctagtgtggcagggtaattcactgaggtgctaatttgcatgtattccctcttatttctcatgcatttgttctgagcaagtagtcaagcccattcaaatgctttgcatcagaaacttcgagacacggggtgggagggcaagagctgctggaagactcccttcttgtctcttttg

SEQ ID NO: 477140 - DNA, 644 bp, Homo sapiens
gctgtgatcccactctatcctgtccattctcactttctatgtatatatctccatttctccccgtgtgtatttctctctgtgtgcctgtctctctccctgtctctttctcatcccaccatactatttgcctctccttctttcccacacaagctctcctttttgcctggcctccagttgctgagaaaattgtttctttraagtgggcatttcccagtgaactgtgatgtgtcctggacagtatgtgtatagtggaaagagtgtcaagcatggaattgaaaggcctggcttccaatccctactgtgccattcactaactcctcacctcaactttcttacctataaatgaggcttcagcacaaaactgtgagaattaaatgatataatgtctgtaaagtctccttccacagtgtctggcacataatgattttaatggatcttgcatctggatcagtggagaatacctaaattacaccatcagactatttttaccctgatatgcccatatggggtagaagtaaagaggcatttctattactaatataattttctaatcaagaactacctctggggtcatcaaaaaaaaaatccaaattatttattcaaccagacccattattctcccttttaaaaaaatacaaaactag

SEQ ID NO: 477141 - DNA, 590 bp, Homo sapiens
agttgcaatcaagacctaaccccagttctttcaacttcaaaagctcacatttattttttttttttttttggttatcaattgttcctcagtttaaggcctgcattctcaatagggcaaaaattgaggttttggtagaaccaaaaattcttatttattattacaatggcttgtggtcttccagtgtgtcattgtacctaaacaaatacacagcatatatgtggtattaaaatttcatggacaggaggtgattaggggaaaaacatctaaaaagtctgttgaaggggacagtcatgaamacaggttgagaaacactgctctaagtatagaatgaggtcatctatatcagagtcttctcccatgccaactgaaaacacaaatttaagtcccactccttgcaggtctaccactcttcccctcacctctgttagaatttctagggctggtgcctgggagcctgcatgaacaccaaactcctcagatgacacttactcaggtttaactttgagatcccctggtctgtcggtgagcttctgaactccatcagctcccaacgacacacagaactgggctgtccttctcactgcccctgt

SEQ ID NO: 477142 - DNA, 590 bp, Homo sapiens
agttgcaatcaagacctaaccccagttctttcaacttcaaaagctcacatttattttttttttttttttggttatcaattgttcctcagtttaaggcctgcattctcaatagggcaaaaattgaggttttggtagaaccaaaaattcttatttattattacaatggcttgtggtcttccagtgtgtcattgtacctaaacaaatacacagcatatatgtggtattaaaatttcatggacaggaggtgattaggggaaaaacatctaaaaagtctgttgaaggggacagtcatgaacacaggttgagaaacactgctctaagtatagaatgaggtcatctatatcagagtcttctcccatgccaactgaaaacacaaatttaagtcccactccttgcaggtctaccactcttcccctcacctctgttagaatttctagggctggtgcctgggagcctgcatgaacaccaaactcctcagatgacacttactcaggtttaactttgagatcccctggtctgtyggtgagcttctgaactccatcagctcccaacgacacacagaactgggctgtccttctcactgcccctgt

SEQ ID NO: 477143 - DNA, 635 bp, Homo sapiens
gacattggctggtgcaaaggacgtgaggcagaaaatgactggacatgaaactcaagaataaggaccagagatcttagacctcgtttggtggggtttttgaattacagggcaccgactatgtacagttgaggcccatcataaataaatctcacatcactcaacatggcataagcttggatcattgaagactatttctattcactgaaggtttttgtgaaccttctgaccacaggccactctcccagactcagcccttggaatggggatcacagtaatttttttttttgttcatctaaactgcttttcctcccaatcaagatctcattaattcccattctatctatcctatgccctttagactcctatcatatgttgtaattatttacttgcaagtaacagaaatgtattcagacaagtttaaatcaaaaagttgagtttaacatrgggtacatgaatgtcttacagaaactcaagacaggggcacatcttggcctcaaaagagagtggattcaggaaccagaagaacattcaagagcatctcttcatctcttatctctgcttccatctgcaagtcacagagaccaaagaataaagctaaaaggcatgctctgcatctttggtgtgcatggcagaga

SEQ ID NO: 477144 - DNA, 481 bp, Homo sapiens
gctccagagtctgcatgtagctttctgtggggaactctgccatctttacatttaacacatctctgctgacagaccagcactattgagctggtgctttgacaaccacgtcgacaagagaccaggagagatgccatgtaaaggtgaaaggacagtgactaaggggagcaaatgascttttaaacgagcctgacaccatccagctagttttcatactccctcctgtgaaaaatcttgacatattggtacattgctatgagttatttatttatatcggtgtatagtggcctaatattatttgctcttgcagagtgttatctaggactacaaacttattttattttaagctcaatgacatttcatcaacagttaacacagcgtgagtagctaaaagtcacttcaggacagtacatgaggcctctcagatgttgttgctttattgcttgactggatagttctctggctttctctacttttgatggtt

SEQ ID NO: 477145 - DNA, 681 bp, Homo sapiens
gctcccagaagttttcagacagtcaaaggaatagggactcgagatcgtaagaaaaaccctcatcttctcagaccattgcagtaaacaaaaacttctcattccaaaaataaaaaataaaaaaatgaggcagcacaggggggaagcctgtggcctctgcaagacaaatatcccctagtgtgtgtttattcagatcagccatagcctagtcacacacagccagggattccccggaggggtttcccatggttctaattagatgaactatttgccagaagtgtagacagcctcactccctggaagagactatgttagcttttggcaaaataacctagtggggaaagagtgaattctayaaacttcctccgagcatcacccagatttgagaggatattgtaaaagtaatattacagttctcctgccaaaattaaggaagggaggctttcatttggtttgaactttcttcaagaaatacaccaaagctaatgcatgattccatttgggcaatacggggctccgccttcctcacccagagcattgctctgcttgaagcccagaaccttctcggtaaaccatacagggaagctcacaaatggggaaacaaagctcaatgctccaagtgagattagggaaacaccaaaataaatactgacaaccaaaaaagacaatagataaataccctgt

SEQ ID NO: 477146 - DNA, 482 bp, Homo sapiens
aaaacctcattattttcataactcataattcatgctacattagtttaacatctcattaaatattcagcagctttccactgcccaaagaataaaagccaaattctttcctatgatatacaaaacccctcataattgtatccccatctggttttccagcctgatctaccttgatgtcccatcggtctcctgtgctctagacatacgtctcatratttctcattccttgaatgctttcagtgttttcctatcctagcagttcacttacactgttctctgaaattgagctgttggctacactctgctccactaaaaaacttaagacacactcactgttgaaaacccgataatttagcttctcatttgctagctattcattagcaactccttaacctaaacaggacacatttttaatggataaactataattgatttattcattgttttattgtttaacatacaatatttataaaagttcattgtta

SEQ ID NO: 477147 - DNA, 473 bp, Homo sapiens
ttgctgaagctcttatatcaacttttctttcactcctgacctctgcttcagttggcttcattttcttratgtatttgtatgtgagatggaatgagagtgcggagagggtaaaaaatgttctcccaaggccatgcctacttctcaaaaatgaactgaaaaattgtccagttagctgagtctcttaggcctaaaagcaatctttatcctcaaataatgaaaactaagcaaaaagtatgagtctacggagaccaaattcagcaaataattgtctccatttgccattttcttcctgcctgtagtgacaaagaaaaactcctccagtgtttttccatctgggctcattcacatggaacctttgctcaggatgtggagaggtggggaggttaggctgagaggaggccagaagcactcccgtggaaaagttcagttgggataaatgcgcagatacagggaaactcagacctcagaagagc

SEQ ID NO: 477148 - DNA, 473 bp, Homo sapiens
ttgctgaagctcttatatcaacttttctttcactcctgacctctgcttcagttggcttcattttcttaatgtatttgtatgtgagatggaatgagagtgcggagagggtaaaaaatgttctcccaaggccatgcctacttctcaaaaatgaactgaaaaattgtccagttagctgagtctcttaggcctaaaagcaatytttatcctcaaataatgaaaactaagcaaaaagtatgagtctacggagaccaaattcagcaaataattgtctccatttgccattttcttcctgcctgtagtgacaaagaaaaactcctccagtgtttttccatctgggctcattcacatggaacctttgctcaggatgtggagaggtggggaggttaggctgagaggaggccagaagcactcccgtggaaaagttcagttgggataaatgcgcagatacagggaaactcagacctcagaagagc

SEQ ID NO: 477149 - DNA, 564 bp, Homo sapiens
tcttttttaaacactttttttctctttgaggtgaccttgagtgagggtagcagggagtagaagagggggaagaggaaataaaattgattaagaaaggtgggtaygagtaaatttggaaggtgcaggaaagggcttccctggacacaagaggctcctgagaacattattccagtgagaaggtctgggactgtggaagatgagaggccaccagaataataagcagacagcagttcaggagtagcttcttaatttaagtgagaagccttttgtcaagtaggaatctagtgttgtttcttgaaatactagatcttagaaaggaaactgtagggccaagcatcatcacacaaatagaggaatccaggtttcagtgaatttattatattcaaataaacttacatttccatgtagatattgataggtataatattgcaataaaagagtacagcccagaatatagtatagcctcagtgggcttcagcgctatgtccataccaacatgtgtccatctttctgagcccttttattgaagttcaaggatcttgcccatctctctctgcttattta

SEQ ID NO: 477150 - DNA, 527 bp, Homo sapiens
ttcaagtgattctccccctgcagcctctggagtagctgggattacagatgagcgccaccacgcccggctaatttttgtatttttagtagagacagggtttcaccaygtttgccaggctggtctcgaactcctgaccacaggtgatgcactcatcttggcctcccaaagtgctgggattataggtgtgagccactgcgcccagccttgtgtgatgctttggtgtgactataagaagcttcaagattgagtagggcaggcttggctgattggctgattgcaaatttatgcacatgggcctgtgtgtgtgtgtgtgtgtgtgtgtgtgtgtgtgtatagtcagagatgatggtagtcatgtgttctgagctatgggtagtttccattcttcttctgttttcaggatatttcaagatggctgtaggaacaagtttctcttgacccatttgcctgtcaattcagtacacaatcaggcaaaggaaatatctctatgcaatattccagtgcctcctgttctatggaatgccctg

SEQ ID NO: 477151 - DNA, 527 bp, Homo sapiens
ttcaagtgattctccccctgcagcctctggagtagctgggattacagatgagcgccaccacgcccggctaatttttgtatttttagtagagacagggtttcaccacgtttgccaggctggtctcgaactcctgaccacaggtgatscactcatcttggcctcccaaagtgctgggattataggtgtgagccactgcgcccagccttgtgtgatgctttggtgtgactataagaagcttcaagattgagtagggcaggcttggctgattggctgattgcaaatttatgcacatgggcctgtgtgtgtgtgtgtgtgtgtgtgtgtgtgtgtgtatagtcagagatgatggtagtcatgtgttctgagctatgggtagtttccattcttcttctgttttcaggatatttcaagatggctgtaggaacaagtttctcttgacccatttgcctgtcaattcagtacacaatcaggcaaaggaaatatctctatgcaatattccagtgcctcctgttctatggaatgccctg

SEQ ID NO: 477152 - DNA, 527 bp, Homo sapiens
ttcaagtgattctccccctgcagcctctggagtagctgggattacagatgagcgccaccacgcccggctaatttttgtatttttagtagagacagggtttcaccacgtttgccaggctggtctcgaactcctgaccacaggtgatgcactcatcttggcctcccaaagtgctgggattataggtgtgagccacygcgcccagccttgtgtgatgctttggtgtgactataagaagcttcaagattgagtagggcaggcttggctgattggctgattgcaaatttatgcacatgggcctgtgtgtgtgtgtgtgtgtgtgtgtgtgtgtgtgtatagtcagagatgatggtagtcatgtgttctgagctatgggtagtttccattcttcttctgttttcaggatatttcaagatggctgtaggaacaagtttctcttgacccatttgcctgtcaattcagtacacaatcaggcaaaggaaatatctctatgcaatattccagtgcctcctgttctatggaatgccctg

SEQ ID NO: 477153 - DNA, 499 bp, Homo sapiens
tgccacacctaatcctccttagaaagcagtttagggaccacgtactctctctcacccatatccccagaccatcacctctacctgctttcctaagtattcacctaaccaataagtctttttttgtgtggcaggtgggggagcgaaatctgttgtcaaggaaataaagtgtcctccacattgttacatcatgtttcatgtactttgtatgaaccaagttattaatttttttacaatgacactattaggtacctattatattatcacttaccaytttaaagatgagaggcctgagtttcaggatttaaatttccccagaattataactagggtaactagggtaaccaaccatctcagattgcctgagactgaccccattttaaatatgggaagtttcaggtcctgggaaaaacctctatcccaagccagtaaaataaaccatatcccaggctagtaaaatagtaatggttgattctcaatccaggttttctgacagattagg

SEQ ID NO: 477154 - DNA, 466 bp, Homo sapiens
aggttacccacacctgaagaacttcccagccaacttacataatcatgagaaatattcagtgcttgttatcttaagccactatgttttcagaaatttgttattcagcaaaagctatctgatacatcccttttttatagaygaagagcccaaggctccgaaagctcaagtcattttgccaagaatcctcaaataaaattggcagagcaaggatttgatccccaggcttatatttagtgccctgaattacctgctttcccctgcaacttgctagcacgtagagagagatgcctgagagaaaatttccttaagaaacgctaactcccccatagagccgtcatcacccattccattttgaggaaagctggaaactctccagtcctctagagaatttctgcttggataggcacagcacagacctgaaagtgtttctctagatggcattttcgtaagtggaagctcacttttc

SEQ ID NO: 477155 - DNA, 641 bp, Homo sapiens
gacctatctgatactgggggaaatgagtaacccttgttcatgaatggtactatgtccaaatctcttctctataatactgtctaggattcttccttggtcagtgatacggtttggctgtatctccacccaaatctcaacttgaattgtatctcccaaattcccacgtgctgtgggagggacccaggggaggtaattgaatcatgggggctggtctytcctgtgctattctcgtaatagtgaataaatttcatgagacctgatgggtttatcaagcgtttccagttttgcttctccctaatttttcttttgtcgctgccaagtaagaagtgcctttcacctcctcccataattctgaggcctccccagccatgtggaactgttaagtccaaataaatctctttttcttcccagtttcaggtatgtctttatcagcagcacaaaaatggactaacacagtaaattgataccagtagagtggggcattgctgaaaagatacccaaaaatatgggggcactgctgaaaagatacccaaaaatgtggaagcgactttggaactgggtaacaggcagagattggaacagtttggagggctcagaagaagacagacctacccttaacctggtgggcacaatctaatcag

SEQ ID NO: 477156 - DNA, 380 bp, Homo sapiens
tgcgtagaggcacagcccagacagactcttgtgttcccaggcgcacgtggcattgctgtgcaccggagcacctgaggacctgtgtcctcatcctggcagtgtccctctccaggtaagggacttcgaacttcagtgycccctctctgctcctcagtatctttgcctgcaagataagggggtgggctgggtggtctccaggctcccacctgctgcctactgcttgccatgcagaatggcccagaatctgagacgaggagcaagaacagacatagcctaggtgacccccaggatgccagaaggtgacttcaaacctcatctcctgggcccctaccaagaggtctagtatcaggagtcaagttcagagacaggaagcatgagga

SEQ ID NO: 477157 - DNA, 659 bp, Homo sapiens
atcaacatccaagatcctgcagtaaggagcccaggctgctctttatgaatcccaggtcatcactacgtggtctgctttcccaaaggtgctctgcccaaagccaaagggaccagtaggcaacagccatgttaactgtaggcggaattagccagccctgtaattccaaagtgtttagctttggagcacaaaaagttaaacaccttcttgcaacacattgtaaacatgtcagtgtgtttaacatgttaaccatgctctgttctcctgcccatgtgtttagaaaagaaacaggttatgatgtttaactagtgaatagatgtatgckctcatagcggctaacactttctaaacacttgtggatgcttaaaattatgatgtgtttaagattcaaacacatttgcttttctacactcttaatccaatgagtgctggctgcattttttttttttctaattgcgagggtttgtccaccttgcaaaggccagtctgccatgatgagttccaagagctgtcaattggccttttttttaaaattagcattttctttgatacacgaatccccttctcaaggaaaggaataactagaagagtgtaaataatggtcattctctagaggatgttgagagtcctattctgttagagaatttaaagggttttactgg

SEQ ID NO: 477158 - DNA, 326 bp, Homo sapiens
aaaaacccagaggaagagctgatcatgtgctgcccacctggtctactccagtgaaacaggatcatttctaattagccagactctaaacaaatgggtacaattgacatgctgggaacatttttgtttaagtgataatgaaaatattttccctttattacgtgcttgactcggatgtgtggcacaggatggcacttcataaccgcttgagaaagtgaggcaggtattcatgtcactattttacagattaggcacccagcataagttaatgccagggcaagaccgtttgtaagscaggtctcctggcttatcccctcctcatgttactg

SEQ ID NO: 477159 - DNA, 566 bp, Homo sapiens
atgatttgcaaaaattttctcccattctgtgtgttgtcttttkactttcttgattgtatcctttgaagcataaaactttttaattttgatggcatgctgaataacttttgtatttgatatgagaagcagaggcaaaaatatcatgatttgtagatgacatgactgtatatcctgaaaacccaagagaacctattgaaaaactgttgaaaacaagagaattcggtaataaatccggttattaaattaatatacagtaaacaatagcctttatagaaataaatatgtaacagaagatatagtagaagaaaaggccctattttcaatagcaaaaatagtataaaatacatgaaaataacttaaaaatttcaagaaatatgtgaaggaaactttaaaatactcctggggacgcaaaaggagcttgaaaagaataaaaggtatattatattgttagatatggagattccacatcatgaaaatttcaattttctattcagttattttataaataatgtaaatctaatatgattgcaataaagacacctataggacctttttcatggaactag

SEQ ID NO: 477160 - DNA, 603 bp, Homo sapiens
tggtcatgtgttgattggagaacagtcactttttatagagattgatgtctctttgtgccttagttttctatttttcctatttctgtcattgcaaattaaaacctatacttctttagaaagaaaggatattattcgatcacgatctgattcaaactttgcttggatctttgtctctccagggtagaagattaaattcctgtggttttctttccttaggaaaatggactcagacttctcacatgccttccagaaggaactcacctgygtcatctgtttgaactacctggtagaccctgtcaccatctgctgtgggcacagcttctgtaggccctgtctctgcctttcgtgggaggaagcccaaagtcctgcaaactgccctgcatgcagggaaccatcaccgaaaatggacttcaaaaccaatattcttctgaagaatttagtgaccattgccagaaaagccagtctctggcaattcctgagctctgagaaacaaatatgtgggacccataggcaaacaaagaagatgttctgtgacatggacaagagtctcctctgcttgctgtgctccaactctcaggagcacggggctcacaaacactatcc

SEQ ID NO: 477161 - DNA, 426 bp, Homo sapiens
tgctgacaacatttatattagcaacttgagttgaaattcttatgccagattttgtcatgtgtttattcataggctggaaaacaaccagactgttcaayataacgattgttcaggttttctgtaaatgcttttcagataagtaaaaaataaatataaattctgaagggcaagtatgtgcttaaaattaataagtatttcagacagagttttctgtataaaattaattatgaaatgttgattaaatagtatataattgagaaataaaggcatttattggtgaatatgatattgtccagggggaagaaatcgggtgggaacagtaatttaagaaatgtgcctgtgctggtgaaatctgatagcaaaggacccacatgatgccagtccgagtaggagaaaatgcaacatgaggaaaagctgaggagaagg

SEQ ID NO: 477162 - DNA, 426 bp, Homo sapiens
tgctgacaacatttatattagcaacttgagttgaaattcttatgccagattttgtcatgtgtttattcataggctggaaaacaaccagactgttcaacataacgattgttcaggttttctgtaaatgcttttcagataagtaaaaaataaatataaattctgaagggcaagtatgtgcttaaaattaataagtatttcagacagagttttctgtataaaattaattatgaaatgttgattaaatagtatataattgagaaataaaggcatttattggtgaatatgatattgtccagggggaagaaatcgggtgggaacagtaatttaagaaatgtgcctgtgctggtgaaatctgatagcaaaggacccacatgatgccagtccgagtaggagaaaatgcaacrtgaggaaaagctgaggagaagg

SEQ ID NO: 477163 - DNA, 434 bp, Homo sapiens
tcttgctcccatgtagaacagcagggcccagcggccacctgcacctcgccatttcctccagctctgtgctagaaatgatgcaagcaggaaaaccatttgcttgtggacctactatgtgtcaggcacctgctgaacagtagcatttgatgctctcgacggccttaacaggtcggcactgatctgttgatgctgcagttgaggagctttagcttagagaggttaaatagcatcctcaaagtcacccaggtcatgctctgcttctggagaggctgggatgcagcatgggagtgtgacctcctgagcacggactgcacgggccgcctcgcagccggcatggtgaggtgagatgagttgaggtaagctcgcagctccttggtgccagcccttccacaaccagagttgggckgcagcaggctctgccccagcttacctgg

SEQ ID NO: 477164 - DNA, 581 bp, Homo sapiens
tactctgggttcctgccctctgctacctagacctgctctctagaatgggcctaacatggttaagccatgttcacagatccctcacctttcagttgttacgatatgtatctgatggcattagaattgtcctgattatggatattttagtcattttatttgttgatcaaaatgttctgattttgtaaataataaagattacttgtagaatgcatgtaaatgcacatagtatagaaacaattaaaaaccattatgccaaatctaaaccttcaaaattgaattaaattgaataaacacgaaatactgatgccaccaggagaactagtgtcttcataactacatgatatgaatattctttgtcttcttattctgcagataaactatgtatcttgctttacattttcatcaagctgtaagtcaggaaattgagttttgatcattgtaatattactacgcaggtagagaagatgcacatattttggaaaagtatgkgttacctacatgtcaaaaacaataaaacttaaatgggaaaatcctgagccaagggacccaataaggaaataattggaggctggactgccaag

SEQ ID NO: 477165 - DNA, 590 bp, Homo sapiens
tcctactaatgagaatgcaagtattgctttttttttttttttaacatttcatttgctttccactcactccaccctgttctgttgttgttggcttagagtttaatctgttgctaaacactgggaagtytgggcttctcgggtgttagtgaggagagagccaaggtgggtctggggcagtggctggaccaaggcctccaaactgtgccctgtcctacatgcagtgcttggtggacatggagttggcatacccaaaggatgggccatactgagggaaaatgaaagtcctggtgtcctctgctgtattttggggtggcttcgtgcattgggtcagggttgcagtatttgggggcttcgggacaaaaaatttagagtagagcagtgtccttggctttggacagacaggaggatggacagaatgaccaaggaaacataagcaacatttgtggggtgtggtatagctgggtgtgaggatgagtgtgtgagaggggtggagggctccgtctctacctttgtttaatctgcttactgagttattggttttgttttttgtttttttttaagaaagcctttccctggctgcttatcgcccc

SEQ ID NO: 477166 - DNA, 578 bp, Homo sapiens
aatgcaagtattgctttttttttttttttaacatttcatttgctttccactcactccaccctgttctgttgttgttggcttagagtttaatctgttgctaaacactgggaagtctgggcttctygggtgttagtgaggagagagccaaggtgggtctggggcagtggctggaccaaggcctccaaactgtgccctgtcctacatgcagtgcttggtggacatggagttggcatacccaaaggatgggccatactgagggaaaatgaaagtcctggtgtcctctgctgtattttggggtggcttcgtgcattgggtcagggttgcagtatttgggggcttcgggacaaaaaatttagagtagagcagtgtccttggctttggacagacaggaggatggacagaatgaccaaggaaacataagcaacatttgtggggtgtggtatagctgggtgtgaggatgagtgtgtgagaggggtggagggctccgtctctacctttgtttaatctgcttactgagttattggttttgttttttgtttttttttaagaaagcctttccctggctgcttatcgcccca

SEQ ID NO: 477167 - DNA, 526 bp, Homo sapiens
tccaccctgttctgttgttgttggcttagagtttaatctgttgctaaacactgggaagtctgggcttctcgggtgttagtgaggagagagccaaggtgggtctggggcagtggctggaccaaggcctccaaactgtgccctgtcctacatgcagtgcttggtggacatggagttggcatacccaaaggatgggccatactgagggaaaatgaaagtcctggtgtcctctgctgtattttggggtggcttcrtgcattgggtcagggttgcagtatttgggggcttcgggacaaaaaatttagagtagagcagtgtccttggctttggacagacaggaggatggacagaatgaccaaggaaacataagcaacatttgtggggtgtggtatagctgggtgtgaggatgagtgtgtgagaggggtggagggctccgtctctacctttgtttaatctgcttactgagttattggttttgttttttgtttttttttaagaaagcctttccctggctgcttatcgccccaag

SEQ ID NO: 477168 - DNA, 526 bp, Homo sapiens
tccaccctgttctgttgttgttggcttagagtttaatctgttgctaaacactgggaagtctgggcttctcgggtgttagtgaggagagagccaaggtgggtctggggcagtggctggaccaaggcctccaaactgtgccctgtcctacatgcagtgcttggtggacatggagttggcatacccaaaggatgggccatactgagggaaaatgaaagtcctggtgtcctctgctgtattttggggtggcttcgtgyattgggtcagggttgcagtatttgggggcttcgggacaaaaaatttagagtagagcagtgtccttggctttggacagacaggaggatggacagaatgaccaaggaaacataagcaacatttgtggggtgtggtatagctgggtgtgaggatgagtgtgtgagaggggtggagggctccgtctctacctttgtttaatctgcttactgagttattggttttgttttttgtttttttttaagaaagcctttccctggctgcttatcgccccaag

SEQ ID NO: 477169 - DNA, 526 bp, Homo sapiens
tccaccctgttctgttgttgttggcttagagtttaatctgttgctaaacactgggaagtctgggcttctcgggtgttagtgaggagagagccaaggtgggtctggggcagtggctggaccaaggcctccaaactgtgccctgtcctacatgcagtgcttggtggacatggagttggcatacccaaaggatgggccatactgagggaaaatgaaagtcctggtgtcctctgctgtattttggggtggcttcgtgcattgggtcagggttgcagtatttgggggcttcgggacaaaaaatttagagtagagcagtgtccttggctttggacagacaggaggatggacagaatgaccaaggaaacataagcaacatttgtggggtgtggtatagctgggtgtgaggatgagtgtgtgagaggggtggagggctcygtctctacctttgtttaatctgcttactgagttattggttttgttttttgtttttttttaagaaagcctttccctggctgcttatcgccccaag

SEQ ID NO: 477170 - DNA, 684 bp, Homo sapiens
cagctgggggagacaaaccacaaactaatgataaagaaactgagatacccagtatcttaagggagtgacaaggctgtggagaaaaatcaagtgtgtaagggagtctctgctcctacaaggaatgtgctaggagccaggagacacagagggacaaggaggacctttatgtcaccagcacatcaggaatgctgcctgccggggcccaccaacaccctccaccagcaaggctccagggagagccacaggggcgagcctttgaacactttgggaacgcagatccccttgagaaccgtatttcagcactccaggaagaagcaccaaacacataatcttgcccataatttcaggagctttatggaccttctggrctgggaccccactgtgttaaacatggagtgtcaggcaccatagcccttcagatgcagaccccacccccagcccagccctacagggtccaggtcccaaagccaacatgagatccccttgatggccctcggggccgtcccagcagctccaagctctcgcacacttgccgaagcaaggctcgtggatggcaggcagcttcttcatctctgatatcccgtaggtcaccagggaaggaggaatcctaattaagcagacaggatgaggactgcttttctgccacccagggtctgtcacactgaggctagcctggcctctggc

SEQ ID NO: 477171 - DNA, 373 bp, Homo sapiens
agggcatgcttattcgtttgtgggtggctttcttcctgccgggtctggtagaggagggaaagccgcgaaaaggaaggagaaaataggggaggacgaggcgkggccgggcggagcccggggtccttggagccgcgaggccggagacctgagccgggagcctggccctctgctgccctccagcgggcgcggcgcactgtgggcatccccgccggacggactcagcgcggcagcgcggctacggcccgcacctcatccttcccgctgtgttagccaagggagaaatccagctccgctccacgcctataagcgcgagtcctgtttggactcacggcctgagcaattgcagcttccatctagggagcctctgccactc

SEQ ID NO: 477172 - DNA, 644 bp, Homo sapiens
agccacataatcttccactgtctcccagctccttctgcaggagctctttggaaccctgccatattggcttaaaaagcagatatctgaacttctgacactgtccaaaaagacacttactccattgcatataagctacatatcatttgtctggggcttaattgaatctgccccgctgctgccctttgagacattccagcctcgtctcaaatccaagcacacaactggacgtcacatcaccctcgctcagaggcagaggcacgggctctgggaggccagcttcctgggctctgggctgtgactgagttatgactggtgtcccaaggaggctcacagaaagaaagcaggccccgtatgcctcccaggaaagatgtgctggggacagacccaaccctggtggcacagcatgccatgcccaggcctcgcattgcrtccaggcactcaccgaacagtgagcagcatggtgggcggtagatgtgtcccctgctgggagggcctaagtatggaggcaactggagttgggagaccagcccccaaggaacccgacagaaacactgaggaccgatattccagcttccccatgaagcaagacctcaaacatcccagtgacctggccaggctgctgaaccccaagtctgcttttccca

SEQ ID NO: 477173 - DNA, 591 bp, Homo sapiens
ctgccatattggcttaaaaagcagatatctgaacttctgacactgtccaaaaagacacttactccattgcatataagctacatatcatttgtctggggcttaattgaatctgccccgctgctgccctttgagacattccagcctcgtctcaaatccaagcacacaactggacgtcacatcaccctcgctcagaggcagaggcacgggctctgggaggccagcttcctgggctctgggctgtgactgagttatgactggtgtcccaaggaggctcacagaaagaaagcaggccccgtatgcctcccaggaaagatgtgctggggacagacccaaccctggtggcacagcatgccatgcccaggcctcgcattgcgtccaggcactcaccgaacagtgagcagcatggtgggcggtagatgtgtcccctgctgggagggcctaagtatggaggcaactggagttgggagaccagcccmcaaggaacccgacagaaacactgaggaccgatattccagcttccccatgaagcaagacctcaaacatcccagtgacctggccaggctgctgaaccccaagtctgcttttcccagc

SEQ ID NO: 477174 - DNA, 606 bp, Homo sapiens
ctaccaaagcctctatcagattaggtggtcagggaagagctctctaaaaaggtagaagaaaagtttcttcataatttttgtgtcctagaccccgcacctcttgagccctatttccagcattctgtatttctttagcaataccagtttaacacacctctgtgcctttacatatgctattgttttctctgtgtgcaatacacctcctcctcctctatcactgcctccctagtccattagagagaacacttctatattcactccttactctgatcaaaatgctgggttccctactgggaggtctcatctctgtgctctgaacatgcttcaaccagtgcatacaccacactgtacttgattggttttacatttctctctctcctactaaaatgtgagttcctcaaggacaagattataaactgaatygacaaaccacaattgctaattctgtgtttctaataacaaaattgcatataaatttcactagggtgggaaaaacagtatacctaaacatgtttttaaagtaccagaaagtaaactgatgaaaaataaaaccttttcatatctaatatctaaatccatttagaaatcaattcttaaaaaagatat

SEQ ID NO: 477175 - DNA, 655 bp, Homo sapiens
gaatgctatggagtgagatagatggttgcaggcacgaggcgggtgtcatgaaagcgcccctttggcccagtagcaagcaacccagaagtgtgcttatcttgagyttattggggtttcccaggtaggggtcccctcctcgcctgccttacgccccagccctagagcccttgggtccccgcgggctggggcggggttgcctgtgcccggcaggagaaggaggtggtgacgcgtccactcgggccgccccgcggctccgccgtcacgtgtgccggggaggggaccaccgggaggttcccgggcccgcggaggtggcgcgtctgcgagcgcctatttgcatatgcgtaccctggatatttataacttctcttcagccagttccaagttattgatgtcttaaagtgactttaatctgagccttcttttctccaaatgggcttttgatttccggagtgatattatacatggctgtaagctattgactgagcgattgccgttgtgttctcaatgtgctgatgctgaaaatctgcgatataaataaacttcctctggtagaatcattataaagcacaagcagcagaaatttatggaaagaacagattaaatgcttagacttaaattcttcagtgtgctggttgccctaaactgctgtgtctgg

SEQ ID NO: 477176 - DNA, 655 bp, Homo sapiens
gaatgctatggagtgagatagatggttgcaggcacgaggcgggtgtcatgaaagcgcccctttggcccagtagcaagcaacccagaagtgtgcttatcttgagtttattggggtttcccaggtaggggtcccctcctcgcctgccttacgccccagccctagagcccttgggtccccgcgggctggggcggggttgcctgtgcccggcaggagaaggaggtggtgacgcgtccactcgggccgccccgcggctccgccgtcacgtgtgccggggaggggaccaccgggaggttcccgggcccgcggaggtggcgcgtctgcgagcgcctatttgcatatgcgtaccctggatatttataacttctcttcagccagttccaagttattgatgtcttaaagtgactttaatctgagccttcttttctccaaatgggcttttgatttccggagtgatattatacatggctgtaagctattgactgagcgattgccgttgtgttctcaatgtgctgatgctgaaaatctgcgatataaataaacttcctctggtagaatcattataaagcacaagcagcagmaatttatggaaagaacagattaaatgcttagacttaaattcttcagtgtgctggttgccctaaactgctgtgtctgg

SEQ ID NO: 477177 - DNA, 572 bp, Homo sapiens
accgcacagaacatgtttacccagggccaggaggyggggatagatgtttcctaacagtcttgggtttgtttgccatcagtttgatgagtccagttgaccataaacctgtatccagtgggccctccctgcacctctccccttccagccagttttccacaaagaggagggcagcacccacggctgtgcccagggctggcatgtgggtgagggccagtccttcaagacagcagcctgccatgggacagaccccagactcattggcagggccaaccaccaaccagccaggaggctccggggccaatcactccccttcccctccaaaggagatgctttatctcctttgtcccttttcccacaaccacagagtgacgggagccatagggaatctcccaaacagcctagaaaagctgaggaggtgaagggccagcctgaggtaattaaagaataaaattgccctttaaaagtgcacagagatagtgctctccacggcctgggcctctctcacgtgcctgggtggtgactcgggtggctggtggctgagctagagccgctggtactcagatggagaatgt

SEQ ID NO: 477178 - DNA, 598 bp, Homo sapiens
ctagagaaatcacaagttgcgtgtgccttttccaaggccgcctaagacaagctgagcgaggatccccaaaaccagggcaggggtctcgggtggatcttcagagccacatcccaacccccttgccaagctccctccaccccaggcagcaactagggcagtgtgcccagcctcggcttgggsaggacactatagtgtgcggtgacctgtgggaagagagcagttcctctcagtctttctcggggaccaaggccaaaagccagcaggttgcagaagttgcttatcctggaggcaacaaagcaagggtgccttgaagttatggagaccatgactgttccgcaaagcccggcagaaggggttgcaaatgagggctggatatgcaaggagagtccattgaggaaatgtgcatggggcactcacctctgatcgtgactgagcgagtttccttctgaagtccagtgcctcctgctttatgaaagtgagctgtagggtgtggtcaggcagacagcacatgtggagcacccaagatcaagtgctcagccacaggctggcccacccagactggcacagaggtaaaggcagcccgaccctctgtggtcac

SEQ ID NO: 477179 - DNA, 598 bp, Homo sapiens
ctagagaaatcacaagttgcgtgtgccttttccaaggccgcctaagacaagctgagcgaggatccccaaaaccagggcaggggtctcgggtggatcttcagagccacatcccaacccccttgccaagctccctccaccccaggcagcaactagggcagtgtgcccagcctcggcttggggaggacactatagtgtgcggtgacctgtgggaagagagcagttcctctcagtctttctcggggaccaaggccaaaagccagcaggttgcagaagttgcttatcctggaggcaacaaagcaagggtgccttgaagttatggagaccatgactgttccgcaaagcccggcagaaggggttgcaaatgagggctggatatgcaaggagagtccattgaggaaatgtgcatggggcactcacctctgatcgtgactgagcgagtttccttctgaagtccagtgcctcctgctttatgaaagtgagctgtagggtgtggtcaggcagacagcrcatgtggagcacccaagatcaagtgctcagccacaggctggcccacccagactggcacagaggtaaaggcagcccgaccctctgtggtcac

SEQ ID NO: 477180 - DNA, 555 bp, Homo sapiens
taaagctgacagtgactcattatgaataactgacactcctatcactcaggaacttctaagagtttcaggagctctgtaccaggaaccaggggcaaagaacagtatattttttatgtcacgctgaggcacagagaggttaacttgtccaagatcaaatagtatgtgacagagctgagattgaaaattttaaaaattcatatgtatkaacatatacaggaaggaaatatcccaaaatgtttaagttagaagatgggattatattaaaacatatttactaggattataaatttatacatacaacgtcatgggaaatgtaatctttactacaacttggagtggagatgttgcatcatttgacaatcctaaagttgcagaatattagagctaaagaacctctttaaaaataaggaactatgatccacagcatgagacttgatctatatcatacagtgggttgatgacagaactgaagctagaatccagttctctttgtttctgtctgtctcaattttatataaatcagctagatgctcctctggtctgtgttcatgtaga

SEQ ID NO: 477181 - DNA, 555 bp, Homo sapiens
taaagctgacagtgactcattatgaataactgacactcctatcactcaggaacttctaagagtttcaggagctctgtaccaggaaccaggggcaaagaacagtatattttttatgtcacgctgaggcacagagaggttaacttgtccaagatcaaatagtatgtgacagagctgagattgaaaattttaaaaattcatatgtatgaacatatacaggaaggaaatatcccaaaatgtttaagttagaagatgggattatattaaaacatatttamtaggattataaatttatacatacaacgtcatgggaaatgtaatctttactacaacttggagtggagatgttgcatcatttgacaatcctaaagttgcagaatattagagctaaagaacctctttaaaaataaggaactatgatccacagcatgagacttgatctatatcatacagtgggttgatgacagaactgaagctagaatccagttctctttgtttctgtctgtctcaattttatataaatcagctagatgctcctctggtctgtgttcatgtaga

SEQ ID NO: 477182 - DNA, 557 bp, Homo sapiens
tttcaccgtgttagccaggatggtcttgatctcctgacctcatgatctgcccccttcggcctcccaaagtgctaggattacaggtgtgagccactgcacctggcctctttgatattttaaacaggtagctttgcactctaactccaggcatgttcctgctgtgattgttactctgtggctgtctgtcaagggcccaccttgctgggagagatgtggtttccactcttgctacacccttctcctctcccccaataccctccagcgacctctgttttgacaartctgggcatggccctgtctcccacctccattctgctcccattctgtcctctctttttgttctcgttttccttgtttgccatattccctgaatacaaaatcaccagggcttcactggcttcatggtaaatccctctgcaggtctcaactccaaggtcacttcctcggcaacatcttctcatggtcaggcccactgtcttagtcccttcccgctgctatgacataatacctgggcctggataacggatcaaaacagaaatttacttctcacagttctg

SEQ ID NO: 477183 - DNA, 615 bp, Homo sapiens
tgctgcaggctgtcactgtggaagtgaaaagatgatgtccttgtgaagagtaggaaggccaaagtactgtgtgcgccttaaaatctaacacaatgcattgaattaggaaggaartttaaagacagttacttgggattaaaacggcataaatccatttatttttcaagcagactttggagtcatgcctaccaagcctttcaggaactagagattatctgagtgcctgtcaactcccagcgaaatatccccttctcactgattgagcagaaaaactgtaatcaattcatcccctgacatcagtaaccaagcagctactaggtctatgatgctgcactctccactgtgaagagaaaacaagcagaaaacattgcccctccttttaagcagcctgaaatctgacagccacaaataagaaagtcaaacaaaaagcactaatttggttctaaggtttgtaagacaatgcactaccaacagagaggtgttgtgaggatacaaagcaaagactacatcagatacatagaatcagtttgattgaaaagatgagcatggcttggcagacagcaaaagagaaaatctctagaggaaataattttcatactgggtagagcccagtgt

SEQ ID NO: 477184 - DNA, 574 bp, Homo sapiens
ctaaatctgatttctatcaccatgtgtctcagctgtctttcccagaggagaataagagcaagttgataagttgataagcattcatgtatgattcacctgtcattgataaacatagcaaccagcacagaaccaactgcaggacccctgctcaaatagatacctggctccagcttggaattaatttataatattcacatagggtggagtagggtgggatgtaacatttgtgatttggcctaattttagcctatctatatgtttctaccttaaccacagggaaatcacaaaatattatcagatacattgctgaaatttagacacaagttgtctatggaattttccaaagctatcactataataaccccatccaataaatgaaatgagacacataatacacatttatttttaaggaactcatgctagctctttatgaccactattttcttttctaattctacataaaacatctgtttaattactgttaggataattttgtagaggttgccattracttattaagctgtaagttaacctacccaattttttttaatttttattttagagacagggtctc

SEQ ID NO: 477185 - DNA, 573 bp, Homo sapiens
gctctgcccttgtcctgggcaaaatagctatgaaagcattaatatttaccacctacgttcggattttattgtagagaaaggaggaaaaaacgctatgtaaggcaaatcccattaacacttcccccaccacctgaattcctyttcaaccttttggcaaaaccagtagtacttaccttataaaatcacctgtaatgtcagcttgaaaatgtcacgttctagttccagacaatatccacaatattaaagcattcttgtttaaaaccaagaaaaaaatatttcaaccgggtttcaagagactgataaacctaaccagactcacaatacaaaacaatttcctcctatttgacaattcaatccttttttaaaggaaatttggtgagatggctgcaattctttagaaagaagtagattcagagatgtttcagttttgaaaattagaatttagagtttaggagctaaaaccaaggaatataaaaagacatcccaagattcagcagaagatgagaaaaactgcagaatttgaaaagcagtttgatgggttggtgtccagatgctgctattcatctctaatga

SEQ ID NO: 477186 - DNA, 500 bp, Homo sapiens
cgccgggggcctccctccttcacgaccaaaggcactaaggcactatccacaarggctttttttggttaaatgctgtctcccttgcctgccctcccggcttcagacttcggagcctaaaacgcccctgcctcctggcccgaggccgacgggcctagaaaaagatgcaaggagctaggaccacacagccaccccctaccgcagctctacgtacccgctcgccgtagttctgctcgccgctgtcgctcatgactcctggctgctgtcgccggtcgatgtgcttcaatcgaagctgccaacctcttgcaccttccttaaggaggctccgccgcagccccgcacgacgcgccggtcgcccagccgctcagagccgaaatgctccgcaccgcctccgcacgggctctaactctaccggatgtgacgcggcgctccttagccaggctcctcccctcccagaaacgcgcgctttcttggcctcgcccctcctcgctctgcctttcctc

SEQ ID NO: 477187 - DNA, 631 bp, Homo sapiens
tttttttagccctttttcttccttactttccctttctccacatccaatcaatcatgaagaccttctcagtttacctcttaaatttctttcactttactcccattgtcaccacctgtaataatttgctatggctgccataacaaartaccgccaagttagtggcgtaagtaacagaaacgtattgtcccattgtctcttgttggttggaagtcgaggtgttggcggggttggttccttctgggggctacgaaggaaggctctgcttcagccctttctccttggctggtagatagccagcttcatgatcataggtgttctccctgtatcttcacattgcctttccccagtacctatctgtgtctcaatttccccttttaccaaggataccagtcatattggattgggacccaccctaattatttcattttaccttgattagctttgtaaagatcctatctccaggccaggcatggtggctcacgcctgtaatcccagcagtttgggaggccgaggcgggcggataacttgagggcaggagttcaagaccagcctggccaacatggtgaaaccctgtctctatcaaaaatgcaaaaaattagccaggtgtggtggtgcacacctgtatgcccag

SEQ ID NO: 477188 - DNA, 631 bp, Homo sapiens
tttttttagccctttttcttccttactttccctttctccacatccaatcaatcatgaagaccttctcagtttacctcttaaatttctttcactttactcccattgtcaccacctgtaataatttgctatggctgccataacaaagtaccgccaagttagtggcgtaagtaacagaaacgtattgtcccattgtctcttgttggttggaagtcgaggtgttggcggggttggttccttctgggggctacgaaggaaggctctgcttcagccctttctccttggctggtagatagccagcttcatgatcataggtgttctccctgtatcttcacattgcctttccccagtacctatctgtgtctcaatttccccttttaccaaggataccagtcatattggattgggacccaccctaattatttcattttaccttgattagctttgtaaagatcctatctccaggccaggcatggtggctcacgcctgtaatcccagcagtttgggaggccraggcgggcggataacttgagggcaggagttcaagaccagcctggccaacatggtgaaaccctgtctctatcaaaaatgcaaaaaattagccaggtgtggtggtgcacacctgtatgcccag

SEQ ID NO: 477189 - DNA, 586 bp, Homo sapiens
agtctatccccgccccgctgctcctgcatcattctctggtagtcataattgttctaaggggttccaacatctctttctctggcctcagtttaacaggatttgccatattttggtgaacaatgaggtgagagaaattctacttcctatattagcaagaggttgtaggcttgcagagtataggccttgtgatattacaacgagattttaaaatagagccactcagtcattattaatgcaaagaatgttagtaataaaacataaaatacaaagccaaaagcgtagctttcaagagcatgatggctatgtattgctacacaggacaatggacttgaatcataagagcgctacatggtttagccctgaggctcaggcacctcacttaacgctwagtctgtttcctcatcaataaaatgcagattataatgcctacatcagaaggttactgtggagaataagctgacatatatatgaaactgacgtgaagactcttaagtactatataaatattggctatcataatttttcacttcaatttttaatacgttttatcatcctttgcctcattaggcaccaatttttccttctg

SEQ ID NO: 477190 - DNA, 656 bp, Homo sapiens
cttactatttacattaacaaaaaaagtggcagtctcttctaatcatttctagaatgcaaattccaaattcaaattgatagttttcattacagttctctgtctttcccatctatcttaagacaggagctttccctccctccctgcacctggcccccttctcaacaaagatatttctacaattattaccacttcagccactgcttctaaaacaaagaaggaaaaagaaagtyattcatgaagatgtaaactttgtcagggtaagaacattttttactcatggccagggtccagtactatacatttggcaatttagaaaattaataaatattctctccgcattctggtaaaaaatgcttttcctcaaaaggttcccctttgctgtgctacccttcttgaataatgtattatcatcagttcaattccccaatccaaaagcgggagccattcttgacctttctctttccttcactatcaatattttggtaagtcactaaattatatccttcttattttcaacctcatcttaagtgttttctacctacctggaatgcacattcccatatcccctgtgttactctttcttcaaatttttctttcaatgtcactgcttatgtgccaggttaagttacttgcctccacttcatgctcctatagca

SEQ ID NO: 477191 - DNA, 493 bp, Homo sapiens
agccctcaatttgcagaggaaaaggggtagagggtgggaaagagagagraatgaaatcattcatttaaaaaatttctttattcagcaaacattaaaaaataccacatgtaaaacactaaaccattgaataatacattttaaacaggaaaacattttataataatatatttatgacataagaatatttaataaggggggagggatagcattaggagatatacctaatgctaaatgacgagttaatgggtgcagcacaccagcatggcacatgtatacatatgtaactaaactgcacattgtgcacatgtaccctaaaacttaaagtataataataataaaaaaagaatattgaataataatacattttaaatatgtatataatatttacacattttaaaacactttgtactgtaataatacatttaagaccttaacacatttagtgatgatcataactattattataattattaagtttggcctagactataca

SEQ ID NO: 477192 - DNA, 656 bp, Homo sapiens
ttttttctttatacttaaaaagctgtttaaatacagaaaagtacatagattaatatgtcaaatacctatgtactcacatctagaaaaaacacatattaacaagtggtcatattcacttcaaatctttttttttttaataacagaagcaaaatactataaagttcaagtgctttttccttttataattttgtcccccttcctcttcctcttcttagagaaaaccactgtcataattttgataaattacttgcagtctaatttcttatacgtttataaaatakacacttgtctcttagcaatgcaaacttttggcttgtgttttttaatttgcataaatcttatatatacaggtctacaatttgcttttttattcaatattatacttctgagtttaatacatgttggtggataatatatagttgtaaatattaatattatattatataaacatatttcatttattttaattgcaacataataacctatgattgaataataattgcagctaatacttgcataatactttctatgtgccaagtactgttctaaccattttatgtaatgaactcacctaatcctcacacctgtgaaatagttgctattgctatcctcattttccagataagaaacatacagttaagtaattagcccaaggt

SEQ ID NO: 477193 - DNA, 647 bp, Homo sapiens
gtactccattatgttaatgtaccacattttctttacccattcatctcttgatggacatttaggttgcttccaaatcttagctattgtaaacagtgctgcaacaaacatgggagtgcaaatatctctttgatatactcttttcctttcttttgatgatccaaatatattcttttagtttcctgataggaggtaatcagatagtgagaattatgccacagctagcagaaaaactgaacacattcactcctagtccccgactctggcctcatccacaccaaatgccaggaatacaaagccagaggcccccgtcctcacgtttgaccattcacttaatgagcacttcttcatgatctgggagctgggagacaacaatcacagagttcctgcccccaaagagctgtgtcctataggaagacaggcctggaagtcaatggttacaacttaggttcttaagtgctgagcagagatgggggtgcagggccgcagaagaccagagaggccattgctccatgattatgaattcacagaacagccaagcttcctccctctgcccccgatgggggccagggatctccaggcccatcgaccaggctatgagcatttcttycctcctccttctgtcctcaccctgcctcctgtttcttaga

SEQ ID NO: 477194 - DNA, 581 bp, Homo sapiens
tgttagctcatgaaaacattaactaggatttataatttttttttttttttttggagatggaattttgctcttcttgcccagcctggagtgcaatggtgcgatctcggctcacygaaacccacgcctcccgtgttcaagcaattctcctgcctcagcctcctgagtagctgggattataggcatgtgccaccacgcccagttaattttgtatttttagtagagacagggtttctccatgttggtcaggctggtctcaaactcctgacctcaggtgatccactagccttggcctctcaaagtccttggattacaggcgtgagtcaccatgcccagccggatttataattattaatgctgctgcttcttgtctttctcctctttcttctctgttggaaaatttgcccctatagtcttctactatttttataatacacctaagctcagtagaggctagaaaacatcaccatcaacatcctcaccaccactgccaccaccactaccatcatcagtatcatcactttcaacaataattaaaacatagctttcccacaggcatcatcttaaatcttatttaaatatct

SEQ ID NO: 477195 - DNA, 553 bp, Homo sapiens
taaatagaactatacagtatataagttttgggcggttggctttttttcattcagcataattccctttagattcatccaaggcattgggtgtattaatagctcattcattttttttttaaatcactgagtagtattccatggtataaatgtaccttctggctgtctcctcacatgrtctcttctctgtgggcacatgagggtgggaaggagagagagacagagagagagagaagagagagagagagatctggcatctctccctctttctgtaagattagggaaccctcttatgacctcacttgaccttcattacctccttaaggccccatcttctactacagtcatattgagggttggggcttcaacatatgaatttttggcagtgggggctgggcaaaattcagtcggtaactggcaggctgtgactctcaggtatggccaaagctgctgtccacaggcataatttcttctttctctttagggaagcctcagctctgctttttaagaccccacacgagctctcccatctaaggtccttcctgttgcaggcaaa

SEQ ID NO: 477196 - DNA, 477 bp, Homo sapiens
tatctcctttgttttctttgccgctacaaattctggatttctgcagcacagacttggagacagacccatgccccttctccttaaataaagygctttatgaaacatcagatcgaattctctccagtggggatgccttgctctgtgaggcctggctggttggaaagaggcccgcgggcagccagaactggagtcgaagtttcatctctggttttgactctggccctttgagcgagcttaacacgtgtggatttaatttccctttctttcttgcttccttttctttccccccacccccaccttgtgagggaacaagaaaaatagtctgctctgtcgacagcgcgacactgttccgtttgccaaagaaaatttgtctttccagagtcccagagagcagtgggttcctatgtttccaacgagcccttcaattgagggaggaggtatccagacaggccccccaccttcaccccagacctagac

SEQ ID NO: 477197 - DNA, 505 bp, Homo sapiens
tttactatatccacgagcttggcttgacagtcaccaccacacatatgcacccacaccagttagaaacaaacttgtcaaaccatagatgggccacacactcaaataccacaagaaggcatcccactgaccttatgaaatgcctagtgggaagaaaggttgcttaatggctctggtgctgccatttcatttctgggcaactgtttctgctggggtcagttttctcctctctgcctttttaatatttttcactccgagacagggtctcactctgtctgtcacccaggctggagtgcagtggcacaatcatggctcactgcagccttgacttcccaggctcaagagatcctcytgcctcagcctctggagtagctgggactataggcacacaccatcattatgctcagccaatttttaacttttgttttttgtaaagacggggtctctctatgttgccaggactggtcttgaactcctggcctcaagtgatcctcccacattggttttc

SEQ ID NO: 477198 - DNA, 624 bp, Homo sapiens
ctagctttcagtgaaaaagggtgccctgtgcaagggcatctaacatattatcatatgtcagccacaggagtggcttgttttaaatgaacctctgttcaggaggtagagtgctgtggtagaaaaggctacagccttgggttattgccttcattctggcactaactagtggagtgaatttggacaggatgcctcacttctgtgagtctcaaattctttgtatgtaaaayaaaaatgtttaactagatcagggtttcttaacatctgcattattgccgtttgagcctggataattctttgttgttggggactgtcctacacattgagggacgattagcaatgtccctggtctctactcactagatgtcattggaaccctctctccccaggttatgaaaactaaaaatgtttccagatattgacaagcaccctatgggggcaaattaccctgattaagaacttctgtactaggtgactataggaggacaatacattaagacttaaaataaaaagtgttataaaccagccagtccccacttccattggtgtctactataaaagttttttctgacctaaacataaccacaagtggaacttttaaatggatgtatatcttctaaattaatg

SEQ ID NO: 477199 - DNA, 497 bp, Homo sapiens
acatccaatagcatctattttggcccaaagtcattcatcgttacatyagtcttttcttaaccagaatgtagaaatccagaaagtagaaaccattcctttaactgtcttcccatgcagtgtcagataaaaatgacagattttgccctgactcctaaagtagtagcatgtaccctaaaaggaaaaagaatgtcatcgcatcgattcttctcctctggtatatactatagaagagaaatatttgcttaaaattcctttgtgtctaaacaatgcttttgatacatcgtgtccaagcatagatttaaaaattaaaattctttggtctatttttccaacatgagtcagtaaatccaatccagcaagcatttattaaattcagagaccttatactatagtttaaagggcaatactttcacacatgaaggagattgagattaatatgatagaatgtaatttacttcaagtatttattgcatgcccactatcagccaaaaaatgtg

SEQ ID NO: 477200 - DNA, 637 bp, Homo sapiens
tccaaaataattctctaaaccatcaactatggatcatatcaataaatgtttgtagattggctgatcagacctactagttacatcacaaaatacgaaatgacttcatawgaagaaagtcagccagtaagtagtttggtgagaacagcattccagtggtagctgaaatgaaagaaaacagctttcattctgaactactggaggttggcttgtactctcttactcaatggaaataaatatcaaatcacagaaaacaaaatgacaaatgtaatctacgaagtgagggttaaggaaggacagagtagaggagaaggagcagaatatgtatcacaatgtttctccatgtccttacttttgtagttttactttattggcaaaaagatcagtagggccaccctggcttagaactggaattatccttggatgtcttagttattggctaaaccacaaacataagagtcagtagacactccacaccctctaatttctaaaacttgaagctgagataccgagtggaaaaaataaaaatgttctttccgcattgtgtttataagtcttttaaatgtcatttcagacgaaaaacatccctggtaaagtttagcagtccacagtttggagagtaagaagaacaacccccata

SEQ ID NO: 477201 - DNA, 596 bp, Homo sapiens
ccatctgagcccagtccaaattgctggttcacagaattgcaggctaaataaatgatggtggttttaagccactaagttgtatggtgatttgttatgtagcaaaaccttaaacaccattcccaaaaacgttttgggagagaagacatgaccatatgttgaaaagacattcaactctgtgaagacagggagcccaatcaatgatttctcaaacattctacaaaccagggtaaaagaaagcatgatgagratcaaagtataataaccgaattaaattatccgaagtaaactgcatcctttgccatccggcgaggaaagtacgtgcaatatttagaaaatgtaaggtaatgtaattactggttcaccagtacaacagaaagttgagtgataaaatacttatttacctcagtaacttttcactttcactctcttccctttatttttcagaggtctactttccatgttcccattccctagtttttagaattctcatggcttcatgtctccattgtactcctctagcaaaaacagaagcagcagtagcttccactaatggaggcactttactaggtgcttttaacatctagtaaaaaatatat

SEQ ID NO: 477202 - DNA, 630 bp, Homo sapiens
aaaaatacatgccgttagaatgtactgcaaaataccagtattcagatacttcagctcaattctcaccagaaggcttaattacccatgtgtgttaattattaatgtttaacaaaccaccaaaaaactcagtggcatacaagaaaaagacctttgttctcaggtcgtaaatctatggatttatggatctgttgggtgaggctaatattgtttggtcttcacttaatttggctccaagctgtgtaggttgaatataggttttctccctgtgtctcacattatctttgggctagtgggatatygaaaacatgtggatggtagaagagccaaacttttgttggtttaatcttcaacaactatttgtgtttgtgctatataatgaaaatggactacatcaaatgaaattaatatggcaagtatggtgctatttcctaatctgagtttgggagaatgtaagaacagaacaggtagacagcggtatcaacttcagcacctttttaatctccatatccaacttattatgtctttcagaataagcatattcaaagatggcacagtcagaaatgactgtaggtgaaaataagtgtagttgtcttcttgctcaatcctttcatttcactgataagaaaattt

SEQ ID NO: 477203 - DNA, 447 bp, Homo sapiens
gtgggctgcacccactgtccaaccagtcccaatgcaatgaactgggtacctcagttggaaatgcagaaatcacccaccttctgtgttgatctcactgggagctggagactggagctgttcctattcggccatcttgccagcaatcctctatttaatcattcttaggataatgtaccttaagaacaaaaagaactgctcttaaaatatgttatataatattattaattttggggaatcatatttttgacagtgatactagtattgttttctttttttggtttggttatagttgacttctatttcccattaaaaagctttattgaggtttaattcatrtataatacactgcacacagttaaagcatacagtttggtatactttggtactcgtatggatattttggtacttgtatgtatcgaggggtcattaacttttattgctgagaag

SEQ ID NO: 477204 - DNA, 598 bp, Homo sapiens
tttttaaaaaattgtatgatcatctgaatagactcagaaaaaacatttgaaaatatctagcatstatttatgattgaaactctcagcaaaatcagcatacaagggacatatcttaatgcaataaaagccatctatgacaaacccacggccaacataatactgaatggggaaaagttgaaagcattccctctgagaactggaacagacaaggatgcccactctcaccactcctcttcaacacagtactggaagtcctagccagagcaatcagacaagagaaagaaataaaggacatccaaattggtaaaaaggaagtcaaactgtcactgtttgctgatgatatgatcgtttaccacaaggatatttaaatctagagagaaaataagagcatatgttcctctctttcctacatcactgatttgaatttctgacattagtcagaccattggagaactgctagaatcaagcatcatgtagaaaataaatagtatcatgcttgaagttcttcattagcgcctgtagctatcaagtaataggaacactgtaatggtgttctgagcttagttactatgatctctggggagttcaaagtaatttg

SEQ ID NO: 477205 - DNA, 598 bp, Homo sapiens
tttttaaaaaattgtatgatcatctgaatagactcagaaaaaacatttgaaaatatctagcatgtatttatgattgaaactctcagcaaaatcagcatacaagggacatatcttaatgcaataaaagccatctatgacaaacccacggccaacataatactgaatggggaaaagttgaaagcattccctctgagaactggaacagacaaggatgcccactctcaccactcctcttcaacacagtactggaagtcctagccagagcaatcagacaagagaaagaaataaaggacatccaaattggtaaaaaggaagtcaaactgtcactgtttgctgatgatatgatcgtttaccacaaggatatttaaatctagagagaaaataagagcatatgytcctctctttcctacatcactgatttgaatttctgacattagtcagaccattggagaactgctagaatcaagcatcatgtagaaaataaatagtatcatgcttgaagttcttcattagcgcctgtagctatcaagtaataggaacactgtaatggtgttctgagcttagttactatgatctctggggagttcaaagtaatttg

SEQ ID NO: 477206 - DNA, 529 bp, Homo sapiens
actactcaggtgatgcgtgcaccaaaaactcagaaatcaccactgaagaacttattcatgtaagcaaacaccacctgttccctaaaaatttattgaaataraaaagaaaaatatatgattcttcaaagatttagtacaaaataaaagtaatttttctattaattacaggttgaaataatattttggatatatccagttcaataaaatacattagcaccattaatttcacttttttctactttttattttgtttcataatgaaatatgcaacaaagacaaaaataagttgtttcattctaagctttctgatataaaagcagattctcatacgtatctaagcaaagcaaagcaagtgctattggcaggactggaaaaaattaatcaacattttaaaactgcttgaagcttcttttaaataaccataaattttaagctcatttagctcctactatgtacttttaaaatcaaactaataataggaacctagccatagttttctaaatcttgcttatttagttgaacatcgcta

SEQ ID NO: 477207 - DNA, 529 bp, Homo sapiens
actactcaggtgatgcgtgcaccaaaaactcagaaatcaccactgaagaacttattcatgtaagcaaacaccacctgttccctaaaaatttattgaaatagaaaagaaaaatatatgattcttcaaagatttagtacaaaataaaagtaatttttctattaattacaggttgaaataatattttggatatatccagttcaataaaatacattagcaccattaatttcacttttttctactttttattttgtttcataatgaaatatgcaacaaagacaaaaataagttgtttcattctaagctttctgatataaaagcagattctcatacgtatctaagcaaagcaaagcaagtgctattggcaggactggaaaaaattaatcaacattttaaaactgcttgaagcttcttttaaataaccataaattttaagctcatttagctcctactatgtacttttaaaatcaaactaataatagraacctagccatagttttctaaatcttgcttatttagttgaacatcgcta

SEQ ID NO: 477208 - DNA, 593 bp, Homo sapiens
tgtagcgtaaataaagccaattaggtcatatagttcagtctctgctggaaaaagagtaaccagaaaggaacttccaggagtccccatgagcctgtacctttgtccatagactctgtctctcccatgtgtgatagacgtgtgttgtggacaattcccgctcctagcaaaaggccagcccctcaacctgtgattggattccatccgggacacatacctccagcaatttctctttctctactggacttcttctatcaccatataaatatgcttttttttttttaatcctaaasaaagaaaaatctgtggccccacttttacttccaactattgccctacttctttttccctttcagcacaattgaaagctgtccatgctcagtcactgtcttcaatttttctcttttcattctcctgtgaacctcctactggcaggctttcctcccactacatcataatattgggtcttgtcaaaggggcctgtaacctgcatgttgctaaattctgtgttcagttttcaggcctcatcatgtctgtcttttctcattaatagctaagccccatgacctgggatatttttgggcatgtctgttttc

SEQ ID NO: 477209 - DNA, 622 bp, Homo sapiens
tcaggaggaagagcatgtttttggtttgggacatgtaggtrcttttaaaacactcaagaagaatcatgaagaaggtatatggagatatatatatatatatgcctggagcttagaggagcctgggttgcagatgtgtttctgagtcatttgcatgtagcttttaattgatacatatatcatgaatataaagtgctttgtagaccataaaaggccatacgttgtgtttgtcgtttcctaaatttgtgatgatatttcaaacctggtgattttctgcttaccttttaatagataggttagtcatctctatagaacttttctgactttccctcttttgaactatttcagtatttcacacataattattgtggtggtgttatagtatactgtaattgttttgtgcatgtttatatatgtatctgtctgccttattatactttgagatcagttgaagaaagtaactgggtttaattcctgtcacctgcttgaggccaggtatcatgtctattttctttcccctggtatatctagcactgtaaatggggcttggcactatcaactgatcatacatatttgaatgttgagtgaaatatttatatccctttgcgcataggtgtttagtaat

SEQ ID NO: 477210 - DNA, 512 bp, Homo sapiens
agagaagtgctcctggcttctagtgggtagaggccagggatgttgctaaacatcctccagtgcaagggatggccacacaaaataaaggattattaggcccaagacatcaagagtgcaaaggctgagaagccttctttggaaggagaagaacaatggctttttgtatgtaatagtaagagtcctgagccagaagttacaagataactgagtcctcattctagttttcctatcaacctgcagcaggcaaatcacatcaccttcctctggcttgatttccttatttgtaacatgaagagattggacaagatatttaaggtcccttccactccaaaatttcatgactcatttttctatcacatgaaagtgttacaygtagccttgtcacatatatcattttaacacaaacatttaatttgttgatataaagcactgagaatttctcaaacacagatatagttttgtttatatgaaaataagtttattcctaacaaacaatagccagtattctaatt

SEQ ID NO: 477211 - DNA, 633 bp, Homo sapiens
atttgggattatttttcagtgactttgatatgctactgagcttcatgactctctacaagaggatgattctaaatattcccaatgaattataaattttagctatttagattctgttaygtatcactgaaatctaagagaaaaaatacatttttgaaacgtttaacagcttattgagtgtctttccacacactctctcatttagtatcctgacaacaagcatatcaggtagatgttattaaactatggtccagaaatagctagttattttctcaaggttgcatagtttgtaagtggagaggccagaacctaatcctaggacttttgactgcatattttgtattcttttcattccaatcactctttataaggttaaacaagagaactcagagcccttaggctggttcagaacctgccctgaaattttccattgctgctctttattgcaatcccttgatacctgtctaagagagacccaaatcatcctgtggtcggtgtagatacccctttagatctggtcttaggaatcacataatacagattttcattctcggctatacctcaatttgaacagttataccagaatttgaacaataaatgatgattattgaagtgcttagtacatcgatgcatgca

SEQ ID NO: 477212 - DNA, 633 bp, Homo sapiens
atttgggattatttttcagtgactttgatatgctactgagcttcatgactctctacaagaggatgattctaaatattcccaatgaattataaattttagctatttagattctgttatrtatcactgaaatctaagagaaaaaatacatttttgaaacgtttaacagcttattgagtgtctttccacacactctctcatttagtatcctgacaacaagcatatcaggtagatgttattaaactatggtccagaaatagctagttattttctcaaggttgcatagtttgtaagtggagaggccagaacctaatcctaggacttttgactgcatattttgtattcttttcattccaatcactctttataaggttaaacaagagaactcagagcccttaggctggttcagaacctgccctgaaattttccattgctgctctttattgcaatcccttgatacctgtctaagagagacccaaatcatcctgtggtcggtgtagatacccctttagatctggtcttaggaatcacataatacagattttcattctcggctatacctcaatttgaacagttataccagaatttgaacaataaatgatgattattgaagtgcttagtacatcgatgcatgca

SEQ ID NO: 477213 - DNA, 633 bp, Homo sapiens
atttgggattatttttcagtgactttgatatgctactgagcttcatgactctctacaagaggatgattctaaatattcccaatgaattataaattttagctatttagattctgttatgtatcactgaaatctaagagaaaaaatacatttttgaaacgtttaacagcttattgagtgtctttccacacactctctcatttagtatcctgacaacaagcatatcaggtagatgttattaaactrtggtccagaaatagctagttattttctcaaggttgcatagtttgtaagtggagaggccagaacctaatcctaggacttttgactgcatattttgtattcttttcattccaatcactctttataaggttaaacaagagaactcagagcccttaggctggttcagaacctgccctgaaattttccattgctgctctttattgcaatcccttgatacctgtctaagagagacccaaatcatcctgtggtcggtgtagatacccctttagatctggtcttaggaatcacataatacagattttcattctcggctatacctcaatttgaacagttataccagaatttgaacaataaatgatgattattgaagtgcttagtacatcgatgcatgca

SEQ ID NO: 477214 - DNA, 567 bp, Homo sapiens
ccagaaatatcagacttatgggaagatttcttctgcagattcctgtcttctttctcttacctgtaatgaatcatatctgaatgatgcttccaccggccaagttccaagtgccatcttttccttcaaggaaaaggcccataagtcctctcaagcgattctcagccttggcatatgcagtggcttcattcagattccagcaaaaaggaattggcagggcatgaataagggcagaaggtaattgaggagccggggctggttttaaggcagtacagagcccagctccacgagctgagctggaaggaatttgctgtctgtgccagakgtcataaagagctgctgagctagttgagctttctagtgctcagaagcaaatcgatcagatgagctgcaactgtggctctgccacagaccatgagctaatgcaggctgtacccagtgagccagtgccgcgggcactggagccggcagtgggagagggtgagccgacatagctaatgcctaacgccaggagggagagacaaaggggcctcttctttaacactgtgaatagccccagagtgaatacag

SEQ ID NO: 477215 - DNA, 551 bp, Homo sapiens
ccttaatgaaataaggagagtaagagaatcctcaacccaaattagaagtactaaacaagtgtgacattgctgttatcctggggtggggaggagctgaaaatgagtgcccaacccaggattatgcaacacaggaagacataatccatgatgaatgacagttatcygatacaaaaaataaacaaaaggattagaacccaaagagtttcaagtaatagattattagagggatattataaaataatatgttaaaaatgattaaagaaaaaaattaacaagtcagaaaagcataagacatatgagtaagaaataggaagctttgaaaataacaattaaatttctaaaattgaaaaatataaacatggaagggaaaagcacaatggatagtttaaccagatattcaacattcaaacagttgaataaagattttcctaaagggtagcagagagcaattaaatatttaaaagtggttaatacacattgaggggagaaagagtgttttaatgagagtgcctgaaggaaagaatagaagaggaggaaatatgtgaagagat

SEQ ID NO: 477216 - DNA, 549 bp, Homo sapiens
ttagattaaactgttttatgtgtatgtgtatgtgtgtrcatatacacagaatggtcagggatagttctctggaggtgacactgaagcagagacctaagtttaaatgagaagaaccaaaggatgaaaagatctaggaaagaattccaagtacagtgggcagcaaatacaaaggccctaaggctggaaggcaggaagaagtgtgatgtgttcaagagtcatggaaatccaggatggctggagtggagtggcaagagggtaaatgatggggaagagattgaagaggttcaacaggtagctagggccatatcttgtatggcttggagaccatggtgcaaatgtaatattggtaaaatgatagaggcaggaggcagaaaaattctaggtagacagggacgggtccgtggcaaaaccccgtcttcaagccccaaaacctgaaacctgtggctcaaagtgagaagttctatctctgttccctcattcaaatgttgccttttcctgaactacccagggcccgcctaccccatcctgtgcctataaagaccccaaact

SEQ ID NO: 477217 - DNA, 623 bp, Homo sapiens
taagctaggcatctcttgcttcagtgtttcagttgcctgcatgtttgtttaaggtactgttctttttagcatcataagaaggtatagcactgtgaaaactagtctttgtattagcagttctggcgaaacaattatgaatatttaggcattcatatttgtacatatcaaggtaggataagttatactgtgctaacagtctatcccaaaacctcagtggcttaaaayaacaaaacttgttggtcttgtgactgattgactggggccttggttctgcctcaccctccctctggaaccaagctgaaagagcagttactgtcttgattgttgccagcaccattgtagaaggaaagagagcagggcaaattgtgtgcagtctcataaagcttccgcctggaagtgagtcatggcatttctgctcacacttggccaaaacaagtcacgtgactaacctatatttctaggggatggaaaagtgcaaacttatcatgtattggtgaaaagaaccagaaatgtttggtaggcaacactaatgactatcacagtattgtgagaaatagaaaatttcacctgtctttcaacttgatgtatgacagctaaggcttcaagaattgtttaccctcatg

SEQ ID NO: 477218 - DNA, 656 bp, Homo sapiens
ggtgtcccgcggagtcccagaaagttttttttttttttaaggaaaaaaattgctaatacctgacatgtctttcggttcataattgcgattgttagcgaagtggtctcgaattccatttcactccccgttcgccgctctcagactaaattgcaaatrtccccaagtctgtagcaaaaaaagttttctcattgagcaggtcaactgtgaacccggggccgggagcagttccctaaatagatccgctacgtagccattaattaatagcatctcgaaccagaaacagttttaaccttggaaaagcaaagaatcctctcccggttgaaattgaaacttaaaatcctttgagtaacgatttaactattcagccaacgaaagaaaaatgcatgtttaaactgcattaacctgtcactggcatccaaacaaatttaaacgctgagatataaattatagtctagcggcgagataaacacattaaaatggactcccaccattttaataatagaaagtcacgtttccaattaggcattatcttgtaatttgcttttgacgaaagttaaatgtaaggaaatgcagcacatgatatagaatgctcatatggtgttttgtgattgtggaggtttgccttttttataatcaaatgcatgtacggtttcttt

SEQ ID NO: 477219 - DNA, 428 bp, Homo sapiens
tgaaggaacttttcttgctytaagtcccactaaaatttgtcagtttttcaaagtcacctattggatttgtcagtgtaacacacccaaatgtgccattggttgccaccaaaaattttacatttttcttactgtaaggcaggccagtccactgaggaggagataacctgtatactcctaaactggaccctctagaagatgcattaatgtaaaagccctcagattttcttcttcctgacattcatgagttttaccaaagcttttaggatattccctgctttcttagccctctctgtagtggaccagcataattttctttggaatggtgagaggatcaaggttcttctatcagtcagagtctaatcataagaacgtaaaccacactagatatttcaaacaaagggtagttaataaagggaattgattacgca

SEQ ID NO: 477220 - DNA, 493 bp, Homo sapiens
ctgaaggtcagggtggcctaaggtaatgagaggcaggtttagtttgtactcatttttctttttccttattctattccttattccccttccccactccacatccagctcttcttctcaactgccagcactgctgactaacagcaatcccaggcccaccagaaacttgactaagaactgacaaatgtggtagctatgtgcactgacttctttatcagtccaccttcacagtgtcatgccagaagctaggtattaacagtctttatgacttcacggtagatctgcagggaaaagttttacactgcatrctttaattcttccattttcacgtcttataatgaatatttataagttttataagcagttaaataatttaaaacatttcaagcaatgctccctaatttagaacactcttagttccctggggaaaataaataaaaggaggtttttcatcgtaaaaaaaatttaaaaagacttacatcattagattgaaaca

SEQ ID NO: 477221 - DNA, 501 bp, Homo sapiens
ctggtagctgacagagctccagtgcagggcaggtccaggcagtgaagctcaagagcgagattctccccgggtaacctctcggtgtggctgaagggcctgagcaaaggtgtaggtgtatgcgtgcacagcacggggccctggaggcccaaggcctgcccctgcacacggctccactggtgaggtgtcagtctcagtcttggcttgctcgccacagctccctggcctcagaagagaggatggtggkgatcccacagatgacactccagagacaggatgagaggcctcccccatcccccactccatggaggagggccaggcctgaccagccaagatcttaccttaaagttctcagcaatgcgttctggtgtcacagacttggggatcaccaccaagttcctctgcatggggaaccggatcaggacctgtgagcccaaggagacagtgagtgtgtatacatgccaggcactcgcacccatcatctcagtctctcacacacacaac

SEQ ID NO: 477222 - DNA, 619 bp, Homo sapiens
ctgtgttttgacatcagctattttcaacaggctttggggaagaaaggggcccagttgaacaagcccgttaccagagcctgttagcatggagctcactctccacctcagagggagcagcgaggcagggtggggatgctcatcgaaggtgtgggttaagaggggacgaccctcagaggacctggcgacctcttatttgactggaggacctcagaagctgctcttgcagccttccccactctgcacggttgaaggaacagagaatctcaatttccagaaagaatgccttaccacaggccctgagtggtgtccgggcacaaccaccactgatgacagcagggagagcagaggacatccctacccmagaaagaacaactggggcccaggcaggaaactgcccaggacacactgaactttctccaggcttgatggcgccttgattgatttttctctgaggagctgctgagggcacactccgcaggctcagcctagccacgcactgcctgccatgcaactggtgcggggacaggaacatgactcaatccaggccataagactcaatctttgcacttgaattggaacccctgagtccagccccggttctgctggggtcactgagctg

SEQ ID NO: 477223 - DNA, 524 bp, Homo sapiens
tctcaattctcctgtgaagtttttcccttatctctgactggatggggtagtaacttttacatagcatttagacataggaagaaagagagagtcactcyaggttgtcttttcttccccacaaatttgcctttggactgaaatcatgttttatgtttaaagaattcccaacaatgccaagcttaggatgttgtaattctacatatgagtagaattagaaaaatgtgagagttggaagggatttcatcagtggcctggccccaaacgcctcagtttccgggtgagaatgctgatccagaaagaaatagacacaaccaagttaattatgaaagttgcactagaacccaggtcgtttgatgtccaattttgtattcttccacggcactataaagccttctgatggcttggaagctggctgaccctgagatatttgtccccacacataaactcaaagggtaagtagagagatgggtgggtcatggagggatgagtcaccatgagctagtctcctcggaagactccagaac

SEQ ID NO: 477224 - DNA, 524 bp, Homo sapiens
tctcaattctcctgtgaagtttttcccttatctctgactggatggggtagtaacttttacatagcatttagacataggaagaaagagagagtcactccaggttgtcttttcttccccacaaatttgcctttggactgaaatcatgttttatgtttaaagaattcccaacaatgccaagcttaggatgttgtaattctacatatgagtagaattagaaaaatgtgagagttggaagggatttcatcagtggcctggccccaaacrcctcagtttccgggtgagaatgctgatccagaaagaaatagacacaaccaagttaattatgaaagttgcactagaacccaggtcgtttgatgtccaattttgtattcttccacggcactataaagccttctgatggcttggaagctggctgaccctgagatatttgtccccacacataaactcaaagggtaagtagagagatgggtgggtcatggagggatgagtcaccatgagctagtctcctcggaagactccagaac

SEQ ID NO: 477225 - DNA, 524 bp, Homo sapiens
tctcaattctcctgtgaagtttttcccttatctctgactggatggggtagtaacttttacatagcatttagacataggaagaaagagagagtcactccaggttgtcttttcttccccacaaatttgcctttggactgaaatcatgttttatgtttaaagaattcccaacaatgccaagcttaggatgttgtaattctacatatgagtagaattagaaaaatgtgagagttggaagggatttcatcagtggcctggccccaaacgcctcagtttccgggtgagaatgctgatccagaaagaaatagacacaaccaagttaattatgaaagttgcactagaacccaggtcgtttgatgtccaattttgtattmttccacggcactataaagccttctgatggcttggaagctggctgaccctgagatatttgtccccacacataaactcaaagggtaagtagagagatgggtgggtcatggagggatgagtcaccatgagctagtctcctcggaagactccagaac

SEQ ID NO: 477226 - DNA, 527 bp, Homo sapiens
taattacttagtggatcatattactgaataatttctggaccctagcagccaaaccataaaagtgttacttacagttgaataaacatttactaaatcttgcagtgggtaaagcactgtgttgtaacagcatgggtgatacagaaatggatcaaacattgttcctgctctcaaggaatttataatcctggtgggaaaagtgagcatttgcacaagcacctctaccaggaggtgctttagtagatgtacagtgtacataacagtttgtctttggttcctgttcctgctatggtgacttaggggagggggttggtaggtgcaaatttgacttcctgaagttaktcctctatgcagaaaataaagttgtttgactttctccccaattttggccttgagctacttcctggacttattaccccaaactttcattatttcttccttaaaatatcccattatttaaattgactgcagttagctcctaggtgcttctacatgaagattcgatacttaaaggcagactttaagtattt

SEQ ID NO: 477227 - DNA, 629 bp, Homo sapiens
tgaggaataaatgagttgatataggtaaacaactcagaagttttctggggtgaggtatattagctattacagttatttttgttatcaagcttgtttctatggggggagttaggtatctaaattttctgtatctcggaaagtatagggctagtgacctgccagatacatttcatctggggaacaatttagttataattactatggaaatagctattggtcacaaattgtacccatgtactatgcattagtatgctccttccttccctctctccctrcctctctttctccttccctccatttatccatccttcatttcttttgttgagttggacccagaaggatgtttggataataggataaaggccaataggagttcatcatatatgcagtgggtgtggaaacatcatatttgaggcagggcgacaggaactaccatggtgcgtttcccttagttgaacccacatgggtacaaagcagtcccgtgttactgttccccagggatcttggattgtgctgagtagaggaattgagctgtggtggtaggcaggggctacggcatgcagaaccttacatgccatactggagagtttcaacttcatgctgaaagtaatggggagccattgaaacct

SEQ ID NO: 477228 - DNA, 629 bp, Homo sapiens
tgaggaataaatgagttgatataggtaaacaactcagaagttttctggggtgaggtatattagctattacagttatttttgttatcaagcttgtttctatggggggagttaggtatctaaattttctgtatctcggaaagtatagggctagtgacctgccagatacatttcatctggggaacaatttagttataattactatggaaatagctattggtcacaaattgtacccatgtactatgcattagtatgctccttccttccctctctccctgcctctctttctccttccctccatttatccatccttcatttcttttgttgagttggacccagaaggatgttwggataataggataaaggccaataggagttcatcatatatgcagtgggtgtggaaacatcatatttgaggcagggcgacaggaactaccatggtgcgtttcccttagttgaacccacatgggtacaaagcagtcccgtgttactgttccccagggatcttggattgtgctgagtagaggaattgagctgtggtggtaggcaggggctacggcatgcagaaccttacatgccatactggagagtttcaacttcatgctgaaagtaatggggagccattgaaacct

SEQ ID NO: 477229 - DNA, 629 bp, Homo sapiens
tgaggaataaatgagttgatataggtaaacaactcagaagttttctggggtgaggtatattagctattacagttatttttgttatcaagcttgtttctatggggggagttaggtatctaaattttctgtatctcggaaagtatagggctagtgacctgccagatacatttcatctggggaacaatttagttataattactatggaaatagctattggtcacaaattgtacccatgtactatgcattagtatgctccttccttccctctctccctgcctctctttctccttccctccatttatccatccttcatttcttttgttgagttggacccagaaggatgtttggataataggataaaggccaataggagttcatcatatatgcagtgggtgtggaaacatcatatttgaggcagggcsacaggaactaccatggtgcgtttcccttagttgaacccacatgggtacaaagcagtcccgtgttactgttccccagggatcttggattgtgctgagtagaggaattgagctgtggtggtaggcaggggctacggcatgcagaaccttacatgccatactggagagtttcaacttcatgctgaaagtaatggggagccattgaaacct

SEQ ID NO: 477230 - DNA, 629 bp, Homo sapiens
tgaggaataaatgagttgatataggtaaacaactcagaagttttctggggtgaggtatattagctattacagttatttttgttatcaagcttgtttctatggggggagttaggtatctaaattttctgtatctcggaaagtatagggctagtgacctgccagatacatttcatctggggaacaatttagttataattactatggaaatagctattggtcacaaattgtacccatgtactatgcattagtatgctccttccttccctctctccctgcctctctttctccttccctccatttatccatccttcatttcttttgttgagttggacccagaaggatgtttggataataggataaaggccaataggagttcatcatatatgcagtgggtgtggaaacatcatatttgaggcagggcgacaggaactaccatggtgygtttcccttagttgaacccacatgggtacaaagcagtcccgtgttactgttccccagggatcttggattgtgctgagtagaggaattgagctgtggtggtaggcaggggctacggcatgcagaaccttacatgccatactggagagtttcaacttcatgctgaaagtaatggggagccattgaaacct

SEQ ID NO: 477231 - DNA, 489 bp, Homo sapiens
gctgagctttgttcctacaaactgcatcgtttgaaaagcacattatattttcaagacttttttctgtctgaatggagtttrttgcaatacttagaaatatcctagggagattatttattttctgaactgatgagagagcatgtcagattgttggaccagattccatgagagaagccatttgttgtgcccctgatatgtgctggatgaccaagacccagttcttgtcctcaggagcttcccaaggagtggaaataaatgtgatatcatcaaaagcataaaacaacagttgaagtttattgaggacttgctctatatgtcagttgctattctaagttcttgacataactttttattgtaattactcttatagtaggtattttacctgcatgctacagatcagaggattgaactgagcaagtttaagtcatgtgtccactttaaaggcaagggcttttcttccaataaaatgttgaggtaattgagttttac

SEQ ID NO: 477232 - DNA, 645 bp, Homo sapiens
tacatctgtgggatgaactaagaattggctgcayaattcgaagatccatttctaatagctttttcttaatatttttcaaaagtggaaattggtgaaatgtttactttttaatagaactctcagatataactatcagatagtcacaagaaaggactattatcaaagagaatactgtatatttgtttaatttaaatgagatcgagtgagacactatatgtgaagcagtacctaagggcatagtatatagtaaatattacctgtaagtgaagtggttgtattatcattattctgttcctagcacagtgtctgagtttaatagcacctggtattattcaatgcacatttattagagaatgaatgaatgaaatctgtgtctgcctgtttcttttctttttctctgcacattaaatgcttgtctgctcttatagctggaggaaaagctgacataaaaattggcttgctggaatgtttcttggccccatttgtcaccttatccttggagcccatttgtatgtcaactccatgccccctctgatgcctgccagtgagggacagaccacaggttacttccatatgatctgcttttgctgccaaggtgctgatcaagcttggctgatggatgggtgctctcttattggaaatgtc

SEQ ID NO: 477233 - DNA, 645 bp, Homo sapiens
tacatctgtgggatgaactaagaattggctgcacaattcgaagatccatttctaatagctttttcttaatatttttcaaaagtggaaattggtgaaatgtttactttttaatagaactctcagatataactatcagatagtcacaagaaaggactattatcaaagagaatactgtatatttgtttaatttaaatgagatcgagtgagacactatatgtgaagcagtacctaagggcatrgtatatagtaaatattacctgtaagtgaagtggttgtattatcattattctgttcctagcacagtgtctgagtttaatagcacctggtattattcaatgcacatttattagagaatgaatgaatgaaatctgtgtctgcctgtttcttttctttttctctgcacattaaatgcttgtctgctcttatagctggaggaaaagctgacataaaaattggcttgctggaatgtttcttggccccatttgtcaccttatccttggagcccatttgtatgtcaactccatgccccctctgatgcctgccagtgagggacagaccacaggttacttccatatgatctgcttttgctgccaaggtgctgatcaagcttggctgatggatgggtgctctcttattggaaatgtc

SEQ ID NO: 477234 - DNA, 645 bp, Homo sapiens
tacatctgtgggatgaactaagaattggctgcacaattcgaagatccatttctaatagctttttcttaatatttttcaaaagtggaaattggtgaaatgtttactttttaatagaactctcagatataactatcagatagtcacaagaaaggactattatcaaagagaatactgtatatttgtttaatttaaatgagatcgagtgagacactatatgtgaagcagtacctaagggcatagtatatagtaaatattacctgtaagtgaagtggttgtattatcattattctgttcctagcacrgtgtctgagtttaatagcacctggtattattcaatgcacatttattagagaatgaatgaatgaaatctgtgtctgcctgtttcttttctttttctctgcacattaaatgcttgtctgctcttatagctggaggaaaagctgacataaaaattggcttgctggaatgtttcttggccccatttgtcaccttatccttggagcccatttgtatgtcaactccatgccccctctgatgcctgccagtgagggacagaccacaggttacttccatatgatctgcttttgctgccaaggtgctgatcaagcttggctgatggatgggtgctctcttattggaaatgtc

SEQ ID NO: 477235 - DNA, 645 bp, Homo sapiens
tacatctgtgggatgaactaagaattggctgcacaattcgaagatccatttctaatagctttttcttaatatttttcaaaagtggaaattggtgaaatgtttactttttaatagaactctcagatataactatcagatagtcacaagaaaggactattatcaaagagaatactgtatatttgtttaatttaaatgagatcgagtgagacactatatgtgaagcagtacctaagggcatagtatatagtaaatattacctgtaagtgaagtggttgtattatcattattctgttcctagcacagtgtctgagtttaatagcacctggtattattcaatgcacatttattagagaatgaatgaatgaaatctgtgtctgcctgtttcttttctttttctctgcacattaaatgcttgtctgctcttatagctggaggaaaakctgacataaaaattggcttgctggaatgtttcttggccccatttgtcaccttatccttggagcccatttgtatgtcaactccatgccccctctgatgcctgccagtgagggacagaccacaggttacttccatatgatctgcttttgctgccaaggtgctgatcaagcttggctgatggatgggtgctctcttattggaaatgtc

SEQ ID NO: 477236 - DNA, 367 bp, Homo sapiens
gacagagctctctctcaggtcttgaaatctgtcaatgtgggcttgcaaactgggatgcccttgacttctttgtataggcagtgatttgtttgagacatcgttgtgcctgcccagttatgttttgtgatggcatttgtctgacactctatatgaagtaagggacataactgtaatacatatgcagctttttgacagccagaagcccaggaaggactataaattttgcttttgatgtttatttgaaacacaaatactttggaggcagtctattttgttccctaaaaattaatgtaaaccttgttttctatgsatcatggtctaagaataatagaaagaaagtaagtgggtgaaagaacatgtcttggga

SEQ ID NO: 477237 - DNA, 372 bp, Homo sapiens
caggcattttctgaaatgtaccaacctcggcatttggcttcagaaggattttagagatgatttcacccatcgagatggataatccttcagctttgaaatggaagatcataatgctttgccaatctgctctgatcccagagaaaatggactgataaaagaagatgatttcaaggtttaaagccaccctcttcttctaacccaatctgttaaaaattaaaactcagtaaggcatagtgagaaggctttccaacctgtcattcttataaagcagagatactaaatagcccgcaaattatcttactgaaaataagatagaggctagtgtggtagacaatgttctaagtcaraggctgatgcttcaccacttgttca

SEQ ID NO: 477238 - DNA, 623 bp, Homo sapiens
tttgaacaaaactttaattttgtaggtgtgtccttagttttaaaaggtaagtaaagtcctaactaatgtgatcacatttatcatagcctttctaaattactataatatgtggattttatttttgtgaatttctaaggtttataaatggtaaggctgatatagtgtaaattgatakatatagtgtaatggaaaatcggactgacatttctcagtgtcaacctgtctccttctcaataacattatctcaaaaagttgggttgaaattcaatctgagtatagaataaaaccctctaaatttgaagagaaaaatgccctgagacatagataatttgaataactggcccaatgtgatacaaccattaaatgatgaaacaatagatgatgaaatacatgatgaagcaaaagctcatcttcttacataacacagagtattgccagagagttggtccatttaactaagaatttagtaatgagtcacaaggtatgatgtgatactgcagaggattacttattttctttcacgaatatttcctgaaaaacagagaaggatgtaataatgctgatgacttcgtcagagagtgaagtggctgcaggttagtgacaaagaaatgaattatgactgc

SEQ ID NO: 477239 - DNA, 623 bp, Homo sapiens
tttgaacaaaactttaattttgtaggtgtgtccttagttttaaaaggtaagtaaagtcctaactaatgtgatcacatttatcatagcctttctaaattactataatatgtggattttatttttgtgaatttctaaggtttataaatggtaaggctgatatagtgtaaattgatagatatagtgtaatggaaaatcggactgacatttctcagtgtcaacctgtctccttctcaataacattatctcaaaaagttgggttgaaattcaatctgagtatagaataaaaccctctaaatttgaagagaaaaatgccctgagacatagataatttgaataactggcccaatgtgatacaaccattaaatgatgaaacaatagatgatgaaatacatgatgaagcaaaagctcatcttcttacataacacagagtattgccagagagttggtccatttaactaagaatttagtaatgagtcacaaggtatgatgtgatactgcagaggattacttattttctttcacgaatatttcctgaaaaacagagaaggatgtaataatgctgatgacttcgtcagagagtgaagtggctgcaggttagtkacaaagaaatgaattatgactgc

SEQ ID NO: 477240 - DNA, 609 bp, Homo sapiens
tttctcagagtgtatcaccatcattaagtgacacatgacagtatcgcagccaggtctgccaaactccagagtatgtcctcttaagctattcacgccaccctcaaactgtctgccccagccatattgcattactttcagctcctagaactcatctgctctccttggcatgaggccttcatacataccgttccctatgtccggaatgtcccctcacaaatctcacctttacatgggtaatatttattcatttatcatgtctctgcttaaatgtcattgcctcaggaaagctttcccttactatctaaaattaaattttatatttgtttacttctttatggtctgtttccctttggtatgatgtcaaaattgttaccactggtcctcagttctcagaatgacattcagcaggagttcaataaacatttgttgcataactgcaagcataaatgaatgatgctggggtggaaactccctaaactgaaaacttcatctattcagactactgatgaaaaacagaaagwaagtataaatttgttcatccactggatatttatttagtagcttccaggtcccagccagtactcttaagaactcatagccttcctatgg

SEQ ID NO: 477241 - DNA, 601 bp, Homo sapiens
atagcatgttgctggactgaatattgtaggcagttctaacacaacgataagtatttttgtatctaaacatatctaaacatagaaaaagtacagtaaaaatatattataatcttatagtaccactattgtatatgcagtctgttgttgactgaaatgtcattatgtgacacatgactgtactgtatcaccctacatttcacatactttttccccattgattttgttttccaatacaaaaataatacatgctcactgtaaaaarcaaaaacaaaaaaaccaaaaaactctaggaaaatagactagtgattaagaacagagacttagaaatcagacatgccttctcgactccagtattcactatttaagttcatctttctgggtctgtttcctcatctataaaaactaaaactcacctcccagaattgttgtaggtataaaattggagattgcagggaaatgagacttcagacaaagtgcacagatagttgtgtaaactcatccagaatatgaatgtaaaccccaaatataaaaagacaatagtatggcatgaactgagttttgcagatctggtgtgacccacatgatcagacagtgtcaccag

SEQ ID NO: 477242 - DNA, 652 bp, Homo sapiens
tatattttggcagttcaaccatgcactgtgtgggggccaaaaaaatccctaaaaataatcatatgatattggctaagaccaaatgcagccagttatttctgttggtatgtcttaatgagggaaaaaggcagagctggatgcctcttctttcttaaattaaaaacaaaacaaaataaacaagcaaaaaaaacttcaagagacttcaaaggtcagtagaaagttttcgtttaaattgccaattgtacaatttgaggaatgcaagtaaactgccctcaaataacttttctaggtatttttcaaaaaattctaaagggaatatttgctttctaggcaaggtttttaaatatttcattatctaggcttagatagcttggatagaatagttattattttatattcaatcttttactttagcagactattaggatatgcttgttgtgactcagttttttgtatctaccatctgttggtttattacccaaatctataagtaaacatcaacataggaagctttactgtcaytgaagctttattaaataaatgagtttaattgtggattgttatctgtgaagtcaggacctgggagagaaaaaagctaccagcaacattcagactgagagaggccaaaatactaattcataattagcctggt

SEQ ID NO: 477243 - DNA, 519 bp, Homo sapiens
gttcccctactacatggcattatccaggagaggcagggggatggggaacacatcttctctgaactcattttgtgtgaaatgtcataaatgcacatgtgcatgtgtctatgtttgtgtatatatggatgttttggacttctacaaattactgacattgtcaagtatccaaattgatgttaataagaacaaaaaaataagcaaacaaacaaaaacagaagtcctaaactttcagccttcaggaatagatttaatgtttagaaacaatmaaaagcaatttggaatcaaattgggttcataaggaaaacataattagatgcattttatattggatttctaaaattatcctgagggaatttcaaaagagggctcccaaaaatatttgttgaatggccgccttatttcaatgtgggtttatagccaccctgtgtaagtcaaatgaaagaactaatactattttagaaaatgttatatgcactcatattgtgtgtgtgtgtgtgtgtctgtgtgtctgtgtgtctg

SEQ ID NO: 477244 - DNA, 519 bp, Homo sapiens
gttcccctactacatggcattatccaggagaggcagggggatggggaacacatcttctctgaactcattttgtgtgaaatgtcataaatgcacatgtgcatgtgtctatgtttgtgtatatatggatgttttggacttctacaaattactgacattgtcaagtatccaaattgatgttaataagaacaaaaaaataagcaaacaaacaaaaacagaagtcctaaactttcagccttcaggaatagatttaatgtttagaaacaatcaaaagcaatttggaatcaaattgggttcataaggaaaacataattagatgcattttatattggatttctaaaattatcctgagggaatttcaaaagagggctcmcaaaaatatttgttgaatggccgccttatttcaatgtgggtttatagccaccctgtgtaagtcaaatgaaagaactaatactattttagaaaatgttatatgcactcatattgtgtgtgtgtgtgtgtgtctgtgtgtctgtgtgtctg

SEQ ID NO: 477245 - DNA, 418 bp, Homo sapiens
agtgtccatggaacaatcacaacaatttaccagaaatccctgactatatttcaaaaattagaaatagcatagatatcaccctctgatcacagtgcaataaaaccagaaattagtaacaaaattataaaactcaaagccccctacctatacattcaaaaatagtttttattaaacaatgtcagaatgaaagagaaatataagctgaaattgtaacctttctagaaaattaacaattaaaattrtacttttcctcagagtaagatgaagtagtttttggcagaccagttgtgtcactgagaaaaactaaaagatatatatgccacaaataaaaatcatttgtttaggggcttcaagttacagttgaaacactaaagtgtaaaggggcaagattttctgagaggggagaaccatagaaagg

SEQ ID NO: 477246 - DNA, 617 bp, Homo sapiens
cccaagctcccttatatccctgggctcaggtataaatttgccacttatttaaaaagggaatttctccacattctttcttccactacagatttgaacctccattcccaaatgcttccctggcttcaggccttttgtctcatgcacggatttgttccctagcaagtctcttctaaatactgttttggtgggtagacttttagattctcatctttactttctgcctaggttactatcacacatgtagttaccttctttgtctcactgaactttatagacaagccttgccctmctccatacaaattcctgagagagtgcaacccagcctggagccggagcttcagcctctcatttgcttgaagagcagcttgatcccctgtatttcctcgaaatagcctttttgttacatgatcctaacaccatgagtataagaaacatgccatctgaagtgcctgattcttgcctgttatgaactaaatgtttatgtcctcccaaaattcacatgctgaagcccaatcaaggtggggtctttgaaaggtaattagagttagtataggtcctgaggatagagttcttaggatgaaattagtgatcttataagaaaagaaagaaagatctca

SEQ ID NO: 477247 - DNA, 555 bp, Homo sapiens
ccccccaaattcaacccttatagacccaatagcaatgcatgcggcttggtaccaacagccatgcactacattttttgtcgtagccttatctgtgatagctaaagcttggaaacaacccatgtgcccatcaacagtatattaaataaacaatttttaacactcgtatcatgaagtgcyattgcaataagtgaacttctgctgaacacaacatgaatgattgtcacgagcgtgacaataagcaaaagagcccagatatcaaagaatacataatgtgtagtttggcttgcataaagtcttaaaggtacacaacacatttatagtgttgcagaaaagggtaattgttacttttgggaacaagagaggaagtgttgattgagcaacggtataaaggattcatctggggggctagcaaaattttatttcattacctggttgtgagttcatagatctttgtttcctgaaaattattgagttgtgcacacatgttacaccttgtgtatgtgtgttacattccattatgattttaaagtaaaaggagagagagagactatcctg

SEQ ID NO: 477248 - DNA, 555 bp, Homo sapiens
ccccccaaattcaacccttatagacccaatagcaatgcatgcggcttggtaccaacagccatgcactacattttttgtcgtagccttatctgtgatagctaaagcttggaaacaacccatgtgcccatcaacagtatattaaataaacaatttttaacactcgtatcatgaagtgccattgcaataagtgaacttctgctgaacacarcatgaatgattgtcacgagcgtgacaataagcaaaagagcccagatatcaaagaatacataatgtgtagtttggcttgcataaagtcttaaaggtacacaacacatttatagtgttgcagaaaagggtaattgttacttttgggaacaagagaggaagtgttgattgagcaacggtataaaggattcatctggggggctagcaaaattttatttcattacctggttgtgagttcatagatctttgtttcctgaaaattattgagttgtgcacacatgttacaccttgtgtatgtgtgttacattccattatgattttaaagtaaaaggagagagagagactatcctg

SEQ ID NO: 477249 - DNA, 621 bp, Homo sapiens
caggttccctctcgcaggctgtgctgactcagccgtcttccctctctgcatctcctggagcatcagccagtctcacctgcaccttrcgcagtggcatcaatgttggtacctacaggatatactggtaccagcagaagccagggagtcctccccagtatctcctgaggtacaaatcagactcagataagcagcagggctctggagtccccagccgcttctctggatccaaagatgcttcggccaatgcagggattttactcatctctgggctccagtctgaggatgaggctgactattactgtatgatttggcacagcagcgcttctcacagtgacacacacagatggggaagtgggacaaaaacctcaccctgctctgggtcttgctctgtaccaatttttaaattttaaaataactggcctaggcacaaactatatttggaagtactttctagttgtaaaaggctcttctctcaattttctatccatttttctgaagtctcagtaaaacaaaacaaaacaaaacaaaaccacctgatgaccctgaagtgttggctggttgtccacatgtgctaacaccagtgcctgtggagctggacgtttttttcttgaaagaagcaaa

SEQ ID NO: 477250 - DNA, 468 bp, Homo sapiens
tagcattaaattcggcccattttggcatttttctggatctttgaaaatatcaccaccactgagctatgcaacctctgactaaccccagcagcccttcatgatgctttgtcatctccttcactccccgaatgccctcctgggcagycaggaatctgcctttgccactactgtatggtttccattttctgaaacttactagtgttatcaaacactatcttcccatttgttcgagcttctttcactctgcacacttcttttcagattctccctgctgttgctgaattgcatcccattctacagagggctcattacaacctttgagggtctaggacattctcttctgattctatttatttacttatttattttaaagtttgaattcattgtccatcaaatcaaactctacgggtgatgttcatctaaggtgacaggagtcagtgagggcttctcaggattcttgcttcttca

SEQ ID NO: 477251 - DNA, 636 bp, Homo sapiens
tgctgctcaagcctggcctgtggcttctgctgctgcagcttccttcatgggtccaggggcatccagggccctgcctgagagtggaggctcctcctccccttcagtcctcagagtcaggaacaggacatccaggaaacagaacatcctcctccctgcagcttaggacacagggtctctgcactgaagtcctgggctgaggtggcaggtccagttgtgtcatctcagacccacctctgatggggaacccgtgtctcygtcatcctccttttcccatttccaggagtttccagagtggtgtcttcctccccctgctcctcagtgtgaatccctgtgcttcctttctctccagcctattcttttttaataaaactcctttcatgtaggaactatgcacatctaataaactacccatatttataacaggaaattagacaaattttggcatttttctggttccttgaaaacatcaccatccccgggagctattgtgaccatcccggcagctcctcatgatgcttgtctcctccctccctcccctaatggcctctcaggaagccacagatctgcctctctcactactgtttggtttttttttctggaatgtatcagtgttatcaaacgttatcttcccatttg

SEQ ID NO: 477252 - DNA, 617 bp, Homo sapiens
tgtcattgcttccagaattatttcccttgctccatcgtggggatcccgcaatactgctgctgctgaaatcactgttgttgctccttccagaactgtcggcaccgcagcattattatcactgcagctaccactggagatggctacagacaccagaaacggaagagcacctctcccctcctccggcagtgtgactttcagtcggctcctctcgtagccagatggtatagaaatgacacaccaatgtccttcagaacatacatgcaaaatattttaaatatattagaaattctattccccttagaaaactaastccacctacatatttttcaaaaatccatcagcaatacagaataaaggcattggttctatacagcgttgcaagaatattttaacaatagaaggtattttaatgtcattcaccacattaggagattgaaaaagggaaaacacaggattaccttagcagatgtaggaaaaaaataagatggtaaaatacaacattcatttatattaaaatctttataccaaactaggaaaagcagacaaatttcttaacctgataagcttatctataacaaaaccatcgacaccaccatatgtaatgttgaagcataatc

SEQ ID NO: 477253 - DNA, 581 bp, Homo sapiens
agctgcagctcagaagtttaaaaaaaaaaaaaaacaaaaaaaaaaaccttatgatggaaatgctyccgttccttttaatcagactgaaattcctcaacggtgtaagcactcactactagatacaaagtcccaaaatatcttctgctgttctagaaactattgacattatcacaccacattaaaatgaaagcacatgcaagtgttctgcagcattgtttattattatgcctatactgccaacaagaaaaaagagggtaaagacacagattaggtccaaggggatgttaaagctcaatagctgaaaggattaatgcatctattcttacatcctttctactataaatgtatctgaatgactatcaaatggcagacttctcaatttgctagtcacctctctgtgctttaatatctgccagatctgtcttccagaaacagacatttcatttcataaaaataccaattgccccatgaccatagttcattaagcccggtaatgttattgagaggttccaaaagacacactatgaagagagttttcctcctctgacatcactaaaagtccagtgcactctcagtagcat

SEQ ID NO: 477254 - DNA, 501 bp, Homo sapiens
ctcagtttggatttggtggaacctttaacaaggatgctggtagaatagctttccccacccctactccaggaactgggacctttagtccagaaaagcctaaagttgtagtaatgaaatcactaattctcccacagataactgcaaattataattagaaatgctaatcctaatttcaccatttcagtcccagactcatgttttctaactgctaagtacacagtcttatataatggccattagttaaataatatactttaccttgaagccttgaaggacaatgtccccatctcagagatgtcacttccaagttggtrcttagctctgccctcaggagaccacatgatgtatggtagaaacagtacattccttggttatttatcattgtcacccctccttctgaaagtgtgacccttggtcctaggagatgtttttcaagatttatgaacctttgagtggtggtgctttgcaaggtgctgtgggaaagacagagagttctatgcc

SEQ ID NO: 477255 - DNA, 560 bp, Homo sapiens
aaaaaaaaaagtatctgtaaagataaagttacctcgtgaaatagcttattaaagtaaatgagaaagccagaggcatctgagtgtaaacactggctttgaaaaggatccaattttatcttcttctctgctggacccaagggcagcttcttactacatttatttttaaggcttttagcgtaacagtcacaaaatycaaggagatttactaaattaacggtcacttaagccaggacgagtctaaccagtttgtacctgttagaaaacagaaacttaaaataatagcttagtattagaaaaaaaattatttttactatattggcacaataagaaaggaaggtgaaatgcacggcagatgaaggggccaaaccagagctctcaggcgctggagcacgaagcatttcagactcttgcctccgtttatcgtttgtgagaactcagacaagtcacaacctctctggacctcagtgttttcaatctataaaatgattaaatcattaaggctattaaaggtcagtatgcaacagaactctgacatagaacttcccagtgagcagggtcag

SEQ ID NO: 477256 - DNA, 559 bp, Homo sapiens
aaaaaaaaaagtatctgtaaagataaagttacctcgtgaaatagcttattaaagtaaatgagaaagccagaggcatctgagtgtaaacactggctttgaaaaggatccaattttatcttcttctctgctggacccaagggcagcttcttactacatttatttttaaggcttttagcgtaacagtcacaaaattcaaggagatttactaaattaacggtcacttaagccaggacgagtctaaccagtttgtacctgttagaaaacagaaacttaaaataatagcttagtrttagaaaaaaaattatttttactatattggcacaataagaaaggaaggtgaaatgcacggcagatgaaggggccaaaccagagctctcaggcgctggagcacgaagcatttcagactcttgcctccgtttatcgtttgtgagaactcagacaagtcacaacctctctggacctcagtgttttcaatctataaaatgattaaatcattaaggctattaaaggtcagtatgcaacagaactctgacatagaacttcccagtgagcagggtca

SEQ ID NO: 477257 - DNA, 560 bp, Homo sapiens
aaaaaaaaaagtatctgtaaagataaagttacctcgtgaaatagcttattaaagtaaatgagaaagccagaggcatctgagtgtaaacactggctttgaaaaggatccaattttatcttcttctctgctggacccaagggcagcttcttactacatttatttttaaggcttttagcgtaacagtcacaaaattcaaggagatttactaaattaacggtcacttaagccaggacgagtctaaccagtttgtacctgttagaaaacagaaacttaaaataatagcttagtattagaaaaaaaattatttttactatattggcacaataagaaaggaaggtgaaatgcacggcagatgaaggggccaaaccagagctctcaggcgctggagcacgaagcatttcagactcttgcctccgtttatcgtttgtgagaactcagacaagtcacaacstctctggacctcagtgttttcaatctataaaatgattaaatcattaaggctattaaaggtcagtatgcaacagaactctgacatagaacttcccagtgagcagggtcag

SEQ ID NO: 477258 - DNA, 490 bp, Homo sapiens
ttcctctccaatgcactgaccaaggctacacctggccctggcttcggtcattcagggtacttcccctgccctttggagttgtgtgctcatctatttcttaatttctccaccttttccaagtatttactaagggctctcataggcccaacctacgcaaggtgctgtggtggctactacagaaggaacagagcacaggcttcttctggcctcttgggtgtcactggtaatatacttggaactcaagtgtaaccgtgaagttccctggtagctgagctggtgacttaactattatcaccttccttgcyacctcctgagagcttgggaagcctttcttgttactgtggtttgaagagtgtgattctcccttatttccctgtgcaccttctgtcaccatgacatcagctcaaatgtggtcttcttgccttgagtgaaccagcacccatattaccaaggccagcatgatcagagaggtgtaaactctttacaggtg

SEQ ID NO: 477259 - DNA, 365 bp, Homo sapiens
caccgtcttaataggctttcctgaatctcttgaccaaattgcttcctagaactctgtgttcctccgcacctagaaaacggcttttctcagcatctccctgtatctttccctatgtatctttttgtcagcctggttttttttcgttatctgtgtttctggcgtggttcttccttttctctctgtactatcctaggcctacyagtagatgttaatgaaaaatatatggagctgaacccacccacaggctgagctctgaaatatttcaagatctggcagaatataacactttgaataaaatttaaaacatactgcaaaagtggctaactctgccacatttggctgtgcagtcatgtctttccttttcc

SEQ ID NO: 477260 - DNA, 431 bp, Homo sapiens
cctcttccccttggctgccgccsctcttgcccacctcccccaaacccctgacctccaatggtcagctcctccctggccagcaggacgggtcttccaggtcttttagagaagataccaactccagaatgaccgtacctctgtttacatgtttttgtttcgttttgatttttgttttctaattgagaccacccccctcgtttccagaacatactggaactcttaggatttggggttgagggacttcaggtgagaactacagagacagcctcacgctctgcctggaacctcttgtcctccaagattcaggtgctctggttgagtctggtccactctgccacagtatctttactcacagtgattttctcttggggacttcatcactgtcttcctctcaaactgacttttgcttataacacagttggaagagagag

SEQ ID NO: 477261 - DNA, 422 bp, Homo sapiens
ttctttcctagttccagaacctgattggaccaagtttaagaccaaggtagggagtgggaggcagataggcaatgcaatgctattcaacatttaagaatacttcccacttacttgtccttgtcaggccctggccatacagacaggctgtacaagacataggccctgacctcagggagtaaatgtttttattgaactgacccactgtgtctctgaatgagaacaaaaatgaaactgctgcagaaaaacccagtgctacaaagtgctagcatcatcaggaggcaggctgcctctgcagtgcaatccataatctctgtgacttccagaaccaaaaaaaaaaaaaaaaaagttaaattactttctaaaattaagctttgcattactttggaaacyaacaaagcattccttcccacagacactgttcc

SEQ ID NO: 477262 - DNA, 638 bp, Homo sapiens
ataatctgtctttcgttataggtgcctcatttgtgaacctagtgatgggtgaagaaagaaagctcttctccrctacagtgctctaagaaaagctattcccaaaagagttgatccatattagctttagctcgggttcttagaattcctcaaacttgaggcattcatgatataatccaggtgccctgacacttgtttttctgttcattctgacatggacttcatggaaatgatgtgcagggacatcagactgaggtgaagagctcctaattgctccttgtaatcagagtttctgagtcctcatttcaatagtttgcagtagcacccaccataggtaggaccttgtatgggttactagatggtggcttaattgaattttttaaagcacaggtgacatcatattttaagaagtttaaaggtctaacagggtgtctgcattggtttaatatatgttaaaattcaaaggaggagtctgttttggggaaaggaggagaaggaaattagaaattcatttctccgcagtcccaagactgagctaaatcactgtggtgggagaggaagggtcgcaggaagtctaaccctgtgtctcaaatatttcacaacatgtttgcctacacaaaatatctgatgttagggtcagc

SEQ ID NO: 477263 - DNA, 638 bp, Homo sapiens
ataatctgtctttcgttataggtgcctcatttgtgaacctagtgatgggtgaagaaagaaagctcttctccgctacagtgctctaagaaaagctattcccaaaagagttgatccatattagctttagctcgggttcttagaattcctcaaacttgaggcattcatgatataatccaggtgccctgacacttgtttttctgttcattctgacatggacttcatggaaatgatgtgcagggacatcagactgaggtgaagagctcctaattgctccttgtaatcagagtttctgagtcctcatttcaatagtttgcagtagcacccaccataggtaggaccttgtatgggttactagatggtggcttaattgaattttttaaagcacaggtgacatcatattttaagaagtttaaaggtctaacagggtgtctgcattggtttaatatatgttaaaattcaaaggaggagtctgttttggggaaaggaggagaaggaaattagaaattcatttctccgcagtcccaagactgagctaaatcactgtggtgggagaggaagggtcgcaggaagtctaaccctgtgtctcaaatatttcacarcatgtttgcctacacaaaatatctgatgttagggtcagc

SEQ ID NO: 477264 - DNA, 648 bp, Homo sapiens
ctggagctgaagaacaagggaaaggtgataaaggaaagaaatgaagctcttattggtcatcccttgcctttgttcatttcaattattgtcttggaaatctgtagacatcctaagagctcccctccactacggacatgcacgtttctctctatgtctttttcccaacccctgctctgacaccttcccattgctgcagcctcatggaccacttccggtgaccagttagatatgcttgatctatttagttaattaaggctctgaatcagcccttggccagaagaagcacctcctctaggaaatcattccttctttttagtaatacgcaattgaaaagtatgtgtgggttatgtgctgttaggtgctaagcattttarctatgaattaactcataatcctcaaaataaatctggggtatagagagaggttcttgtttcaattagaaaagtaatgcttggagagactatgatttgcccaaggtcactgccaatagatgacttgattagaagcagggtatgtttgaatgcgaagtccaggctcaaaaaggggccttagtggctcctactagactggtatcttaaggcaaggaaaacagaatatgtccctaatatctaaaaccatgcctagtgcccaggccaggcttgaatcaat

SEQ ID NO: 477265 - DNA, 610 bp, Homo sapiens
ctatattagtctgatcaagctgccataacaaaataccacagactgggtagtttaaacaacagaaatgtatcttcttacagttctgaaaactgagagtccaagtccgaggtgttagcagggttgatgtcttgtgaggctcctctttggtttaaagacagtccttcttactgtatcctcacatagcctatcctctgagtgcaagcagagagagagatctcttcttcttataaggccatcaatcctatcagattagggccccacatttatgatctcttttaactttaaaacccatctctaaacatagtcacattgaaggttagggcttcaacacacaaatttggaagaggacacaatttagtgcatatcaaggactaaatcagtcagcaagcatcctttacttctttcagagtttctcctctggagagaattatggaattatagttctcaccagcaccygttgttatatgtaagaaaaaaacaaaatttgggagagaaaatggctttcctgaagatcacagagaaaacgggaacagagacagtagcaaaaaccaagtcttcagtgcactctccttttggtctggccttggctcagagagttactgctccacag

SEQ ID NO: 477266 - DNA, 624 bp, Homo sapiens
tatattagtctgatcaagctgccataacaaaataccacagactgggtagtttaaacaacagaaatgtatcttcttacagttctgaaaactgagagtccaagtccgaggtgttagcagggttgatgtcttgtgaggctcctctttggtttaaagacagtccttcttactgtatcctcacatagcctatcctctgagtgcaagcagagagagagatctcttcttcttataaggccatcaatcctatcagattagggccccacatttatgatctcttttaactttaaaacccatctctaaacatagtcacattgaaggttagggcttcaacacacaaatttggaagaggacacaatttagtgcatatcaaggactaaatcagtcagcaagcatcctttacttctttcagagtttctcctctggagagaattatggaattatagttctcaccagcacctrttgttatatgtaagaaaaaaacaaaatttgggagagaaaatggctttcctgaagatcacagagaaaacgggaacagagacagtagcaaaaaccaagtcttcagtgcactctccttttggtctggccttggctcagagagttactgctccacagcatacaataaagctg

SEQ ID NO: 477267 - DNA, 567 bp, Homo sapiens
caacagaaatgtatcttcttacagttctgaaaactgagagtccaagtccgaggtgttagcagggttgatgtcttgtgaggctcctctttggtttaaagacagtccttcttactgtatcctcacatagcctatcctctgagtgcaagcagagagagagatctcttcttcttataaggccatcaatcctatcagattagggccccacatttatgatctcttttaactttaaaacccatctctaaacatagtcacattgaaggttagggcttcaacacacaaatttggaagaggacacaatttagtgcatatcaaggactaaatcagtcagcaagcatcctttacttctttcagagtttctcctctggagagaattatggaattatagttctcaccagcacctgttgttatatgtaagaaaaaaacaaaatttgggagagaaaatggctttcctgaagatcacagagwaaacgggaacagagacagtagcaaaaaccaagtcttcagtgcactctccttttggtctggccttggctcagagagttactgctccacagcatacaataaagc

SEQ ID NO: 477268 - DNA, 624 bp, Homo sapiens
tatattagtctgatcaagctgccataacaaaataccacagactgggtagtttaaacaacagaaatgtatcttcttacagttctgaaaactgagagtccaagtccgaggtgttagcagggttgatgtcttgtgaggctcctctttggtttaaagacagtccttcttactgtatcctcacatagcctatcctctgagtgcaagcagagagagagatctcttcttcttataaggccatcaatcctatcagattagggccccacatttatgatctcttttaactttaaaacccatctctaaacatagtcacattgaaggttagggcttcaacacacaaatttggaagaggacacaatttagtgcatatcaaggactaaatcagtcagcaagcatcctttacttctttcagagtttctcctctggagagaattatggaattatagttctcaccagcacctgttgttatatgtaagaaaaaaacaaaatttgggagagaaaatggctttcctgaagatcacagagaaaacgggaacagagacagtagcaaaaaccaagtcttcrgtgcactctccttttggtctggccttggctcagagagttactgctccacagcatacaataaagctg

SEQ ID NO: 477269 - DNA, 630 bp, Homo sapiens
tgatttcagagggcacaccagtgtctgctttccattccagagaggaatgcggttcagcatagatgtctttgaggagaccaggggctacatcttggaggtctatggtgtccactttgagttacctgaccttggaccaattggtaaatcttcattacaagcctctaagcctcgcttgagatgtaggactcagataattgcatgaaagttaaacatccttctcccttcgctgtctcactcaaacttycacttttctctctagacaaattcttctctagaccaagtgtcttcccagaaaatatatgcaaaacagaaagcaacccaaaccaatccattataaatctctctagaatagtatacagacattggagataaagacggcatgtaatagatttctggttgcatagtgtgtacaggaaagaatatagaagtttgggttactgtgggcttgggtcaccagaaacagctccacagaagagatgagaatttgactaattctttatgaaaagttgaggagagtaaagaggaaagggaacagctttgcaaaagcatataagtgagaataagctttgtgattaggaggaagatatttttgttaagtcagtgagatttataatggattggtttggattg

SEQ ID NO: 477270 - DNA, 578 bp, Homo sapiens
taatggtgctcaacagaagcaattttgtccttcccaccccaagacatctggcaaagtctagagacattttttgttgtcacaactggggagggtgctcctggcatctagtcagtaaagtctagacgttctgataaactttccacaatgcccaagacaatctcccacaacaaagaactacgtagtgctgaatgcccatagcactgaggttcagaaaccctcctctagaaacagtggttctcaagttcatctgtgcattggatcttttgacaactccataactcacagtgcccagagcatgcctcagatcaaccaaatagaaacactagggatgagacccaaatatgataatttttttgaaactcctcaggtgattccagtgcacaggcaaggatgaggaccattgttttaggaatttcaaatcagtatccaaaacaccctctatttccaacctcagatcctggtccaactcagggactggytttgttttatttatttttcagggacaggggtctcactatgttgtccaggctagcctcaaatttctgggctcaaacaatcctcctgcctcagcctcccaa

SEQ ID NO: 477271 - DNA, 649 bp, Homo sapiens
tactataaatgtaaaatgacacatttccaaacatgactattgtgaactcttcagaccacaatgagtacatttctaaaataagagtttttttgatattgacatttttcttctgcagaccaacaccagcagggagattaggttaggaacacatcagtagttccattcatgcaagaatatctgtcctgcatcaggcatggcttaacactgacctagaagtgcacgacatacaaacatggattggacacaagaaaaaacatgaaccagagggtccactggcattgtggagcaagagaataaaaagcaaaagctctcaggggagataggctctaacatcctggaagtcttcctgaaatatgctgacaagcctgaagagaaggtgtggtgattgtccttgggtgctacagactagaatcagcactgcaagtcagaatgaaaacaggtgagaacctaggcaaaaattggcaagagcccacacctggatctttgaattgtcatatgtccaatgtgaatgagaagtcaccccaaatcagcatggttccagtagctcaatcttccatgatcgtgtaaaagaattatcataccagtaagcagaaaacatccaccraccaggccaccttcctggaaccagaacccagacattaaagtcctg

SEQ ID NO: 477272 - DNA, 496 bp, Homo sapiens
ctgaaattaacatgccactrgttgcagaaataataaaaatagcaatataaatagataatgtttattaagaatttaatgaacatgttaggtgactaacgtgatgaatgctttgcagagattatctcatcttcatgcagcgtttaagacaggtatgattggggttgcattttacagagagaaatatatatatatattttgaaagcttgttaaatagcttgcctaagttcacacttatatgtggtggagctgagttgctaaggaaagccattattttaaccctgacttttatttcacatagaaagctttaaaataaacatgagtgccagagccttactctcaaattattatttaatttatttggggtgtgactcagtgatactggtatttttttaaaaagctgcctagtgagttcaatgtgcactttgagttaagaccagtgaactattaaagcacactgctgagagcttagctttgccttccaattgtatcttgtcaa

SEQ ID NO: 477273 - DNA, 655 bp, Homo sapiens
ctttcttctggtacctgccattggctgaacacaagtggaagcttgcaggcaagggagccagttggcaacatggttaagsatcagcattccagcacatggaacaaggcattgaaaggcagaaaatgcttcagggtagaggcagggatggttcaaaccagcccagaaagataaaacatgtacataaacaacagattctagacaaaggagagaacttccagcttacaggtgattatatgggttggtatgagcctggaaatcagggagggcttcattgagaagtctctagctgagccttgaagaggagataggatctagagatacagaaataggaaaggagtattttgaggcagaatgagcaatatcacaaaggcccaaagggcacatggtctatgtgggattgggggttcatatgcagggaataactaatggttctatgtgaaacatgaatgtaggaagaggaaataagactagaaggtaggttggatcctctagtgaagagcctgaaaaaccctgtaaggtagtttgacttttgttcctgggacagtggaacaccagcatagttgtccagaagaggctttagagagactaattcactagacagagagcagagagtatagaccctaatggaagagaagtacagtgttcattcatggaa

SEQ ID NO: 477274 - DNA, 655 bp, Homo sapiens
ctttcttctggtacctgccattggctgaacacaagtggaagcttgcaggcaagggagccagttggcaacatggttaaggatcagcattccagcacatggaacaaggcattgaaaggcagaaaatgcttcagggtagaggcagggatggttcaaaccagcccagaaagataaaacatgtacataaacaacagattctagacaaaggagagaacttccagcttacaggtgattatatgggttggtatgagcctggaaatcagggagggcttcattgagaagtctctagctgagccttgaagaggagataggatctagagatacagaaataggaaaggagtattttgaggcagaatgagcaatatcacaaaggcccaaagggcacatggtctatgtgggattgggggttcatatgcagggaawaactaatggttctatgtgaaacatgaatgtaggaagaggaaataagactagaaggtaggttggatcctctagtgaagagcctgaaaaaccctgtaaggtagtttgacttttgttcctgggacagtggaacaccagcatagttgtccagaagaggctttagagagactaattcactagacagagagcagagagtatagaccctaatggaagagaagtacagtgttcattcatggaa

SEQ ID NO: 477275 - DNA, 634 bp, Homo sapiens
aatatttggcaagcaaatacaaggcagaagtactttaattatcatttcttaaaggatttttgctatcctgattagtataagttggtctcttaagcacatgattttgcaaagattcactcattttccaaaccagctttaagcattcacaattttccatcaacctagaatttctccagcccaggacagacctcagctcarcagaaaatcagtgaggcttaagtgaaagccaaattaaaataatatctgttgggcatggtggctcacgcctataatcccagcaggccaaggtgggaggatcgcttgaagccatgagttcaagaccagcctgggtaacataatgacaccctgtctctacagaaagaaaaagaaaaaaaattagccagaaatgatggtgtgagcctgtagacccagatacttgggagagtgaggcaagaggatctcttgagcctgagttcgaggttgcaatgagctatgatcacaccactgcactccagcttggataatagagtgagaaaatatatccctttaattctgtattacaatgtatatttagacaaggattctccttacttagtaaacattgggtttggggcataaatcatccctaagccaacttgtcaagaatctgtggcag

SEQ ID NO: 477276 - DNA, 634 bp, Homo sapiens
aatatttggcaagcaaatacaaggcagaagtactttaattatcatttcttaaaggatttttgctatcctgattagtataagttggtctcttaagcacatgattttgcaaagattcactcattttccaaaccagctttaagcattcacaattttccatcaacctagaatttctccagcccaggacagacctcagctcagcagaaaatcagtgaggcttaagtgaaagccaaattaaaataatatctgttgggcatggtggctcacgcctataatcccagcaggccaaggtgggaggatcgcttgaagccatgagttcaagaccagcctgggtaacataatgacaccctgtctctacagaaagaaaaagaaaaaaaattagccagaaatgatggtgtgagcctgtagacccagatacttgggagagtgaggcaagaggatctcttgagcctgagttcgaggttgcaatgagctatgatcacaccrctgcactccagcttggataatagagtgagaaaatatatccctttaattctgtattacaatgtatatttagacaaggattctccttacttagtaaacattgggtttggggcataaatcatccctaagccaacttgtcaagaatctgtggcag

SEQ ID NO: 477277 - DNA, 415 bp, Homo sapiens
gcaaatacaggacctctatttagggagcttcgtccatagacatatctcctccttgaactcatttttagattccgcatattctgtgctcccagtgctctgtgcttccctcggcagagtactcatcacgtcatatttttgttatatgtctgcgtcctctgtgtaggcttctgcaggtatttgatgtcttgttcagcttcatgcccccaacaactagcctctgcctggtccccagraggtgctcagggacttgaattaatttgggaggaggtgtcgttttctaaatttgctactttgacacagaaattagactattctataataataatcattaaacacctttcaacaactacaagcaatatcttaaactccctttaggaatgttcccagagcaacagctctgtcaccagcacagaca

SEQ ID NO: 477278 - DNA, 629 bp, Homo sapiens
agatgtgaacatgttactgcaagcaggggagaaggagtgggcttgggccatcacatcgtgggaktgggcactggggaaatactgaagggtgatggtgggtgccagagacaaacttaacagccttcaacattgagcatgagaacacctggggcaaggggcattgtttgggtggagtcatccatttatttattaactatgtgctgatgatgggcactgcaaagagactgcagatctgggcggaagccctctcccaaaactttcaaacaacagaggggctagtgggtctttgaggactagaatacttatctcctgacactttttccccagtctcttccagccactctcctctgtaaccagggaacatctgtgccataatgcaaggccagaactgaactgattaatttacggatcctctaaaatcagctccaggtcccagagtgagaaatcaaacaataacaaatcacctctttttttttaatggaggcatgaagaggggaaaaaaatgtcctgagcactattatatttgtccttcatcttacagggagtccttatcttcttaaaccaaacttccccaaatgctttgatgctctttggaattctgcctgttctaagtctaaggatcacctacc

SEQ ID NO: 477279 - DNA, 625 bp, Homo sapiens
gtgaacatgttactgcaagcaggggagaaggagtgggcttgggccatcacatcgtgggattgggcactggggaaatactgaagggtgatggtgggtgccagagacaaacttaacagccttcaacattgagcatgagaacaccwggggcaaggggcattgtttgggtggagtcatccatttatttattaactatgtgctgatgatgggcactgcaaagagactgcagatctgggcggaagccctctcccaaaactttcaaacaacagaggggctagtgggtctttgaggactagaatacttatctcctgacactttttccccagtctcttccagccactctcctctgtaaccagggaacatctgtgccataatgcaaggccagaactgaactgattaatttacggatcctctaaaatcagctccaggtcccagagtgagaaatcaaacaataacaaatcacctctttttttttaatggaggcatgaagaggggaaaaaaatgtcctgagcactattatatttgtccttcatcttacagggagtccttatcttcttaaaccaaacttccccaaatgctttgatgctctttggaattctgcctgttctaagtctaaggatcacctacc

SEQ ID NO: 477280 - DNA, 506 bp, Homo sapiens
ggtctacagagacccctgcatctttatcacctttcaatatcttgtctacactggcatgtgttgatggctccctaagctggctctcccactggctgcaagcttcttgaggataaagttcctagttttattcaatttctgtcttccttatgttgtagagagtccaatactcaataggcccagaatgcatggttatgaaatgaatgattggaagactacggttccattgctctggtgtcacgcccaccccaagccctgatgaatgtgtcaccatcattgcagataagtctattagtctgctccggctgtggggtataatcaaaagtatgtttggtctctgtcccaggttcctgtcccacagctccttgaactctggraattgcctgagtgatgagtgtctcttgttattcataatgagcccctttggctaacactcaggtgttagccaaaggcataatgctcaggcggtgatttggggtggggtccctatgtagcctcaggctgggacc

SEQ ID NO: 477281 - DNA, 655 bp, Homo sapiens
tcactgagggtgctttggacctctctcccactctccatgagtggatgctacatttttccataatctactggatctgccatttcctagggacttgcctttttcccacaaaacagagttgaggcaaaggaaaagccagcccaggtagaagaggcaacaaaggcaaggggtggggatccgcatcatgatttcagggaacagcaaacgttccatgggactggagccctgagtctgtgaggagaaatgaacaartctaccacagtcatccagaatgagaggcaaaattatgtcacaaaaggtgtgagtgggaaaactgggcccagcggcagattattccaggaagggattgtgcctttgtatgtctctgcaatgctaacctcaatgccagttcctcagagtgttacagacatttgccatgcatctgttactcaagtgctctgctcagagagggtcagtcttaagcccccaggagcatcctgttgtgaatcggttcacacttctttgagatgggcaagagggaaatgtgatgtatagggagaagaggggtggaggagaggttcattcccctagagaagctgatggagacaacccaagctttaaataaatcaactctggtcctttaaacaagaaaaggggatttcattactatgttggtcag

SEQ ID NO: 477282 - DNA, 416 bp, Homo sapiens
gtgtggtcgggaactagaccttctccaggtggaaagcggggcaaaggaggttcttgggtrggattcctgaagttgggaaatggaggacaaaggagataggcactggaaccaggagggcagggctgaggagttacaaaatcaggggcaagggagatagcagaggtgtgcatgtgagtgtgtcggcctgtgtgtctgtgtgcaagtgtgtgtgtccatgtgtgtctttatgtgcttgtgtatatgtgtctatatgtgtctgtgtctatttgtgtgtgtaactgtgtctgtgtccgtgtatatgtgtgtgtgtctgtgagtctgtatatctgtgtgtgtaagtgtgtgtatggctatgggtgtgtgtgtctctttagtgtgtctgtgaatctgtgtgtttgtgtgtgtgtgtgtgccga

SEQ ID NO: 477283 - DNA, 416 bp, Homo sapiens
gtgtggtcgggaactagaccttctccaggtggaaagcggggcaaaggaggttcttgggtaggattcctgaagttgggaaatggaggacaaaggagayaggcactggaaccaggagggcagggctgaggagttacaaaatcaggggcaagggagatagcagaggtgtgcatgtgagtgtgtcggcctgtgtgtctgtgtgcaagtgtgtgtgtccatgtgtgtctttatgtgcttgtgtatatgtgtctatatgtgtctgtgtctatttgtgtgtgtaactgtgtctgtgtccgtgtatatgtgtgtgtgtctgtgagtctgtatatctgtgtgtgtaagtgtgtgtatggctatgggtgtgtgtgtctctttagtgtgtctgtgaatctgtgtgtttgtgtgtgtgtgtgtgccga

SEQ ID NO: 477284 - DNA, 416 bp, Homo sapiens
gtgtggtcgggaactagaccttctccaggtggaaagcggggcaaaggaggttcttgggtaggattcctgaagttgggaaatggaggacaaaggagataggcactggaaccaggagrgcagggctgaggagttacaaaatcaggggcaagggagatagcagaggtgtgcatgtgagtgtgtcggcctgtgtgtctgtgtgcaagtgtgtgtgtccatgtgtgtctttatgtgcttgtgtatatgtgtctatatgtgtctgtgtctatttgtgtgtgtaactgtgtctgtgtccgtgtatatgtgtgtgtgtctgtgagtctgtatatctgtgtgtgtaagtgtgtgtatggctatgggtgtgtgtgtctctttagtgtgtctgtgaatctgtgtgtttgtgtgtgtgtgtgtgccga

SEQ ID NO: 477285 - DNA, 492 bp, Homo sapiens
aagacttgatttcaactctaagaataaactacataatgtttcaaatctawtattatctagaagatcccagatgtcatgatacagtttagttttggaacaagaaatagtaattaaaatcaactagaaagtctagtgggagatcattcaaaaacttcatatgcgagaaacttttaagaggcaaataatatgaacagtgatttcatcaaaaaggtgtaaaaaataaacagatggggaccttgaagaaaaaaatgttataaaatatctactgtttttcttccaaataatttccaaaaataatcaaacctgtaagagttatataatgtgtaattagtaattattgtatctccttgagtttctttcccctttaaaaatatctctgcctgtggctgtatatacagaattagaagaattttactggcttctcaaaaccagtaaggggcgagggaggacagaccagataagcagtcatcagcaattgcggttaggttcagc

SEQ ID NO: 477286 - DNA, 492 bp, Homo sapiens
aagacttgatttcaactctaagaataaactacataatgtttcaaatctaatattatctagaagatcccagatgtcatgatacagtttagttttggaacaagaaatagtaattaaaatcaactagaaagtctagtgggagatcattcaaaaacttcatatgcgagaaacttttaagaggcaaataatatgaacagtgatttcatcaaaaaggtgtaaaaaataaacagatggggaccttgaagaaaaaaatgttataaaatatctactgtttttcttccaaataatttccaaaaataatcaaacctgtaagagttatataatgtgtaattagtaattattgtatctccttgagtttctttcccctttaaaaatatctctgcctgtggcygtatatacagaattagaagaattttactggcttctcaaaaccagtaaggggcgagggaggacagaccagataagcagtcatcagcaattgcggttaggttcagc

SEQ ID NO: 477287 - DNA, 540 bp, Homo sapiens
gggctgatgtgaagcttgtgctaacatatgaaaagtatttagaaagagcttggcatgtagtaaacactcaataaaagttagctactattatgtagtgttttccaatggtttatttagaagcaaaatagtatcagtctagaagtccaggcttgtttttctcccaaacatgttttcacaagtgcttccatggtctccttctccttttcttcttcctcttcctctaaaaacatattttgctgtgtctgcttggtcatctttcactgggccagagaaagaatccctgagggttggacaaggggagcagctgagttggtgagaaaaggagcccagcaggttgaatgcctcgaaccactgtgatgagctcttgagctgggtgccaatcaaagtgaagcagtggggcttgccaggtgagatgttaatttcagcrgtcacacgtgtccctgtctggactctccctaggactcttgaccctaccctgcagtggtttgaaatggattttattaggctttcattacattctcatatcatttttttcacttg

SEQ ID NO: 477288 - DNA, 511 bp, Homo sapiens
tggtgataaaggcatgttttgtcttgatgtcagttagaggtctacctgaaaaataggtgagccatagacagtgaataaatcaaacaagtgcaaatttgataacaagatggaccaataagttgtcaataagtggagaacaaaygtaatacaattcctggtattctcttggagaaacctctgcttatgagtcctctagctttcagcctctgtgcctgggctccatctatatatctagactcatcccagttactgagccagttatgacaaatagggaatatgtcagtataccagaaaagtataatccagaaaagagaaaccctgctgagcatttgaaacagagggaatatgcagggaactggttatacaggagacaaaagagctgagaagccaaacaatggatggtgagataatccaaagaattgtgatagcagaaaaccagtaccacttctaaactggaggtcaacagggaggaggtcgtatttttttttttttaaaccgaagaggaggcact

SEQ ID NO: 477289 - DNA, 511 bp, Homo sapiens
tggtgataaaggcatgttttgtcttgatgtcagttagaggtctacctgaaaaataggtgagccatagacagtgaataaatcaaacaagtgcaaatttgataacaagatggaccaataagttgtcaataagtggagaacaaatgtaatacaattcctggtattctcttggagaaacctctgcttatgagtcctctagctttcagcctctgtgcctgggctccatctatatatctagactcatcccagttactgagccagttatgacaaatagggaatatgtcagtataccagaaaagtataatccagaaaagagaaaccctgctgagcatttgaaacagagggaatatgcagggaactggttatacaggagacaaaagagctgagaagccaaacaatggawggtgagataatccaaagaattgtgatagcagaaaaccagtaccacttctaaactggaggtcaacagggaggaggtcgtatttttttttttttaaaccgaagaggaggcact

SEQ ID NO: 477290 - DNA, 614 bp, Homo sapiens
ttgaggagggcaataatagtagtgaacaccaaaacgaaaggggatctgggcttcaaaatactaacagttctatttcctagccagtcgtctcccgggctggatgtgccgccgtcccagatctcagcggcggccgcagagcgcagaggtagggagagaaaaaggaggcgtcggcggggcgcgagcgaccagggcgctaagtgccgcctcacagtcctgccagagacaggagacgccgggccgcccgcgccgtctgtcccaagagctcctcctggacatccgcttgactctccgtcgtctccaattggccgtcggggaacggaagccgaagcaaactagtgaacccggaagtgcttcgcggcggaggcccgggcaactcttttgaatggaatcgggctgattcatcgccggtttgcagacwgagccgcgtcgggtgtgcgccgctgctgctgttgcctctgtcttcgcgtcaccacagaggcaagacaagggtccatatcgcggcatccggctcccgcccgtcttcaggtaagacccagaaggcaggcctgggaggtctggggaggcagccgtgctaggccgccgccagccccgtgctttcctgagtcacgttgccc

SEQ ID NO: 477291 - DNA, 614 bp, Homo sapiens
gtgctcctcagaggagggaggagagtctgctgtgagccagacgagcagggtggggttggagagaccagcagggcttgcaaggtatggtctaaactgtgaatgttttcttgcctaaagtaaaagatgtatttgttgattaatgaataattatgttagcatttggagagagaagatacttcaaagttgatattgatttccaacaagattaaaaatatgatatgtataacattgagatgtagatttaatttgtattcttttcataagagggaactgggaatgtccatttggtgagggtacttaagtcttaaaagtatgcttatttaaagacaaatacgtggtaacatttttaaagaaatgttggtatgtttagtaatataaagttgcctttggcttaagctaggcagaacaaataaaatgtgtaaggaacttagaatagaaagtacttgtagttacttggggatagggttgccagatttggcaaatgaaaatactggatgcccagttaaatttgaatttcagataagtaaccattaatttttagtataagtatgtcccaaatacwgcctgggatgtacttagtaaaaatacttatttatctgaaattcaaatttaac

SEQ ID NO: 477292 - DNA, 579 bp, Homo sapiens
tttctttcattgccactagggctgaatggaaatgcctagacaattatccaagtttcttcccttccccccacttcccgcccacccagcctcccttctccgcgcgcgcgcrcacacacacacacacacacacacacacacacacacacacacaaaattaaaaataaaaacttcccagcgtgtaccagccagaatataccactgtacctatctggtgaaaggggattctttttttcccctgtccttttctagatgggaagactttctctcaacacagttgacatctactagcttgctgacaaccagaggaaactccgtgtcccagaaggtgactcaaattaaagtgtaccattgaccttcctccccagcccatcctttccccgcccccaccacttttagcaggactagcaaactcggttttcttctggattccagcggcaccctaagctccacgtggtgagggacatagaccctttggggccacaggaaaggcagcctggagagcagccccctgccctgctctacagagggagcgcgggtcaccgctctaaaggtggagtgggcacccgccaggtctctccc

SEQ ID NO: 477293 - DNA, 444 bp, Homo sapiens
tgcttgtagctacagtaattagactgtcagtgcttgttagaggagagaggggaaaacacgcttctgacagcagattccaagactccccagtttgttaatttctaagagatctttaaagcattaattgaggtctccccaactctcccctcccgtccctctctgcaactcctcccttcccaaaaatatctttaggagaagcgagttctctcggcgtggaagcagtgtttcccgcaaaactgccagcccgccccccgctcacgcacagacacccaatttcccatatacagataaatgcacacatgtatacgcgaaaggttaactcggcggaggactcgcccaaataagcaccgggattgcatttaaaayaataataataaataaataaataaactaggaaggaaagcggggggagggaagcagaagtcgggaagaaaagagaaaagc

SEQ ID NO: 477294 - DNA, 649 bp, Homo sapiens
atttgcttttcttaggataatcccaactttgtcatattacattataattttaatatcctcttgaatttttttctaatatattatttagaattatttgtagtcttatagtattatttttccttattatctttatttgtttggatatgttagtttaaccagaaagaatgaattacggaatctatttttcttttctgttctttcatgtttccatgttcaagtttcacatggagttctaactttttaaaatacctyttatgttaacttctttggcccatgagttaattagaaataaattcttaatttgtaaatatattgagattttagaaatttttattttttactaacttctaatttgataattccatggtcaaagcttctgacctacataactaatctttacattttttaaaagaattattaatactcagaagttaatcaactttataaatgtatcatgactgagaataatgtgtactttcaaattattttatttagaactctaaatatgtgaattagatgaactttattattttgctcaaatattattgattgatttttttagcctgtttgatttatcaataattgatggatattaaagtactacactgtgattttgtatggattaatactatttctttcaaatatttat

SEQ ID NO: 477295 - DNA, 629 bp, Homo sapiens
gatggagattttaatccctggttactttattatggctggtgcgtgctacctttgaggttactactgcctagaaacataatacttgtctgaggtctgggagggccatggggccaactgaagtaacacatagccaggttgttgatataacattcctgtacagagctggmtaaaattagtgaggaataaagtcattttgtttagaatgcaatcatagagcatacacatatttactacatataggtagggagctgagctaaataaatggtaagatattcttttgtcaaatcactaatttggtcaatcctcattctttttcttttttgttttatgataattttaaagatcataaattatctatttaaaaatttgaagagtttagatacattttctttataaagcataatatatttggcacctaattccaatctagcaatccaagtagagagcttgatattttgatcctcaaaaaaatctgaatttagttgcaatatcaaaagtaaaatgagcacaatgacttctggtaattcagatgctacaagaaatagaattcttctccgttagtacaatggtcagactaaaactgatgacctctgtcttcatgatagccttctgaaagttgagtaagaaaa

SEQ ID NO: 477296 - DNA, 510 bp, Homo sapiens
ggagaatacataaatgaatgggatgggtatggttgtgttttaagtaaactttacagaaaagtggccagtgcatgtttgctgaatcctgagatagactattatatgcttatttggtacttctgaaggtaatataaakgttataaatttgatatcaagtgtctgagatatatagcattttaatgcactaccaccatttaattataaataagtaaaatggttaacttctttctgtacatgtcttgatttgtttacatatttatttatccaacaaatacttataaagtgacaatcaagtcccaaatgctaaatcttgtgccaagataacaaagaagaatatagcaaaatctctttccaaattggaataaaaattcattctttatatatacacacctactatgtacccataaaaattaaaaaaaaattaaagttaacaagtttaaaaagatataatatttgtattcacatgcaaaatgagtaggatgaacattatggaatgcgtaaaataaatag

SEQ ID NO: 477297 - DNA, 510 bp, Homo sapiens
ggagaatacataaatgaatgggatgggtatggttgtgttttaagtaaactttacagaaaagtggccagtgcatgtttgctgaatcctgagatagactattatatgcttatttggtacttctgaaggtaatataaatgttataaatttgatatcaagtgtctgagatatatagcattttaatgcactaccaccatttaattataaataagtaaaatgkttaacttctttctgtacatgtcttgatttgtttacatatttatttatccaacaaatacttataaagtgacaatcaagtcccaaatgctaaatcttgtgccaagataacaaagaagaatatagcaaaatctctttccaaattggaataaaaattcattctttatatatacacacctactatgtacccataaaaattaaaaaaaaattaaagttaacaagtttaaaaagatataatatttgtattcacatgcaaaatgagtaggatgaacattatggaatgcgtaaaataaatag

SEQ ID NO: 477298 - DNA, 510 bp, Homo sapiens
ggagaatacataaatgaatgggatgggtatggttgtgttttaagtaaactttacagaaaagtggccagtgcatgtttgctgaatcctgagatagactattatatgcttatttggtacttctgaaggtaatataaatgttataaatttgatatcaagtgtctgagatatatagcattttaatgcactaccaccatttaattataaataagtaaaatggttaacttctttctgtacatgtcttgatttgtttayatatttatttatccaacaaatacttataaagtgacaatcaagtcccaaatgctaaatcttgtgccaagataacaaagaagaatatagcaaaatctctttccaaattggaataaaaattcattctttatatatacacacctactatgtacccataaaaattaaaaaaaaattaaagttaacaagtttaaaaagatataatatttgtattcacatgcaaaatgagtaggatgaacattatggaatgcgtaaaataaatag

SEQ ID NO: 477299 - DNA, 510 bp, Homo sapiens
ggagaatacataaatgaatgggatgggtatggttgtgttttaagtaaactttacagaaaagtggccagtgcatgtttgctgaatcctgagatagactattatatgcttatttggtacttctgaaggtaatataaatgttataaatttgatatcaagtgtctgagatatatagcattttaatgcactaccaccatttaattataaataagtaaaatggttaacttctttctgtacatgtcttgatttgtttacrtatttatttatccaacaaatacttataaagtgacaatcaagtcccaaatgctaaatcttgtgccaagataacaaagaagaatatagcaaaatctctttccaaattggaataaaaattcattctttatatatacacacctactatgtacccataaaaattaaaaaaaaattaaagttaacaagtttaaaaagatataatatttgtattcacatgcaaaatgagtaggatgaacattatggaatgcgtaaaataaatag

SEQ ID NO: 477300 - DNA, 444 bp, Homo sapiens
ttcttgctgtattcacctggacacacatagctgctttcacgtggagaatcaactggattggaaggtccaagatagcctcactcacatactactaggctatattggcttccctgtctgttaatttcagggcaatgttccaagcaggtgagggagaaggctgcaagatgtcttaaaacctatgctccataactcatasaccattactaatgccacgttattctagtggtcaaaatgagtgacatggacagcccagatctaagaaggtagagaaatagactccctctttggatgggagatgtggtaaagcatagttgcaaagggacatgtatacttgaataggaggaatttgtgaccattaaggaatccatgaatgtcaactttgtggtataaccataaaaatcactgcttagtttggaatgaagatcaaatatcattctgggttat

SEQ ID NO: 477301 - DNA, 523 bp, Homo sapiens
taacaacttttcccatctgaaaacataatttccccatcgtataggaataagatattcaaagtttacagaaattaggacatgggtatctttgggtggaggggaatgaagtgagatgattattcctactagcataataattaatcaagaaaatagtagtaatatggttacttccagagacaacagtcatacctgaattctctcgaatgctcacatcctttgacttcactgtcttcatacctcatggggatatgggttggatgttccatttcagttgcaattccctgtttgagggttacagttcttcagagrcataacatattaattattattattttttaacttcttgagactacccaaaaagtattagacaaacagattaagtgggttctttatattctgcttgtttgaagtgccttacttttgatattgttgttgcaatttcaatatctacttggcaagttcaaggtgctgccaaaaggaactattgcatggcaggctgcctgcctccttagggaccctcctg

SEQ ID NO: 477302 - DNA, 618 bp, Homo sapiens
aatctcttctgacagtgcatctgaatctcagaatctcagtggctggagcctgggaatctgtattttgagaaaatcctctaggtgattctggtgacctactaattcacaggggtctgtgtgccctttcctcccatgtctcatgccggaatttggggttctaatattgtagcccatatgtccctggtgccaactacctgcccacttgaacatgggctgatccactgccctagctagacagagccttaatgccagactttgacttttccatgatccctcaactatgatcctcccagcatgacttttctctgtcctcccactggcctcctggtctcaggctggctttatggacttacctgcccttgccaggcctcatgtcctgacccctcacccaccattcccccaactacccatgcactcaagtcctaatatctttccccactctgcctggaccatactgatgcctcctgtgtatcctgatgcctccaggtccagcgaatagaaaggatgatattggtaggtatgttttctmtaatgagagatgcagacaaggaacactgaggaggaagtgatggcttcagactggcatctcagggaggtttcgcactgaaataggatttc

SEQ ID NO: 477303 - DNA, 563 bp, Homo sapiens
tttcctgcgtgcagtacccttaatattaggtctgaaaacaatttgcaatcagttgtactaattaatctaattgaatttaatttccctttcttggcgttaggggtgagtgaactccatatgctgacttatgtaaagcaatatgcaaatttgtatcttgagcccagagccctgcaaatgcttttgattacaaaaaaggctacacggaggccctagataaatgaaacactcactgcggcttctggcctgacactcctctcttccagcagtgagatacaatatacctctgttatgccacctgtggcttggttgcctgttcctgtcccgaaatggcactgttgagtccctgcaacaggtccccatgtacctgggtagcatattttctacttaaactctcaagaatctgggttcctccactttgttctgctgctgatccttttccctgggcccctcattaagctcaggagtrgatcctagcgtttgctgggaaggctgtctgatgagcaccctagtggtttggagaggtggtgggtggtaccggttgctccagctcctccagcagaggt

SEQ ID NO: 477304 - DNA, 680 bp, Homo sapiens
attaaatgatttaatgcttgtaaagtgcctggctcatcattaggacaaatacctaatgcatgcagggcttaaaacctatttaatgggttgataggtgcagcaaaccaccatggcacatgtatacctatgtaacaaatgtgcacattctgcaaatatatcccagaacttaaagtacaataaaaaaataaaaataaatttaaaagaaaatacaatttaaaaatgctatgaaaatgtgagaatggcaagcatgggtatcaccaaattcacatatattatacatttttgataaataaaaatctaactacctactctaaaattatatatgataagggatcttttttgacattataaatcttattttatttaagaagttaattatttgcttagttgagattttttycccccaatcctgctcacccttagggttttgatactggcaatattttgtacatattactgttctgaagaaagaaaaggcagaattggagttaaagaagagtgacaataaaacaccagatggaaaatatgacactccatgtatgcagatcctggagaaaggataaaaaaggccactaaaaaaggccaccatgtacattttaagtgaaatataatccatgagagtttcactaggcaatggtcactgcttttgatgaataagtatttctttaatcattgtaaat

SEQ ID NO: 477305 - DNA, 577 bp, Homo sapiens
ctgggcatgttaaaatcttagtctaggaaaccggcctggtgacctctgcaattgytaatttctgtgatttttaggaaatctgaaggatccacctagagccgcaggtagaagctgaaaggggattgttagatttctggaagaagtctttctcactttctttccctacccccagcctgcctgcattttcctccatgtcctcaccttggctgccaagactgtccagacttggcagtaatttctgagaggtgggtttaagagggttgtaaatcctaggatgacccgtgatagccttctctctggacctttatgaactgggtgagtaggctggctccgaagagtggccaggaaatgccatgtctgaaggcagggggttaggctggatggtggtgtgggtcccagcctcttgtttttaagctattatgtatggttctaggcaattggtaactctatgcaaaccaatatatctgtagccacaagagggagctctcctcctgctgaaccaaaatgtaactaaggaaaggctgtattgatcacgtgcccctgcatagttagttgggacctgcattgagcaaaacca

SEQ ID NO: 477306 - DNA, 585 bp, Homo sapiens
ttttaaaaatatccttgtaccagagagtagagaactccaaatctcttttggaaatggggctccatgtttcatgttaatattctgggtacctggtgtaaggtctggtaattatttgttgcctgatatttagaatacttttttcaaactgttagaaagagtagatcagtaaaacgaaatgtaaaaagaatacggggcactaataactttttatcttactacataaggaagttaaaaaatagtaacgactacctctaatgttaccatcatttcacaaaatattttacatcmaaaaaagtaggaagaaaaacattatagaataaaggatgaaggcagttttgtgaccacacacctacacaccaccaaattgtgcttatttttctcattttgcagtcatctaggagaaacttgtcatggtctggactagcctggcatggagaagtcccagatccgtctgtgatgctgcccagactttagagatgccataaaggctacttagtatgcctcactctttgcttgttactttttctgaacagagctctgtcagaaaaaattgtctcggtcctgccaaggatgaaatgcccacac

SEQ ID NO: 477307 - DNA, 493 bp, Homo sapiens
gcaggctctaaatgacaaaaagtctgattatttaggctatgtataaaacattttgatatgtaaaaatttgagtttgtgctggtcaacttttgrgccaatagttgtcagtcttctgtgaagaagtaaacaacccaggagccatctttagctcatttatataaccctcagtgatcttattcttacccaccaagtcatactgtttagtgcagactcaaggagacctgaggtggggcttgtgccatacttcaaagagcagaagatgtatacttacatagcagagctcatgtaaaagaaaatggaagaacaggggtgaggggtgtcactggaggaaattctacagaaatgattgccatccatccatctttcatcatttctttcagtcaatacccaggcacttcatttttgttattttattaatgtgagaatttttaagaagcacttatttgtcccatttatagtaactttttcttatgagatctttcaggacattgca

SEQ ID NO: 477308 - DNA, 493 bp, Homo sapiens
gcaggctctaaatgacaaaaagtctgattatttaggctatgtataaaacattttgatatgtaaaaatttgagtttgtgctggtcaacttttgagccaatagktgtcagtcttctgtgaagaagtaaacaacccaggagccatctttagctcatttatataaccctcagtgatcttattcttacccaccaagtcatactgtttagtgcagactcaaggagacctgaggtggggcttgtgccatacttcaaagagcagaagatgtatacttacatagcagagctcatgtaaaagaaaatggaagaacaggggtgaggggtgtcactggaggaaattctacagaaatgattgccatccatccatctttcatcatttctttcagtcaatacccaggcacttcatttttgttattttattaatgtgagaatttttaagaagcacttatttgtcccatttatagtaactttttcttatgagatctttcaggacattgca

SEQ ID NO: 477309 - DNA, 639 bp, Homo sapiens
gttgcctatatgatattgacataaccacagttatgtccctgtacttttttacacatgctgttccctcagcccagaatgcaggttctgttgatagggattttggtcattgtgtcagaatctcttctgtacgccaggttttgaacaggcctctgtaaatgccctggcttgrtgtgactggctgcccagtactgctttgcccacattgaacagggcttgattacatgaaccaaggtcaactaactaaatcctttggatttgccatcccttttttccacagcagtctgagctatcagctgaagaaagtccagaaaaattaggaacctcccagctacatcgccggaaagtcatttccttgaacaaacagattgcgcaaaagaccaaacatcttgaagaggtcagtgttttcttttcgtaagtttattcaagatcttcatggtagattggttaaaggagattccagaacgggggttggcatactgtggtgcttgggccagtccagttgccacttgtttttgtaaattaagttttattacaacataacacatccatttgtttacacattttctgtggctgctttcaggctacagtggcagagttgagtagttgcagaagaccataagacctacaaagcctaaaata

SEQ ID NO: 477310 - DNA, 555 bp, Homo sapiens
ctgcagtttcctaccaccattctcagatgaatcctaaacagtacctccaaatatctcttgcttatggtcctgttttaaaaatgtatcacrccagagtggttctccgacatggcagtaaaatcttccggggacgttgggtttctcctcttacgatcttggggcagagggctccagtgagtgatgccagaatgtaaacacatgagaaagaaagaattgtccataggtcctgtcatcataaaaaaccctgttacagaagacaaacattcaagttgcctgtaatctcatctcacaagagatgagctaagggcagaagtgctccatatccctttccctgtagaaaaatatcattaatctctctgtgaatgacttcaataaaacgatgtcaaaggaggagaaaaaaagtatcactagtaacaagcacgatttctcaagactattcagccgtaaaaatgagaacgacataagtcagtgtttgcctatatatgcacactcacccaagccaggataggctgtcttgcagagggagaatgcagtcccctctcagtgacctggggt

SEQ ID NO: 477311 - DNA, 661 bp, Homo sapiens
aggaaatccatgaaactgttaacaactgttgccttttggatgttgccagtagcccttgggcagaacatgtcttttcatcaccatttcccacaatgtttcaacagatggaaaagaaaaagcaagagaacaaaatgagaagagaccagttgaacgaccagtacttggagctgttagaaaagcagaggctatactttaagactgtgaaagagttcaaggaggtaagaggaaggctgggtagcacattaaggctaacgtgagatatatgttcacctcaaaagtagccactaaaaaacagcagttttttggttttcctctggtctgtgaagggaaataacaagacagagtgtgatctggcagtgaagtgtggcgtctaggtagctgaagattgcgtttttctgtggcccatcttgaggtctaattaawtgttttaagacatcacatcactttagttttcctaacacttagtaagcacattaactcacaaaatgactccatcagtccgtatcaagggccacttggaaacagcatttgttgtggattcagatatagaatcttctttcctgccaatcttagggtggggagggacctcaagaagctgtgtgggaagagagaactttgaagtgtcacaggcttggattcgaatcctacatttaccacttac

SEQ ID NO: 477312 - DNA, 448 bp, Homo sapiens
ccctgtactaattatccaagtaatcactgtgtctgatcaatcatatttgattgatagattagatggggctgtttatgcagtagaatgtgatgttctttattttcctaaagattagctacatatttgagattttaaaaaggaagaaaagacttgctgacttggcttatttaaaatggtttcctttatagacttacctttgtgataattgttttcccttgatgtctggcctggtgtaggcagaaatctttaaatgaaaaggggtaggaagtcacaaagttacaatacaaaatccttgaaaacaagacgaccaaggaacaactccagaatgtggaaacggaactagaaatggcatcakggaagagaggccctttctgaaactgcgcatttgaaatataagctctggcttccaaaggaatgggcctttgcatttaggagaccccaaataagc

SEQ ID NO: 477313 - DNA, 518 bp, Homo sapiens
tattttggtggcagtgttccagatgcactataagtagctaaagaataaaattagtaaggtgaagcaagaggccatgtaataatccaggcagctagggacacaaccctagagtggaatagtggcgtagagggtcagggttggtgcaagggagattaagaaggaagagagaygtcacaggatttgatggctatttggacctttggtctgagaagtcacaaaggagagaaactgagttaagtcctggctccataattttctgccatttgttcttaggcaatttctctgagccttgtgtcccctcaactatgaaatgagaatagcaatgcttgcctggcctacagcagaggattttgtatggtttaaatgaaatctggtgtataaactaggcataatggccagttgtgaactctcaaatgctcgataaatgtgagggtttgtttgctgttgtcatcatgagttcagtttctgacatgctttttcaatagtgagaacatccaagtggaaatgttgaatgggca

SEQ ID NO: 477314 - DNA, 573 bp, Homo sapiens
tgaaaacatgggagggcgttctggagagaaattagtgtcagaactaacacgtgggcatcacctgcatatctcggggaaaggagaggaagctggaatgggctggggataggakggacaaagactcactcgctggagaagtcaaaacggttagggatgcaggcaggccagggagggaaggagccaaagggtcagggcaggcttcacagtgttgcaagtcgccagtacctgagacatgaaagagagaagacagccagtcttgggatggggaggtatgtgttaactacacacaggagtttccttaggaaatgaaggaagcaaaaatagcattatcagaatttagctggaggatcacgaggaaggaaaggtagccaacagggtagactccacatgttaaacaattggcttgaagaagagagaattgggacaatttcagagtcttgtgttgagatttcagagctctttatttgtgtggttctgctgttagtagaagtgccagggccatgaggaaagccactaggaagacaaggacctcatcttatgcctgcctctggtgctctgagttttgcaaagggg

SEQ ID NO: 477315 - DNA, 573 bp, Homo sapiens
tgaaaacatgggagggcgttctggagagaaattagtgtcagaactaacacgtgggcatcacctgcatatctcggggaaaggagaggaagctggaatgggctggggataggatggacaaagactcactcgctggagaagtcaaaacggttagggatgcaggcaggccagggmgggaaggagccaaagggtcagggcaggcttcacagtgttgcaagtcgccagtacctgagacatgaaagagagaagacagccagtcttgggatggggaggtatgtgttaactacacacaggagtttccttaggaaatgaaggaagcaaaaatagcattatcagaatttagctggaggatcacgaggaaggaaaggtagccaacagggtagactccacatgttaaacaattggcttgaagaagagagaattgggacaatttcagagtcttgtgttgagatttcagagctctttatttgtgtggttctgctgttagtagaagtgccagggccatgaggaaagccactaggaagacaaggacctcatcttatgcctgcctctggtgctctgagttttgcaaagggg

SEQ ID NO: 477316 - DNA, 645 bp, Homo sapiens
tgactgtggcagccgcgagaagttccgagaggagagggagcaggcacagctcagtaattccagagacagagcttcaaaacaggaagactcttgctagagagagaacrctgtatcccagcattttgtgtccagccatgctcttgcccctctgtggagggtggaggggaagtgggagcctctgcccctccatggaagttggaatgtgtagccaagatcctgcactcaaagtcacatttccttctaggatcctaaggatggtagctattttcaaggcttaggcagagcacttaaaggctcttatttttttctccatattgatcttgtttagatagatcagtgttgtgaatgtgtcaacaaggtgtaacagtttggggactagatttcttcaacttggtgagttggaggtgagaggaagtggtgagcaaagtaagcagaggtaccagtggcattggtgcatgagagggagtcttatcaaaggatttgcatggccatgcaaagatagactggaccgaaagtaagattttagtcatcttagtgagcctagatatcatttccttatgactagttctatgaggttagaatcatatctaatagtaattgtttggaaataatggtccagtaatctcagagctgaaatgtgaccaa

SEQ ID NO: 477317 - DNA, 645 bp, Homo sapiens
tgactgtggcagccgcgagaagttccgagaggagagggagcaggcacagctcagtaattccagagacagagcttcaaaacaggaagactcttgctagagagagaacactgtatcccagcattttgtgtccagccatgctcttgcccctctgtggagggtggaggggaagtgggagcctctgcccctccatggaagttggaatgtgtagccaagatcctgcactcaaagtcacatttccttctaggatcctaaggatggtagctattttcaaggcttaggcagagcacttaaaggctcttatttttttctccatattgatcttgtttagatagatcagtgttgtgaatgtgtcaacaaggtgtaacagtttggggactagatttcttcaacttggtgagttggaggtgagaggaagtggtgagcaaagtaagcagaggtaccagtggcattggtgcatgagagggagtcttatcaaaggatttgcrtggccatgcaaagatagactggaccgaaagtaagattttagtcatcttagtgagcctagatatcatttccttatgactagttctatgaggttagaatcatatctaatagtaattgtttggaaataatggtccagtaatctcagagctgaaatgtgaccaa

SEQ ID NO: 477318 - DNA, 645 bp, Homo sapiens
tgactgtggcagccgcgagaagttccgagaggagagggagcaggcacagctcagtaattccagagacagagcttcaaaacaggaagactcttgctagagagagaacactgtatcccagcattttgtgtccagccatgctcttgcccctctgtggagggtggaggggaagtgggagcctctgcccctccatggaagttggaatgtgtagccaagatcctgcactcaaagtcacatttccttctaggatcctaaggatggtagctattttcaaggcttaggcagagcacttaaaggctcttatttttttctccatattgatcttgtttagatagatcagtgttgtgaatgtgtcaacaaggtgtaacagtttggggactagatttcttcaacttggtgagttggaggtgagaggaagtggtgagcaaagtaagcagaggtaccagtggcattggtgcatgagagggagtcttatcaaaggatttgcatggccatgcaaagatagactggaccraaagtaagattttagtcatcttagtgagcctagatatcatttccttatgactagttctatgaggttagaatcatatctaatagtaattgtttggaaataatggtccagtaatctcagagctgaaatgtgaccaa

SEQ ID NO: 477319 - DNA, 621 bp, Homo sapiens
tggatccacactgcttctcaccatgcccctgccaggaggtgaaggcttgcttttccttcagtcttcagtttctctgcctcagtcctggggaaaagagtttgctctctgtgtggttggaaactgggggcccaatgcctctctgtgggaggggcttctccctgcaatgagttgcaacattgtgaattgatacagcaacctactggagagcccagagcctcactagctatccagatccagagctgatgggtacccccttgccttttttggggaggaagggggaagggagatgttcacttttattctcatctttagtcagcttctcctcttaattgacatttactatgtgcaagccactgctttttacctacagtattttcatttaattcttaaaaccctgtgaaataggcattattctccccattttacaggtgatggaactgaggttcaaacaggttaagcagcttcctccaaatcacataaacagtaagyagtggagccagtgtcagagcataggtcttgagaaaatttaggttcatctgttttcattccttaagtgcagctttcatgaaatcttacagggacagaaacttaaagccattgtctgcacaatcgttattttta

SEQ ID NO: 477320 - DNA, 513 bp, Homo sapiens
tgggtgggggctgctgtgggagggagacctctgagccgagggtggcagacacaggatggagtgctgagggccacgtgaggccccaggtgactggcaaagtaagcaggcacaatgggatgtgatggaagcaggaatccgctggggactctgtggatcacwgagcagtgagggtcccactggcctagtgaggggcaagatcagtaaatgtccttgagcttatctttgctgtccctgaggcaacaagaggaatccctgatctccatggaaactttattgtattatccaaactgctctcccctcctgactctcatgataaccgtggcctggccagagctggcgtggtggttgagtctcttctgcttccctgctcctccctgtctctcctccttgattcctcataaggtggcatcatgtactccttgtcccacaccttcctgccctgcctctcaaggtagcaaacaccctctttgctcccgtctgcttcatctcaggccgggtgccaccacccttcag

SEQ ID NO: 477321 - DNA, 513 bp, Homo sapiens
tgggtgggggctgctgtgggagggagacctctgagccgagggtggcagacacaggatggagtgctgagggccacgtgaggccccaggtgactggcaaagtaagcaggcacaatgggatgtgatggaagcaggaatccgctggggactctgtggatcactgagcagtgagggtcccactggcctagygaggggcaagatcagtaaatgtccttgagcttatctttgctgtccctgaggcaacaagaggaatccctgatctccatggaaactttattgtattatccaaactgctctcccctcctgactctcatgataaccgtggcctggccagagctggcgtggtggttgagtctcttctgcttccctgctcctccctgtctctcctccttgattcctcataaggtggcatcatgtactccttgtcccacaccttcctgccctgcctctcaaggtagcaaacaccctctttgctcccgtctgcttcatctcaggccgggtgccaccacccttcag

SEQ ID NO: 477322 - DNA, 513 bp, Homo sapiens
tgggtgggggctgctgtgggagggagacctctgagccgagggtggcagacacaggatggagtgctgagggccacgtgaggccccaggtgactggcaaagtaagcaggcacaatgggatgtgatggaagcaggaatccgctggggactctgtggatcactgagcagtgagggtcccactggcctagtgaggggcaagatcagtaaatgtccttgagcttatctttgctgtccctgaggcaacaagaggaatccctgatctccatggaaactttattgtattatccaaactgctctcccctcctgactctcatgataaccgtggcctggccagagctggcgtggtggttgagtctcttctgcttccctgctcctccctgtctctcctccttgattcctcataaggtrgcatcatgtactccttgtcccacaccttcctgccctgcctctcaaggtagcaaacaccctctttgctcccgtctgcttcatctcaggccgggtgccaccacccttcag

SEQ ID NO: 477323 - DNA, 558 bp, Homo sapiens
cccccactcccattttgttgtctcctctgagatatctcttgctccctgagatatcttgctgccaaactcagccgctgccccctctcgtctgggtgactgcggcaggccctagctgccctsctcattgactctggctttctaaatgcagaaggatcactcctcacctgaaactcttcacatgctgtgggcacacagctcctgtcaccaccccaaccctgaagtcaaggccgcccccatcaggccatggcctgtgccgactgtgctgtgaggattcaggcctcatcattgctgctttctctattcaggatgcccttttgtgttttgggagtctgggtggagggtgtcttcttcaggaagaccgcttgcccctcagacaatttggcagcccctccatcctctatgcttaccctgagcagcaccccttgctgtgcattgcagacatcagcttactgtctatcacccttccaagcccctgagcagctagcacaggaatgctgacttatctttgcatctcctgagcctagcacggtgcctggcactcacactgtccatcagtat

SEQ ID NO: 477324 - DNA, 558 bp, Homo sapiens
cccccactcccattttgttgtctcctctgagatatctcttgctccctgagatatcttgctgccaaactcagccgctgccccctctcgtctgggtgactgcggcaggccctagctgccctcctcattgactctggctttctaaatgcagaaggatcactcctcacctgaaactcttcacatgctgtgggcrcacagctcctgtcaccaccccaaccctgaagtcaaggccgcccccatcaggccatggcctgtgccgactgtgctgtgaggattcaggcctcatcattgctgctttctctattcaggatgcccttttgtgttttgggagtctgggtggagggtgtcttcttcaggaagaccgcttgcccctcagacaatttggcagcccctccatcctctatgcttaccctgagcagcaccccttgctgtgcattgcagacatcagcttactgtctatcacccttccaagcccctgagcagctagcacaggaatgctgacttatctttgcatctcctgagcctagcacggtgcctggcactcacactgtccatcagtat

SEQ ID NO: 477325 - DNA, 561 bp, Homo sapiens
aaagaaagaaagtgtgagccaacgatttatatccattctagccatcttttaagtacaaagacaattgtaagacaatttttggacatgcaataactcagggaatattgttcccatgagcccttcctgaacaaattagtagagggtgaacttcagtcaacaaagtgaagatggagggtgagcattgaatatttttaactgtaaaactaaactaaaactaaaagtaagacaagtatgaggattagaagaacagaggagaatgtaagtgttctgtgccctggtgatgtagaaatgacacagccaacaaatattgaaaggcaaagggggaaaaaggaagttctctgaatgcctcattctataatagcagggagtaaaaaggtataattgagagctgacaaatgaagtaatataagcataattatacttaataaatggtagacacttagaaagaggatgttattgactaaaatcagktggtggaagtgagacagtagcattgccagagtaaattgtgcctaggggctatgtaatgtgtgtgtgtgtgtgtgtttccttcttctctat

SEQ ID NO: 477326 - DNA, 536 bp, Homo sapiens
agctgaaactcagtgaacccagacacggccagatcctgcttcctcaccctcctcctcttccctccttgttctgttttcttattaactggaacgaatgggaggaaatgattagaccagacagctcgttaatgattatygattcactacattcctttcaccaagtgccttgaagggaaaagccagaccatgatcctcatacaacaaaaactcagttctatatccaagaacgtgtggtgcttggctccctgcttccacccccctctgatccccacagctaaaggcacttaaggccatctgcaggttctgacccaacccatgccatgtcagtcaggctgggcacatggcagggacagacttgtcaaccattccagtttgcctggctctttctagtgatagcactggatgccccatatcctgggaagccctccaatcctgggcaaactggaccactgaataccctagcaggctacattattattattattaatagtagtagatttctttgtttttttctttttcttttttttgagatggag

SEQ ID NO: 477327 - DNA, 536 bp, Homo sapiens
agctgaaactcagtgaacccagacacggccagatcctgcttcctcaccctcctcctcttccctccttgttctgttttcttattaactggaacgaatgggaggaaatgattagaccagacagctcgttaatgattatcgattcactacattcctttcaccaagtgccttgaagggaaaagccagaccatgatcctcatacaacaaaaactcagttctayatccaagaacgtgtggtgcttggctccctgcttccacccccctctgatccccacagctaaaggcacttaaggccatctgcaggttctgacccaacccatgccatgtcagtcaggctgggcacatggcagggacagacttgtcaaccattccagtttgcctggctctttctagtgatagcactggatgccccatatcctgggaagccctccaatcctgggcaaactggaccactgaataccctagcaggctacattattattattattaatagtagtagatttctttgtttttttctttttcttttttttgagatggag

SEQ ID NO: 477328 - DNA, 536 bp, Homo sapiens
agctgaaactcagtgaacccagacacggccagatcctgcttcctcaccctcctcctcttccctccttgttctgttttcttattaactggaacgaatgggaggaaatgattagaccagacagctcgttaatgattatcgattcactacattcctttcaccaagtgccttgaagggaaaagccagaccatgatcctcatacaacaaaaactcagttctatatccaagaacgtgtggtgcttggctccctgcttccacccccctctgatccccacagctaaaggcacttaaggccatctgcaggttctgacccaacccatgccatgtcagtcaggctgggcacatggcagggacagamttgtcaaccattccagtttgcctggctctttctagtgatagcactggatgccccatatcctgggaagccctccaatcctgggcaaactggaccactgaataccctagcaggctacattattattattattaatagtagtagatttctttgtttttttctttttcttttttttgagatggag

SEQ ID NO: 477329 - DNA, 631 bp, Homo sapiens
gtcagtcccttattacttatagttggtgcgtggttggccttactgggattatttgcaactaggtaagtttgtaggagcctctgctccctgccctgttgatgtgacataggcaacacaactctttttatatcagtctgagtgtcctataactaggaagataaatagactgctgaaaataacatcttgcactccaaaggcatgtataaatgacttttggatagggtgggctcgattaaaatcaaattgattcaaatcatgatttgaatcactagtcaggaagagtcgattaaatcaatakttttccttcaaaactgcattcatttttgatataattttaatgcacagtcttcacaactctgacagagatagatgtggttttcatttttagaagttacataccatgcatttttaagctatgatttattttgacatttcattgaatcaattttgcagccacgtctgagtcttgagtggtgactaggttattttatttaccaaagctaatcaaacaaatgtgtataattttcccaacaaaataaacatgtgcactttggaatgtttaactattttttgctgtaagtgtaaaaatgtgtttttgctgagataaattgaactgtttgagacaggtcca

SEQ ID NO: 477330 - DNA, 670 bp, Homo sapiens
aacagattctcttcactgggatccactgggttttattttcggaaagtattctcacagcaacaatgcatttgaaatgagatattgtcttagataaggatgtgttagggaggggcatgcttctcttccatcttatcagcctcagaatgtttgggaggaaccccttacatcttgaggccaaataaaaatcttgagtttatgattttacctccatcctttctgagcatgtttctggctcagccctatgacatcatttcttagaacgtggccacatatattctgtatctgccagaaaatttagtatctgcatctttcaagctgaaacaagtgtcttccagttttgtattcctaggatctagaacrtaagtgcatttcccctattcacatagttctaattgaatagaatcatgacattagggtttaatagaacccagtgatttccaagttccatcctcaaactaaccctttcatgtaaaaatgaagtgacttgcacaggtcacaaagcctgggatgagaaaccacgtcatctgagactcccagaacagggggttttctttaataagtcatcctgaatttagatttcttctcttcatcttcctctctgcaaagtagtgatttgtttttaaagaaaactgttctccatatacaaacatctaactattactcatttaca

SEQ ID NO: 477331 - DNA, 670 bp, Homo sapiens
aacagattctcttcactgggatccactgggttttattttcggaaagtattctcacagcaacaatgcatttgaaatgagatattgtcttagataaggatgtgttagggaggggcatgcttctcttccatcttatcagcctcagaatgtttgggaggaaccccttacatcttgaggccaaataaaaatcttgagtttatgattttacctccatcctttctgagcatgtttctggctcagccctatgacatcatttcttagaacgtggccacatatattctgtatctgccagaaaatttagtatctgcatctttcaagctgaaacaagtgtcttccagttttgtattcctaggatctagaacgtaagtgcatttcccctattcacatagttctaattgaatagaatcatgacattagggtttaatagaacccagtgatttccaagttccatcctcaaactaaccctttcatgtaaaaatgaagtgasttgcacaggtcacaaagcctgggatgagaaaccacgtcatctgagactcccagaacagggggttttctttaataagtcatcctgaatttagatttcttctcttcatcttcctctctgcaaagtagtgatttgtttttaaagaaaactgttctccatatacaaacatctaactattactcatttaca

SEQ ID NO: 477332 - DNA, 628 bp, Homo sapiens
ctaaaatggaaatttaatcagtgtcctgtattttatctgataaccttattctccccattattcagggtaatgtgtttggtttggtttttcttgctgacctaaggtgctgagtatcagtccaattttcaggtggccagacccacttgagttactgttttcactgcatattctgcttttctttgtcctgtttcatttaaactctttttggtcaaagctctgattttgccccatgcactgttttcattgatgtgtatcactgcatccctttgagtgggcatcctcatgtttgcagggctcatgcctgcctaagccaaactatttgggcaccaggttgcaggggactggctaaatgcaggactgctggaagccagagcagttccctgagtgtccagcccttgccttccctgggagcagcaggagggtccggtgcctgggaagtgaccaccagagggagtagccrcagtaggggctgagctacgtgagccacactctgcccagaatgggggacccgtgttgggttgtaggaccgtacatgactaaggaagcccgtggggtgctcttatctgataccaccactttgtgttgtgccagaccccttttaacctcaacagggatgacaccatgttca

SEQ ID NO: 477333 - DNA, 628 bp, Homo sapiens
ctaaaatggaaatttaatcagtgtcctgtattttatctgataaccttattctccccattattcagggtaatgtgtttggtttggtttttcttgctgacctaaggtgctgagtatcagtccaattttcaggtggccagacccacttgagttactgttttcactgcatattctgcttttctttgtcctgtttcatttaaactctttttggtcaaagctctgattttgccccatgcactgttttcattgatgtgtatcactgcatccctttgagtgggcatcctcatgtttgcagggctcatgcctgcctaagccaaactatttgggcaccaggttgcaggggactggctaaatgcaggactgctggaagccagagcagttccctgagtgtccagcccttgccttccctgggagcagcaggagggtccggtgcctgggaagtgaccaccagagggagtagccacagtaggggctgagctacgtgagccacactctrcccagaatgggggacccgtgttgggttgtaggaccgtacatgactaaggaagcccgtggggtgctcttatctgataccaccactttgtgttgtgccagaccccttttaacctcaacagggatgacaccatgttca

SEQ ID NO: 477334 - DNA, 537 bp, Homo sapiens
tctcatcacaaggacagcaccaagtcattcgtgagggatccgctcccaggacctgaacacctcccaccaggccccacctccaacactggggattacatttcaacatgagatttggaggggacaaatatcccaaccatattaagatccatgggcaaaaccacagtcacatcctagatcctgttgccatgggttgaggacagcatggccccagttttcctattcttctcagtatccatggcctttacagtctgagtcaagagagtcagtgtctctacctcttaagtctgggctgactgtgatttgctttggccaatagaatattgtagaagtgataatatgacaattctgagtctgggttccaagagggctcgcatgagtgttctctctctccctctctctcttttttctctatgtctccctcttagamctctaccactgcctaagaacaagtatagtagccactactgcaggatgaaagattgtgtgtagcagggcctagacttcccagctgagaccatcctgaaccagttagcccca

SEQ ID NO: 477335 - DNA, 697 bp, Homo sapiens
ctgcgtgggcagagacattcttttacatttaagttgtgtgcctgcacacagtaggaacacaatagcagatttatacccagttgaatttcagtctctatccctactcaaatcaagcatttgcagcagcttgtctgggagagagagccaatagccaccagtctagatgtgatgtctactctgcatgctcwtggagccaaacatgagccttgctgtctctccttctttgccatctgcaaaagcaaactctctgcccaacaggatgaaatgagaatcaaatccttatttggaagtcccctctgtagggctgccttctcaaatcttttccatccaggcaaaattatatacctaggtactaccagggagaaatgcaattcattttcaagaatttattgaaacttacacgaataatagacaagcagagagccaaatcatgagtgaactcccattcagaattgctacaaagagaatagaatacctcggaatacaacttacaagggacattaaggacctcttcaaggagaactacaaaccactgctcaaggaaataagaggaaacaaacaaacggaaaaacattccatgctcatagataggaagaatcaatatcgtgaaagtggccatactgcccaaagtaattaatagattcaatgcaattcccatcaagctactattgattttcttcacagaattagaaaaaac

SEQ ID NO: 477336 - DNA, 587 bp, Homo sapiens
ctgagccagctcagctctggctgggagcgttcaggagccctgaacactggactggactttggagatggctgaggagcctcgggtcttctttctgggtagtcttgagcaaaaatcattcctgctttgggcatttagtaagtgtgagcttgcatgggayaccatagaatgagctgaagacacagagcccacccctgagaaggagagtccaagacagatgacaccaaaaaagacagacagaggccacatctgtagtagagcagatgaggactgcaaagaaagcatgcaagtgggtcaaggtgttaggctgtagagaatcgctagatgaaatatacgttacgggacctcgagggacttgcaaggcaagaaagggaggtttctgaaggcaacatgctctctcccttctcattcacaagggaaagctggctggacaggacaaggggaaaggaacagaggtggaactgaaggttggagggggcatttggccagtgacgggcacctgtgggaatgagccggtcaggcacagggcactggcttgaatcctgatgagtggtagggaagtcaagttcagttcctgatctcaaggacgt

SEQ ID NO: 477337 - DNA, 587 bp, Homo sapiens
ctgagccagctcagctctggctgggagcgttcaggagccctgaacactggactggactttggagatggctgaggagcctcgggtcttctttctgggtagtcttgagcaaaaatcattcctgctttgggcatttagtaagtgtgagcttgcatgggataccatagaatgagctgaagacacagagcccacccctgagaaggagagtccaagacagatgacaccaaaaaagacagacagaggccacatctgtagtagagcagatgaggactgcaaagaaagcatgcaagtgggtcaaggtgttaggctgtagagaatcgctagatgaaatatacgttacgggacctygagggacttgcaaggcaagaaagggaggtttctgaaggcaacatgctctctcccttctcattcacaagggaaagctggctggacaggacaaggggaaaggaacagaggtggaactgaaggttggagggggcatttggccagtgacgggcacctgtgggaatgagccggtcaggcacagggcactggcttgaatcctgatgagtggtagggaagtcaagttcagttcctgatctcaaggacgt

SEQ ID NO: 477338 - DNA, 587 bp, Homo sapiens
ctgagccagctcagctctggctgggagcgttcaggagccctgaacactggactggactttggagatggctgaggagcctcgggtcttctttctgggtagtcttgagcaaaaatcattcctgctttgggcatttagtaagtgtgagcttgcatgggataccatagaatgagctgaagacacagagcccacccctgagaaggagagtccaagacagatgacaccaaaaaagacagacagaggccacatctgtagtagagcagatgaggactgcaaagaaagcatgcaagtgggtcaaggtgttaggctgtagagaatcgctagatgaaatatacgttacgggacctcgagggacttgcaaggcaagaaagggaggtttctgaaggcaacatgctctctcccttctcrttcacaagggaaagctggctggacaggacaaggggaaaggaacagaggtggaactgaaggttggagggggcatttggccagtgacgggcacctgtgggaatgagccggtcaggcacagggcactggcttgaatcctgatgagtggtagggaagtcaagttcagttcctgatctcaaggacgt

SEQ ID NO: 477339 - DNA, 556 bp, Homo sapiens
aatattttaataatgacttttaaaattacattatgcaggacatctattaaagttctagaattggactgcctgggtgagagctctgtcacagcttacaatttgatagacctagcaaaagttcttaatactttttttaatcatattttttccagtggctgatgccatgcattaattcatcatacaaatttttcattgagtgccttyaaagtggtagataagaatctggccactgtggaaacagaggtgagcaaaaacaaacatagctctagcattcatacaacctgtctttcttcttgaaatcaaattcctgacaatatgtagcaagagacttttttgggaggaatatgtattttttattaaggtaaaatttatataatcaaaaactaaccatttgaaaacaataaaataaatgctatttaaaaaataataaataaatgctatttcatatattaatattcacattgtttttagtacattcacaagttgcacaattgtcatctccctctagtttaaaaacattttcactgccctcaaatcaaacttcttacccattaag

SEQ ID NO: 477340 - DNA, 660 bp, Homo sapiens
ctttaggcccggccaccaaggggtgtgtggtcatcaccctgtaaagtgatagttagtgtgtctttgtgatggacacrgttggcctggccacagagctcagccaactgggagacttaggaggacttagcctgtggttgggagagtggctcccaactgacatgaactgggccagaatgaatcctgggatcagcccatgggtaggacctggggaggccttgggggcctagagcactagagagatgctgacagcggtttccatgggaataagggaggaggggaatcccaggctcaagatctgggacatggaaggtgttcagggaatgacagggcatgtgctcgtgggaaaacttcaggccattacaagacaatggacgagactcagtgggcagtgtggccttaaacgtcatgccctcccctgtagtataaaaactgattccttggcctccatctgccttgatttcctcatctctaacacggtttataacctatttgagaagcaggcatgcacctggaaagacaaatgcagtttaaataatgcatgcttttaatcatctagattagcaactactaggaggatgcgttttaaaacatatataatgtttatcttttcctccctccacaactacctgcttttccccaaccaaacagctcaaagttgac

SEQ ID NO: 477341 - DNA, 629 bp, Homo sapiens
ctctggtctggactcttctgagaataaaaccttttacatgagtggcctatttccttttgttacatacactggctgttctctcccaattacctgttttcctgtccacagcggaaagggcttcaggatggaaggagaaaggagcttcacgcgccccactttgtccgtgagtcctcggtacaccagctccatatagtgctcccgggtgaaaaagcaaccccgagtagtcatgcttgcccctgaaaccatgtgatcctggatcagtcccgccaatggttggccatcctataagccaaaacagacaacacaagaagaatgaaaataaatcttaagtcaaactctaatccctaatygcctgcctggaagccactttctatcaagagcccttcttatatccctgtcttgtcttgcccacatcctcactatgttcttgcttgggagccaactgcttcccaaagcacatgaccagggtttagcactggcttctacgtttgccatttgcccactatcctatatcaagactgcttcaaactcatcccgttcccccggccttctctgtttaatcccatctggttctagttactccagcatatttttggcatttatgcctaaatttggtctggctgctgtca

SEQ ID NO: 477342 - DNA, 633 bp, Homo sapiens
tttcggacaacggatcgcccggtcctgtgcaggaggacagttgtgattgaagagagaaaaaacccagtaagatatttaataatagcaatgagtgactgcccagagacgtctcacctggcgcaagggccctgatacttacttgcagtggggacagcgcttagcattcatatgtgccttccagaagagagcaatgagcttgctcttgctctcacacacgttctttacctgtttttttaaaaaaagtcagagaaccttggagtgccattttgaagagaatccaatatatttactttatggttttcaccttttatttttaaccagcggaaacacccccaccaccactttcttaaacaaaatcttccatagaaccctaatacacttgagctctgacaattactgagtgacytctttaagccttcagtttctcaattataatatgggaataagaatagtaaccacctcagtaagctcttactaagacaaagaatcatgaatgcagtgggggcttgaaatacagccagtactcaataagtgctagttactttcacttgtaaaaggaagccctctggatgcagctggcctgcctcagaaggacctcagggttctaaggaaggcacatccacagtccagcca

SEQ ID NO: 477343 - DNA, 633 bp, Homo sapiens
tttcggacaacggatcgcccggtcctgtgcaggaggacagttgtgattgaagagagaaaaaacccagtaagatatttaataatagcaatgagtgactgcccagagacgtctcacctggcgcaagggccctgatacttacttgcagtggggacagcgcttagcattcatatgtgccttccagaagagagcaatgagcttgctcttgctctcacacacgttctttacctgtttttttaaaaaaagtcagagaaccttggagtgccattttgaagagaatccaatatatttactttatggttttcaccttttatttttaaccagcggaaacacccccaccaccactttcttaaacaaaatcttccatagaaccctaatacacttgagctctgacaattactgagtgacttctttaagccttcagtttctcaattataatatgggaataagaatagtaaccacctcagtaagctcttactaagacaaagaatcatgaatgcagtgggggcttgaaatacagccagtactcaataagygctagttactttcacttgtaaaaggaagccctctggatgcagctggcctgcctcagaaggacctcagggttctaaggaaggcacatccacagtccagcca

SEQ ID NO: 477344 - DNA, 632 bp, Homo sapiens
caggaactagggataccatgatgaatggccagatgtggtccctagcctgatggagcttatattctggagggagacacagacaataaatacataagcaaacaacataccaaagatttcaggttacgataagtgcaaagtaggaactatacaaagtgttataataaagaataatggtgggtgtgagagcaaaccaactttgtgtagtggggtcaagaaaggcctctgagaggatgacacttaggctgaggcctgacagatgaggaagggccagacatatggggacccagggaaggaggaattccaggtagagcatcaacaagggtgttgacacgaggctaatatggctgaggggtgttgagcaaggaggagagagccaggagatacatttctaaaagagacctagacgaataattgatccacattgttaggaagagggaaggctattgctataaacagagggtgaggaagaaaatatttggctcctatgtttttactcctcctggatatatgmggtatccatgtgttgtggatactgtagtgctgagtgcagatctctactccagggttgatagtgctgtgtgcagatctctactccagggttgatgtacccatcctaatcctggcaatatgac

SEQ ID NO: 477345 - DNA, 609 bp, Homo sapiens
ttttactttgtttttattttgcctttgataataataataataatagtatcatttattgattttcttctattttgtgctgttttatatgtctatatctatctaattacatctttttacccctcacaaaaaccctacaagttattattactcccattttatgagtaaagaaattgaggctccgmgacttgactaacagcacatagtaaatggtagaggtgggaaataaatccagatctgtgattctccaaagccccaatctacccagtataccatgctaccccaccgagccaggatggaaagtgagcatatcattctttgcaattctcctccaaggtgacttaaaggttagtggacaatggttatgcaaattggtctttcataatttaaggattcctacataaccccacaggtagcacgtaatctgatttattttcacagaggactgtaatgatcctaccactttaagacgtcagcatttctgtatgagaaatattgtttctctccaagctttgtggctgagaggaagtcaaatcaacatatcctaaattctattttaaagtagtgattagatcccaccctgtacagaacataagaaagtgaatttagaat

SEQ ID NO: 477346 - DNA, 609 bp, Homo sapiens
ttttactttgtttttattttgcctttgataataataataataatagtatcatttattgattttcttctattttgtgctgttttatatgtctatatctatctaattacatctttttacccctcacaaaaaccctacaagttattattactcccattttatgagtaaagaaattgaggctccgcgacttgactaacagcacatagtaaatggtagaggtgggaaataaatccagatctgtgattctccaaagccccaatctacccagtataccatgctaccccaccgagccaggayggaaagtgagcatatcattctttgcaattctcctccaaggtgacttaaaggttagtggacaatggttatgcaaattggtctttcataatttaaggattcctacataaccccacaggtagcacgtaatctgatttattttcacagaggactgtaatgatcctaccactttaagacgtcagcatttctgtatgagaaatattgtttctctccaagctttgtggctgagaggaagtcaaatcaacatatcctaaattctattttaaagtagtgattagatcccaccctgtacagaacataagaaagtgaatttagaat

SEQ ID NO: 477347 - DNA, 536 bp, Homo sapiens
aaatttcaaggtaaaactaaagtaattctttctcaagttgcagcagaaggagtttttgtattttctaactggtctgataagcacaaagaagtcgttttttttacttaraaatgccattttacaggaggctgaggtggtgggatcacttgggccagagctcaagatcagcctgggaaacagttagatacctgcccccagcacccaaattaaaagtacaaaaaatctgggtgcggtcgtgaattcctgtaatcccagctacttgggagtggaggtggaaggactgcttgagctcaggagttggagactgggcaacagagcaagactcatctcaaaaaaaaaaaaaaaaaagagaaatgtcaccactttaaactggttcccatcaacctttttgatacaaagaaattttacttttgttaaactattttagaccactgtatcagttattatatgtgactaggtagcatgataacctataatttatgccttgaaataattttgactcattttcttcccacatctgtatttatgagccgggg

SEQ ID NO: 477348 - DNA, 605 bp, Homo sapiens
aaagtcaacatgctatctcctggcgagggaaaaagtggtgaaggcccaaatgaaagcctttctggctatttaatacactgtcactgcacagccaaagctcagagatatcgatagcctaagaatcaactgggggaggctggcatataaatcattgctgtggcacccttgaaaaagaagataatactgcatatattgagatgaaacagtagctaatagcaataaatgcattctttaaacaaaaaattatctttaaactgtgttagtgtcttgatgagatagtcttgccagggccaaaatgttccaagtgaagggaaacacatttatggaggttcggaaatggaaacagatgactcctttggagaacagcaagttcttcagtatagctggggaagaaggggcatagtaggagatggagagaagtggtaggagatgcggcctgaaggaagcaccagccaagtcttctttgcaaaagtaaggagtttgaattttatcctgaaagctagggacaacttgtaggggccaagaaactttctaaaacrtgtttcttttcttaattacttaagcctcaagactcttttcagaggtcctctcattcatgaacttgt

SEQ ID NO: 477349 - DNA, 586 bp, Homo sapiens
tgatcttgaacaaatcaactgtctctccatgggtgtgatcctcaaccagaacatctaggtcttggacaagatgtctcctgagattcccttaagggctaagtgtcctttaaggcctaagtatctaagtcagggtcaacaaagcaaaatatcatgaaccaattcccatttactgcctgtttttatacagccttgtgagctaagaacattttttacatttttaaatagttggggaaaaaataaaaaaaagaagaatattttctgatatgtacaaattatataaaattcaaatttaagtgtccacaaataaagttttattgcaacacaaggaagctcatttgtttatgtgttgtctgtggttgtttttacactacggtggtatagtcaagtgcttatgacagagactgtatggccctcaagcctaaaatatttactatctgaacttttactgaagaaagttgccaatctctatctaaatgattctgaatcaacttaaaagtgtcagtcaagtcatcttttttgtttgtttatttgaatggtaactttcytaatagtaatattgattgtatttgaaaaaaatctttgttaa

SEQ ID NO: 477350 - DNA, 481 bp, Homo sapiens
ccaccgagttcttgtctggagctaccctgtctgaagagggtgctgtgggtgcctggcacagacacctgatggtgtgctcattccctgctgatgggcccgctgatctctgaaactggcccaagtgtcccatagaactgatatttatgggtttttgaaaaataaacatagaaattraccctctcagtcttaaaacttgagaaagttacatttgtcttatctgagttcctttctcaagaaaccaacatcagacatcccagatagtatcaaggaatagaaactcaccggatcaccacatctggacagtgagatcccagaccctcatctgtcctaattgcctaaccactctctgctgcctattgaccaactcctcttccttacccctccctaaatcctgttttctcacacagttacatttcttccctgcaatataaacccctaattttagtcacttggggaggtggattagagactcatctccaat

SEQ ID NO: 477351 - DNA, 601 bp, Homo sapiens
attgacatttaaaagatttgcttcaacagtaattcatttcccagtgccgagragaagtaaatagatagaatcatacacagatttatgagtttttattgtgaaacactaaccatggtgttgtataaggtcgatatttttggttaaaattatctaaacagagaaacagagaggattcttcatgtgaagatactaaatgtttattttctttgttaagttgcagcaaactgaaaggcaagaaaaaacattttttcttttgtagaagactacatataaagagattgaatcaattttggttgagacagacaaactataagtattgaaaacattaagagtcatttggagaacataggagtttccaaaacctggttaccttagcttatttgattcatggacattttgatcttactgtcaaggtctttaaatcaccaccagggggccctgaaagcatttctgtctgatttcaaggaccacagtctctaatgacaagtacaactgataaactatccctagtgcaaatgagaggggtgcctcagtcctcatttaaagtttggatttttcctacagacattttcactcaaaatgcagcagcctaagtggcttt

SEQ ID NO: 477352 - DNA, 689 bp, Homo sapiens
aagaaactcaaagtttaagtcacaggatattttaattccctggaggaatatcttgccaggattaagttattgaactgactttttttgggtaactggtcattggatgtaactgagtcagggtacctttgtggtttgcttgctgtataagcatgtttaagaagtttctcttataaatgcatttaatgcattccttttcccaatgctttcataatatcagcaaaggatatcaatttgccaatatggctgccattagcagggctttgaagtgccagggtcaaacatatcttattagaatggatttaaccgtctgtttctatttcttttttttttctttttttgagatggagtcttgctctgccacccaggctggagtgcagtggtctgatcttggctcatkgcaacctccgcctcccgggttcaagtgattctcctgcctcagcctccccagtagctgggattacaggcacccaccaccacgcctggctaatttttgtatatttagtagagacagggtttcaccatgttggcaaggctggtgtcgagctcctgacctcagataatccaccccccttggccttccaaagtgctgggattacagactggagccatctcgcccggctttaacagtctgtttctagagagaacttcttttatttgacaaactctaagactgttgggtgaagagcaaa

SEQ ID NO: 477353 - DNA, 649 bp, Homo sapiens
tggtgaacgatgggaatttagagaatctggcctctttcctcaggaagcatccgttcttctggatcctcctgccctgttgtctgaaacttctactctaagagtctcctggggtgattccagtaaaatgtaaaattgtcgaggaagaggagttggtcaaatcagggactctcaaatgattgtaacactagctcctccccaccaattttcctgaaaaaaatgcctgatagacatagcattcactatmacctatcaaatgctaccaatataaatggcacagtaaaggtttaagatgttctcaagtaaacaaagttgtttctgtttgttttactgggtaaagtgattctcacgtaaagtctcttattgtcttgaggaacctgtgttcccagaacataggttagcagttcagtgacatttaccaacaatctggtggaattagattattattttcccctggcacgctaacaagtctctgagagcctaagacaaagaagtgaagccattaaaaagaaagtcaaccctggagttttctccaagggaggtgcatgttcagtgttcaaatgtcctgcagtgccctggctaattgattagcaggaagcctcatggcacgacctcttttccatactggctcaaagtttgcattgtcttaaag

SEQ ID NO: 477354 - DNA, 643 bp, Homo sapiens
ctgctatttacctctatgactggcatatggaggcgacttcggataaaattttcaccaacagaccaaatattgcctgctcctcaggggacctccttattggcctgcttagaatctgcaccttccaaaagtctcaagattcctcagaagcaaatagcagcaacaaatattcttgagaggacacatgtgagggaggtaaatctactgtgcaatttttaattttcttaaataatcttgcttctgaatccctgttgaaactaaagagactgaagtaataacaaagctttgtcatttcattgacctaccattggccctcataaaaaagtcatcctatggttaaaattttagtgtgtggttactaatatcattttaacattccatattctttactttgtctagtaattgtgtggcttcaaataattttttctcaatgcctgtccagtgtacattatatgtaattccaaaatttcagagaaaccttttcctttttgttgtttcaattttagattcaggggstacatgtgcagaattgttacatgtattgcatgatgctgaggttggggcttcaattgaacccgtcacccaaatagtgaacatagtacccaataggtagtttttcaacccttgcctccttccctctctcccc

SEQ ID NO: 477355 - DNA, 626 bp, Homo sapiens
agagagaagacttagatgttttcacagtaatccaggctaaaaatacacaaattagaagatgattcaaagttcatgacttaggcaactaaatggatactggtactatacacaaagtttagtttgggacattgtgagtttgaattgcttatgggatacctaagtggaaatatgcagtaaatagaactctttgattaggcttcttatgattataacaattattaaattgctgctaaatagcctccagaaaatctcagcaaataayattagtcattgccagattatccaagcagttttttctttctagctgacatgatttgagtgatacgatgagaaaaatcatagcaaatgttttacatgctgacaagttaaactaatagatatttttagatgttgtgtaagaaaagagctcttggttaaaactgatgctgacatttaaaggctctccataaacttcagaaatgtgtagccttagacacaaagcctagtagtttagaagtaatgcttagcatctaacccatgctttttcaactttgctttctgtcatgaattgccatttattatgaccatctttcaatatctttaaataggcttcaagaacatggtttttaatggctgaattattttct

SEQ ID NO: 477356 - DNA, 598 bp, Homo sapiens
tgtgtctcagtttcctcttcagtctcctcctcacagtgcaaatagactggaaaagatcttaccatagaggctttagaatgtctgcaagtgcaagaattatttttacgggacatttctcctttagtctatggcaatgaatgcatatcctcatcactttcaaaggcagtgttggctggactcagaatcaagacatgagtgatcagggtacttcatctccctgctgcagcctggcaggtgagtgcagcttatcctgctggcaaaggaagtgcaccaactcagctccactcgctctgtgagctttaaggtacttagaccctacatccatgtcttcaggggcagcttgatcagcataagaatttgctattttcataatttgcagaataaattaaaacatgagagatttggattagataacatgttactttcctaattggaagttggaacactaaaatattggcatcatgttcctctgaactcttaaaattgaggttgataacaacatgtcatgtgcaatgaaaccagataacagaagaaagggaaactctcrttttttgtttagatgttattaatgtgtcacacatttatacacatggcactg

SEQ ID NO: 477357 - DNA, 445 bp, Homo sapiens
caaaatccggccacaaagcaaaagaaaatccttgattcctgataaaggaaaaaaactaaaattaaaattcaaaactttttttttaagagatgaggtctcactatgttgactaggctggtctcgaactcctgagctcacgtgatcctcctgccttggcctcccaaagtgctaggattayaggcatgagccaacatgcccaacccaaaacatttttcttgatactcctaataaattataacacattagaagattatttgtactggaaaagtatagtagaagttatacaactgtcttatgattttgttcatataatagtcatccctcagtattcatggggtattggttccaggactcctgagtataccaaaatccacggatgctcaagtccctgatataaaatggcacagtgtttgcatacagtctatgctcccacatactttaaatc

SEQ ID NO: 477358 - DNA, 445 bp, Homo sapiens
caaaatccggccacaaagcaaaagaaaatccttgattcctgataaaggaaaaaaactaaaattaaaattcaaaactttttttttaagagatgaggtctcactatgttgactaggctggtctcgaactcctgagctcacgtgatcctcctgccttggcctcccaaagtgctaggattataggcatgagccaacatgcccaacccaaaacatttttcttgatactcctaataaattataacacattagaagattatttgtactggaaaagtatagtagaagttatacaactgtcttatgattttgttcatataatartcatccctcagtattcatggggtattggttccaggactcctgagtataccaaaatccacggatgctcaagtccctgatataaaatggcacagtgtttgcatacagtctatgctcccacatactttaaatc

SEQ ID NO: 477359 - DNA, 598 bp, Homo sapiens
ttaccttatatgctaaaaaggactttgcagatgtgacaataggagatgtgacaacacaagcaaaaagttagagtgatgcaagacaaagaggcaggagctaaataatgcaggcagtctctcaaagctgaaaaaaaaaaaaagaaaaaaaaaaaatcccatagacctcccaggttttattggttttcttgattggaataaaataaaatgatttatcaaagtaaaattaaatcaatattttaaaagagtacattaaaaacaaattaaagtaatgtgttgaattgtatatcaaggtggtatattgaaaataattagttcaaacggaatcacaccactgtatgctcagtgaatatttaraaaaatctttttgaatcatgatgaaaataacagaggacacacacttgcaaacatatattttattttggaggtgtagttgtaggcataatgttattttcttttgatttcccattcaacaatcatataaacagattctcttttggagtaaaaaacaaacctatattcacaggacaataaaagtagcaaaaaataaatgtagaccacagactgtgacatacagtaaatggtgaagtagggcactcag

SEQ ID NO: 477360 - DNA, 647 bp, Homo sapiens
atcatgctattgtactccagcctgggcaaaaagagcaactccttctcaaaaaaaaaaaaaaaaataataataaattacaaattattttctttttaaatctttcttaatttttctgattaaatcaaggaaaaacaagattctgttagcacatcaaatgtaattttatgaaacttgataatttcaatccaaaaaagatgaaaactgatattgggttagagctaaataatatttctcattgtgcttacttttatagcgggaaaaaacttgytttcatttatggtgggattagaaagttttttttttaaataaatgtgtttaagtaaaaacaaatcaatataaatcaaatattaaatattttatgctatagttgttgctcacataatgcatatcttgaaaaggcaatatgtatgtatgatacaaattaaagaaactcaggcctgatctgatttatgtgccactgacaagtgtgtgctaacccaatcaatattgtaaattaaaatgaagtactagaattttgctgaatcacttaagctgttatgttagtcacaacagagttggcaattgactgagaaatacatgcacaacaaaagcaagataaaattaacaataagggacttttaaaagaagcagttataagtgattcattc

SEQ ID NO: 477361 - DNA, 643 bp, Homo sapiens
agccatatgcataatgagcgaagaagaaacaatttgttgatcccacagcagttctgtagtggcgctgacacatactaatcagtaatacatagtcaggaagtgagaatgatgttatatttcaagaatcaagaaatatgcacacataattttttgataataacatcttgggcaatgccactgaagagcttatagagcatatgaagctactcgatcctggagtaccgcaacacacaacataatgtcacacaccagcaaccatgatcaagagttaaatggttgttaaactaacaaacaagagaagggaaacgcacatttgcagtctttctgcaaaagaaatccaaggaactacagtcaagtaccagtcaaggatccccagaccaagctgaatgggtgtcagasgggcaacagtgctgaaaacgtcctgttcataaaattaaaaagagttgggaagaagatgcatgtgcaagtcatccaaagggaggaaaaaaagtaaactgcaaaagttaaagtaccttcaatgaggacttaggcaagcaagtctcagtctttctctctaccctggtcctggcatcatccgaggtcaatggttccagtagacaattaagaataattgggaccccccaaagagctcttgttcatgtga

SEQ ID NO: 477362 - DNA, 639 bp, Homo sapiens
acatgctcatgcagattgatgccaataatgatctccaatttttggatagactctgaatcttaatacttctgtctgccctggtcatcttytcacagtcctcactccttcactcttcactatcctcctcaagccctctaacccacaatttccataccattttcagcacatgacatccattgctacctcaaaagaaaatagtagccttaatacaagaaatctatccagagctcccagggataaattgtaccatctgtcaacttccttgcctgcatgcatttatttgtatttacaccaaattagtagatgtctctcctcgtgtcataggttaatgcttgaacttggctctggattgcatttgcatgtttctcttcttgctaatcaatgcttctaagtctttactgtatcaagagcctattcttcattattaattttgtttttagatcaatgtaaaatacatttaagtctttctcatatttcaaagcataaaaataaacaaacctcctctggccattctagctccttcttccctccagagctaggcttctggaacaagttatcctgttatagagcttccacagcttcacttgcttttaatcttactgactgcagtctaatttctgccctccccagttcaatgaa

SEQ ID NO: 477363 - DNA, 438 bp, Homo sapiens
ttccgtgagttgtagaagtcatggaagcttgcttcttcaaagccagtaaaataatctctttcttcagaaagcctgtcacttattttgaaggggtcacctgattaggtcaggccagccaaagacaatctcccctttaaattacttaaaggcagttaaggascttaattgcatctgtgaaatctcttcacttttgacataataagtaacactcatggaagtatggtccatcagctttgctgtattgttgttagaagcaagttataggacctgcctgttcacaaggagaggggattacacacggagtgagtcactagggttcatcttagaattctaccttccttagcaaactaaacaaatagggaatttactggaagtaaaggggatagccacacaatcaatggaatggctagagaactggcatgagaaagggcaggaaac

SEQ ID NO: 477364 - DNA, 438 bp, Homo sapiens
ttccgtgagttgtagaagtcatggaagcttgcttcttcaaagccagtaaaataatctctttcttcagaaagcctgtcacttattttgaaggggtcacctgattaggtcaggccagccaaagacaatctcccctttaaattacttaaaggcagttaaggagcttaattgcatctgtgaaatctcttcacttttgacataataagtaacactcatggaagtatggtccatcagctttgctktattgttgttagaagcaagttataggacctgcctgttcacaaggagaggggattacacacggagtgagtcactagggttcatcttagaattctaccttccttagcaaactaaacaaatagggaatttactggaagtaaaggggatagccacacaatcaatggaatggctagagaactggcatgagaaagggcaggaaac

SEQ ID NO: 477365 - DNA, 535 bp, Homo sapiens
tttgctatgggtgccatgctgattagcaagtttcttcttaagttaaagacacttgaytgatcaagactgaagtgagttttccttttcaattttgctctcttttggagcagaaacaaaaacctttgtctttgatatgtaaggagtcaaatatgaaatacggctgttataatcttctaaatcacagttaaacaggggcacagaattattacaagtctttgaaatatttcgttattaaaataacaaaacttctgaataatttctcaaagtagctttccattttggtacatgactttataaacatcacacattaggtaagtattttagcaatttcttctatcaattacactttgccctcagtaagatttagagtatgatttcaaacaatttctacatataagcatctttaaataagttttgttttcactgaactgactctctattttcacttatgttcctgtggaagttaatttgagcatacatacatacatacatacatactatatatatatacacacacatatatatatatatactg

SEQ ID NO: 477366 - DNA, 523 bp, Homo sapiens
tacttcctccccttgctcctctcccaagaccctgatttctgtttctagtttgagacacgatttttccccattggctttactttacatagatcctttctctacacatcagaatttaactttacccttgccagagaaaaaaaaattcacattcattcattcattcattcattccctccctcactcatttgttcaattaaaaaacatacraagttcttgctaagggtcaggcacgattttaggtgctgggaatttggtggttaaaaaaaagaagtgttcttgctgccatgaaacttatgttcttatgggagcagaccataaacaaacagaaatatgatagtaacataatttacatgagtataaaatcaagtggtgtgatgggataaaaaataatgggatgtatttaaaattgggcattaaggaaagacctttgtaaggaaatcaaatgtgagctgtagcttagaaatatgagaagaagctagctctgagaaagtttagggaaaagaagagtgacaactataaagtt

SEQ ID NO: 477367 - DNA, 608 bp, Homo sapiens
tccaggagctgtctcctatatatctttatgactatatcacgaagtataaaaagggaaattttctcctctgtacttcctccccttgctcctctcccaagaccctgatttctgtttctagtttgagacacgatttttccccattggctttactttacatagatcctttctctacacatcagaatttaactttacccttgccagagaaaaaaaaattcacattcattcattcattcattcattccctccctcactcatttgttcaattaaaaaacatacaaagttcttgctaagggtcaggcacgattttaggtgctgggaatttggtggttaaaaaaaagaagtgttcttgctgccatgaaacttatgttcttatgggagcagaccataaacaaacagaaatatgatagtaacataatttacatgagtataaaatcaagtggtgtgatgggataaaaaataatgggatgtatttaaaattgggcattaaggaaagacctttgtaaggaaatcaaatgtgagctgtagcttagaaatatgagaagaagctagctctgagaargtttagggaaaagaagagtgacaactataaagttccccaaatgggagac

SEQ ID NO: 477368 - DNA, 591 bp, Homo sapiens
agctgttggtgtctaaatactattcattgatcacagcactcatggcatgcctacaataagagctacagaaaagagaccattctgaagtaagcaaagcattttcctatgacattacatatttctccaccacagtatggacagtatgcacaggggttaggagcagtggctctggagccacactgcttaactgcgtaattccatcctgccatatggtgactatggatctaggttaaaataacttatttgccctttttttcttatgaggagaataagtaatacacacttcataggattttgtgaaaattaaatgagttaacacatgaaaagtacttaggaaaatgcctggcaagaaatgatagttattatatttattamtttttttattggctgtataatatttgattatgtaaatgtattaatttatataataggtctccccactttcttggatatttagatgatttctaatgggctttattagctatagttatacaatgaacactctttcacatatatacatatatacgtacatacttttccattattatgattatttattcaggataaatttctacggtttgaatctggtgg

SEQ ID NO: 477369 - DNA, 532 bp, Homo sapiens
tccaaccaataagccccatggctctgtgtcactgtctccttaaaatggcaaagtagcctatcctatctctagatagctatgttaaatcctcttaatttggaacaaaatgtgacgttaggacttttacctaggattccagttctgttctctgataccacacaggaaaagtttaatctctcctctttgagactgttcttcaaaattcttggagacctgcagtagctaagcactctaggatctagttgtagagctstggcttgtatattgattgacttcaaaggtcaatttgtataatgtactctcctgattcatctttggtgactgagtatgactagagatttagttttatccctagatgggttggcattacagttctctcttgtagactggtatgagaagtcattcctgatccttctactttcccaaatgctacccttttaaagactctttgtgtatgccagagggtaccatggttcaatatttatattctgttcttcttcaaagttttccttgctgtaatattttttttctg

SEQ ID NO: 477370 - DNA, 532 bp, Homo sapiens
tccaaccaataagccccatggctctgtgtcactgtctccttaaaatggcaaagtagcctatcctatctctagatagctatgttaaatcctcttaatttggaacaaaatgtgacgttaggacttttacctaggattccagttctgttctctgataccacacaggaaaagtttaatctctcctctttgagactgttcttcaaaattcttggagacctgcagtagctaagcactctaggatctagttgtagagctctggcttgtatattgattgacttcaaaggtcaatttgtataatgtactctcctgattcatctttggtgactgagtatgactagagatttagttttatccctagatgggttggcattacagttctctcttgtagactggtatgagaagtcattcctgatccttctactttcccaaatgctacccttttaaagactctttgtgtatgccagagkgtaccatggttcaatatttatattctgttcttcttcaaagttttccttgctgtaatattttttttctg

SEQ ID NO: 477371 - DNA, 647 bp, Homo sapiens
ctgcttgcttacaatctttattatgcattcttataacataacctcagagtatctttaccaaaggtttttaaagtaaatctctttttaagatagacttattcttttataataatgaatgtgcactcatacatatgtagaaacatttagatttagagttttttttttctttcacaaggtataataaggaaaggatcctacaatattttattctagggtttcttaaatatatgatttatattactgtcttttctattaatcatttgatttaaacaatgccaagtcactcttttttagttgcatgaaattttgcctgcaacagagagaaaaagattgtattactttaatgattataatcatactgtctgctgatataatatcataattgttgtggtttaaatacataaatagtagaaaaatcagagtctataacagaaagtttgtaraaatatactgattttgaaaagtatcaggaatataaatatttggtaattctgtgtaacaagagagacatggaaaaggaaaaaaatccactatatcatgggctctgcagaacatatcaaaataggatttcttaaatttttcaacccccagaccatactgactcaacatggagtctcactggccaagaaaattgcctttaaaactcg

SEQ ID NO: 477372 - DNA, 469 bp, Homo sapiens
aggcaaattacatcctgccacccatttcttgtaaataaagctttattggaacaacctatgcctctttgcttacatatcatctatggctgctttctcagtacartgtgagacctgactagatttgccagagcccatataccctacaaagccaaaaatactaattatctggtcctttacaataaaagttcacctgcccctcctaaaagtaaaatgcatacaaaccacatctactttgaaattgtctaagaatataaaatctcatgatatgtatcctagagcaaaagaaaaagaatttaaaaaagactaaaaattttaaaaagaatataaaactccactccatgcaggcagcaggtcaaaactatttcagaatgacatcaagatattatttatctttttcactctttctccaagtgtacagtggagttttccagaggctacatggaattgtgacgtcaaaagactacaacac

SEQ ID NO: 477373 - DNA, 486 bp, Homo sapiens
atgttgtcattttccttgcttccttcagaaaacatgatcactgttctgtattaattgcattcctgggagggagcaaggggttttatgagatagcctcagggcttgtatctatttctcatgaactatagtctccctcaaagttattcactacataaactactccacagaaatggcgccctagaatttaagctctgaatcgagggatgtacctagttgccttattcttggacttcttccttttatgactattaaatggggattggtcaaatgtaccagatcaaagacatttaggaaacacaaaggggatgcaatgtctacctggagagacgctcaatggcattttcaagtgctatctttccctgtatttcactacttcataactctcaaggcatgttgtcccawaagttaattttataacttcagctagttagaacccaccattttcagtgatactgcagagtttgagatgcatcattcatgtcaaaa

SEQ ID NO: 477374 - DNA, 572 bp, Homo sapiens
tgtttgggggcagctatttggggagtccattgtcatgggggcgagaaaagaagttggatgtgcaggttggggtgtccacatccacatatgtgagaccatttgtgatttggagtaaagcttggagagagaagtgggaggctgcaggctggggactggcccttgccatgttgccaggctccaaagcagaggtctaacgaggcagaggattctcagttcaaacctggscttccaggcagaatgatgagaacatgttttatttcagagtttgtcagcttggtttataacttaccaatatttagacacagagtatgtgggtctccatttgtacttgtaccgagggtcttgcaaatattaggggcaggcttgagcagagtcaagagacagagaagatcccggcagcatttgagtccctggttcgtgttcctgcggcttggatgcacccctgcgtttctcttgttttaaccttatcagttaataaagcatacatttctgcctaagctgatctggatttgtgttacttcccatcaaggatcctagccaatgtggagagtaagtgatggagctgaaacttg

SEQ ID NO: 477375 - DNA, 572 bp, Homo sapiens
tgtttgggggcagctatttggggagtccattgtcatgggggcgagaaaagaagttggatgtgcaggttggggtgtccacatccacatatgtgagaccatttgtgatttggagtaaagcttggagagagaagtgggaggctgcaggctggggactggcccttgccatgttgccaggctccaaagcagaggtctaacgaggcagaggattctcagttcaaacctggccttccaggcagaatgatgagaacatgttttatttcagagtttgtcagcttggtttataacttaccaatatttagacacagagtatgtgggtctccatttgtacttgtaccgagggtcttgcaaatattaggggcaggcttgagcagagtcaagagacagagaagatcccggcagcatttgagtccctggttcgtgttcctgcggcttggatgcacccctgcgtttctcttgttttaaccttatcagttaataaagcatacatttctgcctaasctgatctggatttgtgttacttcccatcaaggatcctagccaatgtggagagtaagtgatggagctgaaacttg

SEQ ID NO: 477376 - DNA, 369 bp, Homo sapiens
tgctctaaggaaggagaactggcctggcacctctcacctcctccaagagaactggacctttaaccagcccagtgaacccacctaggagaaaaacgggccagccagtcttggatatggccagtcaatgcagtacgagggaaaatcctcctctaatcctccacacccctccccacacccctggagagaaagagactgcaggagctttgagttcccrcgagaggtcaacgtgggagacaaaacaacttcatttgacctgactatacgttgatgtggtttttgaggcagagcctcttcgggaggaattacctgaatccccaagaagatacagagataacatggcaggatgtccaagatgtcataggccaggca

SEQ ID NO: 477377 - DNA, 369 bp, Homo sapiens
tgctctaaggaaggagaactggcctggcacctctcacctcctccaagagaactggacctttaaccagcccagtgaacccacctaggagaaaaacgggccagccagtcttggatatggccagtcaatgcagtacgagggaaaatcctcctctaatcctccacacccctccccacacccctggagagaaagagactgcaggagctttgagttcccgcgagaggtcaacgtgggagacaaaacaacttcatttgacctgactatacgttgatgtggtttttgaggcagagcctcttcrggaggaattacctgaatccccaagaagatacagagataacatggcaggatgtccaagatgtcataggccaggca

SEQ ID NO: 477378 - DNA, 493 bp, Homo sapiens
gttggaactcatctgaaacatcatgcctactctctttagacttctagggaaaaaaggatgtattgaggctgcttggaacacgggatgcacgtggaagaaatctgcttttcctaaagtggtcaaagccgagccaaaggtagactggagggagctctggatcctgagtgcttatgctgagatttcagtgaatgtgtgtaggaatccacaaggaacagtgagaaaattcacgattgaggaaagaggagggggagagggagatggagtgattgaccgatggattctgaacaggcaagtcacagagaarcagcagcagttgggccaatgtgattctgtcaccccccagctcagcaaccacaagcacctgacgtcgcctctcccagcctgtctccccctctagaatctggaggggtcataaggatgcccgcaggctagcatacatgcaacatgtgtgccatccacttgcgcatacttgtgaatgagctcacagggccgt

SEQ ID NO: 477379 - DNA, 577 bp, Homo sapiens
cctcaatgagacctatagtggttgccaggttcaaggcctataaaagggctaaatctttcttgtccttttttcctgagtttgactatctgggagtaccttctctgcatctccctscatggctagtatcctatggcccccttcctgtcctgagtcctgattctgcaatagcataaaagagtgggtgtggggtattttgtcccatttccttactctctgacaaaggtcctctaattttatcaaagtctaatactgggtacttccattcagggaccaaaatctattatcacccagcaggtactgagtctagacagtattattacagtaataaatcatcttttttctagtcatatgttaataactatattccttccaattagccagaatattccctaggggaatttcagagtaaatagagactttgttgcccatcctaactcagtatctgcacatagatcactcagcttcactaaagcagtgatggtggtcgtcttttaatttcttgattttattccacaagctgtctcctgctatcaagcctctagtagacagatgaattaaaccaatttaacacagccag

SEQ ID NO: 477380 - DNA, 577 bp, Homo sapiens
cctcaatgagacctatagtggttgccaggttcaaggcctataaaagggctaaatctttcttgtccttttttcctgagtttgactatctgggagtaccttctctgcatctccctgcatggctagtatcctatggcccccttcctgtcctgagtcctgattctgcaatagcataaaagagtgggtgtggggtattttgtcccatttccttactctctgacaaaggtcctctaattttatcaaagtctaatactgggtacttccattcagggaccaaaatctattatcacccagcaggtactgagtctagacagtattattacagtaataaatcatcttttttctagtcatatgttaataactatattccttccaattagccagaatattccctaggggaatttcagagtaaatagagactttgttgcccatcctaactcagtatctgcacrtagatcactcagcttcactaaagcagtgatggtggtcgtcttttaatttcttgattttattccacaagctgtctcctgctatcaagcctctagtagacagatgaattaaaccaatttaacacagccag

SEQ ID NO: 477381 - DNA, 577 bp, Homo sapiens
cctcaatgagacctatagtggttgccaggttcaaggcctataaaagggctaaatctttcttgtccttttttcctgagtttgactatctgggagtaccttctctgcatctccctgcatggctagtatcctatggcccccttcctgtcctgagtcctgattctgcaatagcataaaagagtgggtgtggggtattttgtcccatttccttactctctgacaaaggtcctctaattttatcaaagtctaatactgggtacttccattcagggaccaaaatctattatcacccagcaggtactgagtctagacagtattattacagtaataaatcatcttttttctagtcatatgttaataactatattccttccaattagccagaatattccctaggggaatttcagagtaaatagagactttgttgcccatcctaactcagtatctgcacatagatcactcagcttcacwaaagcagtgatggtggtcgtcttttaatttcttgattttattccacaagctgtctcctgctatcaagcctctagtagacagatgaattaaaccaatttaacacagccag

SEQ ID NO: 477382 - DNA, 602 bp, Homo sapiens
ggcttgttgccagtgacagcttactgttaggagcaggttttcccacattttgctatttatagttttacatttcataataattaacatattgcagttaacctggagaacagaaagatacccactagrtgctattaatgctaactgtgtgtgcttgcccaagcagtgttctgtgaaaggtctgatgtcagaattcattctgaaatatagtctataatatagtcattgtttaaatgcctttctgtgtacttcctagtaaacagttggactagtacagtgttatgcagaaatactaaagatagtttcaacctgttgtgagattttcaggtttggtgtgggaggagggggagaactatgtagtaactaaaatggcaactccacgaatgctactgttcttcacccaccaacacgttcccgtacgtgtcccaactggcctgtctttttactgaacttatgtagcatattttaatcatataccaccttggcatttcttctgttgctttttcagatgtagttgttgaacttttcatttattttcattgtcccactgtctagacttttagccccttgaaaacagaggtcatggtttaagtgcttttgtgttt

SEQ ID NO: 477383 - DNA, 585 bp, Homo sapiens
aaaaacccattggcttgttgccagtgacagcttactgttaggagcaggttttcccacattttgctatttatagttttacatttcataataattaacatattgcagttaacctggagaacagaaagatacccactaggtgctattaatgctaactgtgtgtgcttgcccaagcagtgttctgtgaaaggtctgatgtcagaattcattctgaaatatagtctataatatagtcattgtttaaatgcctttctgtgtacttcctagtaaacagttggactagtacagtgttatgcagaaatactaaagatagttycaacctgttgtgagattttcaggtttggtgtgggaggagggggagaactatgtagtaactaaaatggcaactccacgaatgctactgttcttcacccaccaacacgttcccgtacgtgtcccaactggcctgtctttttactgaacttatgtagcatattttaatcatataccaccttggcatttcttctgttgctttttcagatgtagttgttgaacttttcatttattttcattgtcccactgtctagacttttagccccttgaaaacag

SEQ ID NO: 477384 - DNA, 585 bp, Homo sapiens
ttcctctgtgcataccccttgcaatagaacgagctgttcccaggcctgtctccaaactacagaacatgtttctccagggcagaggtcatggcttacccatttctctatccctggccttacattatgcttattacatattaggtcttagtaaatagcactgtgatgaataataaagaaatacagaatgcaggtctccaaaactccaygctggggaggctcaacttgaggagaagataggtgttcaaacctagtaagggaatactgtttcggacatccttggttcttagtggttaaccagggcttggtttctctctgaacaggccaaatcaagggcgggactccggtgagcatgtttgaaccctccaaaagcacatatatcatgagcttgtggaagctcaggccattggcactcctggtgaggtcttcaaatttgtttcttccatcagaacacattggaagatcctgatgcaagaagcagctttaaaggactacctacatctgatggcagaacaccaacggctcccattaaaagagccatggatgctgagctaattaatagcaaatgaccacagctttcccctgtac

SEQ ID NO: 477385 - DNA, 585 bp, Homo sapiens
ttcctctgtgcataccccttgcaatagaacgagctgttcccaggcctgtctccaaactacagaacatgtttctccagggcagaggtcatggcttacccatttctctatccctggccttacattatgcttattacatattaggtcttagtaaatagcactgtgatgaataataaagaaatacagaatgcaggtctccaaaactccatgctggggaggctcaacttgaggagaagataggtgttcaaacctagtaagggaatactgtttcggacatccttggttcttagtggytaaccagggcttggtttctctctgaacaggccaaatcaagggcgggactccggtgagcatgtttgaaccctccaaaagcacatatatcatgagcttgtggaagctcaggccattggcactcctggtgaggtcttcaaatttgtttcttccatcagaacacattggaagatcctgatgcaagaagcagctttaaaggactacctacatctgatggcagaacaccaacggctcccattaaaagagccatggatgctgagctaattaatagcaaatgaccacagctttcccctgtac

SEQ ID NO: 477386 - DNA, 519 bp, Homo sapiens
tccttcagggagaagagaacttgggggaaactattattcataggtgccaaagggagcaatcactccagaaagaggatgtttgcaatttcggatgttcctgcgaagtcctgtggcctataagaatcgagaaatggccattggattggccaactggagacctttaagaaagccacctccgtgggagagggtgcaattcagatcccaaactgaggcgaagaccgcgccccggagtgtgggccgccttcccagtaaatctgcttatgagaggaagtgatggaccagatgctcaaggggtagggactagattttgccttacggaggacaagtcagtctctgaagagaagtcgcggagagggacgcagaagcgcagtgggacggaagggtctcggggaaagtgggcttgcgcagaggtgccagggagctcgtgggaggtgcagagaggccgctgggattcggccaggaaaagcgagagtgcgcgaacaagcttcacasaaatggccttaaccttgcctgctcaga

SEQ ID NO: 477387 - DNA, 657 bp, Homo sapiens
ccacacggccgctctgcctcccccaccagtgccaacattgaccactcagatccctgggtccctccccaagccatctgtagcctggctctgcagccctytggatgtggagacatggcccacacgccctggaaggggtagatctcccctggacgttgccccccacagagcaaaatcaaattcctctttccttcagagagcttgccatttgccttccacagacatttcctgacatacacactccatttctttcaggagaccttgtctttttcttaaagccatgttttaaagaaaattaggaaatacaagaaatgtcccacattaggcataaaacataaatgtataccttaataaatttcggttacgtaaaagagcgcctgggtaacctcacccaggttgagatggaaaatgtgccagtacctgggggtcctcccccaaagccccatggatcccttctgctgcagaagtagctgcctggcagcctcaactcccagatcatatgaatctcacaggagacttgaatctgtagaccacccaggactcaccatgagatccgtccaacttttcctttcagaaacatctttgagcagactcctagccttcactttccagtcctgattagagtgcactgcggggtggatgagggaaaggacaggcaac

SEQ ID NO: 477388 - DNA, 657 bp, Homo sapiens
ccacacggccgctctgcctcccccaccagtgccaacattgaccactcagatccctgggtccctccccaagccatctgtagcctggctctgcagccctttggatgtggagacatggcccacacgccctggaaggggtagatctcccctggacgttgccccccacagagcaaaatcaaattcctctttccttcagagagcttgccatttgccttccacagacatttcctgacatacacactccatttctttcaggagaccttgtctttttcttaaagccatgttttaaagaaaattaggaaatayaagaaatgtcccacattaggcataaaacataaatgtataccttaataaatttcggttacgtaaaagagcgcctgggtaacctcacccaggttgagatggaaaatgtgccagtacctgggggtcctcccccaaagccccatggatcccttctgctgcagaagtagctgcctggcagcctcaactcccagatcatatgaatctcacaggagacttgaatctgtagaccacccaggactcaccatgagatccgtccaacttttcctttcagaaacatctttgagcagactcctagccttcactttccagtcctgattagagtgcactgcggggtggatgagggaaaggacaggcaac

SEQ ID NO: 477389 - DNA, 657 bp, Homo sapiens
ccacacggccgctctgcctcccccaccagtgccaacattgaccactcagatccctgggtccctccccaagccatctgtagcctggctctgcagccctttggatgtggagacatggcccacacgccctggaaggggtagatctcccctggacgttgccccccacagagcaaaatcaaattcctctttccttcagagagcttgccatttgccttccacagacatttcctgacatacacactccatttctttcaggagaccttgtctttttcttaaagccatgttttaaagaaaattaggaaatacaagaaatgtcccacattaggcataaaacataaatgtatascttaataaatttcggttacgtaaaagagcgcctgggtaacctcacccaggttgagatggaaaatgtgccagtacctgggggtcctcccccaaagccccatggatcccttctgctgcagaagtagctgcctggcagcctcaactcccagatcatatgaatctcacaggagacttgaatctgtagaccacccaggactcaccatgagatccgtccaacttttcctttcagaaacatctttgagcagactcctagccttcactttccagtcctgattagagtgcactgcggggtggatgagggaaaggacaggcaac

SEQ ID NO: 477390 - DNA, 516 bp, Homo sapiens
agggaatgtaaggttggttgttgttgtttggctgggaagaacagaggccattcaaggtctctcagagaaagggttgttctgaggacaccagaaagctatgaagaaccagggtcacaaccctctggcyattggagaatgtcaaatgtgctaccttcttggaggcagaaaaaggacaaattgccagagagacaatccatcagtcaggacaggctaggtgacaaacaccccaaatctcagtggcctcatgcaagaggagtttagttctgccttgtgctacctgtctagtgcagtttgccagggggctgtgtttgtcgtggctgaggttccatctccagttatgctccgtgaccatggcagcaggataaggacacgtggctaatcatgtctgctcttgaagtttctgtgcaggagcatgcacacgcagttgctgctcacattcattgtgagtttgggaaaggaagggaggagaatgagaggaaagacctgcctgaggagatattagaaatatttcagagt

SEQ ID NO: 477391 - DNA, 569 bp, Homo sapiens
ctggtggtttgctcagcagaggcctctctggcttgatggtttaccctttgaatgcagcaatatccacactgtattcccagaaacactagagtcccctgagatgttaagagaagttctaagagagagaaagagagaagaacacttttttattttaagtttkttaggtaccttgcagagtcagcgggcaggctagagatcaaagcctgctcagaaaatagacaggaaccaaggaggccagagtggtaggaacaacagcaaggccactacctagctaggaagcatcaccacgctgggcctgggacatttgatgtcaccaccatggcagacaggatgaagtttaaaccatccctgaatctggttttcacttgcttaagagtcaaagtccagggcaggtgcactgaaccggctgagcttgggtcacacgttggtgccccatgtattggtaagagctgtggtgtggctctaaaatttcctctggtgtccttatttgtgtattttttgttgtctttgtgtttccctagagaattctccttggataagatctgagacatgcagctctttctgttgta

SEQ ID NO: 477392 - DNA, 535 bp, Homo sapiens
cctggccagggtttggggaagcagagagccaacaacattcagttatgttttccttatctccctgcatgttctcatttcccttcctcctagtccaacaagtagctgtctctgtgtccattgtttcagggagattcgtggcagggagggaagtgatcagcaattcttttagacttgtattctaaaagtccctgtccttagggaacggcagaggggctgaaagatgatggcgaggagtcttgtgggaagcttcttgcggcattggtggtggcggtctgggggcaggcctccggggcggctcccctgggctcttgtggaagccccaggaagaatgtctgccttccacgctwcttgacccaaatgcctacaggaccctcgcatcagtgggcagaggggcccgcagcacccctgcttgcctgctggttcttcccacatgggtgctacaggtgatgctgttatacaccatccagatctcccttcccactgaaggatggactcctcgggtgctgggggtgctgggggtgctgctggatactgc

SEQ ID NO: 477393 - DNA, 624 bp, Homo sapiens
ttgactccccagcttccacaacggtgagaatttctattgtttataagccagccagttgatggcattttaatatagcagcttgaatagaacaagacaacaacctagcacaaaagtttttaggatgctactaaagcacgacttatggaagtttagtgctctaaatgcatatattastaaagaagaaagatgtgaaatcaatgatcagactcaaggagctaatagtatgatcatctcaataaatgcagacaaagggtatgacgaaattcagtgtccatccatgatacaaattatcagcaaaatagaaacgaaagggaacttcttcagcctgaggaaggctatctatatttaaaactctcagagctaacatcatacttacaggtggaacatggaacattttttatctaagatcaggaacaaggctatgacgtctattctgacagcatctgttgaacattttattagaagtcccagattgttcaataaggcaggggggaagaaagcaaaaaggtatgaaagggagctgtaaaggtgcatttgcagatgacatgattgtacacccagaaaacgataaagtctatttaaaaactactagaactagtaagtaaatctaataaatttgcacat

SEQ ID NO: 477394 - DNA, 592 bp, Homo sapiens
agaggcagctttttctgtcttcctttaggggtctgagtcattagaagtctcctctagatcttttcatgtggtactgaagacagcagagagatgggaggaggttgartctcatttttgtttgtttgtttttgagatggagtctcgctctgtcacccaggctggaatgcagtggtacgatctcggctcactgcaagctccgcgtcccaggttcacaccattctcctgcctcagcctcccgagtagctgggactacaggcacctgccaccacgcctagctaattttttgtatttttagtagagacggggtttcaccgtattagccaggacagtgtcgatctcctgacctcgtgatctgcttgccttggccacccaaagtgctgggattacaggcttgagccaccgcgcccagcccttgtttgttgttttgagagagagggtctctctgttctgcggtactgaaagaaaaataaaaaaatagaaacagggtgttgctctgtcacacaagcgggagtgcggtgtgacatgattacagttcatctagccttgacacattctgggcttaaatgatcctcgacctcagcttcctaagcag

SEQ ID NO: 477395 - DNA, 405 bp, Homo sapiens
ctgtgctgttgaagtaaccaatattggggctacctatcactggacagcctgtaatctgaaataataaacctcttattgcttaagccactctaagttgtatattattactttccaccaaatgcatgtaatttttgaccctttcgttttctacatggactttgtaatcactgtaccatgttccataatcaggttgggatttttcaaattgggtttgcattgaaattaaatattaactttgggagaactgacatctttatgataatgaatgttttaattcatgaatatggtatatgtttccatttattcaaatcttctgcaatgttttccataagaatattttatatacaaaartacatgttatatttattcctagacactatattgtttatggctattaagtatgtt

SEQ ID NO: 477396 - DNA, 478 bp, Homo sapiens
agaaagatttaagggtgattgctggctttgaaggtgaagatgggggaaagtgcatgagaaggaraacatgcaaggcctctaggagcagccagtggctcctggttgacagcaggaaagataaaaaggcctcggtgttacagccacaaggaactcagttcctccagcgatctgaaggggcttggaagcagagtcttcccccgagcccccacgtaagagtctagcctgatgaataccttgatttctgactcattgggaccctaagcagagaaaccagccaagcccaccaggacttctgacctatagaactgcaaaacctatggaataagtgaaatgttgttccacctccctgaatgtgtgataatttgttactcaacagtagaaaactaatacaccccttcagttttcatatcaccaaataaaggtaataatgtctgactatgcccaagaagcgatcggaaaacaaatattaataagattt

SEQ ID NO: 477397 - DNA, 478 bp, Homo sapiens
agaaagatttaagggtgattgctggctttgaaggtgaagatgggggaaagtgcatgagaaggaaaacatgcaaggcctctaggagcagccagtggctcctggttgacagcaggaaagataaaaaggcctcrgtgttacagccacaaggaactcagttcctccagcgatctgaaggggcttggaagcagagtcttcccccgagcccccacgtaagagtctagcctgatgaataccttgatttctgactcattgggaccctaagcagagaaaccagccaagcccaccaggacttctgacctatagaactgcaaaacctatggaataagtgaaatgttgttccacctccctgaatgtgtgataatttgttactcaacagtagaaaactaatacaccccttcagttttcatatcaccaaataaaggtaataatgtctgactatgcccaagaagcgatcggaaaacaaatattaataagattt

SEQ ID NO: 477398 - DNA, 478 bp, Homo sapiens
agaaagatttaagggtgattgctggctttgaaggtgaagatgggggaaagtgcatgagaaggaaaacatgcaaggcctctaggagcagccagtggctcctggttgacagcaggaaagataaaaaggcctcggtgttacagccacaaggaactcagttcctccagcgatctgaaggggcttggaagcagagtcttcccccgagcccccacgtaagagtctagcctgatgaataccttgatttctgactcattgggaccctaagcagagaaaccagccaagcccaccaggacttctgacctatagaactgcaaaacctatggaataagtgaaatgttgttccacctccctgaatgtgtgataatttgttactcaacagtagaaaactaatacaccccttcagttttcatatcaccaaataaaggtaataatgtctgactatgcccaagaagcratcggaaaacaaatattaataagattt

SEQ ID NO: 477399 - DNA, 478 bp, Homo sapiens
agaaagatttaagggtgattgctggctttgaaggtgaagatgggggaaagtgcatgagaaggaaaacatgcaaggcctctaggagcagccagtggctcctggttgacagcaggaaagataaaaaggcctcggtgttacagccacaaggaactcagttcctccagcgatctgaaggggcttggaagcagagtcttcccccgagcccccacgtaagagtctagcctgatgaataccttgatttctgactcattgggaccctaagcagagaaaccagccaagcccaccaggacttctgacctatagaactgcaaaacctatggaataagtgaaatgttgttccacctccctgaatgtgtgataatttgttactcaacagtagaaaactaatacaccccttcagttttcatatcaccaaataaaggtaataatgtctgactatgcccaagaagcgmtcggaaaacaaatattaataagattt

SEQ ID NO: 477400 - DNA, 553 bp, Homo sapiens
tggctttaaaaactaaatattgtgagactgattttttttttttttttttttttttagatggagtctccctctgtcgcccaggctggagtgcagtggcacgatcttggctcaccacaacctctgcctcctgggttcaagagattctcctgcctcagcctcccgagtagctgggactgcagccatgtgccaccacgcctggctaatttttgtatttttagtagagacagggtttcaccatattggccaggctggtctcgaactcctgacctcaggtgatccacccgcctcggcctcccaaagtgctaggattactggcataagccaccgtgcctggcccgggactgatttttttttgtttagctcrtaaactgactctttgagtgattcctaaagaagcaactactaatgctttggaacatttgtgaagtaattacatgttcgtgtcagcctctacctctctgaagcagggtacacccctgggtggtcagtactggacacctgttctgatccacttaaaatcctctgactctgttctatgaccagttctgaacag

SEQ ID NO: 477401 - DNA, 430 bp, Homo sapiens
gtggaacactgagtgccaagctctgtgccctgcatttcacatgccctccctctttcctttgcatccttcttgccttcctaatccgcctcagcaaagggcttcttgcacggttttctcgtcatcaggagtgcatgtctcaaggaaaactgctcttgtccacrttctcagccaaatgagagtatcaattcatttgttcattgtaaatagagtagtgcaatagtttggtcctgaatccgtgttcagtttggaatcttaagagaccaagatgccaaaatacctgcatggcagcgtgttgtctttcccctggttgccatgaagataggatccgctggagcctctgacatcccatctcaagcatgtgaggggctcagaacttttcctaagaggaattaaggtctgtcctcattcaatttgtagaaagccactcagc

SEQ ID NO: 477402 - DNA, 456 bp, Homo sapiens
tttagactccttgtcctctctgcactggggcagtggtttcatgtcagctcacagacattaagaggttgcgctgcctggatgcagcccagcccagggcattgttgacatctgagagtggcagccagctcgacaggctcttcctttctccataaagtcattgagaagtcactggacttaaaagggcccacagagggtcatttagccccctttctgcctggactggacattagcaaaaccatccaaaactatcaggaattttccttatcaccaaamatacccattccgtggtcttgctcaggggatgtggagaatgacggttcctttttctcactatgttcgtagtttcatcctgtggttgagctaagtgggctctaggatgggaaaaacccagtttgactcctagggctgatacttctagtgtgtgaatttaggaaaattattacaataactacatcg

SEQ ID NO: 477403 - DNA, 617 bp, Homo sapiens
gagagtgaaaggatgctgctcatgatgcctagagtggcatgggacaccacatcagctctcttcagaactgggtagtgttttgatgacaggttaggcatgtctgaaagagccagcaggatctgaaggtgcagatgcaatcctactgtagaaataacaaaaagctgacccactggtgggactctgacacattaattttttttctgccaaaaaaagatctttttttttttctgccaactgttgcccttccaaaaacatatccctctgcaggttttattttatttttgtctttttctgggaatgtggcttcattttgttgtccttttccctgagtggctgccaggtttggatgaacaggaacacgctgctgggatgtctgatattgctattgctagagagaagagaaaggaatgaggcaaatagggagtcctgcagaggggagagggagctgtccctagtacattatgggaagtcagtgctgaggcccctacttttaatgggaaatcacaaagaaacgtgcttgagggattgacaggaataataaaaaacaccagcatgctcagaatccattcsgttcaccctcaggtttctaagaactaaactcatcgtcctaaatgctt

SEQ ID NO: 477404 - DNA, 609 bp, Homo sapiens
ccctccaaccatggggaaagttggcaaaagtgactgagaaaatggacttctcttgacacctcaaggaactcttttcctgccgtcctggtcttcctgagtgaagatcaggcttgytgaggccacttagcaagcaaccgagtcacttggcacagggtcttgcccatggtgggggcctaacaaatgcattgattctagtaaactcccactgtgaatccaaggcctggttccccaaaatctttagggcagagatgacctaacagagtcgccttcatatcactgagcctggcacactgctgggcacgaagggagaagggcaggtctgagagatctacggacaaatttgtgagtgtggacacagcactccttggaagcaattaaacctcccactcttgccacctgtctcccttcctagaaaatggatgcccttcagagcaagcatccataggctctctctggctgccgtcaacctcctgtactgaactgccagcccccagccttctcctttctctcctgctgagcccacttcctcatgtgtctctccaagccatggatgtccagtttactcttaagaaaagtgaaagggagggcagatcaggaggagcaatatct

SEQ ID NO: 477405 - DNA, 609 bp, Homo sapiens
ccctccaaccatggggaaagttggcaaaagtgactgagaaaatggacttctcttgacacctcaaggaactcttttcctgccgtcctggtcttcctgagtgaagatcaggcttgttgaggccacttagcaagcaacsgagtcacttggcacagggtcttgcccatggtgggggcctaacaaatgcattgattctagtaaactcccactgtgaatccaaggcctggttccccaaaatctttagggcagagatgacctaacagagtcgccttcatatcactgagcctggcacactgctgggcacgaagggagaagggcaggtctgagagatctacggacaaatttgtgagtgtggacacagcactccttggaagcaattaaacctcccactcttgccacctgtctcccttcctagaaaatggatgcccttcagagcaagcatccataggctctctctggctgccgtcaacctcctgtactgaactgccagcccccagccttctcctttctctcctgctgagcccacttcctcatgtgtctctccaagccatggatgtccagtttactcttaagaaaagtgaaagggagggcagatcaggaggagcaatatct

SEQ ID NO: 477406 - DNA, 491 bp, Homo sapiens
tgcccagcatgacaactatatcctgacctgtcatgattcccatgccaccrttgccatatatttcttaagggaatttggcaaatttaaagggaagtcagaaagaacaaaggaagggagataacatttggaaaggatgcaaggaaggaagagcaagaatagctgaggagaaaagacagatcaaagggaagggcagtgatgacagagaagcagaggaagggaattaccaggaggaagtgggaggcacgaggcagcctccccatggtactcacgtgttgtgcagcacacaccagccacagtgggggtcgcctgagccaaggcactcgccgcagctctgatactgaccacaggactccacagggactctggtgagctaggacagcaggatagggagaaggtggtcaagattttgcagaacacccagcagtgtaccagaagagatgttgctctaaatatcaagtgtatcacctgaaatgttgcaggagcatgaaggt

SEQ ID NO: 477407 - DNA, 598 bp, Homo sapiens
tgcaagaggttcagcagggaatgaagaaaggcagacactgttccatcctggctggtgaggaagagattccgctatctacccagatgagttaacccctaagtttccaggagtactgctccttccygaaagtctcccctgaagaccctctgctgtgacctggccacacacagaaagccatccccactgccacctcactcaccaccaacttcacctcctctatacctgcaagtgacaggcagtaagtgacatatttcaaggctgccctggaaggtacggccaaaggagggttgatttcatacttcgcttatttcatctttctccacggtctgtaccccattcatctttcattcacaattctcctttttcacccttgactgatctggtccttgcctaattctagaatctattttttccttcctctgccccctgatctgccactgaattgcatccatattactgtctatttctatatttcttttgcaattcagccttttcttcccctgtcatatcctttcaggcacagcgtgtgggcttgtgaatggtggtgagtgctggagccacgccttctgtctcagacacaccgagacaaaggtccacc

SEQ ID NO: 477408 - DNA, 678 bp, Homo sapiens
caaggggcccagcaagaatagcaatttcttttttttcctctcatttatttatttatttatttatttatttatttatttatttagagacagggtcttgatctgttgcccaggctggaaggcagtggtgctatctcagctcactgcaacctttgcctcctaggctcaggtgatcctcccacctgagcctccctccccagtrgctgggactataggcatgcgccaccacacctggttaatttttgtatttttttttttttgtaaagacagggattcaccatgttggacaggctggtctcaaaatcctggggtcaagcaatccacccgcctcggcctccctaagtgctgggattacaggcatgagccacctcgcctggctgagaataacaatttctatcactaggaaattcgaaggatttagaatttctcaggagcttggtccaaaatccagacctctctttggccaaggccaatttcttactacacagtttggccatattattaattattcttgaataatatttaataggtaagacagaatgatgctgttgaggttctgtttaaaacaaagcctaacttacagggccctgctgacttgcaggaggtcagccatcatgatgtcaacgttgtgcttcccgtggcctctcgcactccaaacctagttcaggctgaatgacatgg

SEQ ID NO: 477409 - DNA, 549 bp, Homo sapiens
ggatggaaggagagagaagcttgctggatgggagctgccttgaatctctttcctgaaaacagtagtgccagtgatagtgctggacattggataatgctttatggttttcaaagccatgttgaaacgggttagcatgtagctggttggactggaggaaagtagatccatgtgagaggaaaactgggactcaaactggrtcagtgctatcccccagtgtcattgatggctttatgatgagggtctagactttaatttctagtccaaggctctgttcagcaggtaaaagcatctagagatggtgtcaatagattggctgagataagggctcagcagatcagcttgagggctgcaaggaacatcagacagcagagaacagcatcgacctcagactcccttgtagttctctgctttctgcacttctggcttactgctgcaagacagggtttcagttgctccctcatagggaatgtttgtgtaccaccagtcacacagtcttgctgggtcctgcattctgcaatcacccatatatgtttgcagggcactcgctag

SEQ ID NO: 477410 - DNA, 549 bp, Homo sapiens
ggatggaaggagagagaagcttgctggatgggagctgccttgaatctctttcctgaaaacagtagtgccagtgatagtgctggacattggataatgctttatggttttcaaagccatgttgaaacgggttagcatgtagctggttggactggaggaaagtagatccatgtgagaggaaaactgggactcaaactggatcagtgytatcccccagtgtcattgatggctttatgatgagggtctagactttaatttctagtccaaggctctgttcagcaggtaaaagcatctagagatggtgtcaatagattggctgagataagggctcagcagatcagcttgagggctgcaaggaacatcagacagcagagaacagcatcgacctcagactcccttgtagttctctgctttctgcacttctggcttactgctgcaagacagggtttcagttgctccctcatagggaatgtttgtgtaccaccagtcacacagtcttgctgggtcctgcattctgcaatcacccatatatgtttgcagggcactcgctag

SEQ ID NO: 477411 - DNA, 619 bp, Homo sapiens
ctggttcatcaggcttgatggtgcaccccagaaccttcccttaaggaaggagaattctccaatagattcccctctcagtaaaaaacctcattcccttcatctcaaaacagaggagctcggagttgtaagtgaacccgagttgagtgggaacaccaccaaaccacttccctctggagcccagctttatacagtagacagaayactggcatttacaggcttatcatttgctattttgacccaggaggtccattacccaaagtaacttgcaattttactaaggcatgaatttaaattgtttttgctgaatggttgataaggcaaaagaaaactgaaggcgtgtcaataacgaaatggtcatttggaagggaaactgaggcatcaagagacgacaagtattggtataatgggtccttaaaagctctaatttcagacccacagcagagcattagcattcagaatggttgaaacagaagttgatctggatttattaaaatgtcagtttcttgatatagtggtctcttcaacaaagtcttaattgctagcctcccaccaatttggaaaacacacatacacatacacacacacacacacacacagtttattcatacctttaaactac

SEQ ID NO: 477412 - DNA, 462 bp, Homo sapiens
catggtatctcttttatatccaaagtctatttttgaaaataattttgaagattactctccctcttttcctcaagcttaccacaattttctcttctgctatatgatattttgtatgatttcttctgctgtatgataatcaaaatttgcctttgattagtaaacttaggaaacagtaaactttaagggtaactgttagtaaatccttgaattaattaaccatcctttattgattgcctggattcactgcctctgagctatcctacttctcagtaagtcaaaccaagttaaatataaaatgtcaccttcattaaaaacgtggcataatgtcataatattttaccagcgggcccacttgcttyttgatcatcaattaccgaatttcctacagatagaatatttatttccctgctcttatttttggtgttactgttgtcattgttttactactcagttaaatagtaa

SEQ ID NO: 477413 - DNA, 482 bp, Homo sapiens
cttgcttggttctcattgaaggacttgaatcacacactagagaggagagagtcagcagagttacagcttctctcccgccctttcactcaagctggccctctatgctgagagcaccactgtgattgcttcttctctgtttccctctactggttaaatttctagatatagtttgaattgacaccagatgaagcaaagtacataatgactmcctgcctcacagaactttcctcttaaagaacaagatatatagttgacattcccaattttctaaaaggttattgtattagggtagtagggctgccataaaaataccacagacaacatggtttaaacaatagaaatttattctgtcactagtctggaggctaaacatcagagactaagttgttggcagggttaatttctttagagccttctttccttggcttgtggatggctgccttctccctgtgtcttctcaggatctgcctttcacaggtatc

SEQ ID NO: 477414 - DNA, 499 bp, Homo sapiens
tgccgctaaaatccacgcaagatgaataattttacrgacagttcttaaaaggatctgatttctaagttctacattaaaaaactataaggcagatttggagtgagatcaatgtgaattccacattgtgttctatcattgaccattcacatcatcttggccaagtcaatgatccttttttaaccttagttttgtgtcattagagtgataatcccaccttcacaagattgtgaaaatttaaaagatgctaaataaaagcattttattaaaacaaaaaacttggcccagtgtaattaccaccaaggttgtgttgatacatgtcgtgcttaaaaatagctgatggcacacaagcagatgtcaagcagccagtcatgtaacagaatgcagcattaataccatcataatgatgtaagtaatatactgcagataacggtcttaggttaatatctctttgaacaacattgctaatgctaaagagacagtgaaaaagtgaaacattatg

SEQ ID NO: 477415 - DNA, 499 bp, Homo sapiens
tgccgctaaaatccacgcaagatgaataattttacagacagttcttaaaaggatctgatttctaagttctacattaaaaaactataaggcagatttggagtgagatcaatgtgaattccacattgtgttctatcattgaccattcacatcatcttggccaagtcaatgatccttttttaaccttagttttgtgtcattagrgtgataatcccaccttcacaagattgtgaaaatttaaaagatgctaaataaaagcattttattaaaacaaaaaacttggcccagtgtaattaccaccaaggttgtgttgatacatgtcgtgcttaaaaatagctgatggcacacaagcagatgtcaagcagccagtcatgtaacagaatgcagcattaataccatcataatgatgtaagtaatatactgcagataacggtcttaggttaatatctctttgaacaacattgctaatgctaaagagacagtgaaaaagtgaaacattatg

SEQ ID NO: 477416 - DNA, 527 bp, Homo sapiens
actctgaatataaaccaaagttctaaaacaaagttatacctaacaggtgactcaattctaaaactaataagccttttatgggtgctgaaccacagacgcacccatcttcaatgcaaaagtaaaatgatacatttcttccaagagttagtcactccaaacacatacagaagaaagacagtgtctctgtgagttggcaacagttggtatactacgtgcaaatggggtgcaaccaacatttctttctgaccatattcttgggagctcccaacctacatacccctggcaggcggaaggccaagccaagatctcagctctcctttggagaaagagaatgagtaacaaatgggtactccaaagccaagagtcataattcaaataaattcttacaaatgtttctctcctgagctaaaggartttactgaggaaattgagatgaatttgcagaagatgggttttaattagagacccaaagatcaaatgagcttttagagggtcggggacatggacatagggaagtaatgagggca

SEQ ID NO: 477417 - DNA, 527 bp, Homo sapiens
actctgaatataaaccaaagttctaaaacaaagttatacctaacaggtgactcaattctaaaactaataagccttttatgggtgctgaaccacagacgcacccatcttcaatgcaaaagtaaaatgatacatttcttccaagagttagtcactccaaacacatacagaagaaagacagtgtctctgtgagttggcaacagttggtatactacgtgcaaatggggtgcaaccaacatttctttctgaccatattcttgggagctcccaacctacatacccctggcaggcggaaggccaagccaagatctcagctctcctttggagaaagagaatgagtaacaaatgggtactccaaagccaagagtcataattcaaataaattcttacaaatgtttctctcctgagctaaaggagtttactgaggaaattgagmtgaatttgcagaagatgggttttaattagagacccaaagatcaaatgagcttttagagggtcggggacatggacatagggaagtaatgagggca

SEQ ID NO: 477418 - DNA, 602 bp, Homo sapiens
ctggcttgtcacttacacaatgaaagccacgagggggtagttctcagtcaagaggaattagccttccatagctgagtgatgagctgattctgaattttatctttccaagaaattcctgttactcccctgtgtccatgtctaagaaaggacctttgccttattaatgatcaggcttgggaaccaatctactaaattatcctctttgcctaagatccagcttcgattttctgcccagacaccttacagttccctgggagggcagaggtactgacctagtggggtgagagagtatggatttggggatcacaaaggtcatgtgttaaagcaacatattagtgaatatttattgaatagtttttaatgtgccaagctctcttctaaggtctaaacgtttggcatttgatttaccactcacatcagacctattatatgggtgctgttaatagctctgttttacatttagagctggggaaacttgagacacagagaaattaagggactcacagagaccttacagttactttgtggcagagacagtattcaactccyagcagtctgactccacaggcttctctgcgtctgtccaatggaagccttcctca

SEQ ID NO: 477419 - DNA, 586 bp, Homo sapiens
  misc_feature (1)...(586): n = A,T,C or G
ctgttttgtctgactccctagggtgagtttgcctaaatctgtaggcagacccttccatggaaataaacaccactggtttcagagaatcagtctccccnaagctgctgataggcctggaattaatcacaaaattccagtcccttattttgctcttgtgggcaaataatgcgaaatgccatagactttttgttggtaactccaacaaagggctctttccacaaccagcttctgattcatgattccacaactttctcaagtggaatgcacattccactaaaattccaggatggctaggtggatcgccaggctctctgatccacctgagaaggtgaaattaaaaaaaaaaaaaaaaaaaaaaaaaargggagtccctctctcttctctgtcttgttgctcctataaaggattactaaaatttttaaataaatgcatcctttaagcaagtacatggttgttgtgaaaaccttaagcaataatatagaagcataaagagtaaaatagttcaggccctcttttttctcccccagtcccacctcctctccagatttggacgctgtccacattttagtatgtgttcttccagaca

SEQ ID NO: 477420 - DNA, 586 bp, Homo sapiens
  misc_feature (1)...(586): n = A,T,C or G
ctgttttgtctgactccctagggtgagtttgcctaaatctgtaggcagacccttccatggaaataaacaccactggtttcagagaatcagtctccccnaagctgctgataggcctggaattaatcacaaaattccagtcccttattttgctcttgtgggcaaataatgcgaaatgccatagactttttgttggtaactccaacaaagggctctttccacaaccagcttctgattcatgattccacaactttctcaagtggaatgcacattccactaaaattccaggatggctaggtggatcgccaggctctctgatccacctgagaaggtgaaattaaaaaaaaaaaaaaaaaaaaaaaaaaggkgagtccctctctcttctctgtcttgttgctcctataaaggattactaaaatttttaaataaatgcatcctttaagcaagtacatggttgttgtgaaaaccttaagcaataatatagaagcataaagagtaaaatagttcaggccctcttttttctcccccagtcccacctcctctccagatttggacgctgtccacattttagtatgtgttcttccagaca

SEQ ID NO: 477421 - DNA, 705 bp, Homo sapiens
gataaacactatgaagcaggacctgatttctacagatttgagagttccaagctaccaagagagtcaacttgaggccaggagtttgagaccagcctggccaacatggtgaaatcccgtctctactaaaaatacaaaaattagccgggcatggtggtgcactcctgtagtcccagctacttgggaggctgagtcaggagaatcccttgaactcgggaggtggaggttgcagtgagccaagatcacgccactgaactccagcctgggcgagastgagactccatctcaaaagataagaaaaagaaaaagaaaacaaggtctttagaaagataattaagttagagtgagatcattagggtgggccctaatccaatgcaactggtgtccttacaagaagagaaaatttggacatagacaggtacagaggaaaggccttgggaacacacagggcgaaggtggccacctgcaggccaaggagagaggccttagaagaaatcaaccctgccgcagtttgatcctggacttccaacctccagaactgggagaaacatcattcctgttgtttaagccatctagtctgtagtaccttataatggcagctccggcaaacaaacactctaggtgtgttgataatttgttagattaaaaaaagccaagttataaaagaggacttaagatataagatttgtgtaattaaatcatacatcc

SEQ ID NO: 477422 - DNA, 496 bp, Homo sapiens
ttaaaaaaagaacaatgttgtctatatgtattataatgcaattatctccaaggcacattgttaagtgaaaagggcaagatagtattgtatatcatttgcattaaaaatatttagtgctatgtaaatcctttgcatgtattatttgcatagaatgtttctgaaagcaaaaaaagaaaaaaaaaaagctaattgattaattgcttcctaggaagggacttggtctacaggatatcctcacaacctctttaggaagtaaatattactattttattcattagacacgaggaacctagaacaagggaactccagaagccycagtggaatgaaaagaaaggaatccaatgagatcatcgctattaattcactccaagtttcttgactgttgtctctgtgccaggctctctggaatcgcaatagcacctacagcacagagtggtttggtaattaaataagacccaataagcaggaatttgctccccacagatgcttgataaat

SEQ ID NO: 477423 - DNA, 481 bp, Homo sapiens
taattcaatacaatcaaaaacagttaaaaaatatgtatacaactggatgtgttattctttcaaaaatcagtcgtaaatatagacctttttttgggcggggagaaggggtgggtgaaatttcagattggaacgaagttacaacccacatcaggaaaatcggccctttaatgagagaaatgaaaaagtcttaatcaccaaaacccctccaaaaatgacactttgaattacatcagaactctacatggcaatgcaaaacgagagcctttcatctgaaaartgaaatacttaatgatttcaatcagttcgtacctcccctaatttgagatctgcataacgtattcagtgcctggatttctttcatatctctaaaatatttataaaaacaattcattctcttgttttctacctacctccccccctttcaagatgaaggtaatttgttttctctggtagaagttgcagagggcagcgggggattggg

SEQ ID NO: 477424 - DNA, 646 bp, Homo sapiens
cagttctatagcattaagaaaatgaattttggaagtaatctgagtgagtgtgggagtagattcttccgaagtcaagcctgcagatgagaacacaacctggttgaaatcttggttataacctccagaaacccaaagcagaggacctagctaggtcatgcctagatacctgacctgcagaaactgtgagatagtagawgtatgttgttttaagctactaagtgtgtgataatttatcactgagaaatagaaaacttaatacaaatgtgtagttttggatgagttgattaacatttggtctcaggcttgccagataaaaataggatataattgtaagtaacctcctaggtttgttataaaaattaaataagataatgtaattcagtgcccagtgaatgactctcaatgttattatttcttaaaacattgtcttttggtcccagcccctctttgtttcagtctgtaggagaaactctgacctgagcctgtatacagatattttgctcattcttaaacaagtccttctggtacatattgtaggtgttaactcctcagggctgcactttaatgccccttcccttgtgcttccttctcagtggaactgctggtcatcaaccttaccatgaccttcattttgtctctctgccct

SEQ ID NO: 477425 - DNA, 480 bp, Homo sapiens
gacctgcagaaactgtgagatagtagaagtatgttgttttaagctactaagtgtgtgataatttatcactgagaaatagaaaacttaatacaaatgtgtwgttttggatgagttgattaacatttggtctcaggcttgccagataaaaataggatataattgtaagtaacctcctaggtttgttataaaaattaaataagataatgtaattcagtgcccagtgaatgactctcaatgttattatttcttaaaacattgtcttttggtcccagcccctctttgtttcagtctgtaggagaaactctgacctgagcctgtatacagatattttgctcattcttaaacaagtccttctggtacatattgtaggtgttaactcctcagggctgcactttaatgccccttcccttgtgcttccttctcagtggaactgctggtcatcaaccttaccatgaccttcattttgtctctctgccctca

SEQ ID NO: 477426 - DNA, 607 bp, Homo sapiens
gatgcaggaggtcttctggggcatttttcagcctcaactcaactgtcactcccactatactgtgcaattcaactatattgattgctcttgagactacacatatgccaagatttctcactctcatttcttgccatccgtgctatttcttttaccttcctatttcaaaacctggctaatgccactcatttatcaggtctcaccttagtactccatcctttcaaaggcatttctgaytgccccttccctctgcccacagcttgaattaagagctcatccctgatttcatggtagtttggaaatatctttttagaaacctttatcatgcaaattgctcattttgattttctgactgtctcctcttctaaaagaaggcttacttgcagtattttttaatctttgtatttccatagagcatgacactcaataaatatatgagtgtgtgaaaaactgaataaatgtgtgtatgtctgtttcttttaatagagtaagttattttagggaagggccaatgactcttttctgcttgtaggctccacgtttcctagcatggtcctttgtatataatagttgatcaataagtagtgtctgaataatgatatacatgtct

SEQ ID NO: 477427 - DNA, 582 bp, Homo sapiens
cagaaaaaaacaacagaaaaaaaaaaaaaacagaaccaaatacaaccccataactagctcactgaaaaagatgatgaagacaatttttatctctggatctatttcaaagtcagagagagacaaacatatgagaatgattcagccccacgsgatcctgagggagtgtacacagtgtcattaaacagacatttttttccccattaggtgttgtttagtaaagattagagtgtcaactttgacaggtctcacatcttagaaggaaaaactggggtcagtgggggtacaaataaaagcgtataagaaataaggaaataagtgtacagattctcattctctctctcacacacacacacatacaccttgagttggtcatacatcccacatgcatttctagaagcattatttttgtattttaaactctagtcaaagtctgagagatgtgcttttccaatagactttgctttttttttttttttttcccctttggcttcttttgttgcaatttcaatctagctcctgctgcgttgaaccatctcaggcaaaggagaggtagcctctctgtagagagcactgtgcttgtcc

SEQ ID NO: 477428 - DNA, 590 bp, Homo sapiens
agatggcaagtgtgcctatgcaaatttctatagcatttggggcccaacctaaggagagggtggagggagtttgattttagaaaaagagaaagggttaagtacktcactgagcaacttcatgggcagattttttaaatgatacaatcagtcagactggtgatatgtctttggaatactaatacaaaaattgtgttaatgctactttaaaaacgaattttaagaaaataaattatagaggaaaatagaatataacctgcatttggtggggggaattattgcctatttttccaagtttgacaaaattaatatttcaaagtccaggtttgaaatactttatataaaagaatagctttttttgaaaaaaaaaaaatgtttggtgtctactgtggatatatatgtataccagtatatatctctatacatatgtgtatatatatgtgtgtgtgtgtatatatatatgtatccaactttactaaataatatactgtacatatacacccacccttaaacttgtacatactttatatatataaaatggccacatttcttacgtgtgtctgtccccggaagggtggactgattgtttttgg

SEQ ID NO: 477429 - DNA, 574 bp, Homo sapiens
ctcctgcagttggtggtggctggtggcggcggtggcagcagtgggctggttacatcttcagagaaggaattggaagcgataggtttggggcaaggcaggctcccacacagggacatgagatttattatcagaggctattaggactcaggttgtggggcatctgtgttctttgtacactatgctctgggcacttggcatccagtttctttttgtccctatctcttttgaatgagatgagggagtaagtgatgagaaatkgttatatttctcacccactgtgtctattttgttgctattgctctagtttattatatacataggctttttttccctactgcactttctgttgggagactcagctatgtacaggtcccaactttataattctttggtcttatccaagactttcatttgtcaaagaaactctgcaaagtggctgggtctaaaaatgtaatataagtaagtacaacattgatagagggcccctgtccctcaaagactctaagtctatgctatgtagaaaatgcagtgtttcttatctagtaaggtgatcctctcttagaaaaagaaatga

SEQ ID NO: 477430 - DNA, 625 bp, Homo sapiens
tgtgcctgtgggccggttccctaactgctctctgtgtctgtttctgcatctgtaaaataaggsaatgattacaggtatctcaaatgggtgttgtctgtatctaatgggatggagaggtgttaaatccttaccatggtgcctggtggtaggtgcttaataagtgttagtatcattattttcaatgttattgactatggttaggtccacggtcaaggttacataatagtgagtcattttcaatgcttcgccatagttatatatcactcttgtaatatccattagaatgcaaacagctttgcttgattctctcctggtgatgagagatgggaactaattctacatttaaatattggggattatatgatatgtgctggagtgacccatccaattaactttgtctcacagatatggacagatgaggcttattttagaaattagccattgttgttttggagatgataatgcaaccttttcagggctgtggaaatagcgaaatgagattaacaataaccctccaaatagctgcgacttttgtgcccttatgatattgcattcctaagtgcttcacatgttttaaatcattttattattacaaaataaatagtttgtttattcctatgttccc

SEQ ID NO: 477431 - DNA, 625 bp, Homo sapiens
tgtgcctgtgggccggttccctaactgctctctgtgtctgtttctgcatctgtaaaataaggcaatgattacaggtatctcaaatgggtgttgtctgtatctaatgggatggagaggtgttaaatccttaccatggtgcctggtggtaggtgcttaataagtgttagtatcattattttcaatgttattgactatggttaggtccacggtcaaggttacataatagtgagtcattttcaatgcttcgccatagttatatatcactcttgtaatatccattagaatgcaaacagctttgcttgattctctcctggtgatgagagatggkaactaattctacatttaaatattggggattatatgatatgtgctggagtgacccatccaattaactttgtctcacagatatggacagatgaggcttattttagaaattagccattgttgttttggagatgataatgcaaccttttcagggctgtggaaatagcgaaatgagattaacaataaccctccaaatagctgcgacttttgtgcccttatgatattgcattcctaagtgcttcacatgttttaaatcattttattattacaaaataaatagtttgtttattcctatgttccc

SEQ ID NO: 477432 - DNA, 625 bp, Homo sapiens
tgtgcctgtgggccggttccctaactgctctctgtgtctgtttctgcatctgtaaaataaggcaatgattacaggtatctcaaatgggtgttgtctgtatctaatgggatggagaggtgttaaatccttaccatggtgcctggtggtaggtgcttaataagtgttagtatcattattttcaatgttattgactatggttaggtccacggtcaaggttacataatagtgagtcattttcaatgcttcgccatagttatatatcactcttgtaatatccattagaatgcaaacagctttgcttgattctctcctggtgatgagagatgggaactaattctacatttaratattggggattatatgatatgtgctggagtgacccatccaattaactttgtctcacagatatggacagatgaggcttattttagaaattagccattgttgttttggagatgataatgcaaccttttcagggctgtggaaatagcgaaatgagattaacaataaccctccaaatagctgcgacttttgtgcccttatgatattgcattcctaagtgcttcacatgttttaaatcattttattattacaaaataaatagtttgtttattcctatgttccc

SEQ ID NO: 477433 - DNA, 654 bp, Homo sapiens
cagatcaaacaagctagccccaggcagtacatagctactatggaatagtaacaaagtgggggtgggggtggggcaaaatagtcaggggtttttgaatgcctggacagtctgcctagctttctatggaccatgtggcaatgaaggtcacattctgtgctatcagaaagggcattttcccaagagcagtaattagagcatttgccatttcagactcatttcctgattctccatttaggtaggatgtactcaagaagggtcttggcttcatgtgccatatttatagagattcactttcctgatgaacattaaaaagtctctatttggatattttctttctaggtacatttggccagtaagagagagcaataagttccccaaaaggctgaaactgggagtgactgagctttggtgggttggcttttctgcataattccaaagctaggctgayggcagagatagcaatattgcccttaggaagagctggatgggttctttgcagagggcagatgggtggcagattgcagccctggctattttattgcccagtaggaatctttactggttgtctgaaatctgatcagaaccaagagccttcaaattaaatgtgctcgttaagcaagaatgaatagtgtctacccttttacacagaaaaac

SEQ ID NO: 477434 - DNA, 654 bp, Homo sapiens
cagatcaaacaagctagccccaggcagtacatagctactatggaatagtaacaaagtgggggtgggggtggggcaaaatagtcaggggtttttgaatgcctggacagtctgcctagctttctatggaccatgtggcaatgaaggtcacattctgtgctatcagaaagggcattttcccaagagcagtaattagagcatttgccatttcagactcatttcctgattctccatttaggtaggatgtactcaagaagggtcttggcttcatgtgccatatttatagagattcactttcctgatgaacattaaaaagtctctatttggatattttctttctaggtacatttggccagtaagagagagcaataagttccccaaaaggctgaaactgggagtgactgagctttggtgggttggcttttctgcataattccaaagctaggctgacggcagagatagcaatattgcycttaggaagagctggatgggttctttgcagagggcagatgggtggcagattgcagccctggctattttattgcccagtaggaatctttactggttgtctgaaatctgatcagaaccaagagccttcaaattaaatgtgctcgttaagcaagaatgaatagtgtctacccttttacacagaaaaac

SEQ ID NO: 477435 - DNA, 575 bp, Homo sapiens
cacttcttcacggttatacagctcatacatattagagctggaatttaaatacaggcaggaactgtgctgctctcaacctgtatggtctcagccaagagggttaagtagagaaaagatacactagatgttaggtcactgagatttttctgggtcttcctaagggccagcttgacttagctggcagagattggaaccaaacggcctacattgtcttttccattgtcttgtaacatctaattctcttgcttacattgttctctcctggccagccaatggctgggctcagcactcacctgttaggtttcttwcatttggttaagcaactggcagactcacctgagatctgtcttcccaccccaggtactatatcagtgaacagcaggcgcacgccattcaccgccagtggggagagcgagatcctggacctggaaggagacatgtacctgggagggctgccggagaaccgtgctggccttattctccccaccgagctgtggactgccatgctcaactatggctacgtgggctgcatccgcgacctattcattgatgggcgcagcaagaacattcgacag

SEQ ID NO: 477436 - DNA, 571 bp, Homo sapiens
cacttcttcacggttatacagctcatacatattagagctggaatttaaatacaggcaggaactgtgctgctctcaacctgtatggtctcagccaagagggttaagtagagaaaagatacactagatgttaggtcactgagatttttctgggtcttcctaagggccagcttgacttagctggcagagattggaaccaaacggcctacattgtcttttccattgtcttgtaacatctaattctcttgcttacattgttctctcctggccagccaatggctgggctcagcactcacctgttaggtttcttacatttggttaagcaactggcagactcacctgagatctrtcttcccaccccaggtactatatcagtgaacagcaggcgcacgccattcaccgccagtggggagagcgagatcctggacctggaaggagacatgtacctgggagggctgccggagaaccgtgctggccttattctccccaccgagctgtggactgccatgctcaactatggctacgtgggctgcatccgcgacctattcattgatgggcgcagcaagaacattcg

SEQ ID NO: 477437 - DNA, 490 bp, Homo sapiens
tttaccctcccctcccatttacctctcagaccccaccctcaggacagtggtatctgtccgtggctcccatctgtgtgtygctgcccatcacttcagaggaaccagaagcacctgccagagagctttatgtcatcagccatgggaacttcttccatgctgtttgttgcactggcctattttagggaaaactctacgcatgaagagggaagctgaaaagacacagggcaaaaagaaatattccccaccccattctttttccccactatgattttcttcttctttgtcttttgttttatctattttatgattttgcttttcattttaacactgtggtgaggggtgggggggtgctttaaaaccagagccacaagcaaacaggaattagatcagggaaataagaaggcagatggaagaatgatttttgagtaaagcccaggcccagtggaatctgccttgaccatgtggtgctcgtgtgggcccacagaaaaaa

SEQ ID NO: 477438 - DNA, 642 bp, Homo sapiens
tgatatgaaagctttaccctcccctcccatttacctctcagaccccaccctcaggacagtggtatctgtccgtggctcccatctgtgtgttgctgcccatcacttcagaggaaccagaagcacctgccagagagctttatgtcatcagccatgggaacttcttccatgctgtttgttgcactggcctattttagggaaaactctacgcatgaagagggaagctgaaaagacacagggcaaaaagaaatattccccaccccattctttttccccactatgattttcttcttctttgtcttttgttttatctattttatgattttgcttttcattttaacactgtggtgaggggtgggggggtgctttaaaaccagagccacaagcaaacaggaattagatcagggaaataagaaggcagatggaagaatgatttttgagtaaagcccaggcccagtggaatctgccttgaccatgtggtgctcgtgtgggcccacagaaaaaaacccagaacattgcagtagyaaagtgaaagctctgtggactgtgaatgcagattagaattaaaagatgtgcttaccacactgtctctgtctctgtcccagagcctgcctgtgaacgccaagcctccactctcttccccag

SEQ ID NO: 477439 - DNA, 583 bp, Homo sapiens
acacatagctcattgcttgcctgacatttctaactggatatttcataatcaactctaaatctacatgcccaaaagataactcttatcacatatcagggtatcaaaactagatatctgggagccatccttagctgaacatagtttcttaagaccaaggcacaaaatatttgtgtagaggagacatggggcaaaggagagaagaaaagcaagaacgaggttgtaaagaaccttgtatgcygagtaggaaatgttcatctttattccgaaggcaatggagggatccttcattgaaagccttctgagcaagggtgtaacatggtcagatttaagtcttattaagattgttctaggatcatctaggggatacagtgaagagaactttactgaattcaggcaaggcaaagagaaagctattgcagtcaacctagcattcaaagagaacactccattgtggacaataaaatcctggttgtttaggtctaaactttggccttggaagggctttttatataatctagtaaattttcctttaccaacaaagtaacagatactccagaagtttttaagcttgcccaaagtgact

SEQ ID NO: 477440 - DNA, 527 bp, Homo sapiens
gcagtagcctgatcatagctcacagcagcctcaaactttgaggctcaagtgatcctcctgcctcagcctcctgactagctgagactataggtacacaccacctctccaggctaattctaaacaaagatgtatggagttgggagggtctcacttcactgctcagggtgatctccaacttctgtcttcaagtgctcctcccactttggcctcccaaaatgttgggattacaggcgtgagccatggtatccggcctcccaggctgttgttgaaaggtttttgcaatctctcagagttatgcagcagtttattccctsacagtgatactctcatcctttgaccccattttgcagcagtggttgagcgttcacttttctttccataagggggtgagcttgccggtgactctcttccccctcctcatcaatgacttctttgtcatcagagccttcctcttcataaattcccacggaatccaagttttcacgtcccaatcgggcttagttatgatagccacaggcccacaccag

SEQ ID NO: 477441 - DNA, 545 bp, Homo sapiens
atttttacatgaaagaagcaagtcaccccatttctgccacccaggaccaagaaaagataggagagtgcactaaagacacaatactcctttatgtttccaaaggggagcctcaaccaaaagacaatctgatgtctgtttccaggatagatgaaaggaggagcagcacacatacttttacgggagagtgwctggtggtgattccctgaacatttcacatagaggaaaggagaagcgctcaatgacgatttcccaccaacatggcattgtgtcccctgtgtacccccaggtatattttgcttttgcaggctattgttccaccctgttgaagtggcctttccttttcttttgggatatttctctcttcacagttgagaaaatccagaagacaggaatcatttctgttttccctcaatagcaacatccaattggctgaccagccatgtgtctccaattaatggaaactggagttgggagggagaagctgagaactcagagaattggttatctagatgaagcgtataccaggcatctctgccaccataagg

SEQ ID NO: 477442 - DNA, 545 bp, Homo sapiens
atttttacatgaaagaagcaagtcaccccatttctgccacccaggaccaagaaaagataggagagtgcactaaagacacaatactcctttatgtttccaaaggggagcctcaaccaaaagacaatctgatgtctgtttccaggatagatgaaaggaggagcagcacacatacttttacgggagagtgtctggtggtgattccctgaacatttcacatagaggaaaggagaagcgctcaatgacgatttcccaccaacatggcattgtgtcccctgtgtacccccaggtatattttgcttttgcaggctattgttccaccctgttgaagtggcctttcctyttcttttgggatatttctctcttcacagttgagaaaatccagaagacaggaatcatttctgttttccctcaatagcaacatccaattggctgaccagccatgtgtctccaattaatggaaactggagttgggagggagaagctgagaactcagagaattggttatctagatgaagcgtataccaggcatctctgccaccataagg

SEQ ID NO: 477443 - DNA, 585 bp, Homo sapiens
ctattttctcttaattttctttttttttcttttttgaaatggaatcttgctttgtcgcctaggttggagtgccgtggcatgatcttggctcggtgcaacctccacctcctgggttcaagtgattctcatacctcagcctcccaagtagcggagattacaggtgtgtgccaccacgtcaggctaatttttgtatttttcgtagaaatgcagttttactgtgttggccaggctgatctcgaactcttgacctcaagtgatctgcccacctcagcttcccaaattgctaggattgtaggtgtgagccaccatgcccagcctattttctcctggttttctgtgtttctggtgtttctaactttttttttttttttcctgatacttcatcatcttttctatctctaaatatgaatatttctgtattctctgtcttctcacctttgatactttcatctgcttccacagttttagttcctactacctgtctttgaatgctaccttccctaaatagtgctatttgtgtatgtactgtggtacttttacaactrctactttattacatagttatttacatacatacttgattta

SEQ ID NO: 477444 - DNA, 593 bp, Homo sapiens
gcagcgagacagtattctccatccagccacatcaacctcctcacccaacaggtacggatggtctggggtgtccaagagctctttggacctgaggatagaattaatgacagggtactttgtctttccctgtctttactattcccatatactgatgcctcttgaatgagtattattaatagttggtttcaagctaaattatcaagtttttcctcttcaaatttaaagaaaataactttctgttacaggcattgtgaagtaagtctgctactggatatgatgtacctatttsatggataaacagacttgaatgttcatctgtaaatataattttaaaggatctttaaaaataagttcttttctttggtaaaattttccagtgagttctagtcttataaatctttttaccagaattttataacattaccctttaaaaaaatttttttctatactgcctcttatttcatgatctcaggatgttttatgggtaactgattaatttcatatttcattatacccttatccaatataatatcattctccccattttacagatgggggaacctgaggctgaaataagtgatgtgatcaaggtc

SEQ ID NO: 477445 - DNA, 647 bp, Homo sapiens
gggataaggtcaaagagtctgcatcggagactttgcctgcccaacccccaggccttgagcatgatcacatgctccgtatgttttcttccagaagaaaggattttcaatctgcatttagagagaaggaagaaaatggtatgagcatgtggaggggcgaggcctttcaagaagcatggaattccacctaggattttgcttgtatgtttgttgcagatgccaagtgggcatgagaaagaaaagcaattcagragggggaagaagtgaggacttgcatctggtgctgcttcaccatgatcatcattttcaccatcctgctcaaacactcccagcaatcagactctatgttcagtacttcacattgattttctcaattactactcagacgtcaatcctggaaggtaggtatgtgctcccatgttagagaagaaaacactgaagtaagaaagaccacaatatttgctcacggtcacagagctactaagaagtgcagtggtttatacctctgtattttggaccttggagctcaaatattgagcgattaaggctactgtttctaatgtttcatccgtatccacatgccctgtcgtatgtccagggtccttgattccacctcttaaatcagaactgctgaagatgggctccaggca

SEQ ID NO: 477446 - DNA, 575 bp, Homo sapiens
gctccgtatgttttcttccagaagaaaggattttcaatctgcatttagagagaaggaagaaaatggtatgagcatgtggaggggcgaggcctttcaagaagcatggaattccacctaggattttgcttgtatgtttgttgcagatgccaagtgggcatgagaaagaaaagcaattcagaagggggaagaagtgaggacttgcatctggtgctgcttcaccatgatcatcattttcaccatcctgctcaaacactcccagcaatcagactctatgttcagtacttcacattgattttctcaattactactcagacgtcaatcctggaaggtaggtatgtgctcccatgttagagawgaaaacactgaagtaagaaagaccacaatatttgctcacggtcacagagctactaagaagtgcagtggtttatacctctgtattttggaccttggagctcaaatattgagcgattaaggctactgtttctaatgtttcatccgtatccacatgccctgtcgtatgtccagggtccttgattccacctcttaaatcagaactgctgaagatgggctccagg

SEQ ID NO: 477447 - DNA, 575 bp, Homo sapiens
gctccgtatgttttcttccagaagaaaggattttcaatctgcatttagagagaaggaagaaaatggtatgagcatgtggaggggcgaggcctttcaagaagcatggaattccacctaggattttgcttgtatgtttgttgcagatgccaagtgggcatgagaaagaaaagcaattcagaagggggaagaagtgaggacttgcatctggtgctgcttcaccatgatcatcattttcaccatcctgctcaaacactcccagcaatcagactctatgttcagtacttcacattgattttctcaattactactcagacgtcaatcctggaaggtaggtatgtgctcccatgttagagaagaaaacactgaagtaagaaagaccacaatatttgctcacggtcacagagctactaagaagtgcagtggtttatacctcwgtattttggaccttggagctcaaatattgagcgattaaggctactgtttctaatgtttcatccgtatccacatgccctgtcgtatgtccagggtccttgattccacctcttaaatcagaactgctgaagatgggctccagg

SEQ ID NO: 477448 - DNA, 641 bp, Homo sapiens
cccaaacatgtgagagtccatcttcaacaaagcctcatcaaaaaaaggagctgactgcagcctcctaaatgagaccaagtgagacggtggatacagagaggatcctaggactaggggaggaaatactgcttctccaggaaaggtgaaaagatgggtgggggggtgtggagagagagattcctggattgtgttgtcactcaaatagatggccagtgtctcacctaactccagagagagggtaggtgggcaccaaatggcttaaggtatccaagcaagcattcaatctcttgggtaaagggtaaactaaagagagtagattggaagtgatcaagaagacagcaaataggagaaytttaaacctgagctaaacaaaaataaagtgacagtatacatctaaccctcacctgagctttgtgcagtagaaatcctgagatattagtgtggcttcactcttgcccagaaaggaacgcttttaactgcaagagactgaatagccagggaaataggagatggaatgatacaagccccagacttagcaccaaaaatacatcctatctacctaggctttccagggcagacaggtttgggattatccaacccagcctacaaggagtaaagaaatgctgtcatcgcagccctcc

SEQ ID NO: 477449 - DNA, 597 bp, Homo sapiens
caacacacaaagctgggactgagaagtcaagacttccaggagagaactgccatcttccttctcacagcctctctctcttaagtctgggctctcaagagtctggatgtgctcagacatccaygtgcggaaggaagagatggcttctgtcatgtggaatcaggaaagggagaagacagctgctgtgatttgtatgtttgtataaaccctccaaaattcatgttgaaacttaatccccagtgtggtattaagaggtggggccttttaggaagtgattaagtcacgaaggctccaccctcatgaaggaaatcagtgcccttctaaaagagccttgagaaagctgcctgtcctttctatcttttccaccatgtgaggacacagttttcatttctttttgctttcccattatgtgaggatgcagcaagagctttccatctttgaagcagagagtaatttgctagcaccttgatcttggtcttcccagaatccagaaccatgagcaataaatttctattacttaaacatgatccagtctaagatattttgtcctagcagcaggaacagactaagatccccacctgttcccaccatgccaggccc

SEQ ID NO: 477450 - DNA, 597 bp, Homo sapiens
caacacacaaagctgggactgagaagtcaagacttccaggagagaactgccatcttccttctcacagcctctctctcttaagtctgggctctcaagagtctggatgtgctcagacatccacgtgcggaaggaagagatggcttctgtcatgtggaatcaggaaagggagaagacagctgctgtgatttgtatgtttgtataaaccctccaaaattcatgttgaaacttaatccccagtgtggtattaagaggtggggccttttaggaagtgattaagtcacgaaggctccaccctcatgaaggaaatcartgcccttctaaaagagccttgagaaagctgcctgtcctttctatcttttccaccatgtgaggacacagttttcatttctttttgctttcccattatgtgaggatgcagcaagagctttccatctttgaagcagagagtaatttgctagcaccttgatcttggtcttcccagaatccagaaccatgagcaataaatttctattacttaaacatgatccagtctaagatattttgtcctagcagcaggaacagactaagatccccacctgttcccaccatgccaggccc

SEQ ID NO: 477451 - DNA, 476 bp, Homo sapiens
cgtgggctggcagcctatctgggcaccagaggaggcatctgaggccatcaggagactgtgcctgggtcaggggaaaggaaaggcggcttttcctgcttacctgttttggggcccctaacccgctgcagtgcacatacagggcaggcatgtcagtgtcctagggggacgcagtgctcttcccggcggggccagcagggggacctttccccccgggcttccagtcctccggccgccacctcaacaaggggttaacaccccctccccctcccaaacctcagggattaaaaattyatgctgtccccaggggatgtggggaggaggaggggatgtgggggacacaaaattaaaagggaaagagattatttttaatcctcttggtgggtgctgaaacaatgccgggagagcaaagccgctgagagtttgtcccgttagatccaggcgtgaaggacggactgtactacagggagcaggtaatt

SEQ ID NO: 477452 - DNA, 476 bp, Homo sapiens
cgtgggctggcagcctatctgggcaccagaggaggcatctgaggccatcaggagactgtgcctgggtcaggggaaaggaaaggcggcttttcctgcttacctgttttggggcccctaacccgctgcagtgcacatacagggcaggcatgtcagtgtcctagggggacgcagtgctcttcccggcggggccagcagggggacctttccccccgggcttccagtcctccggccgccacctcaacaaggggttaacaccccctccccctcccaaacctcagggattaaaaatttatgctgtccccaggggatgtggggaggaggaggggatgtgggggacacraaattaaaagggaaagagattatttttaatcctcttggtgggtgctgaaacaatgccgggagagcaaagccgctgagagtttgtcccgttagatccaggcgtgaaggacggactgtactacagggagcaggtaatt

SEQ ID NO: 477453 - DNA, 615 bp, Homo sapiens
aggccctccaaagcctagtctcagccctacttcccagacgggtctctgaagcctcctgcagagactagcttatyccctcctttcccaacatgcatgccttgtactcctctgcactctcttgggtttttaatcatagtgtattttcatttaaaacagtcttcctatcaacatccgattctccctttagatagggctcaaatgctgcctcctccaggaagtttccctggatctctgcaaaccctactgctcttcctcctgacaccctacttgccttgagtgcagggaacagtgtctatctctctcctggctcagaccatgacccatctgcagcgtagcctcatcaaatgtgccttcaatgagggggatgcacagcccctctgcatgctgtgactcacatgaacattggggcaggggaaggtataatttttattgacgtgtcctcagcacaaggtctgttttcaattttctgagaaatcaacttgagtaacgtataaaaattaaaacaacactgaactttcgttccagttgctgtcaccaccaagcctgctggctggcacctggaggagctgggaacaaaaggtaccatggcaggtgaaaggcccaagtgaccaacac

SEQ ID NO: 477454 - DNA, 506 bp, Homo sapiens
gtggtggtggatttggctaccagaaaaccaagaaagttgagaaatccaaaatctttaaacacattagcaagaaatcatctgacagcaggcagttctctcactgaacacatgccttcctttcatcttgaataactttgtcctaaaatgaattttttttccccttgatttaacaggatttttgtagactttagaatttggacttacctaacaagagtataaattgacttgggttgcaagcactgagcactgttacttctatcacgtctctcttttatttctgggatataaaacaggctttaagtttcttggttgcccaagggcagagcaaggaatatctggtgtttcttgtgatgataatattttaattttaaatatccctccctcatacaagtgtatgttaccattttaatataattctttttgtacctttccttcttgttttgygaagatttttgtggcatggattgctgtgctcactgctgtaaaaggtgacctagtgtactggg

SEQ ID NO: 477455 - DNA, 669 bp, Homo sapiens
gccagttaatcataggatcccattaaataagtgtgctaacatcgaatatagagaaaactggtaaagaacattccagtaggaaaagaaaagaacaatcttccatttctgggcttggccaccatcaccctggtcggacctgtcctggacttccaaccttgactgctgagctcctggcttagcttcttgggttcctaattcctggtgtttaataattctctccacgatcatgtttttctgattttttttttcagaaataatgttttttaaaagacaaaaacaaagggaagaatatttaattactgagcagaagtaaatactgttggyattttgtacataatctaatttttatatgcatgttcatgctttttaatttttttatcaaaaattaagtcatctacctactacttgtaaccagcttgtttcataacatgttattttcctgtgtcattaaataattacttcaatgttgtatttcgtttatggatgctttgttgacccttgtttggtctgccaggatttaggttcaagatacctacctgaatgtgccaaactggctgtccctatctcagtatgtcttgtgctcagtagtcttgagattgtttacctctagtatgagtcagtctctagaggttttgtgagaaaagcatataaacaaagtggacagggttg

SEQ ID NO: 477456 - DNA, 582 bp, Homo sapiens
ttgtactgggttttatatacaaatgatcacttactcctgcattcactctgtaaggtaaatatagtcctcacttaactatattctaagagggtgagtaggctgcccatggtcacatagtgagtacatagcaggcaggtatttggactcaagtctgcctgtttccaaacatgagaaagatgaaaggaacctaatagaaacctgactagactccatgtttcaactttgrcttgcattttgcagcatgagatctgcatgaacctttgcagactacacctgatatagtgaatcctcttgcatgattctagttggattccaggaagaaggtttcaaggagagtctgggtatcgttgggtaggcacctatagaattttttggtttactcttgctattggatagtgtgcttttaatgtttatttggcaggggtttgacttaacgtgctctcattgtggaagcatctcaggcagacggaatcacatgtatgtttagatttccttaaaagaaaactatttgcttgctaagttggtggcaacttctgctggacattttaggcttcaaacttttcttcagttagtaaagccttc

SEQ ID NO: 477457 - DNA, 505 bp, Homo sapiens
cttttgaaaggtttgagtcttaaaataagccctgccaacaactctagcacatatactaataatggtaaagaaacaggaggcaggggaacttcaagagaataatttctaaataccaggagtgaaggtggggcagggaggtggagggtttgttatttagcttttaaattgtttccaatattttgcctaaatatgaacatatcacttttcctaaatgtaaatattcttcccatgcaaatggtrtgcatttgtatgaattcctagaattggacttcttgggccagacgtacacatttttaaggcttttgataggcactgtttgcctgccttttttttttttagaggttttagaacttttgcaccaacagaaaagaataaaatgactgtttcactgcactcttaacaacattggatgctatatttctacatatttataaaacttatatttagtttaatagtttgaataaataatgatacattcacacaatataatcctatgtagttcatt

SEQ ID NO: 477458 - DNA, 505 bp, Homo sapiens
cttttgaaaggtttgagtcttaaaataagccctgccaacaactctagcacatatactaataatggtaaagaaacaggaggcaggggaacttcaagagaataatttctaaataccaggagtgaaggtggggcagggaggtggagggtttgttatttagcttttaaattgtttccaatattttgcctaaatatgaacatatcacttttcctaaatgtaaatattcttcccatgcaaatggtatgcatttgtatgaattcctagaattggacttcttgggccagacgtacacatttttaaggcttttgataggcactgtttgcctgccttttttttttttagaggttttagaacttttgcaccaacagaaaagaataaaatgactgtttcactgcactcttaacaacaytggatgctatatttctacatatttataaaacttatatttagtttaatagtttgaataaataatgatacattcacacaatataatcctatgtagttcatt

SEQ ID NO: 477459 - DNA, 584 bp, Homo sapiens
actaaaggcaaagcaggagaaaagtaatgtccagttaaacaaacaaacaaacaaacaacttatttgcctcagaatcaatacagatttctaactttcaaaaaaaactatgtgccatataaaaatacaaaacccatactcttaagagaagcagaagtcaacagaaatttaaatcatccatcagaaagtattgagttgtttagacactataagaaccttggactttcttgtttctcattctacaccacatttattagatagtggaaattagaattaggaaagttaacagaggctaataggctagttaacagggagtaaaatgtttgattgtcataatctaaatcttgtgtcaagagaacattcaattataggcattagtttccatttagaagtatgtaacacatttctgagacattggcattttaaatgattatatacttaggtacttaaataggctatctaaaataygtaattataaggatagctacctccctcattgatgatggattaattctttctgtccctttgattgccctttaaatctcatatgcaataaattgtagtaattatttgtgatggcaaactca

SEQ ID NO: 477460 - DNA, 595 bp, Homo sapiens
aaagaagcatggcacctaacacatggagtttacggtatagtaaaaagattatctatggaaaaataacatgaatatgtgcactattataaattcttatgctataaaaaatcaggttgttaggaagaagaacaaggaaaatccaatttagattggtattagacaagacctctcttagaaattacttcatagcacttaacatatattgataatgatgaagatagagattatatgtatctatcttcctatctattcatcttcattctttcctttcctttctcttctagctttgtcactaaggtattccagtacctagaataaagccttgtacataataggaagtcaagaaatacttgttgaataaatgaatgagtgaaaaattatytggacatttaaacttagccctaaagtgtggtgataagtcaggccataaatggagaaaaaccattccagattcaggaaaaagcatgttgaataatttcacagtaggagtaaacaataacttcctggccatattaaagatgttatatttatctcaagataatttttactttttaacaaagggatgacaatatccaaatttatatattttttaaaa

SEQ ID NO: 477461 - DNA, 619 bp, Homo sapiens
aatcctaaaagtcagtactcaataatgtggctttttaatcatgagcaacagtggctgccctttctgtcactatcttcaaactcaccagttctctctgcttgttagcgagttagctacttacaaagctacttctaggcaattgtgtttgacacctggcctcttagagttatctgcttcctacaatactgtaagatgcttggggyctagaaaccacatggagcaaccaccattcaatttccatgcggggatgatatttttctttgcacattcctcaatgtcagtggttcttgcactcccaaagccagaatatccatcagcatgattgatcttgttttcaccctagaagagtccttgacatcaatggagctttttaaagtactgacactttaactaatctggattgtggcctaggcaccttaaagctctccaagagctataaagattaagaaccactaatctagaagaatctagaggattccttaagaaatttttaaaaatatttgcataaaattcctaattttcaagcatgggaaattactggaagatacctgttgacaacagcatcaggaagatacatttgggaaaggacagtctcttcaacaatagtgctggggaaaca

SEQ ID NO: 477462 - DNA, 619 bp, Homo sapiens
aatcctaaaagtcagtactcaataatgtggctttttaatcatgagcaacagtggctgccctttctgtcactatcttcaaactcaccagttctctctgcttgttagcgagttagctacttacaaagctacttctaggcaattgtgtttgacacctggcctcttagagttatctgcttcctacaatactgtaagatgcttggggtctagaaaccacatggagcaaccaccattcaatttccatgcggggatgatatttttctttgcacattcctcaatgtcagtggttctygcactcccaaagccagaatatccatcagcatgattgatcttgttttcaccctagaagagtccttgacatcaatggagctttttaaagtactgacactttaactaatctggattgtggcctaggcaccttaaagctctccaagagctataaagattaagaaccactaatctagaagaatctagaggattccttaagaaatttttaaaaatatttgcataaaattcctaattttcaagcatgggaaattactggaagatacctgttgacaacagcatcaggaagatacatttgggaaaggacagtctcttcaacaatagtgctggggaaaca

SEQ ID NO: 477463 - DNA, 619 bp, Homo sapiens
aatcctaaaagtcagtactcaataatgtggctttttaatcatgagcaacagtggctgccctttctgtcactatcttcaaactcaccagttctctctgcttgttagcgagttagctacttacaaagctacttctaggcaattgtgtttgacacctggcctcttagagttatctgcttcctacaatactgtaagatgcttggggtctagaaaccacatggagcaaccaccattcaatttccatgcggggatgatatttttctttgcacattcctcaatgtcagtggttcttgcactcccaaagccagaatatccatcagcatgattgatcttgttttcaccctagaagagtccttgacatcaatggagctttttaaagtactgacactttaactaatctggattgtggcctaggcaccttaaagctctccaagagctataaagattaagarccactaatctagaagaatctagaggattccttaagaaatttttaaaaatatttgcataaaattcctaattttcaagcatgggaaattactggaagatacctgttgacaacagcatcaggaagatacatttgggaaaggacagtctcttcaacaatagtgctggggaaaca

SEQ ID NO: 477464 - DNA, 619 bp, Homo sapiens
aatcctaaaagtcagtactcaataatgtggctttttaatcatgagcaacagtggctgccctttctgtcactatcttcaaactcaccagttctctctgcttgttagcgagttagctacttacaaagctacttctaggcaattgtgtttgacacctggcctcttagagttatctgcttcctacaatactgtaagatgcttggggtctagaaaccacatggagcaaccaccattcaatttccatgcggggatgatatttttctttgcacattcctcaatgtcagtggttcttgcactcccaaagccagaatatccatcagcatgattgatcttgttttcaccctagaagagtccttgacatcaatggagctttttaaagtactgacactttaactaatctggattgtggcctaggcaccttaaagctctccaagagctataaagattaagaaccactaatctagaagawtctagaggattccttaagaaatttttaaaaatatttgcataaaattcctaattttcaagcatgggaaattactggaagatacctgttgacaacagcatcaggaagatacatttgggaaaggacagtctcttcaacaatagtgctggggaaaca

SEQ ID NO: 477465 - DNA, 507 bp, Homo sapiens
atccctgcctacttgcctatgcaatacatttgcatatcaccataggcactgtgaaaatggttagaactgtttgatccacaatcattcccttcttgctaatgtatctatcatgctcaacctccctcctagtttcctaaattcagtcagccatcctggccagcttacaaataagaaacatgattgacagctgtcttctctcaaacttctacggctattctctttaccttcccccttttaaaaatgtgcttcctcaatctaaattccattcrgtctagggattcctttcttcttcattgacaaactccccctctatcttctgtctcttccttaattgacctggcatgtcacattaacagacatggttttctcccttgaagatgtgtcccattgggactctggtggaaggaatcccattcacttatttgaagcaatacaggactttagttacccatctgcatttctgattttggtatcaattcatttatatcatgctttccacattcttgc

SEQ ID NO: 477466 - DNA, 599 bp, Homo sapiens
atcaccataggcactgtgaaaatggttagaactgtttgatccacaatcattcccttcttgctaatgtatctatcatgctcaacctccctcctagtttcctaaattcagtcagccatcctggccagcttacaaataagaaacatgattgacagctgtcttctctcaaacttctacggctattctctttaccttcccccttttaaaaatgtgcttcctcaatctaaattccattcagtctagggattcctttcttcttcattgacaaactccccctctatcttctgtctcttccttaattgacctggcatstcacattaacagacatggttttctcccttgaagatgtgtcccattgggactctggtggaaggaatcccattcacttatttgaagcaatacaggactttagttacccatctgcatttctgattttggtatcaattcatttatatcatgctttccacattcttgctttaatcactcctaaacttcaatgaatcaatctctctgtaataacaatcgtatggaaaggaaaatgaaaacttctgtttttattacaaatttaatagcaataataaagctaatttgtttggagattg

SEQ ID NO: 477467 - DNA, 573 bp, Homo sapiens
atatcttcaaaacaaagaacaactgtttttggaagttctgaaggtttggattgtgctactaactttttttagggcactattttgaactataaggagcttttcagctttggaaacacttggatgaaggaagaaaaaaaaaattaacttgtgaatccttctttccaatagcaaggaagcgatacattcttgagtaatgaagcatgttttgccagtcacaccatgcattygtttcctccacgcttctcttattgttccagtttaggatctaagagataataatcacaataaaaaatttgatttattttatacaataagatgcagttttaaaaaaggtaaaacaagaggtgatcttcaaatggagggtgaattgtggtcttagacaaaaactaaaagtgaatttatattttccacattattgagtataaactaatttacctttaatatcagtgaaagcttagcaaaaaaatgctaacagatctgaatgatttcactattaaaatgattacagtatttttaaaattttagagaaatttgtttcctaaatagatacaacatgtggaaaaaaagatagat

SEQ ID NO: 477468 - DNA, 456 bp, Homo sapiens
catatattttttcataagcaagtttttcttttaaaattttatgaagttaattataggtatcttttcacatttcagcttctgataaagtcttggtcataagaaaacagtgaggtaactgaattttkcttcaatttattttttcttcctaatcaccttgcaagtgggctttataatttcagagctagtaatagtgatgacatatttgtgctttattgctatggcaacagtgcttctcctgagacaagggccatgtatttttggttctctgttctaaaatcacatgtttaccaacagatacagctttgtgattgtggctttcaatttgattgccccgagcaatgtgttgtggatactactgtattgcccaggtcttcccatcaggattgaggctgttttcacccagttttaaggagtgctgttgtcaaaaaaaccttcaacagtcaaccctttggaatt

SEQ ID NO: 477469 - DNA, 580 bp, Homo sapiens
gtttctacatttttcttcaagaaatatcttaagaacattctttttgcacatcagcatttttgaagcatttctgatttatttcttgtgaattacatagaatctgttgcatcatcagaaaatattccaagcagaaaaaattgttactttgcaagtaggtggatgactgtagttttgaggaaatgttgcacttctacatcaggccattttggaggaagaaaacatatctgttgtttttctttaatttttcaggaaacaccaaatgagttttcaattagtattcatgaattgtctgcacaggtcagtaatcaaattattttttatgtgtcagcctactgaagaaaagtagaaaatcactgcttactttcatgtaaattcagttgttcagaggattgataatctacttgggaagacataaaccattcattttttaattcttgtctgctggttattaatgcttccrttacaggcaagaaagtgagctatttctccagctcacagttatagtaagaggtataagggacaaaagaagcattattaaaaacttcccacctgagattagatttttttaaggcttctctta

SEQ ID NO: 477470 - DNA, 580 bp, Homo sapiens
gtttctacatttttcttcaagaaatatcttaagaacattctttttgcacatcagcatttttgaagcatttctgatttatttcttgtgaattacatagaatctgttgcatcatcagaaaatattccaagcagaaaaaattgttactttgcaagtaggtggatgactgtagttttgaggaaatgttgcacttctacatcaggccattttggaggaagaaaacatatctgttgtttttctttaatttttcaggaaacaccaaatgagttttcaattagtattcatgaattgtctgcacaggtcagtaatcaaattattttttatgtgtcagcctactgaagaaaagtagaaaatcactgcttactttcatgtaaattcagttgttcagaggattgataatctacttgggaagacataaaccattcattttttaattcttgtctgctggttattaatgcttccgttacaggcaagaaagtgagctatttctccagctcacagttatagtmagaggtataagggacaaaagaagcattattaaaaacttcccacctgagattagatttttttaaggcttctctta

SEQ ID NO: 477471 - DNA, 551 bp, Homo sapiens
gtactgagcagtggggaagggaagtggatgaactggagagataattgagatgccaagcattgagtcaaggtgaagctggggtttctggtgtaggaaaccacatggagggcttggcattagcccgaagtagagcaggatgggtgtggagtgtggttggacatgttttaagtgcttgtgcagcagcccagatagggacaccagtgagttgctgaaaggtacatgtcagaagctcagaggctgggtgtggtggctcatgcctgtaatcccaacagcttggtaagtgggtgtatcacttgagctcaagagttggagaccatcctggccaacatggtgaaaccccatttctattaaaaacacaaaaaattagccgggtgtagtsacatgcgcctgtagtcccagctactcgggaggctgaagtgagaggactgcttgagcccagaaggcggagattgcagtgagatgggattgtgccactgcactcccccgcctgggtgacatgggatggacgaagttgcttggagaaagtagactgagaagaggatcaaagacca

SEQ ID NO: 477472 - DNA, 475 bp, Homo sapiens
cccgagcaaccagaaccaagattctcttgtgccagcctctttctctcacccaagtctcatctccatttatttttgctttgttgtattcttcacttttacttatggactttctccacgtatgccaggggctttagatgcctcagccctaacttcatatcttcccaactctggaacccataggcaaggctattctccctcagctccaaatcaagaaaccctggrgaaggatctcagtttgggtcacctgcccacctctggaccaatgtctgtgcccagggaaatgcatatctaggcctgggtcacatgctgacttctgtggctgagtgaagggaggcaggatgcagcatgctaccagaagggaatggaaaactagttttgcagcccaaagtactatccagagtcccctacaaagagggggaaaggatatacacacctaagtatgcaggagaatgcctaaggcagactttgagctgtg

SEQ ID NO: 477473 - DNA, 581 bp, Homo sapiens
actaatctagtaaatctgacaatggggcagaccttttctgatcaggaatgagctaagtgtggaagagcaaatactgaaccaacccatgtgccccattgccatcttccctgcataaagcactcttgggactccttccccactgagcctaactcagcttcttgctcctcaagacagtgtcctaggcagcctcacttgccatcctggtctgggtacccacgcatgcttgaaggcctataccaaattacctttcaagattccttctgaaatccctactgtgtgccmaatagttggtccttgatctatatttcctttttccctgtattcccagggaagccccagtgtgacttaaaaatcccaaagtgaaaataatgtgcttctgtataaagacagatgagatctgaaaattcagaataaatactctgaatataatgatccaacttccagttcctcaagaatcccaattcccttcccaaggcccagaatcgagaggagaacatccttagtgcccaagtgcacccccctctccttacttcttttcgggggttggaaaaactcccccagactaagaattctggtaacca

SEQ ID NO: 477474 - DNA, 581 bp, Homo sapiens
actaatctagtaaatctgacaatggggcagaccttttctgatcaggaatgagctaagtgtggaagagcaaatactgaaccaacccatgtgccccattgccatcttccctgcataaagcactcttgggactccttccccactgagcctaactcagcttcttgctcctcaagacagtgtcctaggcagcctcacttgccatcctggtctgggtacccacgcatgcttgaaggcctataccaaattacctttcaagattccttctgaaatccctactgtgtgcccaatagttggtccttgatctatatttcctttttccctgtattcccagggaagccccagtgtgacttaaaaatcccaaagtgaaaataatgtgcttctgtataaagacagatgagatctgaaaattcagaataaatactctgaatataatgatccaacttccagttcctcaagaatcccaattcccttcccaaggcccagaatcgagaggaraacatccttagtgcccaagtgcacccccctctccttacttcttttcgggggttggaaaaactcccccagactaagaattctggtaacca

SEQ ID NO: 477475 - DNA, 533 bp, Homo sapiens
ctgtgccaccaggtgacgcacactgaaccaccctgacagatatagcacgtttatactccaggaatgaatggaggaaagagcagcagcctgttttcctcaggcttcagaggcagaacagayggggtagagagaggctgagacagggtttccgtagctttacgttgccaggttggcctgatgaattcagaatttagcaattctgagttctcttttgtttcagcttaaagattaaagcataaaatggttgcatctcaaatagaaggttcttggaatttattgctgttcataaatcctgattgatcttgggaaaccaaagcagaatttcccttccaaagatactcactgggatccctcattttgccagcagctattatagtaaaggggcagagaccccctggacccccaaccccgagatctgccacatggagtggcgggatacctagctacaattctgtgttatagatggagctggtcttgtctgaaagaggaatcattcatttttggttccccttccctcttgtccaggctttgtc

SEQ ID NO: 477476 - DNA, 533 bp, Homo sapiens
ctgtgccaccaggtgacgcacactgaaccaccctgacagatatagcacgtttatactccaggaatgaatggaggaaagagcagcagcctgttttcctcaggcttcagaggcagaacagatggggtagagagaggctgagacagggtttccgtagctttacgttgccaggttggcctgatgaattcagaatttagcaattctgagttctcttttgtttcagcttaaagattaaagcataaaatggttgcatctcaaatagaaggttcttggaatttattgctgttcataaatcctgattgatcttgggaaaccaaagcagaatttcccttccaaagatactcactgggatccctcattttgccagcagctattatagtaaaggggcagagaccccctggacccccaaccccgagatctgccacatggagtggcgggayacctagctacaattctgtgttatagatggagctggtcttgtctgaaagaggaatcattcatttttggttccccttccctcttgtccaggctttgtc

SEQ ID NO: 477477 - DNA, 490 bp, Homo sapiens
gtgtcatgcaacaaggtaaaggtgagatggaaaacaggattgaggtcttcttcagggaccaaagccaagtacaatattggtttagttcaaatttggattaactttggtgtattatttttgtttgtttgggagtgttttgttgttgtcattgttttaagaaaatggctgtttgtcggccgggtgcagtggctcacgcctgtaatcccagcactttgggaggccaaggtgggcgtatcacctgaggtcaagagttcgagaccagcctggccaacatggtaaaaccccatctcctctaaaaatacaaaatgagtcaggcatggtggcacgtgcctatagtcccagctacctgggaggctgaggcaggagaattgctggagcccaggaggcagaggttgcagtgagcygagatcgtgccactgcactccagcctgggcaacagagcaagattccgcgccccccaccccccaaaaaaaggctgtttttcatgaca

SEQ ID NO: 477478 - DNA, 619 bp, Homo sapiens
ctggtagaaaaggtccaggaaaaacactgcccaacaccaggaagaacaggccccggyggcagatacggaggcacgtccaggtggtgcagcctgcatttgtagccttctccctatccttccccagcttatgtccagttctgctccagatcttgaagctggaagcaaatgggctgttccacaactgactcaggctgaaggtcatatggccctaaagtgagccggggagacctgcggaccaagagtgacccaggattcaatcaggtcatttttcagaacatcaggggagaaaatgctctaggcctctacacaaacacaccctggaatgaagtgtaactgggccacactctctgggatggcatggtagtaatctaggaattctgatcttccttttatctctcccatgtgaccatccttttcaatttctactgcctttctcccctaaggcctttgtcccctctctcttgaactactcctacttcccttgtttcctgactttcccctcagcaacccatcctaataccaagccacccctgtactattctcccaaaagtataaactcatcagactatcaccccatttaaaatatcccagcctgcagaatcaagtccagattccttag

SEQ ID NO: 477479 - DNA, 395 bp, Homo sapiens
ctggctgaaattccctggtccattctaccccactgccagagcttctggcagcctgccaaaggyctccctatgggctgcagaggagcaggcttagctacttctttagcctcacctcacctttggactctgctctaaccaggcacattcaatttctcaagcctttcacaccctcttgcatctgggccctgcgcttcagcctcacagggaattccctgtgccatatgacagaaagaaaaaattcaagcctgctttacagatgactctgcaccatctgctcaccgtggatggctatatagtcaggggtgaccctaggagagcgggaaagtgaaattcccctgcaggcaggactttgagcagggcacttagcctggagggagaaatgccctaagttaatg

SEQ ID NO: 477480 - DNA, 478 bp, Homo sapiens
ctcttgccgtatctccctgcttttctcacctcaacgctctaggtctaggcaggggaaggtctagacagaaaagaggactcctgagatgtctcatgagaactgtgatgaaggaactccttttccctgcttccagtgcccatagcacggagggcatccccttctcccaacatttcacacctgacctgactccagccaacccrctcgaaaatacacagtgctacttacatattccttaatgtcctttgatttcacagccttgtaggaataatacgcagggtaaagggtgccaaatataagcctggagggaagagagacaaaaataaatacgatttttcatttatcttatttaatggaaaatgtctgtcttcaatgccaagagcaactctctaagctacagaaagtgctgctgtggggcttgatttatttttatgaatgccctgaaggtgttctgctcgtggctggggcatccttgggcacc

SEQ ID NO: 477481 - DNA, 478 bp, Homo sapiens
ctcttgccgtatctccctgcttttctcacctcaacgctctaggtctaggcaggggaaggtctagacagaaaagaggactcctgagatgtctcatgagaactgtgatgaaggaactccttttccctgcttccagtgcccatagcacggagggcatccccttctcccaacatttcacacctgacctgactccagccaacccgctcgaaaatacacagtgctacttacatattccttaatgtcctttgatttcacagccttgtaggaataatacgcagggtaaagggtgccaaatataagcctggagggaagagagacaaaaakaaatacgatttttcatttatcttatttaatggaaaatgtctgtcttcaatgccaagagcaactctctaagctacagaaagtgctgctgtggggcttgatttatttttatgaatgccctgaaggtgttctgctcgtggctggggcatccttgggcacc

SEQ ID NO: 477482 - DNA, 592 bp, Homo sapiens
gggaggcctttcctgacctggtcaccccccctgacgattgggctcctctccgtttttagctcctgtacctgcccctttcttagctcttgtccactgtatccacttggtcagctcagggtgcrtctctcccacaagactgtgttccacaaagccagagatggtgtccctcattcataacacacccctgtgccctgcacagcaggaagggctcagtaagtacgtgttcactgtgtgaagtatcagaatggggaagccaaagccagcaccatccagggaacgctcgtgaccttgggactgaggtctcggtagcgaggtggacgccagacagcaccaggctgattcagcaaagcctcgggcacaacgccatggactggggggaaataaatacaccactcctcaggcacaggtgccatggttattacccatgtctgccaggatggtttccagcccctgccctgggacagcatgtgagcagcagaggagagacaggtgggaagtacagcgctacccaggagctgattgatgggatccccgtgaacccgtgggtcgtgacaccctctgaatggtcacagagcagggaaggcaagacagg

SEQ ID NO: 477483 - DNA, 666 bp, Homo sapiens
gtcccctgattaagccacattcacttgcaatctgtgactttctggctgctctttcttctgtctgaatgttagcacaggatctttcccaatcccacaactcttttgtttttcctgataaagcgccactaatcctttaagacccatctcagaaatgccacttcttctgtgaagcctttggttactgccccctcagttttcttgatactatttaagcctgtgacaggccttatgtagtagcagcaataataaaacatttaaaataatattattatatcattgagtgttcactaatgccaggcactgttctacaagctgtactcactctttcaattaatcctctcaaatacatagggaaaaagaattcttactaccccattttacagactgggacaccgaggcttagcatcattacttacccaaggagacacatcagccaggtgcagagctgggatctgaacccaggcagcctgacaacagagcctgccttctcccggggctgcctgtgctggctgagtctgtctccctagtcagatcatatagtcctgggcaatcaggagggtccctcgtgcctggcacagcacctccccctttaagtgggtgcttgaaatgtctgttgagtaacaagyaatttcaatctgtctccaaggaactcagcccacttgctag

SEQ ID NO: 477484 - DNA, 632 bp, Homo sapiens
taccttcctgatgtcagaaggtccatgtgtggcaaaacaagccttcccaaaaccataatccatctccaagacccactgatcctctagccctgaaaggactgtctcagatamgctgtgggcctgggatctaagtgcttgagaaactctgacctttaccatactgccccagggaacatcgtcactcacgatggttctctagaagcttaatctgggaaaagagatcctccgtctgagcacacagctcaggttcccatagcacagcaaaccacttgggctttggttgccatgggtcccaacccctgggcttctgcttactcacagtgactttctaacaggctggagggagaaaataggaaaacagcagaactggcccactatgcattttggttccctaaagactgtattattgtgacttataagccatttatttttgagtgctcacttttaaccttcatgtgagacaggtattatcattttcctcataataatgagaaaacaggtttagtgaaaataaataattgagtctcacaattaggggaggaggccaaagtcaaacacatgtctaactccactgcccatctcctcactgctatgacacactgccttcctgactctgcagtacatggctgaga

SEQ ID NO: 477485 - DNA, 632 bp, Homo sapiens
taccttcctgatgtcagaaggtccatgtgtggcaaaacaagccttcccaaaaccataatccatctccaagacccactgatcctctagccctgaaaggactgtctcagatacgctgtgggcctgggatctaagtgcttgagaaactctgacctttaccatactgccccagggaacatcgtcactcacgatggttctctagaagcttaatctgggaaaagagatcctccgtctgagcacacagctcaggttcccatagcacagcaaaccacttgggctttggttgccatgggtcccaacccctgggcttctgcttactcacagtgactttctaacaggctggagggagaaaataggaaaacagcagaactggcccactatgcattttggttccctaaagactgtattattgtgacttataagccatttatttttgagtgctcacttttaaccttcatgtgagacaggtattatcattttcctcataataatgagaaaacaggtttagtgaaaataaataattgagtctcacaattaggggaggaggccaaagtcaaacmcatgtctaactccactgcccatctcctcactgctatgacacactgccttcctgactctgcagtacatggctgaga

SEQ ID NO: 477486 - DNA, 632 bp, Homo sapiens
taccttcctgatgtcagaaggtccatgtgtggcaaaacaagccttcccaaaaccataatccatctccaagacccactgatcctctagccctgaaaggactgtctcagatacgctgtgggcctgggatctaagtgcttgagaaactctgacctttaccatactgccccagggaacatcgtcactcacgatggttctctagaagcttaatctgggaaaagagatcctccgtctgagcacacagctcaggttcccatagcacagcaaaccacttgggctttggttgccatgggtcccaacccctgggcttctgcttactcacagtgactttctaacaggctggagggagaaaataggaaaacagcagaactggcccactatgcattttggttccctaaagactgtattattgtgacttataagccatttatttttgagtgctcacttttaaccttcatgtgagacaggtattatcattttcctcataataatgagaaaacaggtttagtgaaaataaataattgagtctcacaattaggggaggaggccaaagtcaaacacatgtctaactccactgcccatctcctcactgctatgacrcactgccttcctgactctgcagtacatggctgaga

SEQ ID NO: 477487 - DNA, 602 bp, Homo sapiens
ttgtttagaaaataaagatatttctctcaactaccacagaatgagaattcctctttaacaactgtgccatttgcttttgcagatctgaagagaatagataaaactaggtcactaaggagaaaaaaattccaagacaataacagaaagaggtagctctgagcatggaaatgtaagaagttttatttgcttcagaatgaaaacaatatacattctttccatttatgagcctcaaatggccacaatcataggtgaccataagggaaagtccaagtgaagaatgtcctattatccaggaatcaagactaaaaaggaaagcttcacactttggggaaaaaaagttaccagtatagcactcctcagtaattagcactggttacaatacaatgcacgctctgtacacagcttttagcagtttatatccatttgcacatacaaaaactctacgaagtagacatgattataatttccrtttcacagactggaaatgtggatcagagaagttaaatagttggactaaggtcacacaccaagtttgtagcagagccagaactagaatgtgagatttcaaagcttaggtactaaaccatggatgctccaacttc

SEQ ID NO: 477488 - DNA, 660 bp, Homo sapiens
tggtaaaggctgagctattccatttgacagcattacagaaaaaagggggcaagcatatttgatgtgtgaatggcacttttaatatgacagaacacagaccatgttttaaaaggttgatgcccagactaggcaacatggtgaaactccatttctactaaaaatacaaaaaaaaattagctgggcgtggtagtgcacgcctgtagtcccagcagtctcagctattcaggaggctgaggtgggacgatcgcttgagcatggsaggcgaaggttgcagtgagctgaggttgcaccactgcactccagcctgggcaacagagggagtggtagaggagtaacaactaggatttctccttgtggtttcagaaccgccctgggtctgcttccctaaggagcttgccgtgacaactggaagggcatgtacagcagggaactggtctgaagagctggagtgaggcttgagcgctgtcactcaccagtggaccctgggcagtcactcagcctctctgctcttctgttcctcacttgtaaagtgggaagtgtcttggtagaggttcttttggttataagtaacagaaatggactcaaactggcataagcagtaaagagaatttgtggggaggacacgggtgcagggagggtttagcatacaaaccccaaggc

SEQ ID NO: 477489 - DNA, 661 bp, Homo sapiens
taaaacaaacaacaggcatggtcaaacaaatgaccataaacaagcaaaattccactaaataaaagaagaaataagcaaggatatagaaaaaaattggaaaaatggtgttaataagctacgttgcttgttctgttccatgacaataatctgagtatttatgtctgtcaagaatagttattagcactttcttggacacaagcattgtgatctaaattaataagcacacataatttagtcccatattttcattaatttatagtttactgatttgagaacagagacattttatatataggaccaagaaatatgttgcatatccttctcgttttttggaggcaaagcagtactataaaatatcatatttccctatcattttttgccatcattataccacagaaaacaggttgatgcagtgaaacttgcaaattccccataycatgtataattaatcctctaagaaagagctgaaagaaaatagtataataaatgtaaaggagaagtcaatgctataaacatctaatttcatgaaatgaaatatttctactttttaaaataaaagctcttttattactagaacactttggaagtgatgttgtctccaatttcaaaggaaaagagcgtaaaacaaaacagagaaaagaaatgtaatagcaaattaatg

SEQ ID NO: 477490 - DNA, 661 bp, Homo sapiens
taaaacaaacaacaggcatggtcaaacaaatgaccataaacaagcaaaattccactaaataaaagaagaaataagcaaggatatagaaaaaaattggaaaaatggtgttaataagctacgttgcttgttctgttccatgacaataatctgagtatttatgtctgtcaagaatagttattagcactttcttggacacaagcattgtgatctaaattaataagcacacataatttagtcccatattttcattaatttatagtttactgatttgagaacagagacattttatatataggaccaagaaatatgttgcatatccttctcgttttttggaggcaaagcagtactataaaatatcatatttccctatcattttttgccatcattataccacagaaaacaggttgatgcagtgaaacttgcaaattccccataccatgtataattaatcctctaagaaagagctgaaagaaaatagtataataaatgtaaaggagaagtcaatgctataaacatctaatttcatgaaatgaaatatttctactttttaaaataaaagctcttttattactagaacactttggaagtgatsttgtctccaatttcaaaggaaaagagcgtaaaacaaaacagagaaaagaaatgtaatagcaaattaatg

SEQ ID NO: 477491 - DNA, 651 bp, Homo sapiens
atatgaggaactgctgtctctttatgattatgctatagccttgttgtagtctgtcctcttctaggtaatatttactaagatgctcttccatagcattttccgttttctgacagcatctaatctacaaccaattcttggcttcttgaactgtctccaagatgacctaatgcactccaatctgaatcccaagggccaatctgtaactccttatttagaaaggctcactctctcactgagatgccccaagttattccatgatgtggagtctctctcactgcaagaaataagaaacccatcttgttgactccaggtgtgttccaggtggtctttgtctagaggtgcatagttgactgtcctgcactaaaccttgtgtgtagcccttagagtgaggaagatggtaccatccagtatggaggtatcacttgtgaaagggaatttttttcctgcgctgctrttaagacagcctagcatatagcaagtcttcaatatatctttgtaaaaagaatgaagtagctttcagtcaactggcgttcccagaatgtaaataatttgaaagtgctcagcaaggagccagacacatacagtgcatacaactaacaataactcttatttcaattgggcttaattcatctatagttgtacagatatgta

SEQ ID NO: 477492 - DNA, 594 bp, Homo sapiens
attgctaagaatctgacaaaataagaagagttcatataacctcatggttttagtttaggatgacttaatrcctcccctttatttcacaatagggacggaattgtctgctgatagatggacatttccaacttttgccttttgagatttttttgatactctctactcccttttctagttgatacattatttctatagataggtcaaatattcagtcaactataacaacactggaaccattttgtctctttagttttactttttgcaatttgttagatatcttctatgttaatcttttagtttatgtttcagaaaacattcttatttccttcacatccagatcttgccagcatattacactaactatctggtactaacatgtggtaacatcgctaatttacacctcaggagactcagagtttaagtaacttttaagtaacctgtccaaagttacacagctagtaagtattaaagatgagagctggattcaaagtccatgctgcttttgttagattgcactatctataattatagttaccctagttgtggctcttcaacattagaaatatgaaagtcctgtctctattattccctctg

SEQ ID NO: 477493 - DNA, 596 bp, Homo sapiens
attgctaagaatctgacaaaataagaagagttcatataacctcatggttttagtttaggatgacttaatacctcccctttatttcacaatagggacggaattgtctgctgatagatgracatttccaacttttgccttttgagatttttttgatactctctactcccttttctagttgatacattatttctatagataggtcaaatattcagtcaactataacaacactggaaccattttgtctctttagttttactttttgcaatttgttagatatcttctatgttaatcttttagtttatgtttcagaaaacattcttatttccttcacatccagatcttgccagcatattacactaactatctggtactaacatgtggtaacatcgctaatttacacctcaggagactcagagtttaagtaacttttaagtaacctgtccaaagttacacagctagtaagtattaaagatgagagctggattcaaagtccatgctgcttttgttagattgcactatctataattatagttaccctagttgtggctcttcaacattagaaatatgaaagtcctgtctctattattccctctgcc

SEQ ID NO: 477494 - DNA, 593 bp, Homo sapiens
gctaagaatctgacaaaataagaagagttcatataacctcatggttttagtttaggatgacttaatacctcccctttatttcacaatagggacggaattgtctgctgatagatggacatttccaacttttgccttttgagatttttttgatactctctactcccttttctagttgatacattatttctatagataggtcaaatattcagtcaactataacaacactggaaccattttgtctctttagttttactttttgcaatttgttagatatcttctatgttaatcttttagtttatgtttcagaaaacattcttatttccttcacatccagatcttgccagcatattacactaactatctggtactaacatgtggtaacatcgctaatttacacctcaggagactcagagtttaagtaacttttaagtaacctgtccaaagttacacagctagtaagtattaaagatgagagctggattcaaagtccatgctgcttttgttagattgcactrtctataattatagttaccctagttgtggctcttcaacattagaaatatgaaagtcctgtctctattattccctctgcc

SEQ ID NO: 477495 - DNA, 493 bp, Homo sapiens
aaataaaagataaataaacctaactgtgcatcagggatacctgataatattttaaaaaataggaatgtcttgtccctactttccragcatctgattcggctgatatgctgtggataccaagaatctgtattatttaaaatgctcaacacatgattcagatgtacagccagagtcaaggcccatggaagtagagcatgatacatgtcctaagaggaatgctgtgtactaagggatttggaggagagcgagagttcttctgggtaggggaatttggaggagccatcactagaaggatacttccccttctgtggacatgtaaaatttatctttgtgttggtggctctggccatatttctgttagagcttgttgctatctaaagtgtgtattctcagacttagggttaaccttgaggttctaatcagaatatcatggttctgtttttaaaggttgtataacaaatattttctcatcatgctctttatccaaatggtt

SEQ ID NO: 477496 - DNA, 493 bp, Homo sapiens
aaataaaagataaataaacctaactgtgcatcagggatacctgataatattttaaaaaataggaatgtcttgtccctactttccaagcatctgattcggctgatatgctgtggataccaagaatctgtattatttaaaatgctcaacacatgattcagatgtacagccagagtcaaggcccatggragtagagcatgatacatgtcctaagaggaatgctgtgtactaagggatttggaggagagcgagagttcttctgggtaggggaatttggaggagccatcactagaaggatacttccccttctgtggacatgtaaaatttatctttgtgttggtggctctggccatatttctgttagagcttgttgctatctaaagtgtgtattctcagacttagggttaaccttgaggttctaatcagaatatcatggttctgtttttaaaggttgtataacaaatattttctcatcatgctctttatccaaatggtt

SEQ ID NO: 477497 - DNA, 493 bp, Homo sapiens
aaataaaagataaataaacctaactgtgcatcagggatacctgataatattttaaaaaataggaatgtcttgtccctactttccaagcatctgattcggctgatatgctgtggataccaagaatctgtattatttaaaatgctcaacacatgattcagatgtacagccagagtcaaggcccatggaagtagagcatgatacatgtcctaagaggaatgctgtgtactaagggatttggaggagagygagagttcttctgggtaggggaatttggaggagccatcactagaaggatacttccccttctgtggacatgtaaaatttatctttgtgttggtggctctggccatatttctgttagagcttgttgctatctaaagtgtgtattctcagacttagggttaaccttgaggttctaatcagaatatcatggttctgtttttaaaggttgtataacaaatattttctcatcatgctctttatccaaatggtt

SEQ ID NO: 477498 - DNA, 626 bp, Homo sapiens
taatagcaaagagagatgagaggcaagaatggccaacacattgatttcatcgtgttcagactaatgatctaaaagtaacctggaatttctgatgcttatttaaattttcccaatttttagactaccagtctcattaagacatcaaaataacatccatcagcatgtawctttttttttcttttcttttcttttttttcttttttttaagatagagtcttgctctgtcacccaggctggagtgcagtggcgtgatctcggctccctgcaagctccgccttccaggttcatgccattctcctgcctcagcctcccaagtggctgagactacaggtgcccgccaccacacccagctaattttttttttttttgtatttttagtagagacggggtttcatcatgttagccaggatggtctcgatctcctgacctcgtgatctacccacctcggcctcccgaagtgctgggattacaggcgtgagccaccgcacccagcccatcagcatgtatctttagcatgtatgtgccaaaagaagatctgtttaacttgtttcctgctgtatctctagtgctcaaaatataatgagctcaatatgtacttgttaaataaataaatgaacattattata

SEQ ID NO: 477499 - DNA, 520 bp, Homo sapiens
tgttacaagaacatacaattcagccttcagtccttggatgcctgaacaccgtttcaggtggttcccttctttcctgggtagcagtgaacttgttgaaggcagggttgagccacctgaataggcaggacataaatatttaataagcatttcctaatcgacttttccagaatacacacaggaatgagttggacagtagacatagctatgtagaggctttgaaaagagatttataaggcaggatctggaagctgtgagcagttttgttgtttgttttctaaagaggattycaataatgctcataagttgtgtgtgtgttgttcattgtacagtgttctcagtaacgtgtcatctgtcaggaagctttagaatgtgactataaaacaatatttcagattttcacagcatgtgcaaggtttccatcttttgggtctctcacttacattctgggccaatggacctaaaggcaaggtggggaggaaaacccgagtataccactaagctccaggggccaatttctgct

SEQ ID NO: 477500 - DNA, 630 bp, Homo sapiens
ctctaaaatggactaatgctctctgcagtattttggcaagtgactttggcagcctccactgtcagggtcctttgttcttgaaccctggagtttaggtcatagagacaatctcatttcaggaaagaaaacattctttcctagagctgacaattggaaacccacaagaaactcagctgcatatattggtgtggagcctagagaggatcatgagacactggtgagaaatggaagtagcaggagcatatgagaacatgtgcagcaacacttccttccactgttcctctaaaytggtattgcagaggttaaggaagaattatgatgtccccggggtggtctaaaagcactaagaacatgcagttaccagttagtttttgtaaaacaactttcttgtggtgtatagaagtggattgtatatatacacacacatatttaatattcactgagcctttattatgtgccaaatgcttgcgagtatacttccaaaaactgaggatactgagggtctagattgaagctaaaagctgaatagaaatggagggtgatttggttatttatccctgtataacaaatgactctgaaaatgtaatagctgagaacaatgaccatttatcatctttcacaattcggtgt

SEQ ID NO: 477501 - DNA, 630 bp, Homo sapiens
ctctaaaatggactaatgctctctgcagtattttggcaagtgactttggcagcctccactgtcagggtcctttgttcttgaaccctggagtttaggtcatagagacaatctcatttcaggaaagaaaacattctttcctagagctgacaattggaaacccacaagaaactcagctgcatatattggtgtggagcctagagaggatcatgagacactggtgagaaatggaagtagcaggagcatatgagaacatgtgcagcaacacttccttccactgttcctctaaattggtattgcagaggttaaggaagaattatgatgtccccggggtggtctaaaagcactaagaacatgcagttaccagttagtttttgtaaaacaactttcttgtggtgtatagaagtggattgtatatatacacacacatatttaatattcactgagcctttattatgtgccaaatgcttgsgagtatacttccaaaaactgaggatactgagggtctagattgaagctaaaagctgaatagaaatggagggtgatttggttatttatccctgtataacaaatgactctgaaaatgtaatagctgagaacaatgaccatttatcatctttcacaattcggtgt

SEQ ID NO: 477502 - DNA, 414 bp, Homo sapiens
cgtcgccccggcagctgaccctcgcctggcgygctcagggagcgaaggaggcggcggctagaccggcgggcgggcgggccgcagtggagcggagtccgcacgtcacgctcggagaagtgcctccgcgagcagccgcctgtaccagcctggccgcgcagcctgacgtcacaaagccagccacgcgcctgcgcggcccacaggccccgcccctggacacgcccttgccacctttctttttggcaggtaagacgcgcatgcgcgggagaggaggcgtgggggtcgaggctgatgcgctgtctccgtccgccccctactggtgagtctgaaaatgaagacaaagggaggcgatggacggtagcgacggttgcagacaaagtgaatgtatttaacgccgctgaactatacatttaaaaa

SEQ ID NO: 477503 - DNA, 403 bp, Homo sapiens
tgttccattgttgggcattttacagtcttccatttagctttagaataaccgtatgaaagagctactttttgtttttgcaaaccagtttttaacaccaattagtttgaaggcaggtttgctgtgtgacatttttgtaccacagaatcaaattaggcagttaagattcaggtttctttaaaccaagttagtaactaatctcacaggtttaatacattttttcccacaaaatacataatttgtatggattttgtgaaccatacaatagaacctaaatttattcaatgtagattgaagttttggttttgtaaaatgtatccactgtgtctaatcagaaaaaaaagtttasttttgcttctgtatcagacaactaagtgatttatttaccaaagctaattagagcagt

SEQ ID NO: 477504 - DNA, 616 bp, Homo sapiens
gggctagactcctgtgatggtagataaaaagaaaaactgtggtgttcagcttggcagttttgagtttcaaaaggcctcagcttttgtgaggttggctgttacaagtgcagccagagagcaccaggcacacacatgtggttccgcagaactagagttgttactcttcgccgcgagggaaacacgcacctggggrctgtgggaattcggccctcactcttactggccgggagcaggggatatttggtgatttttgtggtttgtatgatgatcttggatttgtcactacttagaaacgattatgagttgttttttttaaagtttacttacttttggtcctatttcagcacagtcacacaggtgaccttctctgatgttagtgttctgcgagattattctattcaatagtaacacctccaccagggcgaagctgcgagtgccaggctggttctcatacgtcagggctgcctgacccttttacaggattacaggcgtgagccactgcgcctggccagaatgtctgtgtgttttaaaattccaaacttgaaagtaaaatccaggtggatagcatttggaagagaataaaacgaagtagaaacaacactacttttttgtagtg

SEQ ID NO: 477505 - DNA, 616 bp, Homo sapiens
gggctagactcctgtgatggtagataaaaagaaaaactgtggtgttcagcttggcagttttgagtttcaaaaggcctcagcttttgtgaggttggctgttacaagtgcagccagagagcaccaggcacacacatgtggttccgcagaactagagttgttactcttcgccgcgagggaaacacgcacctggggactgtgggaattcggccctcactcttactggccgggagcaggrgatatttggtgatttttgtggtttgtatgatgatcttggatttgtcactacttagaaacgattatgagttgttttttttaaagtttacttacttttggtcctatttcagcacagtcacacaggtgaccttctctgatgttagtgttctgcgagattattctattcaatagtaacacctccaccagggcgaagctgcgagtgccaggctggttctcatacgtcagggctgcctgacccttttacaggattacaggcgtgagccactgcgcctggccagaatgtctgtgtgttttaaaattccaaacttgaaagtaaaatccaggtggatagcatttggaagagaataaaacgaagtagaaacaacactacttttttgtagtg

SEQ ID NO: 477506 - DNA, 585 bp, Homo sapiens
tctcaaagggtacagcgtccrttatgtggttccttacaggctaatccagcattttgacagggtagtgagtgggtgtcaatacgaagacatgtcctattgggacacagggtctgagaaggtgtggctcttgcagttaactgctccctggagggctcatcacagacagagggtctccggccaccccccacacacccaaagacaccaggttctcaaacgcggttttatgggaacagagggaccggctccatcagaagcatttactgaaacagaagaaacagaccaaaccagatcccctcggcttactgaaaagtaggttgagaaaagctctgccgtactcgaaaaagcaacccgagtatggtcgtctttcccaatgcaacagcacaagagcttgattctggtttcccacacgcttgtagctgctgtcttgaggccattaagtaactggcttgaatcatgactatccaggtggctggggccggcagaggaatatggagccattttccccccaagagggtcaaagacaatgataatggaaaccactgtggcagcgatgatgatccaactgcaagacagagagaggaaaag

SEQ ID NO: 477507 - DNA, 497 bp, Homo sapiens
tctccattatttcatcttgctcacataaatattgtcaaagcactcacctttcttttcccccagaggaggaagtagtcgataaagaatatgctacaccttttctttctttcaaagaacaggtagctatttttcatgaaatgtctcccttgtaaatttctttatatttccttttaataattaatctagtctttattatttaaaaagcagtgtcatcctctttggaagatwtgttctatgttacaatctcatgaattcttaccactcatagaaagggaaactattataaagagttgagaaggaccaaagttgaggaaaataacactactttatctgttgtatttcttctctttcatttaggacaactgtgtaaggttttacattttatataaatatctcaattctatgttaacatggttctatatttcatgcaactcaaaacaaacaagtaggtaataatactagcacatattttctaaaatacaaaaatagatatttaa

SEQ ID NO: 477508 - DNA, 589 bp, Homo sapiens
gtaccctacaccttcctgcccactaagccatgctgaaaatacagaaatctgaacagcctcttgtaagtggagttcagctttgcatgtttggtagtactagcattttttctgtaatataaaactgtgtgaggatgtttcattctgattctacttcctktctctacttccaattttacaatttattttcatttttacttagagtgggtgtgatatgggctgggttgtaaagcatctgcacaagtgtagcctcatgtaatgttaactagtttattaaataaggcatactatgtgctagccaccatcctaagtgcttgtgttgtggtatatattatatatatgtatatatttatatttatatatatatattttttaaatgaccacaatatattgaatctcctatcaagaagtagtgtctattactttacctcttcactctggacttggtcatatggcttgcttaaaccagtgagatattagcacatgtgtcgtaaggcttgaaaagtgcttgggcacgggtgtgtgaccttgcgtttccagcctttagaacccagtcacctcgtgaaaaagtccagtgaggctactacatgcg

SEQ ID NO: 477509 - DNA, 589 bp, Homo sapiens
gtaccctacaccttcctgcccactaagccatgctgaaaatacagaaatctgaacagcctcttgtaagtggagttcagctttgcatgtttggtagtactagcattttttctgtaatataaaactgtgtgaggatgtttcattctgattctacttcctgtctctacttccaattttacaatttattttcatttttacttagagtgrgtgtgatatgggctgggttgtaaagcatctgcacaagtgtagcctcatgtaatgttaactagtttattaaataaggcatactatgtgctagccaccatcctaagtgcttgtgttgtggtatatattatatatatgtatatatttatatttatatatatatattttttaaatgaccacaatatattgaatctcctatcaagaagtagtgtctattactttacctcttcactctggacttggtcatatggcttgcttaaaccagtgagatattagcacatgtgtcgtaaggcttgaaaagtgcttgggcacgggtgtgtgaccttgcgtttccagcctttagaacccagtcacctcgtgaaaaagtccagtgaggctactacatgcg

SEQ ID NO: 477510 - DNA, 513 bp, Homo sapiens
acatcaagggaatgggtactgtccaaaaaggaaggccccacaagtgttaccatggcaaaactggaagagtctacaatactacccagcatgctgttggcatttttgtaaataaacaaggtaggggcaagattcttgccaagagaattgatgtgtagattgtgcacgttaagcactctgagagtcaagatagcttcctgaaatgtgtgaaggaaaatgatcagaaaaacaaggaagccaaagagaaaggtacctgggtttgactgaagcgccagcctgctccattagagaacactgtgtaagaaccaatgggaaggagcctgagctgctggaacctcttccctctggagtcattgcataatagacgtaaaaaaaataaaagacctctggatgtttcttttcactgagtagaagtgtgatgtcccctcccccaaataaatctttaaagccaaaaamcagatttacatgtgtgtcctgtgttttgtctggcatccctggcatcccaatgtcccccac

SEQ ID NO: 477511 - DNA, 485 bp, Homo sapiens
ccacccagatcttctctctatatgtaaccaagtcttttatttatttcattgcacagaagtacttttatttcagcttaacttgaactacaagagttggagtaattgctttgtcatcagtaattcattttcattcttatgtgcttaaagttacagctaaagtagaacagttacacacactgaagccatgctttataagattaaattcacatatcctaaaattcaccaggcgaaatcatgcacatttaattcctgcagcacttgaatgctatttaaggggaaaagaggaaaataaatyagagagccttacctttgatttcaaagacatctgaaaggctctgagcatggtgcttccttgaagccagcagatgacagaaattacctggaaaggataatggcatggagaaggtaggtctcagcctcaaactccgaggaagcacttgaagtggaatccatcttcttcaaaagatagtccaggactgataata

SEQ ID NO: 477512 - DNA, 450 bp, Homo sapiens
gagatttcagagtgtaaaggccaaatgctggactttcagcttccagggactgctttcactttcagaggctgccgggaggtctctgtgtgtggcctcctcctctcacagcctggcggctagctttcttctaaagccagtaggacagcagctttctgtcctttcacaggttttgaaatggctccctaacaaagtcaggcccaaccagaagaatctccttttgatgaattcaaagttagtatcccaaccacgggagtaaaattgcatcatgttcacctgctctgcccacattcaaggggaggcaattatgctgatgaacaccagggggcggsatctcggggattccaagttagagtcttgcccaccactggctgattgtgctggtctctctacaactctaaattccttggataccgagaagaatttaatagtgcaaaagataaggtagtctta

SEQ ID NO: 477513 - DNA, 450 bp, Homo sapiens
gagatttcagagtgtaaaggccaaatgctggactttcagcttccagggactgctttcactttcagaggctgccgggaggtctctgtgtgtggcctcctcctctcacagcctggcggctagctttcttctaaagccagtaggacagcagctttctgtcctttcacaggttttgaaatggctccctaacaaagtcaggcccaaccagaagaatctccttttgatgaattcaaagttagtatcccaaccacgggagtaaaattgcatcatgttcacctgctctgcccacattcaaggggaggcaattatgctgatgaacaccagggggcggcatctcggggattccaagttagagtctygcccaccactggctgattgtgctggtctctctacaactctaaattccttggataccgagaagaatttaatagtgcaaaagataaggtagtctta

SEQ ID NO: 477514 - DNA, 492 bp, Homo sapiens
ttaatgtttcatattacacacacacacacacacacamactctcacacacaatcaacagagatggggaaaaatgccaacttaaaacagaaacaaatgtacttactttattagcaacaactaatccaagtaacatttgtacacagtattgggactctatgttctcagcctaaaacaaagagaaaaatggcaaatctaaaattactatttgtgtgttctaatactgaacaaataagaagtaaatgtattgtggataatgggaatcaggtttctcactgtcaaaggtgaaagttacaaataaggaaaggctaaaatgaatcctgtactgttgtggtaaagtcaaaggcaccaagaactcacagtttcatataaatagacaggtaaatatggatatagatttttgtataaatatatataggcagatatatattgtcatatataagtacagatatatttatgtagatcaatggatatgcatacatataatgacatcta

SEQ ID NO: 477515 - DNA, 492 bp, Homo sapiens
ttaatgtttcatattacacacacacacacacacacacactctcacacacaatcaacagagatggggaaaaatgccaacttaaaacagaaacaaatgtacttactttattagcaacaactaatccaagtaacatttgtacacagtattgggactctatgttctcagcctaaaacaaagagaaaaatggcaaatctaaaattactatttgtgtgttctaatactgaacaaataagaagtaaatgtattgtggataatgggaatcaggtttctcactgtcaaaggtgaaagttacaaataaggaaaggctaaaatgaatcctgtactgttgtggtaaagtcaaaggcaccaagaactcacagtttcatataaatagacaggtaaatatggatatagatttttgtataaatatatataggcagatatatattgtcatatataagtacagatatatttatrtagatcaatggatatgcatacatataatgacatcta

SEQ ID NO: 477516 - DNA, 513 bp, Homo sapiens
aggttagaatttcagttcctatattttctaatgctaactgtacctcaaacactacagataggcctgggaaaccctcaaatcatttggcaaatttttaacaatagtctgtaaaataggaaaatcaatcaygtctgacttcacagcagcagcttgaagaggaatgacctaagtgctaaagaaaacactattattgactgtgctgataatattaatagaatatcaccacatcttaagaaaatacagattgtgacagttctcaagcctcagaatgaatctaaatgaggattttctcatatggaagaaatgagaagatatgtcataatgtttttgagtatttcaggggaagctgccaagaagaatcccggtatgaagtctggaacaggaagttagagaccaacattaagggccaatagggttccaaatatttatgtttttttgtttgtttctttttgttcctttctacttcttgaatgtttcagtaagattatctttcttctgccataaaacaccttt

SEQ ID NO: 477517 - DNA, 513 bp, Homo sapiens
aggttagaatttcagttcctatattttctaatgctaactgtacctcaaacactacagataggcctgggaaaccctcaaatcatttggcaaatttttaacaatagtctgtaaaataggaaaatcaatcacgtctgacttcacagcagcagcttgaagaggaatgacctaagtgctaaagaaaacactattattgactgtgctgataatattaatagaatatcaccacatcttaagaaaatacagattgtgacagttctcaagcctcagaatgaatctaaatgaggattttctcatatggaagaaatgagaagatatgtcataatgtttttgagtatttcaggggaagctgccaagaagaatcccggtatgaagtctggaacaggaagttagagaccaacattaagggccaatagggttccaaatatttatgtttttttgtttgtttmtttttgttcctttctacttcttgaatgtttcagtaagattatctttcttctgccataaaacaccttt

SEQ ID NO: 477518 - DNA, 627 bp, Homo sapiens
ctagagaggaggaatctagagagctgcctctttttttttttttttttttagagttggctagtctgtcatctcctttactatagataaatatactattctcattcttgctccactttctctcatttttgtgtgtacatcattacacacaaaatatgtatgtgtatcgatcaggatagagtagattatgctgcagtaaaaaacaacctacaaatttaagtggttcaaaacaacgaagatgtttttcatattcatacttcatgctcttctcttgtctgccataagcactctactctttgggtcattcagatgccytggctgaggcatctgataccatcctgaagatggccagtcatcatgctagagggaaacagcccttgaatcagaaacctgcttgaaaagcattggctagaacttgttacatggtcccataggatctcaaggggtttctgaagtgcaatcaccacagccccagatagatgagaacataaatacttggtgaacagaattaatggctaattctgcattttgaatcaatgcatttattaaagtaaaaccctagaaaacttttatacaactgagatcattctagtaaaatggtccttaccattgggataaagaatagagtcc

SEQ ID NO: 477519 - DNA, 624 bp, Homo sapiens
agttttgatcagaattcagacttcccaaactcccagttcagaacatttgaaactgcatcaatctcatcctcatggtcaaactgctgtgtctaaagaacttcactttggtgctgcatgtgaggatgagcccctcaatatcacgaggtatctgtaaagactgaatccaggctggggacagccccaggtagtgctgatgagagctgacacccaaaatgcaatctggggagtcaacaagagaagaaaagtctccatgaaaccaacgagcagcactgagagccaaggtcataayctgggaagacattttctgctatgaaaatatggagaggccaggcaaagaagaaatggagaacagtgagagtaggaaggtagagatagaaataaggaagacagtccagtggaattaaaatatacaaattctagggtcttctggaacatcacttgaggtggaccctggcaggagtgcctgggcagtggagccagttgatggggacaagttgcatgggtcacttacatccaagactctgcacagtcttggctcaaatggattaagagtttcggtgcaataatcaagtgactcggggacagaggaactgcctttcttcagagatgcaagggttgccaaag

SEQ ID NO: 477520 - DNA, 536 bp, Homo sapiens
tatgaaaaaataataaagtatgggtctgaattatgatttcattgtttattactcatgcgaactttggtaaatttttttttttttttttgagacaggstctcttgctctgtcacccaggctggagtgcagtgggacaatcactgcaacctctgcctcccaggctcaagtgatcctctcagctcagcctccctagtagctgatgacctagtacaggcacatgccaccacacccagctaatttttgtattttttgtagagacaggttctcaccatgtttccaaggctggtctcaaactcctgagctcaagggatctgctggcctcggcctccgaaagtgctgggattacaggtatgagccaccacactcagtcagtaaatctctttagaaattactgttcattagttttttcatctgtaagacaagggaaatagtatgcgcttcataagctacggtgagacttaagtgagattgtatatttcagttttctcccgtaattgcttctcgatatttaaaaattttcttatctctagaaaaga

SEQ ID NO: 477521 - DNA, 590 bp, Homo sapiens
attccacacctactgtggatttatgtttgttctcccctttaacccttacaacaacaaaatgaagtaggcattctggccccgctttagaggtgacaaaactgaggctcagggggtttgagtctattggctaaggtcacatagctagaaagtggccaaagccaggattcaaacactgtctccctcactccccaaatgtgtgccatccacccctcatatgctacctcttcaggatactacacggtgctaaacgccagtttcagaaggttggttgggagaataacggccttgaaagatgtctatgtcctaatccctggaatctgtgttaccttacgtggcaaaaaagactttatagatgtgattaaattgaggatcttgagttggggaagttactctgsattatctgggtaggctctaggtaatcacaaggggccttataagtgaaagagggaagcgggagagtcaggggtcaaggtcagggagaagtttgaagatgctatactgctggctttgaaggtggagaaggggcagcctctacaaagtgcaaaagtcaaagaaacaggttctccactaaatcctccagaaggaatgca

SEQ ID NO: 477522 - DNA, 398 bp, Homo sapiens
tggtaaaaaggttttgctctcctttgggcaataaagagtgggcttatgacccatraagacccccatacctccccattgcaagattctgctcagttctgtagcctcttcctaatctcacacaatgttattttgtagtctccaatgcctggttaacaagaaccttctattgactgaattgacatggagacgtctaaataattcctgttgataagtctgtttgaatacccctcttgtggtgtaccatgtgagtgtagctgtaccactaaccaccaatggttatacggacagaatagcaacttgtatttcacctccagcttctacacagatagctgtttagcaatttatttcacattggataagcttcttgtctccattactgtctctttcagctaagcctt

SEQ ID NO: 477523 - DNA, 398 bp, Homo sapiens
tggtaaaaaggttttgctctcctttgggcaataaagagtgggcttatgacccatgaagacccccatacctccccaktgcaagattctgctcagttctgtagcctcttcctaatctcacacaatgttattttgtagtctccaatgcctggttaacaagaaccttctattgactgaattgacatggagacgtctaaataattcctgttgataagtctgtttgaatacccctcttgtggtgtaccatgtgagtgtagctgtaccactaaccaccaatggttatacggacagaatagcaacttgtatttcacctccagcttctacacagatagctgtttagcaatttatttcacattggataagcttcttgtctccattactgtctctttcagctaagcctt

SEQ ID NO: 477524 - DNA, 438 bp, Homo sapiens
gtaaaaaggttttgctctcctttgggcaataaagagtgggcttatgacccatgaagacccccatacctccccattgcaagattctgctcagttctgtagcctcttcctaatctcacacaatgttattttgtagtctccaatgcctggttaacaagaaccttctattgactgaattgacatggagacgtctaaataattcctgttgataagtctgtttgaatacccctcttgtggtgtaccatgtgagtgtagctgtaccactaaccaccaatggttatacrgacagaatagcaacttgtatttcacctccagcttctacacagatagctgtttagcaatttatttcacattggataagcttcttgtctccattactgtctctttcagctaagccttaggttggaaagacaaaagcagctctctcagcgcatgatccat

SEQ ID NO: 477525 - DNA, 280 bp, Homo sapiens
gaaccacatattgtatagtcaaaatttcctttgaagrtcttttagaaatatgccactttggtgaccaatacactcactccaaatatggagaacccagtcagattgttttcctaggctacctctggagcctaggaaaaaatgtttaaaatgtttgggggcattgtcatatgaaaagtacatatctttaaatgccgggctcacactctgtatggcaggaaccccttagattaagaggcagcctgtaaggtgtacaaccacctgagcaaaagcagattcacag

SEQ ID NO: 477526 - DNA, 489 bp, Homo sapiens
ataatggggttctagacctggcaaaatgaaggcaggagcgccagaccttcttgcattccaggatttctttaagaattggatgagataacacttgcaaaagtgtcatgaaagctataaaatgttaaccctgcaaagagtgttattactttttaataataagccagcctggatttttcataatctgagagttaagaaccctactgattggacaatactactgtggccaattcttgtgaagagaagcagcctcttttgctttgtggagtcattttttttctcagtcataatcatagatggcaggaccaggatttggtccacctatcactggccttaccctgcatgatcctccttgctccctaacctctggccatgcctcagatctcttggttccaggaatatttgcttgccgcggtgctatctccactttggrccttcacacggtgcttccctctgccgaaaacattcccccgtcccctgtcccttcagctc

SEQ ID NO: 477527 - DNA, 491 bp, Homo sapiens
ttaaggcaaacttttcaatatttatttatattttcaagacaaaaaaacataaaattcgcttctttctattatagaaataatccatgctctctatagacattttagaaaacataaaagatcttaaagaagtaagtagataaaataattattasccatatgtcagtgatccagtgatatctactattaacattttagtgccatagtaaaagctgaataaccagcattttcataagcagtgcttcggatgaggcccatgaaaaaggggttgcttggtttgcttgcaaagaagaggtacagggagataaaatattttgtcaaagtcacccagtgagagggtggcaaaaccaaaacaaaaatgccaggctctgggattttctagcattagtcagaggtgaaagtctcttcgtgacccaagagctgctgactgttgtttttctctgccattttctggctggtggctaaggaaaggaacagccatcttcaacagaaca

SEQ ID NO: 477528 - DNA, 468 bp, Homo sapiens
accatacctgcatataaacttaatcctctcttgccatataacctaacatattcacaggttctgggtattaggacacggacatctttattctgcttacaatgcctcccaaagtattgcccaagaatttttagaaaccttcaagagcgtgctccttatgtactcatagccattttgagctatcattattgtgtggcctctgacttgttrtttctcttccatctagttcttctttggccacgtttactgcctgcttatctaccatcagaacatccaggcctttgcaggctattcattctggtaactcccaaagcctccagtcctgggtgccaaagcactggtttccactcagaggaagggaggtagcccctatcctgagctctgagccattctctgccacttaggtccctgagcaactctgcttgtggccagagcctcaccattttggctctcctctctcaacagagtaac

SEQ ID NO: 477529 - DNA, 368 bp, Homo sapiens
tttacattcattttagcactgaagtgccaggtaacacccacccccgctgcccttcagtgaaacaggtgttttagtcctgtaccytcgtagctgctgtcagtacttcttgctaaggaattgcctagggttgtgaaactgcccttaagagaatggttttcagccttggctgcatgttggactcaccaggcaagtctttaaaaatactgattcctggggtcccaggcccagaggttctgatttcactggtctgtggtgcagcctgggcaccagaatttttttgaaaactccctgggtaattctgatatacaggccaggttaaaagcttaagacctgctcagtcaaagggaagatgtcttcttcctgcctac

SEQ ID NO: 477530 - DNA, 444 bp, Homo sapiens
cctcccaaagtgcggagattataggcgtgagccactgcgcccggccaggttttatggcatttttactgtttattacggtcctctaggatagggagcctgtatgacttatccctgtgtctccaacgctctattgtatagccccattttaaagaagatacaggatctgagactctaactctcagctaataaatactggagccagacatgaacttgcaaaaaaaaaaaatgcatgtaaagcgcctggcccaccgtaaacgctcagtacgtgttagctaccggtagtagctatctttatttcttcacgttcctccaggcagggagagtatctgatggacacgagtgtccccaagcccagggttccgcacagagcagawgctcagtaaaagtttgctgcacgagcaggagccagcgggagcctctcacctgcagcaggggcaggagcag

SEQ ID NO: 477531 - DNA, 573 bp, Homo sapiens
aactcatttatctaaagctattaagtaagtaaaattccaaatctgtgataatgaagattaggatggtggcagaaagtcaagtttggcaataggataataatcatagctaaggtatatagtacttactttgttctaagcactttagttgtattaactaacagatgaataatagagtgataaggaagttagtctgaaacaaagggaccaactgcaataatcttggttggtcatctctgaaccatttgatttgcacatttcattagacatttttgagcacatagtcatatatatgaccaccatttattaacatggataactgtactaatatatgcattataaaagccagaaatgttaaagggaatagaaaaaatacaaatagaaaggccaataattgtgacttcacgggacatgaaatcattgtygtttcttttgtaaagttaccatacaacagaaggtggatagtaaggaagaagaagacgaaggaggaagaggaggatagtatctgcataaaacacctctaaacaagaatttaaaagttaaagtcgtaaggaggtaaggcagatgtataccatc

SEQ ID NO: 477532 - DNA, 552 bp, Homo sapiens
gcaggtctgttggagtttgctagaggtccactccagaccctgattgcctaggtaacagcagcggtggctgcagaacagcagatatgggtgaaccacagatgctgctgcctgatcgttcctctggaagttttggctcagaggagtacccagccgtgtaagttgtcagtccgcccctactggggggtgcctcccagttaggctactcgggggtcakggacccacttgaggaggcagtctgcccattctcagatctcaagctgcatgctgggagaactactactttcttccaagctcagttggaaatgcagaaatcacccgtcttctgcgtcactcacgctgggtgctgtagactggagctgttcctatttggccatcttggctcctccccccatgtttaaatgtttatcaaaaaataaataaagtttacctctgatctcaccatctggaagtagctttcactaatgttttagtacattttcttttactcttctgtgcatgccagtacatacacacacacacagacacataacacattcattctttatggacgct

SEQ ID NO: 477533 - DNA, 552 bp, Homo sapiens
gcaggtctgttggagtttgctagaggtccactccagaccctgattgcctaggtaacagcagcggtggctgcagaacagcagatatgggtgaaccacagatgctgctgcctgatcgttcctctggaagttttggctcagaggagtacccagccgtgtaagttgtcagtccgcccctactggggggtgcctcccagttaggctactcgggggtcatggacccacttgaggaggcagtctgcccattctcagatctcaagctgcatgctgggagaactactactttcttccaagctcagttggaaatgcagaaatcacccgtcttctgygtcactcacgctgggtgctgtagactggagctgttcctatttggccatcttggctcctccccccatgtttaaatgtttatcaaaaaataaataaagtttacctctgatctcaccatctggaagtagctttcactaatgttttagtacattttcttttactcttctgtgcatgccagtacatacacacacacacagacacataacacattcattctttatggacgct

SEQ ID NO: 477534 - DNA, 597 bp, Homo sapiens
agacataaaacatacatgtgacaagcatcataacaaacatgtgacctacacaaatataaaaggaaatagctgagtaagakctaggcttggccaggtgcagtggcttatgcctataaccccagcacattaagaggcccaggttggtagacgggggcaaaacccagtctctacaaaaaattcaaaaattagctgggtgtggtggtggtggcatgtgcctgtagtcccagctactcacaaggctgaggcagaatatcacttgaacccagaaggcagaggttgcagtgagcagagatggcaccactgcactccagcctgggtgacagagttagactctgtctcaaaaaaataaaaaataaaaaataaaaaaatataagatttgggcttagtaaatatagaaggctttgtaggggatcaagtttgaattgcattttgagaaaagaagatgatgaatattaataaacacgtgaagtgaatgggagagaggctagtaatcaaaggcatgaagcccaagccatagaagtaagaactaatgaaatgtgtgaaattaacagatattaattttatggaaagataaagctcaagagtagaaaccttgat

SEQ ID NO: 477535 - DNA, 350 bp, Homo sapiens
tgcaaatctatctgttttggactgactgaagaggttcttcccctggccattttactgctgccagataggttccccgccacacccctccccaccawccccccacccccatggaactcagttgcatcatgccctgaagataaaggacagtgtctctgtgaatggaagatggcaagcccttatacaggagcatgatagagaagtggatcatgtgtccgtctgcacccaagctggtgtagtctcctcccgcacctgggcctcagcacatctcaccatgaacttcccacactactctactccaatcaggggtcagggagggtgctttcactcatcattggtttacccaatcttta

SEQ ID NO: 477536 - DNA, 526 bp, Homo sapiens
ctggtagctaggaacacaccctgagtttcctgtctttgccttttctcatggagcttttcctaagtgatatgtgtccatatattttcttttcttttttgagacacagtctctctctgtcaaccaggctggagtgaagtggtgcgatctcagctcactacaacctccacctcctgggttcaagtgattttcatgcctcagcctccccatagctgggattataggtgcacgccaccatgcctggctaattttttgtatttttagtagagatggggttttgccatgtttcccaggctggtcttgaactcctgagctcaggcaatctgcctgccttggcctcccaaagtgctgggattacaggtgtgagccacggcgcccggcatgtccatatattttccatccttcagtgaaggctggtttaagtgctactggcagtagcaccgcagttcaactctccctgctttcatatcctttggcayccagtggaagtgaacagtcaaccacatgcagctcagtgggtatgttgcct

SEQ ID NO: 477537 - DNA, 630 bp, Homo sapiens
tcccaggtaatgtctagctaagatttacaatattggtattcatctggccactctaaggcacatgaggtgctttatgcttgtccttggatgttagagatcgtcacagactgagaatgtatagggtggacactgaagaggtcttagcaggaaaaaaaaaggtggaactactacatcctatctctgcagatgttgctcccttcaaaccttacccctaatatcattgatgtgggtgactttactattacatcagaaggggttaaaattcaaagcagatatgtaatactgagcaaaggaattacrcacatttttacactttgatatgtacattatgtgattcttgctgtgtgagggcaattaaatcatccaaatgactctccttcacattgaatagagattccaggagaccaaaaagctgtaatactaagaagggcaagtgctgtgggtaacacaggtataatatcacattcctcctctctcttcacaacccagttgcagctattcttgaggtgttaggtagctggggtaggagacaatgttccagaaggttgagcatggccccactaactctaaggttgtcattaagataaccttccattctgctgcaaaatatctcagtgacggaaagcaaaa

SEQ ID NO: 477538 - DNA, 537 bp, Homo sapiens
acaaacacacacaaacgctaaggtagaagtggtttgaggagaatctggactgctagtaatttttattaattataaaacaccatgtkagtaatttctcatattgaaatgacttctgcagaagattataatgtcataagcctatcctatcacagtcttaagatataacatttctccttaatgcctccttttccattatcagcagagaaagaaaaaatctttgataggctattctggatgcaaatagaaatacacaaactatctagttagaaaatctgtttttaagccattagagttcattccttacacactgtggaaagctgtaaggctctttttttctcatgagagtgcgatctgtacaatgtgttaaaagtacagtttgaatactgtattttaaaaaaatacattatttttgcctatcacttgattgtgttatactccagagatttaataggtcagagaagttatttaagaatcacatataaagacagttgtgtgattttgctctgcccaaattcatgaaatagaaacatgacccat

SEQ ID NO: 477539 - DNA, 537 bp, Homo sapiens
acaaacacacacaaacgctaaggtagaagtggtttgaggagaatctggactgctagtaatttttattaattataaaacaccatgttagtaatttctcatattgaaatgacttctgcagaagattataatgtcataagcctatcctatcacagtcttaagatataacatttctccttaatgcctccttttccattatcagcagagaaaraaaaaatctttgataggctattctggatgcaaatagaaatacacaaactatctagttagaaaatctgtttttaagccattagagttcattccttacacactgtggaaagctgtaaggctctttttttctcatgagagtgcgatctgtacaatgtgttaaaagtacagtttgaatactgtattttaaaaaaatacattatttttgcctatcacttgattgtgttatactccagagatttaataggtcagagaagttatttaagaatcacatataaagacagttgtgtgattttgctctgcccaaattcatgaaatagaaacatgacccat

SEQ ID NO: 477540 - DNA, 333 bp, Homo sapiens
agagatttaataggtcagagaagttatttaagaatcacatataaagacagttgtgtgattttgctctgcccaaattcatgaaatagaaacwtgacccatctgcctgtctcgatgattgaaaaaaaatatcccatagctgtacctgatcataaaggaacattaatagcagtcactggtattttattaccatatatcctcttttttgagaactgattctactgcaaggaaatgaagaagactgactactgagtatgattgacacaattttcctatagagaatgggaacagcagggcagggcctgcttaatggatgtgtggcctgtatagtcacac

SEQ ID NO: 477541 - DNA, 658 bp, Homo sapiens
ctaatatctctgtcatatttggaatacatacaagtaccaaacctttcagaatttgttatgattctttgacctcatccccagcaaatgaactgctggcatttattggatacatattattcttggtggaaacttaaaaagatctgcataactagaaggaaagattgagaagaatggaagaggaaatggataaattaaaggcactttcattgattcttcttcctttttctgctatctctgctctttctgcatcccttgtgtctctttatccttctctgccttagtagactcctgagaagatcaaagcaatggtgttttagacctccagttctcctagttagtgtatttccctacaaaggacaaggccacaacttctttcgctgataatgaattatctgccttgtttgaggaaacagatttgtgtgcctcatgccctaaccctgagcctastcaatgttttagcacatactgtgcccccaaaagtcacttatcatttatatttcatgtatttaggaaagcagaaattatgaaggaacgtgcttggggaataattgggaacttgtataaaagactgtccccacatgaagacaaaaagatgtagagtggtctcacttgctatttggaaaaaaaatagtcttagtctaataaacagtaacatgga

SEQ ID NO: 477542 - DNA, 658 bp, Homo sapiens
ctaatatctctgtcatatttggaatacatacaagtaccaaacctttcagaatttgttatgattctttgacctcatccccagcaaatgaactgctggcatttattggatacatattattcttggtggaaacttaaaaagatctgcataactagaaggaaagattgagaagaatggaagaggaaatggataaattaaaggcactttcattgattcttcttcctttttctgctatctctgctctttctgcatcccttgtgtctctttatccttctctgccttagtagactcctgagaagatcaaagcaatggtgttttagacctccagttctcctagttagtgtatttccctacaaaggacaaggccacaacttctttcgctgataatgaattatctgccttgtttgaggaaacagatttgtgtgcctcatgccctaaccctgagcctactcaatgttttagcacataytgtgcccccaaaagtcacttatcatttatatttcatgtatttaggaaagcagaaattatgaaggaacgtgcttggggaataattgggaacttgtataaaagactgtccccacatgaagacaaaaagatgtagagtggtctcacttgctatttggaaaaaaaatagtcttagtctaataaacagtaacatgga

SEQ ID NO: 477543 - DNA, 624 bp, Homo sapiens
tacaagtaccaaacctttcagaatttgttatgattctttgacctcatccccagcaaatgaactgctggcatttattggatacatattattcttggtggaaacttaaaaagatctgcataactagaaggaaagattgagaagaatggaagaggaaatggataaattaaaggcactttcattgattcttcttcctttttctgctatctctgctctttctgcatcccttgtgtctctttatccttctctgccttagtagactcctgagaagatcaaagcaatggtgttttagacctccagttctcctagttagtgtatttccctacaaaggacaaggccacaacttctttcgctgataatgaattatctgccttgtttgaggaaacagatttgtgtgcctcatgccctaaccctgagcctactcaatgttttagcacatactgtgcccccaaaagtcacttatcatttatatytcatgtatttaggaaagcagaaattatgaaggaacgtgcttggggaataattgggaacttgtataaaagactgtccccacatgaagacaaaaagatgtagagtggtctcacttgctatttggaaaaaaaatagtcttagtctaataaacagtaa

SEQ ID NO: 477544 - DNA, 541 bp, Homo sapiens
tcccatcctcacaaagttgaagactactcatacagactagccatatacaagaaattcaattaattgcattgaaattaatttaaattcactgaattaaatgaattcagagaaagaaaatctttgctttrccagtggatagtttatgagtaattctttaagaaatttcataaatatttattggaaggctaaggtggtgtaagaaactgctaggtatcatggcgggtaggtaaaaaaaaaaaaaatcacaaggcttagctgtttaaaaaaatagaatctttaagaggaaaagacaaggaataaaataagatagcatgcaatgattcccctagggaaagggcaaagtttaagtactcaaaaagagaagccaggcatagtggcagatgcctgcagtcccagctacttgggaggtggaggcagagaggatcacttgagcccaggagtgctgggctgtagtgtgctatgatctactatggttgcacctgtgaatagccactgcactcccacctgggcaacatggcaacactcatctcttaaaaaaaaa

SEQ ID NO: 477545 - DNA, 491 bp, Homo sapiens
acaattatggaatatatgtatgactatcattaaatagataaaggcaataccggaaaaatgtgatcataaaagtcttaacattttttctttgaagtaatattctgtctcagttcagttaatattgaaaataataagttgaagcaagccagttttcatttgatctcaaaggaaactaccaatttagagttattaaaagtaagtacaaaagcgctggagcaatggtgttgagagtaaagccaagaacatgcaaaaaaaacaaaagcagtacctcttataataacagtgatctactgggtggaaaaagcttgggaaagcagtaacagatgctcttaacatkagaaattgtgataagatatctacacgaaatacttagagttaaatactcaatgagataaagcagggtaaagtggcatatctgagagatacatacatacaggaaagttagacgagctcaccaactactcccagaaaagctacatggaaatccaggc

SEQ ID NO: 477546 - DNA, 567 bp, Homo sapiens
gcaaacacgtggtgtcccacaaattccttaggactctaaaacaactcttactaaaagatgtgccatttgtagaaaatataagcatcatgttttgtttgaggtggtgtcatgctatgtcgcccaggctgagtgcaatggcagtcattgctcactgtagcctcaagtgcccaagctcaagtcatcctcccacctcagcctsccaagtaggtgggacctccggtgcaccaccatgcccagctaatttttaaagttatttgtagagacatggtctcactatgttgcccaggcttggcttgaactccttgacacaagggatcattgaaccttggcctcccaaagtgccggaattacaggcgtgacccatcacacccggcccaagtatcatttttattacaagtttaatcactaagcatctcatcatttcttcctggtcatgccatgaggtgttagctcacgtgttgtcactccagccgcattatgtcactcttactaggttgttgcaaaactaattgcgttttttgccattgaaagtaaaagcaaattacttttgcaccaaccaacctgtgc

SEQ ID NO: 477547 - DNA, 480 bp, Homo sapiens
gaattctgggtggaaaacatttgttttattacattcacttaagagaagtagaataagttggaggagctagaactctgacaaaagtaaactgatatagctagcatgtggatttttttttttctaaattaatactgtttagaaaaaggtagctaagggacayagaatttcaaatggttctgtttggggattacctatgtattcatcatgatcttctctcatttataacataagcatgaattcctgtaacatttttactcctttccaccctgcaaagtgcattcaaatcacttttcccattcacttattccaatgcctgtacaagctgtgttacgcaaatgtcattatcccagggctgcagttgacgaactgagactgtaagttcacaccttcagcatgggataatggccttccatatgcagaatgcaccgatctctccatcctcatctgtcagtgttcccctccacggtgcttaccagagtc

SEQ ID NO: 477548 - DNA, 658 bp, Homo sapiens
ttctgttttattgtttatacaccatggaatttatttaggaattctgttcctatgtgcctgaaaatgtgtataataagaatacttttcttacatggtmatggacaaactatacatgaaacatgaaccttttgatggcttggtttattaaacatactagtttagtagtccaggaacaaaggagtttcttttctgactgggtctgtttgtcaaggtatttttattttattttttatttatttttatttttatttattatttatttttgggcagagtctcactctgttgtccaggctggagtgcaatggcacgatcttagctcacagcaacctctgcctctcgggttcaagcaattctcctgcctcagcctcccagctatctgggattacaggcacctgacaccacacccagctcgtttttgtatttttagtagagacaccgttccaccatgttggccaggctggtctcaaactcctgacctcagatgatccacccaccttggcctcccaaagggctgggattacaggcatgagtgtcaatgtatttttcattacagaattcacacgcccaccacaccggtcaagggcttctttgctatacttgcttctagttactttcctatttctcactataataatattaattgtaaccctgacagatt

SEQ ID NO: 477549 - DNA, 658 bp, Homo sapiens
ttctgttttattgtttatacaccatggaatttatttaggaattctgttcctatgtgcctgaaaatgtgtataataagaatacttttcttacatggtcatggacaaactatacatgaaacatgaaccttttgatggcttggtttattaaacatactagtttagtagtccaggaacaaaggagtttcttttctgactgggtctgtttgtcaaggtatttttattttattttttatttatttttatttttatttattatttatttttgggcagagtctcactctgttgtccaggctggagtgcaatggcacgatcttagctcacagcaacctctgcctctcgggttcaagcaattctcctgcctcagcctcccarctatctgggattacaggcacctgacaccacacccagctcgtttttgtatttttagtagagacaccgttccaccatgttggccaggctggtctcaaactcctgacctcagatgatccacccaccttggcctcccaaagggctgggattacaggcatgagtgtcaatgtatttttcattacagaattcacacgcccaccacaccggtcaagggcttctttgctatacttgcttctagttactttcctatttctcactataataatattaattgtaaccctgacagatt

SEQ ID NO: 477550 - DNA, 658 bp, Homo sapiens
ttctgttttattgtttatacaccatggaatttatttaggaattctgttcctatgtgcctgaaaatgtgtataataagaatacttttcttacatggtcatggacaaactatacatgaaacatgaaccttttgatggcttggtttattaaacatactagtttagtagtccaggaacaaaggagtttcttttctgactgggtctgtttgtcaaggtatttttattttattttttatttatttttatttttatttattatttatttttgggcagagtctcactctgttgtccaggctggagtgcaatggcacgatcttagctcacagcaacctctgcctctcgggttcaagcaattctcctgcctcagcctcccagctakctgggattacaggcacctgacaccacacccagctcgtttttgtatttttagtagagacaccgttccaccatgttggccaggctggtctcaaactcctgacctcagatgatccacccaccttggcctcccaaagggctgggattacaggcatgagtgtcaatgtatttttcattacagaattcacacgcccaccacaccggtcaagggcttctttgctatacttgcttctagttactttcctatttctcactataataatattaattgtaaccctgacagatt

SEQ ID NO: 477551 - DNA, 517 bp, Homo sapiens
ggtgaaatcacaatgtgaccatgattatttttcaacttcctggcacaaaagtctgtggcctcctctcatgttccatttacagcatgcgaatcattatgagtgaggaarttttaattgctttactgttttgttgaggcataatttacatacataaaatgcagatttcaaatgaatagttcaatgagtagacaaatctgctcaccagtgtaaccatcaccttagtcaagatatagaaactttccatcaccctagaaattttactcatgcacagtccagtcaatccatccccacacagaggcaatcactaatctgctttgtcacagtacctttgtttttccttttctagaatgtaatataaatggaatcatactatgtattcttttttttttagacagagtcttactctgttgccagactggagtgcagtggcacgatctcggttcactgcaatctctgtctcccaagttcaagcgattaccctgcctcagtctcccgagtagctgggactacagactat

SEQ ID NO: 477552 - DNA, 661 bp, Homo sapiens
gattatatatggctttgttagaccaaaatattcagtgatgagaacaacctttaaaaattagtgtgttttgcattagacacctaactggataaatacaaatagtcttttagcaaaagaaattgggaagactctggagataagtgtagttccctatgtgaaaataaaagtgaaaatatgtaaattttcactgtgttcaagggcacagtgaaaacttacgtgcaaagaaatatttaacaaaaatgctccatatagacagagacagctttggaaatctgttgaaaacaagatgtaaagtacctggatatgaaatctttctgtaaagatgacaaagtatttaatgagaaagaaatttatagcttcttattttgtagcagagtccttggccggcagtggggtcacatgatggtctcataaacttgcttggattcctctrtctgcacccccactgagaaggcagagagtaggccgtgtaatgtgtggtaagcaagggtaatatctcattttcaaatgagttatatttctacaaatatttaataggctacgcatcttctgggattgtttttctcttatccagaaattattgcagggatggtgttcatgagttgcataagtgtgtgtgtgtgtgttttaatttattttttggcagctgtaaataattgag

SEQ ID NO: 477553 - DNA, 661 bp, Homo sapiens
gattatatatggctttgttagaccaaaatattcagtgatgagaacaacctttaaaaattagtgtgttttgcattagacacctaactggataaatacaaatagtcttttagcaaaagaaattgggaagactctggagataagtgtagttccctatgtgaaaataaaagtgaaaatatgtaaattttcactgtgttcaagggcacagtgaaaacttacgtgcaaagaaatatttaacaaaaatgctccatatagacagagacagctttggaaatctgttgaaaacaagatgtaaagtacctggatatgaaatctttctgtaaagatgacaaagtatttaatgagaaagaaatttatagcttcttattttgtagcagagtccttggccggcagtggggtcacatgatggtctcataaacttgcttggattcctctgtctgcacccccactgagaaggcagagagtaggccgtgtaatgtgtggtaagcaagggtaatatctcattttcaaatgagttmtatttctacaaatatttaataggctacgcatcttctgggattgtttttctcttatccagaaattattgcagggatggtgttcatgagttgcataagtgtgtgtgtgtgtgttttaatttattttttggcagctgtaaataattgag

SEQ ID NO: 477554 - DNA, 600 bp, Homo sapiens
gaacttcattaattgctttgttkcatgtgtttcatgtatatgtgtgatacagcctcctataaataagaaaatatgggacagagattcttattcctgttgcatatgaaaaaaaaaaactgaggctaagcagctctcctaagagtacactatattgtactaaccatctgggaagaaaaatgtaactctagaactgtaaacattcagctctatccataattttggattttggttagtaaactctgtcattgaaaactgaggggctgcagatcagaagaggtttctcctgatttccagatatttgggctggaatgtaatcacctggaaagagtgtatcttttcatatctgtaggcatcagcggacaagactagccccttggagccttgggtgagagaaagcgagccagccattctagagggccctgtcttcaaggccagatgtgaaggggcttcacagctcctcactccaccctgacacttggctctgaggaagccctcaggctgctcagggtcccaggtgtgtgcctccacctggggctcaaccgctgagctctgtgactgcttcgctgtgccactgtgcatgctctctatctcttcattagt

SEQ ID NO: 477555 - DNA, 523 bp, Homo sapiens
ccaatagtggaagaagctctggactgggcatcagtagatttgggtgtgcatgctgattatgcaactttggataagtgactttggaggaatttgtgtcatgttcctaagtcttgacttcctcatctatggaataagggtgttcagcgagatctctagagtgctttccacttctcatactccacggcactgtgtgctaaactaagcaaaacgacctcaaatcacatgagtagattgtgttgactatctttaaaaagaatgaataaactcaggccaggcgcagtggctcatgcctgtaatcccagcactttgggaggccraggtgggtggatcacttgaggtcaggaattggagaccagcctggccaatatggagaaaccccatctctactaaaaatacaacaattagctggggggtggtgcgcacctgtaatcccagctactcaggaggctgaggcaggagaatcgcttgaacccgggaggcagaggttgcagtgagctgagatcacaccactgcacttcagcct

SEQ ID NO: 477556 - DNA, 555 bp, Homo sapiens
gggtcttcttggttcaaatataaataatcttacctgaaatttctctaacttgaaggtttataaaaaygataatacatttatttgagaatcacttatcctaagctatggaagaagaattaaatacagatttccagtttgaatataatgaagtaaaaattggcatttcccccttttgctctaggaaatcacccaaaagaagaatgagaaacagaaacacaagctaggatgcatatgaaactttaagccacaaataggtagaagggctgccaaaagcaatgaagaacaaacaggatgtgggaggaagcagaaggagatgcctgtaaatgcaaatccctgagacaactggcactaccccaagatgtggagtactcccaagatgcagagctctaatcctcatgtgtcctaacaggggaggtggggtggtgacagaagcatccatgaccatttgattctgagaagtagaggtggtaggactgaacagactcatgtgataaagccatattttaagaaacaatctgttgatgaggcagaggattgaaaaaaagagcctggtgt

SEQ ID NO: 477557 - DNA, 583 bp, Homo sapiens
agtggttaagacagtggctcagttagcagagacgctttgatctctagttctgctacctcctcattgtgtaaatttacttctcagtccaaacctcagtttaccaatggcaaaatgacacgttagaggatacatataaaagatgcaagagtctgtttagcttagcagggatggaaaatacggttcaagggaaacaaggtgaaggatgaattcataaatgtagatgaggccagattgtaaagtacccttagtttcgttgaggttccagtgagaaaatccacccacagcactcagatgtacccagagggttcctgctgttttcatcattagacttttacatgatcaacaatcttgctaacactgaatatgggtgagggtctcagcatggcaaaggctgttcctccttgtgtgtggaaacctttatttagtcattttagctatttggcctaaattgtgaggtttggcctgaatatcatgttgggtcctcagcaacrcagtcagagtaaataggaggacttcaggattggtggggtaaggggatacccacctgtcctgaaaataccaatgtatgcctccaggtctagca

SEQ ID NO: 477558 - DNA, 441 bp, Homo sapiens
ccttcaccaggtcgacacataaaataaaccatcacgggagggatgccgtgtgggtgagctgggaaaggaagtcaagacgatgggaaatgacttgactaaaaacctggaagggaaagcacaagctttggatttgggacaaaccttagaattcatgagtgctgccctattaaccagagcgcacagcgaattccagagaaggacatgctccaggtcactgagggcccaggagcaggcaggaatagaggcagggctagtgccctgtctctcctccagcatgcccttctgcctctggcgttttcctctctgaagtttatgtgggtgattcttatgtggtgtaatggttagaggcccgcacttgagaggcaaaagatcttagctcttatacttattakccatatgatctaaggcaagctattctaaactctacgtgcctcagatttt

SEQ ID NO: 477559 - DNA, 632 bp, Homo sapiens
tttagaaataagtgcttctcaggtatgaggtgattttttaatagagtcaaaccaaaattttacaattgtaatacactgtgatagaaataagcagagttagacattttttttagacctamgatatccccaagtccccagtgcttccctgttacctccaaaaacatccaacctagtcccaacctaccattcccaatccttccttctttactccacacctcctcatttgagctactcagatcttttatcattcactgtgggtgccatacccttccatggcatgtacagcacatactgttgtaccagcctagaatggaggggaaacacccaaatgaatgagtgagagattaaaaaagcaggaagcagatgaaggaagcacagccatgcaaggtgtcatggctccatgcgcgctgactactgagaagagcacaccaatgtcttcgtcctcaggcacaatcctgctgaccctcctagtcactgattcagagtcaggcccctagctcctagtgctctgcacagcaggttgatactccagacccatagaattcctgcctgggacccaggtgctctgcatttcctagacagggacagtgtgagggctcctggtttcagaagaggtacaccatctcaaagtt

SEQ ID NO: 477560 - DNA, 614 bp, Homo sapiens
tgagtttacctgggcatggggggctagagtcatcccatcagttacaagctgaatgtcatcttccaattgcccaggcagaagaagggaagaacagaactgtggctgagggaccctagctaaagctggagaggtgatatctgaaaatgcccaggaaaaaggtcatcttcaacttctgcttcaattgggtagaagaaatgaaagctataatagtggtaatcaaatgaaacgtttctcattccttgccccttgttcctccttgctcaccaccgtgcctcaattcaaataataaaactattcgaatctgaaacccgaagcaaagcggaccagggaggagctggaagagatccagagagaggcagccaaccttatcccacctccttgactrcaagtttcagcctgggggagggaaggagttttaattttgatgatattcaaaagatctattattatattggacaggccaattaatgaacggagacttttttagagaataatatgaccagttttattatgttttattattatgttttattatgtgggactcactagaaaaaatcataagacctgccctagatttcatcgaagtcatggggagaaaacctatcctacagaat

SEQ ID NO: 477561 - DNA, 614 bp, Homo sapiens
tgagtttacctgggcatggggggctagagtcatcccatcagttacaagctgaatgtcatcttccaattgcccaggcagaagaagggaagaacagaactgtggctgagggaccctagctaaagctggagaggtgatatctgaaaatgcccaggaaaaaggtcatcttcaacttctgcttcaattgggtagaagaaatgaaagctataatagtggtaatcaaatgaaacgtttctcattccttgccccttgttcctccttgctcaccaccgtgcctcaattcaaataataaaactattcgaatctgaaacccgaagcaaagcggaccagggaggagctggaagagatccagagagaggcagccaaccttatcccacctccttgactgcaagtttcagcctgggggagggaaggagttttaattttgatgatattcaaaagatctattattatattggacaggccaattaatgaacggagactkttttagagaataatatgaccagttttattatgttttattattatgttttattatgtgggactcactagaaaaaatcataagacctgccctagatttcatcgaagtcatggggagaaaacctatcctacagaat

SEQ ID NO: 477562 - DNA, 562 bp, Homo sapiens
aagaaagaagtcagtaagcctaaggctattggaatgggcagaacatctattctattgctgagacaaatgagcaaagacgggcttcttatacaagtcaaacaattcaacacgagttttggtgttagttatcagagcatacagactttgtgtggttatgatttctttctaacctggtcctgagatctctttgttgagagtggccatagctgatacagtcactctcaagaaaagtcctaagtgaagggagaaagttaggttttggtgtgttactcaagtgagayacgacgaggcaggaaaaccaaaatgcatgaagcagaagaaatgtattacttacaaatcccagagaggttgaggaggcccacggaatgtccgaaagcagcagggagtgcgaccaggggtgaggcgctcaggagagaggagacctgtgggactaggcctttattaaggtccgtggatgtcttgtaggccttttcctggcaggtgtggattggctaacttaaagaaaacacgtgcaaagagtcacatgactcttacattgaccattgggttttatcatgaatag

SEQ ID NO: 477563 - DNA, 562 bp, Homo sapiens
aagaaagaagtcagtaagcctaaggctattggaatgggcagaacatctattctattgctgagacaaatgagcaaagacgggcttcttatacaagtcaaacaattcaacacgagttttggtgttagttatcagagcatacagactttgtgtggttatgatttctttctaacctggtcctgagatctctttgttgagagtggccatagctgatacagtcactctcaagaaaagtcctaagtgaagggagaaagttaggttttggtgtgttactcaagtgagatacgacgaggcaggaaaaccaaaatgcatgaagcagaagaaaygtattacttacaaatcccagagaggttgaggaggcccacggaatgtccgaaagcagcagggagtgcgaccaggggtgaggcgctcaggagagaggagacctgtgggactaggcctttattaaggtccgtggatgtcttgtaggccttttcctggcaggtgtggattggctaacttaaagaaaacacgtgcaaagagtcacatgactcttacattgaccattgggttttatcatgaatag

SEQ ID NO: 477564 - DNA, 562 bp, Homo sapiens
aagaaagaagtcagtaagcctaaggctattggaatgggcagaacatctattctattgctgagacaaatgagcaaagacgggcttcttatacaagtcaaacaattcaacacgagttttggtgttagttatcagagcatacagactttgtgtggttatgatttctttctaacctggtcctgagatctctttgttgagagtggccatagctgatacagtcactctcaagaaaagtcctaagtgaagggagaaagttaggttttggtgtgttactcaagtgagatacgacgaggcaggaaaaccaaaatgcatgaagcagaagaaatgtattacttacaaatcccagagaggttgaggaggcccacggaatgtccgaaagcagcagggagtgcgaccaggggtgaggcgctcaggagagaggagacctgtgggactaggcctttattaaggtccgtggatgtcytgtaggccttttcctggcaggtgtggattggctaacttaaagaaaacacgtgcaaagagtcacatgactcttacattgaccattgggttttatcatgaatag

SEQ ID NO: 477565 - DNA, 615 bp, Homo sapiens
ttatgtggagtgccgtgtaaccaacccacagcatcactcagtataacatatacccctgtaccctgtgtgtaaccaactggtaccaagtcatgtaatcatgtatttgctttatcacctataatcatgtagacacttttgccacatgtcaacacgtaatcaaaacactagaccaccttgtaggctgggcacagtggctcacgcctgtaatcccagcactttgggaggccgaggcaggcggatcacaaggtcgagatattgagaccatcctggccaagatggtgaaaccccatctctactaaaaatacaaaaaattagctgggcatggtggcatacgcctgtagtcccagctacttgcgaggctgaggcaggaggatcgcttgaacccaggaggtggaggctgccgtgagctgagatcacgccactgcactccagcctgacgacagagcaagactccacctcaaaaaacaacaacaacaactagaccacctaccacaaatcactgcagtatgctaccaacacaatgtgtgcaagtggcatattatrgagtaactactgttattcagataaccacctcacaatgtttcttttatctgaacctatccatttcatcagtac

SEQ ID NO: 477566 - DNA, 603 bp, Homo sapiens
ggcactgtgctgctagggggcagtggtgggcaagggttgggtattggaaagaagcatcaatataaacacagatcaagcacagtccctggctgcatggagctgtggcatggttgtcagggtttcaggccctctctgcagcaccwcctcctgcctcttccaaggaggatgtatgggacagtgaagtgtccactatgcagaccaagagcccaggggaaacacagggtcatcaactcagaggctgttgaggtaacaggaaccacacacttcactgtggcctgtggttttcaacaatgttttttaaaatcagggaaccctgtcttctagtgaaaccatagaaagaaccacaaatacaagatatacaaaggtagagatgttgtagttgaagcagagataggagtcaggaaggggtccctgagtcctaccctcttggcccttccttcaaccctttttctaagcactaggggaaaaccatcaattttcccagcgtcacttgagcactgtgctaagtactaagtcattcacgatgaaacacacatgcacacgcgcacacacacacacacacacacacacacgcacacacacacaaaattacagcctagtcta

SEQ ID NO: 477567 - DNA, 603 bp, Homo sapiens
ggcactgtgctgctagggggcagtggtgggcaagggttgggtattggaaagaagcatcaatataaacacagatcaagcacagtccctggctgcatggagctgtggcatggttgtcagggtttcaggccctctctgcagcaccacctcctgcctcttccaaggaggatgtatgggacagtgaagtgtccactatgcagaccaagagcccaggggaaacacagggtcatcaactcagaggctgttgaggtaacaggaaccacacacttcactgtggcctgtggttttcaacaatgttttttaaaatcagggaaccctgtcttctagtgaaaccatagaaagaaccacaaatacaagatatacaaaggtagagatgttgtagttgaagcagagataggagtcaggaaggggtccctgagtcctaccctcttggcccttccttcaaccctttttctaagcactaggggaaaaccatcaattttcccagcgtcacttgagcactgtgctaagtactaagtcattcacgatgaaacacacatgcacacgcgcrcacacacacacacacacacacacacgcacacacacacaaaattacagcctagtcta

SEQ ID NO: 477568 - DNA, 634 bp, Homo sapiens
ctgcaggctgagggcctcagctcttggctaagacttctcacgcaggcttaggctgagtgccggggccaagggggcttccttgtttgctttgttcttaaaggatttgcccatttgtagcagacaccgtgcccacttctaaagagagagcccagagcagcgatgaggagagatgcagcccctgagcctcaatacccagccaagcctgactttgctaacacacacagtaggctttgctggcctctgtatctttgcctaggctgtcccttatcatatttttccctcccctctgcccaaggctcacctgtgtacaatctgccagttcccctcctcactccaatccccagcatcactgtgaggaatggggacaacaaggacagggaggtccccaggttccccctgcaggtgacacactgctctttcaggaagtgatattgtcagtgaatgtacaaaatcaatacacacagatttcagcacatcccatgaagttcacctctcagcagattctgaaaarctgggtcgaaagggagccacatcaggtgttgtgctgacctctgccttttaaaggaggacttaggaggcaaacaccctccccacagatgagggattcagtgaggtcctctccaaatgcctgctg

SEQ ID NO: 477569 - DNA, 574 bp, Homo sapiens
aaaaatattgtgtgcataaggatatggacaggcaggagctgggcacaaaggaaggcaaccttcagagttgggggtgatggaaagaccccctcctcctattatttttagtattacaaaccctggccctttgagaacagcttcaggggctctcccctcatgaagtctgtctctgaggcggacacaaggaggcagctgggtgcagggccacaktcctgattgcaccaggaggtgaggggaactggcccggtggaggtcaggaaggccacgggaggcccctcccatcttaccatgaagcccggagcacaagtgcagcccccagtgatgctgtggcagtcggcgccattctgacaggtgcaaggcagctggcagccatcgccatagtagccaacagggcaggattcattgcagtggtgaccagaccagcctggctggcaggtacaagctccagttactgggtggcagctgcacagatgagagaagggtgagaagacagcttgttctgggaagcagccatgtccccgccctctgtctaccccaagcctggcttgcctagggtagcaggatcaaaggacct

SEQ ID NO: 477570 - DNA, 607 bp, Homo sapiens
tggctgctcagggatatgttaggcactaattttactctttactctgagaaccagaaggctcaaaaccaaatctaaaatcattcctttttttttttcatatccctacaattcttctagaaatgggatatctactttcttaatttgattactctacttatcttatagaaactccaaaagtccctttgaaaagaggatggagagtgacagctgactgatcatgatggagagctgtgattgccatgcttggaacctttgtccctcagcagagtgacttgcacagcccctctcccaggcatcccttcttcctggtggtggtccccattctcttgagtcacatggcaggccagggactgctgtttttggctcaggcagaagttacagtcacttgtgtttagcctggttccgttctctctggttttttcttttctcccatttcccccagacatagattaatcacaagttaataggaaccaaaagctgaacaatacaggaatccttccagagtggatttttctgcctttcttycagctgctatgagatttctatcaatgctgcatctgttggctaaatcaaatctttcaaaggtaatacacgatcatggctgctg

SEQ ID NO: 477571 - DNA, 551 bp, Homo sapiens
accagcctcatcctaaaactttctgcacaaaccgccctttaatgtgcatgtaattaaaagtgagtataaatatggctgcagagctcctctgagctgctactctgggcacactgcctgtgrcatagccctgctctgcaaagagcaggccctctgctgtgcacggccacttcaacacaagttactaacaccactggcttgcccttgaattcttttcctggatgaagccaagaaccctcccgggctaatctcaagttttggacactggagacacagaaagagaaagggtaagaagagggtaaaggatgaaaaactacctattaggtgcaatgtacactactcaggtgataggtgcatttaaatcatagacttcaccactgtacagttcatctatgtaaccaaaacagcttgtacccctaagtccattgaaataaaagacaattttaaaatagtaaaattaaaaattgaaaacattgtaccactgtgacagacactgtgacagggagacacaaatagcaatctgtgtctccctaagccaagtagaactttgtttt

SEQ ID NO: 477572 - DNA, 551 bp, Homo sapiens
accagcctcatcctaaaactttctgcacaaaccgccctttaatgtgcatgtaattaaaagtgagtataaatatggctgcagagctcctctgagctgctactctgggcacactgcctgtgacatagccctgctctgcaaagagcaggccctctgctgtgcacggccacttcaacacaagttactaacaccactggcttgcccttgaattcttttcctggatgaagccaagaaccctccygggctaatctcaagttttggacactggagacacagaaagagaaagggtaagaagagggtaaaggatgaaaaactacctattaggtgcaatgtacactactcaggtgataggtgcatttaaatcatagacttcaccactgtacagttcatctatgtaaccaaaacagcttgtacccctaagtccattgaaataaaagacaattttaaaatagtaaaattaaaaattgaaaacattgtaccactgtgacagacactgtgacagggagacacaaatagcaatctgtgtctccctaagccaagtagaactttgtttt

SEQ ID NO: 477573 - DNA, 573 bp, Homo sapiens
tgtcaaaggaaaatatttcaaggactcaactcagttttcacagagcaggcaatgaaggattgattgttttgtgtaggtgataagtgacagagtcagcttgctccctttcctgaatgtctagaagcctttagggagataggctatcatttatgcaattacatgagttgctagggaaagtcatatttatggaggcaaaatatttgttcttaattcaaatttaatatttctgaaaacaattaggtaatgggaaagctctmtagttattcgatcttagtagatggaatacatagagaatagaggatgttctcaagggtaaaagcttgtgctcctgaaccaataatagcatccaaagaaaaacagattaatattctttacatctcatttctctaagatctcaggaaaattattgccatttacattctacatttgttgttgaaggctaagagggcctcattaggtttaccaaatccaaataattacagttagagacggtgtttttttctactagctgaagtgatgtgtgaaaatagcaaaaatattttcacagagaaattatgctctttaacagtaaac

SEQ ID NO: 477574 - DNA, 599 bp, Homo sapiens
ttcaaggactcaactcagttttcacagagcaggcaatgaaggattgattgttttgtgtaggtgataagtgacagagtcagcttgctccctttcctgaatgtctagaagcctttagggagataggctatcatttatgcaattacatgagttgctagggaaagtcatatttatggaggcaaaatatttgttcttaattcaaatttaatatttctgaaaacaattaggtaatgggaaagctctatagttattcgatcttagtagatggaatacayagagaatagaggatgttctcaagggtaaaagcttgtgctcctgaaccaataatagcatccaaagaaaaacagattaatattctttacatctcatttctctaagatctcaggaaaattattgccatttacattctacatttgttgttgaaggctaagagggcctcattaggtttaccaaatccaaataattacagttagagacggtgtttttttctactagctgaagtgatgtgtgaaaatagcaaaaatattttcacagagaaattatgctctttaacagtaaacttcacgccttgctaggaactgcatttctctgcctggtgtgta

SEQ ID NO: 477575 - DNA, 557 bp, Homo sapiens
ccttcctatagaacaggtgatggaatttagatggggcctttgtcctgttatattttgcccactggcatcatgaatgagctgtttagccacctggagaagaaaatgcaatctctttctctctgtttgatctgtcatcatggcccaggaagaatatgttgagagatcataattttaaagttgacagcagaatgggtgaagttttctcctactttacatggtggttgtcatgagaaccagttcacaccagaatggggtgttttttgttgttgtcattgtgctttttgccttgacacatgcagatatttaatttccatgtaatttgtgtgcagcttccttgctttgacggaytgaaatttctgattctctgtagaggccagagcttggcagaaatattaatctacttccttttctcctaggagagcccctgagagaagaaaagtgctggaaagtatagtcattgcgatatgtcaggattaataaaagcaggcaaagcaaatggccagatttccaaaatacccagcagcatttggcagtatttttggggaggccgagttcag

SEQ ID NO: 477576 - DNA, 504 bp, Homo sapiens
cttttctgctttggccttctcttaaaggaagacaaatgcccttgaaaaggagtcttaaaagtatgattcacggacttgggaagaattacaggatgcagacagcctagagtggtgcctcctgcccccaaaggagttcacatttccttcctcttaatctgagtgaaccattaaaaagttagtcagttccctggaggctctttcygaggaatctcctaaaaggaaataccctgcactggaaaggtaatttacctagacaggatttaaaaaactaagttccagttcagagataaccagcgactttatatgggctggtgtattcctccttttaaggattctcccctgaagttagttaacaaatcaaaaaggtaggcagaacaacatcaagaaagaacacactacccttgcacattttatttatttatttttatatgcaattaagtcctcaaacggatagtttcactgctgttgtaatatcaaactgtaaatatgcaatacattgatttt

SEQ ID NO: 477577 - DNA, 627 bp, Homo sapiens
tgcctatctaggctcagtaaccaataatggctgaatgttgtttctaaacaacaagctgaatgttgtttctaaagcaggtattagattataacctcctgcrtaaaactgttcagtatgtctcccagtgtcctgagatacctacttcctttgtatgacacttcagacctcacatgtttactaatttctcttttcctctctggtcaatacatgttttatagtctgctctaataataacgaacaaacccgtggtcacatctctgaacctgtatacgtgctgctgtctgccaggaaaaatccctgcttcctcccacttgtttgtctttcagatctcacctaaggggttattccaagaaaagttccctaacccttgtctcccagtctcctcaagtctgtgaaggatgtttcttttttatcctcctaagtctgcctatgacttacccaattatatttttaatatattgcacagttacttgaatgcactggatttttgaatgtcttccccttataagatttccttaagaagaggaacttttgtatgaccacggtagcagtgtttagcatacaacaggcaactgatacttttttctttatttggaattaaatagtcaatctcaactctgcacttac

SEQ ID NO: 477578 - DNA, 627 bp, Homo sapiens
tgcctatctaggctcagtaaccaataatggctgaatgttgtttctaaacaacaagctgaatgttgtttctaaagcaggtattagattataacctcctgcgtaaaactgttcagtatgtctcccagtgtcctgagatacctacttcctttgtatgacacttcagacctcacatgtttactaatttctcttttcctctctggtcaatacatgttttatagtctgctctaataataacgaacaaacccgtggtcacatctctgaacctgtatacgtgctgctgtctgccaggaaaaatccctgcttcctcccacttgtttgtctttcagatctcacctaaggggttattccaagaaaagttccctaacccttgtctcccagtctcctcaagtctgtgaaggatgttycttttttatcctcctaagtctgcctatgacttacccaattatatttttaatatattgcacagttacttgaatgcactggatttttgaatgtcttccccttataagatttccttaagaagaggaacttttgtatgaccacggtagcagtgtttagcatacaacaggcaactgatacttttttctttatttggaattaaatagtcaatctcaactctgcacttac

SEQ ID NO: 477579 - DNA, 670 bp, Homo sapiens
gggaacataacattttattggtatggcaatgtcctaattaatattaatgttattactattaaggcagaatagccaaaaagttactgggacacacctaacactttttgtcataaagaaagagaattcttacagctagatgtacagaaatatgtgacaagacaaaaatgaacccttgtgaattactttctagcagacatttgttattktgaaacatttgttatagtgtactactctttctctttgagcatggataggaaaaatagcctaagatggaggctctctgttgggaagattttgttgtacgatcttcccctgctagaaaatttgacattgtctggagtcatttttcattgtcacaactatggaaggtgcttctggcatctagtgagaagaagcctgagatgctactaattattatacaaggcataggacaatccttcaaataaagaattatctagtacaaaatatcaatatctaggtgaaaacataggtatttatctcctttttactcaagatgaaatcaatttccaaaatgctaacaactacacaaagaaaagcagcagtagcaaatgacattgttgagagtagtattaaacaaaacacaaaactgaaaaaaatgaatgtattaatatacaaatagtaaaatattacaaactgaaagtcttacagg

SEQ ID NO: 477580 - DNA, 506 bp, Homo sapiens
gtcctagccgatctctttgtttttaygatgttataccactgtaggttagaaagcaacatttttctaagagtaataggctttctgaattgaaaacgaaactgaattttttaaaagatgagtaacaatacttcactattttaaagctattgtcctggtgtccccctttcatccacaacaaataaatttgtagaacacaaagagctaaagataatgcttttgactctacctattttttataatttttagaagaaaaacacatagcctaatctttttatcattttatttattcaacaaatatttattgattgaacactatatgcaagaccttatgctaggtgttgagaattcaatggtgaacatagcacatatactctctacttttttgaagtttgaaatctgaatggtggaacatttaacaaacaaataaaataatatatagaatactatacattgactgctgtaaggaaacaataggatgctgtgatgtgttgcatgagagatgacag

SEQ ID NO: 477581 - DNA, 497 bp, Homo sapiens
tttcatcatattttataaaaaggtactaattgagagacaattggctgaggtctttcatatttgagactatgcattggttgcctttattcttggagatcttgatcacttacaatgagattgagtcctgttagtagaggctaggttatataacagaaacaaactaccctcaaaatcttagtgttttaccacaccaaaagtttcattctgctctacacagtcactgagagagaatgtcaggaaacagagggttgtacccgttttttccagaatatatggccaccacatctgccaaggcagtggaagagagaaagcagataattwataatcatttttaagtgcctgggctttccagtggcacaggttcctttgtatcttactgtttaggcagcacttgtcacacagcctcagcctaactgtaacagaggctggaaaacacatagcaagtttggaagtaattactacctacatctctgggtcggtgtaaatattgtagtcat

SEQ ID NO: 477582 - DNA, 556 bp, Homo sapiens
cagagcccatgcccaccaggaactcacgctggcccgcgagcaccatgtgcagccccagttccygcccacacctctccctccacacctccccgcaagcagagggagctggctccggcctcggccagcccacagatgggctcccacagtgcagtggtggagtgaagggctcctcgagcatggccaaagtgggcaccgaggccgaggaggcaccgagagtgagcgagggctgccagcacgctgtcatctctcaatgccactgtctgagtggcaattgcgtgttctcttcatgtctgtgtgggttttctctgggtattccagtttcctcccctacatcccaaagctgtgcacatgaggtgaactgccatgtctatatggttcctatatgagtgagtgtgggtgtgtgtcatagataagagatagcagaagaattgagagatgagtcagcccaaggcaaagaatgtctctttttatgaaaattgggagatgtaaaactgaaacctaacagaaaacactttccaaatcacataaaacatcacttatcaattgagctaaaaga

SEQ ID NO: 477583 - DNA, 556 bp, Homo sapiens
cagagcccatgcccaccaggaactcacgctggcccgcgagcaccatgtgcagccccagttcctgcccacacctctccctccacacctccccgcaagcagagggagctggctccggcctcggccagcccacagatgggctcccacagtgcagtggtggagtgaagggctcctcgagcatggccaaagtgggcaccgaggccraggaggcaccgagagtgagcgagggctgccagcacgctgtcatctctcaatgccactgtctgagtggcaattgcgtgttctcttcatgtctgtgtgggttttctctgggtattccagtttcctcccctacatcccaaagctgtgcacatgaggtgaactgccatgtctatatggttcctatatgagtgagtgtgggtgtgtgtcatagataagagatagcagaagaattgagagatgagtcagcccaaggcaaagaatgtctctttttatgaaaattgggagatgtaaaactgaaacctaacagaaaacactttccaaatcacataaaacatcacttatcaattgagctaaaaga

SEQ ID NO: 477584 - DNA, 518 bp, Homo sapiens
aatctaaacgtgtcattgtagtagagccgcctctccaataccatgaactttatttggcttagttgggtatagaaaatagaaatatacagtggcaatgcagatatatatggctctttcctgatggtgttttgaggacagtactatttgtccctgagatctttcttctgcctggctgatctggtagcctgtatattaatttcaacttatttattgtttaaaaaaaaaaaaaaaaaagaggtgaagctarggcccatctgaaacaatgttattaaaaatgtgtgaacaaggacttcagcccatttgttgtattcataaagggtggcttcacaacctccaccccctttacaaaatttagttcacagagttttgacagtcatgcagtctttttctgaagtatttccaaaagtgagacaagaaaaaaactcatattgaaacaatatttgtgtgttttcgatagcagctaattacctctatgctggtttgagttatcaccaggctatttcaggaggatccagtgc

SEQ ID NO: 477585 - DNA, 607 bp, Homo sapiens
tacattttacattctagcaggtgtgtgtgtgtgtgtgtatttcttgtgtgggcatatatataaactctctgtaactgggggaaacactttttttaaccaatttacactctcacagtccgttacatataactagggggaaacttttttaaaccaatttacactctcacagtaccttgcacatgtatgtatgtgtgtgggtgtgtgtgtgtatatattatatattatatattgttgaccaccaaagaaaactaatattttcaagcttccctttcaccagtctttgaactatttttttctcttactttccaatattattcaccaccattcaacagaaacaaactttaaaagcagagccccaaatgagaatttttttgaaatgattgcaagcaatggaaaataaactgttacagccccaaataccttgcaactgtaactatagtgttcactgcagtgattactataatgtgcagtgtggcagagttatagttaccacaggaatcataaatttgattktctgagattttgtgtgttcaaaatctcaactataatactgccttcacatattgttttttcattcgttatacatgtacttgggtccaaagtaggc

SEQ ID NO: 477586 - DNA, 676 bp, Homo sapiens
gcacagggagaaattatgatattattgcccatagctcctattatatcatatttgaggagagtaaatcctcagatgatccttaaaggaagactyacagtcatcagaaagcactttagaaaggtgatttaggagggaagatcaggtggtgaggctggggaagagttgttcaccatcttccatattggatgagtgctaagttgctgcaatgagctcttcaaagtcagggacctaacttcttctcctttagcccagtgcctgacatcagtaggtgcacaatatgtatttttttatacgaatgcatggtgtaatctgggccccatttctatgaagaggactgtttaaaagttcattcctttgagtcaagtctttggcaacttcaagatatccttctaaaataaaggcaggacatccttttgattcttctcagcattccatgtttgattgggtattagtctgcttgcatatctctggtagagcataggaagaaaggggcaggctgtggtttcatgttttgctgtatgcttttctcatcttcacaaaaaaaccttgtaatacaggcattttaatctccattttacaaatcagaaattagtggctcagagatgttaaataagttgcccatgaccatggagctagtaaatgataaatccagggagtgatcataagcctgttttgg

SEQ ID NO: 477587 - DNA, 628 bp, Homo sapiens
agttgatgctggaatgagttaagattttgggagttattggaatggaattaatatattttgttctgtgaggacatgtgttttgttgggacaatggctgcattctgtggtttgaatgtccccaccaaaacttacattgaaatttaatgccaatgtaatggtattaagagrtgggacctttaagatgtgattagattatggaggctatgccctcataaacggaccgataccattatcatgatcatagattagttatagcaggagtttggccccctttttctcccttttccatgtgcatgctttcttatctctctgtaaaatgacccttgctagacaccagtgccatattctttgacttcccagttctgacaacaatgagctagctaagtctttcttcataaattacccagtctctggtattctcttatagcagcataaaaaggactaagacttgctaagaaacaagatatttcattattttagctgtttgttcccctatagtacttatagcaattttagccctatagaccacatgcagactaaatttcctgtccttttacttaggtttaatgagtttttcacccacaaaaaggaaagataaagttttcaagatacaaaaaaatctctcatg

SEQ ID NO: 477588 - DNA, 628 bp, Homo sapiens
agttgatgctggaatgagttaagattttgggagttattggaatggaattaatatattttgttctgtgaggacatgtgttttgttgggacaatggctgcattctgtggtttgaatgtccccaccaaaacttacattgaaatttaatgccaatgtaatggtattaagagatgggacctttaagatgtgattagattatggaggctatgccctcataaacggaccgataccattatcatgatcatagattagttatagcaggagtttggccccctttttctcccttttccatgtgcatgctttcttatctctctgtaaaatgacccttgctagacaccagtgccatattctttgacttcccagttctgacaacaatgagctagctaagtctttcttcataaattacccagtctctggtattctcttatagcagcataaaaaggactaagacttgctaagaaacaagatatttcattattttagctgtttgttcccctatagtacttatagcaattttagccctatagaccacatgcagactaaatttcctgtccttttacttaggtttaatgagtttttcacccacaaaaaggaaagawaaagttttcaagatacaaaaaaatctctcatg

SEQ ID NO: 477589 - DNA, 511 bp, Homo sapiens
ttgagtttacacttttttattttgctgatcccctaactaggctggttgaatactgagtacttctttagagggtttatcagtttggaactctgtattagccacctaacattcaagctctaccactctttcactttttaccttttcgcctcagcttctaatatttgcaataaattagttgttctgattgagtttgtctgcaaattctagtgcctaccacctagagcattaaggtaaagagaaagacaataggtgaacatgtggggcttcatggactctctaaaattatatatatataatattttaccctggaaagcatggccatagctctttattatccttgcaatggaatctgtgactgctcccaaacaatttagaatcatttttaccttattgtctgtactatcactattatgtgctctcaaagtaccyacttttttcctttttaaaaatcaccacatgaccaaattctaggctctaatccaatcttgtgtctataaaaatttatccacag

SEQ ID NO: 477590 - DNA, 647 bp, Homo sapiens
gagggagcatgcaagcacataaggcgggaactggagtgcaccaaccctggaaccagctggctgcttcagcactggcaggagtgaactccactcacttagacctgcagcagtccactccttgtgggatggagtgcatggttgagcacgtgcaggagtcagggtgagtgcttttgggtgctggcaggagcaaactctgtgcaggcctcatggcagaatckggggagatgcctgcgacccctgaagcctcagagggagaatgttacagtgctattttagctctgccatctgcagatggcttaagtgttaacagctcagtgggccttctgacttttcacatgaggcagctgcccctctgccagtgagagtgaaaggccagtatgacagcctttagtgttcgcactcatggcacccaaactcttgtctggcatccaggagaaataaggttgcacaaataaattaaaagatggtaaatgtggggggattttattgccaatgaaagtggcttttagtggaagaggagctgaaaaagggatagggtaggaaggtaatcttcccctgaagtctggccatctccagctggattcttctccaaagttagccatcaagcgttcctctaaagtcaagctggttctctccaatgttgagcc

SEQ ID NO: 477591 - DNA, 647 bp, Homo sapiens
gagggagcatgcaagcacataaggcgggaactggagtgcaccaaccctggaaccagctggctgcttcagcactggcaggagtgaactccactcacttagacctgcagcagtccactccttgtgggatggagtgcatggttgagcacgtgcaggagtcagggtgagtgcttttgggtgctggcaggagcaaactctgtgcaggcctcatggcagaatctggggagatgcctgcgacccctgaagcctcagagggagaatgttacagtgctmttttagctctgccatctgcagatggcttaagtgttaacagctcagtgggccttctgacttttcacatgaggcagctgcccctctgccagtgagagtgaaaggccagtatgacagcctttagtgttcgcactcatggcacccaaactcttgtctggcatccaggagaaataaggttgcacaaataaattaaaagatggtaaatgtggggggattttattgccaatgaaagtggcttttagtggaagaggagctgaaaaagggatagggtaggaaggtaatcttcccctgaagtctggccatctccagctggattcttctccaaagttagccatcaagcgttcctctaaagtcaagctggttctctccaatgttgagcc

SEQ ID NO: 477592 - DNA, 649 bp, Homo sapiens
tggatctgaatacttaatatattttgtatgtcaattttactctaagtgatctataaatctaacacgactccaatcaacactctagccatctttgctgataaaactgataacctgtctttaaaatttataggcaaaagatttacaatacatgacacaattttatgtttcataatctttgctattttcrgactccctttatttattgccacataaacttcaaggttattttaaacaattaaaaaaactgaccctgattagcaatctcatgtaaaatctcatttaaatttatatattaattttaagagcactttctttcctcatcaaaacatttattcagatattgttttaagtacacctaatgatttctgttaattcataaacgtcattcaatttttaaattaatttatatgtattgcctaattttccccttattaaaatgaaatgtttttgtatttccaattatacctaaaatgatgtctttagaagaaaccaagtctcctatgttagtgtttcttagaattaatgtaataatattgctaggcgtttatttggtgttagtaatctataatttgcataatattggaaagggagaaaatctttagtttcagtattaggaatgacttaatgaaattgttgaaaatattgtaca

SEQ ID NO: 477593 - DNA, 649 bp, Homo sapiens
tggatctgaatacttaatatattttgtatgtcaattttactctaagtgatctataaatctaacacgactccaatcaacactctagccatctttgctgataaaactgataacctgtctttaaaatttataggcaaaagatttacaatacatgacacaattttatgtttcataatctttgctattttcagactccctttatttattgccacataaacttcaaggttattttaaacaattaaaaaaactgaccctgattagcaatctcatgtaaaatctcatttaaatttatatattaattttaagagcactttctttcctcatcaaaacatttattcagatattgttttaagtacacctaatgatttctgttaattcataaacgtcattcaatttttaaattaatttatatgtattgcctaattttccccttattaaaatgaaatgtttttgtatttccaattatacctaaaatgatgtctttagaagaaaccaagtctcctatgttagtgtttcttagaattaatgtaataatattgctaggcgtttatttggtgttagtaatctataatttgcataatattggraagggagaaaatctttagtttcagtattaggaatgacttaatgaaattgttgaaaatattgtaca

SEQ ID NO: 477594 - DNA, 577 bp, Homo sapiens
tgtcaacagactggaactataggaaatgctaaaaggggtcttacacatggaaatgcaagattgatattcaccataataaacacacatggaaatataagtgcattagtccattttyacactgctataaagaaatgcccaaaactaggtaatttataaggaaagaggtttgattgactcacagttttgcatgactggagaggcctcaggaaacttacaatcatagtgaaaggggaagcagtcaccttcttcacaaggtggcaggagagagaagagtgagcaaaagaagaaaagccccttttgaaaccaacagatcttgcaagaactaactatcacaagaagagcatgagggaaaccatccctgtgatccaatcacctcccactaggtctctccctagacacatggggattccaattcaagatgagatttgactggggacacaaagtctcaataaaactcacaattctcatgcctgtgtccctaatggtaatgcctaggttttcttctagggttttcaggacataggcatgggcaaggacttcatgtctaaaacaccaaaagcaatggcaacaaaagcca

SEQ ID NO: 477595 - DNA, 577 bp, Homo sapiens
tgtcaacagactggaactataggaaatgctaaaaggggtcttacacatggaaatgcaagattgatattcaccataataaacacacatggaaatataagtgcattagtccatttttrcactgctataaagaaatgcccaaaactaggtaatttataaggaaagaggtttgattgactcacagttttgcatgactggagaggcctcaggaaacttacaatcatagtgaaaggggaagcagtcaccttcttcacaaggtggcaggagagagaagagtgagcaaaagaagaaaagccccttttgaaaccaacagatcttgcaagaactaactatcacaagaagagcatgagggaaaccatccctgtgatccaatcacctcccactaggtctctccctagacacatggggattccaattcaagatgagatttgactggggacacaaagtctcaataaaactcacaattctcatgcctgtgtccctaatggtaatgcctaggttttcttctagggttttcaggacataggcatgggcaaggacttcatgtctaaaacaccaaaagcaatggcaacaaaagcca

SEQ ID NO: 477596 - DNA, 577 bp, Homo sapiens
tgtcaacagactggaactataggaaatgctaaaaggggtcttacacatggaaatgcaagattgatattcaccataataaacacacatggaaatataagtgcattagtccatttttacactgctataaagaaatgcccaaaactrggtaatttataaggaaagaggtttgattgactcacagttttgcatgactggagaggcctcaggaaacttacaatcatagtgaaaggggaagcagtcaccttcttcacaaggtggcaggagagagaagagtgagcaaaagaagaaaagccccttttgaaaccaacagatcttgcaagaactaactatcacaagaagagcatgagggaaaccatccctgtgatccaatcacctcccactaggtctctccctagacacatggggattccaattcaagatgagatttgactggggacacaaagtctcaataaaactcacaattctcatgcctgtgtccctaatggtaatgcctaggttttcttctagggttttcaggacataggcatgggcaaggacttcatgtctaaaacaccaaaagcaatggcaacaaaagcca

SEQ ID NO: 477597 - DNA, 415 bp, Homo sapiens
aagtgacatcttcttgggtcaaatttctctsctcacttcagtccatctgctcacagcttatcataataaacacttctaagttaaagagcaaagagtacacagcaacgagagagggacagcatcttggatattggctagacaataatattagagcaaaaacaacacccagctatctactcttctttcctccagccccattccacactgcccattcacccctcccccgacccttccctgccccgtgtgtggcagccacatgccaggtgggagagaagctgaagggaagaaatcaaagctacccataagtgactgaagagaagaaataggcctaatgggaagaataatgccaggtggaaaatctatgtgtcacttgcttttggaccaatgaaagtagaatgtattatgtgattgatac

SEQ ID NO: 477598 - DNA, 647 bp, Homo sapiens
ataagacatagtcaaaatagctgtcaaaacatagaaggtggtaaaggcaataatggagacaaaattcaacagggtttcagtagaaattgttgttctgctagggaaagcaaggaaggcttcctgcaagaggtgactcagaggctgggttctgaaggacatctaggatttcaacaaatgtaggaaacagaaataaggttgaggaaataacattctaagcagtgggaccagcacagcaaaaagcagtaattaaaaggaaaatgaagtctaatcagtgggttagtttggatggaatatagtatacattagagagaaatgaattttactggataaaaaaaggtaggttgaggccaaatcatgttargctttcaatgttgtattaagaaatataaactctcttcagttggtattaggaagtcattgagcaaaatgaccagaaaaaaaacccaaaatcttacatatatttcagtatgttctgagcagctggggaagaagcagaagagaggaattataacagataaaatagagatgaggtaacagatggcatgagatctcagaaaagataaaagggcaggaggccaaggacctaggtagactcaactgtggaaggtgataagcaaatttttcctctgagacaggaagacaggagg

SEQ ID NO: 477599 - DNA, 647 bp, Homo sapiens
ataagacatagtcaaaatagctgtcaaaacatagaaggtggtaaaggcaataatggagacaaaattcaacagggtttcagtagaaattgttgttctgctagggaaagcaaggaaggcttcctgcaagaggtgactcagaggctgggttctgaaggacatctaggatttcaacaaatgtaggaaacagaaataaggttgaggaaataacattctaagcagtgggaccagcacagcaaaaagcagtaattaaaaggaaaatgaagtctaatcagtgggttagtttggatggaatatagtatacattagagagaaatgaattttactggataaaaaaaggtaggttgaggccaaatcatgttaagctttcaatgttgtattaagaaatataaactctcttcagttggtattaggaagtcattgagcaaaatgaccagaaaaaaaacccaaaatcttacatatatttcagtatgttctgagcagctggggaagaagcagargagaggaattataacagataaaatagagatgaggtaacagatggcatgagatctcagaaaagataaaagggcaggaggccaaggacctaggtagactcaactgtggaaggtgataagcaaatttttcctctgagacaggaagacaggagg

SEQ ID NO: 477600 - DNA, 624 bp, Homo sapiens
atgccgtatcaagtagaacaaaagtcaccagcaagctttccatgcttgaaatgaagccgagagagcttttgaagagcatatattttgtaggaaacttaatttcctaggaaggctaaaaacttgttttctttataggagctaaatggcatggacatactttgagtactgcatamaggactttgcaaagacactcttggtaatcaacataaaaagagaaaggccaaatctttaaaacttaagcaaaatgagcaacagcatcaagatgataagaaatacatggtttgcacatcatggtgcaaaaagtgtttcttggtagtggtcaagatagtgtggacattaggaatgggaaaactactcattgcttgtttgagcaaaaaccttatctcccaatatagatatgtatttatttgcctgaatctaaaacatttagatcatagaatttctgaaaatagctgtatagaaacagcttcattcatttaaaaccacatacaagcaatcctaacaatctgcagaatgttcctaagctatcactgaaagcaaagaactctaccccacaactggatttattgccatttatttcaaaatccaaggaaaaaaagtcaattcactactttagaaaattaa

SEQ ID NO: 477601 - DNA, 486 bp, Homo sapiens
ggactgtctggtttcctgtgacatccaggtgacacaccaggtttccactgcttttcgtcattagcccagatgttcccagttacttggacagagagccttgtagatcccygtatatggagtcttccttcccgtggttcattagaaatggcaaagccaaactggcagtattcttcaatttgttgataagagtgcttcagtgcatgtatttacaaatacacattgttgttttcaatttgtttattcagtgaatcaaaatagcaaaacacattaactataagacaagagaaggataaggaagtaacatctattgggtacctgctatgttccaggcaatgacagagctgcttgacagaaaatgtttaatgtcttcctcattgtagctacatgtggtgtttcaggtatgattactgcatgttacagtgggaagtagcccagcattcttgaaagagtatagggtcctcactatctgtgtgaatttgagtagtt

SEQ ID NO: 477602 - DNA, 598 bp, Homo sapiens
aggaaaaggggttctactttcattagcagaggcaatttcaggctctgcacagctcaagaggcctgtgcttactcattcttccaatwgtctctgcaagaaggatgcttctctcaagctcatggtctttggatggaagtcttccctcttctgtctttgctccttcttcctatgtagttggtagcagtgtttactatcaactatggcaaaattccacttggcatcagcagaactctatcaaagcattatagaatcctttgcttggagcagaccttcctcctacagcttctctgacggattgccattctgcctcttgatgatgacactgccctgtaacttttgcacacaattcctagctctgctccactaacaaatacaccttggggaaagtttggatgactgcatcagtcagcattcaaccagaaaagcagaaccagtaggagaaaatgtacaagatatttttttgtaagaaattgctttacacgattgtgggagcaggctccgtaagtctgtaatctgtacggcaggctggcaggaaggatcggctgaatctaccgtccacgggtggaatgtcctcttaagctgtgctcttcacatcatt

SEQ ID NO: 477603 - DNA, 628 bp, Homo sapiens
aattctagttaatatgaacagcttcctaaggaaaaggggttctactttcattagcagaggcaatttcaggctctgcacagctcaagaggcctgtgcttactcattcttccaattgtctctgcaagaaggatgcttctctcaagctcatggtctttggatggaagtcttccctcttctgtctttgctccttcttcctatgtagttggtagcagtgtttactrtcaactatggcaaaattccacttggcatcagcagaactctatcaaagcattatagaatcctttgcttggagcagaccttcctcctacagcttctctgacggattgccattctgcctcttgatgatgacactgccctgtaacttttgcacacaattcctagctctgctccactaacaaatacaccttggggaaagtttggatgactgcatcagtcagcattcaaccagaaaagcagaaccagtaggagaaaatgtacaagatatttttttgtaagaaattgctttacacgattgtgggagcaggctccgtaagtctgtaatctgtacggcaggctggcaggaaggatcggctgaatctaccgtccacgggtggaatgtcctcttaagctgtgctcttcacatcattca

SEQ ID NO: 477604 - DNA, 628 bp, Homo sapiens
aattctagttaatatgaacagcttcctaaggaaaaggggttctactttcattagcagaggcaatttcaggctctgcacagctcaagaggcctgtgcttactcattcttccaattgtctctgcaagaaggatgcttctctcaagctcatggtctttggatggaagtcttccctcttctgtctttgctccttcttcctatgtagttggtagcagtgtttactatcaactatggcaaaattccacttggcatcagcagaactctatcaaagcattatagaatcctttgcttggagcagaccttcctcctacagcttctctgacggattgccattctgcctcttgatgatgacactgccctgtaacttttgcacacaattcctagctctgctccactaacaaatacaccttggggaaagtttggatgactgcatcagtcagcattcaaccagaaaagcagaaccagtaggagaaaatgtacaagatatttttttgtaagaaattgctttacacgattgtgggagcaggctccgtaagtctgtaatctgtacggcaggctggcaggaaggatsggctgaatctaccgtccacgggtggaatgtcctcttaagctgtgctcttcacatcattca

SEQ ID NO: 477605 - DNA, 533 bp, Homo sapiens
agggtattccaaagaggttcctagaattagcgagttttaaatggtggaaatttccaaccctcatggcaagaggagtaattttgaaaggctgagctgtttagcatacacctaactttgtaccaggtggtgatcctggatttttactcacgtataaaatcagcctctttatagactcagtctgatagcaacaatataaacatatgcatgaaaggctgggctatcacaattatacattaataaggtarcattcatgttgtatattaatgtgtttctgcaagtatttttgtttgattaaatgaaaaaaaaagcctgaactatattttgaaatgcatttggtgatgaaagaggattgggttagaggcaatttacctatcagttccttttggaggtacagcttagagatctcagagctataaagtagaaattgcctggcagtcctgcctcattgctaaggtgacaatgagagtgtcagatgggcaccctccctggatgacctgaagcattagtgggtcttagtcacttcatattaaata

SEQ ID NO: 477606 - DNA, 595 bp, Homo sapiens
ggttaaaggcagtcaaaataacagtgacagccattacagaaacacagacttcattgcttgcaacgaagatgtgggtgctgtgaagcagaaccactgaaatgtgcctkggaaaacatgaagtgcactgcataatacaacaaactatttccattatatgagaaaaaaagtcttttgtgaaacttcacattatagaatcttaagtttctccaagtgaatttattttgaagggaggacacattggtataagccaaagaagtctcattgaatcttttgtgttcattttagtagtcagtacagtgaaatgggttaaaactaattgatttctagatcactaaaggaaatgtcatatcattaaatgagcatttcattcaaagggtatgttattctttgctactctatttgcaaacaggcttctgcttatcttatgattgttccccaagcacacagtagaaattgggccaaaagccttttcccatctgtctttgtgttcaggatataatcctcaacaattacaaaatacagcaattatatcttttgacatttctggatctctgtgatcctttacaagattagtgtgatgattaagaagggagag

SEQ ID NO: 477607 - DNA, 537 bp, Homo sapiens
cccagagagctccctcaatcctcccactatgtgaggatgcagcaagaagactgctgtctatgaaccaggaatagagctctcaccagatgcccaatctgtcagcacagcctccagaaatgtaagaaataaatgtttgttgtttaaaccaccaagtctatggtatttttgttataacagcccaaatggactgagacagttagtgtatctttaaggctagctatcttggttgaagcctgcttttaaaggatctcctggatctcctgagatccagtttgaattgtttagcaccgttccccttggtactgtcctcggatagcgagtgagttctcctgagatctgttcctttaaaatattmtgtcctctcaaatccactatattatgcagaatcaatctctattatgtggctataaacaatgctagaattccaggtacccatctcacacatacttgtcattgaccaaaacatgggtggctaagagaaaacctattattagtgtttggaaaaatagcgcaaaatgcaagtcacactgttggcat

SEQ ID NO: 477608 - DNA, 540 bp, Homo sapiens
cacttcacatgtttttaaggaatttgaatcccacacagctacttgcaccagacaccaaatttgccagcaccttaatcttggacttcccagcctcaggactgtaggaaataactttctattgtttataagacacccagtctatggtattttgttttagcagatcaaatagaccaaaacacttagtaaagaggatctgactgtttccccagcagtctttataaaacattttctcttttcattctgcaaactgcagaaatataagagaatgtgctcactcactggtttacattctcgctgacacataatcacagatgggtgtggcattggaggtactacygtctaaacatgacatgtttttaacaatttagaatttgaaaatcaaaacttacattcaaatcttggtttgagaccataaaaaattcactatttcaagctctttcataattttgggacttctggagaataagagaagttgggaattctggggagaacctggcacaccagggcagaaaagaacatttggagtggcagcaccaagca

SEQ ID NO: 477609 - DNA, 603 bp, Homo sapiens
taagcaaaactgtgaagtagaaaagattgttcttttcttgcatttcccacagcaccatcttctttctctttctctctctctggatcctttccagagcactcttcagccaggacctgacctcccagacttggtaccctttgctgtcccatagctccctaaatycttgctaaattgactcttctccttagagtagtgcttttgttattccccatctcccacctcccggctatgtctgctgtctatccctattctctgaggtataccagttcccaggcccatcaccccaggtgatttcaaacggaatcctttcctagctctcaacttgataaaggagaggccagaggaaaaactgtattgagtaatgatcttttagactagaagttggtgtacggtagccctgcatttagccacagatgtactgtgtttggcttaacacgtaaattcgagatgcaaacctcataaactctggatgcttttgaaaactccaaaattctttcagcactaggctagctttcccacatggcaacggacatcagaagctgtctgtgtgagttgagatgcaggctcagcacatcttcccttctctgtagtgcccttgacact

SEQ ID NO: 477610 - DNA, 635 bp, Homo sapiens
tacctgatggtacacaccacatgctcttttgagattcaggaagacaacattgaaacgttttggtatagtttgtgttttctgtcatttttttttctgtaggattaataatgtgcatattgtattaatatagtagtatgtgaatatttacacacaaatacatgaatataatagtgcccaatataaaagatttggagactactgatctatgtaacgattatgtttcaataatcaacaaagtcccttcaaaccaaacatttatgcttctaactatgtgatggtgtgactctacatatttgtattcagaataaatatttaaatagttttatacttgcatcacatggagggattgctttctatttgctgtttagtaacgtcaattaaatacaaatttgtacccayacaccttcgctatcttgctggcaatttgggtgcataactcatttcaacctttgaacactatgattcttgtttaatcactattgagaaggaatgtttcctatggggctacaggcatagcttcatttgcatacatagctcagaaactgtagaacattagggcagttgttaaaaatccattagcatctctataagcatccctaaatggtagtaaggaagagacaacatgaaaagtggca

SEQ ID NO: 477611 - DNA, 598 bp, Homo sapiens
ctagttgttctgttggaaggaatacctgctgagagtgtagctggcatgcattccttaatttcctgaattatcatatctttataatcagtttctgagccatgacaccattataaagactgaaatactaggttccaggagagtttctaggagatatactttgaagtggaatatttaatttagcctttatcattcaatgtgtggtgttcacatatatgtgtctgtgtgtgtatgaatttatrcatatatgtacatacactagatttttgtttgccttacctaagccatgagccacttatgttaatttatcataatgagttttcagacccccagaaggtcttcaagtagttaagtaagaaatattatctcacttaagaaggctgaatcagacaaaatatatttggattgtgcatacactcagagaaaaataaaattacatcttacagacactgcagggctccaaaataatggatacacttttaattgaaaatgacaatgatattattttcatagtttaatgattaacaactctttgcatgggagtggatagatgaagtcaattggctcatgttttataatcatgcttttatgaggctccagt

SEQ ID NO: 477612 - DNA, 634 bp, Homo sapiens
gctgatgcaatgcagtattctagctgcagtcagttgcggggcggggyggggggtgtttgttttaaatgaatatgtcttttctctttgcaggatcaaggacaaacacctatagtcacaaaaaacaattcattctggaaagcctgagtgagcaggagagatgatagaatcctccgtggaaaggaaggactgttgctatggaaaccagatgatccttcagtgggggccccagtgcacttgccaggctgcctaaccctgtgtattaacatcatggggctggaaggctgcctgcatctctttgaaaagagatttttcagatattggtgtgatgagactttatgcaccttgagaaaagtaaatcagcatctcctgggaggggctaagttgcctagaaccttaaaacactagaggcccacacaccacagccgactggggtgactatattggctactcttgacatttctccagagggcatccaagaaggcgtgtcttaaggattctctctctctctcttttttttttttttcgagatggagtcttgctctgttgcccaggctggagtgcagtggaacgatctcagctcactgcaacctctgcctcccaggttcaagcaattctgcttcagcctctcaagtag

SEQ ID NO: 477613 - DNA, 559 bp, Homo sapiens
aagaagcatcggtagggaatccagaaggagcgttcatgaaggtgttacaagcccggaagaactacacaagcactgagctgattgttgagccagaggagccctcagacagcagtggcatcaacttgtcaggctttgggagtgagcagctagacaccaatgacgagagtgattttatcagtacactamgttacatcttgccttatttctcagcggtaaacctagatgtgaaatcactgttactaccgttcattaaactgccaaccacaggaaacagcctggcaaagattcaaactgtaggccaaaaccggcagagagtgaagagagtcctcatgggcccaaggagcatccagaaaaggcacttcaaagaggtaggaaggcagagcatcaggagggaacagggtgcccaggcatctgtggagaacgctgccgaagaaaaaaggctcacgagtccagccccaagggaggtggaacagccccacacacagcaggggcctgagaagttagcgggaaacgccgtctacaccaagccttcgttcacccaagagcataaggcagcagt

SEQ ID NO: 477614 - DNA, 559 bp, Homo sapiens
aagaagcatcggtagggaatccagaaggagcgttcatgaaggtgttacaagcccggaagaactacacaagcactgagctgattgttgagccagaggagccctcagacagcagtggcatcaacttgtcaggctttgggagtgagcagctagacaccaatgacgagagtgattttatcagtacactaagttacatcttgccttatttctcagcggtaaacctagatgtgaaatcactgttactaccgttmattaaactgccaaccacaggaaacagcctggcaaagattcaaactgtaggccaaaaccggcagagagtgaagagagtcctcatgggcccaaggagcatccagaaaaggcacttcaaagaggtaggaaggcagagcatcaggagggaacagggtgcccaggcatctgtggagaacgctgccgaagaaaaaaggctcacgagtccagccccaagggaggtggaacagccccacacacagcaggggcctgagaagttagcgggaaacgccgtctacaccaagccttcgttcacccaagagcataaggcagcagt

SEQ ID NO: 477615 - DNA, 511 bp, Homo sapiens
catcggtagggaatccagaaggagcgttcatgaaggtgttacaagcccggaagaactacacaagcactgagctgattgttgagccagaggagccctcagacagcagtggcatcaacttgtcaggctttgggagtgagcagctagacaccaatgacgagagtgattttatcagtacactaagttacatcttgccttatttctcagcggtaaacctagatgtgaaatcactgttactaccgttcattaaactgccaaccacaggaaacagcctggcaaagattcaaactgtaggccaaaaccggcagagagtgaagagagtcctcatgggcccaaggagcatccagaaaagrcacttcaaagaggtaggaaggcagagcatcaggagggaacagggtgcccaggcatctgtggagaacgctgccgaagaaaaaaggctcacgagtccagccccaagggaggtggaacagccccacacacagcaggggcctgagaagttagcgggaaacgccgt

SEQ ID NO: 477616 - DNA, 559 bp, Homo sapiens
aagaagcatcggtagggaatccagaaggagcgttcatgaaggtgttacaagcccggaagaactacacaagcactgagctgattgttgagccagaggagccctcagacagcagtggcatcaacttgtcaggctttgggagtgagcagctagacaccaatgacgagagtgattttatcagtacactaagttacatcttgccttatttctcagcggtaaacctagatgtgaaatcactgttactaccgttcattaaactgccaaccacaggaaacagcctggcaaagattcaaactgtaggccaaaaccggcagagagtgaagagagtcctcatgggcccaaggagcatccagaaaaggcacttcaaagaggtaggaaggcagagcatcaggagggaacagggtgcccaggcatctgtggagaacgctgccgaagaaaaaaggctcrcgagtccagccccaagggaggtggaacagccccacacacagcaggggcctgagaagttagcgggaaacgccgtctacaccaagccttcgttcacccaagagcataaggcagcagt

SEQ ID NO: 477617 - DNA, 610 bp, Homo sapiens
gcatcggtagggaatccagaaggagcgttcatgaaggtgttacaagcccggaagaactacacaagcactgagctgattgttgagccagaggagccctcagacagcagtggcatcaacttgtcaggctttgggagtgagcagctagacaccaatgacgagagtgattttatcagtacactaagttacatcttgccttatttctcagcggtaaacctagatgtgaaatcactgttactaccgttcattaaactgccaaccacaggaaacagcctggcaaagattcaaactgtaggccaaaaccggcagagagtgaagagagtcctcatgggcccaaggagcatccagaaaaggcacttcaaagaggtaggaaggcagagcatcaggagggaacagggtgcccaggcatctgtggagaacgctgccgaagaaaaaaggctcasgagtccagccccaagggaggtggaacagccccacacacagcaggggcctgagaagttagcgggaaacgccgtctacaccaagccttcgttcacccaagagcataaggcagcagtctctgtgctgaaacccttctccaagggcgcgccttctacctccagccctgcaaaag

SEQ ID NO: 477618 - DNA, 526 bp, Homo sapiens
atttgaggtttgtgtgctgatttcttgattttgtagatagccactgtattgaattctcattacttccagtaaaatcttagttgattctcttaggcttctttggctaacatttwtcatttaatatgcaaataatgatagttttgtctcttcctttccaatacttctactctttccttcctttcccttttcctttttcctttcctttcctttccttttttttcccttctcagggccttgttgtcacccaggctggagagcaatggtgtgacctagctcactgtaacatcaaactcctgggcttaagggatcctcctgcctcagcttcctgagtggctgggactacaggcaggcagctaatttaaaaaatgtgttcgtagagacaaggtcttgctatgttgcccaggctggttttcctgccacttcagaggaaggactcaggtttcctttttctcctacttttaagagtttttattaggaattatctgttgaatgttatctaaaacagtcaataaaatgtattaagtgc

SEQ ID NO: 477619 - DNA, 526 bp, Homo sapiens
atttgaggtttgtgtgctgatttcttgattttgtagatagccactgtattgaattctcattacttccagtaaaatcttagttgattctcttaggcttctttggctaacatttatcatttaatatgcaaataatgatagttttgtctcttcctttccaatacttctactctttccttcctttcccttttcctttttcctttcctttcctttccttttttttcccttctcagggccttgttgtcacccaggctggagagcaatggtgtgacctagctcactgtaacatcaaactcctgggcttaagggatcctcctgcctcagcttcctgagtggctgggactacaggcaggcagctaatttaaaaaatgtgttygtagagacaaggtcttgctatgttgcccaggctggttttcctgccacttcagaggaaggactcaggtttcctttttctcctacttttaagagtttttattaggaattatctgttgaatgttatctaaaacagtcaataaaatgtattaagtgc

SEQ ID NO: 477620 - DNA, 526 bp, Homo sapiens
atttgaggtttgtgtgctgatttcttgattttgtagatagccactgtattgaattctcattacttccagtaaaatcttagttgattctcttaggcttctttggctaacatttatcatttaatatgcaaataatgatagttttgtctcttcctttccaatacttctactctttccttcctttcccttttcctttttcctttcctttcctttccttttttttcccttctcagggccttgttgtcacccaggctggagagcaatggtgtgacctagctcactgtaacatcaaactcctgggcttaagggatcctcctgcctcagcttcctgagtggctgggactacaggcaggcagctaatttaaaaaatgtgttcgtagagacaaggtcttgctatgttgcccaggctrgttttcctgccacttcagaggaaggactcaggtttcctttttctcctacttttaagagtttttattaggaattatctgttgaatgttatctaaaacagtcaataaaatgtattaagtgc

SEQ ID NO: 477621 - DNA, 594 bp, Homo sapiens
ttgtattgccattgtaaatgggatctttcttccattttctaattagttattggtggtacatgggaaaagtatttgaggtttgtgtgctgatttcttgattttgtagatagccactgtattgaattctcattacttccagtaaaatcttagttgattctcttaggcttctttggctaacatttatcatttaatatgcaaataatgatagttttgtctcttcctttccaatacttctactctttccttcctttcccttttcctttttcctttcctttcctttccttttttttcccttctcagggccttgttgtcacccaggctggagagcaatggtgtgacctagctcactgtaacatcaaactcctgggcttaagggatcctcctgcctcagcttcctgagtggctgggactacaggcaggcagctaatttaaaaaatgtgttcgtagagacaaggtcttgctatgttgcccaggctggttttcctgccacttcagaggaaggactcaggtttcctttttctcctacttttaagagtttttattaggaattrtctgttgaatgttatctaaaacagtcaataaaatgtattaagt

SEQ ID NO: 477622 - DNA, 402 bp, Homo sapiens
gataaaccttcatgtatgtaaaacaagtgtgcttaaaactgtaaattttttgcctcaaatatagataatcaaaatattaaattgccagagtgccaatggcactagcccctaataatatccaagtaaaggccaaagttttattgagaacatggttaatattatgtgcaaatacaaagaaagatgaggtgttttaggtcataatcattaatgtacyataaatcacagatttgtaaaatgttggagttgatgttaacaccctcatttaacagatgaggagaacaagaaaagtttaaagtggagctctaataaacctgaaggcatctatcgtaagctgcatgttatttacacccaatgactctacgtagaaaaaaatacatgcttctaacacgtctagtattacag

SEQ ID NO: 477623 - DNA, 550 bp, Homo sapiens
ctacacctacaacttatataggtgcaagaattttgccttttttagggatttatttgtatctgaaaaataaatgataaagaaggagtatattaatttgtaggccatttttatggttttatgtgataacatttaacttttggtaaaccttatattacttactgagaaactattttttaaaaaagatagggaggttaagataaaatactctttttgctttagtagacaaaatttgaaatgagcattctgaattgacatggatcataggaatttatttgaccactacttcattggcttagatttgattctttttttgacagttacctttatttgctttttactgatcaatttctcttatcatacagtagaagtatctataaagtaatgttcaaatgtacatattggagccttgattttaatactataatatttcaacattagcatacgaagtagtggattacaagaaatactaacaagctcttgttaaaatacagtttgtcacatgaattctacaagtaaygtcacaaagtgttactgtattttttccccctag

SEQ ID NO: 477624 - DNA, 462 bp, Homo sapiens
ccagccagctgatggtttttcaatcaaaactattccaatacttaatttaagaaaaaccagaaactactatttaggatttacagagcaagatatccagatttcaggaatgagaggtgactaattcccagagttgttttcaaattaaactgtcactttaaagctgtgaagggaaggccaaacaatttggttaagcatgtcctttcggcatggtggtggccatggctaaatggtttgtgtgggttcttaagccatggctaggatcctartgaaggtttccatgaaagtaatgttgaaactctgaaggaagcaactagccacagttatttttaaatttcctgcctgtttgtttctttgttgccagccacaggaatgggaaccgctaggtgtttttccatagccatagcagaacaggctcccctgttgagcagtgaagacgcctgggttagggggtgaaaccagaga

SEQ ID NO: 477625 - DNA, 610 bp, Homo sapiens
gagtcgctgggacaggccatggagcctgagaaccctgaagatcaaaggcaggcaaataactgctgtgggaagggcgtgaatttcccacaaagtgttttgtgaacatttacgtaacttcttttgtgttttgctactaatgtagtcatttgcttccatagccsttttgggtaatattaccaatatgaactcataagccgttcatttacttttgagatgaaaaatgttcttctttcagagcatcttgcttgccataataataggtgaagttgagcacagtgacctcatggctctggaatgaacgaaaaatcacaattcacacttaactcctagttttttttaaacgaaaaaagaaataaattatcatcctcaaagtgtaatttttaaagttccttttttatgtacctaatatgtctgggccaaatttaatccatctactcaaccatgtccattcctaatcataactcacatagaaaacgtaaaagacagaagctaagacaaaacttgtccttataatatgcatgtttttttcatggctgagatggggggggggttcaatgagttaagttactgaattctaaatactttagaattatgctgttaattgtattta

SEQ ID NO: 477626 - DNA, 610 bp, Homo sapiens
gagtcgctgggacaggccatggagcctgagaaccctgaagatcaaaggcaggcaaataactgctgtgggaagggcgtgaatttcccacaaagtgttttgtgaacatttacgtaacttcttttgtgttttgctactaatgtagtcatttgcttccatagccgttttgggtaatattaccaatatgaactcataagccgttcatttacttttgagatgaaaaatgttcttctttcagagcatcttgcttgccataataataggtgaagttgagcacagtgacctcatggctctggaatgaacgaaaaatcacaattcacacttaactcctagttttttttaaacgaaaaaakaaataaattatcatcctcaaagtgtaatttttaaagttccttttttatgtacctaatatgtctgggccaaatttaatccatctactcaaccatgtccattcctaatcataactcacatagaaaacgtaaaagacagaagctaagacaaaacttgtccttataatatgcatgtttttttcatggctgagatggggggggggttcaatgagttaagttactgaattctaaatactttagaattatgctgttaattgtattta

SEQ ID NO: 477627 - DNA, 610 bp, Homo sapiens
gagtcgctgggacaggccatggagcctgagaaccctgaagatcaaaggcaggcaaataactgctgtgggaagggcgtgaatttcccacaaagtgttttgtgaacatttacgtaacttcttttgtgttttgctactaatgtagtcatttgcttccatagccgttttgggtaatattaccaatatgaactcataagccgttcatttacttttgagatgaaaaatgttcttctttcagagcatcttgcttgccataataataggtgaagttgagcacagtgacctcatggctctggaatgaacgaaaaatcacaattcacacttaactcctagttttttttaaacgaaaaaagaaataaattatcatcctcaaagtgtaatttttaaagttccttttttatgtacctaatatgtctgggccaaatttaatccatctactcaaccatgtccattcctaatcatawctcacatagaaaacgtaaaagacagaagctaagacaaaacttgtccttataatatgcatgtttttttcatggctgagatggggggggggttcaatgagttaagttactgaattctaaatactttagaattatgctgttaattgtattta

SEQ ID NO: 477628 - DNA, 538 bp, Homo sapiens
gcacgcactccccgccttagcccttgttatggactgaattgtgcttcccatccccctgaattcatatgttgaagccctaaccccccacatgactgtatttggacatagggcccttaagtaggtaattaaggtaagatgaggccgtaaggtggggccctaatcccgcagtgtcctcgtaagaagaggaagagacaccggagatctctccctctttttgtgtgcacacagaggaaaggccatgtgaggatactgtragaacgtggccgtttgcaagccaggaagggagccctcaccagaaaccaaccctgctggcaccttgatcttagacttccaacctccagaattgtgagaaaataaacgtctgtttttggtcattcagcctgttgtgttttggtaggtaagcaagctgactaacacatacctcatgctcaagaccatgggagttatctgagaattcctctcattacctaccctccgcacccagtcatctgacctgctccccaagcccgtgagctccccactcctactataccacact

SEQ ID NO: 477629 - DNA, 553 bp, Homo sapiens
tcctttggctctttacccactgtcatcagactcccactcaattctgcaaaattgtctttcattcaacgtcttattatattgaccactcttttcctttgttttctgaattatctttctctacttctttgccttctagtgctttggatttcttttttagttgtaagatttgggttttttgtagaaaatagtcaaagtgagaagatgggcaaataggaacagctccagtctgcagctcccagcatgagtgacgcagaagacgggtgatttcttcatttccaactgaagtactgggttcatctcactggggcttgtcagagcatgagccgaagcagggcagggcatcacatcacctgggaagcacaaggggtcggggaattccctttgctagccaagggaagccgtgacaaacggtacctggaaaatagggacactcccaccctaatactgcamttttccaacagttttagcaaatggcagaccaggagattatatcctgtgcctggcttggagggtcccacacccacagagcctcactcacactcactgctagcac

SEQ ID NO: 477630 - DNA, 571 bp, Homo sapiens
tggatttgctgtaaaacctgtcatattcattcggttgatacattttaatacttaaggtgaaccataaaactactcagaagtgaccaaaataccattttattctaaaaatattcagttggtgatgtcaaacacacgtgagctacttatttttcttttatgttaattaaaaatatataaataggyttctcatgcagagcttagaagttgccaatgtggaaggaaaatacatcttgcgactctcaaatcactaggctaaagggaaaagtcaagctgggaactgcttagggccaacctgccccccattctattcaaagtcacccctctactcaatgagataaatgcatatctgatcgccttatttgaagaggctcatcagaaactcaaaagaatataaccatttgcctcttatctacctatgacctggaagtcccctctctgcttcgagtcttccctcttttgcttccagttgtcccacctttccagactaaaccaaagttcattgtgcatatgttgattgacgtctcatgtctccctagaatgtgtgaaaacaaactgtgctctgaatcccttg

SEQ ID NO: 477631 - DNA, 665 bp, Homo sapiens
acataaatggtgcctgggcaaaaaataaagagaatggaagaataaataaaactttttcacttcgagaaatgtgatttgactcctggtatccccagaaagagctgacagtgggtgaaagtcagtataagaaagataatccagggtttccaagcatagcagcattgttgacacatgaaccggttgtgacaggtgtgaacactgaaaacttattataaattagccaaactgttcacatcatcaattactccccagctcagtgatactcaggcttcttgttcttccttgtctgaacaggctgtgaatatctccctctaataaccattctggggttcctttgtgccataatckgtgtttccattttattaaattacttcatctttccgttatgccacatgtcgtaggtgagatggagtatagaacatttcaatatctcgataataagaacagtaaaaataacgctaatttagaagtcaaagaagttcttgagacatgcatttacacatgcatgtaatataagcttatttcaatcctgtataaatggtattatatatattagccttaattcatgtaagatgaaaatacaatttgatctgttcacatcagtgtagcaccattgatttagcacctttgtgcaaaacatcagcttttcaataaaaagtaaaacg

SEQ ID NO: 477632 - DNA, 534 bp, Homo sapiens
cctatactttttttttttgtttgagacagtctttctctgtcacctagtctttagtgcagtggcgctagcatggtttactgtagcctcaaattcctgggctaaaagcaatccttctgtctcagcctcccamgtaactgggatcacaggcacttggcactatgcacagcttatttgaaaaaatgtttttgtagaaacaggatctcactatgttgaccacgctggtctcgaactccgggcctcaagggatccttccgcttcagcctcccaaggcactagattacaggcatgagccacctaacacggccagcctatacttttatgaaatgtttgttttaattatagttttatatgtttatatttatatacattatcttagaatataaatatataacataaatataaattttatatattatattcatatttatatttatatacattattttcttttagattgccttgagttataatttacatacaatacaatttttgtatttttaatgtcatttgataaatttagataattgtagatag

SEQ ID NO: 477633 - DNA, 709 bp, Homo sapiens
aattctttccatgccttaagaggtagttattacaatgaagtaatattacaatgtattatttaattaaatattaaaatttaatatttaattaaattttaatatttaattaaattaattaaatattaaaagtagtattacaatgaggtaaaatttgatgtaaattttatgttttagaaaaacttttcattgagttatagcacattagacaatgaaattattgtatgcactcttagacactsatgcattacatagttgctgaactaagctgatggaatgcacccatagttttatgggtagtagtagttcactgtttcttactatcttagaatattgcgttgtatacatttactataatttattaattccttctaatagttatgatagttacaaaccatttagttgtaggctattttgaataatgctgctgtgaaggactctgtacatgttttttagtgcatgtatataagcatttgggagggcatatacctagtagtgtaatttctgacttataggaatatatatatatatatacacagtcctgtaactctatacacatatatatgcatatatatacatacacatatatgtgtgtgtgtgtgtgtgtgtatcttcaattagtagagtttacaggagtaaacaatttagtacagttacaggactgtatctatacctatgtctatatctatattcaattcagttgactttgaca

SEQ ID NO: 477634 - DNA, 598 bp, Homo sapiens
tacaaacattcagctacaatatgaataagttcagaagatctaatatacaggatggggattttaggtaacaatactgaattrtatactttatttgaaatttgcttagatgttctcaccacaaaacaaaaagggtaactaggtaaggtgatagatgtgttaaactaacttaactgtggtaatcatttcacaaaacatgtataccaaaccatcatgttgtacaccttaaaatcatacaattttattagtcaattgtacctcaataaagctggaaaattttttaaaatgtcggaatggttaggtagcaatacagatgactaataataggtacagaaagtaaactcagatattagtctcaataataaccattatatatacacaagagaaagcaattgtgattggtaattaagaatataaagatataaaactattaaaataatttgaaaacaatactcctcatctgaattttcaagaacttttccacataaatgggagaagaaaactagtaagaattaaagctctactctgtatgttacttgtataggaagactgaacaaaaggtttattctcacagttaatattaaggtaaataggttatcag

SEQ ID NO: 477635 - DNA, 519 bp, Homo sapiens
tagttcccctgctgaaatggaagaaaaataatatatacctattattgatcttacattcacacacaatactaaattgatataaaagattatcattacttttcttcctcaataaataaacgaacattaatgaagtgccatcttttaaaagatctttctactcactcccttaccagatagtagagataggcaacacattataagctggcatctaactttaccacactgataaagctggtctccctaaggactttcaaaatactaagtccaatacataattattaaattgtcatcttccctgatttgaaagcatttggttctgtttattacattctctagcctgaaattcttcttatttcagttttaaacactctactctctcctggttctgcctttacctctctgacacattcattcattattcattcattcatcaaatatttctgaaatatctatttaatcttaggagttaaaagaaatctaacacctgccttgtrtaagcttatggcctagtggggaaac

SEQ ID NO: 477636 - DNA, 636 bp, Homo sapiens
acaagtgcatatcatttttatagtaataaaaattgaggattcaagagaccgtggcagacacaaggcaagactagattgtagctctggacagagcagcatgcaggggcttgcattgtggattttagctccagattgactgtaagaacaaaccagcaatcccgrgaggacccacagaccctctctgaaggaagcagactgctactcctgcaggacccaggagacaccccaaatactgtgagtcccccaactgtggaagtgggaacacacttcctcccgaacatacccccccactggagaagttgaaggtctgtttgcaggagaagttttcgactttacttggagttgagtcaagttagggggccaagtgaaatacaggggtagaggaaggagcagaaaggccctgggatctcgctgggtccccaaacagcccgttcctgcctggcaccacagggatccaacaggagggtggccagaggagcagggagtaaaactccacagggaaaaggaattatctagcggaactttgtaacaatttgaacagggtgagaaacctcctggccagaactcaagggagggcacaaatcctgcgtacagacttcacaggcagggtaagaactaaagcccttttctctcgca

SEQ ID NO: 477637 - DNA, 636 bp, Homo sapiens
acaagtgcatatcatttttatagtaataaaaattgaggattcaagagaccgtggcagacacaaggcaagactagattgtagctctggacagagcagcatgcaggggcttgcattgtggattttagctccagattgactgtaagaacaaaccagcaatcccgagaggacccacagaccctctctgaaggaagcagactgctactcctgcaggacccaggagacaccccaaatactgtgagtcccccaactgtggaagtgggaacacacttcctcccgaacataccccccmactggagaagttgaaggtctgtttgcaggagaagttttcgactttacttggagttgagtcaagttagggggccaagtgaaatacaggggtagaggaaggagcagaaaggccctgggatctcgctgggtccccaaacagcccgttcctgcctggcaccacagggatccaacaggagggtggccagaggagcagggagtaaaactccacagggaaaaggaattatctagcggaactttgtaacaatttgaacagggtgagaaacctcctggccagaactcaagggagggcacaaatcctgcgtacagacttcacaggcagggtaagaactaaagcccttttctctcgca

SEQ ID NO: 477638 - DNA, 568 bp, Homo sapiens
actggttgtgagattcaagaggttaaattgctaaaacagattctcaccaaaaaaaaaaaaaaacagaatarttcaagaacaagaaagacttggaaataaaaaattttgtgtcccaaaaagctgccaagatacaccaaaaggaagaaaagacagtgctgaaaactaaattaacctgggaattctctatattttaggaaaaggtagtaaataaatgtaagttataagaaaaaaagacacatgaacaattgattctagaaaatctaatatgcatttattagtacttccagaaagatggagcaaagatgatgggaatagagcattaattttaaaaatatataagaaaatttccccagccgatttctcagaaggactcatccaatagccttgggtgggggagaaagaagaaaaacacagaaaaaaaccctaatacctgaatctcaaaactcaagaaaaaaaaaaaaaacctttacaaggactagatcagggaaggagtgaataagtgtgagcctgtatatggataggggtagataaataacaaattatccacaaaggaaagacagacttacag

SEQ ID NO: 477639 - DNA, 568 bp, Homo sapiens
actggttgtgagattcaagaggttaaattgctaaaacagattctcaccaaaaaaaaaaaaaaacagaataattcaagaacaagaaagacttggaaataaaaaattktgtgtcccaaaaagctgccaagatacaccaaaaggaagaaaagacagtgctgaaaactaaattaacctgggaattctctatattttaggaaaaggtagtaaataaatgtaagttataagaaaaaaagacacatgaacaattgattctagaaaatctaatatgcatttattagtacttccagaaagatggagcaaagatgatgggaatagagcattaattttaaaaatatataagaaaatttccccagccgatttctcagaaggactcatccaatagccttgggtgggggagaaagaagaaaaacacagaaaaaaaccctaatacctgaatctcaaaactcaagaaaaaaaaaaaaaacctttacaaggactagatcagggaaggagtgaataagtgtgagcctgtatatggataggggtagataaataacaaattatccacaaaggaaagacagacttacag

SEQ ID NO: 477640 - DNA, 568 bp, Homo sapiens
actggttgtgagattcaagaggttaaattgctaaaacagattctcaccaaaaaaaaaaaaaaacagaataattcaagaacaagaaagacttggaaataaaaaattttgtgtcccaaaaagctgccaagatacaccaaaaggaagaaaagacagtgctgaaaactaaattaacctgggaattctctatattttaggaaaaggtagtaaataaatgtaagttataagaaaaaaagayacatgaacaattgattctagaaaatctaatatgcatttattagtacttccagaaagatggagcaaagatgatgggaatagagcattaattttaaaaatatataagaaaatttccccagccgatttctcagaaggactcatccaatagccttgggtgggggagaaagaagaaaaacacagaaaaaaaccctaatacctgaatctcaaaactcaagaaaaaaaaaaaaaacctttacaaggactagatcagggaaggagtgaataagtgtgagcctgtatatggataggggtagataaataacaaattatccacaaaggaaagacagacttacag

SEQ ID NO: 477641 - DNA, 568 bp, Homo sapiens
actggttgtgagattcaagaggttaaattgctaaaacagattctcaccaaaaaaaaaaaaaaacagaataattcaagaacaagaaagacttggaaataaaaaattttgtgtcccaaaaagctgccaagatacaccaaaaggaagaaaagacagtgctgaaaactaaattaacctgggaattctctatattttaggaaaaggtagtaaataaatgtaagttataagaaaaaaagacacatgaacaattgattctagaaaatctaatatgcatttattagtacttccagaaagatggagcaaagatgatgggaatagagcattaattttaaaaatatataagaaaatttccccagccgatttctcagaaggactcatccaatagccttgggtgggggagaaagaagaaaaacacagaaaaaaaccctaatacctgaatctcaaaactcaagraaaaaaaaaaaaacctttacaaggactagatcagggaaggagtgaataagtgtgagcctgtatatggataggggtagataaataacaaattatccacaaaggaaagacagacttacag

SEQ ID NO: 477642 - DNA, 637 bp, Homo sapiens
tgctctcatgtttgcttccttgcttaaagatctcacaactatactcaaagccttcagaatctagcatcctttgcttgcccttctgggctacagtaacaaactctgccaagaatgacatccaaaggttaaaatattatataaaatgggttagtttctgatattaaatttgtaaaaccaaaattaaggacttctcattaatttttgttcacattacatactcctctaagttttaaattcctggaaatacttagccaatatattttctaacacaagaaaaatatatgcaaaagcacatttcatttctaataataaaaagctcaaggttctcaattgcatggcagtggacgtttttctgctagttaacataatcgcagggcctaaaatgaataaagaaaaagagtgataaatttgaacacattaaagaaagaatgaaaaatgaaaggaaatttacaaatgatgaaaaatctatttgtattacatgacaaayataaagagctctcacaaacaaatagctcaaaaaaagggcaaaacatatgactagttaacaaaaaaatacaaataaacaacacataaaaatatggcaaacttcactcatatttaaaaaaataaaaatcaaagagtctgtttctcaactaca

SEQ ID NO: 477643 - DNA, 633 bp, Homo sapiens
tcacctgaggtcaggagtttgagaccagcctggccaacatgacgaaacccccgtctccacaaaaaatacaaaaattagccgggcatggtggcaagcacctgtaatcctagctacttgggaggctgaggcaggagaatcgcttgaacctgagaggtggaggttgcagtgagccgagatcacgccactgcactccaacctgtgcaacagagtgagactctgtcaaaaaaaaaaaaaaaaaaaaaaaaaaaaacagaattctcttagacttgaacttctccatattcagtggcaaataaagttcctttcttgggaaaggattgagaactatctgtttcacagtttatttctcctcccaggcaaattctcctctggaaatgagagtggggacaatggcaaacttctcttagtgtcatgcccacattaggacctgagagttttttggtggtgtggggagtagtagcctgaggtcttctcagcttgcctctccagacattaacacctctgcctcaccagtcagtgttaggacaaatggggcctaagtgttctcagtggtagtcatgtgagatagagcctccayctcacaagtatgggcttgccagaagaagagtcctctcacctcttgggtgtacttgt

SEQ ID NO: 477644 - DNA, 436 bp, Homo sapiens
gacaatgtaatagaaataaattcatgagagacttgagctaaaacgtcagaaaagagcatgcccaaatgactaaaaacatataaaaaggcacctacctactctcagtcaggaaaatacgagtgtaaataacaataacatgtataacaatggctaaaatgtaaaaagaaataatactaaatattgacaaaattgtgtcaatatcaagtatgatatagttgataatataacatattgaatcaattgtggagtaaatggacctctcataatattttggagggagtaaaaaccactttggaaaactatttggatgtacctaaagagttggatgtctctttgaacatacccatgtcacatgactsggcaactctgtttctacttaaatcaccaaaaaaacctggtgcacctgtgtattcttgtagatgaatttatgtacaag

SEQ ID NO: 477645 - DNA, 593 bp, Homo sapiens
tggctgcatcctcacccaaatctcatcttgagttgtagctcccataattccctcgtgttgtgggagggacccagtgagagataattgaatcatgggagtggtttcccccattctattctcgtggtagtgaataattctcacaagatccgatggttttgtaaggggaaacccctttcccttgaccctctctcttctcttgtctgtcaccatgtgagatttgcctttcaccttccgccatgattgtgagacctccccagccacgtggaactgtgagtccattaaacctctttcttttgtaaattgcccagtcttgggtatgtctttatcagcagcatgaaaatggactaatacaccagggaatccctaaataatcctattcctgagaggtgacactgatccctggtcttcaggcyttcactactcagactcagagatgttactctctacccattctctccaagccacactgtgccattggaacagcatgcttctctcttagtatccttatccttcaaggtcaaaggccacaccgtgattacagtcagcagacacacatggcaagccagaggctgacaaggcagtgcttgaccaat

SEQ ID NO: 477646 - DNA, 414 bp, Homo sapiens
gtggggtctgcagccaacgtctcagatgtggctttagagatggcctgtggcccagtgagtgactccatgtccacagagttgaygaagagcacattgcaggctggaagaaaccaacccaagggggagtcatgggagctggcgtgggtgaggacattaacccagatccattcttcagggagaaggtagcagataaatttcaggctagccttgagccaaggcatctgcacatagaaatgtgatcttcccagagacatttgggcctggagagacctccagcctgcacgtgcaggaggggtcagggcaggaaggcagaaagagaggcctgggcatgggtacagtttcaggtgaccactcacctgccccttgtttcagcaggtctgcagttgagttggcagggccggagctatctttcga

SEQ ID NO: 477647 - DNA, 626 bp, Homo sapiens
tggcgtggggtctgcagccaacgtctcagatgtggctttagagatggcctgtggcccagtgagtgactccatgtccacagagttgacgaagagcacattgcaggctggaagaaaccaacccaagggggagtcatgggagctggcgtgggtgaggacattaacccagatccattcttcagggagaaggtagcagataaatttcaggctagccttgagccaaggcatctgcacatagaaatgtgatcttcccagagacatttgggcctggagagacctccagcctgcacgtgcaggaggggtcagggcaggaaggcagaaagagaggcctgggcatgggtacagtttcaggtgaccactcacctgccccttgtttcagcaggtctgcagttgagttggcagggccggagctatctttcgattcatctgtggggtctaagacaaaaattcagtaggaattaaaaccctagagctggaaagaagcacaagtttggctgggctgaaggtgagctctgcaactctttggcagaaggaacgctgcttttcataccagaccctggcagtcagccctgagttaggctcagtctgaacrtttgatgattgctctaagcagccagcacactggttgt

SEQ ID NO: 477648 - DNA, 613 bp, Homo sapiens
ttcttcatacggagagttttcctgaacaatctggcaagtccatttatgtatgytcctggagtcaagctttttcataaattttttcttcttttttaataggaagaaaaggagagtagttttgagtttctccagactggcaaaatgacatgtgtcctccagccctggcccatgtccggagtggctggcaggatcaagacatgacaagggccagctcaagggtgtgggtggtgagccaggagtctcacgttcctacctcggtttggaatgaccagcttgcaaggcagggccaatgggatgatggagtgctggtagaccagggcagacagcgatcctgtagggaggcagacggcatgtcatgggcagtgatactggaagccagaagggaaacctccacctctacccttacaccgatacacacaatcttccacttctttattacctctacctcaacccaccaccaaagctgaaaattcacaccctcttgttgaacaagatccaacagagaagattcccaaggttcactctcgcagtcataaagttacctaacaactttcctttgcagaaagttcctcctaacatcgctcctaatgcaccccagttactggggctcctc

SEQ ID NO: 477649 - DNA, 663 bp, Homo sapiens
gctggacaggcaggcttcccactttaactcagttcctattccctaggttctcaaaccccaactgcatggggcagcagggcagggctcctcaggactcctacccttgtcagaaatggtgagaaatgttatgctgagaaatggtgggtgtcagaatccaagctctacccctacctggctgtgtaagcatcagtaagttacttaacctctctgtgcttgtttcttcatctgtgaaataggaacaagagaactcaggtcacaggagagtcatgaggagtacaagaaattatgggtacctaacagtatctcacatattggggggtgcatattaaaggaggtgggcggrtagattctcctcctcatccctagccaaatcactgtctgggagcatcaattaatacagtccttatgaaggccaatctggccctgtctataaaaattatctcttcatatattcttctacccagcaattccacttccagaaatttgtcctatagatagacttacccaaatgaaaatggtatatgtgcaacgccattcactgcagcatttttttggaaacagcaaaagattggaaacagcttaaatgtttctatgatttaaaggcagtttttaaaaacctagttattaaaacatagtgcacacatacagtggaatagtatgcag

SEQ ID NO: 477650 - DNA, 663 bp, Homo sapiens
gctggacaggcaggcttcccactttaactcagttcctattccctaggttctcaaaccccaactgcatggggcagcagggcagggctcctcaggactcctacccttgtcagaaatggtgagaaatgttatgctgagaaatggtgggtgtcagaatccaagctctacccctacctggctgtgtaagcatcagtaagttacttaacctctctgtgcttgtttcttcatctgtgaaataggaacaagagaactcaggtcacaggagagtcatgaggagtacaagaaattatgggtacctaacagtatctcacatattggggggtgcatattaaaggaggtgggcggatagattctcctcctcatccctagccaaatcactgtctgggagcatcaattaatacagtccttatgaaggccaatctggccctgtctataaaaattatctcttcatatattcttctacccagcaattccacttccagaaatttgtcctatagatagacttacccaaatgaaaatggtatatgtgcaacgccattcactgcagcatttttttggaaacagcaaaagattggaaacagcttaaatgtttctatgatttaaaggcagtttttaaaaacctagttattaaaacatagygcacacatacagtggaatagtatgcag

SEQ ID NO: 477651 - DNA, 437 bp, Homo sapiens
ccatacacaccatgcacacacatacatatcaaaggtgtaaaaagattagaaagtggaagattgtaagaggaattgtggagagcacggtgtttggyggcaggtcccacctttctagaggcttctccctcatctcagtgagtctgctcagagactcagcaggtacctgcgggcgcatggaggatgtgaaagacaggggcctaactgtgctgtgggaacaggggtgggggcgcactggccacctcaacccgggtctttgcgggggccaggagtgctgactttttactttggaccaaggtgagagagagccagcccctgggctgcctcaaatgctgtccatgagggccacctgcaggggtgagagatttcagcaggaggaggctggagggagcgaaggatgactgggctgaggaagggggtcctgagcatctgaacagaac

SEQ ID NO: 477652 - DNA, 571 bp, Homo sapiens
atgtctcctgactcccaagagtggggytcccagaacagagccagctatagatggttcccagagagtagaggggcaaggggaacgcggctttttctaaagaagagagggctaaaatcatgtctgtatcttctctcctccagcacttcaataataataataacagacacaaatcactgccagcatggcatgcgccactctgcttttcacatttcatgtatattacctcattgtatatcagacaataatgctataatgaaagtactgttattgaacccattttacaattaagacatttggatctcagaaaggcaaagttacttggccaagaaacacacctataaacaatagagcttagaaccagatcttctggttctaggtcccatagccttaattcctagagattggtctgttcaaccttatttccagcttctcatcctctatgcacaacttccttgccccctttgaagctaggcatgggtgtttggcttgttttggccaattaaacatgagcggaaggaaaacatgtgagttctaggcaggagcagtgtgcaagccatggtgtcttcttccc

SEQ ID NO: 477653 - DNA, 618 bp, Homo sapiens
gtgggggatgggcaggagtcaggggcggacgcctgaatcttgtttctcagaagagccgagaggcctaggctcaagcttggggcgatccggtacttggaggttcgaagctcctagtttcgggttgagaccgatgtggagggcgatgacgcgcgggttccttgacatcgaggatcagtaacacccggagtgggtggggaacgaggggggcggcccctgagctcaggccccgcccctttccggggacgtttcaccggattggctgtccttccataacgacatgcggccccgccccggcgcgcgccccgccgcgtgcccagcccgggtagctgctgcagcctacgctgcctcggccactgcctgccgcktgcggagccggagcccgagcctgagtggcgccgggcccgacgtggggctcctgggccgcggcggcgggcgggcgatgctccagaggcctgaccagccatggaggccgaggcaggcggcctggaggagctgacggacgaggagatggcggcgctaggcaaggaagagctagtgcggcgcctgcggcgggaggaggcggcgcgcctggcggcactggtgcagcgcggccgcctcatgcaggaggtgaatcggcag

SEQ ID NO: 477654 - DNA, 602 bp, Homo sapiens
cagatccatgctttgtgtgctcagtgaatgagctgataagacccactggaattgcaggggatgttcacaatggatatttacagagttttgctgtttatgaaggacttttcacacacaaacttgtcgtccttctgtgaccttgttcaccgctgcttactgtcattggtgctttatggtttagggccccaggctttagaagggatgcacccctcacgcttacccaggcaggggtgtggcgtttttatcgcagtctcctggggctttggccttggcttcagcaagagttcatggatgccctgcctgatgttagccctcagtgttcatctgtgttccacttgctttagtaatcacgccacttataggtttcccagaactttctacaatctgtctccatgctcatcatgccaacttacttcatagagggcgtgccagagccccttgcttgttgggagaakggtcctgcagctgcggagggcaggtgacccagtggtccactcattggcatgtggcacacagctaggaccacgccgccacatctgccagggtccctctccagtaccctcagccccctggggagacgtcactgcaggaggacggggtgg

SEQ ID NO: 477655 - DNA, 562 bp, Homo sapiens
cttcccatgccgcgcctggtgtccaccaccctgatcgggacggagaccgtcacacccgacgagcagttcacccacatgctgatgcagtggggccagttcctggaccacgacctcgactccacggtggtggccctgagccaggcacgcttctccgacggacagcactgcagcaacgtgtgcagcaacgaccccccctgcttctctgtcatgatcccccccaatgactcccgggccaggagcggggcccgctgcatgttcttcgtgcgctccagccctgtgtgcggcagyggcatgacttcgctgctcatgaactccgtgtacccgcgggagcagatcaaccagctcacctcctacatagacgcatccaacgtgtacgggagcacggagcatgaggcccgcagcatccgcgacctggccagccaccgcggcctgctgcggcagggcatcgtgcagcggtccgggaagccgctgctccccttcgccaccgggccgcccacggagtgcatgcgggacgagaacgagagccccatcccctgcttcctggccggggaccaccgcgcca

SEQ ID NO: 477656 - DNA, 562 bp, Homo sapiens
cttcccatgccgcgcctggtgtccaccaccctgatcgggacggagaccgtcacacccgacgagcagttcacccacatgctgatgcagtggggccagttcctggaccacgacctcgactccacggtggtggccctgagccaggcacgcttctccgacggacagcactgcagcaacgtgtgcagcaacgaccccccctgcttctctgtcatgatcccccccaatgactcccgggccaggagcggggcccgctgcatgttcttcgtgcgctccagccctgtgtgcggcagcggcatgacttcgctgctcatgaactccgtgtacccgcgggagcagatcaaccagctcacctcctacatmgacgcatccaacgtgtacgggagcacggagcatgaggcccgcagcatccgcgacctggccagccaccgcggcctgctgcggcagggcatcgtgcagcggtccgggaagccgctgctccccttcgccaccgggccgcccacggagtgcatgcgggacgagaacgagagccccatcccctgcttcctggccggggaccaccgcgcca

SEQ ID NO: 477657 - DNA, 531 bp, Homo sapiens
caaatggtttgattttcggtatgccctgagagccaaaccatctagcgtttgtgcctgtcatgtatgtttatttgccagctctgtctttatcccaggttctgacagttcgcaccgtgtggcttgtctgtgtcttgtttgrtctctgcctcacagtcagctgttcttaccagacccatagtcacaccgggccccgcactgggaggagctcacagagcagccagcccagcgccctgcctgctgttccccggggcggagcctggttagccatggtggtcctgttctgcagagccccagaatgctgaataaaagagggctcggcctgtctcgcttctagaggactcgcagggctatatctgtggccacaaaagttttttcaaatcctcctgtttcgcgtgcattcctgttgaaggacactttgtttctgtacattgttgattcactgacattgttaacgagctgtggccgggaacactgtcccccattcctgagtggagcttctccaccacacctgttcctcgtgagggcagcaca

SEQ ID NO: 477658 - DNA, 619 bp, Homo sapiens
cctctcgggttcattatttctcgcttaactctgtcttgtggtattttctcatttataaaactgtcttatttagcactttaaaaagcgtttcctcattcactcatcagcttggcttgcctttctcgccttcctaacaagtgatgtgtatgtgggaattcccctaggttagatcccctttgagtctcttagtaactatttggtataaatatttcttgattccattttatgattcatttcctcagtggaggtcattaaagcacagcctgatttgaggcttttatttatttatttatttattttgagacggagtctctctctgtctcccaggctggagtgcagtggcactgcaagctccacctcctgggttcacgccattctcctgcctcagtctcccaagtagctgggactacaggcgctcgccaccaagcccggctaatttttagtagagacggggtttcactgtgttagccagtatggtcttgatctcctgacctcgtgatccgccygcctcggcctcccaaagtgctgggattacaggcgtgagccaccgcacccggccaatttgaggcttttagaaaagcaacaagcaaaactcaatctgtttcactagagcctggag

SEQ ID NO: 477659 - DNA, 528 bp, Homo sapiens
actccaggatcccacaagaaatgaccctcacagccaaaggattgaggccaggtttctttagctgagggccaggcaggtcctgactaacgtaatttgatctcattaatggtattagtgggcgtgttatgtcttactccgttcaggcgtctctgaggagccataggcggggcagcctgtaaacacagcagcagttaccaattcacccctgcagctctggaggctggaagtccaagatcaagcaccagccaattgggtgtctgctgagggccacccgggttcagagaagggaccttctcctcgtgtcctctcacattgtggacaggacaagaccgctgtcggggttctttcataagggcagtcatcccaccctgggggcaccaccgycatagcctcctcacctcccagaggccccacctcccaacaccatcccttggggattaggtcttagcacaaatttgacggggtgcgaacgctcagtctgcagccgtgggggctcagggagccatgagcactaccactggacccagg

SEQ ID NO: 477660 - DNA, 573 bp, Homo sapiens
gttttaaaacaactgaattgtggaaagactagaagtcttattttctagtaatgttattaatggaaaactcaaagcatttgacatttattttttaaggtatttagtaaatattttcattgttaatacataaagtcatagctacaaaagaaacattaaagctcatataatcccagtctttcatattgwggatgaagaaatttagacacagagggaggaagggactttctcaaaagtcacataactacttgataccagagccgtcaatatctcctgttttccaggctaggctgccagtcgagtatatagatagtcatgagctccatgttttagctaatgaattacctgtcctcattcttatttttctaagggaacaaatctgacaaaatcagaatttatgagcctggatgaattagaccttgtataagaacttagttcagtgctaaaatcaagaaaaataatggattgtgtgattttagcctgatttccaagtaccacaaaatgggcggcttaagcagcagaaatgtattatcttacaatcctgaaatttagaagtctaagatcaggattggttcc

SEQ ID NO: 477661 - DNA, 598 bp, Homo sapiens
caagccaatggagccgatattctaactaaacttttgaaagcagtggcaattcatgatgttactattcccactgagtcaaaaatatttctggaacacaaagagaatgattaagtaagaatgtaaaataggaaaaaaaatgaaatcaatgtcacatctgaagatcagaggagtgggaagctggtacctgctagggtatgcatggttgtgycagcatatggcatgagtgttggtgtctagttggaaggccatatggcaaggtatctggcacagactcacctaggtcttattctcctgtggttgcccaatgccatattgtctcattctgtaaagaagagatttaaaagattgttgaacagtgttaataaagtcagccatttcaaatacatgaccagattgtttaacagtgttaataaagtcagccatttcaaatacccttcaaatatcatcaaagacaagtagagactgagaaactgccagagtatgagactgcggagatgtgaagactgaagaccacatggggtcctggattggatcctggaacagagaaaggacattcacaggaatactgggaaattctgaataaagcctataatttagt

SEQ ID NO: 477662 - DNA, 594 bp, Homo sapiens
tatagatagacaaaatcaacagggatgatgaaagaaatccaaaatggaatttgtatcagtcaagaatccaagccaggaggcacaagtcatgcagtaatttgaatagagaagttcattatgaacagggaaataactatgaaggtgtaaagacagccctaaagaatattctagagctgagagtacaaaaagaataaacaaatttggaagtggcccctctccaaggatgcgactgagatctcatgggaggtgatggagatactcaataaatactaaaaattaatgggttttctgggcccagagctgtaccacagccatcaggcaagtaagaaatacaccctttggtaggcatgccaaagctggcaggaagaaattgcagccagggccagcaagccaaaagcaaccctctggagtgcaagcagtcaagactggcagaagggcattgagaatgactcagcayattaggagcccactcatcagcagggcagcatgagacctgaggtgtgcagtgtttactttaggagggtcacatcgaggtggtcaccaggccaaggccagagctgtgagctcactaaggcaccatgtggtctgaacaag

SEQ ID NO: 477663 - DNA, 624 bp, Homo sapiens
catagtagtgatttatgtgctcaagatatatagatagacaaaatcaacagggatgatgaaagaaatccaaaatggaatttgtatcagtcaagaatccaagccaggaggcacaagtcatgcagtaatttgaatagagaagttcattatgaacagggaaataactatgaaggtgtaaagacagccctaaagaatattctagagctgagagtacaaaaagaataaacaaatttggaagtggcccctctccaaggatgcgactgagatctcatgggaggtgatggagatactcaataaatactaaaaattaatgggttttctgggcccagagctgtaccacagccatcaggcaagtaagaaatacaccctttggtaggcatgccaaagctggcaggaagaaattgcagccagggccagcaagccaaaagcaaccctctggagtgcaagcagtcaagactggcagaagggcattgagaatgactcagcatattaggagcccactcatcagcagggcagcatgagacctgaggtgtgcagtgtttactttaggagggtcacatygaggtggtcaccaggccaaggccagagctgtgagctcactaaggcaccatgtggtctgaacaagca

SEQ ID NO: 477664 - DNA, 656 bp, Homo sapiens
tagttattaatgaaaattaagcgtgacttttttaggattcarttcctgtttttagtggtatagctttctggtattttgtagcttactgtgttcatgaacacaaaagaacaagtaacctcactagtggcttgagatctgactcgcaggaaaacattaggtagtaattaaaacaaagctttccccccacccccaagtttgtgaaattttaagcacactgcctaatgcagtcaccacttgccgcttgtggctattgagcacttgaaatgtgactagtctgtattcagatgtaaaatacatgctgggattcaaagacttagtatgaaaaaaaggattgtaaaatatctgaatattttatattagttacatgttgccatgataatgtttttgatatattggatttaaaaaagaatattaaaattaatttcacctgtttaactttcttaatgtggctatcaaaaaatttaaaattatatgtgtttcacctcactgatttattggacaatgccagtctaatagatttaaaaattcttaatatgtacagtaaatatcagatattaaaagcttatatgatttggtttttaacctctgaacagtcaattctttggaaatctgagaagcccaattattctttggtctcttcaagggctccaggttga

SEQ ID NO: 477665 - DNA, 656 bp, Homo sapiens
tagttattaatgaaaattaagcgtgacttttttaggattcaattcctgtttttagtggtatagctttctggtattttgtagcttactgtgttcatgaacacaaaagaacaagtaacctcactagtggcttgagatctgactcgcaggaaaacattaggtagtaattaaaacaaagctttccccccacccccaagtttgtgaaattttaagcacactgcctaatgcagtcaccacttgccgcttgtggctattgagcacttgaaatgtgactagtctgtattcagatgtaaaatacatgctgggattcaaagacttagtatgaaaaaaaggattgtaaaatatctgaatattttatattagttacatgttgccatgataatgtttttgatatattggatttaaaaaagaatattaaaattmatttcacctgtttaactttcttaatgtggctatcaaaaaatttaaaattatatgtgtttcacctcactgatttattggacaatgccagtctaatagatttaaaaattcttaatatgtacagtaaatatcagatattaaaagcttatatgatttggtttttaacctctgaacagtcaattctttggaaatctgagaagcccaattattctttggtctcttcaagggctccaggttga

SEQ ID NO: 477666 - DNA, 653 bp, Homo sapiens
cttctcagaggtctggaagttcctagtcctgacagaaagcttttggaagagattgctgcccactaaacagaagagaaaagaaagacagctctgcaactaaaacaagtgcatgcttttcaagagtgtgggaagagccttagtctctctaagtttaaaaaggtgacaaattgttaacaatcataatgcctgggcttaaatctgagcctagaaatggatgaagcagtctgacacacacaaaaatgtgtttttttctggctaaatcttcatctcagctactcctccacttatatcaactgtacttcttgcaataaaaacttggagtgagtgctaatccatgtttatattatcctgttatgttgtattawgttatgctgaaagcaacccaatttactaatagcttgttactctctagctgcatttcccccaggcctaatagcattcaattccttcttagggttgctttctccaaggaatgctggactgcctttaacacattcaatttctaaagtattccttcaaatgcgttcttccttgggaataaaataaatagagaactacaacaacacaaagtaagaagacagtacagagtatatattgtatcccagaggcatacaaatatacaaccattgactaaaatgccaggcccatgtgtt

SEQ ID NO: 477667 - DNA, 452 bp, Homo sapiens
atgcccttctgtccctcttcctaatcactccactggccttactcgccacctatgccttgtttctgtgcattcagttggtccaaggcaaaggatgatttctaatcatcttacagttccagatactggcctttcccgaaacctttacttggatttttttttttttaatttcacacaagttgtcatccagaatgcttctccgagtgctttctggctgcctgttcaacccacagtgccccttgtgcctcctccccttatctagagatactatcctccgtcaaattcccacctcccttcaaggccagccacatgctcagtaggtctcatgttggtrgcctgggggcctgagtccattttctcacctcctatccatgtgatcatggactggatctgagaaatgtgcttgataatattactgacctggtagggttgttgtgaggattaataattaaccc

SEQ ID NO: 477668 - DNA, 368 bp, Homo sapiens
tggtctttctagataaagcatactaacctctctcactttactagataggatctcaagaattaaacaagttgaaaagtaatacagtaatactgcttggttttcctccttaaaaatctcattgtttcagtttttttgtttgtttgtttttccttttcawctgcactagggctgtgtgtgtgtgtagggaagagacaggggcaggaggtcagaggcagagaggaagagaaagagagaaagtaacagacacagagaaagggagaggcagattccatgctgtttctgtgcattatctctctttatatagaaatctttccccaaatgatttcaggatgaatatgctggtcacattccactttcttccttctgac

SEQ ID NO: 477669 - DNA, 450 bp, Homo sapiens
ttgcttctcttacataatatatcccaactgaacatggagttatagaaatttcccagctagaaactttgagacaagtcccagctttttaaacggatctggggatcccaacaacacatgcttatatcactgaattcatggaaagatgcaaaggtatgccagtgggcagagatctaaaatgcttcctttctgggatatgattttaatctcactttcaatgatgctgtttttagttgcagaaataatccttccacatgtcatagtacaagcccatttttctgcactcaaggaaatggtgcttgatttacatatttggaggctgcttctaggtcacaaagtgaactgaactcagygtacctgctctagcctcacacttgatctttcccacttgctgttgaggcaggtctgcactatgtcaacaggattccagacttacctcagtgattagaagca

SEQ ID NO: 477670 - DNA, 394 bp, Homo sapiens
cagcccttggggctgctctgtctatggagtagccattcttttattcccttacattcttaataaacttgctttcactttgcactgtggactcaccctgaattctttcttgcacaagatccaagaacactctcttggggtctggattgggaccccttttttgtaaccctcccagytcactgccctgccactcttaaggtgtagacttagtccctaacatccaaggaagctgctagtgccatcacatctgtgtggaaggtgcaggaagagataaggaagggcctcctgcttgcctctgaggagactacccagaaggccttccccacaacacttctcatgtatgttattcaccaccaaaacatcctagcccttggctgcaagtaaggcaggggctgtc

SEQ ID NO: 477671 - DNA, 394 bp, Homo sapiens
cagcccttggggctgctctgtctatggagtagccattcttttattcccttacattcttaataaacttgctttcactttgcactgtggactcaccctgaattctttcttgcacaagatccaagaacactctcttggggtctggattgggaccccttttttgtaaccctcccagttcactgccctgccactcttaaggtgtagacttagtccctaacatccaaggaagctgctagtgccatcacatctgtgtggaaggtgcaggaagagataaggaagggcctcctgcttgcctctgaggagactacccagaaggccttccccasaacacttctcatgtatgttattcaccaccaaaacatcctagcccttggctgcaagtaaggcaggggctgtc

SEQ ID NO: 477672 - DNA, 578 bp, Homo sapiens
tttcttgggtatgcctaacaaaatctccaagtgatacacaagaagctgtttcacctgcatgtggaccaatgccagggacaacaaggagcatggctgctgcagtggctaacacagatctccttgcctccagtctttgtgaattttaattcattctgcacactgtgaccagctttcctttctccagctcaatcatctgtcatttctttatgctttccctactaaacagaagttgaatgcttgacccmacctttgttcatctgcctcacttgcctctcatcattctcatatctgctgcctcctctcttccccatccccaaacacaactcttcccacattccagacttaccactttctattattccccttcacctcctttcttcatcttcctgagctgaagcttccttcatcctcagtcacatgctcagttcagacttccctgagcaccctatctgaaatcctccctcccccttctgtaatcctagacatctattttcatcatcactacagcacttaccatgtgctgcctgatgccaaaaatacttgcaagcaagtcatatctcctattagcctgtaagctg

SEQ ID NO: 477673 - DNA, 578 bp, Homo sapiens
tttcttgggtatgcctaacaaaatctccaagtgatacacaagaagctgtttcacctgcatgtggaccaatgccagggacaacaaggagcatggctgctgcagtggctaacacagatctccttgcctccagtctttgtgaattttaattcattctgcacactgtgaccagctttcctttctccagctcaatcatctgtcatttctttatgctttccctactaaacagaagttgaatgcttgaccccacctttgttcatctgcctcacttgcctctcatcattctcatayctgctgcctcctctcttccccatccccaaacacaactcttcccacattccagacttaccactttctattattccccttcacctcctttcttcatcttcctgagctgaagcttccttcatcctcagtcacatgctcagttcagacttccctgagcaccctatctgaaatcctccctcccccttctgtaatcctagacatctattttcatcatcactacagcacttaccatgtgctgcctgatgccaaaaatacttgcaagcaagtcatatctcctattagcctgtaagctg

SEQ ID NO: 477674 - DNA, 578 bp, Homo sapiens
tttcttgggtatgcctaacaaaatctccaagtgatacacaagaagctgtttcacctgcatgtggaccaatgccagggacaacaaggagcatggctgctgcagtggctaacacagatctccttgcctccagtctttgtgaattttaattcattctgcacactgtgaccagctttcctttctccagctcaatcatctgtcatttctttatgctttccctactaaacagaagttgaatgcttgaccccacctttgttcatctgcctcacttgcctctcatcattctcatatctgctgcctcctctcttccccatccccaaacacaactcttcccacattccagacttaccactttctattattccccttcacctcctttcttcatcttcctgagctgaagcttccttcatcctcagtcacatgctcagttcagacttccctgagcaccctatctgaaatcctccctcccmcttctgtaatcctagacatctattttcatcatcactacagcacttaccatgtgctgcctgatgccaaaaatacttgcaagcaagtcatatctcctattagcctgtaagctg

SEQ ID NO: 477675 - DNA, 578 bp, Homo sapiens
tttcttgggtatgcctaacaaaatctccaagtgatacacaagaagctgtttcacctgcatgtggaccaatgccagggacaacaaggagcatggctgctgcagtggctaacacagatctccttgcctccagtctttgtgaattttaattcattctgcacactgtgaccagctttcctttctccagctcaatcatctgtcatttctttatgctttccctactaaacagaagttgaatgcttgaccccacctttgttcatctgcctcacttgcctctcatcattctcatatctgctgcctcctctcttccccatccccaaacacaactcttcccacattccagacttaccactttctattattccccttcacctcctttcttcatcttcctgagctgaagcttccttcatcctcagtcacatgctcagttcagacttccctgagcaccctatctgaaatcctccctcccccttctgtaatcctagacatctattttcatcatcactacagcacttaccatgtgctgcctratgccaaaaatacttgcaagcaagtcatatctcctattagcctgtaagctg

SEQ ID NO: 477676 - DNA, 614 bp, Homo sapiens
tgcccattagagcttgatctaaaagagatttttaaattttttcgtaccatgagccctttttgtagtctcatgaaacctatttgattcagaataacatttttaagtagcgtagggttaaaaaggaaatgaattatatattttttagaatgtatttttaaaattatgatattatgtgcttttttattaacatactaaattacatatcttaagtattaccaacattttgaagtcaggktgaatgtaaatatttctagatatgtgcaacaactgtaatgttatcataaaatttctgatttttattggttacaaagtcacagacactatacagatatgactaatagtattggggcttgttgcctatattctggattgaataaaattctaaatttcagttagaaattagtacaaatagagattttttttcactgaagttcatgcaacccactgagttccatacatgggtacattggtgtgggcccggttaagaacagtagctaagctaatactttatgaactgtgctctgtgcaactctagggactcatggaaggggacattttgcaggtggttaaagctttgggttcttttataaaactacctaaatgtttcatgaggc

SEQ ID NO: 477677 - DNA, 594 bp, Homo sapiens
ataaaagaaatttaggtaaggcacagtggcacacacctgtaatcttagcactttgggaggctgagatgggaagactgcttgaggccaggagttcgagaccagcctggtcaacatagcaacaccccatctctttttttgttttttttttaaaagaaatttagagacaggatatagactgaggttaataacatgtaactcaaattcccacttgagggggcttctctgccctcagagattttagataaacttgtccggagccaccattccaggacttgggacagctcaatgttttctctgtgattcctgccccatttttcttgctgttctgtgtttcatttcagtcccaactgagtccaaactgaggaaattggcctcccttgccagtttccataagaagtgctgtcacacaaagcctactgtgatctttgtatacgaattatagattggtagggcactcctatccccaaactcctcatgtgtgccattcccagtgggctgactagctttccctcagacctcctggacatctgctgaattaaaatccttccatcttgctcctgtctgccactgggcygttgtaagggcagcagggca

SEQ ID NO: 477678 - DNA, 630 bp, Homo sapiens
gtaagccatgactttgcccctcgttcaccttccaccatgagtgaggcctcgccagccctgtggarctgtgagccaattaaacctctttcctttataagttacccagtctcaggtatgtctttattaacaatgtgagaacagattaatatgccatctaaatttattgcaattacttattttacaactataaatgaagtcaggaatcaggaattacacttacttatttacagttaaatctccaatatctaacagactgctgacttacataagatgttcaagaaatctttgttgaataaaaaatggatccagagactaaaatggaatcaactgtgccttttgttcctctttactgtttaaggaggaaggtaaatttagataactcaaaacattactgacaaaacactgcagtcatctgaacaaatcatttccagatggatttgtgacttctctaatgtaattattaaaaataaattaatttagaatattatacagacaatccacattttcattttaatcctccagagctaatcaactccttgccttaatctctttatggtttgttttcttaatttccataggttatatgtatgtatatttttttaacatatgtgatcacattaagccaagtga

SEQ ID NO: 477679 - DNA, 455 bp, Homo sapiens
ttacatatgaaaggcaaatcatatgcaaaaatctgtactgagaggacatttggcaggtatratcttaaggatgtcaacatgaatgaataagagaaagcaaggaggaatttggtgccaggtgagcttggtgctttttctcctggattatttctggtcaccctctagctcagcatcactctagaccctctccaatccagtcctgtcatatgtgttttattgaagttgatatgactatatcattcctgtcataagcctgtttcttcatccttcatggagacacctgcactcaggcatggtacgtatctcaccatcgccggaacatggtctgcctttaagtgacctgtgaactgttcacctatcttgacccttgaatttgctttgcctggatagatctgccagcagcctggcaatctgtttgtcttttctgctgaggtcaaatgttaccctcaattttg

SEQ ID NO: 477680 - DNA, 316 bp, Homo sapiens
tctctctagtaaagtgacagggcttagagtgattaatttgaagaatttaaaggccataattgtgttctcagctagtgaagtggttcatgatgagttcagatatttatgctaagatttctcacaaatcccaaaagattattacataaaaatgttcaacacagtgctgtttataatgttgataagcctagaaataacctaaatatcaacagaactttgaatgttggatagttttaaaacgtaatrctatgtgatcattaaaataagtgattttctttaaatttactaacatgtaaagatctctgtgatatcttgatca

SEQ ID NO: 477681 - DNA, 564 bp, Homo sapiens
ccttagaaatttttcaataaagatctatgtctatcttgtttttccttttctttcctccagtcagtttgaacatgaaatgtttttaagacatataagttaatattctatcttacagcaatatggagtattcccacttcagaaattctgaatgaatttatcaactacggctctattttttaacagatagtgatacacaaatcaaacatccagccactcagtcataaaaattgcaattatggaatcaaaagttctaagtcaaaacaataatttaaacacaagtgtaggcaaacatataaatatkgtgtctaaaaacatcgatcattgaaacatttctctggaaatacttgatttttcacttatttgagatctaatgaaacttaaatcagcttgttctcaatgctgtccttcttagcattgatacattaattcatttagcttatatatacttctattatttcttatgttgcagaaatcccccccttttttttttttttgcctttgtctcccagtggcaggtatggaaatgtgttattcagttgtcccttcaagaaaacaattgttcag

SEQ ID NO: 477682 - DNA, 580 bp, Homo sapiens
gcagcaaatactattgtgactaagtttcagaccttacatgacatctttttgtgttcttgttggtttcatttgaagaatgctagtttttaatttttatgtagttgaatttgtttacttttgtcttttgtcacttgtgtcacatctataaaattattatctaacccaaggtcttagtttacttctatttttttcttctatgagttttatggtgttagctcttctatttatttttttgatacatatttacttaatttttgtatatgtatgaggcaggggtttaaatttattattttgtatgatgatatctagttgccccaggattatttgtggaaaatatcttttccyccattcaagtgtcttggtactcattttgaatcaactcattattccactattactttccttatgatagcaccacaaagtcttgattactgtagatttataggaggttttgaaatgagggagtgagtactccaaattcgttttttgtttttaaacagttttagctattcttggtttctcatatctgcatgcaaattttaatatcaatttgtcaatttctgaaaagaaaggaaaaaag

SEQ ID NO: 477683 - DNA, 580 bp, Homo sapiens
gcagcaaatactattgtgactaagtttcagaccttacatgacatctttttgtgttcttgttggtttcatttgaagaatgctagtttttaatttttatgtagttgaatttgtttacttttgtcttttgtcacttgtgtcacatctataaaattattatctaacccaaggtcttagtttacttctatttttttcttctatgagttttatggtgttagctcttctatttatttttttgatacatatttacttaatttttgtatatgtatgaggcaggggtttaaatttattattttgtatgatgatatctagttgccccaggattatttgtggaaaatatcttttcctccattcaagtgtcttggtactcattttgaatcaactcattattccactrttactttccttatgatagcaccacaaagtcttgattactgtagatttataggaggttttgaaatgagggagtgagtactccaaattcgttttttgtttttaaacagttttagctattcttggtttctcatatctgcatgcaaattttaatatcaatttgtcaatttctgaaaagaaaggaaaaaag

SEQ ID NO: 477684 - DNA, 580 bp, Homo sapiens
gcagcaaatactattgtgactaagtttcagaccttacatgacatctttttgtgttcttgttggtttcatttgaagaatgctagtttttaatttttatgtagttgaatttgtttacttttgtcttttgtcacttgtgtcacatctataaaattattatctaacccaaggtcttagtttacttctatttttttcttctatgagttttatggtgttagctcttctatttatttttttgatacatatttacttaatttttgtatatgtatgaggcaggggtttaaatttattattttgtatgatgatatctagttgccccaggattatttgtggaaaatatcttttcctccattcaagtgtcttggtactcattttgaatcaactcattattccactattactttccttatgatagcaccacaaagtcttgattactgtagatttataggaggttttgaaatgaggragtgagtactccaaattcgttttttgtttttaaacagttttagctattcttggtttctcatatctgcatgcaaattttaatatcaatttgtcaatttctgaaaagaaaggaaaaaag

SEQ ID NO: 477685 - DNA, 533 bp, Homo sapiens
ccacttctaaaattagttatgtaacatctcatcataagttgtttataataagaccaatcacacaggacctgctatgaaaattccatacttgtaaagtgctacctagagcctgacacgtggttggcactctatatgtatgagtttcttttaaatttatttgggatatttgaatgcctatttatttttgtgaaagggtttatgtttaaaaaattaaaaaaatatactttcgttcatgcgtcaaatattgttgtgctcttctttatgccaggtacaggtttaagagctgaaaatatrtagtaaataaaacttagaataggccaggcacagtggcttatgcctgtaatcccagcactttggaagactgaggcaggagaatcacttgaatccaggagttcaagactagcctggggagcacagtaagaccccatctgcacaaaaaaaaaattatttaaaaattagccaggtgtggtgactcatgtctgtggtcccagctactcaggagactgaggcaggcgaatcacttgagcccggga

SEQ ID NO: 477686 - DNA, 525 bp, Homo sapiens
ttgtggtcatttccccaacagcactttgctactttcctgctgcttaacagccattccatttgggttagtgtactgggttggatagtttctcctctcaaattcttattcactcagaacctgtgaatgtgaccttgtttggaaatagggtctttgaagatgtgatcaagttaagatgaagtcatgctggattagagtgggccctaaytgaatcacaagaagagggaaatttaggcagagacacagaataaaggcaccatgtaaagacagaggcagagattggaattgttatgtatcgagccaaggaacaccaaggattactgtcaacaaccagaagctagaagagatgaggagggattcttccctgagctttcacagggagcatggcccagccaatacctagattttggacttcaaggactatagaataatgagagtaaatgtctattgttttaagctactcagtgtgtggtactttgttacggcagctctatggaaccaatacagtgtgattgatcctgccctcag

SEQ ID NO: 477687 - DNA, 525 bp, Homo sapiens
ttgtggtcatttccccaacagcactttgctactttcctgctgcttaacagccattccatttgggttagtgtactgggttggatagtttctcctctcaaattcttattcactcagaacctgtgaatgtgaccttgtttggaaatagggtctttgaagatgtgatcaagttaagatgaagtcatgctggattagagtgggccctaattgaatcacaagaagagggaaatttaggcagagacacagaataaaggcaccatgtaaagacagaggcagagattggaattgttatgtatcgagccaaggaacaccaaggattactgtcaacaaccagaagctagaagagatgaggagggattcttccctgagctttcacagggagcatggcccagccaatacctagattttggacttcaaggrctatagaataatgagagtaaatgtctattgttttaagctactcagtgtgtggtactttgttacggcagctctatggaaccaatacagtgtgattgatcctgccctcag

SEQ ID NO: 477688 - DNA, 618 bp, Homo sapiens
tgagctaatcctggcaactgctacccttaatcttgctatgtaagaaaaagaaactctattcatttgaaacatgtagctagtctttctatttcttgaagctgaacacgttcctaacaatacagaattggaggaagaaactgtatataggtataattttgcatatatctacacttggtcctccttccagaatattttgtcaatcaaggtcaccctactcagccccctgaaaagtagccaaacctgacaaggttctcattaaactawtttcaacatttattgggggtctactacttgaaagacaatatagcaaacataaaaatcataagatatagtccctatctcagtgagctttaattttgagacaaataagagagacaaataattttactaaattattttgatccaatctacattagaacccttaatatcatcaatttgaaaaacagagaacatggtttgaaagtgggagagattggagacaaggagggccaggtaggaagtttctgttgtcatttaggcgatggcagtgtccacaacacagtctggttcaagaggtgccattcacagtggctgaacacatgatataaggtagaacttctgaattatcaaggatactct

SEQ ID NO: 477689 - DNA, 643 bp, Homo sapiens
caactatttgcatagcatttacattctattagggattataagtaatctagagattatttgaagtatacaagaagatatgtgtaggttatatgcaaatactatgccattttatrtaagggacttgagcatctgtggaatttggcatctgtgggggtcctggagctgatccacttcagatactgagggagaactgtatagacaggtggcattctagaccagggtatgcctaaagcagtgttcctcaaggttccaggagttttctaaaagaatgatgtaatttttcattttaaaactagactttgatgattatctcatctacatagatgcatacacagttgacccttgaaccacatggatttgaactgtgcagatttatttatatatatattttcttctgcctcgaccacccctcagacagcaagaccaacccctcctttccttctcttcctcagcctactcagttagaagatgacaaggatgaagacctttatgatgatccacttctactcaatgaatagtaaatatattttctcttctttatgattttcttataaacatcttcttttctctagcttactttattgtaagaatacagtatataatatatacaacttacaaaatatgtgtttattggctgtttatg

SEQ ID NO: 477690 - DNA, 690 bp, Homo sapiens
gctcagctgattacagactaaacacaaaagttcccagaggaaaatggtggacttgggagctgctgcctcaggaggatcttgagtgttagtggttcctccctatcagatgtacctaatgcccaggatttaataaaggatcattcccattccaccaccatctccaaacaaatgttacttctttctgtttgccagatcttgtttctgtccttcttcacgaccaaactcaaaactcactgaaccttactttcccrgatgctgcagccctcagctatgggcagagggtcacagtggtggagcctgactaaaatttggtcaaggagagactctttgtcaccactatcctcttccaaggtagtccttgacttttggacttctgtgtcctttcttgcatcatccagtttcagcaagaattttgtcaggttggtttggccaggatttcccaccctcaatatctgatcatcctcaatatctgaccaaattcttcaccactcccatcatccccaggttatatctgattaccaaggcttgcctgcccctaacaagaatcctgttaggacagtttagcaaagtatcaccctaccctcttagttattctccatctactgacagcctccacccccttgactctaaattccccctttttcttatgttcagagttgaacccaatctgtctcccctactgctaaaccc

SEQ ID NO: 477691 - DNA, 690 bp, Homo sapiens
gctcagctgattacagactaaacacaaaagttcccagaggaaaatggtggacttgggagctgctgcctcaggaggatcttgagtgttagtggttcctccctatcagatgtacctaatgcccaggatttaataaaggatcattcccattccaccaccatctccaaacaaatgttacttctttctgtttgccagatcttgtttctgtccttcttcacgaccaaactcaaaactcactgaaccttactttcccggatgctgcagccctcagctatgggcagagggtcacagtggtggagcctgactaaaatttggtcaaggagagactctttgtcaccactatcctcttccaaggtagkccttgacttttggacttctgtgtcctttcttgcatcatccagtttcagcaagaattttgtcaggttggtttggccaggatttcccaccctcaatatctgatcatcctcaatatctgaccaaattcttcaccactcccatcatccccaggttatatctgattaccaaggcttgcctgcccctaacaagaatcctgttaggacagtttagcaaagtatcaccctaccctcttagttattctccatctactgacagcctccacccccttgactctaaattccccctttttcttatgttcagagttgaacccaatctgtctcccctactgctaaaccc

SEQ ID NO: 477692 - DNA, 690 bp, Homo sapiens
gctcagctgattacagactaaacacaaaagttcccagaggaaaatggtggacttgggagctgctgcctcaggaggatcttgagtgttagtggttcctccctatcagatgtacctaatgcccaggatttaataaaggatcattcccattccaccaccatctccaaacaaatgttacttctttctgtttgccagatcttgtttctgtccttcttcacgaccaaactcaaaactcactgaaccttactttcccggatgctgcagccctcagctatgggcagagggtcacagtggtggagcctgactaaaatttggtcaaggagagactctttgtcaccactatcctcttccaaggtagtccttgacttttggacttctgtgtccwttcttgcatcatccagtttcagcaagaattttgtcaggttggtttggccaggatttcccaccctcaatatctgatcatcctcaatatctgaccaaattcttcaccactcccatcatccccaggttatatctgattaccaaggcttgcctgcccctaacaagaatcctgttaggacagtttagcaaagtatcaccctaccctcttagttattctccatctactgacagcctccacccccttgactctaaattccccctttttcttatgttcagagttgaacccaatctgtctcccctactgctaaaccc

SEQ ID NO: 477693 - DNA, 635 bp, Homo sapiens
ccaacagaaagcaggtaattactaaattaactatttttatttttaggttaatgttatagtcatttgatttcccaggaggtattggggatggtagagaatgacttggagtttaaagctcatacttttgcccacacatacttagaaatgtgctcaccgaatccattgaagtgggaatggtgcttactgagcaatttgtgagtgcaaatttctgaacgtttgcttgaagaatgacaacagaaaggataatagaatctttagaagacaagtctatttactcagcctccattggataagcattaatgtattagatattggtcaatggcttgggagacaaagacaaataaaatattgttcttggctcaagattttatagtctagttcctctgtggacatgctaccagaagacaaattttgtgtgaaagtactatagtggagtcaattattcagatggcagcaagggaacaaggarggactcatggaagaagaaacttctgagctgaaattcaaagaacgagtaggtttttcaggtaggcaggcaaggggaagacatgccaggcagaaagacccatgcagaaagacaccaaacatggaagaccataatttagtgcatgtaggaaatagtggaggaagatgca

SEQ ID NO: 477694 - DNA, 588 bp, Homo sapiens
acgttgtttgaaactccatctgtgtgtcctcttctcacatacctagtggcactgaaaagtcatgggattaacattttctcaagccaagtgacatctcaatgtatctttcaatattatgacttgtgtccaggttgccattgctcgaggtgtggtggaggatttgtcttttgctcccaaactcagaaccaggatttgagtctgtaaargaaagtggactcatggcttcctagctgaatctcattttcaatctgacatgatattccccaactcaattactcaccttgtttgctatgcttgattctgagcaattttcagagcattccaaaagtcaaatacactctcaaaagataaagattggtatgttggggtctttcccaagaatttgctaaatgatctaacaaatagtcataagggagagttccaaactcttcttgttctggcagcatccatgcaggaggtactcagcttctcaggatagctctcaggaaggaacggagcccaagcagcatgtataaatgatgctaggcttattaaaagtttgtttccattatctttaaggctgtcgttattcaagtgtccaaatgtggt

SEQ ID NO: 477695 - DNA, 668 bp, Homo sapiens
tagtgttgccctggagatcgagctgaagctgtcttccatgggatttcacctgaaaaaaaaagtgcttttctggctggcccccttttcttaaccagcttctcctattcctgtctaggtatgccctgggaagactttcttatccaatcacaaacacgtgaatcctctaatctccatgttagggtctgaatgtagggaatttccctgaaacaagaacctattatgttacatccccatattaggcatttggcacaatttaacactggtcctcgtcctagtcctgcaaggtaggaattaggatcctcattctgcgactatgaagcaactatggtccagagagataaatggcttttcctgattcatctagagaagtagtggctcatccagaattctgagttcagaattctgactccatctctagagttcatgctcttttactctgtgaggtttgctccaagtcaagtgagtcattctttggaatagttataacaaaggtgccagaggatctttgcagttttgcatcagaggggcctctgccttagaaagggctcttccctacataccaggacaggaggttatttcacctcctcctaggagagctagraaacttgggcaactagaaaggtattatttttttcgaatacaaaacaaaacagcagactatgtaaaat

SEQ ID NO: 477696 - DNA, 353 bp, Homo sapiens
ctggatgttttggctttgtatagacagattacagagtgcttcccagtatgcatccctttgaatctgctttattgatgtagaacaaagtttcatttgctcacagattttaatttaaaaaagaaaagctaatgaatgttggattgcattcttcagggaaggtaataagccttgtgtgttatataaaaagctacygccctctgattgtcaaagtttacttctttcttttcagattcttctttgtattgttttacaatctaggtatatctgtttaacatgaaatgcagaaaatgacagggctcagacagctactgcatccagtgacaaagattactgtcatcctggctcatcagtta

SEQ ID NO: 477697 - DNA, 513 bp, Homo sapiens
ggggaatctaggtatgacatgtaattctcttcctcaacatgacaattctgatctaagtcagggtctggctgtgagaaagtctcaataaacatcatcaacaacaaaaatagaggtggtaatggaggatccctctttcatcccatatacattgtcactgaggaaggacatttgcctcagtcccttctttggcctaggtactcagggagaaagtgccctgagatgctccctgggatgtggggagcaacagttcctgggattcctcctgtattcctgctggctccttccctaacaccttaagtggatttgcattcttctgrtttatcattagcactggctttatccctcccacactgagttggggtagagcctccgtgaggaagtgatccctgctacttcctactcgggctggatgcatgggtgcttgggtgtgtgtgttgtggggcaggagggataagcctgaggcttatcttattacttattactaagattccttatttaagtaaataaatacaa

SEQ ID NO: 477698 - DNA, 570 bp, Homo sapiens
aagaagtacattttctactagggtartatagattatgtggactttgatcaatgtatactatatgcattggtatgtgtagcacaaggaccatagattctgggtttctggagtctattccaacttcagactttcaaatattatatttactgatacagatatgtatgtgtgttaatgaactatatatttttagttatataactatattcttttcaagaaaggcatttttaaaaataacgagaaccaaaaagattttacattttatatttgaaaggctttttatataagtgaattcgcaaatcagaaaaataattctttattaggtcatgagttctaaattgtgactctggaaatatggtcactatagatatgcttactgctcttctttcttaagtctaaatgcctagaaagcatacagctcataaagataaatctggccaaactggttattcgtccccttgcaaagacctgatccctcctcacagttttactcatttctttccatttcgctttatgttgttttttactttgctgagtgcagaccaagttatttgtgtttaaaacaaagagaga

SEQ ID NO: 477699 - DNA, 590 bp, Homo sapiens
gtgtgtaccttgaaaagaagtacattttctactagggtagtatagattatgtggactttgatcaatgtatactatatgcattggtatgtgtagcacaaggaccatagattctgggtttctggagtctattccaacttcagactttcaaatattatatttactgatacagatatgtatgtgtgttaatgaactatatatttttagttatataactatattcttttcaagaaaggcatttttaaaaataaygagaaccaaaaagattttacattttatatttgaaaggctttttatataagtgaattcgcaaatcagaaaaataattctttattaggtcatgagttctaaattgtgactctggaaatatggtcactatagatatgcttactgctcttctttcttaagtctaaatgcctagaaagcatacagctcataaagataaatctggccaaactggttattcgtccccttgcaaagacctgatccctcctcacagttttactcatttctttccatttcgctttatgttgttttttactttgctgagtgcagaccaagttatttgtgtttaaaacaaagagagaaataca

SEQ ID NO: 477700 - DNA, 570 bp, Homo sapiens
aagaagtacattttctactagggtagtatagattatgtggactttgatcaatgtatactatatgcattggtatgtgtagcacaaggaccatagattctgggtttctggagtctattccaacttcagactttcaaatattatatttactgatacagatatgtatgtgtgttaatgaactatatatttttagttatataactatattcttttcaagaaaggcatttttaaaaataacgagaacyaaaaagattttacattttatatttgaaaggctttttatataagtgaattcgcaaatcagaaaaataattctttattaggtcatgagttctaaattgtgactctggaaatatggtcactatagatatgcttactgctcttctttcttaagtctaaatgcctagaaagcatacagctcataaagataaatctggccaaactggttattcgtccccttgcaaagacctgatccctcctcacagttttactcatttctttccatttcgctttatgttgttttttactttgctgagtgcagaccaagttatttgtgtttaaaacaaagagaga

SEQ ID NO: 477701 - DNA, 484 bp, Homo sapiens
cagtataagacaaatacccttagttaattttgcaccaaaagttcatgtcctggccaggaatctcaggaggctggatgccagtcaagatgggtcatttgacacaaaggaaggagaggtctgcaagggaaycctgctatggaaactttagcatccgtaactgcggggatgaagatatgagcatttgccaacttgggaaaataataattataaacagagatctgaaacttgcagttctggcaggcattccattgctagccccacagcctgtgttgggtgaatcatgagactcctatcagcctccctcagattgtgagcaaccaagtgtgatgaggatacttgtcactacttttcacagctcatgagtggtgagcgattactgtgattaacaaggacactgggtccattcacatgatgaacttgcagcttttgccagtgaggaattatggtgattagctattcagagtgattaaaagttcactggcta

SEQ ID NO: 477702 - DNA, 484 bp, Homo sapiens
cagtataagacaaatacccttagttaattttgcaccaaaagttcatgtcctggccaggaatctcaggaggctggatgccagtcaagatgggtcatttgacacaaaggaaggagaggtctgcaagggaaccctgctatggaaactttagcatcmgtaactgcggggatgaagatatgagcatttgccaacttgggaaaataataattataaacagagatctgaaacttgcagttctggcaggcattccattgctagccccacagcctgtgttgggtgaatcatgagactcctatcagcctccctcagattgtgagcaaccaagtgtgatgaggatacttgtcactacttttcacagctcatgagtggtgagcgattactgtgattaacaaggacactgggtccattcacatgatgaacttgcagcttttgccagtgaggaattatggtgattagctattcagagtgattaaaagttcactggcta

SEQ ID NO: 477703 - DNA, 508 bp, Homo sapiens
agctgtgaataaaaccaggcttattcaagaatgagtaatagagacaacattttataagactccaaatttgacctttcttggaaattctaatatccagcaagaacttgtctttgagctcataaacatataatttctttgattttcttccaaatttccaataagctgagattgcatttggaggtggagaagtggaacattgtgaacaggagaggaacacagtgattccccttgaacagagggtgaaaccagaggccagcgggctagactgtcccacaagtctgtttgatttggctggtacagtrtggcctaaagagaacttagaaaatgtttgactgaattgctaacaacaacaaaaaaacaaagatttcacatttaaaaaaaaaatccagatttccagcttctctttgaagaaatgaaatgatctggcaatattggattgatatcacttccaggcaatacgaagcttgagctgaacagagattgtccctttagacagagcaaggcaacc

SEQ ID NO: 477704 - DNA, 598 bp, Homo sapiens
ctttttttttctttttcttttttctgtcggggggtgggtggtggcggtgaggagaatgtctcactttgttgcctaggctggaattcagtggcatgatcacagttcactgcagcctcaacctcctrggctcaagcaatcctcccacctcagcctcccaagcaactgggaccacaggtgtgcaccactgcacctggctaatttctaaattttttgtagagacagggtctccctatgttgcccaggctggtcttgaactcctgggttcaagtgattctcctaccttggcctcccatagtgttgggattacaggtgtgagccactatgcctggcccaatttgcatattgtcatggccacaggaagatctagttttagtctagtgtctgtggaatgggatgggaaatctaggtaacaaaatctattaagtgtctcccatgtaccagtcatccctgtctcaatggattctcacaataatccatctgggtaaatattattatcctcattttattgacaataaaacagtctaagagaggttaagctactcaaagccatgcaggtagaacaggcaggattagatttaaatccaggtttgtctggtgc

SEQ ID NO: 477705 - DNA, 564 bp, Homo sapiens
ctactaaatgcaatgtggcatccttggttctctcctgggccagaaaaagaacagtagtggagaaatctggtaaaatctgaataaaggcctgagtttagttaaaggtatataatgatgttgacaaatttaccatggcaaggtgagattctaacactaggggwaactgggtgaggcatatacagaaactccttctgttatatttgcaaattttctgtaaacctaaaattattccaaaatttaaaatatatatatatatatatatatatattgtgtaatagctattgaggaggctcagagcaagagaattcagtctcctgggtgctgggagatttctgaatagactaccaggtaactcatcaggaccttgtctctgtctggagagtgagggcctgggtggggaaccagcaatgttacaacaggctggccatgaatccatgaaagcacctacccagccagtcagctcatgagaggaagcagaagcttcatatgctctctggtgggctgacccacagtccttccacaagaaaaagaaaaagcttatcaatgtgtacttgtgctaaaaga

SEQ ID NO: 477706 - DNA, 598 bp, Homo sapiens
tctccttgagagaaaagaccatgctgtgtcttcttaagaaccctttccccacatctctcagaatatcttacacataacagatggtctatatatacttgctggatgaataattttctagcctcccgagtaaaatgcacagtaggtcctgaataaaggatacmcactatggcaggtgtttactagaaaagaaaatataataggagaatgagggacaataaaaataatttttcaatggaagataaggtagttgtaggaaattcacacttttcaagttttttaactgccttttaactgcttttaaatttatgttcgtgtgtgtgtgtagtgtgtgtgtagtgtgtgtgtagtgtgtgtgtgtgtgtgtgtgtgtgttattcagccaacatgtagatttggatgtctgtttggggaattgttccctcactaataattaaatcctaaacggccattttgagaagtggcagtaaccatccacattctataatcttgtaattactcaagtgtaatgagaatataggagtatttagaaataggcagagtgtttcttgtaaattccatctgtatcagtacttcataaaatggaggtcatgcaccctag

SEQ ID NO: 477707 - DNA, 605 bp, Homo sapiens
atgagcttgggtttaaattttactaacagatatcagcacaagatggattttaccagaacaaggatggattaattttactaaacctattatctgacatatcaaggaataggcgttctggttatcaaatattttgcaagcagattagcgctatatatgccatgtatagatcatcaacattcaaatcatgcacctaaagttatttaatgatatattatgctctgagattctatgatttttattttctgtctcctctgagcggaatagaagcccctagcctgagagcagaagcatatatatttgtatatatgtataaacatacgaacatctgactatatccacatacatacatatacatatacctaacacatrggagatactctgtatattatgaataaatgaatagacaataaacagaattcaatcttttttattcagaaggtactttagaattgtgtaactttttaggattatcatgtactgcatgtgcacaagtgtgcccattaatgaagtcctgattaacagattgctagataatggggtttattgcattttcagtttagacaattaaaacattgattgagcatctaattcacactctacactta

SEQ ID NO: 477708 - DNA, 637 bp, Homo sapiens
atcaatagtcaatgagttaggtctctctgagcaatttttaaatgctagtaaaaacacaagatagattatgataaatcacagactttcacaattctctggaatagcaggttccctgaagttcccactagcctatttcatttttctatcacctgaacccttcggaaagaattcttttgcctaatttttactttccagcatgtcttaaaaacctgaaatggaccctaagtaataccactgacatcatccacatattttacatatatatggttatttgcgaagtataatgcaaaagaactaggatgctctcagttattcctgagctagctgtacagtttatggattaatcagtcttctttatcacctcccatccctgacacgagtagtttgtcaccaaacagtacacaaggaaatacagaggctgggagacacaygtgagcctgtctttcgccaataatcaactcttgtaataaagacacaagattggatttcttcttggattttcccaggagatttcaacctgactcatgcctttatcacatacaacaaaatttcatcacggtagtgctgccgactgtactccttggtgtatttctgtgtcaggaccacctctgtaaggggaaaaccatgccagtgagta

SEQ ID NO: 477709 - DNA, 598 bp, Homo sapiens
caacttacacaagttataggtattctgatggaatttaaaatagctaacaatcaattaaacagacataagaattctctgtggtaagtacatctagattttctaaaaattrtactgtaatttcaagggctatcagatcatcttattatgcacatttaactcacttccatattcatggctcaagaagagttcattgtctcatggcaaatttattgttttggacatatactgagttaacaccaagggaaaaataattgctcctttaaatgtgtggagacagaaacatatttttttctttcttagagatgaggtcttgctatgttgcccaggctggactgcagtggctattcacaggtgtgaacataaattctaacaaggcaaatatttttataagttttattttaggcctacaggcaatatttgccattaagtttcacagcacctgggattatttcacgaacttgaatttagtgctggaatttactgggtgctccaagtcatcttaagtaataaaattaaatggaacccaatctcttaatttgtcaagatgttagattgtatgtgctgcagaagcatttcctgccaaatcaagagggcaaaa

SEQ ID NO: 477710 - DNA, 533 bp, Homo sapiens
taaaatttagaacaacttctgggatgactcagataaccgaggcttctttaaaatgctttccggatgggtttcaactgatggctttttttcctctgtgtaattttcaccatagtaagcaaaggctctcaaaaatcatttcgtagtacttagtgctacactcaaatttgagatgactctgttaaaaaattgccactgttgcccctaaatagtaggagagcccacggagggctttgggttgaaagagttagagaaggggactctcttgagtcaggtccttctgacagtcttctcttagctctctctattcctgggtaactagagggagacccttcgaagagaaagaacatggaaaaaaggaagcacactgagcatggcgggaggggaagcgactaagaactttacctggaacagtgattctctgccttttatccctcccagcccacctaaggcacagcatgcacagccaggactagcaacacatggaacacatttttaacagggaaggtttgamaaagactttctccaactgaatc

SEQ ID NO: 477711 - DNA, 629 bp, Homo sapiens
tccatatctgtgggttctgcgtctgaagaatcaaccaaccacaaattgaaaatattttgaataaataaataaaaaacaatacaatacaaaatagtacaaattttaaaactacactgtataacaactatttgcatcctgtttacattgtattaagtaatctacagagggtatgtgtaggttatatattaggtgttgtattaggttgtgtgtgtgtgtaggtaggtaggttatgtaacacaaatactacaccattttatatcagggtctcgagcrtctgcagattttggtatccaagcggggtcctggaacaaatcctcccatgggtaccccaggacgactgtacataaatgcagcattggaaatttaagaatgtttatcagaagtcctgttgttggcatggtggctcatacctgtaattccagtactttgggaggccaaggcaggaagatcgcttgaggccaggagttagagaccagcctggccaataaagcaagacctcatctctgctaaaaattaaaactcctaggttcaaatgatccaccctccttggcctcccaaagtgctgggattacaggtgtgagtcaccacaccctgccctcgtgagccaccatgcctggcccttccctgtc

SEQ ID NO: 477712 - DNA, 629 bp, Homo sapiens
tccatatctgtgggttctgcgtctgaagaatcaaccaaccacaaattgaaaatattttgaataaataaataaaaaacaatacaatacaaaatagtacaaattttaaaactacactgtataacaactatttgcatcctgtttacattgtattaagtaatctacagagggtatgtgtaggttatatattaggtgttgtattaggttgtgtgtgtgtgtaggtaggtaggttatgtaacacaaatactacaccattttatatcagggtctcgagcgtctgcagattttggtatccaagcggggtcctggaacaaatcctcccatgggtaccccaggacgactgtacataaatgcagcattggaaatttaagaatgtttatcagaagtcctgttgttggcatggtggctcatacctgtaattccagtactttgggaggycaaggcaggaagatcgcttgaggccaggagttagagaccagcctggccaataaagcaagacctcatctctgctaaaaattaaaactcctaggttcaaatgatccaccctccttggcctcccaaagtgctgggattacaggtgtgagtcaccacaccctgccctcgtgagccaccatgcctggcccttccctgtc

SEQ ID NO: 477713 - DNA, 602 bp, Homo sapiens
acaaaaaagatctgtctacacaatcgccttgatattttgcctggaaacactttctggaacacaggcagagagggagaactcaaacagagcatggcagtctcacggggctggggaggcagcaatcagaattcagggatgctgaagtagctggaatgtgcrgtgacgtgagtcagagggaaagttgttcatagaaagagatctaaagtttagcatggggggggtcttcttaagttattagctgcacatgtgtagaccaatactcatggagagatgtggcagacaataggtcctagacagtgtgatctgagtggacattccagaggtcacacagtgctgagagatacagcacttctaaccagtcagagtacacaggctgatttattttgattattgtctccactagaacataagctccataaaagcagggttttttttttaaataactattgtatctccagtaccgagaacaatgtctggattatagtagatacccaataaacattgttgaaagaataaatatactgtttataccttttttatttgttattttgcctagaaacactttctggaacacaggcagagagggaggctgcctggatcac

SEQ ID NO: 477714 - DNA, 602 bp, Homo sapiens
acaaaaaagatctgtctacacaatcgccttgatattttgcctggaaacactttctggaacacaggcagagagggagaactcaaacagagcatggcagtctcacggggctggggaggcagcaatcagaattcagggatgctgaagtagctggaatgtgcagtgacgtgagtcagagggaaagttgttcatagaaagagatctaaagtttagcatggggggggtcttcttaagttattagctgcacatgtgtagaccaatactcatggagagatgtggcagacaataggtcctaracagtgtgatctgagtggacattccagaggtcacacagtgctgagagatacagcacttctaaccagtcagagtacacaggctgatttattttgattattgtctccactagaacataagctccataaaagcagggttttttttttaaataactattgtatctccagtaccgagaacaatgtctggattatagtagatacccaataaacattgttgaaagaataaatatactgtttataccttttttatttgttattttgcctagaaacactttctggaacacaggcagagagggaggctgcctggatcac

SEQ ID NO: 477715 - DNA, 484 bp, Homo sapiens
gtcaactgcaaaatgtaactaatatttgcagccccacctgcagagtacaagagtacttgtttccccacagctttcccatcactgcatatttattgattacttccatcactgccaatctggtgagtgaaaaagcatatctaattgtctccatttacgtctttatgactactagtgatatttacataattatcgaccaaaagaagaaatatattcctttctttgtgaatcgcctatacacattgttgcccattttttctagctagtggactttccttgtcaattgataaaatattttgagttctttactttagcagggaatgtaatatataagacttctcatccaggtgttgtttctaaatccatctgtctactttacctgccttcattctcyaaaagaataaagttctgatggctctcagtgaaatatgctgtccctttcctgagcttcttcccgacaatttttaacaaacttggatgttttttt

SEQ ID NO: 477716 - DNA, 621 bp, Homo sapiens
ctatgtcctgataaactcatttctttaaagtcaacggcaacaacaaggaaatctttacctaaatcattgcatttgtacatatctctagtttgtgctaaatgattatgagttattgttgaattaggaaagagggtagcagctgaaggaccaaggaggaaagacctagagttgctcttgtatcctttgtaagatatacaatctaaagactatgccaaggttataatatggatgacagttaaaatgtcttggctttcaaagtattctctaatacattaactttaattttattgtaatcttaattgtacatggatactatacctagcagcatccctctgaacaaggttccctgagaaacatgagaacatttccagacaagacgtaaaactggatgaatcttgagaaaggttcttaggagtctcccaatgcctagtcttgaatatcagccatctctgctttgtctggctrtattgagaatgcaattatagacacattgtattcactgtgagaaaattattggactttgtattcaatgatttacactctgtcctccaaagttgcatcttcaattaaggagtctgattccctctcctaagctggtggcatgttataacaatcaattgc

SEQ ID NO: 477717 - DNA, 631 bp, Homo sapiens
ttaattccatgggttccagaactttgttactgaagccatagccccagtctagtctggggtttatctgcaaggctgtggcttctcaaaaccaggaataggaaaacaaatcctgacataaactgacacaggccacagctacttaagagggataaaaagcttaaagattgaastggcattttttccctctctcatgaagcataaaggtctccacaagtttagttgggtccttattcaaaaaagacatgatggatagcttctcagaactggcaactggcctaccaagatatatatcatagaatagaatagaacagaatagaattagatagattgattgactggctgatcatatgcatatatacgtcatacagtatagtgtaccgggtcatgatgtgaaatgtattcctactatgggttacaataaaagaggcttgaaaagtagtgcaacagggacaccctatctccccctaattgggtaagctgcaggtgaaagcagcagtatccacacagtggtaacagcagagggaagtgagttaataggaaggcagcgggactcgggaatgaggagatgactcaggggtgctgcagcacacccaggttaccagtttgtcaggattgctcctagtttgaaatg

SEQ ID NO: 477718 - DNA, 631 bp, Homo sapiens
ttaattccatgggttccagaactttgttactgaagccatagccccagtctagtctggggtttatctgcaaggctgtggcttctcaaaaccaggaataggaaaacaaatcctgacataaactgacacaggccacagctacttaagagggataaaaagcttaaagattgaactggcattttttccctctctcatgaagcataaaggtctccacaagtttagttgggtccttattcaaaaaagacatgatggatagcttctcagaactggsaactggcctaccaagatatatatcatagaatagaatagaacagaatagaattagatagattgattgactggctgatcatatgcatatatacgtcatacagtatagtgtaccgggtcatgatgtgaaatgtattcctactatgggttacaataaaagaggcttgaaaagtagtgcaacagggacaccctatctccccctaattgggtaagctgcaggtgaaagcagcagtatccacacagtggtaacagcagagggaagtgagttaataggaaggcagcgggactcgggaatgaggagatgactcaggggtgctgcagcacacccaggttaccagtttgtcaggattgctcctagtttgaaatg

SEQ ID NO: 477719 - DNA, 616 bp, Homo sapiens
tgacagcatcaaggaatctcccatagtgataagggggtggggatatcaggcatctgtcagtaaaggtgggagggagatatgactacagggacttgaatttctcctcgctcagtcttgtcagggtgcagagctcaccacctcaagcttttcgtgcaagggactctygaccatctccctctccctccttcccagcctgtttgctgttcctcacatgccctgcttgaccccagtccttctgaggcctttgccacagtgtctccccacccggattgtgcttccccgactgtgtcagctcacttttgtcgcatctctgaccaaatctgaggcccttttccattcctatccccttccaggtcacaattttagattctgactttctccttcacctcctcctgcccccaggtgtccccacattcaaagcatcctaacccctctttctggaagcctcagaaaatggttaaggcctccactctgtccactaaccctggccttcccccaagctggagttcacctttcacctttcctacctcaagatgagcacccagaatctaggcccgatacttcgtgaatttgagaataaaatgaaaagaccatcccacatgctgccaaataccag

SEQ ID NO: 477720 - DNA, 254 bp, Homo sapiens
gtgtcccctctcctgctgactttgaagctcatcatagcatttgccttgaatataggcagaaatgatagtaacctattccattccaaagtctacagaagcatcacatgtttttattcaccgttttgaacttctaactatttggtgagaaagacatactccaggtattaaggctacttcaccctscactccagaatgaagacacatgaagcacaggacccagcctggaggtgggagatgagcagggagatgaacag

SEQ ID NO: 477721 - DNA, 647 bp, Homo sapiens
tgttgcctgccatttcagacaggcaattcaccttgtaaacagataatgtaaacttattgtattgataaataagtacggtactgtaaatgtattttcttttccctacacctttcctaataacatattcttttctctagcttacttcgttgtaacaatatagtatatgatgtatataacgtacaaaatatgtgttaactgtttatattatcagtaaggctttcagwcaacagtaggctattaatagttaagtttgaggagagtcaaagtgacatacagattttcacctgtgacgggttagcacccataaccctcatccccatttgttcaagggtcaactgtacatctcatttgacagaacgtagttaaatggacgcaactagctgcaagaaagcttatgcagtgtgtgcaatgtggtcttttagctggggtcattgatacctttagtaaaatcagagttatgttacagcagaagaaggggaagatggacattaagaaggtgactgtcggattctgccatagaaattttttccaacaaccttaactacagtttctcttacatacatatatacacacacaagcatgtgtgcacatacatatatgatctttattattcatctctatttcatgtaattacattctgaaattga

SEQ ID NO: 477722 - DNA, 629 bp, Homo sapiens
gtcctttcagtgagctgccaacacccccctttctctgtctggtatgaaagtggttatggggcggtaggctatgagggactcccaaagggaaggattcagcggcgttagaaaaaccctctccccctggctgggcaggactgccctgggctggggatcaaaggctaggtgtggggttgggagtgaggggaggcttgcccagctcagagaacggagaagggggaacaaaaaccatgaacgaggggaagaggaaggccaaaggggtggaaaaaccacgaggacgaggtgtggtgagaaggaaagacgcaaagaggaaatggtgattgtgacacctattacctgagtgtttccaagcaccaggcctgtgctgagcgccttacaaatrttaatttcacccatccagcaacgctaagggtggtgctattattgcccccatttttcagatgaggaggctggggcttagttaaggttaagtagtttatccaaggccctgtgccgcgaggaacagcgagaagtggaggccgaaagcgaaggagagatagtgactgtcagaaagagaaacggaggtggacagagagtggaggagagataggtgagagacatgcgaactgacagatcaaagcgtggctgca

SEQ ID NO: 477723 - DNA, 640 bp, Homo sapiens
catttaggaggtagaggaaaatacacctgagcacccagaagtcttcttcctgctatctgagccagagaaactgaagggtcagagttgccagattctgcaacatcagcacactagaagtctgggaacttcctaggaaatcatgataaatgcttaatgaacagcccatattttctgtgccacatggcatgtcactttgttcttcacatcactcagtttaacaacctgactccamatttttttgttccctttgattgggttccctggctttgggtgtttactgtcctggaagctacataggatctttgttccatgcacaaaacagtgtaaagaggatcatttttgcaagtgttaaatttcttgctttaaattattggctgagccaagggtttattttccatgaacaggtactatactgtgactagaatagtgactttcaaacttttttgactaccatgactcataggaataaatttgttttacatcaagacccagtagacaaacctatgcatatagaaaagctagaaagtttaataatactgcagcaatgtgctatatagtataattttctggttttattctattttgctttcgaaaatgctttttgtatttcacaaaacttattttgtagcagacaatgtgg

SEQ ID NO: 477724 - DNA, 640 bp, Homo sapiens
catttaggaggtagaggaaaatacacctgagcacccagaagtcttcttcctgctatctgagccagagaaactgaagggtcagagttgccagattctgcaacatcagcacactagaagtctgggaacttcctaggaaatcatgataaatgcttaatgaacagcccatattttctgtgccacatggcatgtcactttgttcttcacatcactcagtttaacaacctgactccaaatttttttgttccctttgattgggttccctrgctttgggtgtttactgtcctggaagctacataggatctttgttccatgcacaaaacagtgtaaagaggatcatttttgcaagtgttaaatttcttgctttaaattattggctgagccaagggtttattttccatgaacaggtactatactgtgactagaatagtgactttcaaacttttttgactaccatgactcataggaataaatttgttttacatcaagacccagtagacaaacctatgcatatagaaaagctagaaagtttaataatactgcagcaatgtgctatatagtataattttctggttttattctattttgctttcgaaaatgctttttgtatttcacaaaacttattttgtagcagacaatgtgg

SEQ ID NO: 477725 - DNA, 640 bp, Homo sapiens
catttaggaggtagaggaaaatacacctgagcacccagaagtcttcttcctgctatctgagccagagaaactgaagggtcagagttgccagattctgcaacatcagcacactagaagtctgggaacttcctaggaaatcatgataaatgcttaatgaacagcccatattttctgtgccacatggcatgtcactttgttcttcacatcactcagtttaacaacctgactccaaatttttttgttccctttgattgggttccctggctttgggtgtttactgtcctggaagctacataggatctttgttccatgcacaaaacagtgtaaagaggatcatttttgcaagtgttaaatttcttgctttaaattattggctgagccaagggtttattttccatgaacaggtactatactgtgactagaatagtgactttcaaacttttttgactaccatgactcataggaataaatttgttttacatcaagacccagtagacaaacctatgcatatagaaaagctagaaagtttaataatactgcagcaatgtgctatatagtataattttctggttttattctattttgctttcgaaaatgctttttgtayttcacaaaacttattttgtagcagacaatgtgg

SEQ ID NO: 477726 - DNA, 555 bp, Homo sapiens
ctgcagtgattatttaatactttgtgcatgcatcattcatacctagtatgttctgctccacaaaagacatttgtgggttaatgaagttgtacacatgtatgtcatcaaggacctgttttaagcataaggcgctatggaagctcttctatttaatgcaaaatatcccacctaaaatttctggttagtaaatttgaatttttagtcttttgtacaaataatttcatggtgccataggcactggggtcgggattagtagcattttgatttggtgagcaggttaattgtgtataaagtaagcttttgttaatgcaaaaagttgcttcacctctcttgcatgcacatggcattatagagatcatttttacaatgtgtaatcataaaggggatctttagagactgttttctgccagtcacagtaaaaaattatcaggatgcttgcaatatcataatcatagaaattagaagagattatatgctgtgattcatggaaggacattaccttrtctgagaaaagagctgcgttttgtgtatatgtgtgtttgtgttcatgtgcat

SEQ ID NO: 477727 - DNA, 541 bp, Homo sapiens
gcacacctattcttattttgtaaaatgctgaggtcatcttaacatgggaaaacaaaaaggtgtccttaacaactgaaaaaaatagcagtattaagataagattttgaaaatacaggtgttagggagaaaataatttctagtattgcaaggtcttcgtttattcaayacaatgtcatttgaaaagacttcacacctatataatctttcaagaaggaaattacattgaatatacgacgaaaaccttaattaaagcaacattttctgtgtctctttcttctccagctccataagaggattacatctttagctaagggccttttgctttcagttctattatcttgctttttataacagattttgagctaacgctacaccaagtaacagtcttagtctcccaaaccttgaaaaaatacacataaaagcccccaactactatcttttattttttcttcttattattaaatgtgcgtcttcgtgttgattcatcttcaagaagatatgagaactcaacagctagtggtaaagtggataaatgggaaag

SEQ ID NO: 477728 - DNA, 351 bp, Homo sapiens
ttgtcatttcctaggacaaatcctgacmtctttgaactctgttcccataccacctcttccatgaagccttccctgagaaccctccccatcactttcctaaggctgcattgggtttccctcttctatgttcccatagtaccatctacatggatgtccttatcactgtgtttagcatgctgtattataaatattttatgtatgtctttttctttcactaatctgagctctttaaggctgggattagattttatgtttgtgtccttggtggatagcatagcatctgcctagagtgaatgaaaggaaggttttctattaatgtttccatgtaatctctagaagattctctctaaa

SEQ ID NO: 477729 - DNA, 602 bp, Homo sapiens
ctgtataattctgaggtgttgacccccatctctaaactcagctttctaacccagttaagtgggagaaatagtggtacccgagatcaagcctgtctatacttatatggctagaggatagttgaggctggcattatctgattggttggtgcctgtgacatgccagcggtgaaatactttgaatatcaccctgcctgtcttgttgggttgttgtgatgattaagtaagacagtccaattatgcttggcatattgtaaactctcaacagctatgagctattgttcttattgtcccaattcataatcaggtaaaataaggaagtcccacctactgctttgrccttatatggcaccccactccccttccctgcctgtcctaggtacagtggcacattcttgtttctctaccttggcaatttgggccaattcttgcctcagggcctttgcacttcctgtaccttctgcctagagtgctcttaccccaggcttttattttgctcctcctcgttgtgcagatttccgttccaatgtcactttcagagagtcctttcctgacttccctctataaaagaatccctacctacctatccaattctgcataccctt

SEQ ID NO: 477730 - DNA, 604 bp, Homo sapiens
cagtggcattgtatcagcacctaagttgacttgcttcactgaggcaagtgtggtgtattttttaaatcagagatccacacctgaaacattcttcctttagtagtaggtcacatttctaactctaataatctgtaagccatcgagtcaatatcctctttgtgtgaatgtcctatatatattaatctcattatgatcaacagagacatgaataagccaatggcttcatccatacccttcaattgtttgttttgtatcttctcaacaaaggagcactagttaaagagatacgttcttcagttcttcatttatttgccactctcaactarggcaaattggcccactgttctggtcttcagattcatcattatccacaaaaagaaggtctttcaagagaagagaaactttaattccaaatctaaagtccaaaaaagggctacaactttcaattttcctctgtcacttgcatatactttcccttacccaaggaatcatactgtatggtacatattagctaacatttttttcttggcctccaagtgtattcctctggttctcagttgatgttacaagttgctgaaccatttaaaacacaactgaactactt

SEQ ID NO: 477731 - DNA, 517 bp, Homo sapiens
tgtattaaattgcctccagtgtcttttcagcctggaggccttcttgcttctgtagtgggtggggacagctttcagacagatctgttttgacctttcctataacaacagcctctgcaaagttatcatggatttaaaactcctccttacttgggatgcctccagttggtgtctctctgtttaaatgacctagagatagcagacttcagggaggtttctggttctcttgaatttaataaaaatagagatagatagccacttgctagcagtgtgaccttaaagaagttactgaacctcctgaggctccatgttctcgttcagaaatgcattattatctcaagttaacaaatgtaaattatctcaattacccattttttcaggattgtcaaagaatattagtaatgtcaaattattaaacagatgttagctaytgcgaatactactgctactactaatgctgataataatgagaataatagtggtgaatttgccagcattgtggaacttatcaaaattgcac

SEQ ID NO: 477732 - DNA, 723 bp, Homo sapiens
taatgagaataatagtggtgaatttgccagcattgtggaacttatcaaaattgcacaggacaatgagcaatagtcttaggcaggggtccccagcccccagaccacagactggtaatggtctgtggtgtgctagaaactgggcagcacagcaggaggtgagcagcaaacaagcatcatctgaatttacagccactccccattacttgcattactgcctgagctctggctcctgtcagatcartgatggcattagattttcaaaggagcacaaaccctattgtgaacagtgcatgtgagggatccaggtcacgtgatccttatgagaatctaatgcctgatgatctgtcattgtctcccatgacccccagataagactacctagttgcaggaaaacacactcagggctcctgctgattctacatgatgatgaattgtatcgttatttcattatatattacaatgtaatactagaaacaaagtgcacaacaaatgcaatgtgctccaatcatcctgaaaccatcccccaccccactgtgtgtggaaaaaattgtcttccgtgaaactagtccctggtgccaaaaaggttggggaccactggtctaaggtatacatttccatcagaaaatggtttcaacccattcagattatagtgtttggggaagaaaaagacaaacagatgagagaccttgatgacatcgtagaagagaaactttgtacaagacg

SEQ ID NO: 477733 - DNA, 723 bp, Homo sapiens
taatgagaataatagtggtgaatttgccagcattgtggaacttatcaaaattgcacaggacaatgagcaatagtcttaggcaggggtccccagcccccagaccacagactggtaatggtctgtggtgtgctagaaactgggcagcacagcaggaggtgagcagcaaacaagcatcatctgaatttacagccactccccattacttgcattactgcctgagctctggctcctgtcagatcagtgatggcattagattttcaaaggagcacaaaccctattgtgaacagtgcatgtgagggatccaggtcacgtgatccttatgagaatctaatgcctgatgatctgtcattgtctcccatgacccccagataagactacctagttgcaggaaaacacactcagggctcctgctgattctacatgatgatgaattgtatcrttatttcattatatattacaatgtaatactagaaacaaagtgcacaacaaatgcaatgtgctccaatcatcctgaaaccatcccccaccccactgtgtgtggaaaaaattgtcttccgtgaaactagtccctggtgccaaaaaggttggggaccactggtctaaggtatacatttccatcagaaaatggtttcaacccattcagattatagtgtttggggaagaaaaagacaaacagatgagagaccttgatgacatcgtagaagagaaactttgtacaagacg

SEQ ID NO: 477734 - DNA, 723 bp, Homo sapiens
taatgagaataatagtggtgaatttgccagcattgtggaacttatcaaaattgcacaggacaatgagcaatagtcttaggcaggggtccccagcccccagaccacagactggtaatggtctgtggtgtgctagaaactgggcagcacagcaggaggtgagcagcaaacaagcatcatctgaatttacagccactccccattacttgcattactgcctgagctctggctcctgtcagatcagtgatggcattagattttcaaaggagcacaaaccctattgtgaacagtgcatgtgagggatccaggtcacgtgatccttatgagaatctaatgcctgatgatctgtcattgtctcccatgacccccagataagactacctagttgcaggaaaacacactcagggctcctgctgattctacatgatgatgaattgtatcgttatttcattatatattacaatgtaatactagaaacaaagtgcacaacaaatgcaatgtgctccaatcatcctgaaaccatcccccaccccactgtgtgtggaaaaaattgtcttccgtgaaactagtccctggtgccaaaaaggttggggaccactggtctaaggtatacatttccatcagaaaatggtttcaacccattcagattatagtgtttggggaagaaaaagayaaacagatgagagaccttgatgacatcgtagaagagaaactttgtacaagacg

SEQ ID NO: 477735 - DNA, 723 bp, Homo sapiens
taatgagaataatagtggtgaatttgccagcattgtggaacttatcaaaattgcacaggacaatgagcaatagtcttaggcaggggtccccagcccccagaccacagactggtaatggtctgtggtgtgctagaaactgggcagcacagcaggaggtgagcagcaaacaagcatcatctgaatttacagccactccccattacttgcattactgcctgagctctggctcctgtcagatcagtgatggcattagattttcaaaggagcacaaaccctattgtgaacagtgcatgtgagggatccaggtcacgtgatccttatgagaatctaatgcctgatgatctgtcattgtctcccatgacccccagataagactacctagttgcaggaaaacacactcagggctcctgctgattctacatgatgatgaattgtatcgttatttcattatatattacaatgtaatactagaaacaaagtgcacaacaaatgcaatgtgctccaatcatcctgaaaccatcccccaccccactgtgtgtggaaaaaattgtcttccgtgaaactagtccctggtgccaaaaaggttggggaccactggtctaaggtatacatttccatcagaaaatggtttcaacccattcagattatagtgtttggggaagaaaaagacaaacagatgagagaccttgatgacatcrtagaagagaaactttgtacaagacg

SEQ ID NO: 477736 - DNA, 622 bp, Homo sapiens
caatactctcaagtttaggaattgaagaaactgagattattgttccaagttcttccctagtctctgggtcttcccttgcagtccctttgtgcatatacatttcacacaactgttcatgcaggtctggaagggggtcwtgctgaggatattcatggcagtggtatttgcagtagtagcaggagttagattcaggcagcaagcaacccatctgcaggaagtggacaagtaaaatgtggtaaaaatatgctatggacaccatgcaatgattagaagcatatcagttatctattgctgtgtaacaaattactccaagtttaacatcttaaaataacaaacatttattatatcatggtctctatgggcgaggagccagcatggtgtagctgagtcctttggctcagggtctcttacaatgctgcaatcaagtgttggcaagagctatgggtcctctcaagtctctactagactagaataggatttgcttccaagctcacccacgaggctgttggcaggattcaattcctcactgctattggactgagggcttcaattccttgctggctgttggctggaagcctctctccagtctttgctgttaggctttctataaggtggctctcaa

SEQ ID NO: 477737 - DNA, 701 bp, Homo sapiens
ctggcttccaccagagtgagcaagggagggcacaagagaagaagacaaaggctttttataacttagtctcaaaagtaacatactgtcactttttgccacattctgttcactaagtgcaggtcactaagtatagtccacaatcaaggtaaggtgattgtacagggacatgggtaccaacagggcaccattattgggagccaccttaagagctgcctaccacaagaaacaacaggtcaaaggaccatgcagcattaaacacaatacttaacagaaaaaggcaagagttagggtgaagtctgcagcagaatacaatwtgtttaaattaaaatacacaggaacaatgttatatgctttacaaagatacaaacaaattcagagtataaaacaatcacattgtaatgtttgcctgctgggcatggagagctggtggggaaatgagaataaataaccacataaatccagagaagggccttgtagatacagaattaaattgtgtactataaactcaagaccaagttcaactccttgcacatgaggttcaaaagaaaggaaaagtaaagtaacaaaacacatactctgggtctctcaaacactcaagttcccatggaaggatcttatcaagatcgatgtctgagggagctccccacccaatgtcacactggattaaagtcatctcaaagtctcagagattcttaccgagt

SEQ ID NO: 477738 - DNA, 219 bp, Homo sapiens
cacagaaggcagacctcaagatccaggaggcaaagttcaggaaggggtcaagacaggagtttgagaagcaagattttcctgactggctgttagaagaaaccacatcccacggctggattagccatctccagaaaagtctggcggaagttacccacccacacgacaatctgaagaatgtgcttrtaagattaaagtgatctctaggtcttcaggaagcag

SEQ ID NO: 477739 - DNA, 685 bp, Homo sapiens
ttccgaaataaatctcctttacttataatccaatttcatccttaaccacaataccatttgcctcttgcctaggggcacaaactatccctgaacagccaaactagcagcccagaccacctgctaaggacaatggggccagtctttcatgtggggctgtactttttaatgccagcctttgtgtagttacagttcaccccagccccatttgaggcacctctatgttgctagttccttcataygcctctgcttctcttccttctaattaacttccaaactcagggtggagacttagcattggtactgtaagaaaaagccagcctaaagcattctcctaagtgacaagaaaaaaataatgtcatggacaacaagaaaaaaacacatttttgccttagggcctgaactagtctaggccatttagcctgcctgataggtcagactgccaaataagagaagcaagagttgggagagatatctctgcttcctccctttttaggggatggtaatctcaccaacttgtaaagcatgccctaccccaaaacaccagaccgaacaactgtcttggtttggtccagtgctctcaccaaggtcctcaagaggtgatcacaggaagttagtgggaaaagaaaggggagtgaagtagagatgggggaaagcatgcgcaaggctgtctaattgagctgatttt

SEQ ID NO: 477740 - DNA, 288 bp, Homo sapiens
acacctgcttgcagtgcagcctcgggtgccctgggggcctacatcacagctcctgcactggtggaccacacctgaccagcagagagctccagcagagcagcccccatggacatgcaccagcttgctcactccctctgcccactgtagcttcccctgggccatggccaccccccacatatctttgccagcacrtgtgtgcctgggcagattttgccttccctgacctgccagcatgcgtgtgagcgtgcatcctgccctgccgctgctgccaatgtgagtgccccccaa

SEQ ID NO: 477741 - DNA, 288 bp, Homo sapiens
acacctgcttgcagtgcagcctcgggtgccctgggggcctacatcacagctcctgcactggtggaccacacctgaccagcagagagctccagcagagcagcccccatggacatgcaccagcttgctcactccctctgcccactgtagcttcccctgggccatggccaccccccacatatctttgccagcacgtgtgtrcctgggcagattttgccttccctgacctgccagcatgcgtgtgagcgtgcatcctgccctgccgctgctgccaatgtgagtgccccccaa

SEQ ID NO: 477742 - DNA, 494 bp, Homo sapiens
atatcagcttcagtgatgtcactgaacccagtgtttagaatagatttgcagacctggttttcaaaagacatttcaagtcagctttagcccacaactggatctaatatataagatgataaaattaaaccttgggagaccacccaacttccataagctcatagttctagcaaaggaaacatctggaaaaggatctagatctttcacgagtcctgygctctatctaatcaccatgctaataaaagtaatatagaacagtggttctcaaagtcctgagaccagcagtctcagcagcatttgcgaaattcttagaaatgcaaagtcacaggctcctcctcagaattcctgaatttaaaaaatctggggatattccccagcagtgtatcttttagcaagccctccaggtgattctgatgaatactaaagttaaagaaccacaggcacagacaatagtgatatcttaagtcacttgatgctttgatgctttttaaagaatt

SEQ ID NO: 477743 - DNA, 489 bp, Homo sapiens
gctgcccgcaggaacccaccgggagcccagtaggagaactggctgccagagctttgtatcagtgtgccatccccagcctttcagaaacaagcgtaatgaactctttagccagggtgtttctgcctactaacctaagggacagtttattcttgcttgaattgtcaactgccagatgtcagttcaggcaaatcaactctattccctctttcctcctgtaccctttctctcagcttattttcatatcaaattccacttttccccattttatrgctacataattaacagctattaatagagcaaattcaattcataaatttagatataacaaaaaaatccaaagatacaaagtcctctaacacagcactgcccaatagaattttctgtgatgatataaatgtttcatatctatgctgttcaatacagtagccactggtcaccaagtggcaactcagcatttgaaatgtggccagtgcaactgagtaaccaaat

SEQ ID NO: 477744 - DNA, 465 bp, Homo sapiens
aaactcaagttcaatgtaaaatcctgagcttttaactgaaattatctaaaataaaatgtttaagagtcaagaactgatatcctaaataaaaggcgataagaaaaaaaactgaggaaaaaccataaaaactacaaatagcttcctatcattgggtaatattttacaaataaatgatttttaaaaacttttcaaagcaccwtttcagtaataaagattgaaaataagattgtagatcttaaaatggaagattaagaggttgagaaccttacagaggcagagcctagaagtaggaagatgatgttttgatcttttcagactatttctgaagggattaatcttctcttatcaaccctgatcacttaaagattccaacattgatgggattttcattatgacttttctgtactttgctgttaatgtgcaatattaggcttccattaatgctgaatgacactcaacactaag

SEQ ID NO: 477745 - DNA, 627 bp, Homo sapiens
gggccccgagtttggcatgtgtggatctgaggagagagtttggggagcagtgacttaggtgacagagcaggtccatggtgtctgtgtctcaagggtacamcactgctgcctaaatcaagctctaaagaaagtgcagtgtgtggggaacaccaactctagaaaaagctgtgttctgcagatacctagtactggagaaaatcatactggggagtgagcagtggaggaaaactatgctcaaaaggagcttagccagtgagcatcacagaaaccagaaagagaagcctcagccacttcagtgtccctccagtgccctctactgacaaggcttaacattgtacgagccagcaaaaaagaaatttacaaggcccagctccattattacagagcaggctaatacagtaaatttggaactaagagacagtaaactgataagcagcaaagtctacacttttcactactcagcttccacatgcaccctctcccacacactgaaactcctgtacaataacaacacaattctatatttcacctaacaaagtctaactgtccttctttataagtgaagaagttctatctcctcaaaaacgagagacatagagtcctaacagctattgtagtcattgctgt

SEQ ID NO: 477746 - DNA, 491 bp, Homo sapiens
cagaatttctgctgctttgaaatttcaggacaagtaaacaatagggtgaartatcatttgcatggaatcaatgaaaaaggggaacgtttttctgagatgctttttcttttgttgttgttgtttgttttttagatggagtctcactgtgtcacccagtttggagtgtagtggtcccatcttggttcgctgcagcctctgcctcccaagttcaagcaattttcctgcctcagccttccaggtagctgggattacaggcatgcaccaccatgcctgtctaatttttgtatttttagtggagacggggtttcaccatgtaggccaggctggtctagaactcctgaactcaagtgatctgcttgcgtccgcctcccaaagtgctgggattacaggaataagccaccgcaccagccctaagaagctttttctgttataaggacacaatttatgtgagcaaatatagtcttcaccctgctaagaaatgataagtagag

SEQ ID NO: 477747 - DNA, 491 bp, Homo sapiens
cagaatttctgctgctttgaaatttcaggacaagtaaacaatagggtgaagtatcatttgcatggaatcaatgaaaaaggggaacgtttttctgagatgctttttcttttgttgttgttgtttgttttttagatggagtctcactgtgtcacccagtttggagtgtagtggtcccatcttggttcgctgcagcstctgcctcccaagttcaagcaattttcctgcctcagccttccaggtagctgggattacaggcatgcaccaccatgcctgtctaatttttgtatttttagtggagacggggtttcaccatgtaggccaggctggtctagaactcctgaactcaagtgatctgcttgcgtccgcctcccaaagtgctgggattacaggaataagccaccgcaccagccctaagaagctttttctgttataaggacacaatttatgtgagcaaatatagtcttcaccctgctaagaaatgataagtagag

SEQ ID NO: 477748 - DNA, 587 bp, Homo sapiens
tgttgatagaagaattaaagtttaggctgagacyggtttatttccaacccaaattttacattaaaggagcttttcttgtgccttaaccatgaagagtggataatgcaggaatttcagatggtagttggagaagtggagggatattgttcgcttcaaattaggcacatatatagcctaatcttaaaggtagacacagattttatgtataataaaaaatgatgttatggaagacttgaaaaaaattctgttttatatctggggaggtggcagctaatggggaaggggtaaatatggggagacttacaaatattgagattgaagtcttttagaatttctagagcaggggttagtaaactatagttcttagaccaaatttgatccactacctgtttttgaaaacaaagtttaattggaatgcagctatgattattcatttacaaattgtcttttttgtactacaacagaattgaatagttgcagtagagaccatatggccagcaaagcaaaaaaaaatttgttatctagtcctttataaaaagtttgttgacactttttctagagggtaatggaagctgagagatggagga

SEQ ID NO: 477749 - DNA, 524 bp, Homo sapiens
ggattttttctaataaaaattcttatctgaatgttagactttttcctgtaaagatgagacaatgatgtctgatgttgcaagtattttaaktgtgtgatggatgaactgttgttaagctcaccaagcatagtaataattataattaataaattttaggaagtgataaatttaaatatgaaagaattaaaatcccttctgtatttagaacttccatgatttttctcatggagtttctgcattaattctatgctgctcctcagggtagatatcttgctcatattcagagaaaacttctttttctaaatgcttttttatgaaggaaacataacgtgatacaatagtaagaaatgaagtacttattcagggcttactgatggatgagattaatttagagaagaaatataaatagaagcagactaatcatgtgtatgtgagaccgtttccacatgagctattatgcagaaggtaccattttgggtgagggtttgtgtgaactcctctgagggcagagtttattgtttcag

SEQ ID NO: 477750 - DNA, 651 bp, Homo sapiens
ctctttggtctttatattcaaaatttattaagtatcaattctttctttcaacaaatatgtactgaacacatgctgtgttagaacaactgtcttgggtagtaaaaagaggggaacactacaaattataatggataatattaatgaagggtggcatgaaataatcaagctttctcaaatcctcttaatatgtgattttatcaagtgacattagaaaaactgacatcagttcttgtctaattatatgtgagctgcaactaaaagatgcttcctttacctaaattatagaactcactggatcgcccttcatctctctccctccatctgaaatgtatgaattaaatcaggactcagctaggactgaatcaaatgaaaaagaaattttcrattaattgcttcttcaatgttagacctatataagtgatgctaaatttacaccagcaaactcctatcagacagtttcaaggaggatttgactcatgcataacccaggaaacatttcaggaaacttttaagacaacagtgtggaacacaatcactcttacttctatttataaaaagcctatcaaaacagcaaaatcctgttgcaaattccaaagacatcactttgcagcaggtggaaaacagagaggttgttagactccatcactttca

SEQ ID NO: 477751 - DNA, 621 bp, Homo sapiens
actttggtttcctttaaacagtgtctgtcaattttcccacatcagtgcaggaatcactgacatgcacaattttccccatcagtatgatgcccaattacttgaaaagggtgaaaactttatgccactttccagcatgatggacataacctttaaatattggcaattgctgagatgtttcatgttgtaaattttctgaacataattgtgagttttcccttgccatcagctttattttctattcaaattaggaagtattaacaaagttttgcttgtctctcttaagattcaaatttatagccacaaagtatgcttaactctactagaatggttaaatgaatgctaaaggagattgtggagtcagctttggggatattttaaaacaagagttttccttcctgagcattttatrtggagaatagcctgaacacagagtagagttttgcatcaactcttatggtctgatctggatatattatccaacatataattcccatttaaaactcagacctagtcacacataaaatcattagatacttttggcttcatgttgacctgaaagagtgaatagtcttccttaaatggaacatcagtttttcaaaatgtgaatttgtatagcaaata

SEQ ID NO: 477752 - DNA, 493 bp, Homo sapiens
ctagacatagaattggtgggtcaatggtacattgattataggcttttgatgtgtattaatactggtgataatgttaaggtaatgaagaagctgcctagtggacaagtgataacttatcygaggaattccattcagggttaatagtcaagtaaatacttttcagatctactgacttaagagaactccactgtgcagcaaacctcacagagttgttcgctctgttctgactccagaggctcaagatttaccataatgttatgaatagtggtagtgggtgtggaggtggtcgtttgggggagagttctcaagcaagacttgagcatgaagaatcacaaaaccagcccatagaaacttcatacctagacccatatgagccacagaagagggcaaaggcgtctctctgtaccatagtcaaaaggaaggccagcccaagaaggtgggcactgcaaagaagtgagagcatgcatagtaaaagcagaaaggaggcctttgg

SEQ ID NO: 477753 - DNA, 493 bp, Homo sapiens
ctagacatagaattggtgggtcaatggtacattgattataggcttttgatgtgtattaatactggtgataatgttaaggtaatgaagaagctgcctagtggacaagtgataacttatccgaggaattycattcagggttaatagtcaagtaaatacttttcagatctactgacttaagagaactccactgtgcagcaaacctcacagagttgttcgctctgttctgactccagaggctcaagatttaccataatgttatgaatagtggtagtgggtgtggaggtggtcgtttgggggagagttctcaagcaagacttgagcatgaagaatcacaaaaccagcccatagaaacttcatacctagacccatatgagccacagaagagggcaaaggcgtctctctgtaccatagtcaaaaggaaggccagcccaagaaggtgggcactgcaaagaagtgagagcatgcatagtaaaagcagaaaggaggcctttgg

SEQ ID NO: 477754 - DNA, 362 bp, Homo sapiens
aacagaagaagactaaagactgcagcacaccagaagaaaaccttaccttttggttgttttttttttttttatcaagcatgaagtttatcttctgccccaggactgcagtgttttccacatgggcacagtggtttatggccacaaagcaggcaccctccagaggtttcctaagtcattcatcacgcccagtctccagtcatcaccatgcatctcatctagataccacacacactgaaaaaagaagagaacgtgcaggcaattttagaatgtaaaaacaatccatttktttcatttgttcagtaaatatttattacctacatactctgctctagaagagtcagcaaactaaagcctctaagcca

SEQ ID NO: 477755 - DNA, 440 bp, Homo sapiens
atttcttcttggggatccccatctgcccaccctcccttaggaacagttctgaattttggtctcaaatcctgcacaattcttctatatgttgacttacttcttccttataattagaagcagttcatactaacaaatagggttatttaaattttacatttccaataccacyaaattacaggaagccaaagttatacaggtagccaatgtacaatttaaagtctcaataaatgtcgaatttggcattaagctttgaattttgaaggccattatttatactgtaatattcacatttttgaatgactgatcttgagccaatggattgtaagtttcttatatggaaaaactctatcacattcatctttgttaccctcaccacctagtaaaacaagcagcacattgtaggtggatttgaaacactgatagctggatttgctgagtat

SEQ ID NO: 477756 - DNA, 626 bp, Homo sapiens
aaagtagtgattaagaattttgaagtcaaacagacctgactttgctctccctgataactgcaactttggacaagatacttamactttccaaaccggagtttcttctagaaaatggtaataactacctcatagcattattgtgagtattaaattagattatgcattgcatgaccttcagtaaagtgccagaacatagcactatcattactttaaacggttttcagaagtttttatctggcttttatggaatgtgacggatggcagaaataatacaaatttataattatattaaagcctatcaagatgctactatatttagaagctatatctgtacaaagaacaaatcaacacgaaatatgttttaagaaattacaaccttatgtattctgtttgaattgtaaacttattattcatttaaaacacttgctaaggtaattaaaagccctaagtataacaaacagtatgatctttttactgtgatcatatcaaagtttctggcttctttacaaagaaaaagaaccaatttgagacagatgttttgtgtgagtgtttattatgtttacatatatcttagttataaagcaacaaagccaggaaaccactgtgaataagcaggatggcggcgg

SEQ ID NO: 477757 - DNA, 236 bp, Homo sapiens
cctacatactctctttctgcttgggtctccctttttcagacagccttttgggcaggacctaacataactactatccttagyatctactcctcctatggaaacttacccactcttgtccagggtattttctgaatatagcttatgggctcaggaatcatcccttccttcttgcctgcagaaagaggaagctccagccatttcctgacttcagatgtcctcaggccagagtccagcac

SEQ ID NO: 477758 - DNA, 581 bp, Homo sapiens
ctgatagagggatcgcagtgcttattttatagaacacctttttttcttgctgccaattcttttgaaaaggtgctctgcatgcactgcccacacatttcagtctcagtcacatgtcaaaccacttcagcctggcttgcaatcttaccaactttctgcaagggctttctgaaaggtcagcattcaccacctaattggataagtggccttttctttggtctttagttcacataactctgtcgcttttggcactactgataggccttccattttataagtatctcttctcttgcttttcttgacaatcctccatcctgggtttttttttttttaacctcrctgactttttttcttggtctccaacatggtatcctcttttgaaatactgcttgtactaaaattctataatgagtccacttcctttattccctgctttgtctcctcaagggatcactttcacttccatgacttcaacaatcacctgtacactgatgactcacaaggtgattatcacactggcctcatcctgagcttcagacctatatttataagtccctctacctaaaagtaatacaggcagctta

SEQ ID NO: 477759 - DNA, 383 bp, Homo sapiens
ataaaaatgcaaatactccctaagagagaaacatattttaagttctctattaagcaatgtaaatgtgtggaacacatacagtgtgtrgcattgagaggtgacagtgtgctggcagcccttgctcgctctcagtgcctcctcggccttggtgcccactctggctgcacttgaggagcccttcagcctgccactgcactgtgggagcccctctctgggatggccgaggccagagccggctccctctgcttgtggggaggtgtggagggagaggcatgggcaggaacctgggccagcatgagttccgggtggatgcaggctcagcgggccccacacttggagcagccggctggcccctggctgtgaggggcttagcacgcaggcca

SEQ ID NO: 477760 - DNA, 539 bp, Homo sapiens
ttgtatatcacaagtaaacaatttcgggtccctggggtttgttattacttgsaagctcacttgtttgccttgtgaattatctatgcttcctcttcaaaatcactgaaatacatttccttatagaaacccaataatcttgagatagaatggtgtaatgtatcatccaaaacacaaaatcacttaccttggttcatactgaacctgagaaagaaaaatcagacctggtttgtaaataggaataaaatttccctacatttttaatggaagatatctgaggtgtcagagtagagaaaaaaatggcttttgcttcctagaatggcaagtcaatgtcataatagtattaccatctttgtgagttgctcctttttcatagtctcatcttcaaaaaaaaaactcaagaataaagcaaaacttttttgggtgaaaatatattaattttctagtctgcatactggctgttatctgtataattactggtttgacttaacctcggtatacaggaaattctttaaaatggtttttttgttaaattttgacag

SEQ ID NO: 477761 - DNA, 636 bp, Homo sapiens
actcattataaagcatttgatcaaaccagacatatatgaacacagagattatgagtcttccttctctcaggcttactccccagaagtaactcccacaactactatcaatagcttggtgaataccatgatgtaattttaaaatatatatattcatacacaaaatatattgaaacttattttccccaggaacccgttataaagagtaatttcttcatatccattgttcctgggaatgagaattgtttaggaaaaaatatttagaagactaatatgaggaaaggtgggagcaagagagggtgagagaatgagagaagagcaagtgacagataagaaaattgggcaaaaaaacccccaaaatgttccatagaggttataaaattattttgctacrctgtgtgtaatgttttcccctttatttccccacaatatcttgagtaaagttacctaaagctttatggaatggattttggtggaaacttacaagttttgtatcctgactcaagcttcatctgagcctgaaataggatagccatagggtgatttctcagatagtatggaataaataggtagatattgcttatctgtacatatctgtatctgtatttatacatatataatatttgcacatgcatggcc

SEQ ID NO: 477762 - DNA, 658 bp, Homo sapiens
ggggaatatagaatttctgcgtaataccttgggctaagagtcacaacaaagcatacattaatatacaatgaaaatattctaaatattcaacaagaggataatagaaaaggattctagaactttcagtaaatgaactactgtgaagttatcaattttctagatatgcttaacataggaaaatctccatgtggaataatawaactacaattctttatattctatgttgttaccaggaagtgcaggaatcctcaattcttagtcttacttggagaaagttctgccaagtgatttaaccaaaaaagagaatttattgaaggaaagtagagtgcagagagtttgcttaaagcaacagtataactctgaaaagatgagtcagagccaggtacttaaagggagtgggccagctgcagcccctgagagttccgcattgggtttttatgatgtcaaaatcttgaagttcttacttgtgtcttaaaactgtttctcgatctagtttttccactcctacattaagtctccttcctttcccccatggacttctcaatccaggcttgtgggaccctcccttaccactattagggtgcatgtgtgggtctcctgtcagatacaactagcacctgcattatcccttataactttgccttttgcctcttgttcg

SEQ ID NO: 477763 - DNA, 658 bp, Homo sapiens
ggggaatatagaatttctgcgtaataccttgggctaagagtcacaacaaagcatacattaatatacaatgaaaatattctaaatattcaacaagaggataatagaaaaggattctagaactttcagtaaatgaactactgtgaagttatcaattttctagatatgcttaacataggaaaatctccatgtggaataatataactacaattctttatattctatgttgttaccaggaagtgcaggaatcctcaattcttagtcttacttggagaaagttctgccaagtgatttaaccaaaaaagagaatttattgaaggaaagtagagtgcagagagtttgcttaaagcaacagtataactctgaaaagatgagtcagagccaggtacttaaagggagtgggccagctgcagcccctgagagttccgcattgggtttttatgatgtcaaawtcttgaagttcttacttgtgtcttaaaactgtttctcgatctagtttttccactcctacattaagtctccttcctttcccccatggacttctcaatccaggcttgtgggaccctcccttaccactattagggtgcatgtgtgggtctcctgtcagatacaactagcacctgcattatcccttataactttgccttttgcctcttgttcg

SEQ ID NO: 477764 - DNA, 658 bp, Homo sapiens
ggggaatatagaatttctgcgtaataccttgggctaagagtcacaacaaagcatacattaatatacaatgaaaatattctaaatattcaacaagaggataatagaaaaggattctagaactttcagtaaatgaactactgtgaagttatcaattttctagatatgcttaacataggaaaatctccatgtggaataatataactacaattctttatattctatgttgttaccaggaagtgcaggaatcctcaattcttagtcttacttggagaaagttctgccaagtgatttaaccaaaaaagagaatttattgaaggaaagtagagtgcagagagtttgcttaaagcaacagtataactctgaaaagatgagtcagagccaggtacttaaagggagtgggccagctgcagcccctgagagttccgcattgggtttttatgatgtcaaaatcttgaagttcttacttgtgtcttaaaactgtttctcratctagtttttccactcctacattaagtctccttcctttcccccatggacttctcaatccaggcttgtgggaccctcccttaccactattagggtgcatgtgtgggtctcctgtcagatacaactagcacctgcattatcccttataactttgccttttgcctcttgttcg

SEQ ID NO: 477765 - DNA, 639 bp, Homo sapiens
gggagtgaagaggggacacacaggaaagcagacttggaatatcattcagagttatagaagctggattacacttttgggaaaccgtatgtcctttgggagtcatgactataaaagacatcagtatccactgtaatggaacccatgctctatctttaccaaaaaaatttaataaatcaacttaaatagagtgtttctttaaatacctgtttatatgtcctacataataaaagaattgtatctttgtcagatgctttgcttaagctagtgcacgcttccttcccacttccctcagcctgatgacacaacagactatttcatcgtcaacacctttttggaaattgggcagagaggacagagaaaggggaaagagtagatttaacgtttattggttgggttcctgcctgggcctaaactggggtgggtggggaggagaaaagaataggagtgaaaacaggtcaaacaggactcattcccagcacttgccatgacctcttcactcccttgctttttcctctaatatcataaacgtattcattctttcctcagaatatcaaggagatgtaytcttccttgaaggcaatgtttttgcttccttttgttttattaaaaaagtagacaatgaattaagaaattaatcaa

SEQ ID NO: 477766 - DNA, 586 bp, Homo sapiens
tgatgaaaatcagaacccccatctcagatcccaatttacagagcatttgcactttcatgagcctatatcttgctcacaacttccctgagagagaagaaatccagggcaaatatccctgtgcctagcttcctgaagatcaacttggattttgtattagtccattcccacactgctataaaaaactacctgaaactgggtaatttataaagaaaagaggtttaattgactcacagttccgcctggctagggaggccccagaaaacttacaatcatggaggaaggcaaaggggaagcaggcacctttttcacaaggcggcaggagagacagagcaagcggggaagtgccacacttttaaaccatcaaatctcataagaacttactcactatcacgagaacagcatggggaaaatctgcccccatgatccaatcacctccctgatcaagtacctccccctgacaagtggggattacaattcgagatgagatttgggtgcggacacagcaaaaccacatcagatacccgggtcacatgtgggtcmttgggtggcagaccttttcaaaggaataattttaaggttttcaagt

SEQ ID NO: 477767 - DNA, 564 bp, Homo sapiens
gtctgtgtccaaatttcctctacttgtaaggacaccagtcatattggattagggcacagattattgacctcttttaacttaattagtttttaaaaatcctatctccaaatacagtcacattctaaggtcctgggtgataggacttcagcataagaatttgaggggtatgcacttgagcccataacacatggctcaacccaacatcaatggggtgagaaagtgcactccatccagcacggcaagggtggkacaagaagcaagaactgtgagcaaagtaactgatatggacagcagacaaagaaatagaaaaggacggttccccgacaaagaccccatcctcaaggctggagacccacggccctaaacagggacagggattcctgtttttgcacccaaaaagttgtcttttggcctgccatgccccctatcttgtacccatacaaaccccaaaccctaggctccagtagcagatgagcagatgaggagacgaggagacaagcagatgaacagcagaatgacactgcaggaaagagagaagaggaggaacatatgaacaccaagagg

SEQ ID NO: 477768 - DNA, 549 bp, Homo sapiens
tacaccctctagccactgatcaagacagaatgtattatagttgttattaaatatttttttattaataacaaagtatttgaaatgaaatatatgaaataaaatattttcatttttaccagagattttagaaaatggtttgaaatgatgagtatattgtcatattgctggtgtgtgttgggctggttgccaaatgggaatatgattttgagtaaaaggtccaggtcattcttccattttctacggttttctttataactaaaaattgctttagtgatgaatactagtgaattttacccaacaactgagtatatagcatactgtggtgtgttagtyagggtatgagttgggttgttgttgcaaaggcataacttgatggattagacaaggtataaattaatttctctctacttaattgtttgaaagcagagagttagtaagggctggtagagtgtctctacaatcacctatatgtggcttccatttctgtgtctaaagtggctgctcctggtctagctatcacttctgcatcccagtcaatgtgaaggagaa

SEQ ID NO: 477769 - DNA, 557 bp, Homo sapiens
gggccaaattatgaggtcaaagataagcagtgtttttatggttgttgaaatgcaatgccaattgctttctaaaacccagtgccacytcttccagaaatgtgacaaactttctaggatttcatcctcattagtgatggcagagccaagactagttattggttattgaccaacaattacaaattcaactcaatgggatgccattctgccttcattttttccgtttggtgctacaaataggagagcatctgtgagatatttaaaggccagaatcttgcttgctgccgtatttccagcttctcatgcacagcaaaggctcaacaaatatagttgaatgaataaaatgccttctgaattctataacttttttttttctgacataacattcattaacctcatgagaaactggctttgaagggaggatgctgtcattctgtaagatcagcttctggccaacatctcatgacctatcctaggctgtgaagattttttaagcactcagctctattgtgggtcctgggtccagtgttccaagtgatatagttctactgttggaccct

SEQ ID NO: 477770 - DNA, 543 bp, Homo sapiens
tggcttccacaaggtgctttttttcaaaatggatttctacttcctgttaaggagtcagtccaaaggcagaatgtgataaaaatgctccactcccccttgagtactggctggacttagtgtcttgctttgaaagaatagagggaaaaatcataagtttgcacaggaggaaagtggtagaaactgccttaaccaagtgatggggggaacatcttcagtgatgctgtgtggatctctatcatgtacctcctgaggcaatgggaggagagggcacacacctctgtgatattcttcccccaaaccccagtctaaycacaaggaaacctaaagtgagggccattctataaaacacctgaccagtactcaaaagtaacaagatcatggaaagccaggaaactcagataacttatgcaagaggagacaaaggagacaactcagtgcagtcaattatcctggattggatcttggaacagaaaaaggacattaggctgggtgcggtgactcatgcttgtaatcccagcattttgggaggccaaggaaggtgac

SEQ ID NO: 477771 - DNA, 543 bp, Homo sapiens
tggcttccacaaggtgctttttttcaaaatggatttctacttcctgttaaggagtcagtccaaaggcagaatgtgataaaaatgctccactcccccttgagtactggctggacttagtgtcttgctttgaaagaatagagggaaaaatcataagtttgcacaggaggaaagtggtagaaactgccttaaccaagtgatggggggaacatcttcagtgatgctgtgtggatctctatcatgtacctcctgaggcaatgggaggagagggcacacacctctgtgatattcttcccccaaaccccagtctaatcacaaggaaacctaaagtgagggccattctataaaacacctgaccagtactcaaaagtaacaagatcatggaaagccaggaaactcagataacttatgcaagaggagacaaaggagacaactcagtgcagtcarttatcctggattggatcttggaacagaaaaaggacattaggctgggtgcggtgactcatgcttgtaatcccagcattttgggaggccaaggaaggtgac

SEQ ID NO: 477772 - DNA, 660 bp, Homo sapiens
gttcttggtacctcctgtaagtgggatcttaatacttgtccttttcagtttttgattttaagttctttggtgtgttggttctgacttttaagtttccgttctaaacttcgtggttgtaaaggagtcttcgagtatttccaactgtgactgttgataattttttcctcattgttactcttgtctctctcacaggatccttttgcagggtaaaaragtagccagcagcaagcaaaagcaaagaaggggacttgctgtctctgaatgggagggcaagggaccctccctctgctttccggatccctgagaggacccacggggtgactgtgctcacctagacactgtagaatgaaccaggccctttttggttttccagtaaccaccacagtctaagtaaatcccttcctgccagaagaaaatatgagttaaattgaatgatgagtttagatactgcttagtgttcttaatttttttttaaattgtggttttctatcatttcatgtacactctcagaggccgctctatgacggaagtgtcttaaatattaaaagcaaataaataaatagaggattatcttttgagcacctggcagttttgtttagatttaaggaatctaagtagttaaaatttctagttttcctagatcctgtaaatgcaaatgtc

SEQ ID NO: 477773 - DNA, 660 bp, Homo sapiens
gttcttggtacctcctgtaagtgggatcttaatacttgtccttttcagtttttgattttaagttctttggtgtgttggttctgacttttaagtttccgttctaaacttcgtggttgtaaaggagtcttcgagtatttccaactgtgactgttgataattttttcctcattgttactcttgtctctctcacaggatccttttgcagggtaaaagagtagccagcagcaagcaaaagcaaagaaggggacttgctgtctctgaatgggagggcaagggaccctccctctgctttccggatccctgagaggacccacggggtgactgtrctcacctagacactgtagaatgaaccaggccctttttggttttccagtaaccaccacagtctaagtaaatcccttcctgccagaagaaaatatgagttaaattgaatgatgagtttagatactgcttagtgttcttaatttttttttaaattgtggttttctatcatttcatgtacactctcagaggccgctctatgacggaagtgtcttaaatattaaaagcaaataaataaatagaggattatcttttgagcacctggcagttttgtttagatttaaggaatctaagtagttaaaatttctagttttcctagatcctgtaaatgcaaatgtc

SEQ ID NO: 477774 - DNA, 660 bp, Homo sapiens
gttcttggtacctcctgtaagtgggatcttaatacttgtccttttcagtttttgattttaagttctttggtgtgttggttctgacttttaagtttccgttctaaacttcgtggttgtaaaggagtcttcgagtatttccaactgtgactgttgataattttttcctcattgttactcttgtctctctcacaggatccttttgcagggtaaaagagtagccagcagcaagcaaaagcaaagaaggggacttgctgtctctgaatgggagggcaagggaccctccctctgctttccggatccctgagaggacccacggggtgactgtgctcacctagacactgtagaatgaaccaggccctttttggttttccagtaaccaccacagtctaagtaaatcccttcctgccagaagaaaatatgagttaaattgaatgatgagtttagatactgcttagtgttcttaatttttttttaaattgtggttttctatcatttcatgtacactctcagaggccgctctatgrcggaagtgtcttaaatattaaaagcaaataaataaatagaggattatcttttgagcacctggcagttttgtttagatttaaggaatctaagtagttaaaatttctagttttcctagatcctgtaaatgcaaatgtc

SEQ ID NO: 477775 - DNA, 565 bp, Homo sapiens
tttttgtgcccacaacaaaatcacactttccttcctccacatctttgcctattaaattgtgagttccttgaatagttctttcaaaaatattttctcaggacttaacaaagtgcttagaatgtaattgattctaagctattgatagatattggaataaaaatcaatgcataaacaaaggaggtcatcctcctagatagacatatgttttctattcttttccacatgtttaagtcctgttcatcctaaaatatcaagttcaaatatcattgcttgtkgaagtgttctctagttgtccccaaattaagcaactttcctaccttgagtgccaatataaagcattgcttatactaattacatagcccttgatatttacaaccataatgctttggcgtctttccatgatcttatatataatttctccaactagttcttaaggtatttgagggcagtactgtaccttattattattttgcttcttatcttcctccttcttctcatttttaaattctccttaagacctatacagtgtgtgttaggtacacactgtgtattcataatctatttg

SEQ ID NO: 477776 - DNA, 465 bp, Homo sapiens
aaagatcacttctgcctataactatcctggacggtttttacaaaatctttaaaaaaattcctggcacaatttttttgttattacagtctgctttcttctatagatggcaggaaaaaaatttattttgtttttgaaagtcccagtttgtgagtctctggctaagagaggttagctgtaccaaacattacactggcagttacatatcttacagacagttctgtgcctgggctgcacagagacacctttctctaagaagcttatgagagatacatgtacaggagtttttattgaagccttatccaaggctcctggagagaaggtgggwagggtagcagaaggaatcatcttctagttattaggggttaacatgggaagagtgactgctggagacaaatctaatggtttgaacccagttgtggccaccagcctgctggggcacttggtgctgtgctgtgtctgcgggca

SEQ ID NO: 477777 - DNA, 465 bp, Homo sapiens
aaagatcacttctgcctataactatcctggacggtttttacaaaatctttaaaaaaattcctggcacaatttttttgttattacagtctgctttcttctatagatggcaggaaaaaaatttattttgtttttgaaagtcccagtttgtgagtctctggctaagagaggttagctgtaccaaacattacactggcagttacatatcttacagacagttctgtgcctgggctgcacagagacacctttctctaagaagcttatgagagatacatgtacaggagtttttattgaagccttatccaaggctcctggagagaaggtgggaagggtagcagaaggaatcatcttctagttattaggggttaacatgggaagagtgactgstggagacaaatctaatggtttgaacccagttgtggccaccagcctgctggggcacttggtgctgtgctgtgtctgcgggca

SEQ ID NO: 477778 - DNA, 602 bp, Homo sapiens
ctggttgagtatcagcaaattcctcttttrtggttaaatcaagggccattttgccaaatgccagtgaccaaaatgccagaaactagaagctactgagacttctctggagcttcagtagtgtctgccttgtaacttggaccatttcttctagagagggagaggacctgggaggtggtgtggggacaagggagggagaggaccttgagggacaaggtcagggcagaggagggagaggacctttagtagaagtgcaaaaataagagtcgctttcaatgtatcttcgctgcaggtgctcaaaaaaggcagaaggagcttgtcctcaacaactttagaagtcatacaaagtgttttgctctcagggagtcacaatatttattaatatacacatgctctgagcattcctgcaacaaagaaatctgacttgggtcagcccagcgtgttacaagctggccaacaccattttgcagtttacaccatagagtacactgaggaatgccctcctggaaaacaaaacttgctgtggggcctctgtctggggaggagggggtccatgatgcagaacctctccaggcagtttcaggagtccgtttgtgaggggccac

SEQ ID NO: 477779 - DNA, 602 bp, Homo sapiens
ctggttgagtatcagcaaattcctcttttatggttaaatcaagggccattttgccaaatgccagtgaccaaaatgccagaaactagaagctactgagacttctctggagcttcagtagtgtctgccttgtaacttggaccatttcttctagagagggagaggacctgggaggtggtgtggggacaagggagggagaggaccttgagggacaaggtcagggcagaggagggagaggacctttagtagaagtgcaaaaataagagtcgctttcaatgtatcttcgctgcaggtgctcaaaaaaggcagaaggagcttgtcctcaacaactttagaagtcatacaaagtgttttgctctcagggagtcacaatatttattaatatacacatgctctgagcattcctgcaacaaagaaatctgacttgggtcagcccagygtgttacaagctggccaacaccattttgcagtttacaccatagagtacactgaggaatgccctcctggaaaacaaaacttgctgtggggcctctgtctggggaggagggggtccatgatgcagaacctctccaggcagtttcaggagtccgtttgtgaggggccac

SEQ ID NO: 477780 - DNA, 688 bp, Homo sapiens
aagaggggaagccatagatggtagcagactgcgtggagcagttccctccccctgcccacgtatccccaagtctccattcccattgccaccaacttgcactggtctgagaaataacatttgattgtattaggccactgyacctgggaggttgtatattgtagcatttagcatgcatggactacatggggtgataagaccaagttgggaatgaggtaggggaattaaggactaggagactgccatggacttgctcagcatccaccacccctgtagggaaggaccagggagctcaacagatctgcctggaatctccttgaaagagaagcaaaatttaatgagtagggagagagagacttcttaatgtttgtttttggttttctaaaccagatgagccttaaaatgatatatatcctggttggaaggaaatatccctttaggaatatctaaattcttttgtatatctaatatgctaagaatatccaaattccttttccctggttaactgggtgccttttgacttgatctcctcccacagggaggatccctgggtcccactgctcctgaccagtccatcacccacagaaacaaatgaagtggaattctcactaaccaatcaggctcatgcaggcttccacccttggccagcagctccccaggctcctcccctgagagagatctgcatgccacc

SEQ ID NO: 477781 - DNA, 548 bp, Homo sapiens
tcatagctgtatttgcagaaaggataccaagaaaatgactgaggtggttgcatttcattaatgccccaactcctaatgggaagcacttgagtcaacagcactggagaacacgcaaattccctttcaattccacatcttgtgcatgctcacctgccagcctcatctccatgacaaccaaagagccttcttcaraaatcagctcaaatggcactacctatgagaccctggcttcagcaagccacagggccatgacatgccccctgccctgtgccccctgccctatgctcccatatatctgacctgctgctgatgttctgtaatttttctacgtgctgggctttctccccatagaccctgaagccttgatgtgtttcttccttgttagacacctcctgcagtctcccacgcatttagaaataggttctcaacaggtgtttgttgatgcagggaaggaagaaaggaaagaaggagggaaagaaggaagcagggagagagggaaagtggagaggagggaagggattccatgggtgtgaaggcagttaaagcag

SEQ ID NO: 477782 - DNA, 543 bp, Homo sapiens
catagctgtatttgcagaaaggataccaagaaaatgactgaggtggttgcatttcattaatgccccaactcctaatgggaagcacttgagtcaacagcactggagaacacgcaaattccctttcaattccacatcttgtgcatgctcacctgccagcctcatctccatgacaaccaaagagccttcttcagaaatcagctcaaatggcactacctatgagaccctggcttcagcaagccacagggccatgacatgccccctgccctgtgccccctgccctatgctcccatatatctgacctgctgctgatgttctgtaatttttctacgtgctgggctttctccccatagaccctgaagccttgatgtgtttctyccttgttagacacctcctgcagtctcccacgcatttagaaataggttctcaacaggtgtttgttgatgcagggaaggaagaaaggaaagaaggagggaaagaaggaagcagggagagagggaaagtggagaggagggaagggattccatgggtgtgaaggcagttaaa

SEQ ID NO: 477783 - DNA, 621 bp, Homo sapiens
ctgctattatcatcatctttttgtttgtactatactgtgaccttgggaatgaacccaagcttgttggaatcatgtgtaaattataaaacttcaaagattaagggcacaaagacattctaaataatgaagaatgagttttaatccacacattttatcagcttagagaccgtctttatttcttttccttttttggctgttttttaggcaagtgaatttgctaaatagctatgtttcttactggaaaaccagtaatctctaagatgccgctgggtattttcattgtaaaagtgaacgtaagtggttcaacttcagtagggaataaaaatatggtttttctttgaaacatacttacttttgaggtgacaatgccatattttaaaaacttaaaccttttgccttctggatcgaaatagaagttatttcatgtgarttaatactgtttacatttatgatgtttttaaagatacttaagagcaagtcattcagacaaactgcaagaaagaaatatttttacaaagccatgtcaaacatacagaaataccagtttttttaaaaacctggtgtagattaaaataggatatgagtctgaatgatcattttaagtatatactgagggaatag

SEQ ID NO: 477784 - DNA, 560 bp, Homo sapiens
aatctcataattttttaggtaaggaaactagtatttaggggagtctgaaacttgctgaatatcacaggttaacacacagaacacctggttgccagccagttctgtttgaggatgtaataaattgtttgtttatagtggtaaaatgtgtcaaatgacaaaaaaagcaattcattttacatattcacattttaaaccactgtataccatacttaattctttgaaattctgtttcagaaaatttaggtaaataaaaattttatgaatagaatctttttcctatgaacatattattttcaaagaataattytgtctgctgtctgataaggtatttcggccacatcccctatttctgaatgtcctttaacagaagatttttcatttgttgcctggtttttgtttctgttttgctatttaatatcttgaagttttatatgttcaaatgttcagttgcctggaagttgtctaaacaaataattatatgtaaacctttctcagaatttttagaaaatattgaacttgtataataaaactctactcttagtggttctgataaaccaaaa

SEQ ID NO: 477785 - DNA, 624 bp, Homo sapiens
aaattgcagcttttaaataccaagccataatgatgcaatctgaagaggtttaaaactcagttctccaaaatccaagattcgtttcctaagctctattatacgttaaagattctatggtaaaataaacctgtttccccaaacataaacttgaaagacatttgaagatataagaattcctctcctcccaatttggagcagttttattgaaatgtacatatcctaccaaatagaattgaggttttctttttccagttataaaaaatggagaaaataatttttcaaatatttaggaacaccatttacagttcagtccagctatggtttctgaaatacatagtagtascatctgatatggtagccataagccacatgtggctatttacatttgagtaattaaaactaaataatatttacaagttggttccttagtaacaccagccatattacaagtgctcagtaaccacatttggttataggctactgtcttagtctattttgtgttgctctaaaggaatacttaaagctgtgtagtttataaagaaaagaggtttattaagctaacagttctgcaggctgtacaagaggcatggtgctgtcatcagctcagcttctggtgagggctgc

SEQ ID NO: 477786 - DNA, 549 bp, Homo sapiens
ttgctaagcttattatacagacaactaaaatatcaggaagagggcaaaaatacttattaattaattatctggaaagaaataagaaaaatgagctcaggatcacatagctcctaattccaaagactgtattaaccaccttagcagcaattatcaaaatatttaaaaactagtatagcaaagcactgattaatcagatagtcacagagtctggcgaggcctcctaatacaccatgtattaaccattagtttgcaggattttgaggaagtctggggtagttcaaggagccagtctagcggaaggagccagggtggtcaaggggtaggtggggcattgggaggcccagattgctatttttgtatgttaaccctacactatactggatggtttttatctcaaagtctctcatttatgctcagaaatctatacagcctgtgtatttttaatctatatttgagtaatcaaaattctccatgrtttttctccctgtagacaaaggagctcacctgacagctacaaattactgactttcagctccaatcagttttcat

SEQ ID NO: 477787 - DNA, 579 bp, Homo sapiens
cctatcaccatctgctatatttctatttacttatcttgtcctccacctgccagaatttaactgtttattcattcaatattctatctttagtgcctagaaatgagcccatccctgtgtagattagtatatatttgttgagtgagtgaatatttataaactgaaaaaaaagccagtgaaaagagatggatttatagcaaagaagaaagtgaatgattacagatggaacaagaaaattgaggtggaaggagagaatgggatacagagcaccagaaaatgagtcagacttgatgcttctccctttgtaactggaatatacagaagtaggtaaatgtatggggagtggggcaaatagctgagagaatttgtgttggaccactcctattttcttgctgacgtcgtgctatttgctgagatttgggcagggtatgtgactggtaacgatcaggggttaaaagggacaatacccaaargaccaagatcatctttggttttcccaagtctacttaaattctgctcaatgagagctaagcaaaagtttaaggaatttggttcctaggtactatctatggagcattaaaa

SEQ ID NO: 477788 - DNA, 238 bp, Homo sapiens
gttcttttactctgtgaccagaactcatggaaataaaaccactcagattctttcaataagcttgctttggtctcaagaacttgaagtatttttaatagtgtgaagtgagataaatctattttagagataacactctaatttctayatcaaaatccaaacatattgcatttacacgcagtcagtcctattgacaacatgatgcaaattgcttttctagggacaaacggccatccacaaa

SEQ ID NO: 477789 - DNA, 238 bp, Homo sapiens
gttcttttactctgtgaccagaactcatggaaataaaaccactcagattctttcaataagcttgctttggtctcaagaacttgaagtatttttaatagtgtgaagtgagataaatctattttagagataacactctaatttctacatcaaaatccaaacayattgcatttacacgcagtcagtcctattgacaacatgatgcaaattgcttttctagggacaaacggccatccacaaa

SEQ ID NO: 477790 - DNA, 238 bp, Homo sapiens
gttcttttactctgtgaccagaactcatggaaataaaaccactcagattctttcaataagcttgctttggtctcaagaacttgaagtatttttaatagtgtgaagtgagataaatctattttagagataacactctaatttctacatcaaaatccaaacatattgcatttacacgcagtcagtcctrttgacaacatgatgcaaattgcttttctagggacaaacggccatccacaaa

SEQ ID NO: 477791 - DNA, 580 bp, Homo sapiens
taaggactctcagcccttcactctagaattgattcaccttgtagtgttgccagattctaaactggatttccatagtttcaagtagaaaatggaagaacaatgctattctattaggttatagtaaatcaattccaaataatttgcgaaagactagaagtcactttaaatagttgaaacctcataatgctcatattcatcaagcgctatttgccatagccaacatatggaaataacctaagtgtcaatagatgaatatataaagaaaaggtggtgtgtgtatattatacatacatacatatatttcattgcctmtatatacacaatggaatgttattcagtcataaaaatgaaggaaattctgccgtttgcaacaatatggatgaatctggaggacattacgctaagtgaaacaaaccaaacacaaaaagacaaatactatatgatctcactcatatgtagaatctaaaaaaggtgaacacatagaatcagagagtggaacagtggttgcaaggagccggagggtgttgaaagtaggaagatgcttgtcataaaatgaacgagttctggggattgaatgtat

SEQ ID NO: 477792 - DNA, 576 bp, Homo sapiens
tcctatcttctgaatttgccccattgcatctggatgtcatttaccttatttctttatctcctgtatttcacataacctggaagttagatttaaagggctgataagattccagttaaatatgtttggcaagaatactttatagatattgctatgtattttatattgcatcaggggcacgtaaagtctggtggcctcattctcagtatgctgaaattgagcacttggctaagaagctgacaacctaatcattcctttgtgaagatttttgttttgcttttcccttgaacaagtaatctgtgggtggatatcaagtaaaatcattattctttttggtcctcgaagtatatctatcttacctttggccagtgggaactcttttaagttggttcctgtgtccttttgttacaatcctttagcatttgaaagtttccttgtattttgacacaagatggttcaggctcatttttataaatttcttatcccggacctggaatcagccatttttcaaggagccctaatacctgccagtggacartggtgtttacagaccatgatctggatgctaggacttctcag

SEQ ID NO: 477793 - DNA, 541 bp, Homo sapiens
gcatattatgttcctatgctttgagaattttccaaatttttctcttgatggatggcagttattttccacgactcctattaccttccagtggtgtttttccaaaggagatatatttaaatacatcttggacaagaacaaagtattttaattaactgtgaaacaatataaaaataaattttgctctttatttcgacattatagccttcagtgtcagaagcactattatttcgttcctgcacacctgtattagtttgtgcttggggaaaagatgtagccagctacatacatctagctctaagtcactgcagtttacacaaggatagaagactattgctttaatggggaagaagggaaacaaaagaataatgtattattaaatgtttcaaaagtaagaataaacggaaaagactaacaggtttagaaacttmacttctggatgtgacaagaattccaaaacagtcaactccagctaccccacctttgaaataggaacctaatcaagagtgtaagacactgtcactcattttcatgttaattttta

SEQ ID NO: 477794 - DNA, 635 bp, Homo sapiens
attaaagaaaatatgccttgcagctatgatcataaatctctctctctgcttatacttgagctagctyaggttaaaacacaatgtaaaatataggaatggcaaagtttatgcaccttttgatttttataccagatttgggttcaaatcttggcttctgtaaaggttatttcagcttagacaatttaccctgtccacacctctgataatacacaagtgctgggttcttgtgctttttgtgtgtaaggttcttgctgatagaaaaagttttggccaggcacattggcccatgtctgtaatcccagcacttggggaggccaaggagtagagaccagcctgggcaacacagtaataactgttctctacaaaacataaaaaaatattaaccgggtgtggtggcacacacctatagtcccatctcctcggtaggctgaggtgagaagatcgcttgagtctgagaggtcaaggctgcagtgagccatgatcacgccactacaccccagcctgggtgacagagtgagactttgtctcaaaaataaataaatgaataaataaaataaaataaaattgtgtaggaaccctgcatctgtatctcctaaaaatacatcacacagtgggatcttttgtgtaaaaggagg

SEQ ID NO: 477795 - DNA, 478 bp, Homo sapiens
tgcatcaactgggctggtcaagtctcagacagaacagcatctcatacaatggctactctcatggcactggtggtcggggtcagaaggaccgtggcaaggcatcatcagggtccatctatcgaatactgcagtggtctccaggcagaacaagatggatgggttgtaaatgggctagaaagattggatctataatagcacgaagaggattttcatgaattgaggttacaaaaagaatagagaatgtgctgtttgcaragaatgggaactgaaaagaggaatgtaggccagaggaaaaaagaaaaatccgtgttggcatagagccattcactattaaatgcaaccttcattccccaagttcaattttattttaccattcagtatattaaaacatgatgcttattttaccaggtttataactgctattctggaatttagtgatccttgtgccataataccataacctattatttggctgagc

SEQ ID NO: 477796 - DNA, 663 bp, Homo sapiens
tagtgacatccaggatggataattttcatctttgttttgatgcagatctgaagcagagccttgaataattcaggtaaccagccagcactagagctagaatgcaaatctcctacgcactgactatgtgaggacgtttataggaagcytatcagaggtcaggcactgctaaactttacatgcattgcctcattcaatcatgacaacagccctgtgagaaacctgccttttctcttttatacacgaggaaccctgagtacagagaatttaaggccataagtttgccccattctctccctcctcagtaaacataatgccttttacatccatccaaatgtcaatgaataagatgtgctatgtgtgcctgaacacttggaagataaagtattttggagtcagttggaacttgtttaaaccctgactctaacacttcctagctgtgtgatcctgagaaatctcaatttctttatttataaaatgggggcatctaaagactcaggacctctgcaccggacaatacaaagcaatagaatacaacgtaaatggtgtcatctagaattgcgttgattgaatgttcctgccaagacttcagcaattccaaactgtgaatagattccatttgcctttacccctccagagacagtatggtaggtatcctgaaaagaa

SEQ ID NO: 477797 - DNA, 630 bp, Homo sapiens
aacccctgccagccccatgaggctggggtgagcctgtgcgtggcctaagcagaccctcggcctccagctcccctgctctccccagagctggagcctagtccccgcctgtgtgtctgaggtcggtgctgcctggcatggtggggctgccccagggtgagggcaggggctgagctgggaccttggcttgtagctgccatcgacgaggatgtgctgcgctaccagtttgtgaagaagaagggctacgtgcggctgcacaccaacaagggcgacctcaacctggagctgcactgcgacctggtgggtgtggaggccagccactccccatgccccaaggtcatctctgggtcatctgacagccatgtcttaaatatagggctgccactggtatgtgcttgttgtaggaaattcagcctgtcactaggcgggacccgcagcagtgccctgtgtycttcctagggggccgcgttggcagcatggcctgcgcacaggtgccagtgtctcagagaaggggccaagccgcacctgctgctctgcccacacttctcccatgcgctgtactctgggccgtgcggctgcacgggtcctgttgcttaatgttgtgggtccatccgtgcccagtgtggctgggca

SEQ ID NO: 477798 - DNA, 591 bp, Homo sapiens
agtgaagatttacaggtgcttgagcctgacctggatggattctaagtcttcagataccagcctggagtatgaggctgtggggacctgcctattactgagttttactgaggtggggcttgtgttggggtaagaggaaaatctgsttctcatttcattctcctttcccatgcaataggtatctgagccatactgcctgggatgagtgaaagaataatgtgggtaatgagaaactgtttttattcccttcaatcagtcttttcttatttatttgttacacccagatgctgtaatctttcacttggttttcttagctcttgtgaaggtattattttgtgttgatagttgttcaaattgatatttttgtaaagtgctgagcactagactatcctattctaccaccttgctgacatcattacttatcttggtgtcacacagctctatcagacatctgaggtcctgttagaggcaggtttctcattcaggtgaaggtatctgaaaaacccttatgcagactgttgcgtgccactattttccctcttcagatgggttaaggatgccctactttcaagtcatcctggagtagcatctgcc

SEQ ID NO: 477799 - DNA, 591 bp, Homo sapiens
agtgaagatttacaggtgcttgagcctgacctggatggattctaagtcttcagataccagcctggagtatgaggctgtggggacctgcctattactgagttttactgaggtggggcttgtgttggggtaagaggaaaatctgcttctcatttcattctcctttcccatgcaataggtatctgagccatactgcctgggatgagtgaaagaataatgtgggtaatgagaaactgtttttattcccttcaatcagtcttttcttatttatttgttacacccagatgctgtaatctttcacttggttttcttagctcttgtgaaggtattattttgtgttgatagtkgttcaaattgatatttttgtaaagtgctgagcactagactatcctattctaccaccttgctgacatcattacttatcttggtgtcacacagctctatcagacatctgaggtcctgttagaggcaggtttctcattcaggtgaaggtatctgaaaaacccttatgcagactgttgcgtgccactattttccctcttcagatgggttaaggatgccctactttcaagtcatcctggagtagcatctgcc

SEQ ID NO: 477800 - DNA, 655 bp, Homo sapiens
tgctcaagcagtacgatgtgaagtatgaagatgattcagagaaccaattccaaacctccagaggagatcagaacctgccatttgagtgccttggtacccaagctaatctaccacatttggctccaggcttcaaatacaaacagctccccagggcgctctgctcatcactcctccagggcacccttggatggaacttcagaccttttctgaaaartatgcctggcagcttcttccatgatgaccttcccagtccagaacctgcgggatcccctgcttggaagagacccacttccactccccatttcccaggcatgccagggaccagagggggctctaccatataagctgatgaatctcctagttctgctcccttgcttaataaacaaacatttcttccttgtttctccatgtccactgcagcctccgggagcccagggccttcagaaacttccatccagcaagcagggagagtctgggagcccaggaggctgcctccaggaccaccacatcatctggggcaaatcaacccaattcctctctgcttcagtttccacgtctgtaaaatatagacaacaatctccctcctgcctgatgcccaagggatgttttggaaagcaaaatgaaggcactttgggtagaaaatatttaaatgtaa

SEQ ID NO: 477801 - DNA, 601 bp, Homo sapiens
gaaagaagtcattaggtagctgtgtgtatgtatattgtgtctgtcctcagttgcagaggtctttgcgggcaggagtcttgcctcattcctgtctgcagtcccacagggactggaacataataagtatcaaaatcaatattttgaaagaataagtgaatgaacaaatgaaagaagttcctagagtccacgtatgggctgtgtccaaacgactagccccttgaaaaaagtccgagacagagcaaatgtggagaaaagcaacagggaggccactcctttggccttctggttattctgcctgactccaggctctctcctcctggtcttttctgcccaccactttccaggactcatatgtytgcaacactgcttgatcctgaatctccctgcctgagcactttctatggctccctgttgctctcagcatcaaaatcctctcacgtcttttaagcctttgcattctcccccaacaagcctctccttgctgttcaccggccactcattccagccagctactcccactggccaccatcactcctgctcctccctccttgtttcctgaccaaacccaaacagtctccagggatcaagatccatctaacag

SEQ ID NO: 477802 - DNA, 605 bp, Homo sapiens
aataaataaataaataaataaataaataaataaacaaacaaacaaataaaagaaaatagggccattgcagatgtaatgggttaagatgaggtcatactggagtaggatagactcttactccaacacaactggtgtccttataagaaaagaagagacacacagaaaacggcattggatgagaaaggcagagattggggagatgcaatctctgcctccctggggattggggtgatgtctacaagccaagaaacacagaggattgccagcaaaccccagaagctggggaagaggcaaagaaggatcctcccctactggtttcagagggagcaccttgattccagacttctggcctccagcactgcaagagaataaatgtctgttgctttcagccacctagtttgtggaactttgctatagcggccctgggaaacttgtatagaacctgacgacagtgtttaggtgcaggctaaacctgagtatggggtacagtgacatgcactgtgaaggtgggaggggcrtgcagtccccctgagattgtcacccacttcgcagcagttttccgcactaagcaggaggacccgagcctgcaacgggccctgagaagc

SEQ ID NO: 477803 - DNA, 599 bp, Homo sapiens
cccacctctgagcaggtgcaaatccacccactgcatcctcccatccacctttctcccctctgacttctgctctcctcctaaatggtctcttttccccctgcctcctcctcctycgtttcccttctccagagaggcagaggttaggtgtgcttgaccatgattcaccaagtgcagacatcaaaacagcaaagggatgtggacaccatctccagcctctcgtttcatggactggctaaggttcagggatgctgaaggatttctcccatgtgcccaaggtagttcacagaagagcctgctccagagcgtgtgttttcccagcctttcccacaacctggcccccggtggaggaagcggttcccctccaccgacccctgcctcccacatcagaggtactgcacccaatgagtgcggccaaccaagaccaccaggggatgaaatgagtcacatcgactgtctctaggatggaaacttggtagggattctgtttcctgtgagcaggaagaacgcgagatgagacacaggaggaccgatcctgctgctctcaggcctctcatatgacttcacagaggacaactttggcccctccccgcccagctctg

SEQ ID NO: 477804 - DNA, 599 bp, Homo sapiens
cccacctctgagcaggtgcaaatccacccactgcatcctcccatccacctttctcccctctgacttctgctctcctcctaaatggtctcttttccccctgcctcctcctcctccgtttcccttctccagagaggcagaggttaggtgtgcttgaccakgattcaccaagtgcagacatcaaaacagcaaagggatgtggacaccatctccagcctctcgtttcatggactggctaaggttcagggatgctgaaggatttctcccatgtgcccaaggtagttcacagaagagcctgctccagagcgtgtgttttcccagcctttcccacaacctggcccccggtggaggaagcggttcccctccaccgacccctgcctcccacatcagaggtactgcacccaatgagtgcggccaaccaagaccaccaggggatgaaatgagtcacatcgactgtctctaggatggaaacttggtagggattctgtttcctgtgagcaggaagaacgcgagatgagacacaggaggaccgatcctgctgctctcaggcctctcatatgacttcacagaggacaactttggcccctccccgcccagctctg

SEQ ID NO: 477805 - DNA, 622 bp, Homo sapiens
tcccaacaaagcaagcctttgagttccctgatggagcatgggacctttgagcctttggtcttcctggcctaagatgtggtctttatccctgaagttctaagaactgtgggcttgcctgttgccaaattaccctctaggaccatggatcctccaagcccactacagaatccagctgaagctttcaattatgtcagcctgtggaagtatctaaggtgagtgattgatgggctgctgtcagggaaagcagaatggatcaagctcaaagatctgagaggcagctgtagcacactttcctgaaatgcaaaccccacccccacgccaccagcctccagatttcagcagcattactacccatcaagggctgcttaatttgccttcaacgtccgaaggctgtcagcagggagggcactgccaattagtccatcagtgagtgagatcagatgtaaggttgtaattgccctgggacctatatgaaagtatcaacactctgtaggagggtgagagacccaagagtttggagcaaagagagattctgactctamgagaaatggcagtcacaagctgagaagagtaaatacataattattttagctcttggatgtcctagtattaaggaaactga

SEQ ID NO: 477806 - DNA, 480 bp, Homo sapiens
ctctgccatcttcagtgtgtgarttctaaggcttccctgggaatgggcatttcaaccagccagagggaaaaaggacatagagaagacagggagaggttttgacaggccaggtgtggagggggcatttatcatttctgttcatgttctatgattagatctcagacccatggcctgatctaacatcagaggagggaaattattctagttgtatgccctggaagaagaggacatgagttttgatggacaggcagcagtctccaccaaattttattaccttgagtcagactccaaatttcagtgtcataaacaattattgagcacctactgtgtgccaggcaccatacaaggcactagagacccaatgatgaataaagcacagtccctgcccttgagaggttcatatgcaggagaggtcctcactgtgggcagtgactgaaacctacatcacaggatttgggaatgagaaaatatagccaaccc

SEQ ID NO: 477807 - DNA, 605 bp, Homo sapiens
cctgcttctggtggatcttcttattgttaacaatctgcttattaaatttgtgctgctctttcagcttttgcatggctctcgattgctatttctttacgttaattttggaactgctttttcactctgtcttatgctgtttgtgatgtaacagagtatttgattgtttgcatgcttatctgactcaggatttcctggctgcccttatcttatctcctcatcttctgcctttgacccagactaacaaaataaagaagttcagaattggaaaggatcttaaatgttgaatctaactctaatcaacgtgacagaaacatacggtattaagaaagtttttatgctgacttyagcggtagctgaggctaccgctctcccttttaggtgaagggattgaaacctaagagaaatagtaaatgagtagtagggcttcaactggtacttaggcatcacattctctggctacatcattttgcaactaagtgtctgtaatggttatcattattcaatacaattgcttttgagtaaaaacaaaaaaaaattaaccctcaaatgaaatgtaaattggcagaaaataaacacaaaaaagagagtggctgggaatgtagggt

SEQ ID NO: 477808 - DNA, 381 bp, Homo sapiens
ctgccagccttagctgtgagtagaaaaaaacaacttactgatttctgggaagccataattgatagctatttcttcatcttaagtattggctcaagcagggactgttgtgagactttattctaagttactgcattacacactacagttacctcgggagcgcttaacagagataatagctaaagccgtctttcagaaactgggccaccatgaaatttacaatagatggagcagggtgtgccctggggaaaactaacagcaagatgaaaagtggggtaaaaataaacaaaaatttgttaacatcaaacttagttttccaagataatgattatattsacctccagctttttttttttccttcaaaggttattacttaacagaggc

SEQ ID NO: 477809 - DNA, 529 bp, Homo sapiens
tctttttttgtgtgtgtgcctatgctgaattcattgttaggttgttccacccactgccsatgttccatcttgtcccaggaatgctcaggatggcaggataggcagggaacagccattcatacagtctttgatgtggataagatgcccagagctgtgctttttggcatttctgtttctcttctccaaaacaaaatacaaaagagtaatttaggaagtggtgatctcccatctctagtgacttcttacctagtaacttctggaagcaaatttcaggcagtcaatattttaagacaatttgaaacctggacccatgctagatttacattcctcactggatcttcatgataccttcacttctccatacaaatcattcttcctacctaatatttctataaaaagaagctgctctccaaaagggaagttaaagaaccacttgcttttgtggctacagaaggaggtgagggtcaaaaccacagcatctacctccacagctcccacagagtatgtgctcacagcggagaactgagtc

SEQ ID NO: 477810 - DNA, 678 bp, Homo sapiens
atactattacatggtgcaggttgccagttattctgattagaaatactaaacagaaaaaagaaaacacttggcttggatccttataaaggtatgtaaggagggtgttgccagcacagcccatcccaatgtctggtggaatttcctgtctgggagaggtccgtgggttctcacccaaacaccacagaccacagtagtgtttcccgggctaatgttcctgtcttttcacagtactctgctgattcagtctttagataactggtcttccttcctcttcataggatctatacccctgaagtgtggatcctaaactgaggggcttctcgaaagtctttggattctgtagaagagaccctggcacttactgtgcgctcaaagatcactctccatgtccacaatatgttaggaagatctttacccttcagaaagggaaaaatattccctctgatgccccctgttgtgggttgaactgtgtcccacccaatttcatrtgttcaaattctaaccccagtatctcagaatatgactatatttgaagatagggcctttaaaaagacaaaggcaatgaaattaaaatgaggtaattgggatgaaccttaattcaatatgaccagcattcttataagaagatattagcacacagacaggcacaaagtaaagaccatgatgtagagacacaag

SEQ ID NO: 477811 - DNA, 646 bp, Homo sapiens
ttcgatgaacatcattgcatatagtaatttgtgccatgtgtaaggggtacattcatgtatcttgcaaggagaattcttgctctaagggcatatttattttttatgttgatgtatattgcctacttgttttccaaataagctgtacagttttcccaaccgtataygagagtatttgtttcccagtatttatccctcttccctatattatcaattttttgaacttgccaatctgattataattctaaggtatgtttatctaattatgactgaggttaagcatcttaacaatcatttgttacattctttccacataaccatttagctcttcattataccctgaaagatatccatcttctctccactagtttcaaatggaagcttaaataaatttgtttatttgagtctaaactctccatttctaaactctctactcttttacatttaccttattatttacacatatcagtactaatttttgtaaaatgcatagattaagacatcttaatgtacaataggttagtgccttttctttttctcagaatttccctagatattcttgctttatttttcagtggtagtgatggagttgtttcataaaataaacattgaaatataccttgtttaaaagaggggtattatcacaata

SEQ ID NO: 477812 - DNA, 568 bp, Homo sapiens
caattacaaccattcgatattaattccaagggcactaatttttctccagaatttttctttagtttccattgtagttcaggtgatttttattgccctgttttctaggtcattatttttttctttttgactgttcaatttgctattgacaccattcaatgaattttctaatttcaagtattgcatatcttagttacaggcattctagctggttgtttttctacaactcccatttatctctttaaactggtccatttttttcattcattcaatctgtctttacctgtaaatgctttaccacatttttaattgttattttaaagtcttcatcttctaattccaataaataggtctggtttatatgtaggttcacttctacaaactgttttcttttgattgttggtcacatatttctgcttcattgactgtataataattttttattaaattccagttgctgtgcgtgtgtgtgtgtgtgtrtatatatatatatatatatatatatatatatatatatattttctttctcctgtctggcaattagggtgagatatagatcaattagttactt

SEQ ID NO: 477813 - DNA, 735 bp, Homo sapiens
atatatatatatatataaaatatatatgcatatataaatttatataaacaaatataaatgtataaatatatagggtataatatatatatatttatcctattagttctgtacctctatggactatcctattagttctgttccttgcagatggcctattgttggatcttgtaatcatgtgagttaatacatatatatagtataatatatacatatttaatctattagttctgtccctttagagaaacctgactaatacaacagttaaacatctcatataggcaagtagatagatatacatgagtcatacatatgtgagggttatgcttgctcatgataatttctttttagtttctctgactttcctgctgtctcacgcttccaaaccctacacttcgtaggttcactgccatgccaggatatrggaacaagtgcatctctattaagaaggaacttaataagtcatagaccaatagtccaggcagaaggaatcaggtcagactctgatgttctcaattttcccactaatgcctgctcttgaaattacattcccagcctgttccttggtacccaaattatttgctggtttccttcaaaaaaaagtcagatctatgaagtagtgatttttgtctatttattcactgatataatcccaggctggaggaaagccttgaattaggaggtgatccataaatatttgttgaagcagttcattaataaatattctgtccaattcaa

SEQ ID NO: 477814 - DNA, 735 bp, Homo sapiens
atatatatatatatataaaatatatatgcatatataaatttatataaacaaatataaatgtataaatatatagggtataatatatatatatttatcctattagttctgtacctctatggactatcctattagttctgttccttgcagatggcctattgttggatcttgtaatcatgtgagttaatacatatatatagtataatatatacatatttaatctattagttctgtccctttagagaaacctgactaatacaacagttaaacatctcatataggcaagtagatagatatacatgagtcatacatatgtgagggttatgcttgctcatgataatttctttttagtttctctgactttcctgctgtctcacgcttccaaaccctacacttcgtaggttcactgccatgccaggatataggaacaagtgcatctctattaagaaggaacttaataagtcatagaccaatagtccaggcagaaggaatcaggtcagactctgatgttctcaattttcccactaatgcctgctcttgaaattacattcccagcctgttccttggtacccaaattatttgctggtttccttcaaaaaaaagtcagwtctatgaagtagtgatttttgtctatttattcactgatataatcccaggctggaggaaagccttgaattaggaggtgatccataaatatttgttgaagcagttcattaataaatattctgtccaattcaa

SEQ ID NO: 477815 - DNA, 497 bp, Homo sapiens
ggtactggtgcagacagtaaattttgcatttttgggtggatgttcttcaccaatggacagtaatayaatgattaagaaatggggacacattggagatgaatgcaaagtaatggtgtcacagaaagtcaaacaagaggggagtcatcccttttacatcttcagtctgtcctcgacctgggaataaatgttgtaggtgatattgtgttggacactaggctacaagaaagccaagcaagtttagtgtttggttgagccgatgcaggaagacgaaagcaaattgctagtttgagagcttccccaaccagagtgaacatcagttctacgtgccctctactgcaaacgtaactaacacttgaatttctctagttctcctcagcttctccattaatgcatgacttaggctcccatcatctctgacctcaatgcaataattccatatctgttggttatgaattgaatgcttgttctcccccaaaattcgtatgttgaagccctca

SEQ ID NO: 477816 - DNA, 497 bp, Homo sapiens
ggtactggtgcagacagtaaattttgcatttttgggtggatgttcttcaccaatggacagtaatacaatgattaagaaatggggacacattggagatgaatgcaaagtaatggtgtcacagaaagtcaaacaagaggggagtcatcccttttacatcttcagtctgtcctcgacctgggaataaatgttgtaggtgatattgtgttggacactaggctacaagaaagccaagcaagtttagtgtttggttgagccgatgcaggaagacraaagcaaattgctagtttgagagcttccccaaccagagtgaacatcagttctacgtgccctctactgcaaacgtaactaacacttgaatttctctagttctcctcagcttctccattaatgcatgacttaggctcccatcatctctgacctcaatgcaataattccatatctgttggttatgaattgaatgcttgttctcccccaaaattcgtatgttgaagccctca

SEQ ID NO: 477817 - DNA, 407 bp, Homo sapiens
cctaactataactttccactacttaccccaaacctataaawccagttcccctcccaccacccttcgctgactcctttctcggactcagcccacttccacccaagtgaataaacagccttgttgctcacatttagcctgttcaggttgtctcttcaattagacatgtgcataacaatttctagaacttgggatcatcagaaagaaccgtggaaacaccactggtctaagaccaaccagagccctcctgattctgagcaagacaaccttggagtcttttgtttgcaataaactgcaaacttcagaactataataagaaatagagacttattcaaggttctcactctcccatgccctattaaaggaagtaccaggaaatatttaaatagcacctgcacccctggattgag

SEQ ID NO: 477818 - DNA, 561 bp, Homo sapiens
cagagccatctaactccagagatgctagagcaccgattagagccaccaaaactctgtgagtcatcagaacaactcataccagggcagggcacccgtctctgcactcttattatttcattcaggccaaaagttacagtcataatcttgtcttatcagatttgggacactctggaacaaatgtcatcctaattttggtagaaacataaaagcaagtaagcatgatttataaacaaagggctttcagcctaggatttgcaaaagttctccttcacttttataatttagtctatctacagagggacatttagaccttattgaacctttccaaaaattctgcaactaagagtcacagcctgttaatcctatytgctttcttggagtcagggggtctcttataaccactacatgccagcaggtgctgttctaggaaaatctgccttctttgaggagcctcttcccccataccgtgctctcacatgtacacccctgtagtctatctcagtgactggtgacctcttcctcctgggccagagtccttccccccgggtggtataaataaag

SEQ ID NO: 477819 - DNA, 604 bp, Homo sapiens
agaaagggtctaagcacctgatgcaatgaaatcatgtggggccctcacagcccaggctcaggatcctctgagaggctcaggagcccagagaaggaacacctcagatgagacctgccaggtcatgccgaatggccaggtgaggatrttgggaagacgggagaagaagagtgttctgggcaaacagaacagccagtaaatgccagaagaaagtgccctgaagggagagagagcctggtgcattggtaaacagaaaatgtccctacagcaaaggagaggcaggaagtgataaattgagcttggagaggtgagtaaagatcaaaacacaaaaactgaagttttgagatgcaattctgaagacagtgaggaggcattagaaggtctgcagcaggagaatgaaaatgaccagatgtgggtagacagaccactcaccgtctttctctcacactcttggagaatgactaagaatgactcttaggctcaagcctgtaagcagaaaacagcatggaaacagcatggttaacgcagataggtgattgtgttaatgacgtatcattttactttttaaaatcttgtttgtatctagtcattgggtttgatatattta

SEQ ID NO: 477820 - DNA, 604 bp, Homo sapiens
agaaagggtctaagcacctgatgcaatgaaatcatgtggggccctcacagcccaggctcaggatcctctgagaggctcaggagcccagagaaggaacacctcagatgagacctgccaggtcatgccgaatggccaggtgaggatattgggaagacgggagaagaagagtgttctgggcaaacagaacagccagtaaatgccagaagaaagtgccctgaagggagagagagcctggtgcattggtaaacagaaaatgtccctacagcaaaggagaggcaggaagtgataaattgagcttggagaggtgagtaaagatcaaaacacaaaaactgaagttttgagatgcaattctgaagacagtgaggaggcattagaaggtctgcagcaggagaatgaaaatgaccagatgtgggtagacagaccactcaccgtctttctctcacactcttggagaatgactaagaatgactcttaggctcaagcctgtaagcagaaaacagcatggaaacagcatggttaaygcagataggtgattgtgttaatgacgtatcattttactttttaaaatcttgtttgtatctagtcattgggtttgatatattta

SEQ ID NO: 477821 - DNA, 557 bp, Homo sapiens
attttgtctccaaaaccaccagcctacatataaaatatgcatcaccccaagaaaccatcttgctttgtgaataattggacacatgactacagaatgacaccgtccagacagcccatgctgccctaatcccttccctgtaactgggaaggtgctgccagttttcttkggccaagcacagaggaagtgtttccgtttctgttccctccagccttgatgtttgtccaccgaaagccaagccttgtcctacctagggtcctggctccgcgcagtgcattaaggaaaccatggtgcctcccactgttcccccttcaaccctaagctttgtccccttatctcagcacctggatcctcccttcagctcccccactcctctcctgacctctccatgcagccatacccttctgttacctgcacgaacctagcccacagcaccaaaaaaaaaaaaaaaaaaaaaaaaagcaggttgctaaccttgtgtatgacgtccttagacaaacttcaaccctcctgattggtccatcaatttcccttcatgctatggtagtggtaaccagatc

SEQ ID NO: 477822 - DNA, 468 bp, Homo sapiens
gagctggacttgggcctgatgccctagtcttctgctgggttgggagagaggggtggaagcctagagagaacccttctctactgcataccatccatgtgccaggtgttctatgacttgggagatcagcattcttgccttcattttatagttgataaacctgaagctcagagagctaaaagtaacttgcctaagtttatatagtgaatgagtgccagatctggggtatgaacccaggtggatttgacttcaaaactcatctttcacttttaaactgtgctgacttgccaagggattaaataaaccaacatttgttgagcactatggcagtgactttaagttgtcccccaatgttcatgttctccttttttcttaattgcaaagccctggtttgttttggtatggaaatgtaccccctaaaagactctataccccaggcttcctgaagyaaagtatgcccatgcaaagctg

SEQ ID NO: 477823 - DNA, 604 bp, Homo sapiens
gttttcattagcagccctgggacaacatctctgggcttaacccctccagacccayccagtcttgggtatcccattagaaggagaggctgtaacttctacctctgctagggacagataagatgtggggggcccaagtaggggaaaatatgttcttcactcaataggaagtgtatgactaggttacagttctcctaatttccacaagggtcaaattctttgggtcactctttccactgtgacccttccagctagttcaaggtatagaacaacttggtgttaataaatatttgttgaatgagtaataactcacttttttattgaacactgtgccagacactgctctacatccaactgtatcaactcatttaattctcacaaccttctgagaggtattgttctggttatcctttgtgtacaactaaccactcttactgtctgaaagcaacaacttattgttattatgtctcactattccacgggctaggaatttggatgaggcttatctctgctctattatgtctgaggcctcaggatgacttgaaggactggaggttggtatagctggaggctgcctgggcctctctctctctccctaaacacacag

SEQ ID NO: 477824 - DNA, 444 bp, Homo sapiens
ctgcagcttttctggggagctatgagaaaggcaggcctggtggctccggccttctctacccggccactctcaggctgacgagttaytagaattttattttctagcttcccatctgaccctgaccaacttctgtgccattggagcaaatcactgaacttgtctgaatctcggtttcctcatctgtaaaattggtccagatagatacataactcgaggttgtagacattaaataagatgaggcatctgaagtgtaatgcagggacctggcgcgctaaatggtgttattactaccaacgcactagaattgtatctgcttttttttttaagtccccctttttcattaaaaaggaagggaagagaaagaccacggtcaaatgtttcaaagaggtccagtggttaaggatttgctggttttccccgcaactgaccgggttcaagtttcac

SEQ ID NO: 477825 - DNA, 582 bp, Homo sapiens
gaaggatttagacaaattgggacatgttttgaacctgggaagcaggaagcaaggagaacaaaaatttgtgtttaaagaactagagaactttagcccggagaagaggaagtgcagggagaaataaaaatctcttctcagatgtttggaaagcattcatgtggttttactgttcccaaagaatagatgtcataactaatgactgaaaggtcagatgaaggcaagggacgaccttctagtggttggaaccacctgaagatgaaacaggctgttctttaaggtagtgagtccccattccttggagcgttctcgtaaagcctgggacaagggtcacaggattcctaaccacttcaggggccttttctaaccctgggagtccctgaaatcctggactctttttagctacaacaaactgaaagacctgacgattccatcccaggactctgggattatggtctgaagtctcatgagaaatacctcattttttaaccctctactttcttcctccacctccctctcttccaaaaagagcttaagtcagtccctgtgacagaaagcaraatagaacaaatgagttaagtcaga

SEQ ID NO: 477826 - DNA, 471 bp, Homo sapiens
agcaccatgctgcttctcttgtggaaaggatgcttttatgtggaaacccagagccagatccttgaggagatgttcattgggctctgtgttcttatccgggagcgattcagtgcagaaagctacagtggctgaaggaagaggaggcactcagaatctcccgggacatggaagggaagcttgggcagggacgtgggctgtgtagaagcagaaggaagcagcattgcctattggaagggtcagacaaacctgggctcaaatttcaactactagctatgtgtcgtggacaagttatttaacctctctatgatccatgattataaagtctaactcacaaggttagtgtgaagattaaaaataacattgataaggtacctatgcatgattgayatttttatttatttaatttatttagtttcttcagtgcagtggcacaatcatagctcgttgtagcctctgcctcctgggctcaag

SEQ ID NO: 477827 - DNA, 597 bp, Homo sapiens
ggtgctggtgtggctgtaataggtcacattcctctctgtttccaaagccagtccctcccgatgagggggaaagagtactgggaagctctggagtgagggatgaatcctgtccttcagcctcattttatagagacttcagggtgagaactgaaaggtgtcaccccsatttgtgcccatacttgtaaaaacccgtttatttgaatgtctttgctagcagaactctaaatgcctcagatgaggaatggcgctccctacaaaaatgagtctacctttgggacatttgtgcatgtggagtgtggtgtggggtgtatgttgcatctgtgcacttctggagcatcttgaattactgcatcccagctctcgctctctgtgcttgcttgcaaattgcctgcttactgctatgtctcttacctctgagctcagtgccctggtctacctggtttactactgcacagagcttggcacttggtaggcgctctgtaaatatttgttaaatggaagaacagatgagtaatctgcacattcatcccagtgagtctgtctttcttttggggtgtagtcttgtctccatgtctctgtctgtctctctgagcccgt

SEQ ID NO: 477828 - DNA, 597 bp, Homo sapiens
ggtgctggtgtggctgtaataggtcacattcctctctgtttccaaagccagtccctcccgatgagggggaaagagtactgggaagctctggagtgagggatgaatcctgtccttcagcctcattttatagagacttcagggtgagaactgaaaggtgtcacccccatttgtgcccatacttgtaaaaacccgtttatttgaatgtctttgctagcagaactctaaatgcctcagatgaggaatggcgctccctacaaaaatgagtctacctttgggacatttgtgcatgtggagtgtggtgtggggtgtrtgttgcatctgtgcacttctggagcatcttgaattactgcatcccagctctcgctctctgtgcttgcttgcaaattgcctgcttactgctatgtctcttacctctgagctcagtgccctggtctacctggtttactactgcacagagcttggcacttggtaggcgctctgtaaatatttgttaaatggaagaacagatgagtaatctgcacattcatcccagtgagtctgtctttcttttggggtgtagtcttgtctccatgtctctgtctgtctctctgagcccgt

SEQ ID NO: 477829 - DNA, 578 bp, Homo sapiens
actcttggctgtgagcttcctagagcctttgttccaagcaggtttttaaaaacaaaagactgggaccgagagagtgggctggtacaaagttgttgatcaggaactctctttggattacagaaacaaaattgatgagcaattggttattgttaagttataggatgtggtttatgcttctggtgagacactataataatcctaaattaaaattaattcatagctacttgtggcaatagcaagcagttttaagagatgaatacatagctcaaagcggggagtagggtgtgattgctctcattttaacgtctctccaggcctcatagtttaaaaaggattcaccttcctcagatgaaagctctttaggttttgcatcaggaacctccttttctgctttcttggagggtcaggatgggtcccatgaagagctgctggtggggacagacagaagccaaggagaggccgggcaaggaagctgaagtgcttggcagggggcaacagtcccctgcctgcaaccaacgttaaaaaacactgtcacttsaggccgaaagtggtagaaaccagtttgttaaatcacacga

SEQ ID NO: 477830 - DNA, 543 bp, Homo sapiens
cctctgttttatgtataaggggactacgacatgaagaagtggtttaccccagttctcagacccagactccaaaccaatcataccccctctaggtgacattacttactggacaacaggccctcagcaatctaggtgccactataagatatcatgggagcaaaacatgcttgtcttcttttaaagaggtactttgggtcaagagttactttgtaaatatacacctctgtcatttcccggtatgtggtcccatggacatcaccagcttctaagtgtgcttttcaaaaggccaggcagttgagtaggccacagtagttacttacagactgtcaaaaactgtccagttttctgatcattttaccctttggctgttcataggccatgatgaagctggggggttgggagaggaagacaaagaagggaatggcagaatgaggtttcgcagyaataaagataaacgtttattgaacactaactacattcctgacatggtgcttagtgcattacccaatattatccccattatacagattgagaaattgagat

SEQ ID NO: 477831 - DNA, 553 bp, Homo sapiens
agctgctccatgtccttcacctctgccagggcctcatcccggagaaggcccatctgctcgtggttgtagaaggggcaggctgcctgcttctcctgcctcctcctctttggcttctcctcctcagctcctttcttcttctctgagggtggcacaggcacaaagagagaaaacagagaagacagcaactgtccacgggcccgagagggggttgtgtaatgttgagacccacttccacagggtggggtctataagaccctcccaagtactgcctactgtgtctcatcggaacactaaggttttacttttgttctccagaaagagcccgtaaaatcatctccaagccaacgattcggaccagacgctcacccagagagtaggaacactttttcccaaggagaggggactcaggaaggaactggggtctcctctgccattctttctatgaaagacactgaatggtcttcagtcactgccacccctgcctcactctctccagaccacctgcggctacaccatggtccyggtggctaccgtgcctgcttctctgcatgtc

SEQ ID NO: 477832 - DNA, 491 bp, Homo sapiens
cttgctaaagttagtatcgctggggctcagtttctgtaagagacaggtgggttacaagcgctcactcactgttgcagtgtcttatctacgtaacataatccatgaaaagctcaacacagctaggccaaatctaagacccagacacgcggctgctgttaatgccgactcctgcgcaccgcsccgttccaccgcaggcacaaccttcctaggccggccccgtccccacacaggggttcccgcttgtcaatcacgctggcccggccctccacttccggaatgtttttccgctccggacgggccacccacctttgcaaacaggggtccggtgccggaacagacgcccagtttgcgatttcaccagtctgcccttcctcgtcccgctgttcctcgtcctaaggacctctgctgccacacagcactgcgctcaccttcttcgccggcagaattgctacgctgaaagccaggccccgggaatcagggcaaacgccact

SEQ ID NO: 477833 - DNA, 491 bp, Homo sapiens
cttgctaaagttagtatcgctggggctcagtttctgtaagagacaggtgggttacaagcgctcactcactgttgcagtgtcttatctacgtaacataatccatgaaaagctcaacacagctaggccaaatctaagacccagacacgcggctgctgttaatgccgactcctgcgcaccgcgccgttccaccgcaggcacaaccttcctaggcckgccccgtccccacacaggggttcccgcttgtcaatcacgctggcccggccctccacttccggaatgtttttccgctccggacgggccacccacctttgcaaacaggggtccggtgccggaacagacgcccagtttgcgatttcaccagtctgcccttcctcgtcccgctgttcctcgtcctaaggacctctgctgccacacagcactgcgctcaccttcttcgccggcagaattgctacgctgaaagccaggccccgggaatcagggcaaacgccact

SEQ ID NO: 477834 - DNA, 475 bp, Homo sapiens
tgagaaacgtgatctacaccagaatcaycatacattcctcatgaatcatcctctctatgaatagtgactcactctactattgctctggggaggaggaggagctaggctgctttaaaacactcttaagctgattcacaagacccttttcataatgttctccagcttcactgagacaaggctgaaatactaaatcaagtacagcaagtaggaatctcagtctacaaaatatcttccctccctcccttcctttcctctttctttccttccttccttctttccatttgtttctctttaggacctttgttcagccttagatgtgtttctgccatgggaggtttatgtaaataccagatatcagaacttctatgggtatattagagagtgggtctgtcagggagaagcaacaccagacagtcagtataaactgacccatcatgaaccccttaaggcacccctcattgatggcagtggtggc

SEQ ID NO: 477835 - DNA, 614 bp, Homo sapiens
tttgagcagactgagacacttagcaaacamgatggaatgggaaacaggtgagtcacttaatctgtctacgcctgagtttcttcctctgtaccataagctgaataatcaaacctgcctcaaatggtgtagtgagcattacatgttttgtaagtcatacgttgctcattcatgcatcacccgtactgttattatcttacaggaagggggaacagatgaggtattgggctgggcccctgtgttcaggctgctgccccacctcatttaaagtgaatcatggagtcgacctgagattttcctcttcaccactttatcagcaacagtttccccttgtttctccccactctacaggaatgaggtatgaggatatcaactgcaaataagcccacttagatctggagggcctctgggaggacacagagtgaagcctattcaactgccctggttggatctgcaggcctcaaggaggtcaccaaggcctgataaaggacagcagggggttgcattaactgaaggagatggggtgctctcagggtaacttggagagtgactaattatgtcagatatgcttcctccagatttcattagaacacgtggggaatgcatgaaaatttaca

SEQ ID NO: 477836 - DNA, 602 bp, Homo sapiens
tctcctacttcagcctcctgagtagctgggattacaggtgcaagccaccacgcccagctaatttttgtattttcaccatgttggccaggctggtctcaaactcctgacctcaagcgaactgtctgccttggcctcccaaagtgctaggattacaggtatgagccaccttgcctggccaccaggcattttcatggaagctgaacttggaagagaagttatcatccgcagggcttgctctaaggaaggagaactggcctggcacctctcacctcctccaagagaactggacctttaaccagcccagtgaacccacctaggagaaaaacgggccagccagtcttggatatggccagtcaatgcagtacgagggaaaatcctcctctaatcctccacacccctccccacacccctggagagaaagagactgcaggagctttgagttcccgcgagaggtcaacgtgggagacaaaacaacttcatttgacctgactatacgttgatgtggtttttgaggcagagcctcttcrggaggaattacctgaatccccaagaagatacagagataacatggcaggatgtccaagatgtcataggccaggcag

SEQ ID NO: 477837 - DNA, 624 bp, Homo sapiens
actggccaaggtgcccagcagaggccacgtgtggaactggcaatccattggcctcccaccaatgtacagtgggtcctagcactggtagatastggtgcagactgcagctttgtttatggaaatccgggtaagtttccgggcaaagctgcattcattgatggttatgggggccagttggtgaaagtgaaacctgtgtctctgcatcttagcaatggccacttggctccgtgcctgtatactgtgtatgtttctcctttacctgaacatattccgggggtggacattttgcatggtctggacttacacaccagggccggagaattcggactcggtttgggtagtaaagccagtactgcgtggacatacccgttaccagtcccatgtcttatataatcatagccatgtagacataacatggagaagctcaccgtctggctctcagccactattgtttgtgtggtgtataaatgtaacactgaccctgtgaaggggatgctgaatcaagccatgtctcatttacctactgtctcttgcgtgttcttccagctccctgcgccacatacacccacttccctcggcccttagctggggctggaacctgacccttagcatgatgtttggtgt

SEQ ID NO: 477838 - DNA, 624 bp, Homo sapiens
actggccaaggtgcccagcagaggccacgtgtggaactggcaatccattggcctcccaccaatgtacagtgggtcctagcactggtagatagtggtgcagactgcagctttgtttatggaaatccgggtaagtttccgggcaaagctgcattcattgatggttatgggggccagttggtgaaagtgaaacctgtgtctctgcatcttagcaatggccacttggctccgtgcctgtatactgtgtatgtttctcctttacctgaacatattccgggggtggacattttgcatggtctggacttacacaccagggccggagaattcggactcggtttgggtagtaaagccagtactgcgtggacatacccgttaccagtcccatgtcttatataatcatagccatgtagacataacatrgagaagctcaccgtctggctctcagccactattgtttgtgtggtgtataaatgtaacactgaccctgtgaaggggatgctgaatcaagccatgtctcatttacctactgtctcttgcgtgttcttccagctccctgcgccacatacacccacttccctcggcccttagctggggctggaacctgacccttagcatgatgtttggtgt

SEQ ID NO: 477839 - DNA, 428 bp, Homo sapiens
ggcccgggtgctaagcccctcactgcccagggccggcggtgctggctggccatttggagtgctggcccaccaagcccacggccactgctcctctccctccacacctcccttcaagcagagggagctggctctggcctyggccagcccagagaggggctcccacagtgcagcggcgggctgaagggctcctcaagcatggccagtggtggccagagtgggcgcagaggtcgaggaggcactgagagtgagggagggctgccagcatgctgttacctctcaatatgatgaggacctcagtgagggtggagtcagtgggaatttaggctccctaaatatttatgaatatcatgttgaagaactaacaatagataaatcagtgatgaattgatagttttgagtccaatttcccaagcaaatagttggatcaa

SEQ ID NO: 477840 - DNA, 496 bp, Homo sapiens
aatcaaagtccttctccatttcaatatgcacaaaatccaatcccacatgttcctatgattatcatttaaattatctagatttgtaatttttaaccaaataaattattttcttctcgaaaaggttcctatatcctacttgcactctaatgatagctgaacctaaatgttaaactggatgcaaagagggactgctcttggaaaggccatgagacccttgtagaggtggctttctgcaccttctamagatattgaaggcattatcatctgaattctgtctactgacagcatgcccaacagatcaaaaaataaatccttctttcctaagtgaagggcgagggcatgacctcctcttacacatcataatataccccttatattacttgaatttattgaatttatatattcctataggttaccagaacaactcttttaggattctcttacttgaggagaactaggagagaaagtttcgaggacaaattgtttcttgctgctg

SEQ ID NO: 477841 - DNA, 496 bp, Homo sapiens
aatcaaagtccttctccatttcaatatgcacaaaatccaatcccacatgttcctatgattatcatttaaattatctagatttgtaatttttaaccaaataaattattttcttctcgaaaaggttcctatatcctacttgcactctaatgatagctgaacctaaatgttaaactggatgcaaagagggactgctcttggaaaggccatgagacccttgtagaggtggctttctgcaccttctacagatattgaaggcaytatcatctgaattctgtctactgacagcatgcccaacagatcaaaaaataaatccttctttcctaagtgaagggcgagggcatgacctcctcttacacatcataatataccccttatattacttgaatttattgaatttatatattcctataggttaccagaacaactcttttaggattctcttacttgaggagaactaggagagaaagtttcgaggacaaattgtttcttgctgctg

SEQ ID NO: 477842 - DNA, 619 bp, Homo sapiens
ttggatgtggtggactcttatgtcaatgggtcaaatttattaattmttttcctgtattattgctgatttgactatttcttcttttagttcaatctattattaaaaaataacttaaaaagtgttatttttaggtacacaaaaatttaaaattttatcttcatgttactaatcctttgccattacaaaagtctatttctggcaatatttctttccttgaagtccagtgttgtctgctattagcatagaaacagtgttcttttggtcagtttatgagtttattctattattttatttttatcttttaatcctgttatttaagatgtttctcttataagagtcttaacattgtgttctatttcttaaataggagaaatttgctgattaaaaaattaattatatgctagatataaatccaacataaataaaaatgtgtatattttgccgtttgtgtttgtatatataatgcaataatatttcataatagaatatattgtgttttattcaataccaattatatattgcatttggatttaaatccaacatatatttaattcccttggttttgtatttattaatgttacatatgattaatattcattttatttattcctgtatttct

SEQ ID NO: 477843 - DNA, 619 bp, Homo sapiens
ttggatgtggtggactcttatgtcaatgggtcaaatttattaattcttttcctgtattattgctgatttgmctatttcttcttttagttcaatctattattaaaaaataacttaaaaagtgttatttttaggtacacaaaaatttaaaattttatcttcatgttactaatcctttgccattacaaaagtctatttctggcaatatttctttccttgaagtccagtgttgtctgctattagcatagaaacagtgttcttttggtcagtttatgagtttattctattattttatttttatcttttaatcctgttatttaagatgtttctcttataagagtcttaacattgtgttctatttcttaaataggagaaatttgctgattaaaaaattaattatatgctagatataaatccaacataaataaaaatgtgtatattttgccgtttgtgtttgtatatataatgcaataatatttcataatagaatatattgtgttttattcaataccaattatatattgcatttggatttaaatccaacatatatttaattcccttggttttgtatttattaatgttacatatgattaatattcattttatttattcctgtatttct

SEQ ID NO: 477844 - DNA, 619 bp, Homo sapiens
ttggatgtggtggactcttatgtcaatgggtcaaatttattaattcttttcctgtattattgctgatttgactatttcttcttttagttcaatctattattaaaaaataacttaaaaagtgttatttttaggtacacaaaaatttaaaattttatcttcatgttactaatcctttgccattacaaaagtctatttctggcaatatttctttccttgaagtccagtgttgtctgctattagcatagaaacagtgttcttttggtcagtttatgagtttattytattattttatttttatcttttaatcctgttatttaagatgtttctcttataagagtcttaacattgtgttctatttcttaaataggagaaatttgctgattaaaaaattaattatatgctagatataaatccaacataaataaaaatgtgtatattttgccgtttgtgtttgtatatataatgcaataatatttcataatagaatatattgtgttttattcaataccaattatatattgcatttggatttaaatccaacatatatttaattcccttggttttgtatttattaatgttacatatgattaatattcattttatttattcctgtatttct

SEQ ID NO: 477845 - DNA, 619 bp, Homo sapiens
ttggatgtggtggactcttatgtcaatgggtcaaatttattaattcttttcctgtattattgctgatttgactatttcttcttttagttcaatctattattaaaaaataacttaaaaagtgttatttttaggtacacaaaaatttaaaattttatcttcatgttactaatcctttgccattacaaaagtctatttctggcaatatttctttccttgaagtccagtgttgtctgctattagcatagaaacagtgttcttttggtcagtttatgagtttattctattattttatttttatcttttaatcctgttatttaagatgtttctcttataagagtcttaacattgtgttctatttcttaaataggagaaatttgctgattaaaaaattaattatatgctagatataaatccaacataaataaaaatgtgtatattttgccgtttgtgtttgtatatataatgcaataatatttcataatakaatatattgtgttttattcaataccaattatatattgcatttggatttaaatccaacatatatttaattcccttggttttgtatttattaatgttacatatgattaatattcattttatttattcctgtatttct

SEQ ID NO: 477846 - DNA, 664 bp, Homo sapiens
actatgaatatgtagcaggcccttaatgtggactattgttagtgctcaaacaggatctgattcttgtcactgagattttatagccctccttcttcaagtaaggaagttacaaaacccaaagagayagagtcagtgtcggggaaagaaaccccaacgagaatggggattctaacctcaaactgcagtcccaattcaactacttttccatttcatgactttgtaattaatatctgctaatttattattttatttagaaactagtgtttatgaagtgtttgcaaataaattatgctatgtaagtactacagtattaatattaacaataattattgtgttaataagtgtaatttaaaacagaattcttggattcccattttgaagcattgctttttctctttgcacagtcagaagagtacatcacaaaattaggcagtggaaaaatttccttttcaaaaccatgcagagagagaggcctcacagattgtatctaaactgaaaagattgatgttaataaggcttactatttatcatagcagactatttcatggaactaagaacaaaggcagtttatgaaaatctcacttatttggcccaggttctaatccaagaatacctttcaaatgtggttcactaaaggataaaaatatttgcaggagtggataca

SEQ ID NO: 477847 - DNA, 584 bp, Homo sapiens
aaaacagcacaaaacaagtcttctaattctttggcctgttctccaatcctcttcatagaggaagtggcaaggatcccaggaactgcttttgctaattactaggcattttctctcaggctgtgttcattttgccagggtgatataactaagtgtatgactttgttcttgcttatttatctaggttacttgttagcttttcatttccttastatttcctagtttggattccaaaacacctttctaatgccatttccttgcttaataagcttcagcgactctctattgcttataaaataaaattgcatgcacaattaactataatacagtaagctaataatagcatttattgagcccctttttaagtaagctgtgctgagtgcattctgtgtatgacatctaaatctcatcacttctttgcagggtaactattgttattcccattctacagatgagggttctgaggcactgagagtcaaggggtttactcacagtcaaagagctcccaaatggtaaagccagaatttaaactcagattcttttgattccagagtcgttaccctcacagtaaagtatgccattgtgct

SEQ ID NO: 477848 - DNA, 646 bp, Homo sapiens
tgcctgtatgcatattcaggagcaccagtgaccttgaattggatggcaagactggggtgacgaccttggctacagtcatccctgaatgcctcagcatctctgtgtcatgattttaatttttgaagaaactttttgtcaactaagtcatgtatatgcacatacaaacacacgagcataaacacacacaaacagaatgtgttttgaaaagaaaaaataaaatcatagtcttgatttgtataatgaaataatgttatcccaatattgtttgttaaattctctagcctggcttcatctcttttatttcaaatgatttamctgttgattaggtattgaaaaatcttgatgggcatatcaccacttaaaaatcttatttccaaaattgtaagcatttaatattttacagcatattgacagtgcctctgctttttgttcctgggccacgtgtcaactgtatccatcaaaggagaacttccatgtttcccctttgcatggttgaaacgtgacttgtgagggcagatctgagtgatgggtgctgctcaggctgctttttgctcctccttgtttcccaaactttatctttctgcactgctccttgtatgtgttgggagaagctcactgctcccatggggcagggcaggaggcgaaa

SEQ ID NO: 477849 - DNA, 603 bp, Homo sapiens
tcctaattttgccattatatcagttaggaactagaacccaagtgatctggaattatcctcttaattaatttattttttgaaattctattttctgttagcccacactagattctaattttcttcaaaacagggaccttatctatttagttcgtcagtttatcttcagaatctagagtagtacctggcataaattgggcactcaataagtatctgttaagtaaaaaagggatggtaacacactgaatcctatacatagggatgctaataaatcctcccaacccctgaagaactcacaatttgctagagacttacaacttagctacacaagtgagaggggaaaaaaaggccttataaaataaaatgttaaatcataagaatggtaggagtaataggtgttcattcatttattgtttcatttatttatttatccattcatatatccatttarccaacacatttttactgagcactttctatgtactcagctctcttgagcaaagagtttcaaagatgagtgagacattgtttctgccttcaattacattactttgttgggagaagaagacatgggagagtctcccttaaaacagggagaagtaacta

SEQ ID NO: 477850 - DNA, 523 bp, Homo sapiens
ctgcatccatgttgccacaaagaacatgattatagctgaatatcagtattccatgtgtgtatatgtaccacatttcctttacrtattccatcgttgatgagcatctagcttggctccatgtgtttgctattgtgaatggtgctgcaataaacatatgagtgcaggtgtctttttggtaaaataacttattttcccttgggtatgtatgcaataatgggattgctgcgttggatggcgattctattttcagttctttcagaaatcttcacactgttttccacaagggctaaactaatttacattttcaaacaatagtgtattagcgttcccttttctccacaacctcaccaacacttgttattatttgactttttaatatagtcattctgactggtgtgacatggtatctcactgtggttttgacttgtatttctgtgatgattaggttttacttgcttttgagtagaggttagaaaaagtttatgactcatagcaaagtatgataggaagaggaaaggaaaat

SEQ ID NO: 477851 - DNA, 596 bp, Homo sapiens
atggcttttgatcatgaagcatgtttttacaaacaaaaaaatactgaaagtagtwtgtgaggctgagattatgttaatttatgcagtttccactgctgctaggattaaaaatagctttctttcaagaaaactagaactacgcactgtcagtatgccttctaggccctcttgttgggctccaggactggtgggccagacacaggacatggattatgagatcctccttggcagtcccaggttctggagctttgctgaagtggaagataaagacactttatcttccagtggtaaggactcttacaaagtctttactgcatgtttcataaaactggatatgctgagctctaatgaaagctgttgtcagcattaaatacccagggaaaggcatggaggcctttaaaaaactgccacaatgctcctgcactgaagtgctcacattttgctccatatgtgagagggaggggaatttggccagtgtcatccacctcataaaaggcaaacccaggatttaaactcaggtctggtgcctccaaagcccaggaactcatgacatctcttcccccaactctgctgttctacatgttgattatggctac

SEQ ID NO: 477852 - DNA, 596 bp, Homo sapiens
atggcttttgatcatgaagcatgtttttacaaacaaaaaaatactgaaagtagtakgtgaggctgagattatgttaatttatgcagtttccactgctgctaggattaaaaatagctttctttcaagaaaactagaactacgcactgtcagtatgccttctaggccctcttgttgggctccaggactggtgggccagacacaggacatggattatgagatcctccttggcagtcccaggttctggagctttgctgaagtggaagataaagacactttatcttccagtggtaaggactcttacaaagtctttactgcatgtttcataaaactggatatgctgagctctaatgaaagctgttgtcagcattaaatacccagggaaaggcatggaggcctttaaaaaactgccacaatgctcctgcactgaagtgctcacattttgctccatatgtgagagggaggggaatttggccagtgtcatccacctcataaaaggcaaacccaggatttaaactcaggtctggtgcctccaaagcccaggaactcatgacatctcttcccccaactctgctgttctacatgttgattatggctac

SEQ ID NO: 477853 - DNA, 580 bp, Homo sapiens
gggaaaggcatggaggcctttaaaaaactgccacaatgctcctgcactgaagtgctcacattttgctccatatgtgagagggaggggaatttggccagtgtcatccacctcataaaaggcaaacccaggatttaaactcaggtctggtgcctccaaagcccaggaactcatgacatctcttcccccaactctgctgttctacatgttgattatggctacctgtggtgctcattttaatcagatttcatcaatataaacattagtggtggggtcttcctttagagttagtatagccacaaccacctcccctaggttatgcaggacacctggcaaaccttttctgaggggcccctaccaggggaaaaaaaaacttattgccaaacattaatatgccagccccattttggcgggccggtctcacacaatctcatgaaagaactgtrgtgccagccaggaggggcagtcctcttgctctcctagaattggctgctagccgtagagcccaaggcaacaccactggggtaattcctgaagatccttgggacatctggttgacaccataagtggacagaagtttaga

SEQ ID NO: 477854 - DNA, 574 bp, Homo sapiens
cccatctgcacatactcttcaagtcccagccagccccacccaggcacaagccagggaggaggccattgttcaataagctccagggtgcttcatcagacctgcaccagaagacaaagccatttcctaagtgtgagaattgctcagtacagtgttaggaaatcttcctccctggagagctttttaaatagactctcatttttctggggttattttgagcaaacttccatctggagatggagaatgagacaaaccaggaacttagatgacctcaggagttcctccctgatcctggctgaaggattcttgtcagacctgcagttccactgctggattctctctgtctcctaaatcatccgctttgacttcttcctctccacctgggctctctggatgtgccaaggcgctgtrcatggagtcaacagctttgattaagcagctttgatctctgttgagcatctcggaataagatctttgctctcagcatctgtgccaattctcgaaatagtttagctcagccaagcaggaggggggctggattgcaaagtgtattatatgagaaatttaaaaagaaaag

SEQ ID NO: 477855 - DNA, 574 bp, Homo sapiens
cccatctgcacatactcttcaagtcccagccagccccacccaggcacaagccagggaggaggccattgttcaataagctccagggtgcttcatcagacctgcaccagaagacaaagccatttcctaagtgtgagaattgctcagtacagtgttaggaaatcttcctccctggagagctttttaaatagactctcatttttctggggttattttgagcaaacttccatctggagatggagaatgagacaaaccaggaacttagatgacctcaggagttcctccctgatcctggctgaaggattcttgtcagacctgcagttccactgctggattctctctgtctcctaaatcatccgctttgacttcttcctctccacctgggctctctggatgtgccaaggcgctgtacatggagtcaacrgctttgattaagcagctttgatctctgttgagcatctcggaataagatctttgctctcagcatctgtgccaattctcgaaatagtttagctcagccaagcaggaggggggctggattgcaaagtgtattatatgagaaatttaaaaagaaaag

SEQ ID NO: 477856 - DNA, 650 bp, Homo sapiens
acagtagaagttatctaaaaaaatacatcctagaaggggcactgacaatttgtgtttatatctcactggccagaacatagccacatgaaacacctaaccacacgtgaaactgagaaatgcgatttctgctttggatagccacatcctacctaaaatcctacaattccataactgaagaagaaagagcaaatgggtgttgaaggacaacaagctgagtctgatacaacctagaatgacctccactctccctgcaaccacttagcctggctaactcttactcattttgggcctyagtttagctgttaccttttacagaaagcctttctgaatccttatggcaagcctgcgttaagtgtccttcctttatactcccacagtctctgtccctccttcccaaacaatccactaatcactcccttcatacacacacacattcacacacacacacacacacacacacacgaagtgatttgcctgggtcataaaacagtagggggaggaactgctacatgaaccaggtggtcttatctagagtctagaccacccattgaaccacttcactaagtttacctcttaatatttcctcactaatatctataagggcagcaagttgccaatctcaattactattccatgctcattacatagct

SEQ ID NO: 477857 - DNA, 650 bp, Homo sapiens
acagtagaagttatctaaaaaaatacatcctagaaggggcactgacaatttgtgtttatatctcactggccagaacatagccacatgaaacacctaaccacacgtgaaactgagaaatgcgatttctgctttggatagccacatcctacctaaaatcctacaattccataactgaagaagaaagagcaaatgggtgttgaaggacaacaagctgagtctgatacaacctagaatgacctccactctccctgcaaccacttagcctggctaactcttactcattttgggccttagtttagctgttaccttttacagaaagcctttctgaatccttatggcaagcctgcgttaagtgtccttcctttatactcccacagtctctgtccctccttcccaaacaatccactaatcactcccttcatacacacacacattcacacacacacacacacacacacacacgaagtgatttgcctgggtcataaaacagtagggggaggaactgctacatgaaccaggtggtcttatctagagtctagaccacccattgaaccacttcactaagtttacctcttaatatttcctcactaatmtctataagggcagcaagttgccaatctcaattactattccatgctcattacatagct

SEQ ID NO: 477858 - DNA, 585 bp, Homo sapiens
gaaaataaacagctttcttagccatgacgtgctctctcctttgctgaatgtattttcccttgagttgcrtgctaccttttgtgaaaggaaaatatatcttgtggcccccaaattactaagctaaagggaaaagtcaagctgggaactgtttagggcaaacctgcctcccattctattcaaagtcacctctctgctcactgagacaaatgcatatctgattgcctcatttggagaggtgaatcagaaactcaaaataatgcaaccatttgtcttttatctacctgtgacctggaagccccatcaccccttcaagttctccagacttcgcctcagttgtcccacgtttccagacggaaccaatgtacatcttacatatattgattgatgtctcatgtctccctaaaatgtataaaaccaagctgtgtcccaaccaccttgggcgcatttcgtcagggcctcctgaggctgtgtcatgggtgtgtgctcaaccttggcaaaataaactttctaaattaactgggtcctgtctcagattttcagggttcacacttccatacattcctcttgccacgaaagctgagtttg

SEQ ID NO: 477859 - DNA, 601 bp, Homo sapiens
ctgcctgggctttaaccccagctctgcaacttacctgccatgtgaatgttttcgttagctattgttgtataataaaccaccctaaaagtttgtgatttaaagcaataatttactattagctctcatggttctgtgggcacactgggtttagctgggtggttctggagtctctcgtgcagttgcagtcagtatttaactggtgctacagtaatataaggctcaactgggcttatgacatcacttgtgcygtatttccttggtcaaagtttagtcacagggccagcagagattccaggaagactcaactttggagacaagctaccatagcaaccttgggcaattcatttatattgtgcttcatttttttccctccaaaaaaatgaaggtgataaaagtgcctatttgataagatgttataagaatcaaatgaggtagtacatggaatgtggtaagaagagaacctggcacataacagatgctcaatgaaagttactactattactctttctgaggcataccatgctagatactggggcgctattgctttataccccctaaatgccttaatcacactacactacacactacactactactaatg

SEQ ID NO: 477860 - DNA, 601 bp, Homo sapiens
ctgcctgggctttaaccccagctctgcaacttacctgccatgtgaatgttttcgttagctattgttgtataataaaccaccctaaaagtttgtgatttaaagcaataatttactattagctctcatggttctgtgggcacactgggtttagctgggtggttctggagtctctcgtgcagttgcagtcagtatttaactggtgctacagtaatataaggctcaactgggcttatgacatcacttgtgctgtatttccttggtcaaagtttagtcacagggccagcagagattccaggaagactcaactttggagacaagctaccatagcaaccttgggcaattcatttatattgtgcttcatttttttccctccaaaaaaatgaaggtgataaaagtgcctatttgataagatgttataagaatcaaatgaggtagtacatggaatgtggtaagaagagaacctggcacataacagatgctcaaygaaagttactactattactctttctgaggcataccatgctagatactggggcgctattgctttataccccctaaatgccttaatcacactacactacacactacactactactaatg

SEQ ID NO: 477861 - DNA, 635 bp, Homo sapiens
acttaatttaacctaactgtaagctttyaaattagtgaagagaattttggttgtttgtgttgtttgttttgagacagggtttaactcctgtcacctaggctggagtgtagtggcatgatcatggctcactgcagccttgacttccccaactcaggtgattctcccacctcagccttccaaagcatgtgccaccacacccggctaatttttttgtatttttagtagagatagggttttgccatgtcctggactcaagcaatctgcccacctcggcctcccaaagtgctgggattacaggtgtgagtcactgtgcctggccatgaagataattttgaaactagttttatttaccaaagattaccaaagtcttgtgaactaaaaggtatttcagctagcttctatttttcagatattcatatcagaatcagctctttgtaacagctctttcatatattttggtataggaaagacacagacagaggcagatcttaaagacttataagattcttcatttgccagttttcaaagtctctcccctactttggactatcaatctcttgtgtacctgtttcatgccctaaacaattgttagctagtcagctctaaatttgcatctccaaagacatgactcaggt

SEQ ID NO: 477862 - DNA, 635 bp, Homo sapiens
acttaatttaacctaactgtaagctttcaaattagtgaagagaattttggttgtttgtgttgtttgttttgagacagggtttaactcctgtcacctaggctggagtgtagtggcatgatcatggctcactgcagccttgacttccccaactcaggtgattctcccacctcagccttccaaagcatgtgccaccacacccggctaatttttttgtatttttagtagagatagggttttgccatgtcctggactcaagcaatctgcccacctcggcctcccaaagtgctgggattacaggtgtgagtcactgtgcctggccatgaagataattttgaaactagttttatttaccaaagattaccaaagtcttgtgaactaaaaggtatttcagctagcttctatttttcagatattcrtatcagaatcagctctttgtaacagctctttcatatattttggtataggaaagacacagacagaggcagatcttaaagacttataagattcttcatttgccagttttcaaagtctctcccctactttggactatcaatctcttgtgtacctgtttcatgccctaaacaattgttagctagtcagctctaaatttgcatctccaaagacatgactcaggt

SEQ ID NO: 477863 - DNA, 543 bp, Homo sapiens
cacgtgccatgatgtggctttgtagcaatgttcaaaagactaatatatccctgggattttgatagtgtttgtttaactcagaatttgtccaggctttcagattttttcctgaggatattttcagtgatgctagcttctttagtgctttaagttttaaaactgtacattgttttggtatgatgaaagataccaagatttccaccccatgtgaatttgcccaaattgagttttgacctatgagtctagaagtcaggctacaggaggacaatcactctatgaagagaaggatgttgtctttcatgaaggtgtagctccttgtagtagaagtcagccaaattgtgcccccaaaacacctcatactttaggttagtaaagaagagtatacttctataaataaattatatctgctttaggtgatttaacttttgaagaaccaaaaggttttattcaggaacacggccatatgaawaacttaaatgtggtcatggtctatatggtcaaagccttgatcaaaaaggtcactaactgaaacagctatgaagg

SEQ ID NO: 477864 - DNA, 497 bp, Homo sapiens
ggaacttctccaacctgacaaagtgtatctatggaaaatacaaagctatcattatacatagagataaagacttcattatagtgaaatcttttatttcactataataacaggaacaggacaaggctgtgcttgccacttcttttttgcatttttttcatttttaatttttgtgagtacatagaaggtatgtatatttatgaggtacatgggatattttgatacaggcatgcaatgtgaaataagcatattatgaagaatgggttatccatcccttcaagcatgtatcctttgagttataaataayccaattacagtccttaagttatcttaaaatcacaactaagttattgctgactacagttaccctgttgtgccatcaaatattaggtcccactcatttcttccaactatttttctgtggtacccatcaaccaaccccagctcccctcatcctcccactaccctttcccagcttctggtaaccatccttctacttc

SEQ ID NO: 477865 - DNA, 497 bp, Homo sapiens
ggaacttctccaacctgacaaagtgtatctatggaaaatacaaagctatcattatacatagagataaagacttcattatagtgaaatcttttatttcactataataacaggaacaggacaaggctgtgcttgccacttcttttttgcatttttttcatttttaatttttgtgagtacatagaaggtatgtatatttatgaggtacatgggatattttgatacaggcatgcaatgtgaaataagcatattatgaagaatgggttatccatcccttcaagcatgtatcctttgagttataaataacccaaytacagtccttaagttatcttaaaatcacaactaagttattgctgactacagttaccctgttgtgccatcaaatattaggtcccactcatttcttccaactatttttctgtggtacccatcaaccaaccccagctcccctcatcctcccactaccctttcccagcttctggtaaccatccttctacttc

SEQ ID NO: 477866 - DNA, 497 bp, Homo sapiens
ggaacttctccaacctgacaaagtgtatctatggaaaatacaaagctatcattatacatagagataaagacttcattatagtgaaatcttttatttcactataataacaggaacaggacaaggctgtgcttgccacttcttttttgcatttttttcatttttaatttttgtgagtacatagaaggtatgtatatttatgaggtacatgggatattttgatacaggcatgcaatgtgaaataagcatattatgaagaatgggttatccatcccttcaagcatgtatcctttgagttataaataacccaattacagtcyttaagttatcttaaaatcacaactaagttattgctgactacagttaccctgttgtgccatcaaatattaggtcccactcatttcttccaactatttttctgtggtacccatcaaccaaccccagctcccctcatcctcccactaccctttcccagcttctggtaaccatccttctacttc

SEQ ID NO: 477867 - DNA, 553 bp, Homo sapiens
tcccacttcatttgccccttcacarcccaggacagtgagaactataattatcctccaagaggcagcatggcacggcagagccagaatgctggcttcaaagctcacgctacggctctactagctgtgtgatttgggcaacttattcaacctctctgtgtagataattatagtatccacctcatagggctgctgtgagaattagatgagttaattcatgagacccttagaacatgcttggcacagggtaagcactcaatacatgttagctgttattttataactgaggcataataatgaggtaaagagatttggccaaggtcaccagcaacaatacagcaaagtctacacccgtgcaacttcaggtttcctgggaaaaggaatcatctgggaaaggtagttaggacatgcagattcccaggccccgccccagatattctgattgggtgggtcaagtagacggtgccataggagggcaagaatctgcattcagaacaggctctgcccaggtgattccgatagagaggatcagcaggggacagcctggggaacccca

SEQ ID NO: 477868 - DNA, 619 bp, Homo sapiens
atacatctaattgttgtcatcaaatccacattttctctagtaggtcagggatatcatgagagtctttgcaaatgccctgctgaaagccagacccaccatttaacagactgaatggaattaaatgaaattccaggatctttcagcatcccgccttgtcctgtctccccttctyttcccatgctccatggaattacctaattcaagccatgccaatatgaaaaatggttctcatacccttcattcccaggttctgacatgtcctcattatctttttctggtagctgttaacataggagcccgagaagaactggccaagggctaaagagaaggggtcagccaacttcttctataaggggtagataaaatattttaggctttgaaaatcagagggtctctgtcatggtgtctagtctaccattctagcagaaaaggagccacagacaatatataaactagtgggtatggctgtgttccaataaaactttattgatggacactgaaatttgaattttatatcattttcacaggtcacaaaatagaaatccctttttgtgtttttttttcccctaaccatttaaaaatgtaaaaaaccattcttagctcacagaacctacaaaaa

SEQ ID NO: 477869 - DNA, 537 bp, Homo sapiens
tgttgatgtgggtaatactattatccgtattttaggaggaggaagctgaatrataggaagagcctgggctgggtttcaaacccagcctgcctatcctggagccacattctcagccaaatgtagagccctgcttttccctatcaaaaaagaatggattcccagggatctgtctttttctaaacatcagcatgactctgtttcatcttaattgcctggcacacagtaggtgatctataaatgtctaggaaagattaataaatgaatgtcatcaatgtcgatgaaaaagcaaatattgaaggaagaaaaaatttaaagatgggcactctgttctgaagcattatcagcaatttcatggtgtgtgttttttgtgtgtgtctcatacgcagacacttgcaggcacacacataccacacaagtctatgatctcaagtttgagaaagtgaatattaattacttctacaaaaaatattacaggcttttctatcccccaagatgtgcttcaaaactgtacccatgttgcaattcaaccttccttct

SEQ ID NO: 477870 - DNA, 131 bp, Homo sapiens
aaaaatgtttcacttttaaygaaacaggaaatgacgtgataatgttctttcacttttaatgaagaggaaatattttagattcacggttctggtggtaaacagaagggaggtggcaaagagagtggcaatag

SEQ ID NO: 477871 - DNA, 595 bp, Homo sapiens
ggtgggcctgacctaagttcatggactataaatctgcgtaagagaccaagaagtcagagattcaaagcacccttgttgggttggaataagggtagcttctaggagctaagagcagctcgctggctgacagaggtcaaagaaacagggatcttagaattctgccaacaacagcaaatgagcttggaagtggattctgtggtaatttgttgtgcagcaatacaaaaygtatacagtctctaactggtctccttgcctctggactgattctcttccagtataacatccaaaccgccaaggatcttttaaaactacaagcctcatcatattacttgtttacaaaccttctgtggggtagaaaaaaagagagattactcacgtgtgtactattctgtgtgagaagctacaagtgatatcaaataaaaaaataactgccagccagttatgatggctcatgcctgtaatcccagcactttgggaggccaaggtgggaggactgcttgagcccagagttgaagaccagcctgggcaacatagtgagactctgtctcttctaaaaatacaaaaaattagctggtgaatgcctgtggtaccaagt

SEQ ID NO: 477872 - DNA, 551 bp, Homo sapiens
cctgtggttgtaacatccaaggggcttggggtgggggcaggtaagtcaggaagagcaaattggtgaaaaaggagatgaacctctattatctttctttttttctcccttttttttaacttactttttttttttttttttttttttgagatggagtcttgctttgtcaccctggttggagcgcagtggagcaatctcagttcactgccacctctgcctcccgggttcaagcaattttcctgcctcagcctcccgggtagctgggcctacaggcatgtgcaccacgccaggctaagttttgtatcttcrgtagagatggggtttcaccatgttggccaggctcaagagagccacccaccttggcctcccaaagtgctgggattacaggcatgagctactgcacccagccaaacttccattatctttcctggaagatattttagataaatagacagatatgtgaaaataagtaattcagaacctaagctgttggaactaaataaatttgagccttaaaggaataattttgggcctgaggcacgtgacaggtagct

SEQ ID NO: 477873 - DNA, 473 bp, Homo sapiens
cttgtgaagcaaacaaatgttctgcctcaagtaagtaatgtctgacaagcactaaatagtaagaaatggtaaacaacaaaacaacaccaaacattttctagaagccaaaggaattgactgaaaggggttagcctaccttactgagatggatgtttataactaaagaaaagcttgtttttcagaaggtcaaatgggttcccaagtatctgaggagtaagcctaaaactcactcgaatcacgtctctcttctgcttcttagtgaacacagcacaacttcctaccgcatccacccaagaggaagaaaaccaaaagccagtaaatagaggaagaatttcagttgcgataaaagagaaactattagtttgmaaagggtgatttggcacgtatctgtggattttgcttatctctgctccctgagccataagcttgcatgttgcaaaggttactgtgctttacttgtggaatttgcggca

SEQ ID NO: 477874 - DNA, 574 bp, Homo sapiens
  misc_feature (1)...(574): n = A,T,C or G
nnnnnnnnnnnnnnnnnnnnnngaattccaggattcttgggttaaaaggtagtttgtgtggagccacatactctgctctcggacttcgtataggcaaatttgctgtagtgcagatttgtgtttggcatcttcatgaacccactgagtcccacgccattagtgtcctccttgtcacaaggtgagcatttctgctttttgtcaaataagccagagtggcttttcctttctcacttarggtgtggtctgcaaaccacacctgagtggttggtggcttttgtgggcagtacacggagtatagtggcctctccctctgggaaataattggaaataaaaacagaaagcagtagcagattcttggctctgctcttcagtcagaatgacatttaggtttggtttttcctgttttctgtcttttgctgaattttttgaaaattcatttactcaatgtgtacaactgctttgatgtgtacaatttgcagccattcaatactctgcttagtgttacccaaacaccttgataaagtagccattattaccctaccactccagcaatccctgacccccgacccaccgt

SEQ ID NO: 477875 - DNA, 480 bp, Homo sapiens
ttctccaatgcccctcttatggggccagaagtttcagactagcctgagcaacatagtgataaacctatccacaagcatctcatgattcctgccaggattaatccagaaggagccatgttctttgtcaacctggcagacaagataccaggggacagaatctgtccttctctacttttccttctgccctttctcgccccttcttccttcccccaactaccaattacccttaacttggattggtaaggaattgagaaaccatcccagatacaaatactactctggcaggaacttggttcatgtaaagcctctgcctgcaaaatcttgacaatagcaaacagagggcaagcaattccaggctagttaagtaggaaaaaaasccagcttttatttgctgtagataaacctaagcttttgcactgtaacctatatcaggtacctgaacctatgtgcaaaccctgcaccttgtcctctagctagaaa

SEQ ID NO: 477876 - DNA, 467 bp, Homo sapiens
acattgtctgcatttaggaggactaggctccctcaggacttgggtagctttcttggtctatcatagtccacatagccagtttcattagctaaagagggcatttgctctgtaataaatgtgcccataaaacaaagaatgaatttgcacatgcttagtttctcaaactgaaatgggctatctttaatggtttacaaaaaaagaaaagaaaaagaaaagagctggggacattcaaacacttgagcagtttacaatggtcttttctcaattacatttaatacttagtacaactttgcaaccagaatgcagacagattctgaagagtgctggattcgtatcaaaagagagtggcraattagttggggagaacagcctttaacttcatgtgcaaaggaagacttgaatgtggaggtagtgagggtcaacggtattcactaatcacttccctcacaaaaaaggctgctttcagt

SEQ ID NO: 477877 - DNA, 505 bp, Homo sapiens
ttttgaagttttcagagtttttgtgatcaacttagttgaccttcttcaatgactagaaaattacagtttggggacctcagtagcaactgagtggccacctgtgaaaagtttctcttaccttcttgcacctttaaatgatgtaacacagaccaagcatcttatatgttggtttggagttcatccactataaggcaccaatacaactacatctgaaagtaagaggctcttcctatgtgctttccaacctgattcagcagtgattcccttgagtactcwgaggtaccagaactttctcagagtgagggaaaataataaaaatgcagtatgccagccactcttggactttagcattaattccttacacatccttctttttttcccacttcacatcattcccccaaaaatctcctccttagtagggaaaaccattttccctgctgtagagaaaaaaagagaattcctttttgttagcataggaatctaccacaaaggaggagggaaacac

SEQ ID NO: 477878 - DNA, 588 bp, Homo sapiens
tgtgtttaagaggtcttatcattaaagcagcagcaggcatttataaaccaagcttgccggcagtgctgggcagacaggattagaataatcatccatcaggctctgtttcatgaatgttttcctttgacttttggcaggatctccaacstgagcatatgccagttgacatgggaacactgaggccagcaatttaaggatttcacatttgcttgcagtggtaagatttaaatatataacaacgaaggacagtaaatattactgggttctgcctttttccattagatgtgaaactgaagttgtttaggtatatcttttttgatcagtaaagatctctgctcgcaaaaccatagcaaacacaagagaaatccataatccataagtactgaacatagtgtttgttggtacgagtgaaaatagggaaactaataattagattttttaagtgtctgcatcattggactaagtggaggaaatggtttccattttgaacaatgaaactacgtgtattcagaagagatatgattatacagcacaaagagacacagagtttaagatcaatggggagaaagaaagggaaaatgactctgt

SEQ ID NO: 477879 - DNA, 642 bp, Homo sapiens
caatattttcctaagcagggcctccttgttgtgagaagaaagaaatgaggtccatggcgactcagtctacttagagaggggaaaaggctgcagaaagagaatcaaatggggttgaagtaagggtcctactttaaagtgttgcctacaagagcatcctcattgagaaagggacctgttctgcttgtagaagccactgaggtgaacatcttcttccaatgagaggactcggtcttcatctttgttctggaacagcccctgcctgtgcctcaagcagggggctgtggaaaatcctcttcatccttccaccctgttcagaactttctgggagtcatggtgctatgttcatccagaaycttgttctagcaaacaaatgtgaaaaatcatcatctcccccattcatagctactcttgtgatcatcaatgagaattgctaacatatttcaccatggcttacagactttgacaccctcctacgcacgttctgaagagactttgatgaagcaagaaatgtcctatacaggacatagtaaatgagcttgcttcctgtcttggtgacttcccaaaacccaggaacctggtgatttattgaggcataaaggaaaatattagcacatattctcatgttttattgaaatataagac

SEQ ID NO: 477880 - DNA, 642 bp, Homo sapiens
caatattttcctaagcagggcctccttgttgtgagaagaaagaaatgaggtccatggcgactcagtctacttagagaggggaaaaggctgcagaaagagaatcaaatggggttgaagtaagggtcctactttaaagtgttgcctacaagagcatcctcattgagaaagggacctgttctgcttgtagaagccactgaggtgaacatcttcttccaatgagaggactcggtcttcatctttgttctggaacagcccctgcctgtgcctcaagcagggggctgtggaaaatcctcttcatccttccaccctgttcagaactttctgggagtcatggtgctatgttcatccagaatcttgttctagcaaacaaatgtgaaaaatcatcatctcccccattcatagctactcttgtgatcatcaawgagaattgctaacatatttcaccatggcttacagactttgacaccctcctacgcacgttctgaagagactttgatgaagcaagaaatgtcctatacaggacatagtaaatgagcttgcttcctgtcttggtgacttcccaaaacccaggaacctggtgatttattgaggcataaaggaaaatattagcacatattctcatgttttattgaaatataagac

SEQ ID NO: 477881 - DNA, 642 bp, Homo sapiens
caatattttcctaagcagggcctccttgttgtgagaagaaagaaatgaggtccatggcgactcagtctacttagagaggggaaaaggctgcagaaagagaatcaaatggggttgaagtaagggtcctactttaaagtgttgcctacaagagcatcctcattgagaaagggacctgttctgcttgtagaagccactgaggtgaacatcttcttccaatgagaggactcggtcttcatctttgttctggaacagcccctgcctgtgcctcaagcagggggctgtggaaaatcctcttcatccttccaccctgttcagaactttctgggagtcatggtgctatgttcatccagaatcttgttctagcaaacaaatgtgaaaaatcatcatctcccccattcatagctactcttgtgatcatcaatgagaattgctaacatatktcaccatggcttacagactttgacaccctcctacgcacgttctgaagagactttgatgaagcaagaaatgtcctatacaggacatagtaaatgagcttgcttcctgtcttggtgacttcccaaaacccaggaacctggtgatttattgaggcataaaggaaaatattagcacatattctcatgttttattgaaatataagac

SEQ ID NO: 477882 - DNA, 532 bp, Homo sapiens
gcaaagctgttggctccctgcttatttaggactagagatggttaggtattctcctcaaggaaaatgtagtggaatagagattagtactgtaagattgcatgacaaatcagccagagtatatatatgtgaatatacattttgatgtatacatagaagtgggctactagtagcataaatattaatattataatataatttatagatacatgatacatatgtatcacagatacaaatcaatctgcctgtgttccctctcagatgatgggggccacttttttttcaagggagaagactgttattycccaatatccacccaaaggttaaatgtgtgccccataatttccccatttccattaatagttcactctgggtctttcatccatgaatttacctataccttttcagaagctattgaaatttgagaacgtgccacctcctgggggtaatgacagtgttttatgcatcactgggaagtgacagtgcaaaaggtatctgttaaggcctgccttggtttgtgctctcatggccacct

SEQ ID NO: 477883 - DNA, 532 bp, Homo sapiens
gcaaagctgttggctccctgcttatttaggactagagatggttaggtattctcctcaaggaaaatgtagtggaatagagattagtactgtaagattgcatgacaaatcagccagagtatatatatgtgaatatacattttgatgtatacatagaagtgggctactagtagcataaatattaatattataatataatttatagatacatgatacatatgtatcacagatacaaatcaatctgcctgtgttccctctcagatgatgggggccacttttttttcaagggagaagactgttattccccaatatccacccaaaggttaaatgtgtgccccataatttccccatttccattaatagttcactctgggtctttcatccatgaatttacctataccttttcagaagctattgaaatttgagaacrtgccacctcctgggggtaatgacagtgttttatgcatcactgggaagtgacagtgcaaaaggtatctgttaaggcctgccttggtttgtgctctcatggccacct

SEQ ID NO: 477884 - DNA, 539 bp, Homo sapiens
aggtcatggcctagtgtttacagtaacacacagcagtatgagaaactcgattttaggctcctgcttcctgtttagtgcttcttccgtcttcaaaatgcckcctctttctattttatgacaaagactggaaaaggaacaataaaggctgggaggtggggctttgtagacttgaaatacctctctagccaggtggtatattttgcattgctgaaaggcaacactgcaatgtagctacgccccgtatatttagagcaagctagcttcttctgaagcacacaacatgtttacctgtgaacctccacccccatcccaaaatcaatttttccggtacccaagcacctccaccaacccttgaagtaggagtctgcaaggtgaatttcctaacaagctgacttttcaaaggtttttcagctctcaaaaacatgaaagctgtgtttaaaaatttaagggtctgatatgtaccagttctgtggagcagcagcaggacgtagctttttgcagtgccatgattccccaaaccccaactctttaaattaaga

SEQ ID NO: 477885 - DNA, 541 bp, Homo sapiens
ctgttgtgcaggttttgattcacttccaaatgactgggaagaacaccaagatccttccccagagattcacaaacagaccacgagcagggtaatgctctctacagagatagggacttgatagaattgtggtgaatgacggggtggaaccaagtttctaaacctaaaatacacatacaccctgcgcccaaagtgaacacggtggatgacttgggcaaataatttagcttctctgggtcttagttttcttatatgcagaatgaggtagtcagtgacattttttttcttccagacaggttctcagtgtgttgcctgaactggagtgcagcggcaccatcatagctcgctgcagccttgacctcccaggctcaagccatcctctcacctcarcctccctagtagctggaactacaggcatgtggcaccatgcccagagaatttttactttttttgtagagatgggggtcttgccatgttgttcaggctgatcttgaatgcctggcctcaagcaatcctcctgcatcagcctctcaaagtgctggat

SEQ ID NO: 477886 - DNA, 618 bp, Homo sapiens
cagctgggacttcaggcatgcgccaccatggctagctaatgtttttggtattttttggcagagatggggtttcaccatgttggccaggctggtctcaaactcctgacctcaagtgatctgcccgcctcggcctcccaagagaaagtatcttgatggctactttcttttcttgagcttttatccagcaatcaccaatccagacaaactgcctaaagttctgtaatcagaggggagtagagaggctacaaatagtaatgatctatgatttcctaatttataatttaatcagtttttcatatgtcttcttcaaagtgttaataatattgatactctaaaaaattctttatggacccatggtattctatatatcaggaaataactggtcaccacctctctacttttaaatatttgtttaataccccattggatcctagggcttttacttttcatcttatctgagagtgggyctcatttcctccaaatttagaactgaatttctattgtgtccactttggcagattccctctcttctctaggtgattcaagacatgagtgaatgcatggggtttttccttcttccatcattacatagtgatacccttggtctatctatgcttc

SEQ ID NO: 477887 - DNA, 531 bp, Homo sapiens
ttaggaaacaaagcaaaacaaaatttcctcagccctggtgattatgaactgacgtaaaaggcatcatcatgatacatcatctgtgactatgggttgccatatttgtagccccaagatagtttgtccccaaattgttcaaatgcagctgaggtggctgctgacagtgcataaaactaaattcaatcctcaataataggaggagtcacaacttgtctttgtctccaaagaaagatgatcyattgaagaatgtgtgtcaatttttgtagtcatttcgttaccacgatcatgctttaactcgaagaaagcaccactgaatcctggagtgcactttacattatgaaacattacagtaagcagttgatgtccaacatgattgcaattagagcttagtgaagcacaagaagggacaatccatgtaggatgcattagtgtaactgtgtttgccaggaacaagttttaaccttttgtacagctgttgagggaaaggtgccagtattccctgtgagaatacctgtcaagtttgcatttgaa

SEQ ID NO: 477888 - DNA, 596 bp, Homo sapiens
ggaggcctactctcttttttcaaaaataaaaaaggtgattaaaaagtgttagtcaagcactaaaggcatattggcaggaagcaaaaacgttttcctcaaaatattgaaaattaaaacccaaaagattatccttttcctccgtctgaaattcagccgcacctccttaaaatcatcttggaaaacactggacctaatgacctcaacaccctttcaaaccatgagtttctagacccctgcattccttctctaaagtgaaatagccctagtttcttcaagcgttgctcaaaaggttccaagtcctctcatccatcatccccattactctccatggataagtgctgtttgcttccgtcacagcctgagcagcaccaaagaaaactgagctataactgagctggacctatccttccattagtgccacatcgcgcctgccttaaggctcacctgatgagagccacagyctcttgacccaaggggcatcgagacacatccgctccagcccatccctgatcagtcggggcttttggatggactgcatgacatttatacaaggaggcagtttggatcagtataaggaacaactttctgacaattaa

SEQ ID NO: 477889 - DNA, 395 bp, Homo sapiens
gactccatctcaaaaaaaaaaaaaaaaaatccaagaacagtagctcaaaaacagactcagattgtccctggggaagtccccaagcagaatctgccagggtggtgattccaactgccaaactttcaccagaagctacagaacaggccccccactctgaaatccatacttytctagcacaacacgcaaagacagaggaggaacaagccagggtgcacttcccggaggagcccgggagtcctgcagatttcatgcctaggctctgccccgggatggtccaatgcatcagatttcctgccataaataatttcattctcacgactgtcttgtgaagtaggtaagctgtttccattttgcaaatgatgaaaccgactctcaaagaggttaaataacttacc

SEQ ID NO: 477890 - DNA, 395 bp, Homo sapiens
gactccatctcaaaaaaaaaaaaaaaaaatccaagaacagtagctcaaaaacagactcagattgtccctggggaagtccccaagcagaatctgccagggtggtgattccaactgccaaactttcaccagaagctacagaacaggccccccactctgaaatccatacttttctagcacaacacgcaaagacagaggaggaacaagccagggtgcacttcccggaggagcccgggagtcctgcagatttcatgcctaggctctgcccygggatggtccaatgcatcagatttcctgccataaataatttcattctcacgactgtcttgtgaagtaggtaagctgtttccattttgcaaatgatgaaaccgactctcaaagaggttaaataacttacc

SEQ ID NO: 477891 - DNA, 395 bp, Homo sapiens
gactccatctcaaaaaaaaaaaaaaaaaatccaagaacagtagctcaaaaacagactcagattgtccctggggaagtccccaagcagaatctgccagggtggtgattccaactgccaaactttcaccagaagctacagaacaggccccccactctgaaatccatacttttctagcacaacacgcaaagacagaggaggaacaagccagggtgcacttcccggaggagcccgggagtcctgcagatttcatgcctaggctctgccccgggatggtccaatgcatcagatttcctgccataaataatttcattctcacgactgwcttgtgaagtaggtaagctgtttccattttgcaaatgatgaaaccgactctcaaagaggttaaataacttacc

SEQ ID NO: 477892 - DNA, 629 bp, Homo sapiens
aaaacagagcgagaatgatcatctatttactgtacaaccgctagtccgccactaagagaagtatgcaaacaagagcctccagaagatggctattccaccagtacatcaattaaccaaatagtgtaatgatacacacaatgtcactgacatgccagtacatcaatcagctacagagtataaaaccatgtgtggtccaaaaggaccctacaataatccccaagaatgctacgtggcacagtagctcatgtctatcagcccaactacttgggaggttgaggcaagaggatcacttgagcccaggagttcaaggytacagtgagccatgatcacaccactgcactccagccaggataataaagacctcatttttttaaaaaaaagtaaaataaaataaaaagatgctcccatgtgacagtcttacaatgcaggctagtgtctccaaagaagacttactgagctacacagaggaagctggacattaggaatcccacccagaaacatttgttaacccttacgaaatcactgattaagtttcaccagattcactgcttcaactttccaggtacccgtatttaggggggaaaaatccattcaccccaaatgaaatgattactggaccaaaattagtt

SEQ ID NO: 477893 - DNA, 631 bp, Homo sapiens
caccattactctctataattgtggtatctgctgtaatggatgtcacagggtcctctgaggtagagggtccaggtgcacctaggaggacttccttgaagaagggattttttttttttttttttttttttaaacagggctctgtcacctaggctggartgcagtggtgcaatcatagctctctgcagcctcaaactcctgggctcaggtgatcctcccacttcagcctcctgagtagctgggactataggtgcatgccactaatgcccagctaatttaatttaatggttttttttttggtagagatgggagatcttactatgttgcccaggctgatcttgaactcctggcctcaagcaatcctccgaccacggcctcctaagtagctaagaccacaggtgtgagccattgcatccggttaagaagggatttttaaagaatgatttagtattatttacatactataaaattcacctcttaaagttttgcagttcacagagttttataaccatcagtactatctaatttcagaacatttttatcaacccagaaagaaattctgtcccgctgagcagtcattttccaggacccccaccccaggccctggcaaccacaggtgtgctttgtgtgaaga

SEQ ID NO: 477894 - DNA, 456 bp, Homo sapiens
gtggaaacgtgtttttaacaatgggtttaatgttytaaacatttaaactttttcaaaagtgtatgcttttttgaaacatagactgtgacatccaggtcgggcaattgctcacaattgcacgtatgtgaggcatgctgagattcaggtgtgttttccaaaaatagaagaattgtgttttgtgtggcagaaggactgcaattttacacatagattaagaaatcactcataaatccaaatagttaatcaaacacctctctgaagaatctgagccacttagctttgcaaattcaagtgaaagctctgcagaaacacaagcggggaagccctcggttgttgtttctgggtttcattgttgggcgtgttgttttgattttgtcttttcctctggtaggaatggaacttttgttccgatatttcagacgtgtgaccaaaagtagtgctttccaaaggctgctt

SEQ ID NO: 477895 - DNA, 456 bp, Homo sapiens
gtggaaacgtgtttttaacaatgggtttaatgttttaaacatttaaactttttcaaaagtgtatgcttttttgaaacatagactgtgacatccaggtcgggcaattgctcacaattgcacgtatgtgaggcatgctgagattcaggtgtgwtttccaaaaatagaagaattgtgttttgtgtggcagaaggactgcaattttacacatagattaagaaatcactcataaatccaaatagttaatcaaacacctctctgaagaatctgagccacttagctttgcaaattcaagtgaaagctctgcagaaacacaagcggggaagccctcggttgttgtttctgggtttcattgttgggcgtgttgttttgattttgtcttttcctctggtaggaatggaacttttgttccgatatttcagacgtgtgaccaaaagtagtgctttccaaaggctgctt

SEQ ID NO: 477896 - DNA, 456 bp, Homo sapiens
gtggaaacgtgtttttaacaatgggtttaatgttttaaacatttaaactttttcaaaagtgtatgcttttttgaaacatagactgtgacatccaggtcgggcaattgctcacaattgcacgtatgtgaggcatgctgagattcaggtgtgttttccaaaaatagaagaattgtgttttgtgtggcagaaggactgcaattttacacatagattaagaaatcactcataaatccaaatagttaatcaaacacctctctgaagaatctgagccacttagctttgcaaattcaagtgaaagctctgcagaaacacaagcggggaagccctcggttgttgtttctgggtttcattgttgggcstgttgttttgattttgtcttttcctctggtaggaatggaacttttgttccgatatttcagacgtgtgaccaaaagtagtgctttccaaaggctgctt

SEQ ID NO: 477897 - DNA, 596 bp, Homo sapiens
ttcaagtgggctggacatggtggctcatgcctctaatcccagcactttgggaggtcgaggygggtggatcacttgaggtcaggagtttgagaccagcctggccaacatggtgaaaccgtctccactaaaaatacaaaaattagccgagcatggtgacaggcatctataaccccagctacttgggaggctgaggcaggagaatcgcttgaacccaggagggagaagttgcagtgagccgagatcatgccattgtgctctagcctgggtgacagagcaagactccatctcgaataaataaaaaatgaaaaagtaaaatattcaagtgaatatcatccccactggtcctgtatctttcagggatcctaatgacatatttaatggagctgaagggtcctttcacccttggaacaacccaaatgcttctgaacagttggaagctccaggtatggccctgcttctcctggtctcagtagatgttcagagaagctctttcagattctctagaacaaaattctgatcttgttaccacatataaaagcatcaagcttcaaaaagcacatgttgtctaaaacatttttctccttctgtatagactt

SEQ ID NO: 477898 - DNA, 596 bp, Homo sapiens
ttcaagtgggctggacatggtggctcatgcctctaatcccagcactttgggaggtcgaggcgggtggatcacttgaggtcaggagtttgagaccagcctggccaacatggtgaaaccgtctccactaaaaatacaaaaattagccgagcatgrtgacaggcatctataaccccagctacttgggaggctgaggcaggagaatcgcttgaacccaggagggagaagttgcagtgagccgagatcatgccattgtgctctagcctgggtgacagagcaagactccatctcgaataaataaaaaatgaaaaagtaaaatattcaagtgaatatcatccccactggtcctgtatctttcagggatcctaatgacatatttaatggagctgaagggtcctttcacccttggaacaacccaaatgcttctgaacagttggaagctccaggtatggccctgcttctcctggtctcagtagatgttcagagaagctctttcagattctctagaacaaaattctgatcttgttaccacatataaaagcatcaagcttcaaaaagcacatgttgtctaaaacatttttctccttctgtatagactt

SEQ ID NO: 477899 - DNA, 579 bp, Homo sapiens
ccaggcgtggtggctcatgcctgtaatcccagcactctgggaggctgaggcggatggatcacttgaggtcaggaatttgaaaccagcctggccaacagggtgaatgaaacactgcctctactaaaaataaaaaaaattagccagtcgtggtggtgcacgcctgtaatgccagctactagggaggctgaggtgtgaggatcacttgagatagcagtamttcgaaaccagcctggccaacatggtgaaaccccgtctcaactaaaaatacaaaaattagccggtcgtgtggcagttgcctgtaatttcggctactcaggaggctgaggtggaaggatcacttgaaccctggaggcagaggttgcaatgagccgagatcgcgccactgcactccagcctgagtgacagagtgagagtccatctcgaaaacaaaaacaaaaaaacaaattacacatgctgtgggactttttttggaggtatcacaatcccaagtttattccatttctttatttaagatgtatacatcttgaatgaacttgaacttgcaaatcaaaacacaaggcaaaataaagatatttaata

SEQ ID NO: 477900 - DNA, 680 bp, Homo sapiens
gtgaccttatttggacattgggtcttcacagaggccctcaaattaagacgaggtcactggggtaggccctcatccagcatgacagatgtccacwtaagaagaggaaatttggacgaaacacactgggagaacacctcgtgcagatgaagccaaggaataccaaagatcgccagcgaaacaccagcagcgggggagaggcctggggcagattctccctcacggcccaagaggcaccaaccctgctgacactgcctcatacctcccacctctggaactgagacagaggaaatgtctgtcctttaagtcccccagtctgtggtcctttgttaaggcattcccaggagaccacctcaaatgggactaaagtgtgcctgggcagggactcaccactggggctaggcctgcatggcctcaggcttgctgaatccagcctcacctgcccacaccagcatcttcccaggggcgggctctagggtaccggaccagatcaccttagggtgcctcctttcttcatagggtgcctcctttctcctgatatgtgttgaacacctccactggtcccagccctgtgctgggaattgcaggtgcgaggcccatcccttctcggggtcagggagagagggctttgtttgggcatgggtgctgggcatggcctggaggagaagggaggacaggcgcag

SEQ ID NO: 477901 - DNA, 624 bp, Homo sapiens
tctgccttacagagagctgttttctgccacatcaaaggctggggagaacccgggcatgtcaaaggtttgggagaacccagggcatggctgctttctctccctccttctgtcctgcctagccacacagtgatggagagaacctcgtgacagagccttgcccaggtgcacgtggggcggagttcatcacagcgctggctggtttgttgaaaaggaggcccggcggctgttcactgtcttgacaaacagccagagaggcaggggaaccctacactgtatacttttctcagtaataaaccaagctattcatgaataatgtccagagtgtgtyctcaaaacagcgtggccctcatggtgctcaatgccctgttagactccaagcaacccgaggacagggttttgtgtctctcttgctcacctttgcttctccaatgcccagtgggccttcagggcgcatttgctgagtgactccacattattccatattcacggtagaatctgttgcataaggtcaggataagtccgcacagttacttgcaacgtggctctttcaactgttagcaggttctggactccaaagcctacataatgttatgtgaggttgagaggaaaatcataagcatactt

SEQ ID NO: 477902 - DNA, 624 bp, Homo sapiens
tctgccttacagagagctgttttctgccacatcaaaggctggggagaacccgggcatgtcaaaggtttgggagaacccagggcatggctgctttctctccctccttctgtcctgcctagccacacagtgatggagagaacctcgtgacagagccttgcccaggtgcacgtggggcggagttcatcacagcgctggctggtttgttgaaaaggaggcccggcggctgttcactgtcttgacaaacagccagagaggcaggggaaccctacactgtatacttttctcagtaataaaccaagctattcatgaataatgtccagagtgtgtcctcaamacagcgtggccctcatggtgctcaatgccctgttagactccaagcaacccgaggacagggttttgtgtctctcttgctcacctttgcttctccaatgcccagtgggccttcagggcgcatttgctgagtgactccacattattccatattcacggtagaatctgttgcataaggtcaggataagtccgcacagttacttgcaacgtggctctttcaactgttagcaggttctggactccaaagcctacataatgttatgtgaggttgagaggaaaatcataagcatactt

SEQ ID NO: 477903 - DNA, 623 bp, Homo sapiens
tctgccttacagagagctgttttctgccacatcaaaggctggggagaacccgggcatgtcaaaggtttgggagaacccagggcatggctgctttctctccctccttctgtcctgcctagccacacagtgatggagagaacctcgtgacagagccttgcccaggtgcacgtggggcggagttcatcacagcgctggctggtttgttgaaaaggaggcccggcggctgttcactgtcttgacaaacagccagagaggcaggggaaccctacactgtatacttttctcagtaataaaccaagctattcatgaataatgtccagagtgtgtcctcaaaacagcgtggccctcatggtgctcaatgccctgttagactccaagcaacccgaggacagggttttgygtctctcttgctcacctttgcttctccaatgcccagtgggccttcagggcgcatttgctgagtgactccacattattccatattcacggtagaatctgttgcataaggtcaggataagtccgcacagttacttgcaacgtggctctttcaactgttagcaggttctggactccaaagcctacataatgttatgtgaggttgagaggaaaatcataagcatact

SEQ ID NO: 477904 - DNA, 568 bp, Homo sapiens
tgatttcagttcccgaggatgagattttaattttctttttcatcaagttttgaaatgatattggtccacttttcccaagagcacagagactaatatagatgcaaaagagagaacggggctgggtgtggcagctcacacctctaatcccagcactttgaaaggccaaggtgggaggatcacttgaggtcaatagttcaagaccagcctggacaacatagcaaaactctgtccctaaataaaaattttaaaactggccaggcacggttatgcacacctgtagtcccggctactcaggaggctgaggtaggacgatcccttgagtccgggaattcctggctgcagtgagacatgattacaccactgtactccagcttgrgcaaaagagtaagaccaagtttgtttcattgttagcaaaaaaccaaaagagaacaggtttaattttagtgttagcaaattatccaagatttgcttagaatagacttagtgagattttgggtagaatttgtgctattctaaaccaatactacaaccaagatgctaagacagtttagaggggttaagaagtttc

SEQ ID NO: 477905 - DNA, 524 bp, Homo sapiens
aaacatattttaaaatttgaagacaaataaaagggaactcaaagtaaattgggatacatacatacaacagaatactgagccattaaaaaatgatgaaatagtaaaattgggggaattttgatgatactaggatgatataatgaccaagagacaaatacaattttagtttggttgagagatgtgatcatcacgttgctgattttactatgtatagaggttatcttttcctttctaagattttgaaactttaattagttaacccacttacctagtttctattagctgtgtaactttctcttcctgttttttgttttgttttgttttgttttttgctttttaactgcagtattttgaggagtcttggagtagcaagctaatctttggaagaaaggaaaatataaacctgaaaactaacaatttaaagaacgtcttttcaggttrtcatttgaaaaatacttgatttctgatcactgatttgaattgagtgtcaaatatttgatatgttttgtaaattaggtgaagat

SEQ ID NO: 477906 - DNA, 587 bp, Homo sapiens
gaagatgagtgagtaggttctaaactgcttgggtttaccgcactctggagcattgcagaagaatgtgatgttggaaggaagtgctgaaacataattattggcttgcctataggagggtgctacataattttagaaggtgtcaagaaaktgacacagtctgaattagttctgttgagttgcaaaaaatgtaaagtttcttgattctgaaaataagaaatatgttcccagaaatctcatctagttaatgtgcttttaaaatcattgatgtctcttgttattacaataatagccattgaaagaatcttttttattagaatgttatttacaggtacgattagcttctatttaaataaattatttttatacttgatcttaggcaaaaggccaacaagtgatcagaataaattattttaagagaaaactaattataattgatatttggaattggaagcacaatttcctttagaacaattccacgaatggttgttttgattctcaaggcagcccacaaaagacagtttgaaacacaatttatgcagtgtcaatagtactgacctgactttggatcttggaggcaggggcttcag

SEQ ID NO: 477907 - DNA, 609 bp, Homo sapiens
gccaaaacagcatatcaaaatggattgaatgcagaagtagatctgagaatacagccacttttgttaagccagacaatgagatttgcaaaatgtaaacaatgctgctgttctcagttttwaaaaatatgttttttaaaagtatttatgttaatgtgtacttggtttactactgctatttttaaataaaacaagaaacatttttaaatgtctgttttaatttctaaagtggtagtgatagatataacccatattaataaaagctctttggggtcctcagtgatttttttttaagagtatggaagggttctcagacctaagagattgagaaatgctgatgtaatgttttattataaaggtgtaccatgaattatgtaccttacttcatattgttggacattaaagttgctttcagtttttttgttttaaacagcactgctttgaccttttttaaaaaatgagtcagggtcttgctgtgttgcccaggttggagtgcagtggctattcacagacatgatcatagcatgctatagccttgaattcctgggctcatgtgatacttctgcttcagcctcctgagtagctgggactataggcgtgcaccactatgcc

SEQ ID NO: 477908 - DNA, 640 bp, Homo sapiens
ttaggagaggctctgtggagaaggaggcatgtaggcactgaacaatgggtaaggtctccatagattatgacagtggtgtgggaggaatcatgaggacacgttcaaggaatggcccaaagtcattttgactggagcatgttcaaggggtcctggaagatcagatcagagatatattttagagctacattatgaaaaaccataggcaagattaaaatgaaatatcatatatcaggatcatttctaaagaaaggcagtgggaagggcatrggctttggattcagaaagccctgggttcaaattgtgtttccttctttttctgttgatagagtcttgagaaattactgagataaagtttgcttatctttaaaactggtgtaaaattgcctaccttgcatcttgctattatgtttggaaatgctggcaatttataaaatgccatacaaaatttgttatgtgatttagacattcttctctgaaactcccccctccagaaatttattactattctttacttgagaaggcagaactggcctgatttattgatttgaagatgaatcatatcagaaatcagcactttgcaaagatcacctaatggtgtccattaggaaactaaatttcttttgagtttttgcaatttcag

SEQ ID NO: 477909 - DNA, 534 bp, Homo sapiens
tgagttaatcgagttctaaagtggtcacttgatttgtcccaggtcacacaattttagtaattgggatggctcttttaatcagtttcaaacgaagttagtagatgattggtttttgttttaatggagtaggttcttcagtgggagcttggttggcatgccttgctttttatcaccaggtagctgggaggcagtgtggtgcagtggaaaaatgcttccttctgagtcagggaaacagagctgggacctgcttcctgccacttggtggcagcccttgggcaaattactagggacaggaatgggaataataatacatatcctaacgagtcagcatgggccttcaaagagatgcacagtgcttggcctacagtacatcttcggttactggtagctgccattattattagctgtatatttttattagtagtgctatattttattattagctgtgtatttctatacattattagtatatattagcagcattttttttgcttmttttttatctgaaatccatgtccctaatttctagttact

SEQ ID NO: 477910 - DNA, 628 bp, Homo sapiens
gacatagttttattatgaaacgtcactttttaaaagatataatgtttcacatattttaaatcgatttatttggagacaagtcttttgtcgtaggatcaagtatgcgtctaagaggaaaatagacggtaggtatatggaaagtgtgttttctgtggcttttctggttggcttacttgctctgtttgctctaaagactattaggaggaaartgataactaagaaaacagaaagtttgttcaaaatggtgtggaggaaaaaggaaggaaagaaaatttttatctgaagaatgagagcccctttaaattatcaggccccaaaaggcactgaatgaaacagcagtcacatcactcccccttgaactaaataattatctcttgaagccacttgccatgtgggctctagactaactgatgccaagtagccatcaaatgccatatgccagacactataacactatatcctgcagtcccacagtgcatggccaatcattaagcaatgttattctctgaaaaccagtgagaattcctgtcaaagaactttacatcagaccattccttgttccctttgcctttagaaacctgcttacaacaaaagctaacagagcactccccagtgcaactgggaagag

SEQ ID NO: 477911 - DNA, 628 bp, Homo sapiens
gacatagttttattatgaaacgtcactttttaaaagatataatgtttcacatattttaaatcgatttatttggagacaagtcttttgtcgtaggatcaagtatgcgtctaagaggaaaatagacggtaggtatatggaaagtgtgttttctgtggcttttctggttggcttacttgctctgtttgctctaaagactattaggaggaaagtgataactaagaaaacagaaagtttgttcaaaatggtgtggaggaaaaaggaaggaaagaaaatttttatctgaagaatgagagcccctttaaattatcaggccccaaaaggcactgaaygaaacagcagtcacatcactcccccttgaactaaataattatctcttgaagccacttgccatgtgggctctagactaactgatgccaagtagccatcaaatgccatatgccagacactataacactatatcctgcagtcccacagtgcatggccaatcattaagcaatgttattctctgaaaaccagtgagaattcctgtcaaagaactttacatcagaccattccttgttccctttgcctttagaaacctgcttacaacaaaagctaacagagcactccccagtgcaactgggaagag

SEQ ID NO: 477912 - DNA, 628 bp, Homo sapiens
gacatagttttattatgaaacgtcactttttaaaagatataatgtttcacatattttaaatcgatttatttggagacaagtcttttgtcgtaggatcaagtatgcgtctaagaggaaaatagacggtaggtatatggaaagtgtgttttctgtggcttttctggttggcttacttgctctgtttgctctaaagactattaggaggaaagtgataactaagaaaacagaaagtttgttcaaaatggtgtggaggaaaaaggaaggaaagaaaatttttatctgaagaatgagagcccctttaaattatcaggccccaaaaggcactgaatraaacagcagtcacatcactcccccttgaactaaataattatctcttgaagccacttgccatgtgggctctagactaactgatgccaagtagccatcaaatgccatatgccagacactataacactatatcctgcagtcccacagtgcatggccaatcattaagcaatgttattctctgaaaaccagtgagaattcctgtcaaagaactttacatcagaccattccttgttccctttgcctttagaaacctgcttacaacaaaagctaacagagcactccccagtgcaactgggaagag

SEQ ID NO: 477913 - DNA, 616 bp, Homo sapiens
gagagcttttggcttccacagactgcagattggaaggatgggaygtgtcacaacactgagatttcatggttgatgtccagcttctactgatctttagttaatcaccaacccctgctaattcttcctctcctacagtcttcaaatttgacactttcacgcagtcctttctttaacatcactactagtgaagcaggatatttccctgaccccttcgagggacttgtgacaggtgtgcttcatttactcagcctaccactctcaactcttcatgagagggagcacatgatcaaacgagtgtggcaactggagtagatgagtgctggaatcagctcctttggcactggtgggatcacactccactcactcagacctgctgcattccagcccttgtaggagggagcagacaggtgagaaggtgcaggaactggctggatgctttagcgccagcaggagcaaactccatgcaggccccacagcagcatccaggcaggggtgtctgcaacccccaaagccccagagggagtgttacagagctcttttagctctgccatctttggatggcttaagtgttaacagctcagttaacagctcaggccctttgccttttcatgtgagg

SEQ ID NO: 477914 - DNA, 683 bp, Homo sapiens
cagagtgggctgagtcatggtggccaagagaccaaccttcttcaacccaaatatgttagaggcaagtgtctgttgcctgaaagggagaagctggatcctgcatggacaggagctacccagaggctagacgctgaggttacttctagctaaatagataaatgtgaccctgtaggcaaccaagggctaggggccagggaggatgtggcaaaggagtgcctactataagtaagatcataggagcattctgccatggttgtgggataagaagggacagtcacaggtagagacatagtatggtaaaaagaatgataaatatctcattagtaatttcaatattttgattacatgttgacatggtttggctgtgcccccgcccaaatctcagcttgaattatatcacccagaattcccatgtgtcatgggagggatccagggggaggtaattgaatcatggggactggtctttcctgtgctattctcacgatacttaataagtctcaygagatctgatgggtttatcaggggtttccacttttgcttcttcttcattctcttttgctgcagccatgtaaaaagtgccttttgccctccaccatggttgtgagacatttcccagccacatggaactgtaagtccaattaaaaccttttcttttgtaaattgcccagtcttggatatgtttt

SEQ ID NO: 477915 - DNA, 600 bp, Homo sapiens
ctttgattctgagagctcagttgtggtgcagaagctagaagacacaaggatctctttaataaacgttatcagaaagaattgatatgtaggtactaggaggaactgtaagcctagaaatactgttcagaatatgaagggggtgatactacctacagcctcttggttagcatttattaaggacatctatgtgccaagcccactgragggctcaacatactttaaccttcacagtaatcctgagaggtaagtagtaatacccccatttatactagagaaaattaaaacagataattttcagtggatgtaataactttcaatggggatcattttaatggagcaagacaaaaatgtcaggcctttttgttttatcacagagatttccccatgaagactgaacagactcatcagagaaaaatgaaattgtggtgaggaactgcaaataaatgtgatcatatttgtgaaacaacacagaaaaattagagaactgaataacaaaacttccagtttgactagttatattcccattaaatctagaaatgagaaaattattctgacagtctcccattaaattagatggtacacaaacagaagaacatccaa

SEQ ID NO: 477916 - DNA, 603 bp, Homo sapiens
gctaaccacgtttcacttggatcgttaaggcaatgtcttaagatgtttccttacctttctagtagctttccagtccttcttcctcactatagccaaattatgattgcatcactctcccctataaaaccatgggcaggctccttaccatggtgtccaaggcctctgccattgttctggtttaacctcttgacacaccatcttgtgtgctttattttccagctatgctgaagtacttgtaggtttataattaagacaagatctacctgtacttgggacattcgcagatgcagctccttctgcctaatagatacaccccacatgcactttagcctargtcaaacgtcctcattttttacttcttagctttagccataagtttttgcccagtttgtaaataatagagctgagagtcacattccattctggctaaatccagggaatccaagttgtcatcactatagtataaccctttctgttaacaggtaactgctatcaaattgacagtctgagttgtcctcaatgtattttcatgtttttttttgtttccttggcattttgtttttaaggaataatttgttactttagtcaaatgctcagcctcag

SEQ ID NO: 477917 - DNA, 625 bp, Homo sapiens
agtggctcaaataagtcataacattctaggatttggccctctactttgaaggcccagaagcttagtcttttaacttaattattcccaagagaatggctcaagaagctaagtaaacttcacatagaacagaggtggcrtgatgaaggttaagaacacgggtttgcagtcactcttggattctaatacagccttcgccactaaccatttggatgaccttgggcacattccttagctctgaatattagttttctcttctgaaaaacaaaggtaatgtatcttcctcacaaagctgtttgctaggatttaataaaatattgtgtctctaccttagtgctgcctggcatatagtgtattctcaaaggagaacggcatattacaacaaggagaattatcatatggaccaattactcatgtcagtgtgaccaagatatgctacccttatagtcaagctccatgaaaacctgaattctgatcagaagctacttgatggacatcatggaaaccagagcaggaagaaggaattcagcctggatgaacagggggaccaggaaggattttgttatttattcattcactcttaaaaataaacattagttaggcaactactatgtccaaacagtgtgct

SEQ ID NO: 477918 - DNA, 332 bp, Homo sapiens
acaatggaaaagggcaaatgaatgttaacatttaattaaagccacaggatgagaatgccaaagtgcaggtcagtggtagaaagaatgtgtgttagtgccttacagaggcaggctggctgagcacagaggcagaacctgaatgcagatggttggattagcagctctctcgatgtcacggatgttatakttgtttctgttcaggtgatagcacaaagaggccatttgtacagtgattaaccatagggctttgaagcccaatctagcgggatttgagaagctgccctcagagtggttaggagcatggactgggagacagaccgcctggcttcaaa

SEQ ID NO: 477919 - DNA, 537 bp, Homo sapiens
ttaccagattctcctcttcggcctctcttacctcgtttccctggagggcctgaaatacaaaggataatttttttagtgtagtttaattcttyttcctggttccaaaatagctagtaaataatttatatatattttctcattgtttttaactaccaacttcaagaaagggatcagatatttgtaaaggtcagtattgtctttagtgtttcagcaaaactcttaaggttcatttaattataaaagctactctagatacatgatcatctagtgttacttaagaaaactgatgattcggaatttttgttcatcctgctttaatatcatcaataaagaaaaggtttgctaagaaaattggtagttgagttttatatttctaagaaatatttcttttcagtatatgaataattaaagtactaattaataatttaaaagtactaagtccaaatgatttacagtttcttttcagtcaggtccatcataattttctgaaaatgtttagttagcagttagttaaatgtatatattagtaatggaaaa

SEQ ID NO: 477920 - DNA, 541 bp, Homo sapiens
gacttaccagattctcctcttcggcctctcttacctcgtttccctggagggcctgaaatacaaaggataatttttttagtgtagtttaattctttttcctggttccaaaatagctagtaaataatttatawatattttctcattgtttttaactaccaacttcaagaaagggatcagatatttgtaaaggtcagtattgtctttagtgtttcagcaaaactcttaaggttcatttaattataaaagctactctagatacatgatcatctagtgttacttaagaaaactgatgattcggaatttttgttcatcctgctttaatatcatcaataaagaaaaggtttgctaagaaaattggtagttgagttttatatttctaagaaatatttcttttcagtatatgaataattaaagtactaattaataatttaaaagtactaagtccaaatgatttacagtttcttttcagtcaggtccatcataattttctgaaaatgtttagttagcagttagttaaatgtatatattagtaatggaaaat

SEQ ID NO: 477921 - DNA, 611 bp, Homo sapiens
ctgtgtgaattgagctgactttcaactaatctctttgattttaatctgctatctggtaaataatactcactccgccccatttgtatgattattgtgaggatgaaactgtaaagtgctattacattatactaaacaagtgtttccttcatttttcattcatgtgttgaagcttataarccatttccgtgctatattactgtcatattcatcaataagaatagtaagctttttaaacatagtaagaattctaaaatagtaagattttgacacattctaataaaaagctgaaacttagaagtttcatccccagaagcatagggaactttaagtacattagataagaaaaatcataaaatacctcaaacagtagaaaatattccaaaaaatactcttattcagagttttggaggcagaaaatggagacgtcacagcaaagtaaagggcagaaaaccgaacttgtggtctgggagggacagagtgaggacgaagctgtttgcagatggagcagccctcttgatggacgcacactggggtagggaagtctggaggacaaatgtgtgcaaacccaagacactcctccaccccaaacgatccctgaacaggtcgccaac

SEQ ID NO: 477922 - DNA, 515 bp, Homo sapiens
aattttttttctccccaagatttccatttgttttcagtgtccagacagatttccagctggacagctgaatgctctcattgttctattgaagaatattctacactatttaccattaatcaatccastttaactgtgtagcatagtgtttagtattaactgaaaattttttatagccatttgagcaatccttctgaattgagtcatacattcgtttattcaacaacaaaaaatgttgtcattttatgggctaggtactgtgctaagtcctgagatgaaaagctgaaaaataacacatcgcccttatccatgtgaggatttcagtatgtacacagagatatacaaacacctataataagagctagaataaattcaagctcagatagctaaaaagtgcacacaataaaaggagctaattctggcttataggaggcagcagctgagaaaattgaatctcttcactgcaaaacttaagaaaaaaaaatctatccatttagagtagttttccagcattctgg

SEQ ID NO: 477923 - DNA, 515 bp, Homo sapiens
aattttttttctccccaagatttccatttgttttcagtgtccagacagatttccagctggacagctgaatgctctcattgttctattgaagaatattctacactatttaccattaatcaatccactttaactgtgtagcatagtgtttagtattaactgaaaattttttatagccatttgagcaatccttctgaattgagtcatacattcgtttattcaacaacaaaaaatgttgtcattttatgggctaggtactgtgctaagtcctgagatgaaaagctgaaaaataacacatcgcccttatccakgtgaggatttcagtatgtacacagagatatacaaacacctataataagagctagaataaattcaagctcagatagctaaaaagtgcacacaataaaaggagctaattctggcttataggaggcagcagctgagaaaattgaatctcttcactgcaaaacttaagaaaaaaaaatctatccatttagagtagttttccagcattctgg

SEQ ID NO: 477924 - DNA, 516 bp, Homo sapiens
cacaaagtgggtatcaataaatgaatggtagatgctgtcatcgttattattgctggtatatcatcatttttattccttccccaaaacatgtaatatttgtaatattttgcataaatggaatttttttaatttttgcattacttaatgatttgactggaatacatacttaattcttaggtggatgagtgaatgaatgagtaggacctcgagaaatgagcaaattctcatattatagtttgtcccatagagagtagtggagaataatcaagtctcttttcctccattatacatctacagcacaaaccatgtactctttttcagggtataaaaaaatctcattatgtaattttactatgtattattgcagagaactctcacattacctaaacatgagaagcgttttgcacatkcagactcttaaattttatcttctgaatttagtatcactttttaaggacaatctgaaatagtatgagtttgttactagtaatgcatacctcagaattcttttaggcc

SEQ ID NO: 477925 - DNA, 627 bp, Homo sapiens
cattttaattattctcaatcaggtatgatagccagcagatgacttgcacattttttgctatgaattcacagaatattcaagtaaaatttctctttgcacttttacctcaattttttttgctaactcatgagtagaagctaaaagatgaaatcttcccagaaatactcatgtctttataagtgatacacataattttaaaaagtcrtaaatatgcaaaaatgtcctcaacatcattagattttagggaaatgcaaagtaaaatcattgtaatattacataccaataaagtaactaaaataataagattgataatatacaatctagatttattgtggagaacctgaaactctcaattctgctgataggaatgtaaaatgataaaaaccactttagaacatagtttagcactctcttagagattaaacatataatgaccttataacctagaaatttccctcttaggacaattttttaatgcacttttgtagaaagacatatagaaaaagtataaaagatggtttattgtttaaggatagggagtggtaatcaactggaaaatagcaagaaaagacattttggggatgatggaaatatcttttatgttgattggttttctaagagttacac

SEQ ID NO: 477926 - DNA, 558 bp, Homo sapiens
tagtcagctgctgggacatgcagggcctggctgagtgtagtctggaacactcaaatctgctccagttgacctctcatcctccagcatactatctcattttaagctcatacttgttcttagctttccaatagcatcaagacccagcatacagctcttgtcaccctctgcttgtgttatatttgctgatgtcccattgaccaaaggaagtcccatgacctgcacagattcagtgtgtaggaaacaaccaaaaggcttggataaaaaggaatgatttgtggtcatttttgcaattacaacatgtccctaaagttcaaactaattgagttttataaccttagcatccacagtaacctatcattttgttctgtttctaagaaggaagctaatgttcttcttttagactggcctataaatgagtgacgcatatcctttgtccttctatctgtttgaaaactttctttttcaagtctccactccttcctttttgttgttgttagtttttaaaataytgtatccacaatcaaatccaactcctgtaaaaattaatagtagtattgt

SEQ ID NO: 477927 - DNA, 349 bp, Homo sapiens
atttattaggtaacagagtaatgcagacaccataaaataaaraagtatgccctccccctcaatcttttcaagaaatgtgtagaattagaatgatttcactcttagttatttggcaaatattgttttcaatattaatcagctgagtcttgagggagtttttgtttctatatttgttgaagggttttaactgtaaatttattttctttaataatttaaagccctattcaaattatttatttcttcttgagtgagaatttttagttcatatattttaagtaatatggccattttatatcggttattgaatttgttcacctaaatttgttcataatattttcttcttatcctt

SEQ ID NO: 477928 - DNA, 349 bp, Homo sapiens
atttattaggtaacagagtaatgcagacaccataaaataaaaaagtatgccctccccctcaatcttttcaagaaatgtgtagaattagaatgatttcactcttagttatttggcaaatattgttttcaatatyaatcagctgagtcttgagggagtttttgtttctatatttgttgaagggttttaactgtaaatttattttctttaataatttaaagccctattcaaattatttatttcttcttgagtgagaatttttagttcatatattttaagtaatatggccattttatatcggttattgaatttgttcacctaaatttgttcataatattttcttcttatcctt

SEQ ID NO: 477929 - DNA, 585 bp, Homo sapiens
gctgagctcaagcagcctggccccagagcctgggtgcttaaccactatactatactgcctctcggtgaagtgcacgtacctcctacagaggtcacatgtcttccaacctggggttttgggtaaacaytggacaacatagaggtcacgattttaatccttggtaagaacttggaggacagctattctgagttgccaaggagttggcagatatacaacttcaatagtcagtggggaagggaggacagcatacgggttaagagcaggaattggtactcatcctgagttgaatctagctttgctgcttaccagcattgtgatctaatctgtgggagttttattttctgcagctataaggtgggggatagtaatctccagcttgcaaggttttataaggtttaaataaaatgatttctacagaggatggacttcctgctgagagaccacaacttagaatggattgtctctagcctcggtatgagtgtggggaggcctggtggtgagtctctgtatagctgggtatcaaggcacagtgcctgatttggaaagtagaattaaaagcagatgctgctgggtgtggtgactcac

SEQ ID NO: 477930 - DNA, 602 bp, Homo sapiens
gtagcatctctccaccctggatgacagtgttgagaagtagggcttaccatttwggagaagttgttgctaaagaacccactcaaaaagaatgggtatcaaacatcctgcactcaggttgtgttggaaccacgcccttgaaggcaacacaatgtaccaatgattggacttcctagaagtacattccctctgcgtttccatgtttggcttatcacagaccagttcatcaaggacttgacattcactctgtttgtttctgggagaccatttaagtactctgtgtgtgtgtgtgtgtatgtgtgtgtgtgtgtgtgtgtattaagggccagtgctatgcaaactgcaaactgtatgaaaatgttttttttcttatggatgagaagagactataatatctcaaggcctctggcacaggaattctttagagcaggataaacaaatcattattctcatgccactgatggcagtgaagcagtttctctactttctttccatttgcacttctttcttttctctccttctcttttctttacttttctcctattcttagtctccttctgccttctcttccttcttttgtgggtgtgccttatgtttgctctggg

SEQ ID NO: 477931 - DNA, 602 bp, Homo sapiens
gtagcatctctccaccctggatgacagtgttgagaagtagggcttaccatttaggagaagttgttgctaaagaacccactcaaaaagaatgggtatcaaacatcctgcactcaggttgtgttggaaccacgcccttgaaggcaacacaatgtaccaatgattggacttcctagaagtacattccctctgcgtttccatgtttggcttatcacagaccagttcatcaaggacttgacattcactctgtttgtttctgggagaccatttaagtactctgtgtgtgtgtgtgtgtrtgtgtgtgtgtgtgtgtgtgtattaagggccagtgctatgcaaactgcaaactgtatgaaaatgttttttttcttatggatgagaagagactataatatctcaaggcctctggcacaggaattctttagagcaggataaacaaatcattattctcatgccactgatggcagtgaagcagtttctctactttctttccatttgcacttctttcttttctctccttctcttttctttacttttctcctattcttagtctccttctgccttctcttccttcttttgtgggtgtgccttatgtttgctctggg

SEQ ID NO: 477932 - DNA, 507 bp, Homo sapiens
ggaggccgaggtgggagagttgcttaggccaggagtttgagagcagcctaagaaacaaagcaaaaccccatctctacaaacaaacaaagaaaacagccaggcatggtggtgcacctgtagtcccaggtacttgggaggctgaggtgtgaggatcacttaagcccaggaggtagaggctgcagggtgctaggattatgcctctgcactccagcctgggcaacagagtgggaccctgtctaaaaaacaaaattttgtttaaatatctaggctttagaatctccatttgttaataataatataacaatgaccaattacggcctttactcttgaatggccactatgggtcaggcactgtcccaggagctggaggaatagtggtaagcaagctgacaaccacgctcatatcctggagctygtatccacggatcatcagacaggcaatacttcccctgttttagagctgaggccactaagatttagagccctgaagtgatggcaggtgaagca

SEQ ID NO: 477933 - DNA, 630 bp, Homo sapiens
tgtaggctggatgtgaatgccagggcagcattggaagccacttgttgtagatggcagagacttgctcattttgggagctgtgtgactacatggagcagagaggtcctttccatccatcccatgctcagtttgttagactttatgcaacaagaagggaacatttactgtgttaagccttttggactttggggggttgtctgttacagcagcttgcattacattaactacaccttgctctagtgcatcgttagatgatcaacccttggtgatgattggatacctgtgttcatttatagtttgcctttggagccaaaccaagttggtgatttcattttctttttccatggaggcctagcttagtgttttgaaaataagtttttttagttctgttttcattttaatttgcatttttattttctcaccattgttgaaaaaaatacgctccatagtacatcctgctttccaacmacccgccccgagtccacgccagtgatatctaccaaaagacacttcataaatactgctgagctgattgctgatttcactttaagaaattatgttttctcactttgggaggtcctctacttaatttacaactgagacatgccaagtgttagtggaaatccccag

SEQ ID NO: 477934 - DNA, 576 bp, Homo sapiens
ttttaactatcaaaaaacttcttggacaccctccctcaatctcaccacctcattcatttgcttaacaaatatttactgagcacttactatgtatgagtcatgtgtctaaaggttgggtatataatttatgagaaaaacagaagcagttcttgccctcatgaaggttatagtctagtgggagagacaaacatgaaacaaacagtcatgcacayagaaatacaatcataaattgcgttaagtactctgaagggaagcagggatctatggaagcctgattaggagctgagggagcagagaaaagacttagggctcttttatgtttgtttgtttgattttctttctttctttttcttttttaaatgatagggtctcactctgtcacccagactggagtgcagtggcacgaatgtaactcattgcagccttgaaatcctgggctgaagtgattcttctgcctcagcctcccaagtaggtgggactgcaggcatacatatggctgtatttttaatgttcttttagaaaccacataaagtgttactgtcaattgagtaatgctttaacattatttgtatatta

SEQ ID NO: 477935 - DNA, 576 bp, Homo sapiens
ttttaactatcaaaaaacttcttggacaccctccctcaatctcaccacctcattcatttgcttaacaaatatttactgagcacttactatgtatgagtcatgtgtctaaaggttgggtatataatttatgagaaaaacagaagcagttcttgccctcatgaaggttatagtctagtgggagagacaaacatgaaacaaacagtcatgcacacagaartacaatcataaattgcgttaagtactctgaagggaagcagggatctatggaagcctgattaggagctgagggagcagagaaaagacttagggctcttttatgtttgtttgtttgattttctttctttctttttcttttttaaatgatagggtctcactctgtcacccagactggagtgcagtggcacgaatgtaactcattgcagccttgaaatcctgggctgaagtgattcttctgcctcagcctcccaagtaggtgggactgcaggcatacatatggctgtatttttaatgttcttttagaaaccacataaagtgttactgtcaattgagtaatgctttaacattatttgtatatta

SEQ ID NO: 477936 - DNA, 625 bp, Homo sapiens
gctagcagaattaaaggtaaacttgaggagttagggatcatcacggtgatgggaagaaggactagaatgcagctctacacagagcagcacacggagtcttgcgttgtgaattttaggtccagattgactgcaagaacaaatcagcaatcctgagaggacccacaggccctctgaaggaagcagactactcctgcaggacctgggagatacccygaatactgtgagtgccccacctgtggaagtgggaaagggagaccatcccctcctgaacacacaccctcactggagaaactgaagttctgtttgtgggagaagtttccaattttacctacagttgagtcaacttagagaaccaagcgaaatacaggggtagaagaagctgcagaaaggccctgggagctcactgggtcccctagcaggccattcctgcctggcaccacagggatccatcaggagggtggccagaggagcaggggggtaaaactacacagggagaaggacttctctagctgaactctgaaaccatttgaacggggcaagaagcctgctggtcagaactcaggggagggctcaaattcactttgaagactctataggtgggggaagtaacaagacctttcttttg

SEQ ID NO: 477937 - DNA, 625 bp, Homo sapiens
gctagcagaattaaaggtaaacttgaggagttagggatcatcacggtgatgggaagaaggactagaatgcagctctacacagagcagcacacggagtcttgcgttgtgaattttaggtccagattgactgcaagaacaaatcagcaatcctgagaggacccacaggccctctgaaggaagcagactactcctgcaggacctgggagataccctgaatactgtgagtgccccacctgtggaagtgggaaagggagaccatcccctcctgaacacacaccctcactggagaaactgaagttctgtttgtgggagaagtttccaattttacctacagttgagtcaacttagagaaccaagcgaaatacaggggtagaagaagctgcagaaaggccctgggagctcactgggtcccctagcaggccattcctgcctggcaccacagggatccatcaggagggtggccagaggagcaggggggtaaaactacacagggagaaggacttctctagctgaactctgaaacmatttgaacggggcaagaagcctgctggtcagaactcaggggagggctcaaattcactttgaagactctataggtgggggaagtaacaagacctttcttttg

SEQ ID NO: 477938 - DNA, 554 bp, Homo sapiens
gtgctttaacaattttgtcttgtaagtgcattttgaaaagtattcacatacatatatgcatatatatacayatatatttttttttccaaaaaggctaacccatttaagagcctgtagtttagtagagatagcagccaagtatgtgctccttagttgaagaccatcaagacatttaggaactaattctcttgcactttcatgggactctttctgcctcagtttctactgaagaggcatgaataacaaagaagcaagagacagactctccctcccctacccatcactctgctctctgccccattgccagatgtgcaatgaaatgtataaaggggaacttgttcggtaattcttgaccccatcacccatcttgaggcaataaaaatggaaaagaaggggaagaagatggggtaattggtaaagaaattgtcaatgaacagagcgatgtcatgctgaatcctgctcctctagtgaaaggggtggagaaaggcacctcccaatcccaggcctgtgagggggttgctgcaggggaatccccaacaagattttgaaatatg

SEQ ID NO: 477939 - DNA, 554 bp, Homo sapiens
gtgctttaacaattttgtcttgtaagtgcattttgaaaagtattcacatacatatatgcatatatatacatatatatttttttttccaaaaaggctaacccatttaagagcctgtagtttagtagagatagcagccaagtatgtgctccttagttgaagaccatcaagacatttaggaactaattctcttgcactttcatgggactctttctgcctcagtttctactgaagaggcatgaataacaaagaagcaagagacagactctccctcccctacccatcactctgctctctgccccattgccagatgtgcaatgaaatgtataaaggggaacttgttcggtaattcttgaccccatcacccatcttgaggcaataaaaatggaaaagaaggggaagaagatggggtaattggtaaagaaattgtcaatgaacagagcgatgtcatgctgaatcctgctcctctagtraaaggggtggagaaaggcacctcccaatcccaggcctgtgagggggttgctgcaggggaatccccaacaagattttgaaatatg

SEQ ID NO: 477940 - DNA, 579 bp, Homo sapiens
actttagatttttacttctatcttgatgctaatacacataatttaatatttttatgaaaactaccatcaaacagaacagcatttagtgactgyctatgtatgagatgggggaaaatacccagaaggtattttagtattcagggccactgtgcacaggggtttagtgtctcttgcagatatggccatctaaagggatgccattcacatccacgtcctacagcaacaaggaaagcagcctcttgtccgtggtccagactagttcatacagtcacacgcacactcggggctccagtgtgtgtgtgtgtgtgtacacacatgcgagcatgcgcaggtgagtgggtgtggttgtgccctatcccagtcctgctgagcaccccttgtagttgctcccctcacctgccctccagtctgagaggctccagatccatgaccctatgtgcctcaggtaccacagggaagcggacatggagagtgtgcaatgctgtgatgtgtgagccctggtgtcagtgtgtgggcaggcaggagcatgggcacacagagccaggtgggctgtctgccctgctggctctaggaaaggca

SEQ ID NO: 477941 - DNA, 579 bp, Homo sapiens
actttagatttttacttctatcttgatgctaatacacataatttaatatttttatgaaaactaccatcaaacagaacagcatttagtgactgtctatgtatgagatgggggaaaatacccagaaggtattttagtattcagggccactgtgcacagsggtttagtgtctcttgcagatatggccatctaaagggatgccattcacatccacgtcctacagcaacaaggaaagcagcctcttgtccgtggtccagactagttcatacagtcacacgcacactcggggctccagtgtgtgtgtgtgtgtgtacacacatgcgagcatgcgcaggtgagtgggtgtggttgtgccctatcccagtcctgctgagcaccccttgtagttgctcccctcacctgccctccagtctgagaggctccagatccatgaccctatgtgcctcaggtaccacagggaagcggacatggagagtgtgcaatgctgtgatgtgtgagccctggtgtcagtgtgtgggcaggcaggagcatgggcacacagagccaggtgggctgtctgccctgctggctctaggaaaggca

SEQ ID NO: 477942 - DNA, 579 bp, Homo sapiens
actttagatttttacttctatcttgatgctaatacacataatttaatatttttatgaaaactaccatcaaacagaacagcatttagtgactgtctatgtatgagatgggggaaaatacccagaaggtattttagtattcagggccactgtgcacaggggtttagtgtctcttgcagatatggccatctaaagggatgccattcacatccacgtcctacagcaacaaggaaagcagcctcttgtccgtggtccagactagttcatacagtcacacgcacactcggggctccrgtgtgtgtgtgtgtgtgtacacacatgcgagcatgcgcaggtgagtgggtgtggttgtgccctatcccagtcctgctgagcaccccttgtagttgctcccctcacctgccctccagtctgagaggctccagatccatgaccctatgtgcctcaggtaccacagggaagcggacatggagagtgtgcaatgctgtgatgtgtgagccctggtgtcagtgtgtgggcaggcaggagcatgggcacacagagccaggtgggctgtctgccctgctggctctaggaaaggca

SEQ ID NO: 477943 - DNA, 592 bp, Homo sapiens
caaatccaacacttaaaagacaaagctctacgaatattcttggttttgacccttaatcccagctactcaggaggctaaggcaggagaatcgcttgaactcggaaggtggaggttgcagtgagccaagattgcgccactgcactccagcctgtgtgtgtatatatacacacacatatatgtgtgtataaaaagatactagctgcatatgcaaggatagtgaataattatctcaatttattaagtgaaaaaagcaaagtctagaagtatgctatatttatgtaaaaagaaaataaaagagtccatacagagtgcttgacaatgcatagacaacagtacaaaaatagtcactagtcacagattaggatagaggaatgagagggagacatacctttcactgtatatacttttgaattccatatcatactcatgtatgacctatccaaaaattactttaaatgtattagctggtggcccaatgctttcacagactccagataaatttgcacactgacttcaatttaggatgccccaataaataacgttctctgaatatcctttaastgaaattgcttcagttaggtaacgcaaaata

SEQ ID NO: 477944 - DNA, 488 bp, Homo sapiens
ttgatcagcattgctggaaaaaaaatgaaggaagagaaagagtagtggaagataaagctaaaaagtcaacagcagctataacatgagaaccttataggtcattagcattttgtgtaaaagaagaacagagtaacaatgacctaacatatgcagcatattattctgacttccatgttatttatagatttggtgttggtggtagaataggaagcaagtctgtgaaaatggatattattaagaggctattgtaataattcagttaagatattttagtagtttggcttrtgatattagcaatggaagtagcaagaattgttttgattctggatattttttaaatagtgccaaaattataagctatttggatgtgagaagtggaaaaaaaaaagaaatcaggaatcaaaaacgacagtcatttggccagcacaactgaaagtggctcttcataaggaaaataagacatgatatatgttacaatgaaatatttg

SEQ ID NO: 477945 - DNA, 550 bp, Homo sapiens
agaaatgaagaggtgtaaagtaccattttaaatcactgatctcactaaaggttaactataatratagctagtcacctgtctgcacctattattatattccatgctcatggcaggtggcaatgaaggtgggatgtgtgagtaggaatagcactggtagaaaatgatagatttggccaagaattgttctaacacacttttttttataacagtggctattataattttatcaccatcatcaccatccattatatttgatttagtttccaatgttcttgaacacatttgagcccattttacagcaggctacctaactttcagaaaggctatagttctctcaaagtctcagaaagagccagtagtaagtggcagaactaggacttgaacctagctcttctgttcttgctccagtaggtttcacggtgctccatgaagtcatacaggtccacagagcaccccaaggaccactgtgggaggaactgggaaggctggacagtggtggaaaatgatagtggtgatgagaaaattgacaataataactgcaacaagccca

SEQ ID NO: 477946 - DNA, 550 bp, Homo sapiens
agaaatgaagaggtgtaaagtaccattttaaatcactgatctcactaaaggttaactataatgatagctagtcacctgtctgcacctattattatattccatgctcatggcaggtggcaatgaaggtgggatgtgtgagtaggaatagcactggtagaaaatgatagatttggccaagaattgttctaacacacttttttttataacagtggctattataattttatcaccatcatcaccatccattatatttgatttagtttccaatgttcttgaacacatttgagcccattttacagcaggctacctaactttcagaaaggctatagttctctcaaagtctcagaaagagccagtagtaagtggcagaactaggacttgaacctagctcttctgttcttgctccagtaggtttcacggtgctccatgaagtcatacaggtccacagagcaccccaaggaccactgtgggaggaactgggaaggctggacagtggtggaaaatgatagtggtgaygagaaaattgacaataataactgcaacaagccca

SEQ ID NO: 477947 - DNA, 550 bp, Homo sapiens
agaaatgaagaggtgtaaagtaccattttaaatcactgatctcactaaaggttaactataatgatagctagtcacctgtctgcacctattattatattccatgctcatggcaggtggcaatgaaggtgggatgtgtgagtaggaatagcactggtagaaaatgatagatttggccaagaattgttctaacacacttttttttataacagtggctattataattttatcaccatcatcaccatccattatatttgatttagtttccaatgttcttgaacacatttgagcccattttacagcaggctacctaactttcagaaaggctatagttctctcaaagtctcagaaagagccagtagtaagtggcagaactaggacttgaacctagctcttctgttcttgctccagtaggtttcacggtgctccatgaagtcatacaggtccacagagcaccccaaggaccactgtgggaggaactgggaaggctggacagtggtggaaaatgatagtggtgatgagaaarttgacaataataactgcaacaagccca

SEQ ID NO: 477948 - DNA, 574 bp, Homo sapiens
ccatcaggatgctgcacaaaaacctaacctaaaaagataagaaaaacatgagattcaaatggtctcaaatctttccttttcctctttatttctataaatgatattactagatttctaaagttagaaagtccagagtcattcttgaccatctttctttcaattatattaaataaaaatatctcaaattgttcaattggacttcatcttccctctcacagatttaaataaatgtttcatcactttaactactattacagtctcctacagagtctcctgtttacaattcatttcccaagtattatcttcttttatgaatttcaaaccctttcaactgactttcttctgcctgaaayatcttgatggaaattactcattgctttttttccattctttttcctttcttcttatacattttccccatctatctatagatgtagacatttaattatttatattcattgacctttagaaggtatgtcatttattatgtaattacctcaggatacggattttaagtaatttctacaataaaaatttatatccataatatctttattagtgaatttttttaatt

SEQ ID NO: 477949 - DNA, 560 bp, Homo sapiens
taaaccctctttttactgctagttggaatataaacaaagagtcatctactttaaaaaacagtttcacattgtctagtacaacccacatgttctaattttcagccattctactcttagtaatttacccagagaaatgttctcaccatgtgcttgagggacaagtatatgaatgtttaaagcaatattgttgrcataacaatgaattttaactggcaaatgtttactaatagtaaaataaataaataaagttttgtgtatttatacaacagcatattacatacataattttttaatagttgaaaaaaatgacttacagttcttcagagagaaagattgatttcaaagatacactcttgaatgacaaaacaaattacaaaagaatacttaatgtctaatttcagttatataaagtaacctaaggcaaaattaaataatatgacaataaagaacacagatacatgttaaaaatgagggaatacttaacacaaaaataattaatacaaaaatttcatataatgcttctacctggaagggggaagtagacaaagaacaaacagcac

SEQ ID NO: 477950 - DNA, 531 bp, Homo sapiens
gtaagacaaagaaggttagattagaatagtcaagttatgtggcagggtgcagggagatkgctaaaatgagtggaggagcagatacatggctaactaagaaagtaatagtggtgaaagaattggagacaggctaattctttgttctttcgggttagatggaaacaaaaactatttgatattcaatcaccttataggttattgctgcatgtcccatggtagaatatcgtatggaagatgagagggtagtgtcttgttgagatgaccatgttcaagtgaacatttgtgtacggaatatgtgggtgtttagggaatttaatgatgcagcgatataaaaagaaataatatctattaaacatattatttgtatgccacatagtttaaggtttaccaagacattttgcccaagtgtaaaattgcatctttggttgttttataattttatcatttctaagggatttgggatatatgactctgttatgtaatatcctaaatgaaagtgatttttccagtgtgcacatgacagaagtattc

SEQ ID NO: 477951 - DNA, 442 bp, Homo sapiens
ctgtttacaatcactgtactagactaagctctcaaaatatacactgcaaatatttccctaccttttttttttctctagtatcctccatagtgtttgatcaataataagggctcattaagaaatattgccaaaaaaaaaaaaagaaaagaaaaaggataaacttcccttggaattaaaagattcattataaaagtttatataaaaagtcagatatacttaaaaagtcatttacaaattatgtttgtcacctcatctgytaaattttgattactactattgtggaaatatgtttcctttttctcatttttaaactactgacctctacagagaaaaacagtcaaaagaaaatctatggttgcttttttctttcttttcatttttctgtttcagctaaaaactttgaattgaagattaatgactgaatacaatgaattgcattatt

SEQ ID NO: 477952 - DNA, 343 bp, Homo sapiens
tgtggcagaatcgttttgccatttctgtgagatatattccttctgagcatagtatatagacatataattctgattatattattactttgtatcgttccctagcagaaattaattaatttctgataggttggggtatggctttcacctagtttaagaaattcaaatwattattaaccaaacaggaaagagtttccaaatgagtatatgaaaatttaataacatgtgaatttaaatattcttttatttatcaactgacagtctagctatacttttggtattctcttagaacatgcttttctcattttttttttgagacaatatataaattaggggttgtttcata

SEQ ID NO: 477953 - DNA, 611 bp, Homo sapiens
gaatataaatcatgctactataaaracacatgcacacgtatgtttattgcggcactattcacaatagcaaagacttggaaccaacccaaatgtccaacaatgatagactggattaagaaaatgtggcacatatacaccatggaatactatgcagccataaaaaatgataagttcatgtcctttgtagggacatggatgaagctggaaaccgtcattctcagcaaactattgcaaggacaaaaaactgaacactgcatgttctcactcataggtgggaattgaacaatgagaatacttggacacagggtggggaacatcacacaccagggcctgttgggggtggggggagggatagcattaggagacatatccattgtaaatgacgagttaatgggtgcagcacaccaacatggtgcatgtatacatatgtaactaacctgcatgttgtgcacatgtaccctagaacttaaagtataataaaaagatatatatattaaaaagaaaagaaaaaaaacatgtttgacctacaaatctccatggcatttaggaaaactaaaagctagtaccctagtccctccagcatcatttaacaccataaaagtaaagggcag

SEQ ID NO: 477954 - DNA, 611 bp, Homo sapiens
gaatataaatcatgctactataaagacacatgcacacgtatgtttattgcggcactattcacaatagcaaagacttggaaccaacccaaatgtccaacaatgatagactggattaagaaaatgtggcacatatacaccatggaatactatgcagccataaaaaatgataagttcatgtcctttgtagggacatggatgaagctggaaaccgtcattctcagcaaactattgcaaggacaaaaaacygaacactgcatgttctcactcataggtgggaattgaacaatgagaatacttggacacagggtggggaacatcacacaccagggcctgttgggggtggggggagggatagcattaggagacatatccattgtaaatgacgagttaatgggtgcagcacaccaacatggtgcatgtatacatatgtaactaacctgcatgttgtgcacatgtaccctagaacttaaagtataataaaaagatatatatattaaaaagaaaagaaaaaaaacatgtttgacctacaaatctccatggcatttaggaaaactaaaagctagtaccctagtccctccagcatcatttaacaccataaaagtaaagggcag

SEQ ID NO: 477955 - DNA, 611 bp, Homo sapiens
gaatataaatcatgctactataaagacacatgcacacgtatgtttattgcggcactattcacaatagcaaagacttggaaccaacccaaatgtccaacaatgatagactggattaagaaaatgtggcacatatacaccatggaatactatgcagccataaaaaatgataagttcatgtcctttgtagggacatggatgaagctggaaaccgtcattctcagcaaactattgcaaggacaaaaaactgaacactgcatgttctcactcataggtgggaattgaacaatgagaatacttggacacagggtggggaacatcacacaccagggcctgttgggggtggggggagggatagcattaggagacatatccattgtaaatgacgagttaatgggtgcagcacaccaacatggtgcatgtatacatatgtaactaacctgcatgttgtgcacatgtaccctagaacttaaagtataataaaaagatatatatattaaaaagaaaagaaaaaaaacatstttgacctacaaatctccatggcatttaggaaaactaaaagctagtaccctagtccctccagcatcatttaacaccataaaagtaaagggcag

SEQ ID NO: 477956 - DNA, 608 bp, Homo sapiens
gaatataaatcatgctactataaagacacatgcacacgtatgtttattgcggcactattcacaatagcaaagacttggaaccaacccaaatgtccaacaatgatagactggattaagaaaatgtggcacatatacaccatggaatactatgcagccataaaaaatgataagttcatgtcctttgtagggacatggatgaagctggaaaccgtcattctcagcaaactattgcaaggacaaaaaactgaacactgcatgttctcactcataggtgggaattgaacaatgagaatacttggacacagggtggggaacatcacacaccagggcctgttgggggtggggggagggatagcattaggagacatatccattgtaaatgacgagttaatgggtgcagcacaccaacatggtgcatgtatacatatgtaactaacctgcatgttgtgcacatgtaccctagaacttaaagtataataaaaagatatatatattaaaaagaaaagaaaaaaaacatgtttgacctacaaatctccatggcatttaggaaaactaaaarctagtaccctagtccctccagcatcatttaacaccataaaagtaaaggg

SEQ ID NO: 477957 - DNA, 652 bp, Homo sapiens
gaagattttgtattagcttcagaggtgatagggcttgaatctataaacacaatttttttatgtccttgttctttgtttatttatagcatcatttctaggcaatgagatccatctaggtctcatagttcagtggttcacaaaccataatactacccctacatggtttgtcattcatcaaagagcacatagaaaacccagctcctctctgctttttcttgatgtctgttagattagctgttagaccttgaaattgttacttttaattgatagcatttttttttaccaattaccaccagctaggcattatttttttaagtacattgtgttttatctcatttcaccacaaccatatgagggagatgctataattacagtctcttgacagatagaaactgaggctaaggaagacaaaggcatttgcagaaaatgacatagtsgaaaataattggatccaggattttagacttagtctgaccccattgccctagaccttaccaagcatgttttattgcctctcattctagtaaaatgtagtgtttctccaccttaagttattcatggaccccttttaaaagaaaaaaaacctaaactcccaaggtgggcttaaattattttcagactatgataaaacatgtacaaacataaaactaga

SEQ ID NO: 477958 - DNA, 434 bp, Homo sapiens
ctaccagtgtcaggagtactatattagacacttacgtaaccttaggtccagctaaaagttgtgtctaagggaggctgtggtcagcagattgtggccargcagagcagaacagagagacactttgttcgagtttttctactctgttaataacttgctttccctgcgcctcttaggaaagcagtctctctccataacccaactcttttcatctctgttggagacaggtctcatttaatcctttaattcctgcatcagccctatgtttatttccattttacagatgaaaatactggagggagtatctatttctaaaatgagttaaaggaaataagttcctttctcaaaaacttaaattatcaatttccctggggtttccttccctgccccccactcccaaataaagaagcctataaacaagataatatttctcattt

SEQ ID NO: 477959 - DNA, 466 bp, Homo sapiens
ctttcgtaaacacaaggcaggcagtgttagctggtccaactagacctcattctttctttcacctggggcctgtgcacggaggctgctgacatgagtggactcccacrtgtgtggtgaacgagaagttcaaagtgacactttgcattcttcccttcttctccactctcctcttcccgctccaggaaaaataaaggaagatgattgttttggtacaggaaaaaaaaaatgaatactaggtttttaacttgtgtcccgggttgggtaaagaatgacaactattctatagtttgtatagactttcccttagtggtcattgctatatgacataagaaagtcagtgcctgggccaggcactgtcacaggcctgtagtcccagctacttgggaggttgaagcaggaggatcgcttaaggccaggagttcaaggttacagtaagctatgatagcacaacctgagtgacagagca

SEQ ID NO: 477960 - DNA, 411 bp, Homo sapiens
gaggtaacatttttcaaataatagttgtgactgtgtgtgtttctctcgagggcatgtttctggggactgtggggggccgtgtgtgtatgcgtgtcctgatgccttgacacgatgttttgcagacggaaaatgccggggttcataaatattratactgatttttggaggaacagtcggcgcaattatggatcatctgattttaggggaagcaggttctgctgctgttgctgctgctactggggctgctgaggctgcgaggaggaggaggaggaggaggtagagagggaggaggaggaggaggttggtggaggtttaatttcacttttggatttgcagatgcggagaggtggctccatggacacagacctgctgtgtgtgcttctgcgccccaggtgttgtgtgtgggggtgc

SEQ ID NO: 477961 - DNA, 579 bp, Homo sapiens
caaactcctgggcacaagtgatcctcctgcctcagtctcctgagtagctgggacaacaggcatgtgccaccccaaagcccgacatacatttttgtgtagagacggggtctcgctatgttgcccagactggtctcaaacccttggcctcaaatgatcctccctcctcagcatcccaaagtgctgggattataggcgtgagccactgcacccggccctagtgcccatttttattcctcagaaacacatatgacttccagtcagaactcctgattgccttgagaaaactggtatcatcaaatctcactgawctcattatagccaaaggtagagacccgtggtgtgttggacaggctggccggctccgtgtgagagaaactcaccatcccgttaggctttctgaggcactgaaactagccgggaccctccatcaataacttggtctgcttggggatccagggaccccatgcaattattttaaatgaataattgattttgttaaatgtagtaacacatgcaatggttttcttaaatgcacacattgtgttattatttcatttgtttattaaatatttcttgaca

SEQ ID NO: 477962 - DNA, 619 bp, Homo sapiens
ggcatcaacaagtggaagcccccttcccatcttgtctttacttgcactacaaaattgtgaatatgtgggtataaaaagtagtcttataagacacagaattggaagcttttgcaaaaagaggttgggagagtgtcacatcttgtggcatgaggagttgttggcatacacttgagctttgtgctgtgagatattcktggaacttcaatagctttaagagaacagtttagatgtcatcttattaacctaccataacactttctcttgttttcagagatttctggacaataccttttacagctctaataatgtggactattctaatagatacaaagtggtatttcaccagcagatgctactgtagtttatatgatgatttcaaactgagaatccctttaaggttatgcagtaggttttattggaaataggatgaaagccctttaagtctaaaatcctaagaaataggtttacagcatataattctttgttgcaatgtctatcatactatcttacatccacatacatattgatttcctaatacatatgtatgagagtgaaagttattgagggcagagactgtgccatatattccctgcactgctggtgcctatctcagcacatg

SEQ ID NO: 477963 - DNA, 621 bp, Homo sapiens
tgtgctgtaaccctggtatctctgcagcctggtgaagatgacggtgttttaatgaagcgtacatctctacagtaactggcctggcacatgcaaacaggaacagcagcttcctctcctgcarggcacggtgcagattgctttccacgcattatttctgctcctcgcaccaccctccccaacccgaaagatagagcatattgtcctaattttaccaagcagaaaactggctcccagagagcagctctgctcagctagggcatgtcagagcactgcctgggacccacatctcctgactccagggccaaggcacctctgggccctcacacgggcattaatagagatacatttcatgttcaaaccagccctttggccaagcatcatcctcagtctctcagaacttactgcattttcttctaaaccccaattcaaaagttccatatagcatggtggttcgtgcctataatcccagtgggaggccaaagtggggggactgcttgaagccaggaatttgagaccagcctgggtaacaaagcgagaccccatgtgtaaaaaataaaataaatgaaaaattagctgggcgtgaaggtgcactcttgtagtcccagctactccaaagtctaa

SEQ ID NO: 477964 - DNA, 600 bp, Homo sapiens
ttttttctcctatatatatttaaaagtaatacatttaaggatgtgccaacttaattaaatactcttgagatactcacaaaatcatgggagttgtccatggtggcatttcttctttttatcttgagatggagtctagctctgtcacagtggtgtgatctcggctcactgcaacctctgcctcctgggttcaggtgattctcttacctcagcctcccgagtagctgggattacaggcgcccaccaccatgcctggctaatttttgtatttttagtagagatgggttttcaccatgttggccaggctggtctggagctcctgacctcaggtgatccacctgccttggcctccaaaagcgctgggattacaggcatgagccgccacacccagcccygtggtgcacttcttaagcagaattttgtgttcatgccatcgagaaagggctagtaaaatattttgtatttctttaagacttagtttaaaaagcgttgtaaaaatattttctcaccagatccttaaacaatctctaagaggattaggctggttggtattttacagatgaggaaataggctcagagtgggtgggtgacttggagcaccct

SEQ ID NO: 477965 - DNA, 569 bp, Homo sapiens
cagccgtctctctctgtggtgcctgctgcttttttgtgaaagaaaaacataagctgttcccaataccttcccaagcagccgacaaacgagggctcttccgccttaaactttccccatacygggcggagccccaagccacaggaaacctccagcaggaagtcgggctgccagggcggtggcgggcgcggtgcatcctgggagttgtagtccgttctcggaggcgcaggcgcagtggtgaaggcggggagctgggggcagcaccgcagaggattgtactttttcctgaatgatacagtcctccttccacatccttggggaattggttccaggacctgtgctgataccaaatccggaatgctcaagtccctgatataaaatggcgtaatatttgcatatcgcctacgcacatcctccgtgtactttaaatcttctctggattatttctaatacctaatgcaatgtaaataattgttatactgtgttgtttagggaataatggtaaggaaaagtctgtacgtgttcagtacagatgcaatttattaaaggatattttcgattcctggttgatt

SEQ ID NO: 477966 - DNA, 518 bp, Homo sapiens
actttataatgttcactgccattccacagaggaacctagcagcttttgccactgagaaaaccaacaaccattttagccaccatggacccccagagaaggagacactgctgtgctctcctcgtaatggagctatactgcaccaccaaggggctgggacactccctcttcaatccttttataagcgtatttcccacagacccaaagtcataggtgccctgtgcttgcccatgcttcagaccacagctctgtgaacactttacaggcacccatacctgacacagttgtgccactgctgcagtgggaacacctgcaatctagataacagtgccaccagtgctgagggcatactcacactctgtttcagatatcagttccatgactacttcattgactcccacacatgatctactgatgccactgccattgtaaatgtcctgccatgtgaacctgacaccaagagagatcttgaccatgatttgatgaygctatagggaaaaagagatcagatagaccccagc

SEQ ID NO: 477967 - DNA, 592 bp, Homo sapiens
tcaaacagtggctaatttgtgctgaaattaagaattgctggagaaattaactacagaatatagttgaagaaataataacttaggatttacagaagcattttcccccaaattttcagtactttagattaaatatatttttcaagaaaactcaattttagtacctctcaacygttcaaccaaaaccagaataattatatttatttcaatgtacaacactgtattagggttctctagaggaacaggactaataggatatatgtatatatgaaagggtgtttattaaggagtattgactcaaatagtcacaaagtgaagtcctacagtaggctgtctgcaagctgaggagcaagaaagccagtccaagacacaaaacctcaaaagtaggggagccgacagtgtagccatcagtctgtggccgaaggcccaaagggccctggcagaccactggttgtaggtccaagagtccacaagctgaagaacttggagtccagtgtttgagggcaggaaacagccagtatgggagaaagatgaaggcaggaagactcagccagtctagtccttccatgttcctctgcctgcttttatcctagct

SEQ ID NO: 477968 - DNA, 592 bp, Homo sapiens
tcaaacagtggctaatttgtgctgaaattaagaattgctggagaaattaactacagaatatagttgaagaaataataacttaggatttacagaagcattttcccccaaattttcagtactttagattaaatatatttttcaagaaaactcaattttagtacctctcaactgttcaaccaaaaccagaataattatawttatttcaatgtacaacactgtattagggttctctagaggaacaggactaataggatatatgtatatatgaaagggtgtttattaaggagtattgactcaaatagtcacaaagtgaagtcctacagtaggctgtctgcaagctgaggagcaagaaagccagtccaagacacaaaacctcaaaagtaggggagccgacagtgtagccatcagtctgtggccgaaggcccaaagggccctggcagaccactggttgtaggtccaagagtccacaagctgaagaacttggagtccagtgtttgagggcaggaaacagccagtatgggagaaagatgaaggcaggaagactcagccagtctagtccttccatgttcctctgcctgcttttatcctagct

SEQ ID NO: 477969 - DNA, 592 bp, Homo sapiens
tcaaacagtggctaatttgtgctgaaattaagaattgctggagaaattaactacagaatatagttgaagaaataataacttaggatttacagaagcattttcccccaaattttcagtactttagattaaatatatttttcaagaaaactcaattttagtacctctcaactgttcaaccaaaaccagaataattatatttatttcaatgtacaacactgtattagggttctctagaggaacaggactaataggatatatgtatatatgaaagggtgtttattaaggagtattgactcaaatagtcacaaagtgaagtcctacartaggctgtctgcaagctgaggagcaagaaagccagtccaagacacaaaacctcaaaagtaggggagccgacagtgtagccatcagtctgtggccgaaggcccaaagggccctggcagaccactggttgtaggtccaagagtccacaagctgaagaacttggagtccagtgtttgagggcaggaaacagccagtatgggagaaagatgaaggcaggaagactcagccagtctagtccttccatgttcctctgcctgcttttatcctagct

SEQ ID NO: 477970 - DNA, 592 bp, Homo sapiens
tcaaacagtggctaatttgtgctgaaattaagaattgctggagaaattaactacagaatatagttgaagaaataataacttaggatttacagaagcattttcccccaaattttcagtactttagattaaatatatttttcaagaaaactcaattttagtacctctcaactgttcaaccaaaaccagaataattatatttatttcaatgtacaacactgtattagggttctctagaggaacaggactaataggatatatgtatatatgaaagggtgtttattaaggagtattgactcaaatagtcacaaagtgaagtcctacagtaggctgtctgcargctgaggagcaagaaagccagtccaagacacaaaacctcaaaagtaggggagccgacagtgtagccatcagtctgtggccgaaggcccaaagggccctggcagaccactggttgtaggtccaagagtccacaagctgaagaacttggagtccagtgtttgagggcaggaaacagccagtatgggagaaagatgaaggcaggaagactcagccagtctagtccttccatgttcctctgcctgcttttatcctagct

SEQ ID NO: 477971 - DNA, 342 bp, Homo sapiens
atcaggcactaattttaataaattgggcaagagaaatgaaagcaaattactggtttatgctctctaaatcctaagtgaacttgcggaartaaagaaacacctcagagacgttgcaggttcactttcagaccagtgcaatgaagtaagtattgcaacaaagctagtcacattaatattctggtttccaaatgcatatgaaagttgtgtttacactatactgtagttcattaagtgtacaatagcatatgtctaaaaatacaatgtacaatgtttataccttaatttaaaaatactttatcactaacatactttatctaaaaatctaaagctcaaggaactaaa

SEQ ID NO: 477972 - DNA, 588 bp, Homo sapiens
tcacttactgcaactctctggcctctgctctgctgacaacccccatgctccctctcagggcatctgcactcattgctccatctgctttggaagctcctgtcctggtcagacatttggtttgtttcctcacttcactgtggtctcaccttgtctaataggcagcccctgccccctctgccctgtactctctatccagccctgtccatgctaattactgctctctgacagtatagtccatgtttggttgcttatctgtctgtccctgccacaggaaagtaagatttgtgaggaaagggtcttacttcctcactgttgttatatcttgggcagcacttggacataagaggcaatcagatattcastaaacaaatgaaagtgcatcttgcatttttgacagacgctgccagattggtgtttagaatgtaaatccatgagcctgctcaaccctcattaatatggaatattttctttgagcttcttgtgcccagtgtggttgcaaataggccttgcgggcctggaacattcatcactcgcctctgcctcgctggggtggcctcatctccccaggttccttgaagctgcacttcc

SEQ ID NO: 477973 - DNA, 582 bp, Homo sapiens
tcacttactgcaactctctggcctctgctctgctgacaacccccatgctccctctcagggcatctgcactcattgctccatctgctttggaagctcctgtcctggtcagacatttggtttgtttcctcacttcactgtggtctcaccttgtctaataggcagcccctgccccctctgccctgtactctctatccagccctgtccatgctaattactgctctctgacagtatagtccatgtttggttgcttatctgtctgtccctgccacaggaaagtaagatttgtgaggaaagggtcttacttcctcactgttgttatatcttgggcagcacttggacataagaggcaatcagatattcactaaacaaatgaaagtgcatcttkcatttttgacagacgctgccagattggtgtttagaatgtaaatccatgagcctgctcaaccctcattaatatggaatattttctttgagcttcttgtgcccagtgtggttgcaaataggccttgcgggcctggaacattcatcactcgcctctgcctcgctggggtggcctcatctccccaggttccttgaagctgc

SEQ ID NO: 477974 - DNA, 624 bp, Homo sapiens
aaactgcatttccattaactgctgcagtagaaattatttaccaatggccacctgtgatatcattgtcccgtagtttatgtggcgtggactgactctgcaaggggtggctactgaagcctctattcattatccccctccttgaagcccgggggatgctgcatgtgagcaaaggcagtgcttttgtgtgcatgaaaaaggaggagccaattcataatatcatggtgatataaaaaatgattcttctcccatttttctatgacctttccttgcttgatttgaatttatgattttctgcatgtgtttcagatgccagatatcaccaataagaataaataacaaacttattttccaacgagctatatgccccgccgtgagttaagtgctttgtatacattattccacatagttagaatagcctggtgtgccagagattgtcctctagtatccatccttttcttcttcctttgataatataatcccacrtttttcagctcagcacatgatttcctgcaatcgaaccatgtatcacaccagccgcccttgcagctatgtgtgaccatgtggtcactgggatgtaagagtttcgtgtgcaattttcgggacatatcctcagcaggagggaac

SEQ ID NO: 477975 - DNA, 600 bp, Homo sapiens
ccagtgtaggaagcttggcttggctcagtgcagcggaggctgagccgaaggaggggctgctctacctcatgggccaactgtgttggtgcctcttgggaaaacatatgccttctgggttccagtcccccagtgtaaaatgtgagaaatgatattcrccgccgactgcccaactgtagagaccacaggcactgacaggcatatttataaagtcggcaaagccaccaaaccaaagggctgcgataacaacttagtccaggattagattttactattctgacatctcctataatgacggatgtggagcacttaaattatgtagcctttcagaaacaatagcctccaatgggttctaagaattttaaaaccagtcataattcaggaggccttggagacaactgcctcctattaaatcattgctgtgacactcccaacagagtcataaatatgatctatgctggtatgtcgatattttagatgccaaattattccccaacaactctgtgctgttgcattctttctatctgcacacaaatgtgtggggaagaggatgacattgcatcattgttatgaacagaatcaatgccatgatcgagaaagaca

SEQ ID NO: 477976 - DNA, 600 bp, Homo sapiens
ccagtgtaggaagcttggcttggctcagtgcagcggaggctgagccgaaggaggggctgctctacctcatgggccaactgtgttggtgcctcttgggaaaacatatgccttctgggttccagtcccccagtgtaaaatgtgagaaatgatattcaccgccgactgcccaactgtagagaccacaggcactgacaggcatatttataaagtcggcaaagccaccaaaccaaagggctgcgataacaacttagtccaggattagattttactattctgacatctcctataatgacggatgtggagcacttaaattatgtagcctttcagaaacaatagcctccaatgggttctaagaattttaaaaccagtcataattcaggaggccttggagacaactgcctcctattaaatcattgctgtgacactcccaacagagtcataaatatgatctatgctggtatgtcratattttagatgccaaattattccccaacaactctgtgctgttgcattctttctatctgcacacaaatgtgtggggaagaggatgacattgcatcattgttatgaacagaatcaatgccatgatcgagaaagaca

SEQ ID NO: 477977 - DNA, 632 bp, Homo sapiens
cccccttgttgctgataccaggccgactgttcccactctccagcccttggtatgacaatgggaccagcagattggagggcagggggttaggaaggcggaagctctgtggcgagttctgcaaaccrtcagggttcatgactttattaatcagtgtccatggactgtgaagagaaatgctgagtctacaatagcaaatgagccaagaacataaacagacaattcaccgaagaggagatatctagtaaacaaatatctgggaaagtatttggcttcatgtgtaatttaaacttatgtaacatataatgctttactctactagataatagaaagacatttcttgatgccagtacccagcaccaagggtatactgtatgcagaacattagcatgttgctgatggcagtgcacattgattagtggctgttgggagacaatttggcgaaacatatcccaagccagtaaaatattcataccctttgactcagtcatcccgtttcttggaatgtatcctcaggaaataatccaaaatatgagggaagccatatgtataaggatattctcctagacttgtcacttataataacagaaacttggaactagatgtctaacacttgatgactggattaatatgat

SEQ ID NO: 477978 - DNA, 616 bp, Homo sapiens
ttctgaccctgtcagactctgcaaggaataaagwatacgacctgagctccaacctggtgccaattaacaacattctagggaaataaagccaagtatgaaaaattgtcatgtaagatgtgatctcagaaagcagagagaatcaaaaggaagtagagctcagatgaaagagaagctggctcatttctttttattattattattattatactttaaattttagggtacatgtgcacaacgtgcaggtttgttacatatgtataagtgtgccatgttggtgtgctgcacccattaactcgtcatttaacattaggtatatctcctaatgctatccctcccccctccccccaccccacgataggccccagtgtttgatgttccccttcctgtgtccaagtgttctcattgttcaattcccacctatgagtgagaacatgcgatgtttggttttctgtccttgcgacagtttgctcatttctaactgagcaatcaaggttccacagaatccttcatttgagtcgagccttaaggatgagggaaaaggaagagaaaagtacaagagagagggaaccgagagtgattcagtttgcctcaggcacaagggtgcatgtggaagaga

SEQ ID NO: 477979 - DNA, 583 bp, Homo sapiens
cctgcagccgctggactcactgcattcccactctgactttggcatgaaagacacacaagtgtgcttgtgagaaatagatcttaacagtaccttttaacacctatttcaggtgctcaaaatgactgcctgttttacatttatattctggcagtgcaaacttcaattggacaggaaatcttacaacctctcttccaggtgraaaagcgaggcagggatgtttatacagttccatccatgtcatcccacttggaagatactagtaaaacacaccaacagtaatacaaaaaccatggtgtttgcaatagtgataatgttactagtgaaggaaaaatagaaactttctgtaatttggagattctaatttttataggtgggctaaaaaaaaaatctggagagaagggtgttaagtgagtaaggagtgtgtctctaactaaatatagtgtaaaaagagaagaaaatacaaagtcaggcacagtggatagaggtggatagtctaatctctaatagtataatgggcaaaattgtctcaaacaaaattagtctgcctcttgtttactcagggatgtgtgactgttttctatgc

SEQ ID NO: 477980 - DNA, 583 bp, Homo sapiens
cctgcagccgctggactcactgcattcccactctgactttggcatgaaagacacacaagtgtgcttgtgagaaatagatcttaacagtaccttttaacacctatttcaggtgctcaaaatgactgcctgttttacatttatattctggcagtgcaaacttcaattggacaggaaatcttacaacctctcttccaggtgaaaaagcgaggcagggatgtttatacagttccatccatgtcatcccacttggaagatactagtaaaacacaccaacagtaatacaaaaaccatggtgtttgcaatagtgataatgttactagtgaaggaaaaatagaaactttctgtaatttggagattctaatttttataggtgggctaaaaaaaaaayctggagagaagggtgttaagtgagtaaggagtgtgtctctaactaaatatagtgtaaaaagagaagaaaatacaaagtcaggcacagtggatagaggtggatagtctaatctctaatagtataatgggcaaaattgtctcaaacaaaattagtctgcctcttgtttactcagggatgtgtgactgttttctatgc

SEQ ID NO: 477981 - DNA, 510 bp, Homo sapiens
tgtgtctagagactagttagagccattgttaaakttcctgtcatgagcagaatataatgctgctcaggagtctttgctgaagccttgatcccagatatttataactaccaacatttttttgcaatgaattctgataatgtctacattttcctagaagttaaaatacttgacagaatagttttttattttatcttccctacggattatagtcacttgtcaatttctgcctccagattgagctttgtaaaaacataggaattagatgagaagctgcttcttcctctattaaagatatcacggcaactatttctcctgtctcttgcttctgatgagttacttttttgctaatgatgatactatcctacttccaatgagagaaagccttggagttgcaccgtaatatgttcagaagtgaactcctgtggtctgtctgcattttaataatggttagtcttggtcaacattctcaagctgttttcctctggacactgttgtcttgtgacgttgtct

SEQ ID NO: 477982 - DNA, 660 bp, Homo sapiens
ttagcaaactgagttttaaacatcaaattggcttttattaatgattcatgaatcaagtgacattccatctatgaaatagaaaggtgccctactgagctgagcagatgtgtgggctttataayggaaaagactgaagaaagcagaaagaagaaacaaaaagtggactggtgatttcaaagctactttccttgcatacgttaaactagaggagacttccttatcatgtgagcttaggttgactgggcccctttcaattggttactgtgaatctccttttttttttgaacaagtgacctatttttacattcagtttgacaatgtggcatctggcatgagtgactccattctggtttgatctggtctgttggggcctagtgcaggagcttaatccaaaacaatgacctcccacatattttactgaacagctttccccttttgatcagactcaacctgtactgagggatttgataaaaatttatggcatcagcactactgtcagtcatcatcatggcagggttgtctttgtcttagcatgaaactcataagtcacaatgtcagccttgtggaagacacattcctttggtcatcttgcagttgttgcagtaatcacagtgaggccacctagtataccactaatcgctgcaaatacaccttcaaaac

SEQ ID NO: 477983 - DNA, 548 bp, Homo sapiens
ggattctcaaagacatcttttgttacaaacctcaaagacagcatagcaataaggctgcagggtaggttaatttaacatttgcatcacaaagttaatttggaattagcttatctttctgtctttgttccactgtttctgtcaactgtgactaattctgcaacctcattttttttttttttttttttttttttttttaratggcgttttgctcttgtcgcccaggctggagtgcaatggcgcgatctccgctcactgcaacctcatcctcatggattcaagcgattctcctgcctcagcctccaaagtagctgggattacaggcatgtaccaccacccccagctaatttttgtattattagtaaagacggggttttaccatgttggccaggctggtctcaaactcctgacctcagctgatccaccagcctttgcctcccaaagtgctgggataacaggcttgagccaccgcgcatggcccaattctacaacttctatgtggaacttagctggaatgttaacttgaatctctaaaaataatagacgtggat

SEQ ID NO: 477984 - DNA, 548 bp, Homo sapiens
ggattctcaaagacatcttttgttacaaacctcaaagacagcatagcaataaggctgcagggtaggttaatttaacatttgcatcacaaagttaatttggaattagcttatctttctgtctttgttccactgtttctgtcaactgtgactaattctgcaacctcattttttttttttttttttttttttttttttaaatggcgttttgctcttgtcgcccaggctggagtgcaatggcgcgatctccgctcactgcaacctcatcctcatggattcaagcgattctcctgcctcagcctccaragtagctgggattacaggcatgtaccaccacccccagctaatttttgtattattagtaaagacggggttttaccatgttggccaggctggtctcaaactcctgacctcagctgatccaccagcctttgcctcccaaagtgctgggataacaggcttgagccaccgcgcatggcccaattctacaacttctatgtggaacttagctggaatgttaacttgaatctctaaaaataatagacgtggat

SEQ ID NO: 477985 - DNA, 548 bp, Homo sapiens
ggattctcaaagacatcttttgttacaaacctcaaagacagcatagcaataaggctgcagggtaggttaatttaacatttgcatcacaaagttaatttggaattagcttatctttctgtctttgttccactgtttctgtcaactgtgactaattctgcaacctcattttttttttttttttttttttttttttttaaatggcgttttgctcttgtcgcccaggctggagtgcaatggcgcgatctccgctcactgcaacctcatcctcatggattcaagcgattctcctgcctcagcctccaaagtagctgggattacaggcatgtaccaccacscccagctaatttttgtattattagtaaagacggggttttaccatgttggccaggctggtctcaaactcctgacctcagctgatccaccagcctttgcctcccaaagtgctgggataacaggcttgagccaccgcgcatggcccaattctacaacttctatgtggaacttagctggaatgttaacttgaatctctaaaaataatagacgtggat

SEQ ID NO: 477986 - DNA, 565 bp, Homo sapiens
taaaatattcaatcacaatcttgcaggttaaaaaaaagagatgttgatatcaggctcaggacagcgggagaaagctgggatgtttctgatcccaggaggaaaggaaaatgtgattgactgatggttatctgacctattttattctgaattgtcatggatgccacaatagtggtgaagagcttcatgcatgtgacaggtattcaccaaaggttttttccgcattgtgtgtaatcatgaacacaatttctcatccacattgtttctgggttgaatttttgtgaaggttgagattattttagaatcctttgttagggttgtgattaaagcaaatcagaagcgagaacygtgttgatattttgtatatggagagaaggccatttcatgttccctggactttaaaggttttttttaatgtgtttattctattttcaattttaattttaatttttttaaatttagttctcagaattcttgctcattggccatgaagctatccagagagttaacaagacactatttaaactgtaaaaactgcttttgttttttattttgttgctttcgatgg

SEQ ID NO: 477987 - DNA, 472 bp, Homo sapiens
tgccaccatcatatctggaataaaacaattatcatatgaccatatttctattgccaatcacattattgatatctagtacaaagttcctctgaattacgcataaaatattagcacrtaaaacaaaaaatgtttaaataattttggtatagctcaatatattacagtatatacaggtgcatattcaaaactctacataactgagtttaaaaagcagtaaaaaataaacagaatattatgtttaaataaaagcaatgctaacactcaatcaaaactattgccaaaactttgtgggaggcaagttaagagttatgtaagtttaacattacgcaataactgttagaaatccactaataaatattcacttaaaaagatagaataggatggccacataaaatactagatatccagttcaatttgaatttcagatcatttttagcataaatatatcttaaatattcttattgtgtgtcta

SEQ ID NO: 477988 - DNA, 495 bp, Homo sapiens
ataaaacaattatcatatgaccatatttctattgccaatcacattattgatatctagtacaaagttcctctgaattacgcataaaatattagcacataaaacaaaaaatgtttaaataattttggtatagctcaatatattacagtatatacaggtgcatattcaaaactctacataactgagtttaaaaagcagtaaaaaataaacagaatattatgtttaaataaaagcaatgctaacactcaatcaaaactattgccaaaactttgtgggaggcaagttaagagttatgtaagtttaacattacgcrataactgttagaaatccactaataaatattcacttaaaaagatagaataggatggccacataaaatactagatatccagttcaatttgaatttcagatcatttttagcataaatatatcttaaatattcttattgtgtgtctaaaattcagttgaactaggcatgttatatttttatttgataga

SEQ ID NO: 477989 - DNA, 516 bp, Homo sapiens
tggataggtggtaggtgaagtacaagtgtcctggccttggttctctttccgtggttatcccccgaccgtcttagtctattcagactgccataacaaaataccataaactgggcagcttatacacaaccgaaatttacttcttaccatcatggaggctgggaagtccaagatcaaggcactggcagatttggtagctggtgagggatcccattgtcataggtggcaccttctcacatggtggaagaggcaaggtcactctctsgggcctcttttataagggcactagtcccattcaggaggtctccaccctcgtgacttaatgacctcccaaagaccccacctcctaatactatcaacttgggggttaggatatcaacacatgaattttgagggacacaaacattcagagcatagcacctatacttggcattcccatacctgctgacgggtggaaaaggccatccaaaggcctggatctatggagagacagaccatcccacagccttgcccctaccc

SEQ ID NO: 477990 - DNA, 629 bp, Homo sapiens
ggggaaagctggagagcaggatggagtgagatgcacccaggaccagagactgtcaatgtcatcatttaataggtccctctcatttgtcacttgagaaactgaaacccagagacagaaagtgacttcctcaatgccatatactggataggtggtaggtgaagtacaagtgtcctggccttggttctctttccgtggttatcccccgaccgtcttagtctattcagactgccataacaaaataccataaactgggcagcttatacacaaccgaaatttacttcttaccatcatggaggctgggaagtccaagatcaaggcactggcagatttggtagctggtgagggatcccattgtcataggtggcaccttctcacatggtggaagaggcaaggtcactctctggggcctcttttrtaagggcactagtcccattcaggaggtctccaccctcgtgacttaatgacctcccaaagaccccacctcctaatactatcaacttgggggttaggatatcaacacatgaattttgagggacacaaacattcagagcatagcacctatacttggcattcccatacctgctgacgggtggaaaaggccatccaaaggcctggatctatggagagac

SEQ ID NO: 477991 - DNA, 555 bp, Homo sapiens
caaggcttgaagcccctgggtggggtgtatgcaagggtaggttgccaccaggtgggagatttccggcaggcactgagctcgtaatgtgcccggaagcatgggagtaacatcagaaggaaacttgaaaacaamaaaaaaactagccttcctcctcctcccagtattttgttaaaacgtgtgcccctctccgactgcctccctttttctttctaagcaaactgccaacatcgggattacgggtttattctacacagcctccttactgctgcctgttagccacattatcgtttcatccactcgttgatgattcactcattcgaaaacatttatatggcctgctatgtcccagactcttcttggctctgaggatcgccagtaaaaagaaaaatcactgcctttattctgcttacattctaatatgagaaaattcagataatgaatatagcaagtaaatgaaatggtacgttagaagatatgcgtttgtggcagggcgcggtagctcacgcctgtaatcccagcaatttgggaggccgaggtgggcggatcacttgagcc

SEQ ID NO: 477992 - DNA, 555 bp, Homo sapiens
caaggcttgaagcccctgggtggggtgtatgcaagggtaggttgccaccaggtgggagatttccggcaggcactgagctcgtaatgtgcccggaagcatgggagtaacatcagaaggaaacttgaaaacaaaaaaaaaactagccttcctcctcctcccagtattttgttaaaacgtgtgcccctctccgactgcctccctttttctttctaagcaaactgccaacatcgggattacgggtttattctacacagcctccttactgctgcctgttagccacattatcgtttcatccactcgttgatgattcactcattcgaaaacatttatatggcctgctatgtcccagactcttcttggctctgaggatcgccagtaaaaagaaaaatcactgcctttattctgcttacattctaatatgagaarattcagataatgaatatagcaagtaaatgaaatggtacgttagaagatatgcgtttgtggcagggcgcggtagctcacgcctgtaatcccagcaatttgggaggccgaggtgggcggatcacttgagcc

SEQ ID NO: 477993 - DNA, 519 bp, Homo sapiens
gagaacatatttccactcagtcttgactatgcccaagggcctccgcgtcgaacagctcagaattgtgccgaatggagcaaaggtacactcctagagtattctagctggaagcaccacaaagatccttcataactttccccaggcatgtagaccattttgtcaacaaaagccaacaatcagcccattatagcaaataggagcagagctgctgtaattaggggtgggggctggagtccggaccagtgggcctttcctcagttgccgcccgctccctgaagtcttctctgaagagccctagagcatctccaagaccagcccaaagcgggtgaatttacccttgttcctcattttacacaaggctcagagaggaggagaggttgcccaagttacccagcaagtcaaagggggattccctgagagcttgmgctctcatcctccctagaagagttacatcaatattgccaaaggtaggtgtatctctctcactctcccacaccctttcttacacacataattctc

SEQ ID NO: 477994 - DNA, 671 bp, Homo sapiens
tatctcccctttccaaactctccatcatgccagcagccaatgcctttgttctggggagtgagggggataactgaggcattgttggtctccctgattgactcccctccctgccacatgtcatgtttgccagttcactgtgtttttatctgtgtttactcagtaagctcccaaaaatcctaggacagcaaagaaaattatatcccatttcacagatgacaggctcagagaggttaagcaactttcttggcatcacacagcaagtcagtcaatggcagaatagaggatccasggctcctgactgctcaagatctctgctgtctctgaattgtgcagttccacagagggggaagaaccatagcccagcctggggtctgcagggttgtgtgggtggaggaggaggatgaggaggcatcagtgagagctgaagcacagtttggggactctgggatttggctgtgctgtgcttctggcagtgtcagtggctacactaaagcgagggctgcctgcttcccatccttcgccacctagtacctctctgtgaaggaggctgccaaccagatcggagagggtagagcacgtgcttcccacagagctcaccagaactctgggaacttgttgaagaggaccgagctcccgcccagacctgagaaccctcagccttgcactggaaa

SEQ ID NO: 477995 - DNA, 617 bp, Homo sapiens
ccagctgcgtccttgggaaccagggcctgcagcaccaggaacccaaaagaagccatcttgcaaatgtcagggtatttggctccagaggccatgatgtgtttggggtcaggaaagatagaatccctttctaaatattgtttatcaagaggatttgtcttctccatgcacagcctattggaggcagaggaaggcaggagggaggtagctggtgaaactggtggatggaagtaatgttaggattacagttttgctctcgggctgagggacagattctcccagacttgccttctgcagcatagggggtccctgacctggaggaaggccagatacccakgcttcattgaaaggatagtggtctgggggtgtaaacgaacactctctctgcccatttttctcatatatgatgagggcaaggacaggtgccagagtttatacaggcacggcgtgacccaccagtatgcacagcttctgataggaagtcttagaaaagcaccgcctcaccgcctccagctggagccatgctgtgaaatctctctccctggcaaatgtgcgtggaacacacacacacacaaacatgcacgcatgcgctcacgcacccagcattagagtcaaacttg

SEQ ID NO: 477996 - DNA, 551 bp, Homo sapiens
tgctgataccatgtattaataaggatctccatgatcccagcaagtggccccaggagaaaattcttgctgtatcagtcaattgggtaactattttttttttttttttttgagacagagtttcactcttgttacctaggctagagtgcaatggcgtgatcacggctcaccacaaactctgcctcccgggttcaagcgattctcctgcctcagcctcctgagtagctgggattacaagcatgcgccaccacacctggctaattttgtattttcagtagagacgaagtttctccatgttggtcaggctggtctttaactcccgacctcaggtgatccgcccgccttggcctcccaaagtgctgggattacaggcgtgagccgccgtgcctggcgggtaaccatwgcaatatgccttgagcccacccaggaggcggtgattccacaccagggtatgtgggagcacagatatcctatagagatgcatgctggaaactacaaaacattgttgagaggactcttaataaagaactctctgaattcgataataagaaaac

SEQ ID NO: 477997 - DNA, 529 bp, Homo sapiens
gatggtccttaccttatttgacttctttccagtatttatcactagagacactttaaaaattatcttctcttgtcttctgttccatctcattatctttccatctctgaagcagatcctcatgaatattaaaactaataatagagtagccttcatttattaagggttctgtgttaagtacacatattactattatttartccaacctcttaacagcactaatgaaataggtataattcctccccattttatagatgagaaaacgaagtgattttcccatgatccgacagctaacgttagtagcacctaactcagtctcacttcggagcgcatgctcttaatcactgcactcttatgtcccaggtcagtttctttcagagcttcattttactttgctcattttcctaagtgtcagcattctttagagtcctgtcctctgtctcagctcttctgacttcagtactctttggttaatcatcagtagacatcagacttccactgacaacttctgcattgatgaatcctgtagcag

SEQ ID NO: 477998 - DNA, 490 bp, Homo sapiens
tttacattctagagggggagacaatcacgcagaaaaatataccaacaaggcaatagtagaaataagtaagctgggtgcagtggctcatgcctgtaatctcaatgacttgggaggctgaggtgggaagattgaggccagcctgggcaacatgacaaaattccatcattacaaagagattaaaaaaaaaaaattagctggatatggtgacacgcacctgtagtcccagctactcaggaggctggggagggtggattacttaagcccaggagttctaggttgtagtgagctatgattgtaatcatgccactgcacaccagccttggtgacagagtgagaccctgactctgaaagaaaagaagagaagaggagaaaagaaaagagaaaagcaaacccaaaacaaatgtgatatggggcatttgaacagatgacatgctgtggggatcrtacggctcctttagagtaggtgagcaggaaaaccgtctgaacaggt

SEQ ID NO: 477999 - DNA, 446 bp, Homo sapiens
ttgtaaatatctgtattctgttgaaggaagcccatttattagcaaaagctgttacacactttattttcaaaaatacccagtgttttgaaaagactcccaagttgtgttttcctctactctcataccaccaccacaacaatcatcaacacagaagacttcggtgaccaaacgtggggatttttccccacatgccaagcagtgaacaccagctgggtgtcctccaattaaattccacactgtcgccgggcgtggtggctcatgcctgtaatcccagcactttgggaggccgaggttggcggatcacctgaggtcaggagttcgagaccagcctgaccaacatgsagaaaccccgtctctactaaaaatacaaaaaaaaattagccaggcatgatggcgcatgcctgtaatcacagccactcgggaggctgaagcaggagaattgcttg

SEQ ID NO: 478000 - DNA, 629 bp, Homo sapiens
ttcaagtaggttagctattagcagatgttcctcttggctgaaagattgacagctctctctgattctccttatcctgattttttaaaataatgccaaaactcaatatccccaaggagacatcacaaataaggaaacaagactgccagaaatacatcaataaaatataatatgtgtattttttcagtcatgccatgagaggaatattttacatatttcagaatacaaggttgagggcaaggtttcatggcacccgaataaagcaaaacaaggcaaaaayaaatgctcaattaaggtactgtgttaagagaaagaaagaagaaaaatcaattggtaatttatatttgctttgttttgttttattctgaaagtttctagaacttgtttttcaacccagattgtgtcaaagaatacttttgaaaataactttcctctcttattaaatatttcctttgatcagatacttgtttataatcaaccaatcatttcaaaagcaaattgttagccatatggattgcatagtgaaataaagaaaaatcttctgagataagaaagtcagcaaactatttttattcatatttctgcaaatcttattacccttcatgtgctttaaggataataatattctgttc

SEQ ID NO: 478001 - DNA, 629 bp, Homo sapiens
ttcaagtaggttagctattagcagatgttcctcttggctgaaagattgacagctctctctgattctccttatcctgattttttaaaataatgccaaaactcaatatccccaaggagacatcacaaataaggaaacaagactgccagaaatacatcaataaaatataatatgtgtattttttcagtcatgccatgagaggaatattttacatatttcagaatacaaggttgagggcaaggtttcatggcacccgaataaagcaaaacaaggcaaaaacaaatgctcaattaaggtactgtgttaagagaaagaaagaagaaaaatcaattggtaatttatatttgctttgttttgttttattctgaaagtttctagaacttgtttttcaacccagattgtgtcaaagaatacttttgaaaataactttcctctcttattaaatatttcctttgatcagatacttgtttataatcaaccaatcatttcaaaagcaaattgttagccatatggattgcatagtgaaataaagaaaaatcttctgagataagaaagtcagcaaactatttttattcatatttctgcaaatcttattacccttcatrtgctttaaggataataatattctgttc

SEQ ID NO: 478002 - DNA, 599 bp, Homo sapiens
gggaagcagataccgcaactgagcattccggcaatctctagctttactgctacaggctgagacagttgattgttatcctttccaaggcaatttcctggcaacagttttagaactacagttggcccttgaacaatacaggatgaactggatgtatcgacttacactcagattatctttcccctctgccactcatgagatggcaagaccaactccttctcttcctcctcttcctcagcctacttaacattaaaatgacaagaacggagggctttttgatgatccacttccacttaataaatagtaaatgtattttctcttcctyataattttcttagtaacatttacttttctctaacttactgtattgtaagagtacagtatataatacataaacaacatatgtgttaatcgacagtttctgttattggtaagacttccagtcagcagtaggctattaatagttacattttgggggagtaaaaagttatatgcagatttttatttgcatagagtttggcacttccaactcttgcattgttcaagggtcacctacacttgctacagggcacctggctgctccagtgacttttcaactgact

SEQ ID NO: 478003 - DNA, 575 bp, Homo sapiens
tctatgatttttggaatttaatgttgagcttttaaaatctccaataatgttttctctattttgtttttgattgttgaacagaatattttgtcctgtgagcaagcaactatgactaagcataaaatatatagtcagaatttgtcataattttaakatattcaacaaataaaaattaatttttactttaaaaataaatatatacatatatttttcaaaattactagttcattgcattttgaataaatggtggaatgtttattgaataaataaatgaatagaataattatttttttcttatgtgaggctaaagtcaatagtatcagcttagtatgcagaacagccatgggtataaaaacagaaagtttagatagcgtgctctatagacatattataaattaaaaggaagataaagggtgattaatatagataagtataacaacagatatgtaatattactccgggtatagattagacaacatgcttctatttatacttttttacatattccatatgtattttgcctttattaaaatccaagatattttctcttttatacctagtagtatataagagat

SEQ ID NO: 478004 - DNA, 600 bp, Homo sapiens
agatttaaataatacaccaaaatgttgcaacatgaattgtaaaatattctgacactgtgcattgtccagttctgaataaaagttaattatagggccataaaggaaagtaaaacaatcctgggcactgtattatctaattagaaagctatactcagcatcttttatccctgtgtaggactggttagccttataaagctattaaatgtggagtttgccttttactaatccaataagtttgattctgtttaatgtaagtataagttcatctttaaacagtaaattttaaagcactttaaaatcagtaaacaaaattrtagtcttgaagcgaaatatgcagcatgtatgtcatccaattctaggcaggactgacagtactgcatgtaactgacaccaatagaaaaagcatgattttccttccttcctctgaacaatagccatgctagaaggaaaactttggctcatgaacatatgtatttgcataagataatttctctgagtttgtcaatagtgtggaaaatccaaaatgaacttggtcaccatatgttattataagttcattttcttcaatgttctcatttaaaataagctgaaacagatgga

SEQ ID NO: 478005 - DNA, 576 bp, Homo sapiens
tcagctctcattgtttttgtgaggattttgctgaggtggcatttactctggtgaattcgattaaattaatgggaggcaaatcaaacctcccttttaaaccctaaaaagcagtgtgtcaggggctctggtgactacatctttacatatgtacaaaaaactagcttagataacattttatttattagcaaacacttattgagtgtctacgctggtttaacctgggagtccatctataaaacttttcttatctgctcaaattacttaaaataaatcatagaactggatgaaattgggagtcatctaatatagcttttaattttaaaaatgaggaaactgaggcccagactaattaagtaacaaatatttattgggcatttacgttgtgccaagcacttttctagctgctgagaatggagtgagtggtgaacctatatgtaagaaccagggggttgtggtagagtgactatggwtgaggtctggccatgtctgatttggtgtttaaggaaggtcctttcaggggtgacactaaacaccaaactgaaagaaaaggagaagctaggcttacaaagatatagg

SEQ ID NO: 478006 - DNA, 642 bp, Homo sapiens
attttagctctttcttttctagttgagcacattctcctctactccctattgtctttcatctcctactcctttactaatttacatacagtctttacttgtctggcccctttgcactcaagtctgcattctcaatacaaataagtcctctactattactacggagtcggttttatcatcaaggactttacatctcaggaaaagctctgagatagatattatggtgtgaaataatttgcagtgcaaattaccttaggcttagaggttttgaaatgacttatccatgtatattaagacatgcctttgaagggaaactagaataaagataaattarattcactcttcatatgaggtaaattttccaatcttagaatttggaagagaatggtatcatgacataatgaaatcgtccagagccccgtactaactctgggtcagctttaggcagattattttatttatctgggtctcagattcctcatccttaaagtaactgtgtctgatgtaatgagggccccttcccactcttgatttctgtatgaatcccgactaagaggaaagaagtatctctttcttaacccttcctggctccagagagcaaatgtaaaaggaaacaacatatttatgtccaccttctagttgttc

SEQ ID NO: 478007 - DNA, 595 bp, Homo sapiens
atgtcagtaaggcaagattctcgaaaattttactcctgaattgcttgcaacgcactgacattgtgttcagctcygtattgacttagaagatgacttggtctttgcctggggctcttacaatctggttgaagtagtcaaagcaatttaaacataaaaatgccaactgagaaggggattaaatcccaagaggtataaaggtgcatgtaacattattagccataacaccacatatatggtaattaagcaaaaagcacttctattttgctaccttcagcagcccatatcaaaaggccactatttaaatcaagtcaacttgtgaccttgatgtgacttatgatttgccaaacctgtaacactgtaatcaataattcaaataaatttaaataatcagagttgtgtgctgcagatttacatgctctcttaacattttagaaccaaaatacattgtgatttttagactgtgacaccatctatgaaattattccaacactgtaagaagttatgcggcagtatagaaactaaattgggttttgatagactcatcttacatgtccattggctaagttgcactcctgtcagtgaatttatgaaggct

SEQ ID NO: 478008 - DNA, 595 bp, Homo sapiens
atgtcagtaaggcaagattctcgaaaattttactcctgaattgcttgcaacgcactgacattgtgttcagctccgtattgacttagaagatgacttggtctttgcctggggctcttacaatctggttgaagtastcaaagcaatttaaacataaaaatgccaactgagaaggggattaaatcccaagaggtataaaggtgcatgtaacattattagccataacaccacatatatggtaattaagcaaaaagcacttctattttgctaccttcagcagcccatatcaaaaggccactatttaaatcaagtcaacttgtgaccttgatgtgacttatgatttgccaaacctgtaacactgtaatcaataattcaaataaatttaaataatcagagttgtgtgctgcagatttacatgctctcttaacattttagaaccaaaatacattgtgatttttagactgtgacaccatctatgaaattattccaacactgtaagaagttatgcggcagtatagaaactaaattgggttttgatagactcatcttacatgtccattggctaagttgcactcctgtcagtgaatttatgaaggct

SEQ ID NO: 478009 - DNA, 595 bp, Homo sapiens
atgtcagtaaggcaagattctcgaaaattttactcctgaattgcttgcaacgcactgacattgtgttcagctccgtattgacttagaagatgacttggtctttgcctggggctcttacaatctggttgaagtagtcaaagcaatttaaacataaaaatgccaactgagaaggggattaaatcccaagaggtataaaggtgcatgtaacattattagccataacaccacatatatggtaattaagcaaaaagcacttctattttgctaccttcagcagcccatatcaaaaggccactatttaaatcaagtcaacttgtgaccttgatgtgacttatgatttgccaaacctgtaacactgtaatcaataattcaaataaatttaaataatcagagttgtgtgctgcagatttacatgctctcttaacattttagaaccaaaatacattgtgatttttagactgtgacaccatctatgaaattattccaacactgtaagaagttatgcggcagtatagaaactaaattgggttttgatagactcatcttacatgtccattggctaagttgyactcctgtcagtgaatttatgaaggct

SEQ ID NO: 478010 - DNA, 397 bp, Homo sapiens
cctgtagtccccactacttgggaggctgaggcaggagaatcacttgaacctgggaggtggtggttgcaatgagctgatattgtgccactgcactccagcctgggtgacagagcaagactctgtctcagaaaaaaaaaaaaaaaagggtaataataatacctacctctagaagactgtgagaagtaaatgtcaagtgcttagaacagtgaacagtacctggcacagagaaaaatactaagtaagtgtctgttgaatgaatggatgaatgaacaaatacatagataatatgggcagaggcttccaaatgtaaatggatgaagccttaagaaagtctcagaatgactctggactaacgggagtttrgggatgggagcaaatggaaaaggaagtaactaaa

SEQ ID NO: 478011 - DNA, 509 bp, Homo sapiens
tgttttaagccactaagttttgaggtgatagtttttatgcagcagaaaagcaaaagggcttgctaagcaatgatcaggctctttagtcctaacaataacttgatttctaaattattacatcagtcagcctgaaatatcaaagggaaaaggcctgagagaaccctaagtttttacctctggctcaccttcaggcaccacacagtcaggaagtgatggctgaagcagagtggtaaacagtttgccaaagagttgaaggactgtaaaaaacaggtgatgtataaagactaaaaaagcatattttcttttttttttttarctcctgaagtttaagaaaattgttaaaatgctagctgaccactaagctaataaaacacaaactacagtggtcacacaagacaaagaatacagactataaaaacataatttagaaaagctgctaaaaaataaaacccacaacaacaaacttgagagtgaagataatctgatttccagagctgtcacattataat

SEQ ID NO: 478012 - DNA, 584 bp, Homo sapiens
aattcaaataacataatattgcatattgcctataatattgcagggtcatatgggatggtctgaaggcatgagctctggatcagggctacctgggtttggatctctgccccactttttgcttgctctgggtcttggaatgaatcactcaaaagctctgaggctcagtttctttgtctgcaaaatgggaaaaataatgatacctaactcattggactggtaaatgaataatatataaaataataaaatagtatctggtttatactaactatttaaaatatattaatagtagtggtaactgtactgctatactaaacctttgtaaaargatatgttccgcctatgaaggaattaattgaaagcagggttttgttcctaaggtgagcaatgtttaccatgcccccagaatgtgcagtattgttcctatttgcaaatctgtctatctttttttatagaaaaatattcattagccagatgccacagtcaactctactgtttagtaagctcaactgtcttcatttggaccaaatggtgggcagcatactggaaacctttagtgaagctctgcttgagtccattagtaccag

SEQ ID NO: 478013 - DNA, 529 bp, Homo sapiens
ctgttgacaagactgaggatagtttagaaggatgcttggattgtctgcttcaagccctggctcaaaatagtaagtttcattatgtttactcaaattccaaagaagaaaatcaaatcagtagtcattcagaaactggtatgtagttaagcacataactttgtattcatataacttgaattcttttgaatcatatccctgaatactgagattgttttacatgttctaccctcctacttccctccacgcccccgcargatcctcaaagccaagctgataggcaaagaaaggaggaattgatgggtggtgatgacattaataccagtcccagagagaggccattgtttcatttctaacagtcaagcatcgtagttgtttttcttagcacctacatctgtgctttaaaaatagattgttttatatgtggggagagtggggagggagagagaggagaaacagagggggagcttaaaacacttaacatttttttggaatcttatcatattttaaaataattgtaccttaaaataat

SEQ ID NO: 478014 - DNA, 629 bp, Homo sapiens
ccaggcaatacaacttgatccacatgcacaggttagtccttgatttcagctaagagcaggtgcccagcctctatactgatcagtgtctgtgataaagatgtaattagatagccttaagatagtgctatttagtacacacggtaagagaggagccacagctagaacttggggtgcttggctgagatttgcaggacctagattacttcaaggcactgtcacccacctctctcatgcactggctgtataaacctattcactggttgttacaattaacaaaatataaattcatgtaaaagcactattgaattctttatggccttatattcataacaatagaactagtttgcatatatttatgtatacatatgcacatattcattcctttaagtttttcrgaataaatttctactttaaacaacaccttaaaatagtttttttaagcaagaaactcttattttaggaaattttgaaaatcaaagaaaatataagaaaaaaattactcctattcaagtgagaccactgtttagtattttgattctttatgttcttcggtctactcagatctcagataattttttccacataatctatactgattcttgtattttttcatttaaaatatcatggat

SEQ ID NO: 478015 - DNA, 629 bp, Homo sapiens
ccaggcaatacaacttgatccacatgcacaggttagtccttgatttcagctaagagcaggtgcccagcctctatactgatcagtgtctgtgataaagatgtaattagatagccttaagatagtgctatttagtacacacggtaagagaggagccacagctagaacttggggtgcttggctgagatttgcaggacctagattacttcaaggcactgtcacccacctctctcatgcactggctgtataaacctattcactggttgttacaattaacaaaatataaattcatgtaaaagcactattgaattctttatggccttatattcataacaatagaactagtttgcatatatttatgtatacatatgcacatattcattcctttaagtttttcggaataaatttctactttaaacaacaccttaaaatagtttttttaagcaagaaactcttattttaggaaattttgaaaatcaaagaaaatataagaaaaaaattactcctattcaagtgagaccactgtttagtattytgattctttatgttcttcggtctactcagatctcagataattttttccacataatctatactgattcttgtattttttcatttaaaatatcatggat

SEQ ID NO: 478016 - DNA, 629 bp, Homo sapiens
ccaggcaatacaacttgatccacatgcacaggttagtccttgatttcagctaagagcaggtgcccagcctctatactgatcagtgtctgtgataaagatgtaattagatagccttaagatagtgctatttagtacacacggtaagagaggagccacagctagaacttggggtgcttggctgagatttgcaggacctagattacttcaaggcactgtcacccacctctctcatgcactggctgtataaacctattcactggttgttacaattaacaaaatataaattcatgtaaaagcactattgaattctttatggccttatattcataacaatagaactagtttgcatatatttatgtatacatatgcacatattcattcctttaagtttttcggaataaatttctactttaaacaacaccttaaaatagtttttttaagcaagaaactcttattttaggaaattttgaaaatcaaagaaaatataagaaaaaaattactcctattcaagtgagaccactgtttagtattttgattctttatgttyttcggtctactcagatctcagataattttttccacataatctatactgattcttgtattttttcatttaaaatatcatggat

SEQ ID NO: 478017 - DNA, 593 bp, Homo sapiens
atacactgatcactagtccagaccaataaatgccataagtctgtttcttgcctaggtaatagagtaacttcataagtcatgctttgggggtcgtaggatatgctcactacrattccctctttccattgtcctcaggcctaccttctgagggacgtaagagaggagtcttctctccacttgagtaattattatctggtgccagcagccttttctacttgagtctggagcctgcagaagaggctcaagattcaacaccatcttgataggagttgggataggtacttgtccaagactaaggttcttctggtgataactaccccagaacattagtgggctctcagtcattgtcctgagtacatctttgactgaaacgtgatgccaggaatttctgtgggataaatttgctcccttcatcacagggctgcctaatgacctttttaccttcaggatttttattcagctttctattcccattgtttctaacggccttgtcctcaagagaataaaggagcacaagtgattggaaagaggcttgcttgcagggactggaaagcacctcttccctagtctgccctatagatctctcccttcca

SEQ ID NO: 478018 - DNA, 593 bp, Homo sapiens
atacactgatcactagtccagaccaataaatgccataagtctgtttcttgcctaggtaatagagtaacttcataagtcatgctttgggggtcgtaggatatgctcactacgattccctctttccattgtcctcaggcctaccttctgagggacgtaagagaggagtcttctctccacttgagtaattattatctggtgccagcagccttttctacttgagtctggagcctgcagaagaggctcaagattcaacaccatcttgataggagttgggataggtacttgtccaagactaaggttcttctggtgataactaccccagaacattagtgggctctcagtcattgtcctgagtacatctttgactgaaacgtgatgccaggaatttctgtgggataaatttgctcccttcatcacagggctgcctaatgacctttttaccttcaggatttttattcagctttctattcccattgtttctaayggccttgtcctcaagagaataaaggagcacaagtgattggaaagaggcttgcttgcagggactggaaagcacctcttccctagtctgccctatagatctctcccttcca

SEQ ID NO: 478019 - DNA, 530 bp, Homo sapiens
atttatagattcaatgctatcctcattaagctaccattgactttcctcacagaattagaaaaaattattttaaatttcatatggaatcaaaatagagcccgtatagccaagacaatcctaagcaaacaaaactatgatatattgttatagtcctttagttcagtgtgttgttaagtactcatggttatttcttctttaattttttaattactttggaagcttcttgcttaaatttcaaatgtagatttttagcgatttttaattttgagctcaatagaattataaattgatttatgacccagcatatgctcaacttttatagatgttttatatgtatctgaaagctatacgtgttctgcagtaattggatgcagcgttctatatatgtcaattagatcaagtttattaattgggtttttcaagtcctctacatattgaattttttgtacatttgtgcagcagccgtgtggtgtrccaccttgctctcccttcaggaaagtacctccacagtaggtgcatttagctgaaag

SEQ ID NO: 478020 - DNA, 257 bp, Homo sapiens
gtcctccttcgtatttttctctctatattctcctgtcacttggtcatcaaggcagatccattcaaggcaaggggaaatcagagtgactagccccttttctagctaaaaggccagaaggagggtcccctgggtggcagaaagtgtggtagagatcatggagaagaggaaatgtgagaaagggatcctctcaggttgtgtatcaagtactgggctcaacctgacrtgctcacgcaaaaatcttaccataaataagataa

SEQ ID NO: 478021 - DNA, 648 bp, Homo sapiens
aaccttaacctatggctacattgatatcacttccccaagactacacagctaatgatagcagaactgcttttatcgaatacctaccctcccaaactytactaagcacaggagacagtatccttgctgtggggagaaaccaataagtgaacacattgaaaataatattgaaatgaaacatcttttttctcttggtttccactgtaccactctggttttcaagtgcaacgttgcatacaaatgtcacttatatttatcttgcttcatagtgtggagttaaaatagcaaagtaactctctttaagcttcagttatagtaagatttggtaaattaaacaatcattctttttttattcaacaaacattcattcagcatctactaagtcactaatagctactgagctagactgagcatggtgatacatagaaaagatataaataagacagtctctagtggatatttgttatagaaaagatataaataagacagtctctagtggatatttgttatcttgttttttggttgcccagcatctcaactctctttccatgtttgagaaatttctcatcatggttgcattagttcagaacaccaaatacttgtagcatcttccttaggacatgacaggattatactttccaccctccttag

SEQ ID NO: 478022 - DNA, 556 bp, Homo sapiens
atccaatcctccaaaggaaaaacacaaaacatgtgaagtattaaaaattaattaaaatgtaattacactaataaaaatatgtgtcacattttcaaagctactttcacaggtaactacataaacataaatatagagataacaatatttacatgatagctgaacatggtaggttatcaaatttaataatcaaatgagttagattgcataacctctcataaaataggaagcatattcaataacaggtattccatggatatattttcacaggaataaaatctaaaatagcagaggaaacctatggcagatatggaatactacatgacattctaccttagtattttagggytcaaatgttgcattccatctctttctcataatacaaaggactataaaagaagggaaaaatgctatcttgcaattctacaaagattaaaaatagtgtattcccacctaccaaattgctattccttattaggacaaatgtaccattcaaatcatagtcaatctcatagaaatcaagaaaggtatgatttttattattttctaaagctactga

SEQ ID NO: 478023 - DNA, 658 bp, Homo sapiens
ttttctgttccttgtggcattgacagtggtcagtcattcagggatattaagctgatggatgaaatggttcagagagtccaagacagcatcactgatgtgtctggtgccttggcaggaagggctgaaaggctggggctgggttggagggggcatctacattggcttctccagcacggcggcctcagggtggttagactttaacatggagcctcaggggtccaagaaccagagttaatcaaagtggaagctgcaaggatttttatgaactagtttggcagatgacttagtgtttcttcccttgtactctattggtcaaagtggtcagaagcacatccagattcaagggaaggggaacaggcaccatctttcaattgaaaagaatgtataataatttgttgtcatgttttaaaaccttcacatctcaaactgagatgtatcaagcacttactatgggcaaacattttacacaccatccctttaaatcttggcaaaattcaatcaacyaaacactttagtgttacccattttatagatgaggaaactgaaaaacaatgagggtaagcaatttgcttgagactcctatacttgagccctcaacggtggagtaggatatcctagttattctctcctgagtatattcaaatcagtaaagtcctaa

SEQ ID NO: 478024 - DNA, 658 bp, Homo sapiens
ttttctgttccttgtggcattgacagtggtcagtcattcagggatattaagctgatggatgaaatggttcagagagtccaagacagcatcactgatgtgtctggtgccttggcaggaagggctgaaaggctggggctgggttggagggggcatctacattggcttctccagcacggcggcctcagggtggttagactttaacatggagcctcaggggtccaagaaccagagttaatcaaagtggaagctgcaaggatttttatgaactagtttggcagatgacttagtgtttcttcccttgtactctattggtcaaagtggtcagaagcacatccagattcaagggaaggggaacaggcaccatctttcaattgaaaagaatgtataataatttgttgtcatgttttaaaaccttcacatctcaaactgagatgtatcaagcacttactatgggcaaacattttacacaccatccctttaaatcttggcaaaattcaatcaactaaacacttyagtgttacccattttatagatgaggaaactgaaaaacaatgagggtaagcaatttgcttgagactcctatacttgagccctcaacggtggagtaggatatcctagttattctctcctgagtatattcaaatcagtaaagtcctaa

SEQ ID NO: 478025 - DNA, 658 bp, Homo sapiens
ttttctgttccttgtggcattgacagtggtcagtcattcagggatattaagctgatggatgaaatggttcagagagtccaagacagcatcactgatgtgtctggtgccttggcaggaagggctgaaaggctggggctgggttggagggggcatctacattggcttctccagcacggcggcctcagggtggttagactttaacatggagcctcaggggtccaagaaccagagttaatcaaagtggaagctgcaaggatttttatgaactagtttggcagatgacttagtgtttcttcccttgtactctattggtcaaagtggtcagaagcacatccagattcaagggaaggggaacaggcaccatctttcaattgaaaagaatgtataataatttgttgtcatgttttaaaaccttcacatctcaaactgagatgtatcaagcacttactatgggcaaacattttacacaccatccctttaaatcttggcaaaattcaatcaactaaacactttagtgttacccattttatagatgaggaaactgaaaaacaatgagggtaagcaatttgcttgagactcctatacttgagccctcaacggtggagtaggatatcctagttaytctctcctgagtatattcaaatcagtaaagtcctaa

SEQ ID NO: 478026 - DNA, 658 bp, Homo sapiens
ttttctgttccttgtggcattgacagtggtcagtcattcagggatattaagctgatggatgaaatggttcagagagtccaagacagcatcactgatgtgtctggtgccttggcaggaagggctgaaaggctggggctgggttggagggggcatctacattggcttctccagcacggcggcctcagggtggttagactttaacatggagcctcaggggtccaagaaccagagttaatcaaagtggaagctgcaaggatttttatgaactagtttggcagatgacttagtgtttcttcccttgtactctattggtcaaagtggtcagaagcacatccagattcaagggaaggggaacaggcaccatctttcaattgaaaagaatgtataataatttgttgtcatgttttaaaaccttcacatctcaaactgagatgtatcaagcacttactatgggcaaacattttacacaccatccctttaaatcttggcaaaattcaatcaactaaacactttagtgttacccattttatagatgaggaaactgaaaaacaatgagggtaagcaatttgcttgagactcctatacttgagccctcaacggtggagtaggatatcctagttattctctyctgagtatattcaaatcagtaaagtcctaa

SEQ ID NO: 478027 - DNA, 481 bp, Homo sapiens
attacgcatgagaaatacaatggaaataattcagttaatagcatgaatggagacataatcattttaagatcatattaaagaactcttcctagaaggcaccaagaaagtattaacaaaaaatatgcatatattgaaatgccaggggaagaaaaaaagatakatatatatatatatatatatatataaaaaacacagttgagaagaaataactggattttccagatttcaaaaaatatcactttcagattaaaaataaatgcagagtaaatataaagctctcctgcactaaataaaattataaaacttcagaacattaaagccaaagaggtatttccaaaagattccagaaaaaagcagtggctcacctactgaaaagcaagaatcactttgacatcagactaattacaagaccaaaggcaggcagcaatagagaaatattttcaaaatgttggaagaaattatcttaaagcctagaatttta

SEQ ID NO: 478028 - DNA, 589 bp, Homo sapiens
ttggattcctacataccgtttcctaaatacatatttaaattttaaaaatgaaaagaaaattcacatattaatacaatcttgtgatagggaaggttttatggacatggaacatcatacaaagaccatgaaggaaaaattaatagatctgaacagctaaaagtgtaagtaaaagcgtcatctctaaagtaaaataaagttacatataaaatactagaaatatgtttctaatatacatgataaatataggattcaagtccttawagcataaaaatgcctcaataaaagagaaaaagataaaaacctaatttaaaaataggcaaaagacatgaagagtcgttcacaaaaatgaaatataaataaataaaatgattacaaattgtcaaccctctctgtaacaataaatactaactaaactacaggcactggtaaacttttttttgtttaagcacaatatccaatacctgacaatggcacagagaactgattattctcatgcaaatgtaaatttggccttctgtagagcaatttagcaacctgtctattaatgataatttagcaagacagtatattaagccttaaatgaataata

SEQ ID NO: 478029 - DNA, 589 bp, Homo sapiens
ttggattcctacataccgtttcctaaatacatatttaaattttaaaaatgaaaagaaaattcacatattaatacaatcttgtgatagggaaggttttatggacatggaacatcatacaaagaccatgaaggaaaaattaatagatctgaacagctaaaagtgtaagtaaaagcgtcatctctaaagtaaaataaagttacatataaaatactagaaatatgtttctaatatacatgataaatataggattcaagtccttatagcataaaaatgcctcaataaaagagaaaaagataaaaacctaatttaaaaataggcaaaagacatraagagtcgttcacaaaaatgaaatataaataaataaaatgattacaaattgtcaaccctctctgtaacaataaatactaactaaactacaggcactggtaaacttttttttgtttaagcacaatatccaatacctgacaatggcacagagaactgattattctcatgcaaatgtaaatttggccttctgtagagcaatttagcaacctgtctattaatgataatttagcaagacagtatattaagccttaaatgaataata

SEQ ID NO: 478030 - DNA, 560 bp, Homo sapiens
cacaccaccgcacctgcctaacttttgtatgttttgtagagatggggtttcaccatgttgcctaggctggcttgaactcctgagctcaagcgatctgcctgcctcagcctccaaaagtgctgggattacaggcatgagccaccatacccaaccaacaatgggcattttatttttttatttttttattttttgagacagagtctcactctgtcgcccaggctggagtgcagtggcatgatcttggctcactgcaacctcctcctcctgggttcaagtgattctcctgcctcarcctcccaagtaactaggactacaggcatgtgccaccatgcctggctacttttttttatttttagtaaagacagggtttcaccatgttggccaggctggtctcgaactcctgaccccaggtgatctgcccgcctcagcctcccaaagtgctgggattacagggtgagctgccatacccagccataatgtacattttaaaaatcatctcttcctcgccccagtggaactcaattcagggctaggccattggctttttctttcagaaggca

SEQ ID NO: 478031 - DNA, 582 bp, Homo sapiens
agacacacagagactctgtctccccatcccatctacttccagattcagaagtagcactgcaccactggrcatcagtctgcctccccagaagtcagttcaggggtcagtcaacaaaacactgagacagggatgaaccttcaacaagagtcaggatgaggagaggatccagtgaatgagtttccctccccttttcccaataacaaaaaatgttctgagacacagtacttgggatagcctgtactatcccaaagggggccatataactaagtagcttgcttcctttcctcttttcctgccttacctccctattttcctcactcttacagccctgggattgcacacctctttgcccacttcccaagtaaggcattactgcataagctttgcttcgagttctgttttctgggaagtctaggctaagatattagaatcatgatataatttagatgtggatagatttcaatcaattgttcttctcaagggctagatagaagatgttgatgggaaggtgtttgaagccacacttggtgcacctagagcaagaagaggtcaaagaacaatgagaagtcttggaatagcgtt

SEQ ID NO: 478032 - DNA, 419 bp, Homo sapiens
gtgtctctaacctgatatgcacaaggtgaatatgcacatatatagatgtccacactccaccctcccaaagtcatggaaaaatgaaagctttaataaatatggttgtagataaaggaacagctcmtaatgacatgtgaaagcaattctgttaacaattgaaacaaattatctatatgactttgtaagatgacatgtaatgatcatagacaaaaaatgaactagtctcagaataaaagcccttgtcaggagaaaattcactgctcattatgggattgatcgtagactgcttctttcctaatttaaacctaactctttaaaattaaaaattagaagtatgtgtggaaagagaagtagattaagagctaagagacctgggttttcatccttgctctgtggctaatgagctgtgtgacacttcg

SEQ ID NO: 478033 - DNA, 630 bp, Homo sapiens
ataaatgttagtttctttttattactatgggcacaacatcttctgtattattagttcaagccttttagttgtttgaagtcattggcactttctaatctcagagttctcagaagcagcatggtgaactgggagtagattccataaagaatagggttctgttggatgtgycagtaacagctctgtgaccttgggcaagttacttaacttttccagccttgttttcctggacagtaaaaaaggttgcaggccaggcgcagtggctcatgcttgttatgctagcactttggtaggccaaggcgggtggatcacctgaggtcaggagttcgagaccagcctggtcaatatggtgaaaccccatctctactaaaaaataaaaagtacaaaaagttagctgggcctggtggcgggcacccctgtaatcctagctacttgggaggctgaggcaggagaatctcttgaacgcaggaggcagaggttgcagtgagccaagatcgcaccattgcactccagcctgggcaataagagtgaaactctgcctcaaaaaaaaaaaaaaagagggttgcacgttgtcaacaaatacctattgaacaccctggatgttcaagacatgtgaatgactcgaagaagtgg

SEQ ID NO: 478034 - DNA, 475 bp, Homo sapiens
tgttggatgtgccagtaacagctctgtgaccttgggcaagttacttaacttttccagccttgttttcctggacagtaaaaaaggttgcaggccaggcgcagtggctcatgcttgttatgctagcactttggtaggccaaggcgggtggatcacctgaggtcaggagttcgagaccagcctggtcaatatggtgaaaccccatctctactaaaaaataaaaagtacaaaaagttagctgggcctggtggcgggcacccctgtaatcctagctacttgggaggctgaggcaggagaatctcttgaacgcaggaggcagaggttgcagtgagccaagatcgcaccattgcactycagcctgggcaataagagtgaaactctgcctcaaaaaaaaaaaaaaagagggttgcacgttgtcaacaaatacctattgaacaccctggatgttcaagacatgtgaatgactcgaagaagtggc

SEQ ID NO: 478035 - DNA, 490 bp, Homo sapiens
ttcttgaccctcttctccaaaggatagtgctaaaatatagaaggcacggtgacggacttgattctgatactcactagctgtgcagccttaagaaagccattcagattttctggctaagagatctaggagtattaaataagataaagtgtgcaacatacccagtataatgcctgtcacatattaaatgctcaataagcattggtcctgtattcttagcacctcatctgtagtgctagaatgctaccagacttgcctatttctcaggttattttgagttcaaaagatatagtgggtgatatagtgagagacattatacatatgcaagctaaaattaaaagcaattatccaagaatcaagtgttctgatatggaacaatagatgagaaatggaaatcctgatagcttgaagagaaagatggrcatccaggttccccttattgagtatctgctctcgtcctcatttaatttgtcagcttctggagctgacttaa

SEQ ID NO: 478036 - DNA, 415 bp, Homo sapiens
atttaagcaaatgtaccccagatattattatttcaatatatgataattcaaaattatcagttagcttgctgtttttgttttgctttgtttttgtattaagatctttaaaactcagtgtgtatgttataccaagagcacaccttaatttgcactagccataggtcaggtgctgaatagccacatactggacagccacctcactagccacctcccatttttaacatctttcacagacagcatctaagttataaggtacactttaattttctaacacttgtggaggcttgaaagtgaccaacagtgaaagaacaaaaagtcctatgtttattttcaccgctttttccctccctcaatattgtcacyggtaaactgagatcttttcccattttgtgtggattgcacagaagaacctcca

SEQ ID NO: 478037 - DNA, 632 bp, Homo sapiens
tggtgggttataaataactaataagtagctacaatcatcatataaatataatgaaactaaaaattgtgcttgtttaatctgcacatgtttccttgaccccttcaattggaaaatcctgctagcgttgaaccagcacccttttcactacaaatacagcattttcttctcttactcaagagcaggaggactggtacctgaacagcctctgtttttgacagccaagaaataaggaaatgtcactgcakaaatagtaacttgcctgtagctcctgagtacagaatggcctggttacaaggcaaacactgcggcaggtagcaggcaggtggaacatctcctgaggaggagggctcccactgccacccacctggacgctgggaattcaggacataatgaggcagatttgtgcttggggcaggagtaggggtattgggaaatgctatcgatgctactgctgctgctgcttcttatcatcaatcgttattgatatttttatgtaagttacagtttctgccttctctcaaatctcactctcttttggggagcaagacaaataaaaagcttataaaataaagtgcgacgtgttctcttcatgggacagttggggaaaactcctgagacaatgaattctgctg

SEQ ID NO: 478038 - DNA, 632 bp, Homo sapiens
tggtgggttataaataactaataagtagctacaatcatcatataaatataatgaaactaaaaattgtgcttgtttaatctgcacatgtttccttgaccccttcaattggaaaatcctgctagcgttgaaccagcacccttttcactacaaatacagcattttcttctcttactcaagagcaggaggactggtacctgaacagcctctgtttttgacagccaagaaataaggaaatgtcactgcagaaatagtaacttgcctgtagctcctgagtacagaatggcctggttacaaggcaaacactgcggcaggtagcaggcaggtggaacatctcctgaggaggagggctcccactgccacccacctggacgctgggaattcaggacataatgaggcagatttgtgcttggggcaggagtaggggtattgggaaatgctatcgatgctactgctgctgctgcttcttatcatcaatcgttattgatatttttatgtaagttacagtttctgccttctctcaaatctcactctcttttggggagcaagacaaataaaaagcttataaaataaagtgcgaygtgttctcttcatgggacagttggggaaaactcctgagacaatgaattctgctg

SEQ ID NO: 478039 - DNA, 583 bp, Homo sapiens
gtttagggaagactctggtaaagctatggagggccagtgggggaaataaagcagtgagtatcaacaactacataatctggttgctacatcatcacttgcttccccacctgtatctcttcttctttgcttgagacctaagaaatgccaactgagcattcattgtccttccttcaccttcagtttgcatttcagcccccaaagcaagaacktgtcttcctactttctgaatctggggtcacattatatcagaatacaaccaatagaaaagtaatggctgaggctaaagccaaaaacccttgagttcacagatttcaggtcctggatacagtgctccagtttggtaacaaaaattgaaggtggaagcaatgcccagcaagatgagttctaggagaagcaaatgtaggtgatttcagtgagtagagctttgttgtagacagtaggttagcgtccttccccaaatcgtatgttgaagctctaatccccagtgtaatggtacttggagatgggaccttgggagctaattaggatcagattaggtcatgagaatggagcaccatgataggattgtgtccttatgaaagag

SEQ ID NO: 478040 - DNA, 583 bp, Homo sapiens
gtttagggaagactctggtaaagctatggagggccagtgggggaaataaagcagtgagtatcaacaactacataatctggttgctacatcatcacttgcttccccacctgtatctcttcttctttgcttgagacctaagaaatgccaactgagcattcattgtccttccttcaccttcagtttgcatttcagcccccaaagcaagaacttgtcttcctactttctgaatctggggtcacattatatcagaatacaaccaatagaaaartaatggctgaggctaaagccaaaaacccttgagttcacagatttcaggtcctggatacagtgctccagtttggtaacaaaaattgaaggtggaagcaatgcccagcaagatgagttctaggagaagcaaatgtaggtgatttcagtgagtagagctttgttgtagacagtaggttagcgtccttccccaaatcgtatgttgaagctctaatccccagtgtaatggtacttggagatgggaccttgggagctaattaggatcagattaggtcatgagaatggagcaccatgataggattgtgtccttatgaaagag

SEQ ID NO: 478041 - DNA, 583 bp, Homo sapiens
gtttagggaagactctggtaaagctatggagggccagtgggggaaataaagcagtgagtatcaacaactacataatctggttgctacatcatcacttgcttccccacctgtatctcttcttctttgcttgagacctaagaaatgccaactgagcattcattgtccttccttcaccttcagtttgcatttcagcccccaaagcaagaacttgtcttcctactttctgaatctggggtcacattatatcagaatacaaccaatagaaaagtaatggctgaggctaaagccaaaaacccttgagttcacagatttcaggtcctggatacagtgctccagtttggtaacaaaaattgaaggtggaagcaatgcccagcaagatgagttctaggagaagcaaatgtaggtgatttcagtgagtagagctttgttgtagacagtaggttagcgtccttccccaaatcgtatgttgaagctctaatccccagtgtaatggtayttggagatgggaccttgggagctaattaggatcagattaggtcatgagaatggagcaccatgataggattgtgtccttatgaaagag

SEQ ID NO: 478042 - DNA, 538 bp, Homo sapiens
aagttttttttttttttttgagatgtagtgttgctctgtcaccaggctggagtgcagtggygtgatctcagctcactgcaaactccaactcccaggttcaagtgattctcctccctcagcctcctgagtagctgggattacaggtacgtgtcaccacacccagctaatttttgtatttttagtagagacggggtttcaccatgttggctaggatggtctcaatctcctgaccttgtgatctgcccacctcggcctcctgaagtgctgggattacaggcatgagccaccgcacctggccaagtgttaaatttaattcatggaactatcttcctgtttgaaccttaggtagggggaaaagctgagtctggctgccaatatttttttttctcttattcttttgggcaagttgaattgaaaatcatgatcaagacaacaagctaggctccaaatctagtcaaagcaatacatctttttggagcatttactatttatgaagccctatgaaaggcatataaagtagttgaagacatggacttta

SEQ ID NO: 478043 - DNA, 500 bp, Homo sapiens
cttgagaagctgggactagaggcacatgctgttatgtctggctgattttaaaatgtatatatatatatatatatatatatatataatttttattttatttatttatttatttwttttttttgtagagatggggttttgctatgttgcccaggctggtctcaaactcctggcctcaagtgaaactcctgcctcagtccctgcaaagtactgggattaaaggcaggagccactgtgcctggcctctttttattcttaaaatttaatttttcctaggcaagtcttattttcctcaccagatgatatttctcttgatgttaggagcttgtcttacacatcatcagccacagattattgtctgtcatgtgtcttgtaggagcttaataaatatttcatagtcattatctatcctgtccatgttctcttactaaaaatgcaaatacaagtttcctattcctgacaacctgccagctccacacagcttcgaggtgatggggtgtaga

SEQ ID NO: 478044 - DNA, 640 bp, Homo sapiens
gtcaacccgagtatgttccacatcctgtgagtgccctgttcttcctggtagtttatacacttaggggattgaaaacagcccaattaagctcgtttgcctttccaaagacatttacatgaggagaaccctagtaatagctctgagaaggctagcatttgtttcccaagatagtgctatagaataaagaaacaatggtcytaggtcacacagtctactaatgctgaatggaaaacagaaggaatttcatttcgtagctattttatttggaatgagtcttttcacatttgccagtgctttgatactgtgcagtcatcagccttaataactagtgatgtacaatagctacagatggcagtgttctgagtcatcgttggaatttttgttcaggtttctcttcctgcttgcatgaataagtcccctgccagtgtcctttgtgccttaggtctatgggtctatgctaatgggtatgactcgtagtgaatatatgtctacatgtataactctgtatatcatcagcttaaaatgtttacacatgagctaccttgggtattaatttgcactcattatctgtgccccaatttgaagcgaagaggtcaacactttcacagagacctatgatttaatggtgaagaaataatac

SEQ ID NO: 478045 - DNA, 622 bp, Homo sapiens
ctaacttggtgtgtacttcctgtggctattaagtaatttaattattcctgaaaagtttgatattaaagacctttgatattgaagaattgaaagcatagtgaaacctgtctttgtgtgccctttctttttgtgcatttaatatggagcagtagactcgctccacttcatgctgatggaggtggaagggggagacggaggtggaagcctgccactgaatttgaattatgtagggaacatagccgtgytgtactgtcttgtcaatatctccttccagctggtgctgacataattaggcacatcaagcacagaagaagacattttaaattcaaagcactgttccaagtcctgtgagtagctatgaaaggtgcctgaagtaatcaataacacatggtaaggtgtgcagttccagtaggttatccacccacctcaggtctattataagacacgaagaagcagaaaagccaagatttctaacttcttaaagagtggccttgtttgaatagtttgacttattagagtgtgttttctttaaaaatatatatacttagaattgaatctttcatcgccagcataaagtgtatatatgtaaactttctgagaccaggaacatcacctcctttgt

SEQ ID NO: 478046 - DNA, 631 bp, Homo sapiens
tccctttattttcacatctgaaagtatgtagcagtgtggcaaatggttttctcaaatgaataaataatattctttttggaatcattgaatcaagattttgaagagtttctaggaggatatcatcttttttcaagtgaaattatatcttagccatattagaagaaagaaattattttaaaagacatccagaaatgtctaaactgctctttagtgtatcttataaatgcttccagaatgatagttgcaacttcttgcatgtcaaatatcagatattatattaaaactttcacataactgtttaaagatcatcacaacagtatctcagagatgacataatcctcattttacaggcaaagattatgagtctcagataatctaagcaagttgcygaaagctgacaatcattggggctagagttcagaatcagatttgtctcgctgtaaagtctgagctcttcccaccacacctccattgtcattcattagaccacaaattcatcatgcacattttagattattccctccaatccattgtcagcatagctggagaaaatgttttgttttatttgtcactgtctagattatctgctgacttaatctcacttgaacacacctttactctaaagtatatg

SEQ ID NO: 478047 - DNA, 639 bp, Homo sapiens
acacataccacagagtaattaatgtgcatgctcacctgttcttcagaaagacagctgtggggtcctgcagatttttaaatcatcagagcaaatatccttactatgataatgctaggaatgtaaaaatattgcttctataaatgtttttagcacagaatttagggcaaaaaatagtttcctggaattataaagattgyttctcaggaaataccattctaacagtatttacaaggaagaagttaatatgactcttattgtttatgtaggaatgtagcaaaacactctgagacactaatgtgatatagcttaaataaaagaacatttgactattctagtattttagctaaagggcattttacccccagaatcccctttgggagtgatgagctttatatccttattaggaacgctgctggcagatggtcaattgtcaatctccattagggattatgtggctgaagatgaagataaccaccttgttcaagggcatgccctctttccaggaaggcccatgtccagtgactgattgacacagagcctctcacccaccctggacaactctgaagagtcaccctagcttcagagctccccaaagtgttcactgaggcctccagtgggactgcctccctgctcagctcc

SEQ ID NO: 478048 - DNA, 639 bp, Homo sapiens
acacataccacagagtaattaatgtgcatgctcacctgttcttcagaaagacagctgtggggtcctgcagatttttaaatcatcagagcaaatatccttactatgataatgctaggaatgtaaaaatattgcttctataaatgtttttagcacagaatttagggcaaaaaatagtttcctggaattataaagattgcttctcaggaaataccattctaacagtatttacaaggaagaagttaatatgactcttattgtttatgtaggaatstagcaaaacactctgagacactaatgtgatatagcttaaataaaagaacatttgactattctagtattttagctaaagggcattttacccccagaatcccctttgggagtgatgagctttatatccttattaggaacgctgctggcagatggtcaattgtcaatctccattagggattatgtggctgaagatgaagataaccaccttgttcaagggcatgccctctttccaggaaggcccatgtccagtgactgattgacacagagcctctcacccaccctggacaactctgaagagtcaccctagcttcagagctccccaaagtgttcactgaggcctccagtgggactgcctccctgctcagctcc

SEQ ID NO: 478049 - DNA, 599 bp, Homo sapiens
accccagataatgtgtcacctgtaaaataacccctgatctgaccaagtatagcagcttggttatcctgattatttagcatgtattacattgtacgtttaattgttcaggttagtctcttccatgaaactgcatatttcctaaagacagggaatgtgtcttatgtttgtaaacacaagatctaccttaatcatagacagtactcaacattatttgttgaattgatttgaaattgtattgtcataaattcagaagaactgtccaaattctattgccagcatttggttacaataaattttttacaagaccaatgtatatagcttgttgctatctggagatttttaggaatatgaaattttgcataagcagatttgatactgaggcatataacagaggccaccaaattttgtattaaaggaggagacctcacagcaaagggggaaggttccatgaagctaccagcaacttgaccttctctattgagtaacctctacagtcctccagtggaacaggggcaggaccgtgatctttaatacayttaaaaagcagcaaggtataatgagtaatttaccaaggccatagtttctatctggaaagaaag

SEQ ID NO: 478050 - DNA, 565 bp, Homo sapiens
tgggcatctctttttgggctccagttcatcctagggcctttcctcttcatgtgatctctccagcagggtagctggactgctcacgtgactgctgaggagccgcaaaagctcatgcaagagggataaatcaccaggtgttcttaatatctgctcctagaattcctgaagtgctgctaggtttgttgtctcctggtcaaaggggacaggagctcagtccagaggccagagaggaggggtatgaatgtggagaaaagggtgggcttatctgaggcyatctttggagcctggctgtcactataggtacaagtgagggagcagggctgtggcagtaagggcaagaattcccaattctgtggtagagcatcctcatgaattagaaggtcaggaaaggaactcatatgacaaaagataatgagacaaattagcataaaaacacatctcttgaaatttagctggtcctaaaatctagaagttctctttattatttaaagggaatgtaaatgaatatggcattatttttacatttattttaataatctaaattctatcacttttttagagtttt

SEQ ID NO: 478051 - DNA, 585 bp, Homo sapiens
gcgctctcaaggaggagctgctcctcatgaagaagaaccatgaagaggaagtaaaaggcttgcaagtccagattgccaactctgggttggycgtggaggtagatgcccccaaatctcaagtcctcgccaaggtcatggcagacatcagggcccaataggatgagctgtctcagaagaactcagagaagctaggcaagtactggtctcagcagactgaggagagcaccacagtggtcaccacacactctgccaaggtcagagctgctgagatgacacggagctgagacgtacagtccagtgcttggagattgacctggactcaatgagaaatctgaagaccagcttgtagaacagcctgagggaggtggaggcccgctacgccctgcagatggagcagctcaacagaatcctgctgtacttggagtcaaagctggcacagaactgggcagagggccagcgcaaggtccaggagtacaaggacttgctgaacatcagggtcaagctggaggctgagatcgccacctaccgccgcctgctggaagacagcgagggcctcaatcttggtgatgccctggacagcagcaa

SEQ ID NO: 478052 - DNA, 557 bp, Homo sapiens
gcgctctcaaggaggagctgctcctcatgaagaagaaccatgaagaggaagtaaaaggcttgcaagtccagattgccaactctgggttggccgtggaggtagatgcccccaaatctcaagtcctcgccaaggtcatggcagacatcagggcccaataggatgagctgtctcagaagaactcagagaagctaggcaagtactggtctcagcagactgaggagagcaccacagtggtcaccacacactctgccaaggtcagagctgctgagatgacacggagctgagacgtacagtccagtgcttggagattgacctggactcaatgagaaatctgaagaccagcttgtagaacagcctgagggaggtggaggcccgctacgccctgcagatggagcagctcaacagaatcctgctgtacytggagtcaaagctggcacagaactgggcagagggccagcgcaaggtccaggagtacaaggacttgctgaacatcagggtcaagctggaggctgagatcgccacctaccgccgcctgctggaagacagcgagggcctca

SEQ ID NO: 478053 - DNA, 557 bp, Homo sapiens
caagagagaaggaggaggtgccacacacttttcacaaccggatctcgcaagtrcctgctcactatgcaaggtcagcaccaaatcatgagggatctgtccctatggcccccacacctcccaccaggccccacctccaacactgggcatcacaattcaacatgagacttagagggggcaacatacaaactgtatcaggtggagctgcatgacgggactagtgccctcaggaagaggaagagattccagaactttctctctgtgtcacttgaggacacggccggaaggcagccctgcctggaccttgaagctggacttccagcctccagaactgtgagacataaacgtctgccgttgaaggggctcagcttgtggtgtgggattgtggtagccctagtgaggcactggcctgttagatggaaacttctggagctaaggggctttcacctttgcacccagcacctggtcagagcttggacatcctctcctaaaggtttccctaagcttgggttgaattaatgagctgcccagatgccacagaccatgtctgagagcctgaa

SEQ ID NO: 478054 - DNA, 569 bp, Homo sapiens
tcccatgtgccccacaaatacgtacaaatcttatatatcaataaaaaagaaaaattaaaagaaaagaaatagactgagtggggctggtggccctcccacctacactggcttcagcactgacttgacccagtggtattacctgcaaagaggtgcccacgcaaaactgcawagccagagtggtttcccagtccctctccctggccctttatgagactcctccttccatctcccttgtgtggccccatagggcttgctggggtcagcaccctgctcaggccagcctgtaatgtccagagtttgttcccaaatcagaactagcattccttgaccatcttcatcaatgatctgaggaaagttaagtcacactgaggttaaaaagtcaactgcattttaagagattagtagcacagatgaaagggactaacaggcccctttctgtgtggggaagctttccttaattacctcattcaatccgcagaaccactattagagaagaagaaatgcctgctattaagggttaagtaacttgcccaaggtcacccacgtctaagtagcagaggggagattca

SEQ ID NO: 478055 - DNA, 569 bp, Homo sapiens
tcccatgtgccccacaaatacgtacaaatcttatatatcaataaaaaagaaaaattaaaagaaaagaaatagactgagtggggctggtggccctcccacctacactggcttcagcactgacttgacccagtggtattacctgcaaagaggtgcccacgcaaaactgcaargccagagtggtttcccagtccctctccctggccctttatgagactcctccttccatctcccttgtgtggccccatagggcttgctggggtcagcaccctgctcaggccagcctgtaatgtccagagtttgttcccaaatcagaactagcattccttgaccatcttcatcaatgatctgaggaaagttaagtcacactgaggttaaaaagtcaactgcattttaagagattagtagcacagatgaaagggactaacaggcccctttctgtgtggggaagctttccttaattacctcattcaatccgcagaaccactattagagaagaagaaatgcctgctattaagggttaagtaacttgcccaaggtcacccacgtctaagtagcagaggggagattca

SEQ ID NO: 478056 - DNA, 569 bp, Homo sapiens
tcccatgtgccccacaaatacgtacaaatcttatatatcaataaaaaagaaaaattaaaagaaaagaaatagactgagtggggctggtggccctcccacctacactggcttcagcactgacttgacccagtggtattacctgcaaagaggtgcccacgcaaaactgcaaagccagagtggtttcccagtccctctccctggccctttatgagactcctccttccatctcccttgtgtggccccatagggcttgctggggtcagcacccygctcaggccagcctgtaatgtccagagtttgttcccaaatcagaactagcattccttgaccatcttcatcaatgatctgaggaaagttaagtcacactgaggttaaaaagtcaactgcattttaagagattagtagcacagatgaaagggactaacaggcccctttctgtgtggggaagctttccttaattacctcattcaatccgcagaaccactattagagaagaagaaatgcctgctattaagggttaagtaacttgcccaaggtcacccacgtctaagtagcagaggggagattca

SEQ ID NO: 478057 - DNA, 547 bp, Homo sapiens
cacttttcctcctgtccctcctcccagcagctcagcatgcatcctgtctcccggccacgggacaaggctgtgagctgcagctttgtgcactcrctgtctttgcaaagtgttttggaagttctgtcaattcgtcttggcctggaaaatggaaaattggaacagtgaaaacacatcaaatggtgcctgtttcgtgcttggggaggcagacaaggagaaacttcatgcggtcaaggtgtgggtggctgttggcttaaagccagtggagagcttatttatccccttggaggaagggaagagcagattagaactatcaaagcttcttaatattagctctgggtttttggtggagggtggcaagtggagggaggagggttaattatacggctgactgtaagcaagcagaatctgatccaatcgtggctgtcattgattgagccaggtgctgtgctaagggtatcacgtgcatcagctcaatctaatccttgcattgctcttattatttccattttacagataacaaaactgcactttagaaaactgagggatt

SEQ ID NO: 478058 - DNA, 547 bp, Homo sapiens
cacttttcctcctgtccctcctcccagcagctcagcatgcatcctgtctcccggccacgggacaaggctgtgagctgcagctttgtgcactcactgtctttgcaaagtgttttggaagttctgtcaattcgtcttggcctggaaaatggaaaattggaacagtgaaaacacatcaaatggtgcctgtttcgtgcttggggaggcagacaaggagaaacttcatgcggtcaaggtgtgggtggctgttggcttaaagccagtggagagcttatttatccccttggaggaagggaagagcagattagaactatcaaagcttcttaatattagctctgggtttttggtggagggtggcaagtggagggaggagggttaattatacggctgactgtaagcaagcagaatctgatccaatcgtggctgtcattgattgagccaggtgctgtgctaagggtatcacgygcatcagctcaatctaatccttgcattgctcttattatttccattttacagataacaaaactgcactttagaaaactgagggatt

SEQ ID NO: 478059 - DNA, 635 bp, Homo sapiens
tgtcctttgcctttccctgtgtgtgtcaayctatgttctcactaaaccatcagcgatagaactagtcccacctggtctttggtgtgtgttagcatctgctgttgctgagcttggactccaccatagtctctggtcctgtggctgctgcattctgcctcaaagtccctgccatttcttaagtccttccagcgtgtccttgctcccctgagcaggtgggaacctctggctcttctgtacattgtgcacagtgttgattatgtctaccttgctagatccctctttctgccaatgctatttctatatgtctactatgagccttagtgttctcagacctagtcatgtttatttagatttacttcgtctcacccgttgatttctgaccactttgctccgtctctagaagatgaagggctttctctattttttcccctttctgtatggtcaggtcatatcattccccatgtggatgcagcatttgaactcctttccctggagccataagatgataggactgtaggggaatatgatttatagaggaaataaggacttgtttactgttttcaaaatagcaatatctaattcttaacaaataattacacagttgttcattttagcatgttattattatgctattg

SEQ ID NO: 478060 - DNA, 635 bp, Homo sapiens
tgtcctttgcctttccctgtgtgtgtcaatctatgttctcactaaaccatcagcgatagaactagtcccacctggtctttggtgtgtgttagcatctgctgttgctgagcttggactccaccatagtctctggtcctgtggctgctgcattctgsctcaaagtccctgccatttcttaagtccttccagcgtgtccttgctcccctgagcaggtgggaacctctggctcttctgtacattgtgcacagtgttgattatgtctaccttgctagatccctctttctgccaatgctatttctatatgtctactatgagccttagtgttctcagacctagtcatgtttatttagatttacttcgtctcacccgttgatttctgaccactttgctccgtctctagaagatgaagggctttctctattttttcccctttctgtatggtcaggtcatatcattccccatgtggatgcagcatttgaactcctttccctggagccataagatgataggactgtaggggaatatgatttatagaggaaataaggacttgtttactgttttcaaaatagcaatatctaattcttaacaaataattacacagttgttcattttagcatgttattattatgctattg

SEQ ID NO: 478061 - DNA, 587 bp, Homo sapiens
gatctccaaagcaagcctttctcatggctgggatattttccttggccattacggaagtgtaaatcccccgtaaatgtccctaaacttgagaatgaagctgtgatgccttcgtggttcagtaagatcatgtagcagagctctcacagtgtaatgtggactaaagttatgaacaacaaacaattccaggcctggtccataaaaagaaacctacactcggccctccatgcttccttcatcaacctgcctgctgagggtgctgcaagtctccaacccrcacccagtcccactcctgcaccgcacactttcaaatgcagttcttccaaagaaagtcccagctctgtccacactggggcccctaatctcagctgagtctttaacacaggccagcattctaaggtctattcctagtcagctgaccactccttctttaacctaaattcatcctcctccccagacaactaatcctctcctgatctcagtcaacagcaccacaatcatcagaaaaatcctttagacgcttccccctccctgactcatccacctgaaaagttacatctcctaaatatgccccagatccttcagggtgt

SEQ ID NO: 478062 - DNA, 327 bp, Homo sapiens
ctcggtatgggacacagacattttgatgccaagtttttctggaagtatccaggagagctgctgctgaaattagagatggggacctactactatcatatttatattcccctccaggggaagaaataaaaagtatgccagtttcaacaaataaatgccctttggagtttggtttagtttttataaatattcctaatattttctgactcccttttctttcaracttttttcttgtcaagtaaacacttcttttacatatagatagtgaaatgtttcaagatattacaggatatgaaaacaaatcaatattaatcagagatttttatattt

SEQ ID NO: 478063 - DNA, 617 bp, Homo sapiens
ttcataattacctcatggtaaagcaaccctgatgctattcacttctccaataggaagtaaacagagtttaaaaatacaaaagtatttagacctgacaattcaactatttgttagggatctcctactggtttgctcttgaaggatattctaccataagataaagcaacattggtcagcaccatatagagtggtggcaaaaaaaatttttttaattaaattacatttaggaactctatatagactatttatctaaaayatgtcccttattatcacaaaaggactactgtatacagatactccttgacttacaaaggggttgcatcctgataaacctatcacaaattgaaaatgcatttaacacatctaacctaccaaacatcatacttagcccaccctaccctaaacatgtgcagaatgctttcattagcctatcattgagcgaaatcatctaacataaagcctattttataatagagtgttgaatagctcatgtaattcactgaatactgaaagtgaaaaacagaagggttgtatgggtactcaaagcatggcttctactgaatgtggatcactttcacaccatcataaagtcagaaaattctaagtcaaaccatctt

SEQ ID NO: 478064 - DNA, 655 bp, Homo sapiens
gcgcctactagattaagggtgaatttgccttccctagcccactgactcaaatgttaatctctcttggtaacaccctcacagacacacccaggatcaatactttgtatccttcaatccaatcaagttgacactcagtagtatcaactagcacagtaggaaacttacgtctgttctttttctgtgttccatctctgttatttccttttcccactggctttttttctcctttaagatatggaggaaatggagccttcccttccttttaagaaatagtggcggccgggcacagtggctgatgcctgcaatcccagtactttgataggccaaggtgggcagatcacttgaggtcaggagtttaagaccaccctggccaacattgcaaaactctgyctctactaaaaatagaaaaattagctgggcaaggtggcgtgtgcctgtagtcccagctacttgggagggtaaggcacaagaatcacttcagtctgggaggcggaggttgcagtaagctgaggtcgcaccactgcactccagcctgggtgatgaagtgagactgtctcacaaaaaaaagaaaaaagaaaaaaaaaatagtggcttcctcctccccatcttcctcctcttttcttcctccctacgactgactgtcttcaattttgac

SEQ ID NO: 478065 - DNA, 589 bp, Homo sapiens
ctgagtcttattggagatttgatcattctcatgggatgggcttgatggccctgctagtgtgattgtctgtagcaagattgcaaattggcaatcaccttttgggaaccatttcaattggagagctccaaaaaaagtagttctttgtaggtttctcccttttgggtggggtccttggttcaaagatagacagtaggattttttaaatctcctgtttctcaggtgggctgaaccaattccggttgcctttcccactaaagggaaaaagatgtcaactcacatgtcttcacacaacactccaggtaatgactttaattgataagatttagcaactgaaatgaaaactatttaccatcttgggtcagactggaccaaagattctaaggtagaaatgaataaacctagttgttatgggttgaattgtgtccccccaaaattcataagttgaagtcctactgccaatacaccagaacatggccttatttggaaatagggtctttgcaagtgtgattagttaagacgaatttataatgatgtagggtgggcctgtagtctaatatggttggtatmcctatgaaaaggggaaatttgg

SEQ ID NO: 478066 - DNA, 603 bp, Homo sapiens
gcaaaaatatttatttgcaacaacaaagcattacaagtgacaaagtagagctctaaatttccactgatttcaaagtcagaggacwcagaaatcaccaggtcacatgttgatgactcaatctctgtctttcctcatgttcctctttttctatcagatgctaaagcgaacatgggtgtacatgtctgtgtgtgtgtgcatgtatgtgtgtgtttctgtctgtgtgcacaagagcatgcacataagaagcagggtctccttcgcagtccaagaaccctactgctattcactcttcagatgttttggggagttacacaaactttcccaagcagaagccctacagagggagaagctggattgtggggatatttttaaaatgtgggccaaaaggtttccaggattactacagttccaactgccctgtgaactaattgcttgtaattcacacctcttcctgagctttcaatccgtgaaatctcatctggaacaacggatgccagtctcaaatgccaagctccagagaactcatttctgacaagcttttaaatccaactcaagtcacagggtttggaccaaaatctttaccattccatgcttagctgaagc

SEQ ID NO: 478067 - DNA, 603 bp, Homo sapiens
gcaaaaatatttatttgcaacaacaaagcattacaagtgacaaagtagagctctaaatttccactgatttcaaagtcagaggacacagaaatcaccaggtcacatgttgrtgactcaatctctgtctttcctcatgttcctctttttctatcagatgctaaagcgaacatgggtgtacatgtctgtgtgtgtgtgcatgtatgtgtgtgtttctgtctgtgtgcacaagagcatgcacataagaagcagggtctccttcgcagtccaagaaccctactgctattcactcttcagatgttttggggagttacacaaactttcccaagcagaagccctacagagggagaagctggattgtggggatatttttaaaatgtgggccaaaaggtttccaggattactacagttccaactgccctgtgaactaattgcttgtaattcacacctcttcctgagctttcaatccgtgaaatctcatctggaacaacggatgccagtctcaaatgccaagctccagagaactcatttctgacaagcttttaaatccaactcaagtcacagggtttggaccaaaatctttaccattccatgcttagctgaagc

SEQ ID NO: 478068 - DNA, 603 bp, Homo sapiens
gcaaaaatatttatttgcaacaacaaagcattacaagtgacaaagtagagctctaaatttccactgatttcaaagtcagaggacacagaaatcaccaggtcacatgttgatgactcaatctctgtctttcctcatgttcctctttttctatcagatgctaaagcgaacatgggtgtacatgtctgtgtgtgtgtgcatgtatgtgtgtgtttctgtctgtgtgcacaagagcatgcacataagaagcagggtctccttcgcagtccaagaacmctactgctattcactcttcagatgttttggggagttacacaaactttcccaagcagaagccctacagagggagaagctggattgtggggatatttttaaaatgtgggccaaaaggtttccaggattactacagttccaactgccctgtgaactaattgcttgtaattcacacctcttcctgagctttcaatccgtgaaatctcatctggaacaacggatgccagtctcaaatgccaagctccagagaactcatttctgacaagcttttaaatccaactcaagtcacagggtttggaccaaaatctttaccattccatgcttagctgaagc

SEQ ID NO: 478069 - DNA, 528 bp, Homo sapiens
tgccggtcacagcttgtccgcatgatctcctgctccttctacttctctaactgttaaacagaaactcagaccaagaaacttcartactcccctatcctctaaactcaatccaaatggcttctagaagtccagtgcggccaggaaaaagcaggtcttcatcaaattttataccataccttattttattaatacagaaaatgttgagaatccttagtttgattggaaaacatgtaaaggtttgaccagatgataaatgccaatattaaatctgctggaattccgtgtacagaatgaagagacaataccaaaattagttaaagacataatttctttaactgtggcttaagaaacaatgaacgcttaaaaccctaccttatgaataagaatagattttatcttatctagtgataaagaatgagatgtggagtggaggttcagttttatttggtttattaaatctgtaagaccacagaagaggcaatataaaaagcttccatgattctatttatatgtacattagaaggaatt

SEQ ID NO: 478070 - DNA, 538 bp, Homo sapiens
catttattacatttttctcctgttaaacaagctatataggctgaatacaaagaagtttgaaaacacagaaaggtaaaaaaattaaattaaattaagatcatctgaaatgttaacttcaagagaaagttaacaactgtgagcattctggtttgtatattcttgcagtcttatttaattaattgcatttatgtactttaaaaaaagtagaattatattgtatatatggctttgatttcttaaaaattaacattgtgaacatgtgcaaggagtgtttcttaaattgctctttccattgtcacttttactggagattaaagtctcaaagtacattttttgacttagcagagggagagctgagatgtctcattaaagcttggccgagcgccttctgttactgcttatttacmtaagtagctttcctaaaatcaacggctcccatgaacaagacatatatattaatgcctcacagtccaatatatgatgagataaatgaccactgcttccttatataatgcgcacacacttgcctgagacaagt

SEQ ID NO: 478071 - DNA, 575 bp, Homo sapiens
ttctctttaaaacacccaaagggtagaaattctgggctctaacgtacaggcataaggctcctgccaagtcctgactgggcttagcatcaaatcctgtagaaaaggaataggtacagaacatggatgtgaggccaggccaaaacgcattttattgctggcyactgtttcccagccacagaagaatgctgctgtagaaggcatggcgtgggtgagaaagagacttgttgaactgaactttaatgggagaggatgtggggagggtgggctagggagagagaaaggaagagacgtcttgagagagcttatgaaggtgaaagaaggcaaaagacacagatgtgactccatgatgaagcaatggaaaataaaagtcttttaatcatccaatgggaatttaatggacaccttctgtatgcactacatggattcgccacagaggacaagccacagatgagaaggacctgccctctctcttcagagactatgatctagatcagagttggcagatcagttgccttcattagtttaagaactattttgtatgcacctctatattccaggcactactctaaattcca

SEQ ID NO: 478072 - DNA, 524 bp, Homo sapiens
gtaaatattcagtatgtatctctaaaagataagggcttttaaacccttatttaaccacaatactattattacattattggtaattttaaactctttctactagtggctttgtacatgtattataaaaatatgtatattacttttgaattgagcaatattattttaaaaacattaagattcagtaaacatcacacacacacacacacacacacacacacacatgttgagtggctctgagatcacctctatggaaacacccttgtcctgaggacagttttcaacacatgctaggtggactcgatacatctgcattagaagtgaaaaggaagcctctcatgctcacactagtcctgtgggaaatgggggctggggatctggcccaatcttacacccagcccacagcacaagcatagtgagtggtcccaacaggggactctgaatgacactgacaaagatgagaaagcaggaggcaaggcaccctayggtgtccttcagagaaggtccttctggcccctcgtctgcca

SEQ ID NO: 478073 - DNA, 640 bp, Homo sapiens
tcactgccaatgctaaagcatgaaccacacatgagctcctgatgccagggctgaaacatgagcaaagcacacgttcctcatttgcttgcatatggttcctgccactgaatgcaataatgctgatatagtttgaactcgtgtccccccaaaatctcatgttgaatgtaaccttcaatgatggaggtggggcttggtgggaggtgattggatcatgggggttgtttctaatggtttaacaccatcccccaagtgtttttctcatgatagaggtctcatgagatcagcttatttaaaagtgtgtgacacccaacctttcattcttcctcctactccagctactgactctccctttgccttctgccatgattgtaagtttcctgaaggctcctcataacccatcatgcttcctgtatggcttgcagaaccaygagccaactaaacctctttattttacaagctacacagtctgaagtgtttctttatagcagtgcaagagttgactaatacagaaaattggtaccaaggactggaggttgctaagatgtggcaacacctttggagttggcatataaaactcatttcagggacctgaggctgggctaactgatactgctgctacaaccacatctggcacctacct

SEQ ID NO: 478074 - DNA, 589 bp, Homo sapiens
aaatcttcaggatgaatgaaaatgtataactcctctggatttaattatctgtaaacacggttcttttcctcatgcttatctaatatctatgtggattttaaaataaaattcataacacaagttccccccaccctcaaaaacaaaacctcccaggatcatattgtaataacacctgtttatgcccacctgattcatatttgtaataaggtgagcatgatatgcctctcctgcaaggatgcacactgattgttcaggtgcttagcctctggtaaatgtggtatttatctctgaagattgcaatgtcaagactggcaacagtcttgacaaagtttttcctgagacagttggaccaacctcctgagataagttggaccaaaaggattgttcccacgtggcgtaggccacttttctacagagttatttggagctaaatgaaaaacctcctgtcaaatctatacatttcaccaaatattgctgagtgacagcctagcckctggaatgaggctagtgtaaatttcacttatttctcaattttacagattaatgttttggactttctagtagctagccctggcttacttattactat

SEQ ID NO: 478075 - DNA, 530 bp, Homo sapiens
tggcatctcctctattcttttcctccttccccaaagtactccctccctcttctgtactggagtggtagagtgcaacagtttctagcttgctttccaaagtcaaattcatctgagttcatctcctggatgtaccacttagtcactatgtggccttgaacaatgtatataatctttctgggtcccagttttgtgatatgcaaactttcctgatagacagtaatactatctatcccataggattgttcaaattaaattatataaagaatacacagtacttagaacagattcagacacataggaagcaattttaccattggtcrtatgacattaggttatagttatttatttaggttcgctctatcccactagaatggcagctccttaagagtaagaacgatgttttattcatcacagggcccagcatacagtaaatgtgggttctgaactgaacctaataacggtataaaatatgtatatcataattcattgcaattcaaatgcaaggaattttaaataacaactcataggga

SEQ ID NO: 478076 - DNA, 420 bp, Homo sapiens
tttgaattatgagtttactttcaaataaaggtgtttctgctagaacgtatctgaaaatcctcactttaaaaagctgaaaaaaaattggggacaaacaactcaaaatctatgcaatgttctaatctaagcaacagcaaaacagtatcaatcccaacagaaaacactactccactaaaaagacactataatcctaaaaaataaagaaatgctaaaatacatacaagaatatccccaaaaggtgaagttttgatgatgaaaggggtgaaggattgagcattctgttttataaagagacaaggtaaatgttgacaggtcggaaagaaccacacaataagtacttctaagatagagcatgtgtctaaactagagaggagtrtaacaggatgcatggacaatctgtatagctctggattctcccac

SEQ ID NO: 478077 - DNA, 491 bp, Homo sapiens
attctaaaaccaactctatgtattgacatcaatcactctctaacattctatgacacattcattagtttgtatatttattgkccatctctactagaatgtaagctcctaaaggaacgagacttttttttttttttttccagtgctctattcctagcacctcctacctggcccatagtaggcattcaacaaatactgtaggtattattcctgcccactgcatgaaaggagcacccacggctcctttaaaattatttaactgaagttaattaatttgttgccatgtgaaaaatcctgagttcaaactccagtcggctgcaaagttgaaactcttattctttgtgctgatcacttcttgtaatgcctcttaagggccagggctgggttttatactttcttatattggtaagtgcaggttatttgttgaatgtattgataacaatggcatacatttattgcgcatttattatttgtcagataatctaggaacttaa

SEQ ID NO: 478078 - DNA, 520 bp, Homo sapiens
tacacttttcccctgggctgaggtctgccttggagtcaaatgtgataatttttagaaggggttgtttccttttgccaaggagggagactggcacttttacttgcctcgtattacaaaatttgtagcaataaggcaatttaattagcacagcagtttaaggttttaatagttactgtatttaagcaatttccctagcacccctgctgttttatgaggctataatttggctcccaaatggagaaacaataaggccaaataaagcaaaaagatgacagtgttattctggaggttaaactcttgtacagcccagggcaagatactagtgaggcaraggctggcttcctacaaggacactctaattgttcactatgtttcattgggtcactttgccaagacttacactgcgtggctgttgcatccaaatttcagagagggtaagggattttctaggacttgaattcagatggggtttttaaatcaatttaaccaaataaagaactcatgtcagcaatgatgcaaa

SEQ ID NO: 478079 - DNA, 572 bp, Homo sapiens
tccaaggcaggaggagagagagagaacacaggggaaactccctcattatcaggagaaccgcatgggggaactgccccatgatccaatcacctcccaccaggtccctccctcaacatgtggggattactgtttgagatgagatttgggtgaggacacacagccaaaccatatcagaacctaaaaccatcctcctaaacagaaatgtgtaaataagtagctgaatgattttctaaattcaggcacacaaatggagctctctgcaagatttcttcccatacgcgcctctgaatctactctctaccttcctctactctaccctataccatgaaaggtcaacctgaatgaactgtaggtaacaacaagctcccttgacttttggtgaatcaactgacaggagatcagaggccagcaggagattatggtcatgatatttattaccctggcttttctttctgccacacttgctgtctttttactgacggtcacaggtsttgctaactagtcctcttcaggttccgataacccctccttccacttgcttcttcagtcttaagagtagttacagaccctca

SEQ ID NO: 478080 - DNA, 584 bp, Homo sapiens
ctaatttataaccatagaagttatcctcaaaggccttcatggccataaatttcatgaatcctgtcccatcccagagtcatagagtggatcctatttcttctaatggcatccctagtccctaaatacctaactaggtgaaggtttaattttgaaacacactggttctccaatgaaacaaatgcatgtaggtctgggggttgtttctcttacttatagatggctcagactatgacaagggcttcattcacccagtagttaagggaggaaagaactggagactaaagactgaaggcagacaggatactagagggctggaccagggtcctagcccrtacatgatgcacactggggttcccacccagctcactctaggactcaatttccgcttctctagtaggtctaaattatttaaatcatcaattttcaaacatgtctaaacttgaaaaaattttaacaaaatattgtaatgaagccaataataataataataaaagcaataaatattgcaagtattaatacaacagatggatacctcagtgtgacagtttcaggagtgaagggcgtttccccatagctgctagcag

SEQ ID NO: 478081 - DNA, 619 bp, Homo sapiens
tcttcattccaaagaaaaggccatagtgtggctccagccagatgtcaattatttgaataaactttccttgaagcaagtaacaccaatgtaatttaagccatcagtaatgtgagagaaagagagagagagaagagagagagagagaatgttactttccaaagtcactgaaacaaccatcccaaaggttctaagaaggatatttttgacttgtgctttygaactttgatggggatggaggtatcaggaagcagtattctcccagccctcaagatactttccagaatctgggcatcatgagaatttgctctaatttcatacagattattaaaccaggagaggtataactcaccgtcctaaatattcagctccaaagggcttcaacatgttttactctatgtcccagtaatcagggccctgacacacacaaaaaaaacgtaaaatattttttgattggtgtgaaaataaaattaaagatcaaaaagagctctccacggaaactgatcagttttattcccaataatttatacatcagcaaattttactgagtacctacatatacctttcacgtataattctccatgtccttattataagcaccaggactacctgttcccaccag

SEQ ID NO: 478082 - DNA, 524 bp, Homo sapiens
tggttcctggggtgatttttacaatcctactttcttggctatggcttgacataatttccctggagagttcagtcttagggtatgatactataccttggatctgcaaagcattaaaagggaggatattgtcagatatatgatctagccatggacacaggccagatgcattcgtaactgaaagagaaggccctcttgtctggtccactcctaacttgtttgattttgctgctatctatcagcaccttccttactaatgcaggatggctcagttaatttctttctttggtcttccagttatgctgttgagagcttgctyatggccatatataagaggtgacaacaatggcttttcagaaacaataccaagagagcaatagaaacactttatttacccacagtgtaaaatgggctgcaactaattatttacagatggggcaagctttgataaatagattgactgattaatgatttgggttatatttctgacattaactcaaactggacttgggcttagtttcaaaata

SEQ ID NO: 478083 - DNA, 243 bp, Homo sapiens
tatctctagcccagcctgctgcagcctctcacctggtctctgaccaggctacacctatctcactcagtcctatctggtctacctgacactgcttttgacttcccacagaccctttttcacacagcagacataattatcctttataaataaatatgatatcaagtttcctgcwtaacattctccaatgacttttctttgtatcttaaatacaaactcctgactgagggcctagaagatactatg

SEQ ID NO: 478084 - DNA, 589 bp, Homo sapiens
ctctcagcctctctgccttcctcgcctgctgctgcagggaaggcaggttgcaagggcagagctgatcataaattctagtgatcttctgtaagatcatttgcagcatcagactctttaatagactctgcttattcctgcggtgtaggctcaaaaaatttaagtagtaaaaataaataaaaatctcatgtcagttaaacatagagatatgggctttaaaaaaaatctttcccctcctccttatgttttttcttctatgaatgtatttatgtaacctctgcagctaagatttttgaagggcaaactttccctagacagggacaatttttagttttagttaatgcagtgtacaggataagmaatggtgccctgtgcagagttagcgcccataaatgtcagttgatgctgccactaccctctggaagtttcatagaagagctcctttctctttgtgacttcaacgtccttcacctacaggatctcattttccacttactgtgataacaaagggccatggattattatcttcaatttacaggtaggaacaatgtgtcagggaaagatgatctgcccaagaatagagagcaagtca

SEQ ID NO: 478085 - DNA, 498 bp, Homo sapiens
tatggttgggggtaatccccaaacatttggccacagaagttttctgtgttgattgtcatggtgtgaaagcaaattaaaaatagagtttgtttttttttctcttagccactgactcattatgagcccacctggaaacaccctccccttcctgcactgctttctgctgtgctcagccaagcaaagcatcccctacatagaccacagggtataaataatactccatctcttgtggtatcacagccaggtccagtgtctggctcctgggaagaccatgggccagagaagtcaggagaaaacacatcccaacwcagaagggctccagagtggatttcaggttccctttattgactccaaagaaaaatcctgtccaaatagggccacatggcatgcagcactagccacagatttcctcctttggaactctccaaaggtaagaggaggaaacagctttaaaaatgcaacccgaagcttcttacctctgccttatggatctagatc

SEQ ID NO: 478086 - DNA, 577 bp, Homo sapiens
tgttttctaagaaacatttcattgaggagaatttttgtgtcctcttgttctggttaaaatatcaatcttcaaaggtgattttaaaatcactaagcaggacttttattgggatcatgattgcaaaagcctgcattttctttttcctcrtggaatttatttaaaagtaaaatttaaaagaacccagaaagctcaactttcagtaaagtgaagatacgtataattcctagtctgtaatgacatacatgagacaaacaaaatgaggggagaaaagaaagaagtgagaaggaatgaagaaagtacagaggcctcagtggcatgagatctgtcacacagaagcactgtctccaggtgagaagcacacacttttaagtgtaaacatcttacagcagaaacattgtaaattgacttcagttcgcaggagcagagaaggcagcaagaaaaagagcatatttgtgttgtgaaaactagaaagctttagaaactactttggctttcctcagccaataggaatttggtttgaggaaagcctacatattaaatgacaagacatataaaagattcagtataatattggaag

SEQ ID NO: 478087 - DNA, 509 bp, Homo sapiens
gaacattcactatggaaatattgccccgaagagataaaaattaggacaaaaaatttggcttaaattaaaaaaacaaaatcagaaacttggtagacaatagastttataaagagagaccacaaaataagaaaaattttaaaaatcaagaaagagatgacatggcaaaggaggaaatacaacattaagtgggggaaattaggagagaagtaaaataaaaaaattaagtcatcatagaaataaaacagtaaaggagaggatagaacttactaaaatcctagcaggtgatggagaggacagaaatgagaagagtaagcaaaataaaacattttcaaataaaaagaacaaagagaaaaatttttaaaaaccataaaacgcaggaaaaggagaaccaaaatatgcacaaattgaatttccaaggaacaaaactgaaacagtgacgtcaaaaaaacacttaaagacacaattcaatgaataaaaatgatttgaacttacactctgaaagattatac

SEQ ID NO: 478088 - DNA, 556 bp, Homo sapiens
agcagacgccccctccccgctctctaagccccgctgcatgaaaggatgccctcggccccttgccagagggccgggtcggggattcccggggcttcagctcctctgccggcccgcccctccgagccttgggagccaggtcgccggccgcagcgctcagtcttgtagtgtcctggctgyggagcagaagcgcccgggcagcaccaaggtgtgcagtgcgggaggctggggccccagggcgcagagtgggcgcgagaccctcctactcgctggatcccggccagcctttctggattccaaagtttctgccgcccaaaggggctgggagagcccgagacgccgcaggacaccggcaatccagcctctctccgcctcactccccgaacgcccccactctgcgcactccggtgcgtctgtcccctccccctcagccctcctccctgagggctccggacgtgcccggccctgctgaccccctgcccggtccctgccgacctcaacactgggcgaagcgcccatattcacaaacttgggcgggggagggggttcctccggagca

SEQ ID NO: 478089 - DNA, 653 bp, Homo sapiens
ttaatcaggggcagaattgggcttgattatcctctcccgctgtgtgcatttacgctgcactagacacctttgattctgcactcctgtgaccaggcagtgactgcgaggattggtaccccagtgggttcaacaggtaacttcctccttcccctttttaacatgaggacatggaagctcaggaaggaaaaaggactggctggggatggcgcagtccagttctagagctgcttctcttcctgagaattgctgtactgttgccacatacactgtctttcctcctgtttccttggccacccttcctacccttgctctggaagcctcctgtcctggcggccagaggtctccccatctgcgctgtgtccagctttgcattttccctcgggcttggctggaggaggccagatgtyggagtcactgcacagcctcctccctggggaagcctcatggggtttcagtgggagaagggaacgtgggattcctcctgtgcatctcatcttggtactgtgatgtcgggcagtcaggggcttgcctgaggctacaggggcacgctgaggtatgaggtccaggaccaagtttcccacgtctcatggcctacctgggtctctagatctgggacaacgctcgtgcttattcctttacagttaagatgcctg

SEQ ID NO: 478090 - DNA, 619 bp, Homo sapiens
taaatttctctgcctcccaaaaccatgattctttaactttcttataatgttgtcagtgataatatttgcataaatttgacacagtaatatttaggaatctgagataatatgcaatgacaaatttactttttaccacaaacactttattacgatagggaaattattcatatctaaragaaattgttttctgtgtccttataaaatgtttcaatttattgctcaattccactgttaataatttcattgtattattctctgccaccactaggctgtctttttagttgtattcattgtctggctttctgtggcccagcagtagtcagaggaatggggtttacatgagtctcttaaaagccttagcatttatgtattactattccttaaagaggatgtgaattggtgagctaacgaggttttgaagaaaggctgaatctacttgggatgattctttttatcatgcagagcagtagatttcccatatgcactgtggagaggtgagtggggaggttttcagtggaagaatggggtgaaattctgtagccttctagcgctgtgcattccagtttctattgctacataacaaactgctgcggaacatggtggcacaaaacaaactcag

SEQ ID NO: 478091 - DNA, 526 bp, Homo sapiens
ctccgacactcctctcccactccgtgtggtgtcttacgctatttcctgctggaagggacttcccctctcttgtaaatctgtccatgttgcaccaagaaagctttctgtgcaatactgctgtcatgttcttcttttttccttagtcagccactaaatccccaagctcactacatcttcttttacttktttctcctcttctgcaacctctatgtgatggcatagtccatgacataatctttgacccttccctttctttcgtttttctatttgtagatcatttccaaagtcatatcttcagcactaatctctcccataagtttctgacaactgcatactccacagttctgtacaaatgtgttaacagacttcataaattaaacatgtgcaaaatgaaaatcttgactccactatctctctctaccatcaaccctcctccttctcatcccctttaatggcatcaccactgagttgcacatcagaacataaagaatcatctttgattccttcttttatttaccctcaccag

SEQ ID NO: 478092 - DNA, 599 bp, Homo sapiens
taatgatgaaccaagatctacaaacagaccttccagtttttctttctctctattagtggttagatttgtctttggagatgaaaaacttgattttattgggtaactaatgtaacttaattatattggtcactatttatttaaatcactctggcttctttccccaccaaggaagggtacataggtatttcagtcatttcacatttagtggatgcgtcccactggtcaggcactgtttctgtctctgtggggaaacagaaacagcactaacggtgggagttagacaggattcaaccacraaagaatattcacaggatccacaatggccacgcttacaaaatattcaattattgttggcaaatgattcaacacaggaataccattaaagtgaggacatgcactgcagccagaggctgcctgctgtacagcaaggggtctggggagcagaaagagcaagtcctcagtgccctctctctaaagagtcacaccagcacaggcctcttctctcagatcaaaaaccaacatataccaacgtgtacccagaacactacagaacaagggaccccaaaataagagtcttgagcagagcttcttatccccag

SEQ ID NO: 478093 - DNA, 230 bp, Homo sapiens
agttgtcctcctattatgcacctgctttgtctggggatgatttgcataattaagttttggtttgagactaagcatggtatacaatcgttgttggctcaaaaatactgtgtgtacatttaagtcacatttgatctgatttttaaaactgagactatttagaatttctcctttaragaagtattttactgggagaagatttatattatatggaaaggaatactagttcaaag

SEQ ID NO: 478094 - DNA, 579 bp, Homo sapiens
cacccataataaagccttctttccttgcgatactttttgtctcagtaattggctttctgtgcartgaacaacaggactagatcaaattcctggcatttagtaacaacaccagcctccgcaactgtacctctttcactctgtgccaggctttaaatgtacaattcatactaaaataattacagtgacattaacaagtaatgctgttgcaactccatgcctttgtaaaagctgctctttcttcttggaagatctatttccttatactttcttcacttgcttcaacttttattaattctttgagacttggttttggttttatgtcttagggaagtgttttccgagaattccaaactgtgatagctgctcctttgttgtgcttccaatatcttttgttcttttctctatccaggcaacatcaaactttttttaagtgtcaacttaacatttctttctcctaaacttgaaagtaacctgaaactaggttctgatccttaatgcaacactatgtgtcctcagtaacagaataccctgtgccttatatctaatcaaagtttgtttatcaaataaatgtaccaatga

SEQ ID NO: 478095 - DNA, 579 bp, Homo sapiens
cacccataataaagccttctttccttgcgatactttttgtctcagtaattggctttctgtgcagtgaacaacaggactagatcaaattcctggcatttagtaacaacaccagcctccgcaactgtacctctttcactctgtgccaggctttaaatgtacaattcatactaaaataattacagtgacattaacaagtaatgctgttgcaactccatgcctttgtaaaagctgctctttcttcttggaagatctatttccttatactttcttcacttgcttcaacttttattaattctttgagacttggttttggttttatgtcttagggaagtgttttccgagaattccaaactgtgatagctgctcctttgwtgtgcttccaatatcttttgttcttttctctatccaggcaacatcaaactttttttaagtgtcaacttaacatttctttctcctaaacttgaaagtaacctgaaactaggttctgatccttaatgcaacactatgtgtcctcagtaacagaataccctgtgccttatatctaatcaaagtttgtttatcaaataaatgtaccaatga

SEQ ID NO: 478096 - DNA, 622 bp, Homo sapiens
actctttacactgactacattattcctagaagcctttcaagattgccagcaataatttaacttacacagcagtgactgcaaactacaaaaatattactccaaacttacactgcatatattctcagctaaatatccccataggctaattgcagaatttcccatggccactccagtgctactaaacaaaagggagactatgacagagaggaaatcagagtggaaatggacagtcattttcattggttgaagttaatatatattaattttgcaaattttataaagctgtttcagcttgtgaatagattccagatccctggaagagattccagagtccctgcaaagagagatttcgaggcttaaacttatgtgattttcccagtcactccaggtctgtcttggagagsagcccccaaatttggagaggagcaaaagaacagggcattctgagagatctgaattatctaaaagagaaacgtttaaaatacttccaatttattctagtggaccagtgttacattggaatgaatgtgttctttgctacttgtttccaccactctctccctcctagctgccccagaggtagaggattgggtgaacatcatatctgtacattgaaaataaa

SEQ ID NO: 478097 - DNA, 535 bp, Homo sapiens
gctgtcattattctgatttggtcattaacatatttttatgctccaaaccatttataactgctttagtggatgcttatcactaagggtatctatccactcacttttcatagtactccacacagtgctctttgctggatctgttatttgcttaagagtgaaaattgtgtggaatagtttcaaatttctgtttttaccaaagctaaacaaagtcttcttcacttcaactaaaaagaataggctttgtgacagagttaccaggagctccacttgacatcagacaaaatgagccttgatccctccattcattcatgcatgcttcattctataaatagaaattgagaatctcttgtatgccaagtattctactatgctctgaactcaaaaaataaataagacatggttgggtgtggtggctcatgcttataatcccagtgytttgggagactaagatgggagaatcacttgagtccaggagttcaagaccagcctgaacaacatagtgagacctgtctctacaatcaaccagtcaatcaat

SEQ ID NO: 478098 - DNA, 592 bp, Homo sapiens
taatattttctagtgaagaattgatggatttcagagaagttccggggatgaacaatactgtattatcacttgtaaggtaatcttcctgggcagaagtctcttgaaatagtgaagagatgctaatgatggtagttgaatcgtaaagtcatattaacagtgacaataaatggtgtgtgcttgtgcgtgctttggatgattctcactgtgatagatgcagcaacatctctaacttcaagaatttcattaagtctagtggtagaggcaggtaagttatagaaaatattgagggtaagtattaagtgctttaagaaagtatgcttgggctgcagggagcattgtagggttctcagaggaaatgatccttgctcctttttggaatcattccaagcagarggaacagcaagttcatgtgtatataatgggggaaggataggagataaggttgtaatgtggctctatctaatggacctttatgccatactaaagagtttgtactttatcctatacaaattaggtaagggcaaaggaattaggtaagggcaaggtaaatttagttaatagaatataactagaagatttttagtaattaggt

SEQ ID NO: 478099 - DNA, 499 bp, Homo sapiens
taaacataaatgccacacaggcagaagaaagtcagaataaaaattccatggggtgttttaagtatgtccaaaatgggatgacacttggtcatttgtttagtccttctcaccctgttggaggcatccaagaagggaagaaagtagccagctggttgccttctttctctttgctcctgtctgacgcttgggcaaggagtgcagcctcctgtgaggatgtggattgtggagctgagtaatctgcatttgaatctgggctttgcctcctgctgactgtgtggcctggagcaatccctgagtcccactcagtgtctcattttctcctctgtacattgagataacaatagtaactacgtcacaaggttgttatgaggatgaaatgaactaacactagtaaaatggcattcaatatatagctgttcatcaaaayaaaataggttccagagtcctgtgggagagagaataaaatggtagctactgtgttctattccttaactgactg

SEQ ID NO: 478100 - DNA, 668 bp, Homo sapiens
ctgctttatcatcagtgctaagaatagtggttattacacgktagatgctcaattaatatttttgaattgctggattaatatgtaggttaatgacttcacccatttactgaacaaggaagtagcccagaaaaatcagatttggaaatctggctcagggtggttttactcttgagaccaaatggttctctctgattctaaggactttgaagctttacagacttggtattaatacatttctaaactaaaaatgccaaaaaatattgcggggaagtggttaaaagctgccagcttttcatttttccaagtaaggagatggagaaagatattaccgacaattgttatttcgtaaaagggcatttaaacacttcaattgtgtgaagggtgatcctagaattttaaaacattgggtacatattggttctatgaaaaagttactacattgttctaatttttttcccatttcactgaggattggggtaaacttcactgatccacagtgaagagacaggtccgggctcagatgggcatttgggagcctctggcctggaggaaccagtcactcaagttctttcctctctctttgtctctctttttagtcctcttccctttcttcttctctttcttcttcctttctcacctcttacatacagacacacttagacacactg

SEQ ID NO: 478101 - DNA, 476 bp, Homo sapiens
cttctgcttttaacaaccacagcacttcccccagcactgtgcaattctgaattatctggaatacatgaaacaagtgaaaatctagtgataagaactataaaatacttggctaaaccatgggtttctccaccctccaagtcccctgggaaaggctttctttgaaatgagcatctattcagtgctgtttatgtagtgtcttggacaaggccctacatgagctttaaaagcagtacacgatcttggcactaygcatgggatttccaggtttgctgaggggtaacacatatttgagaaatgaccacaggacaatgcaacctcctcctcctctgctgcatttcacagtgactcgccccaccgtccagctacccaggaaatctgaagctaaaaactttagccatccttagctttgctctcttcctcacctgaccttgcctcacttctcaagtctcctggattctgactccaaatgtctctag

SEQ ID NO: 478102 - DNA, 596 bp, Homo sapiens
tattttccctccttccttgcaatcttttctgattccctggagagaatcatactctcccttccctgaatttaagaatgctttatctawggcactcagatgtggactatagtttatagacacacagccttcccagtaagctggtaacacttttgcagttaagtctctcaatatggagctaaaatttgcctttctataacttcaaccaactgattttcattcattagatcctttagatctgcacagtagctgtcttttagatctaacctacataagcttatcccctcattggttcaatacatttttactgagtgcccattctacatagtgcattggcttccaaatgatagacttccaaacacttgaaattggaagacagtgatcatacctccaagataaacagcaacactgtccttatataacattttcctggtcatgttcctctgttcatgctcccatttgtcattctctcttttaaaaggatataattcaaaacagagcaaacaccagtgtagaggacagagaagctgctgttgtcttttgcttggacactcaaatccttgtaatactatgtgagaatatacttgctttcttgacag

SEQ ID NO: 478103 - DNA, 541 bp, Homo sapiens
ccatttgggctgtttattgaaggatgaggaagattccaccagagggaggaggtgaaggaggcggaggacattccaggcagaggagggagcatgagcaaagcgtagaggcatgaaagtactggctatttttggagaacagtgattagactgaagaggttggtagataggataaaggaaagtgggatggtgggagaasaagtgggaaagttaatctggagcaagatgaagaaatttgaaaatgatgtcaaaatttttaacatgatcttatagtaagggggcactaacagaagtctgcgagctgaagggtgccatcatcagatccaggttttgaaagatgactctggtggtggtgtaacaaatggaagggaagtgggaaacctgggtggggggcttctgaaaaagtctaggcaatacatctgaactggggcaataagaagaggaggcacaaaggaagggctaaattcaaaagacattgaagtgcctgttgttgacacaggtgaagagtcataaagactacacagcccatggaaacacctcctaa

SEQ ID NO: 478104 - DNA, 600 bp, Homo sapiens
acttgccacttttattcctaaaattgttttatttcatatcccaaaagccaactgagccatccaggttttaatacacagacgttttctgtttcaggctccagcccagtcattcattttactccctctgatttggaggtgagacggtcttcaaaagagaactgtgccaaaaacctcttttccacacgtgggaaaccaaactttactcgacacccatctcttatcaaattggtaaagagtatagaaagtgatcggagaaagataaattctgcgcccagtagccctatcaagaccaacaaaggtatgttttcaggaatgtcagggatctgctaggaagaattcccttttatctcattttttcagcttacttgwtccttgcaatagttgtcagagaattatttcaatatctatatacccaaaccctcttgaagcctaactaatgtataaatttaaaaagtcatttgtggggtttattgtttaatcgctatgcaactttgaggggaggtgcacactttctgttcctctgacttcagtgaggtttcatctgtgtgaacatttgttctttagctttgaccggtgctctcttcctttctattttaccag

SEQ ID NO: 478105 - DNA, 600 bp, Homo sapiens
acttgccacttttattcctaaaattgttttatttcatatcccaaaagccaactgagccatccaggttttaatacacagacgttttctgtttcaggctccagcccagtcattcattttactccctctgatttggaggtgagacggtcttcaaaagagaactgtgccaaaaacctcttttccacacgtgggaaaccaaactttactcgacacccatctcttatcaaattggtaaagagtatagaaagtgatcggagaaagataaattctgcgcccagtagccctatcaagaccaacaaaggtatgttttcaggaatgtcagggatctgctaggaagaattcccttttatctcattttttcagcttacttgatccttgcaatagttgtcagagaattatttcaatatctatatacccaaaccctcttgaagcctaactaatgtataaatttaaaaagtcatttgtggggtttattgtttaatcgctatgcaactttgaggggaggtgcacrctttctgttcctctgacttcagtgaggtttcatctgtgtgaacatttgttctttagctttgaccggtgctctcttcctttctattttaccag

SEQ ID NO: 478106 - DNA, 550 bp, Homo sapiens
ctgactttgttctgactaaacttttgattctggcctcgcttcttccatacctgtggaaaggacaggratggtttttgaaccagggacttatggttgtaatcattctgatggctgcaacaaaatgaccctttggaatgtccaaaaaccccacacatctgtcagcagagggcttctcacaaacaccaggtaggaaatcctgatgctctgtggtaccaagccagaggggctggggggggtgagtgcttgctgtactttaggtagtgaacgtttgttgagctctgaacatacaccaggtccaggctaaacatatgagtaaagtggtggacaccacagcctctgctcttctggaattcagtccaagggaggcaaatactgatagagataaataaatagataaaaagaaatagagacaatggcaaatgctaaacaggaaaagtgccaagaatataatacaggaacccactttagcctggggcgataggtggggtagagagtcctcttcagaaagtcataacaccagctcaaaaggactttcccaacttcattcacc

SEQ ID NO: 478107 - DNA, 634 bp, Homo sapiens
gaaatcccttctcacatgctcttttgagtttcttgtctgcatcacaagtcaaatcaggtaaagacaaaatgaacagaagaccctttcttaacaaaggggcaaaaaagcaaaargaagaaatcacccttttaatgaacaaattctccctggattcctctgcatattcagttgtagtctatgcagctatgactcaattaaatgatatcaactgccccaagtcaagaatgattttattttccctcctttgtctaaaatataagctacccacatgggagccagttagtcatcatcattgtaaaaggtcaaagaaatatgctgcagtctgattaaattcaaatgctcaggatgtatctcccagccagaagagcatctttgttcctattagaattttgttgcagagaatgttatcacatttatcacccttcaccagttttcttaggtaagtgttagaggccattttcattttcttacaaaaattaaagagcaaggagtttgttcaggcaaataagacagcaaggaaaagcaaacagaaaccagatcttctgaccctctacctagaccataagaaacttcttctagaggtatcttggattcagtaaaataatgaaagttggcaaatgcatcccacataaga

SEQ ID NO: 478108 - DNA, 634 bp, Homo sapiens
gaaatcccttctcacatgctcttttgagtttcttgtctgcatcacaagtcaaatcaggtaaagacaaaatgaacagaagaccctttcttaacaaaggggcaaaaaagcaaaaggaagaaatcacccttttaatgaacaaattctccctggattcctctgcatattcagttgtagtctatgcagctatgactcaattaaatgatatcaactgccccaagtcaagaatgattttattttccctcctttgtctaaaatataagctacccacatgggagccagttagtcatcatcattgtaaaaggtcaaagaaatatgctgcagtctgattaaattcaaatgctcaggatgtatctcccagccagaagagcatctttgttcctattagaattttgttgcagagaatgttatcacatttatcacccttcaccagttttcttaggtaagtgttagaggccattttcattttcttacaaaaattaaagagcaaggagtttgttcaggcaaataagacagcaaggaaaagcaaacagaaaccagatcttctgaccctctacctagaccataagaaacttcttctagaggtatcttggattcartaaaataatgaaagttggcaaatgcatcccacataaga

SEQ ID NO: 478109 - DNA, 601 bp, Homo sapiens
agatctagaggatttgcatcatgaacaaactaactcaggtaaccatgacaagcagccaagttgagaattcatggtttaccatatatgagataccgtaccagacactaggattgtggaggtatacaaagcctacacttgctctcgaagaactcacagtctagttggaggtggggagtctggaaagaygggttaactggctatgatattgcagtctgataagtgttatgccagaagcaaacactagtgctgcagaatatagccctagggcacctaagtcatcttagagaattgggtaaggctttctggagttggttgagctgaatctttaaggatatatatgagttagctattaatacttggatgacctgggtgatgtgggtagttcagggacagagaaaaataggaagacaaaatgtcatttaatgtgttcagagaattgcaagaatgaatgggaaaggagtggcgagagacaaggctgaggaggagggtaggggtgaaccctagcaggcctttatcctctgggcaatgaggagaagccaaggatttactttaagcagaggaatgacatgattcagtttgaacttcagcagattactttggc

SEQ ID NO: 478110 - DNA, 557 bp, Homo sapiens
ccatgacaagcagccaagttgagaattcatggtttaccatatatgagataccgtaccagacactaggattgtggaggtatacaaagcctacacttgctctcgaagaactcacagtctagttggaggtggggagtctggaaagatgggttaactggctatgatattgcagtctgataagtgttatgccagaagcaaacactagtgcygcagaatatagccctagggcacctaagtcatcttagagaattgggtaaggctttctggagttggttgagctgaatctttaaggatatatatgagttagctattaatacttggatgacctgggtgatgtgggtagttcagggacagagaaaaataggaagacaaaatgtcatttaatgtgttcagagaattgcaagaatgaatgggaaaggagtggcgagagacaaggctgaggaggagggtaggggtgaaccctagcaggcctttatcctctgggcaatgaggagaagccaaggatttactttaagcagaggaatgacatgattcagtttgaacttcagcagattactttg

SEQ ID NO: 478111 - DNA, 601 bp, Homo sapiens
agatctagaggatttgcatcatgaacaaactaactcaggtaaccatgacaagcagccaagttgagaattcatggtttaccatatatgagataccgtaccagacactaggattgtggaggtatacaaagcctacacttgctctcgaagaactcacagtctagttggaggtggggagtctggaaagatgggttaactggctatgatattgcagtctgataagtgttatgccagaagcaaacactagtgctgcagaatatagcyctagggcacctaagtcatcttagagaattgggtaaggctttctggagttggttgagctgaatctttaaggatatatatgagttagctattaatacttggatgacctgggtgatgtgggtagttcagggacagagaaaaataggaagacaaaatgtcatttaatgtgttcagagaattgcaagaatgaatgggaaaggagtggcgagagacaaggctgaggaggagggtaggggtgaaccctagcaggcctttatcctctgggcaatgaggagaagccaaggatttactttaagcagaggaatgacatgattcagtttgaacttcagcagattactttggc

SEQ ID NO: 478112 - DNA, 601 bp, Homo sapiens
agatctagaggatttgcatcatgaacaaactaactcaggtaaccatgacaagcagccaagttgagaattcatggtttaccatatatgagataccgtaccagacactaggattgtggaggtatacaaagcctacacttgctctcgaagaactcacagtctagttggaggtggggagtctggaaagatgggttaactggctatgatattgcagtctgataagtgttatgccagaagcaaacactagtgctgcagaatatagccctagggcacctaagtcatcttagagaattgggtaaggctttctggagttggttgagctgaatctttaaggatatatatgagttagctattaatacttggatgacctgggtgatgtgggtagttcagggacagagaaaaataggaagacaaaatgtcatttaatgtgttcagagaattkcaagaatgaatgggaaaggagtggcgagagacaaggctgaggaggagggtaggggtgaaccctagcaggcctttatcctctgggcaatgaggagaagccaaggatttactttaagcagaggaatgacatgattcagtttgaacttcagcagattactttggc

SEQ ID NO: 478113 - DNA, 557 bp, Homo sapiens
ccatgacaagcagccaagttgagaattcatggtttaccatatatgagataccgtaccagacactaggattgtggaggtatacaaagcctacacttgctctcgaagaactcacagtctagttggaggtggggagtctggaaagatgggttaactggctatgatattgcagtctgataagtgttatgccagaagcaaacactagtgctgcagaatatagccctagggcacctaagtcatcttagagaattgggtaaggctttctggagttggttgagctgaatctttaaggatatatatgagttagctattaatacttggatgacctgggtgatgtgggtagttcagggacagagaaaaataggaagacaaaatgtcatttaatgtgttcagagaattgcaagaatgaatgggaaaggagtggcgagagacarggctgaggaggagggtaggggtgaaccctagcaggcctttatcctctgggcaatgaggagaagccaaggatttactttaagcagaggaatgacatgattcagtttgaacttcagcagattactttg

SEQ ID NO: 478114 - DNA, 623 bp, Homo sapiens
agaaaatcattctgattgtcagctaaaatgttgttctctataattttcatctgttggttatgcagcctcttgaaggtgcatgatgcgagtctaatctcatcttcactcyatggtcctccaggaatttgaacacagctagtaagtgctccgcgagctttcttttgactgaggtcactaagctgaacatgtccattgccttccatggcttgtctcatgttttgttcccaggcccctctcctcctggacacactttatcttcaccatgagtggtacccagggctgaatgcactgttgaagcagtgctctcaccaaggcaaagcacagctcatctctttctcaaggaattttaaatctaccgagccccatgagtatgccaaaaagaccatatgaaaggaatccatatgccagacaaaggaaactaaaaccaagatccagtaaagttaagcccattaaaattcctttaaattgtgcccaggactggctatcttaaaactggttcctgtgcctttatttatcacagcatgtgctgaaaaattgtgaggcagaatgaagtatttagggtactagatttcctagactatcttttcaactcaattgtgagaaccagtcccatgattaaaatc

SEQ ID NO: 478115 - DNA, 623 bp, Homo sapiens
agaaaatcattctgattgtcagctaaaatgttgttctctataattttcatctgttggttatgcagcctcttgaaggtgcatgatgcgagtctaatctcatcttcactccatggtcctccaggaatttgaacacagctagtaagtgctccgcgagctttcttttgactgaggtcactaagctgaacatgtccattgccttccatggcttgtctcatgttttgttcccaggcccctctcctcctggacacactttatcttcaccatgagtggtacccagggctgaatgcactgttgaagcagtgctctcaccaaggcaaagcacagctcatctctttctcaaggaattttaaatctaccgagccccatgagtatgccaaaaagaccatatgaaaggaatccatatgccagacaaaggaaactaaaaccaagatccagtaaagttaagcccattaaaattcctttaaattgtgcccaggactggctatcttaaaactggttcctgtgcctttatttatcacagcatgtgctgaaaaattgtgaggcagaatgaagtmtttagggtactagatttcctagactatcttttcaactcaattgtgagaaccagtcccatgattaaaatc

SEQ ID NO: 478116 - DNA, 474 bp, Homo sapiens
agccagggatcaaatttcaacctgagatccagtggggacacgtatccagactattatcatgggccaaaacaaacacccaaggagtgcaactgtttctgagaaaaacaaaagctttgttggcatttaattatatgatcatgttatttttttctttaatttgttgatgtcatctactatgttgagagactccataatcttgaatttccttacatttctgcagtaaaccctacctggtcatagagcattgttttgatatgctactggattttctttgttaatacttatttgatattttgcatttcaattcctaagtgagatcaggctatcattttccatttttgtacaattttaatcaggttttggtattaacattttgttggagtcatgcaatgagttggggcaatttctaacttttaatatgatctataatattttgaattgtraaggaatgaccttttccttacagatgaaaca

SEQ ID NO: 478117 - DNA, 651 bp, Homo sapiens
cttattttgttagatttatacataagtgctttacttttaattctattgtaaattatatttttaaaaactcaattcccaagagtttattgttagtatatagaaatacaattgatttttcartattgaccttgtattttgtgaccttactacacttacttaacagttctagtagttttttagtaagccccagtgctcttctgaatgaataacatccaacagtgtgaaaatacaactgtgatctaggggtgggggctgttaattttttgtctgattcccgtatgtgcctggttaaacaatgttagagatttttgtaaaccttgcaatgaccaaaaaatatttaccaccttttcaggcctattgtcctgagtatataaaataaatccaaatgcccatcttttgtactttattagagataaagtacagaagactaacaggtatttccagaatcttctgggttaagggctatgagatcagtgttagaagtttgtgtgtggattttcaagctgactgtgaagtccctgagggaaaaatgttgggtgggcttctatcaataggtagcagagagcgatggtgggggcaacatctagagacctaccagggaagatgtgagatccattggtatgccctgattgtcaacgtaagatgatatgc

SEQ ID NO: 478118 - DNA, 651 bp, Homo sapiens
cttattttgttagatttatacataagtgctttacttttaattctattgtaaattatatttttaaaaactcaattcccaagagtttattgttagtatatagaaatacaattgatttttcagtattgaccttgtattttgtgaccttactacacttacttaacagttctagtagttttttagtaagccccagtgctcttctgaatgaataacatccaacwgtgtgaaaatacaactgtgatctaggggtgggggctgttaattttttgtctgattcccgtatgtgcctggttaaacaatgttagagatttttgtaaaccttgcaatgaccaaaaaatatttaccaccttttcaggcctattgtcctgagtatataaaataaatccaaatgcccatcttttgtactttattagagataaagtacagaagactaacaggtatttccagaatcttctgggttaagggctatgagatcagtgttagaagtttgtgtgtggattttcaagctgactgtgaagtccctgagggaaaaatgttgggtgggcttctatcaataggtagcagagagcgatggtgggggcaacatctagagacctaccagggaagatgtgagatccattggtatgccctgattgtcaacgtaagatgatatgc

SEQ ID NO: 478119 - DNA, 653 bp, Homo sapiens
atatcctattagtaagattttaggaaacaaaaatttaatttattcacattcgatatggtctgtaaatgccaccattrtatgccttccgctggcctttgattagctatggattaataaaacttttatacctcctttgtcagcctcattttgaactctgtttttgcatgctgttactattaaataaatgaattagtgtccagaaatgtgtcatgcatattacctagcagcaggaagcgtaatacagtggtcagcttcccaggagcgttataaatcttaatgcgctcggtaacctgctcacgtggacctattaaagcatgatgatttagtggagcagtatttgtgcttaacaatggaattttagttaattcaaaacaaggtaaatcatctccaattacagtatttgaatattcacagttgcttcccaagaacacgtactgttgctaagccaaaaaaattgttttttcttcaaaagcattgtactcagttacttgcttggagtaacatttaggcaggttttggtagcttatgttaaaagtgacccagtcctgaagaacaatgtttatgtggcgcagctagctaactcgctgccaaagcaatttagggtgtccaaaatacagaaagggggtaacccagagcaggagccccgggatgca

SEQ ID NO: 478120 - DNA, 653 bp, Homo sapiens
atatcctattagtaagattttaggaaacaaaaatttaatttattcacattcgatatggtctgtaaatgccaccattgtatgccttccgctggcctttgattagctatggattaataaaacttttatacctcctttgtcagcctcattttgaactctgtttttgcatrctgttactattaaataaatgaattagtgtccagaaatgtgtcatgcatattacctagcagcaggaagcgtaatacagtggtcagcttcccaggagcgttataaatcttaatgcgctcggtaacctgctcacgtggacctattaaagcatgatgatttagtggagcagtatttgtgcttaacaatggaattttagttaattcaaaacaaggtaaatcatctccaattacagtatttgaatattcacagttgcttcccaagaacacgtactgttgctaagccaaaaaaattgttttttcttcaaaagcattgtactcagttacttgcttggagtaacatttaggcaggttttggtagcttatgttaaaagtgacccagtcctgaagaacaatgtttatgtggcgcagctagctaactcgctgccaaagcaatttagggtgtccaaaatacagaaagggggtaacccagagcaggagccccgggatgca

SEQ ID NO: 478121 - DNA, 619 bp, Homo sapiens
gaggactacctgaaaaacaacttaggattaatgcaaagggtaattaatcctgttctgaccattttttaaaaagaaggatcccacacacagccaaaaaaaaaaaaagtggaaaataaatgaatcattggactgattaaaatgcatgaagctactaaagctcgtcagacaggggacaactaaactcattcatcaagcccaattcacaattatatcaacaagatcagctaaagaaagcctggaaaacttaaccgccctgggctaggaaactcttaaaactttgttctcaacaagaaatcatatacatttttttwaaaaaaattaaatatgttttcacagtttcctgcaaaagaaaattaaggccatctctggaatatgctaatctcatcgaatttggtaacactgaattcaagctggggatgaaagaagtatagagggctaacacgggcctcaaacattttataaatcatcagcttaaataaatgttcctcttacaacaggcactagaattcagagatgagtgatgtgtacatctgcacatttaatacctagaggtaaataagatacagatcctatttctgatttttagcaaaggagagatttcaactcagtatttgaaaat

SEQ ID NO: 478122 - DNA, 162 bp, Homo sapiens
ctgtcaatggagagaggcagaaacagaacttggaaactgtttcctccacccactttacagtaactgggaaggcagcattctctgaaaaggccatctgcaaaacacagcacctgcctcctgatgctgtccctactcactytgaggatcaggaagcctaagcta

SEQ ID NO: 478123 - DNA, 565 bp, Homo sapiens
ctcaccccaatttatcacttcaaaaatgataaaagctgagacttggagaaactagtaactaaccaaaagtcacccaagaaggaggtggcaagctaagatcaagccccactttggtgggagctaagagtagcccttggtagagtcatggggttggctaattcttgcctttggaacctgtttctatctccattcagttcctttctttcctgtcagttggactktaaactctaagatcaggaaatttccctttatctatcaaatcataccctattgagtgagtgcctgcttagcctaatgtcctgcaaatggacaggactcctctcttctatgactccccagaaatattacaaaggcctgtaggaaatagctcgggacagaccagaggaaatagcatggaggattcacagtataacttataccttcaaaggtgaccaccagcctgcatcccattaaaaacaaaaacaaaaacaaaaacaaaaacaaaacaaaaaaaaaccctgaacaaggtctccaaagaaaccaccccgtcccactacatttttctgaaacacagttctgacttgca

SEQ ID NO: 478124 - DNA, 465 bp, Homo sapiens
tgtgcttcacccaggaagaaggcaggggaaacgggcatggcaagtcatgacttcacgacctttctgcacaaactgcttcctcccagttttgctctrgacttgctctggaggttgcactgcttggaggggccccaggaccgtgggagtcaaatggagggacttgcaagtccatctgctttcagtggagtctttttcagtgttagagaaactcagggctaacatttaaaatgctaaatgcccaaggacaatttgcaaggcttaaaaaactacttttggccttcagtagctgagttttaaagatggaaattaaaatacatgctgtccacagaggaattcggagcacccaggccagagatgacaaaaatccaccatttgcaaaaccccacttctatgttattctaacctgcattttttccttcttttccctacagttgtcagcaaggggacttgtgtaaaagaggtaga

SEQ ID NO: 478125 - DNA, 465 bp, Homo sapiens
tgtgcttcacccaggaagaaggcaggggaaacgggcatggcaagtcatgacttcacgacctttctgcacaaactgcttcctcccagttttgctctagacttgctctggaggttgcactgcttggaggggccccaggaccgtgggagtcaaatggagggacttgcaagtccatctgctttcagtggagtctttttcagtgttagagaaactcagggctaacatttaaaatgctaaatgcccaaggacaatttgcaaggcttaaaaaactacttttggccttcagtagctgagttttaaagatggaaattaaaatacatgctgtccacagaggaattcggagcacccaggccagagatgacaaaaatccaccatttgcaaaaccccacttctatgttattctaacctgcattttttccttcttttycctacagttgtcagcaaggggacttgtgtaaaagaggtaga

SEQ ID NO: 478126 - DNA, 540 bp, Homo sapiens
ctaataccacttgctttggaaaccaatttaaaacatctttctttgtttccaaactttgcttagtaaaaccttgcattatcctctggcagtgagtatataaagccctacatgaaaaacacggaatagtacgctgtctgttctagaaatcaaaatgcagagaggccattcaggggtctctagtgaaggaaaacaaggttgagatgatttgagtgttttgggcaagtgacttaacctccctgagtcttgcttgtgccacatggaaattcatctttaaacgggggagacgggtatgacggtgataacagtgcccatctcactaggttactgttgttaagagaactattgggcttgctgcctgccaaatagtacgtgctgaaaaaatacccatttttccttcctcatttgcaatttcagagttttcaaagttacaggaggcttgctagtcattaacatagtgctgaggcagagatggggcaygggaactagaccaccagacctttcctccagtgcccagccccagcggccccagagaactgaaga

SEQ ID NO: 478127 - DNA, 424 bp, Homo sapiens
tgctctccatagaagaatccttggcacttcagaaacagcagaaacagaattatgaggtatttagagtattttttttcttgtctgtttgttgggtgctrcttacataagctagaatttactccaggttcaaggaggaaggaatggaatagaggggattaggtgcttccatgagctcagatctatgccactagttttcagagagtcacaaagttgctagaactgcaggaagtagctagagatgatcacagctaccttcaacattaaagtggtgatttgcctggagatgtggggagacttgtagaatttcatgtcttaaagctcatttacctgcctgttcctgttaggatagtagtagcatcgcatctctccctttcaccttgtaaaactcatgtgacagcttctcagtggcggactcaaacccaga

SEQ ID NO: 478128 - DNA, 630 bp, Homo sapiens
aataatgtatccatagaatggaatactattaatgagttaaaatagtttgttgacataaaaagaaaactaatatagatggaaagatagctacaacaaattagtggctgaaaaagcagattataacatagattacaatattttgttttcatttatgtaaaattggatgcacatgtctgtacatgcatagcaagccatttgtatgcattcagtcaatctatttcttcaacaactattgtgtaagtgatgctctgtaaatacattgtgatagttgcccatgtcatggggcaaaatcagataatacatataaattgtatcatgcatatttgagggggaacatatttgacttactgaaagtacctttttttctcatctccagaataatgaactacaaagcaggttggactatttaacagaaacccaggccaagacygaagtggaaaccagagagataggagtgggctgtgatcttctacccaggtatttaggaatttcctgatttttttttttattcaaattcctctttggctgaagaaaatactttactaggctgttcttagcagaattgcattcttcctatcacaaatatttctgcaaagccgagtggtggctgctgagaggcttgactggttt

SEQ ID NO: 478129 - DNA, 646 bp, Homo sapiens
taattctacacccagaattgtkttctctcctgtgttactctttccaaataccagcatcactacccactcagccactcaagctagaaattcagagactctcctcgctgttccctacttgccactctgcactttctattatggccacattccggtgattctgcctctgaaatctttttcaaatgtattctttcacattcgttcccatgtccacagccctatttcgtgcccttctcgatgcttgattggattacaacaagagtctctttattggccatcttgtttctagtcatttctttctgtaatccattcactttcttaactactcttaaaatgtaaattctaaaacacaaacctggtcgtggcttcttgccaagagatgacttaactttttttaagttttggtgtaaatgtgcaggatgttcaggtctgttacataggtaaacgtgtgccatggtggtttgctgtgcctatcaacccatcaccaaggtattaagcctagcatgcattagctacttttcctgatgctctgaatcatctgctcccaatctaccttctgtttttgatctcttatcacctttctcctctcctccaggtaccagggctatatccacattgaaatgttggatgctccgaagaaatgccacat

SEQ ID NO: 478130 - DNA, 646 bp, Homo sapiens
taattctacacccagaattgtgttctctcctgtgttactctttccaaataccagcatcactacccactcagccactcaagctagaaattcagagactctcctcgctgttccctacttgccactctgcactttctattatggccacattccrgtgattctgcctctgaaatctttttcaaatgtattctttcacattcgttcccatgtccacagccctatttcgtgcccttctcgatgcttgattggattacaacaagagtctctttattggccatcttgtttctagtcatttctttctgtaatccattcactttcttaactactcttaaaatgtaaattctaaaacacaaacctggtcgtggcttcttgccaagagatgacttaactttttttaagttttggtgtaaatgtgcaggatgttcaggtctgttacataggtaaacgtgtgccatggtggtttgctgtgcctatcaacccatcaccaaggtattaagcctagcatgcattagctacttttcctgatgctctgaatcatctgctcccaatctaccttctgtttttgatctcttatcacctttctcctctcctccaggtaccagggctatatccacattgaaatgttggatgctccgaagaaatgccacat

SEQ ID NO: 478131 - DNA, 641 bp, Homo sapiens
caaatatgctcagaactctctactccagattctaccctgcacgagggctttattccttccrtggattttcttccagggaagttttgaatcaatattaacagcaacataacagagatgaaagagctttactcctaaatccagtgtgaaacattttggagaactcttattggctgcatttgggtcaaatgcttgcctctaaaccatctgggaaagtagagtcagctaagggaatgaacaaatatggctaaaatagggaagaaagcagacacccctcaaaatgacagggataacactgacagattatgaagtagacagtcccttccccctaagtttatgtccatttagaggataagagagagaaaatgactttcttgttcagtcatagagtttggacaagaaaaacatagtatttgcacactccgctggaatacttgatgaagtgaatgtgtctccctctaatgaagttattccatcttttgggcaatgtctttgagcttgacaagtaccagggactttaattgaaaattactttgggaatcttgccagacattacaaattaaaaatatgaaaacctttctcctgggtcaggagtgtaacaagccccatgtcaaatgtcattaccccacgtgcattctaggact

SEQ ID NO: 478132 - DNA, 654 bp, Homo sapiens
aaacacactaacgatggtaaggcaggtagataaaagaagcccagttcttcataatggcttcggcaagccatacagttctgaatttcctagcctgaacatctgtttatgtgagaaaaataaaccccttacttgtttaagtatgtgataggattttctaatgcttatgaccaaaagcattcttgatacacatacgtacagggttatgatgagaaagacagcaaatgtaaagtcccaatagtaccttggtgcttggtgattgttcaataaatagtatctatgattacagacccttttgtgtgagtccatttacccagacagactaggaacttcctgaaggcaaaagcctagaaaatgaactaggcatatagtggaggtcagtactaactgggttgacctgaaccgaaamtgaattccctcctgggcaaactgttatctatttaggtgacccagcagaggatagatgcatcaatcagtttactgaagtaagcagaaatcactctaattattttatgcggaaagggatgtaatacaaaaaatttttggaagaaatttgtgatgtggaagtcaaggttctgcaaccaggctatcaaatacataattataccactgaaactgttaggaacccactactgctactacctctgtgaacaccac

SEQ ID NO: 478133 - DNA, 496 bp, Homo sapiens
ctgggaagagaaggagcttaataataatggccccacccttgcgtctatgackggtgtgcagagagcactttgctagctagtttaattcacaagcaatcttgtaaaacagggggcagatgtctagcttgtttgagggggaggctgagttgtggtggtggggaggcaggtgtggaggatggccggctctgagaccgtgaatggtgctgtgtcactcgccctccccaaacccctggtgtcttagctcagacaccagggggttgggtgagctggggagctagtggcatcctggtcaaccaagacatagaaaggttaggatttgcccagggtcatagacatgtcacattcacctaagtgttaattaaggaggcaaaagtgggatcttccccccggctggtgctgggggctctggtgctcagggacctgctggggagagcctcacggtcttaggatacaggtgcctgaacatgaccagccacagaaaatggaccagagaccc

SEQ ID NO: 478134 - DNA, 578 bp, Homo sapiens
cttaataataatggccccacccttgcgtctatgactggtgtgcagagagcactttgctagctagtttaattcacaagcaatcttgtaaaacagggggcagatgtctagcttgtttgagggggaggctgagttgtggtggtggggaggcaggtgtggaggatggccggctctgagaccgtgaatggtgytgtgtcactcgccctccccaaacccctggtgtcttagctcagacaccagggggttgggtgagctggggagctagtggcatcctggtcaaccaagacatagaaaggttaggatttgcccagggtcatagacatgtcacattcacctaagtgttaattaaggaggcaaaagtgggatcttccccccggctggtgctgggggctctggtgctcagggacctgctggggagagcctcacggtcttaggatacaggtgcctgaacatgaccagccacagaaaatggaccagagaccccaaattcataatcagatctgctctgtgtcccagacccaggccccagcccagccacagaccggcctgctctccagggcccaccattccttccaggccat

SEQ ID NO: 478135 - DNA, 545 bp, Homo sapiens
ctgcctatctttttctgaaagtcactaatgttaaatttgtaaattataattttgcaagcaaggtagggtgaaggcttgacagcaaacgtggcttccttctttctgcctctcttccctttttcagtgaagaacacatctgattaccaggtctttgaagccagagccatgccttccttctctgtctcccccgcaatccccagttcactgtggtggacataataaaaatgcaatatgactgttttggattgagctgaattttatttctaaagggaagtttggctggtcctattcttmttctcccagagaggtcttcctgcaatcggctccactgctgaacatgcagtggctgattggttccgtcgtgagggctgctgagtggctggtggttttcaaaagcggacatttgtccctcagggccagagccgaatcaccacacaagttcacagactcctcccgggcaccgaggcgctgactctgagtcatgatcaacgtgagcagcattctttctggtaatttagtggcaaagaggacaaatcccacatttg

SEQ ID NO: 478136 - DNA, 545 bp, Homo sapiens
ctgcctatctttttctgaaagtcactaatgttaaatttgtaaattataattttgcaagcaaggtagggtgaaggcttgacagcaaacgtggcttccttctttctgcctctcttccctttttcagtgaagaacacatctgattaccaggtctttgaagccagagccatgccttccttctctgtctcccccgcaatccccagttcactgtggtggacataataaaaatgcaatatgactgttttggattgagctgaattttatttctaaagggaagtttggctggtcctattcttattctcccagagaggtcttcctgcaatcggctccaytgctgaacatgcagtggctgattggttccgtcgtgagggctgctgagtggctggtggttttcaaaagcggacatttgtccctcagggccagagccgaatcaccacacaagttcacagactcctcccgggcaccgaggcgctgactctgagtcatgatcaacgtgagcagcattctttctggtaatttagtggcaaagaggacaaatcccacatttg

SEQ ID NO: 478137 - DNA, 545 bp, Homo sapiens
ctgcctatctttttctgaaagtcactaatgttaaatttgtaaattataattttgcaagcaaggtagggtgaaggcttgacagcaaacgtggcttccttctttctgcctctcttccctttttcagtgaagaacacatctgattaccaggtctttgaagccagagccatgccttccttctctgtctcccccgcaatccccagttcactgtggtggacataataaaaatgcaatatgactgttttggattgagctgaattttatttctaaagggaagtttggctggtcctattcttattctcccagagaggtcttcctgcaatcggctccactgctgaacaygcagtggctgattggttccgtcgtgagggctgctgagtggctggtggttttcaaaagcggacatttgtccctcagggccagagccgaatcaccacacaagttcacagactcctcccgggcaccgaggcgctgactctgagtcatgatcaacgtgagcagcattctttctggtaatttagtggcaaagaggacaaatcccacatttg

SEQ ID NO: 478138 - DNA, 671 bp, Homo sapiens
tttgtgtttgtcttctctcattaactcagcctttgagcatctctccacttttattttgatataccaacttcattatttatatgaacattgcattatgctttttagccattaaacccattattataaacccacacaaaaatcctatatgacagactggaattatgtgtatttcagagaagacagaatgcatgcaagccttttraggatttttaaaaacacacaaaccaggtagaaaggcaatttcatgggctagaatttcataactcagtaaatatgaatgtacggggtgcagcattctatgaggtattttggtaccaaaaaatgatgtataagccaagttccttcctgaagatccctgatgctgattctgtacagattctataatgttgcatttatttaactctcctatcacatcccaaattgactcacaagggatccattcattcactgccaccagaaagagcaccctgttgtgggactggacagcaacaggtcttacttacatactgctggtgggagtgtggactcacacaagtctttttagaaacaatttagcattatctaagaaacttgatgacccacgtacacggtggcccaaatattccactcctgggaatattttcttgagagagatccccaagtgctccaaggagacatgtccaaagtgttta

SEQ ID NO: 478139 - DNA, 671 bp, Homo sapiens
tttgtgtttgtcttctctcattaactcagcctttgagcatctctccacttttattttgatataccaacttcattatttatatgaacattgcattatgctttttagccattaaacccattattataaacccacacaaaaatcctatatgacagactggaattatgtgtatttcagagaagacagaatgcatgcaagccttttaaggatttttaaaaacacacaaaccaggtagaaaggcaatttcatgggctagaatttcataactcagtaaatatgaatgtacggggtgcagcattctatgaggtattttggtaccaaaaaatgatgkataagccaagttccttcctgaagatccctgatgctgattctgtacagattctataatgttgcatttatttaactctcctatcacatcccaaattgactcacaagggatccattcattcactgccaccagaaagagcaccctgttgtgggactggacagcaacaggtcttacttacatactgctggtgggagtgtggactcacacaagtctttttagaaacaatttagcattatctaagaaacttgatgacccacgtacacggtggcccaaatattccactcctgggaatattttcttgagagagatccccaagtgctccaaggagacatgtccaaagtgttta

SEQ ID NO: 478140 - DNA, 442 bp, Homo sapiens
ctgcagtctcaaatccatcttcctgactgattaaaaccaggggattatatagcagccaagaaatgtaagaatgaataagaaaacaggaactcgggaggagcaaggaagcgatcctggtgaatgaggggtccggcaacyggtgtggtgatctgggttcagttctttgatgctttttgtgagaggcctgaaggtagtttcctgaggaaggaactcagataaaacaaacataagtttcaaactttaacagcagaaggttccattcctgtgtttatccaaaagcaagtgtctataggacttttgggttgctttcacaaggaataggttacatgggacatctctccacgttgaaaatcgggaggatgtgctttccatcgtagtgatgccctcagagcaacatggacaacatcacatcactgaatttttttttggaaaggatgaaata

SEQ ID NO: 478141 - DNA, 553 bp, Homo sapiens
ttcagaggaagcagagacagggatactttctaaaagctcggctgcaaaaggaagtagagatacaaaagagaaaatgaggaagatgcgggttcaaacgaatgtctaagatggaattatcgcaatgtgttcatagctgaaaggaaaaggtagtgtagattcaaaagcacaagacagaccagggaggagatgcaaaggcactgagttcgagtatcgcatgaagtaacaacctcagactagaaaaaaaattagcgaaaatgagaggaaatgaaagaataggtagaaatagaaataaacagacaaaaactaaactgcattagcytcaattcctcccaaatcccatttaaataacagtaaagttatattaatacataattaataattatatcaatatataatacataaaaagtattaaaaatcccaaaggaatgcaaacatcagcaacgcagttttagaaactgaaaaccagctagtgagtggtggctgacttggcggtgtggaaggatacaaagtcatcagtacacatctcctttcctgctggagccccgcgtgctgg

SEQ ID NO: 478142 - DNA, 557 bp, Homo sapiens
cgtttcagacacactgagacccagaaggagcctcagctcccatcacaggtccagtctggatgtggtagggtacgaaagggaagcgagtacaatgatgaaaatcctgatggtgacccctgaggcagaggaaggcacagctaatgtctgcccactcatggcttcccacttaactctgggctccgctgcccacctgtggcctgagatgggacgacagggagcgagagaaacccctctctgtttggagactgccatcactcccagccacagacagccctgatctgtctctatctctagacacaataggatctcacccactacgtaggaaagggtgatgtcaatttggaagaggaaggctacaaaaatgcagcaacagccaaacatctcctaagagcaattaacctcaaaataattcgtaagctggacatttcccattctaagatatacaaaacgagcaattccaggcatatctcattggtgacaggaaaaggaaagcatatcttctgagatctttccaaatactccaacccccacaagaygtgctccacttgatgaacact

SEQ ID NO: 478143 - DNA, 593 bp, Homo sapiens
tttttttaacattttcaaactggaaatgatcaataattatttwaaaaaatcaaaatcctaatgtaaatattgaaaccaaaaatgttcccaaggccaattaacttagagtttttttaaggatgggagaggtgtgaagaaggataagattatacctaggataggatcaattttggagttttattggaaaaatgtataccagtggaatcatgtttttaaaaacgtgtagagcttttttaccataagacactcccctttgatatctctaatgtcatatgtaaaaatcgcttcataaggctgggtgaggtggcacatgcctgtaatcccagctactcgggaggctgaggcaagagaatcacttgaatgctgaaggcagaggttgctgtgagcggagatcgcgccactgcactccagcctgggccacacagcaggactctttttcaggaaaaaaaaaaatcaataacatttgtccttcttttatttgccatatctgtttgttcaacaagtagaaagccaaattgtgttttagggaaagaaaaagtgtggtacagacaggactatatgccaaccagattacaacagtttatcagttatat

SEQ ID NO: 478144 - DNA, 593 bp, Homo sapiens
tttttttaacattttcaaactggaaatgatcaataattattttaaaaaatcaaaatcctaatgtaaatattgaaaccaaaaatgttcccaaggccaattaacttagagtttttttaaggatgggagaggtgtgaagaaggataagattatacctaggataggatcaattttggagttttattggaaaaatgtataccagtggaatcatgtttttaaaaacgtgtagagcttttttaccataagacactcccctttgatatctctaatgtcatatgtaaaaatcgcttcataaggctgggtgaggtggcacatgcctgtaatcccagctactcgggaggctgaggcaagagaatcacttgaatgctgaaggcagaggttgctgtgagcggagatcgcgccactgcactccagcctgggccacacagcaggactctttytcaggaaaaaaaaaaatcaataacatttgtccttcttttatttgccatatctgtttgttcaacaagtagaaagccaaattgtgttttagggaaagaaaaagtgtggtacagacaggactatatgccaaccagattacaacagtttatcagttatat

SEQ ID NO: 478145 - DNA, 625 bp, Homo sapiens
cagaagagctgaagaatcagacatggaaaataggcaggctctataggaggcaatgcatggtgaccacagccaaacttccatcggggacagtctggcggggtctttcttgtgtcctggaatgatgacggccagtgcaggtcctgaagaatgcagctgcygtggacccagtcagcacctctggtcaactgccctggaatgagaaagcatcctcactgcctctagaatgcaattctcctctaaccctacttctttgctgaattgctccacattcaaagatgtgggcatcagtgtctgcctgaatctagtaatgaaattaaagtttaaagcaatgagaggtagacaaaactgggtacttattacgttccaaatactttccaatttattcccatatctctggaatacatgttttttaaaaggggtgatgtaagaatggggaaagcaaaataattaagaaaaaattatgaaaataactggttgatggaataattgaacggaataaatggaataatgaaaggatgtcaaagaccttcgtgcattacgtgtatatagctctgaagtgtgtgtatataactctgatggatgtgttgagatttggctctgagtgagggactcttgcaggaaaaag

SEQ ID NO: 478146 - DNA, 547 bp, Homo sapiens
aaataatcttggagaaaggaggaaaataaaattcatcttgtttcaccattattattttttactggagaaaccgatgactggaactattaaattacttccaaaagaaccaggattggaactcgggtttcctacactagtttctgtgttctcttttcattttaacacatggcctattacctctttatattttatggagaataaaatcatcacaatagaatgctccataaaattatacatatgccttaaaatttttacatatcaatataatctttttgttgttaaatccgcagtccatccttttagctatttcagttgctgggggtgctatataagattttaattgtgcaatattgaacatttcacataaaagaatgatgtatctcttgagctttcagggagacaagaaaatttagtctacggaagaacaaaagcaaacaaaaarcaaataggaaacttctctcatgagaagtaaacaatagtaccccattatagggggtgtgatggttgatattgagtatcaacttgatccaattgaaggctgcaaagt

SEQ ID NO: 478147 - DNA, 572 bp, Homo sapiens
catctattcaggttaccactcagtgtaaaacatgctgcttgaagtgataagaataagttggcttttgggggaggaagggtatttccatgaaattgtggatatttttgcatttcattttcacgctgtcattcccagttgttactttggtggtttgaccaactccrtttttattttcagattcatcaggcttctgttgcctatttttaaaaagatataatcagatgttaacaagtgttgacttgtttaatttttagcaaaagtgtggaggcaattttaatatactcaattttactatgtgtataattttgacaaaagaaagcaaaacttacaagagaaaaagaaaatttaatgaaaaatatattaataaccatagtaagaaataatatacaaggataaatctaacaaaggaaatctttatccatatttctggataaagtttataaaccttttgaaggaaataaaagtatgctaaataattaaagatatatactgtgcttgtgggtgacaaaacttagcattacaaagattttgtaatgcttagcattacaaagattttggccaagcaattttat

SEQ ID NO: 478148 - DNA, 572 bp, Homo sapiens
catctattcaggttaccactcagtgtaaaacatgctgcttgaagtgataagaataagttggcttttgggggaggaagggtatttccatgaaattgtggatatttttgcatttcattttcacgctgtcattcccagttgttactttggtggtttgaccaactccatttttattttcagattcatcaggcttctgttgcctatttttaaaaagatataatcagatgttaacaagtgttgacttgtttaatttttagcaaaagtgtggaggcaattttaatatactcaattttactatgtgtataattttgacaaaagaaagcaaaacttacaagagaaaaagaaaatttaatgaaaaatatattaataaccatagtaagaaataatatacaaggataaatctaacaaaggaaatctttatccatatttctggataaagtttataaaccttttgaaggaaataaaagtatgctaaataatkaaagatatatactgtgcttgtgggtgacaaaacttagcattacaaagattttgtaatgcttagcattacaaagattttggccaagcaattttat

SEQ ID NO: 478149 - DNA, 583 bp, Homo sapiens
ggtttacgaaaaagaacaaagaaaataaggcagaaaaatcatcaaggttcaaaacatcacacaagacaggatttttctgacctctgttgaaaccattcaaaataccaagttgttatagtacgttctcctttgaacaagtaatgacaaagtaagaagaagctacagttctactttctcttagctagaaaacaagtggagcaaaaattggacgtacacaaagttagccataagcaacatgccattgtccgacctctgagacaaggaagacatatgcacacawctgcacaccaccatatgcttcccagatttttgctaaagaagaacttgattttttgtgatacagaagacagccagttctttaggatagttgcagaatgagaaggatgtacagagactaaagtcacaatgaattgctggtagcaactgcacatttgaaaactgaacatgttttggaatatatatgttatttgaaagcaattttgttctttctccttccctgtatttttaattcaggtaatataatctcttcttgagcttcacaattctaaaccacaccgccaaataccatgtggtcttaataaaa

SEQ ID NO: 478150 - DNA, 583 bp, Homo sapiens
ggtttacgaaaaagaacaaagaaaataaggcagaaaaatcatcaaggttcaaaacatcacacaagacaggatttttctgacctctgttgaaaccattcaaaataccaagttgttatagtacgttctcctttgaacaagtaatgacaaagtaagaagaagctacagttctactttctcttagctagaaaacaagtggagcaaaaattggacgtacacaaagttagccataagcaacatgccattgtccgacctctgagacaaggaagacatatgcacacaactgcacaccaccatatgcttcccagatttttgctaaagaagaacttrattttttgtgatacagaagacagccagttctttaggatagttgcagaatgagaaggatgtacagagactaaagtcacaatgaattgctggtagcaactgcacatttgaaaactgaacatgttttggaatatatatgttatttgaaagcaattttgttctttctccttccctgtatttttaattcaggtaatataatctcttcttgagcttcacaattctaaaccacaccgccaaataccatgtggtcttaataaaa

SEQ ID NO: 478151 - DNA, 583 bp, Homo sapiens
ggtttacgaaaaagaacaaagaaaataaggcagaaaaatcatcaaggttcaaaacatcacacaagacaggatttttctgacctctgttgaaaccattcaaaataccaagttgttatagtacgttctcctttgaacaagtaatgacaaagtaagaagaagctacagttctactttctcttagctagaaaacaagtggagcaaaaattggacgtacacaaagttagccataagcaacatgccattgtccgacctctgagacaaggaagacatatgcacacaactgcacaccaccatatgcttcccagatttttgctaaagaagaacttgattttttgtgatacagaagacagccagttctttaggatagttgcagaatgagaaggatgtacagaractaaagtcacaatgaattgctggtagcaactgcacatttgaaaactgaacatgttttggaatatatatgttatttgaaagcaattttgttctttctccttccctgtatttttaattcaggtaatataatctcttcttgagcttcacaattctaaaccacaccgccaaataccatgtggtcttaataaaa

SEQ ID NO: 478152 - DNA, 522 bp, Homo sapiens
ctggtatgaaggaccccaggaggagctgacttagcaactaacgcagtttccacatcctgatgagttcatttcccttatcctgaccaatcaacaaccccatttttctagcacctcgccctccattatttccttaaaatccccagcccagaactccttgggaagactgattttatggtcttttccatctcctcacatggccgctgtgtgtcattaaactcctcctctgctgcaaacccttctgtctcggtgtagtggtatgttactacatagtgggcatatgaacttggtagtcctataacattactggttaagcaaactttaaaactgattcaccatttagggctaaaaattctaaatatatgcatattaacaagatcatagctgaaatagacatgtaatatggaccttagaggaaatatataatgttcaataggacatacttagatcaaatgactcattctaaatttctaaaactrtagtaaaagtaaataaaaacttcctagtccatgaagagacaacttt

SEQ ID NO: 478153 - DNA, 655 bp, Homo sapiens
aatcccatgacttctcgctttcatgccaccgtcctcttctgcaataatccccactacctgctctcttccttggacctcacttccctttagtcaattctcaacccagaaccagagtggttctttttaaatggcagatgatgtgactcttctgctccgaaccctctaaaagcattctttgtcctcagaggaaaaaaaaaaagccattgtagtcattacaatggcctacaagcctttacatcagaggtcagtaaattataacctgtttttctgagggaagaaaagtcttatttggaacacattttttttcattcatttatgcattgtctatagttcctgtcatgatatgatgatagtcatgcattgattattcatttaatattaktattagcatgcaataagatatagcatttagtcaataatgatttcaagagaagaactgcttatgaggacataaatctgaatgggagaagacctagatttctccagagctgtgcgtaatgaggacagtcacaaattaggggagtagatgggaagtgggcactcctgagctctgcaagtgtgagcaagaatagtggttgagccatttggagaaggcacaataggtgagttaatgagaagataaatgtagctgagaaaatgagagaagttttcagca

SEQ ID NO: 478154 - DNA, 655 bp, Homo sapiens
aatcccatgacttctcgctttcatgccaccgtcctcttctgcaataatccccactacctgctctcttccttggacctcacttccctttagtcaattctcaacccagaaccagagtggttctttttaaatggcagatgatgtgactcttctgctccgaaccctctaaaagcattctttgtcctcagaggaaaaaaaaaaagccattgtagtcattacaatggcctacaagcctttacatcagaggtcagtaaattataacctgtttttctgagggaagaaaagtcttatttggaacacattttttttcattcatttatgcattgtctatagttcctgtcatgatatgatgatagtcatgcattgattattcatttaatattagtattagcatgcaataagatatagcatttagtcaataatgatttcaagagaagaactgcttatgaggacataaatctgaatgggagaagacctagatttctccagagctgtgcrtaatgaggacagtcacaaattaggggagtagatgggaagtgggcactcctgagctctgcaagtgtgagcaagaatagtggttgagccatttggagaaggcacaataggtgagttaatgagaagataaatgtagctgagaaaatgagagaagttttcagca

SEQ ID NO: 478155 - DNA, 650 bp, Homo sapiens
gctgaattaaaacaataaaagagtacaatctaatcagcaaactcaaaagcaggggaatgcacaaaattagcataagaataacaaaactacaatagaagcattaagaccaagaattacaaaaagcagaccaaattcagaactcactcatgaaatttaagtaagtctatcttttcattaaatgtgatttgtgctcaggttatatccttaggaatatttttattccatgactttaaaaatggaaagactcactgtgtgtgtatacaaagaattgtctttggactctcctcaaagatgaaaaatattctattgttattcaagttattgaaagccaggactcatcagtgaaatgaatgatcaagatggaccatgtatttttggaaaaaatgtaaggtaaccaaaaagcaatggcattggtagactttggctaataaaatggttaaaaaaaaaaaaaaaaaaggatttttttttcaacaacggcaatactgctgcaatagaacctaagaatgacaaatacatctaaaacatgtttgaatatgtaaactttgattgaatattcatcctattgctacttgtaggatacaggtgcatacgcattctccaaagcaggacagtatgcatatgygtgcaaatcattacagtttgcagagaaa

SEQ ID NO: 478156 - DNA, 518 bp, Homo sapiens
atggcaaaaatctagagttaactacagtactagagagaaccgggccaataataaattaatatcactatgacatacccaggtaatttctatgtatttattaatatgtgttaataatattatctaactgataaaccaaacagcagagagcttggcacagatgttataggataagtacccaggagagtgcccagcacacagagattctaaacaaacactgattcccattttccccaggaagatccatgcatyggcctcactaccccaatttgcttttttgtaaaattagtggctgtcttgaaatactggcaacaatcaggtctgttatgatgtcaggcatgggaaagagactctagacaacagaaagctcctacaacccaccgcccaaagagcgttctcattcccgcaacccactttccattttgcttatctccccacttcactactctatgttttccatgctgctccaaaaagaaagaattcctatttcctaggtgattttgggggaaccacttgacagc

SEQ ID NO: 478157 - DNA, 657 bp, Homo sapiens
acagttggggcagaggtggatgtgcttacgtgcctggatcctcgtgtttacacagggaggagtcaatctgatgaatttagcaaaaggtttaaatgaggaaactcaagctgtaatctctaggaaaccagaaggaatactataatcaaaacagggaagagaggagagggtgtggtggagaatggagctaacttctttattctttacaaacaccagatgcagcctatacaccaagaagctgtcttcaggacacctccaggacaaaaaccaggaatgcctacaaggggtactgcaggaaaacgggaagagagaagtgctgggaatgcargtatggtggcaagactctgactccaaatagtaataataacgtacaaaactggtaaatgtcaggagaatttaagtaaactagatatttaaaaataatggcaccatattacactattacactacatacagaattacgcaaagtctctttttttattcagataaaaagagtttacagcaatctgaggtaatcacaaaatacaatcctttggacattttcagcaagaggaaattttagttggagagtttctggatcaccttgctctaaatcttatgaattttattttcctttattataactggtagctatttattgaatgggataatttccattag

SEQ ID NO: 478158 - DNA, 614 bp, Homo sapiens
ggattacagacatgcaccaccatgcccrgctaatttttgtatctttgtagagacagtgtttcaccatgtaggccaggctggtctcaaactcctgacctcaagtaatccactcccccttggcctcccaaagtgctgggattataggcgtgagccactgtgcccagaatttgaatatcttttgagcgatgtgcccattcatgtcttttatacgtttttctctttatgtgttaatctttcgaaaaaaaggttttaagaaatggggtctccctatgttaccaaggctgaacttgaactcctgggctcaagccatccttccaccttagtctccaaagtaattggaactgtaggatacaccactacccatggctccttttgcatatttttctgttactttgtctttttttttaatttgtaggagctttttaatattctgaatgcatgtcatttgtatgatactttttttataaatatcttttcccaagattatctgtgtcttgaatggggaaaagtcgaacacctttcctctaagaactggaacaaggaaaggatgaccactttcacatttttccccatgtttattacagcatgactgacaatagccaagatatggaaac

SEQ ID NO: 478159 - DNA, 614 bp, Homo sapiens
ggattacagacatgcaccaccatgcccggctaatttttgtatctttgtagagacagtgtttcaccatgtaggccaggctggtctcaaactcctgacctcaagtaatccactcccccttggcctcccaaagtgctgggattataggcgtgagccactgtgcccagaatttgaatatcttttgagcgatgtgcccattcatgtcttttatacgtttttctctttatgtgttaatctttcgaaaaaaaggttttaagaaatggggtctccctatgttaccaaggctgaacttgaactcctgggctcaagccatccttccaccttagtctccaaagtaattggaactgtaggatacaccactacccatggctccttttgcatatttttctgttactttgtctttttttttaatttgtaggagctttttaatattctgaatgcatgtcatttgtatgatactttttttataaatatcttttcccaagattatctgtgtcttgaatggggaaaagtcraacacctttcctctaagaactggaacaaggaaaggatgaccactttcacatttttccccatgtttattacagcatgactgacaatagccaagatatggaaac

SEQ ID NO: 478160 - DNA, 583 bp, Homo sapiens
tttcaagtgaatcccttgcccttactcgcaggaaacaggttgtatctttccaggccaagataataagacagtacgaaatcatttagagttctctgaaaagcagacactaagaaggaattaggctagagatttcttggaggaaacgcttgtgaacagtaaaggggagaggaagccagagtaggctaggagaaaattcagattggggtgcaggtctgatacctttgaaaagagagtagggaggaaggagaattaagtaggataatcctcagaccagaatgcatccctgagacactcttggsctgggccaaataggaagccccagagcagaatgcctgttgtaagagacccatgacaggcgggagtagcctggctctagggtccttgcagtgctggatcattataggagcagcctacgagagggtggcctctggctgagtgctgagatagatgtgaaggtatggcagctgcaggctgtctgccagctactcttctcacagcagctgcttttgaagggaaatttgagggacatacctcaatggccatcacaagtgttttataatttctcactaaatatgacatttat

SEQ ID NO: 478161 - DNA, 504 bp, Homo sapiens
agtcagctgctgtgggtgagttgggggtcactgtgtggagtgagcactggacgcagagcttggaggccaagtgcctgccccgcccttacctgtctgtggtcttgggcaagtcctagtcctaggtggggtattgggtacttgtactgtgaaggtacagaagagtacctttagtatgttaccatttctgtagaaagaggaaacgcgtgcatgtgtgtgtgtgtgtgtgtgtgtgtgtacatactgtgataatatacataaaacatgtctgcaagggttcataaaaaaktcaggagagagaacaagatggctgggagatacttcccttctgtaccttctgagttttggactatgtgaatgtatcatcctttcaaaaagtgaacaaaagattaattttccccttcctatctgtgcccccatccccagcaagaaaaatgggcttagagaattggatagacctgggtgtttatatcccagctctgcctaagtgaacttaggcaagcactt

SEQ ID NO: 478162 - DNA, 322 bp, Homo sapiens
ctgtgggtgagttgggggtcactgtgtggagtgagcactggacgcagagcttggaggccaagtgcctgccccgcccttacctgtctgtggtcttgggcaagtcctagtcctaggtggggtattgggtacttgtactgtgaaggtacagaagagtacctttagtatgttaccatttctgtagaaagaggaaacgcgtgcatgtgtgtgtgtgtgtgtgtgtgtgtgtacatactgtgataatatacataaaacatgtctgcaagggttcataaaaaattcaggagagagaacaagatggcygggagatacttcccttctgtac

SEQ ID NO: 478163 - DNA, 504 bp, Homo sapiens
agtcagctgctgtgggtgagttgggggtcactgtgtggagtgagcactggacgcagagcttggaggccaagtgcctgccccgcccttacctgtctgtggtcttgggcaagtcctagtcctaggtggggtattgggtacttgtactgtgaaggtacagaagagtacctttagtatgttaccatttctgtagaaagaggaaacgcgtgcatgtgtgtgtgtgtgtgtgtgtgtgtgtacatactgtgataatatacataaaacatgtctgcaagggttcataaaaaattcaggagagagaacaagatggctgggagatacttcccttctgtaccttctgagttttggactatgygaatgtatcatcctttcaaaaagtgaacaaaagattaattttccccttcctatctgtgcccccatccccagcaagaaaaatgggcttagagaattggatagacctgggtgtttatatcccagctctgcctaagtgaacttaggcaagcactt

SEQ ID NO: 478164 - DNA, 504 bp, Homo sapiens
agtcagctgctgtgggtgagttgggggtcactgtgtggagtgagcactggacgcagagcttggaggccaagtgcctgccccgcccttacctgtctgtggtcttgggcaagtcctagtcctaggtggggtattgggtacttgtactgtgaaggtacagaagagtacctttagtatgttaccatttctgtagaaagaggaaacgcgtgcatgtgtgtgtgtgtgtgtgtgtgtgtgtacatactgtgataatatacataaaacatgtctgcaagggttcataaaaaattcaggagagagaacaagatggctgggagatacttcccttctgtaccttctgagttttggactatgtraatgtatcatcctttcaaaaagtgaacaaaagattaattttccccttcctatctgtgcccccatccccagcaagaaaaatgggcttagagaattggatagacctgggtgtttatatcccagctctgcctaagtgaacttaggcaagcactt

SEQ ID NO: 478165 - DNA, 521 bp, Homo sapiens
gctaacaggccagcccaagattgatgcaggaagggctcaatcctcagccattggattctgaggtgcccatcaggtggcctgggattgctgatctcagcatagatgcaagagaaggaaaatgagtgttgccgcagcaggagagattgaagttagacactagaaggacgttccaactctcargaacctgggagttgttagcttccccagggccagtcaagaacagactctgcttctatgtgtgcagaatgacaaccttgctccaaagtggaggtgtgcgtggactgaccaagaaggctcatcagacctcggtacacaaggaactcaaagaaatgggtaatttattttcagaatgagctagaaaattaattcattaacactttatcctcagcctcccaggaccaaatgttggactgaagcactggtgcaaaacataaagacaaacatttctccttaagtattgatctttttagcctacgagcttcggcgacaggtgtcttgctggttaacctatttccatctca

SEQ ID NO: 478166 - DNA, 573 bp, Homo sapiens
gcacaaactgtatggcattgaggaaaggaagaacattctgaaagtttttttcttttttcattctgtcctcattctgttggtttctcagttttacggatgcaggatcatgcacagaaccctgtaaatgagcatagttcgtttaagtatataaagtgctttcggtggataaaatgaattttaacaggcttaagtgatgtgcctaaatgcacacaattaatgcatggctggaattcaaaatcatgtcttttcctctgttctgattgttttataaatatgggttgttttaatgtgtggctggaattcaaaattgtgtcttttcctctgttctgattgttttataaatacaggtgtagtgattgattttctacccaccatgacagggaataggttcaaaacttaaaaccctgtttgttttataattaggtagactcaaatgacaggtcaaggcagggaggggagccagtcatttttactcccatatgggtttgctccttcaaagacaggaytggggtagcagtgtcagttcctacaggttataacgatcttaatgataaacttaaataaccgtaactg

SEQ ID NO: 478167 - DNA, 517 bp, Homo sapiens
atacatgattggacagttccagcycacaatataaaggatggttcaaatacttacatttcagaaatgcttagttcttctgctgcttcttcagcaatttcatcagcttgtttgaacccagatcatcatcatcatcacttgctatgtcttcatcactttcaactggatcaaaaaaagtctttgtccttcacatttctggaacttttacctgactaaaataaaaagatttttaaaactattaattaggaagagaaaaatacatcgttagcacacacatatatatttgtgtgtatactgtatgtctacgttactttctaacttaataacactacaagccaaaaatagttattaggtgaaatcagcaactaaaaacattaccataaaactattataagaacaactggaacagaaactgaatggaagtacagattcatttataactgataagatagagcacaatatttcttagatccaaatcttctaactacaattacatctgtcctagaaaaacagaacaaaa

SEQ ID NO: 478168 - DNA, 540 bp, Homo sapiens
tggctctcggaaggggtgagggtccagagaaatcagaaggcagggaaacgaagagcataaaggggtcttggagggaccacagagaaaggtggcaaaatgggtgcagggggagtcaggctcaccatggcctccctgctctccrggtcctctgggacactcggcatgggccgaggtgcctcctccccctcactgtccagatgttctccgtgtcctgtggggggtggccagaggggtcttcagacaacccaacaagggaggtactgtgggcccacctctacctccaccctcactgtgtaaccctgagcctgcccctccccagagaggaatgagctgttgttctttatttttacttttaagaatcaagagcttgctattccgcccaggcacactcccactactggtcgatgtgggagttctgacctgctccctttctgaccttggccagttcagccatccttaggcaacttggtgaccccccgctcacaggaggtcaccacactgatgccgaacttagtgcaggcacccggtcggcataatgac

SEQ ID NO: 478169 - DNA, 540 bp, Homo sapiens
tggctctcggaaggggtgagggtccagagaaatcagaaggcagggaaacgaagagcataaaggggtcttggagggaccacagagaaaggtggcaaaatgggtgcagggggagtcaggctcaccatggcctccctgctctccaggtcctctgggacactcggcatgggccgaggtgcctcctccccctcactgtccagatgttctccgtgtcctgtggggggtggccagaggggtcttcagacaacccaacaagggaggtactgtgggcccacctctacctccaccctcactgtgtaaccctgagccwgcccctccccagagaggaatgagctgttgttctttatttttacttttaagaatcaagagcttgctattccgcccaggcacactcccactactggtcgatgtgggagttctgacctgctccctttctgaccttggccagttcagccatccttaggcaacttggtgaccccccgctcacaggaggtcaccacactgatgccgaacttagtgcaggcacccggtcggcataatgac

SEQ ID NO: 478170 - DNA, 297 bp, Homo sapiens
cgcctccttctcacaggtcagctgctgataggtggccacgtactgctgcaggtgacccaggtaatggtctggctgctgctgcagactctgagcctcttggctcttcagctccacctgcaggaagaccctgggtgtgagggcatgtggtggctggtttccagattctgggcccattaatagggtagygagggcactgtggggctctgtcagctgcccaggcccctgtccccttactccaggcctaagtgactgcctccctttcctagaaccccatgcctccttccccagcctcaaatc

SEQ ID NO: 478171 - DNA, 596 bp, Homo sapiens
gtcagctgcccaggcccctgtccccttactccaggcctaagtgactgcctccctttcctagaaccccatgcctccttccccagcctcaaatctcataccctcttctcatttaatcctcagcacctctgtaaggaaaatgctaacttccctttgaagttaaagaaacagagacttagagatgcaaagtacttgaatggtgaccagtggaaccgaggctggaatccagttttaatctaaggagtctttttgttttgttttcagacaagagtgtcactctgtggcccaggctggagtgcagtggtgcaatctcagctcactgcaacctccacctcctgggttgaagcaattctcgtgcctcagcctcccgagtaggtggaattacaggcatgcgccacaatgtcctgctaattttttttttttttttgtaattttagtagagatgaggttttaccacattggccaggctgatcccaaactcccgacctcaagtgattctcctgcctcagcctcccaaagtgctgggattataggcatgagccactgcacctggyataaggagcctgttataccactgtctcttcccctgtgattggggg

SEQ ID NO: 478172 - DNA, 596 bp, Homo sapiens
gtcagctgcccaggcccctgtccccttactccaggcctaagtgactgcctccctttcctagaaccccatgcctccttccccagcctcaaatctcataccctcttctcatttaatcctcagcacctctgtaaggaaaatgctaacttccctttgaagttaaagaaacagagacttagagatgcaaagtacttgaatggtgaccagtggaaccgaggctggaatccagttttaatctaaggagtctttttgttttgttttcagacaagagtgtcactctgtggcccaggctggagtgcagtggtgcaatctcagctcactgcaacctccacctcctgggttgaagcaattctcgtgcctcagcctcccgagtaggtggaattacaggcatgcgccacaatgtcctgctaattttttttttttttttgtaattttagtagagatgaggttttaccacattggccaggctgatcccaaactcccgacctcaagtgattctcctgcctcagcctcccaaagtgctgggattataggcatgagccactgcacctggcataaggagcctgttatascactgtctcttcccctgtgattggggg

SEQ ID NO: 478173 - DNA, 449 bp, Homo sapiens
gacatttgctcatcttctgtggaatagawcttgggaaactgaacttgacaccttgaatcttcctcatattatctcaaccttgggtactttgagtgccacaggataaatgtgggacatctttctgaagcatcagtttcccttgattctcttgagatcaagagaaaaaacatgaatgtacttagggatgacagtcacataggtttctaagagtataccagacctctctctgaaatgaggcttgggttgtcctctttctgataaattctgatttaagagaaaggctgccttctgccatgaggacacattgatataagagtttgagaggtactggtgcacttcttcacactaacagacgtgtgaggatgtatgactctaaaccacatggcatacagttcctgcctacttaatgtttacttttctacctctgcctctggttttggtccctggca

SEQ ID NO: 478174 - DNA, 556 bp, Homo sapiens
ccacacaccccagccctaatgattgttctctctacctctccccccactcctgctccacctcctcctctctgcatgcacctcagagcccgtgccaagaacgagcagtagtcctggattcaaggtccgtagaaatcagtcaactgaagaacaccatcaaatctytggtaagagtccactggggtcccctgattccacgctgccaatcctgggctccagtttccccttggggccctgaagaaaggggctgggggtccctggtgcctgggacaaatagggagcttgggtgcccaggcctcacctggagggaccccagagcatgcagcatggctcttcttttgctgccctctttgccgactctctcctctccagacacccctgctcgagtccttgctacacacgccctggggttgttgcctcttggggaagtgctagcctgactggttgtcaagggccccgtatttctgccatgactcagtccctaatttgctctttgattctggacaagccacctctcctttttgggctcgtgtttccagaggaggtagtgagtatcaaa

SEQ ID NO: 478175 - DNA, 556 bp, Homo sapiens
ccacacaccccagccctaatgattgttctctctacctctccccccactcctgctccacctcctcctctctgcatgcacctcagagcccgtgccaagaacgagcagtagtcctggattcaaggtccgtagaaatcagtcaactgaagaacaccatcaaatctctggtaagagtccrctggggtcccctgattccacgctgccaatcctgggctccagtttccccttggggccctgaagaaaggggctgggggtccctggtgcctgggacaaatagggagcttgggtgcccaggcctcacctggagggaccccagagcatgcagcatggctcttcttttgctgccctctttgccgactctctcctctccagacacccctgctcgagtccttgctacacacgccctggggttgttgcctcttggggaagtgctagcctgactggttgtcaagggccccgtatttctgccatgactcagtccctaatttgctctttgattctggacaagccacctctcctttttgggctcgtgtttccagaggaggtagtgagtatcaaa

SEQ ID NO: 478176 - DNA, 556 bp, Homo sapiens
ccacacaccccagccctaatgattgttctctctacctctccccccactcctgctccacctcctcctctctgcatgcacctcagagcccgtgccaagaacgagcagtagtcctggattcaaggtccgtagaaatcagtcaactgaagaacaccatcaaatctctggtaagagtccastggggtcccctgattccacgctgccaatcctgggctccagtttccccttggggccctgaagaaaggggctgggggtccctggtgcctgggacaaatagggagcttgggtgcccaggcctcacctggagggaccccagagcatgcagcatggctcttcttttgctgccctctttgccgactctctcctctccagacacccctgctcgagtccttgctacacacgccctggggttgttgcctcttggggaagtgctagcctgactggttgtcaagggccccgtatttctgccatgactcagtccctaatttgctctttgattctggacaagccacctctcctttttgggctcgtgtttccagaggaggtagtgagtatcaaa

SEQ ID NO: 478177 - DNA, 556 bp, Homo sapiens
ccacacaccccagccctaatgattgttctctctacctctccccccactcctgctccacctcctcctctctgcatgcacctcagagcccgtgccaagaacgagcagtagtcctggattcaaggtccgtagaaatcagtcaactgaagaacaccatcaaatctctggtaagagtccactggggtcccctgattccacgctgccaatcctgggctccagtttccccttggggccctgaagaaaggggctgggggtccctggtgccygggacaaatagggagcttgggtgcccaggcctcacctggagggaccccagagcatgcagcatggctcttcttttgctgccctctttgccgactctctcctctccagacacccctgctcgagtccttgctacacacgccctggggttgttgcctcttggggaagtgctagcctgactggttgtcaagggccccgtatttctgccatgactcagtccctaatttgctctttgattctggacaagccacctctcctttttgggctcgtgtttccagaggaggtagtgagtatcaaa

SEQ ID NO: 478178 - DNA, 478 bp, Homo sapiens
tggggcgcagtctggccctgacagccaacaggctcagaagcctgatctagcggtggcccggaagacaggtaccagcacctaagggcactgacttccacccagccccggcatcttccgttctatccccttgtctccctctcctgtctgcacctggtggcctgttctgtctgtgcctccagagtgccggctgccctgcaggctccctctgggctgagttcatggccctgccccctggtggccagagccggcttcacaggataagagccmgctaagctccaggggctttccaggaaaagtgtcccttggaaagggcatggccttttcactgctcccaacagcaccctagaaatggcttggcctttcccctcccctgagctccacagagaacacagccagcagaggacacacttccccgccatccagaagcgggtttgattctcagccaagggacagcaggactggtagagactgtcaggcc

SEQ ID NO: 478179 - DNA, 553 bp, Homo sapiens
ctgtagttttcaaacttcagggagcatctcaaggcttattaaaggacagacagctgtccctcttccccactttctgattcaggaggtgtggggctggcccaggaatttrcatgtctaacaagttcccacgtgttgctgatgctgagggtctaaggactacaatgggagaatccgtggtttagtggatatccacctaaagaatacttgttgtatttcctttagtgcctgtgatcacagaggaaatacctttcaactggaagatatcattaaacacaggaaaagagatcaggtcagtaagaattaaatttaacttaattgaaatgtcactgaaatttttagaaataatatgacaggccaggcacagtggctcatgcctgtaatcccagcactttgggaggccaaggcggacagatctcttgaggtcaagagtttgagaccaggctgtccaagatggtaaaccccgctctctactaaaaatacaaaaattagctgggcatggtagtgcatgcctgtagtcccagctacttgggaggctgaggcaggggaattgctt

SEQ ID NO: 478180 - DNA, 553 bp, Homo sapiens
ctgtagttttcaaacttcagggagcatctcaaggcttattaaaggacagacagctgtccctcttccccactttctgattcaggaggtgtggggctggcccaggaatttgcatgtctaacaagttcccacgtgttgctgatgctgagggtctaaggactacaatgggagaatccgtggtttagtggatatccacctaaagaatacttgttgtatttcctttagtgcctgtgatcacagaggaaatacctttcaactggaagatatcattaaacacaggaaaagagatcaggtcagtaagaattaaatttaacttaattgaaatgtcactgaaatttttagaaataatatgacaggccaggcacagtggctcatgcctgtaatcccagcactttgggaggccaaggcggacagatctcttgaggtcaagagtttgagaccaggctgtccaagatggtaaaccccsctctctactaaaaatacaaaaattagctgggcatggtagtgcatgcctgtagtcccagctacttgggaggctgaggcaggggaattgctt

SEQ ID NO: 478181 - DNA, 440 bp, Homo sapiens
gttctggtcccaccatagaatcctctggagtgtgctaaaaatatacaaattggggccctgcctggggaatcagaatctcagagtttgggcttaaaaaaatatttttcaaaggatcatagatgaaaaccattattttatagattacatttatatggctagctcatgagtctgtttccttctgaggtttgaaccaacactttcactattccagcagcagctgcaggtggaggctgaccrcctgggtaaggagctacagagtgtgtcagcaaagctccaagcccaggtggaagagaacgagttgtggaacctcctgaaccagcaacaagaggagaagatgtggaggcaggaggagaagatacaggagcaggaagagaagatgtgtgagcaggagctgaagataagggagcaggaggagaagatgtggaggcaggaggagaaga

SEQ ID NO: 478182 - DNA, 609 bp, Homo sapiens
gctgggcaaaagctatacaggagttctcaactattttttaatcttttctctaaaagtagtttagaattaaaagttaaacacaaaaatttccactgatgaaggcttcccataaactatcaaatatggttataagaggaaaaaasgaaacacagaatattgtgtaaagcaagcttgtccaacccgcagcccgtgggctggatgcggcccaagacagctttgaatatggcccaacacaaattcataaactctcttaaaacattgtaagaatttttttgcaattttttttattggttttttagttcatcagctattgttagtgtattttatgtgttgcccaagacaattcttcttccagtgtggcccagggaagccaaaagactggacacccctgggaaagatatcacaaattgttctagaaagcccattttgaaaatgcgccaatgcacatcaaacttagcataataaagttacactgccagacatatgaactcacaaaaagaattagctccattatgaaaaacagctaaatcatctatataaaatgctgtctatctagaaaataaacatgaatccaaaaacccttacattgttctaaaccacactaatgtt

SEQ ID NO: 478183 - DNA, 609 bp, Homo sapiens
gctgggcaaaagctatacaggagttctcaactattttttaatcttttctctaaaagtagtttagaattaaaagttaaacacaaaaatttccactgatgaaggcttcccataaactatcaaatatggttataagaggaaaaaacgaaacacagaatattgtgtaaagcaagcttgtccaacccgcagcccgtgggctggatgcggcccaagacrgctttgaatatggcccaacacaaattcataaactctcttaaaacattgtaagaatttttttgcaattttttttattggttttttagttcatcagctattgttagtgtattttatgtgttgcccaagacaattcttcttccagtgtggcccagggaagccaaaagactggacacccctgggaaagatatcacaaattgttctagaaagcccattttgaaaatgcgccaatgcacatcaaacttagcataataaagttacactgccagacatatgaactcacaaaaagaattagctccattatgaaaaacagctaaatcatctatataaaatgctgtctatctagaaaataaacatgaatccaaaaacccttacattgttctaaaccacactaatgtt

SEQ ID NO: 478184 - DNA, 609 bp, Homo sapiens
gctgggcaaaagctatacaggagttctcaactattttttaatcttttctctaaaagtagtttagaattaaaagttaaacacaaaaatttccactgatgaaggcttcccataaactatcaaatatggttataagaggaaaaaacgaaacacagaatattgtgtaaagcaagcttgtccaacccgcagcccgtgggctggatgcggcccaagacagctttgaatatggcccaacacaaattcataaactctcttaaaacattgtaagaatttttttgcaattttttttattggttttttagttcatcagctattgttagtgtattttatgtgtkgcccaagacaattcttcttccagtgtggcccagggaagccaaaagactggacacccctgggaaagatatcacaaattgttctagaaagcccattttgaaaatgcgccaatgcacatcaaacttagcataataaagttacactgccagacatatgaactcacaaaaagaattagctccattatgaaaaacagctaaatcatctatataaaatgctgtctatctagaaaataaacatgaatccaaaaacccttacattgttctaaaccacactaatgtt

SEQ ID NO: 478185 - DNA, 510 bp, Homo sapiens
ttgtgtactggggcatgtagtcatgtgattaaaacaggtaacatgaactctgactttaaaatgtattgtagatacaaatgctctaagctaggaaaggttttccacatccacagtcaacgatgggaacctttcattcctcagaaataagccctttttaggtcatcgaaaaagagtgcaactgctgcagctcatgatgcaatatcttcatgagcccagagcacatacaaatcctaagggcaccaccataatacaccgctaattcctggcaccggaasagatgaaacacactctatcttgcacatacctgccagaggaggccactttcctcttctgtgagatttaaaaagctcccccaaaaggttatcactcccatcaccaatacacagaaaatggaggaaaggctgtttccaattcttggcctttaaacaactctaaatgtcagtactcatagtggcgtattacaaagtaataaacagtgcacacttgggggcaaactacatattgagctaa

SEQ ID NO: 478186 - DNA, 591 bp, Homo sapiens
ctgtgaactagatactgttgtaagaactttacatgggttaacatccctatgagatagatattattaacatctctattgtacagaagagaaaactaagggccaaagaggtagagaaaattacccaaggtcacacagcggtggggcagaattgaaatagggaccatgggtctccagggtccatgctctggaccactcccaagccaaattttcactccatgccagagattcttgacatgtatgtgctgctgcccatcaaacatgcccagccaggtgagacaacctgaagccaaagttgggcatccaatgcagaagcagctttctccctgaagaaggtttctagagtggcccaaagggcctattttaagggcacccacaactgggcagctctgtggttgagcctttacatattcctgttcatcaggatggtggcttgggatcttttgaaagcagtcgcaccctcagaactgatgacctggcagactgtgagttgtctctgtctacaccatggcacttccagtcaaagtcactcatctgacaaccaccaactyaacagcaggacactccaggctgacccttcccttgtcaccaggt

SEQ ID NO: 478187 - DNA, 602 bp, Homo sapiens
gctgcaggtacaggagctaacctgtgagctttcttgttattttttatttcctacttgtgggaaactcaatgccactgtgtgattcatgggtcagagttcctagtagatgcgaatgattagtgggtgtgatataatcaaagaggaatacaataaggccacagtaactaagctggaagtttgactttgacatttaaacccccttgtcccagggcatactcaaaacttagatgtggcaaaccaaagaaccaaggccagagcacagaatactcaggttaagaagcaactggttcctgagtgagggagcagactcagaatgcagggctcaaatggaaagagactgggaacttcaggaactgcataggcaagtagcattttgcagacatcattagagtaaccttcagcaattcaacaacagttattcagtgcttaaaaggatctttggactttggtaaatccaaagaaaatactgcaattagtattaaggccattatatraaaaggtaatttatgaaggacaggaacagatattgggaagggaattagcaggaacctgacaaactaggagagggaggatctgagccaagccaggccagcatggaaatt

SEQ ID NO: 478188 - DNA, 522 bp, Homo sapiens
cataatctcaacttgttcagtgggtgtgattgtcttaggttgggtttctgggaaacagactctgagatggtgcaataaactgaatgtttgtattccccaccccccattcatgttaratccctaatcccaatatgatggtatttgaaggtggggcctttggaaggtaattaggtcacaagggtggtccctgcataaatgagatttccttataagaaatcagagaactagctagctctctttctcccatgttatatctcccaatatttctctggtaatatctcccagattaccaaattggtaatctgcaatccggaagagggccctcaccagagccccaccatgttggcacactgatttcagacttccagcctccagaactgtgagaaataagtttctattgtttatacaccacccagtgtatggtactttgttataacagcctgagatgacagatggaaattagaatgcaggagatttaatggggagtagactcataagcattacctatatgagaatgattgg

SEQ ID NO: 478189 - DNA, 522 bp, Homo sapiens
cataatctcaacttgttcagtgggtgtgattgtcttaggttgggtttctgggaaacagactctgagatggtgcaataaactgaatgtttgtattccccaccccccattcatgttaaatccctaatcccaatatgatggtatttgaaggtggggcctttggaaggtaattaggtcacaagggtggtccctgcataaatgagatttccttataagaaatcagagaactagctagctctctttctcccatgttatatctcccaatatttctctggtaatatctcccagattaccaaattggtaatctgcaatccggaagagggccctcaccagarccccaccatgttggcacactgatttcagacttccagcctccagaactgtgagaaataagtttctattgtttatacaccacccagtgtatggtactttgttataacagcctgagatgacagatggaaattagaatgcaggagatttaatggggagtagactcataagcattacctatatgagaatgattgg

SEQ ID NO: 478190 - DNA, 654 bp, Homo sapiens
ttgttggctgcaccttggagaggggagtgaaaactggggcaaggcattacctttcagcgtagggcgattcccagtagaggactcagctgtgaactgcaagtgtttgacactcccagcagctaggggtgtaagtactttaaccctgaagagggtatctgaacaatgcatgacaacatcttctatagtctaccgcttgtacagcttgtatcctcttgcttcatgtaatagttatttcgcatctggagataacttaccctggattctagttagtctttttttcctggaaaaatttacaagaaaaagattagtgggaaaaaattccaaatcctgacattacacttcatcctgaggctgtaactgataawtcattatttccctcctgttccacacattctatatccccttcacattcaacttgcacttctgctgggctaagtggcttatctggtggggctattcagatccttatccttgaggggtctgaccctctagttaccacatctgtcataggctgtggatactgcatgtattcgtctggcatcaacactgggtaggggaattatcaagagactgtgaaaataagtaattcaaagtataagctgttggaactttattttgagccttaaatgaatgtgattatagggcctgagtctg

SEQ ID NO: 478191 - DNA, 491 bp, Homo sapiens
caggaattactaatggcaaacaactcataatgtatgcctaaagaactgtgttgaggctactgagcctgcatcccaggttcaggtgaaagtgttttctggccttttcccccctaagagatggggtcttgctatgttgcccaagctacactcaaactcatgggcccagatgatcctcccacctcagcctcccaagtaggctgggactacaggcatgtgccactgcgcccagcttctttcccagctttttaagggggaagtgtcagccaagtcccatcccttcagtagaggtttttagagcaacagttgcctggttgtaggtggaaggaaaacctggacaaagcaaccgccaagataaggaaaaggttgagatagtgtgacccagattatggtgatagttgtcatgaaaggmccaagcacagagaagactgtggataaactagtaatagctttggggcaaggaacaacttggagtcagaagtgctactctaaag

SEQ ID NO: 478192 - DNA, 580 bp, Homo sapiens
ttggtatgttctttttccctcctttaatgttttaacatactgaactacaaaggcaggtttcttgttttcctttaaagactgctagatttgattgctataattttatgtaggttttttgcatctatgaacaaaagtgaaatgggtgttgtagtttttctctacttcttttcctttctgtttttgatatcagtatcattctgtctgtatgaaagaagccgaatagttttccttttttgattcttttcttggaagctttttataattagagattttctgccctttgattaaaattgtgaaactgtctgagtctagtgttcttttattcaaggggattctttttgtctatgcatttagcttctttaatgattagatgtactatttctagaatagtttttggttatttctaaaataatttttkgttctagaaaagtgttcatatcatgtatgttttaaaatacattagcataaactgagtctatggtggtatgtttgaaatcttgactgtatccataaccatgtacacccctccttttggtagctttccaatattgtttatttttgtctttttctttttctatca

SEQ ID NO: 478193 - DNA, 517 bp, Homo sapiens
ctggaagtatcagtgaagccagaagattctagctgttcagggtctgtgaggaggagtcaaggtctggggtttgtgtcctctggcatagcaatggcactgcaatgggggagcctgttgctgggctgggccgtctcgccactgtcacctgcctgttgaggggtgacggtggttgttgagaggctggatcagaccccagaggtgacatgsatgtggcatatttgttggacttacacagccttgcattttattttcatctctgttccttcctcccatgagatcttgggtggtgtttatcaaccctgagtaatcgtttctttgtctgcaagatggaataaaaaggcctacctcattgggctcgtgtgggtgaggagaactgaagagtctgagagcgcggcacgagccagaggctacggaaaacactgccctcctacactccaccttggagagacccagaaaagaacaagcttcatttgtaaaaaaggaaaacaactcaggcaatgggggtggcttaaagtga

SEQ ID NO: 478194 - DNA, 548 bp, Homo sapiens
tattccccatctaccctattgtgccttttttctttttaccctctaacattgcactttgcttacttttattatctgtgtccctccccagctagaatgaacattctgccaggcagggaccaatrtgttttatctctgaatctctaggacagtgctaatcaaataatagaccatcagtaatattcgaatacatgtatggataagggatttgttccaggtcacatagctagttgttgctaatagaaaggacaagtatgtagataccagccacagtttttttagtatctctacgccctattgcctttcctttaactttaagcttggtcttacccatattttctgtagtttaaccttgcttttgatccctctaaggggctgttttatataaactcatgatcattgttcttttttctctctctttccttcccctccttccttcccttcttctctcttcctacctctgtctctttttctttccttcccagtctccctcctctttcttttttcacttgtaggcttctgttaattaatcaatatggtacttattaagc

SEQ ID NO: 478195 - DNA, 530 bp, Homo sapiens
ctgacacgctaagatgccaagtcaatctaatggagaaaaacaaacaaaaaagagatgtgttctgttttgtcttgagacagggtcttactctggccctcaggctggagtgcagtggcatgataacaactcactgtagcctccacctccctcagatgatcctcctgcctcagccccccargtagctgggattataggtgcatgccagtacttccggctaatttttgtatttttagtagaaatgtggttttgtcatgttgcccagactggtctcaaactcctgggctcaaatgatctgcctgccttggtctcccaaagcgctgggattacaggtgtgagccactgtgcctggccgagaaagggaagtttttcttaaacctatgttgctggaacaactagatatctatataggtggaaaatgaacccaaactcctatcttatatcataacacaataataattactttgagatcaatcacagactcaaatgaaaaacttagaaaaataaagtttctagaagaaaaagctttcttt

SEQ ID NO: 478196 - DNA, 628 bp, Homo sapiens
actacaatttctgagagttgcaaaagcaaagaaagctcaaagaattaaaatatattgggacattttaattcgttttgtgcctttcgtaggaatgtgtaagaaaggggactgtaactattatgattgctgactcttaaaggtgaaaaggtgcctaggaagaagaaactagcaagagtaaatgagacttggcaaagctatttttccaagcctaatatatttttgacgggccaattaatcaatttaatctgccaaaaaaattaatctgaaggtttctcagaaaaggagaggagacaygagctgcatgaaaatgttacaaaccaagggaggctgcacataactaacttaaatctccacaggcttatttcctgttgaagtatggcctcctggggtaagttttactgcagtgttcattgccagatgacttttggttttaacagaggccaagggcaagttggaaatgcgattcttaactaaacattaaaaagaaaaaaagaaactgtggctgtttcccatttctgtttgtaatcagaatgcaggcttgcggaggaaacacaccatcccccgcaagcaaaaatataacgacacagtcacgtcctcaaaacaaactaacacacaaacttcccagccg

SEQ ID NO: 478197 - DNA, 493 bp, Homo sapiens
atactttgataggttcaaaaatatatggataggccaaagtacaagtctgtatctaattggataaaatttaayagatgtaatagtacacttttttacttttaattttaaaaatcaacttaaaaagtagcatgaggagaatataactcaactgccatctgtgtggagaaagactttgatgttttagtttattaaaagcttaatgtggatacacacaaaaacacacacacatggagcaataagttaaatcatgccaccagagaaaatcaccttcactaaaaggaagacaggaaggaaggaaagaaggaagagaagaccataaagtaactagaaaacaacaaaatggcaggagtaagtccttacttagcagtaataacattgaatataaatggactaaactccccaataaaaagacatactatctttttattgggctgaataacatttttaaaaaagactgactgatctgttgcatacaggtaatgctttaccttta

SEQ ID NO: 478198 - DNA, 513 bp, Homo sapiens
gaatctcattcactccactctgaaactcttcaagtctactctgtgagtctgatgtgttattgctaaagaaaagtttgcaagtgttgtgagaacartattttcaaggtggaataagaatgtaaaagcctggggaatgggaaaggttttagaagtttacccccagtgaagtttcacttttttcacagtgtactgaagtctcactaattgagaacttctaccagatataaggcagccagatctgagaaaaataaattgtaggacatttttaaaaaagcaattcaatttgataaaactgaaacatattctgtgttttaagtgtaaacaaagtcttttccaagttagagggcctgtcagcaattttatccttagaatgtaatttatgaaagctcagagagagttattctctgattgaggaaggcatagtaatatttctagtatgtattatgcatcaggtatgatggttggcatttgcatatatattctctgatcctaacaaaattggtcatacgagca

SEQ ID NO: 478199 - DNA, 535 bp, Homo sapiens
tggacattacattaagaaggggtcaaagtttagctgctcgagatcgaggaggtaagagcataagagcaatatcacctagaagcttttttatgtgtttatgacaaactttgttttccacgtgattgcctgagttataaaaaattaactagaatataatttttagaagcttgaattcaaagacacagtttgacacattacttgactcctgtgaccatggtggaaracgttttgatgcaagttccaaaactctgacttattctcaacccagacagcaaagtccctatcaaactgctgacaaattagactctatatcatatgtaattactgacataattggttacataagtgaggcatatatttgaagccatgtcagaacttaccttttggtagacctgaaattctttttgctatatacatttgctcagttgaatctgctcacattgcaggacccaggactaatatctctccaaaacttcagagattcctaagaagtgatcttttgaggcctggtcagatctggcagtagtctcatggt

SEQ ID NO: 478200 - DNA, 619 bp, Homo sapiens
cagcatgtaaagagctctggacactattacttctatctttaccrtaagaaaaaggcaaagaaaatgagtatcagtgacttgttttgagcccatcattgaattgaggtcactcacagagcacaccacttccccaaatctggagagacaagaaaatgcagaaattgataactaaaatatgctcaccgggagcagaagccactggagacaaaaactggaaaatttaagtagtgatgttcaataattgctggagactgagtgtggactaacatgaaagagaaattcttgaagaccacagatttagggaggaagccacgctttactgagttttacctctagaaatttcaacaaattccaacagtgaagatccaagaagtctgtcatgggaggaggggaagagtaatccttgtgaaataagcatagagtgttctccataacaaaacttgagtctccagtggtaaagactatcaagtaatattttgcagtatcaagtaatagtcctcagagcacattttggaaaagataggttgaaatgattaacataattcatctggtacagagggggtacagagaagttactctatcctggcagctagtattgttgttattggatattggtatc

SEQ ID NO: 478201 - DNA, 574 bp, Homo sapiens
ttctttcgcaggcatcaactcattgaaactgcataatagctaactacggagttcctcatcattgtcattgtcatcagaaactaaggctctgttagtgagacagagcacctcgctgaagcatgctctgctggacagtggtgaaggcaactctgtaccaaagatataaatatgacccgcattcttctcactaggacaatgctattctgtctctcctgtgtgccgctggtgactacagcaagagcttaggctttttctggagccagaggaggatgctccaactacaagagtagaaagaaggcagaaaacctggtcattgatctgaagcttctcagatagctctgccacattgggtctgtgtggtgattcacgcatcatcctttagaaatgttaagttccagaggaaaggaaaatattcaagaaacagggaccaagggtattttgtttgatttttaaatggttgagattcagagtctctgtagtrttgtactgggaaaatatacaaggctacagaaaccaaaaaatctttagtttgacctccatgccctttttctcacacctcttcatcccacccaat

SEQ ID NO: 478202 - DNA, 612 bp, Homo sapiens
aggtcatttcacatctgcatctagtcatttactttataaacctcctccttctttggcggtttccctcgaggggaagcaagacagaacataattgagggagtctctttaatgatgcatcatttttgttttaatgttttcataaagaaaaagcacttatactattgtgcatcttgggctttaggaataagcccatgaaaggacttcagtatttttattttccttttttagggctggagaaaaagagctgggcttaagctacaccatgagcaaagcttcctttggagctactttgaaaagacattggtgacagtaccatagtatatcattacagggtcatttggagtacatttttggctctctgaggaggctctggggtcaatgtcctaacacgtggggactggaacctttttctccttattgttaaactccaatttcactggaaggtaggtttagyctttaacttcctggttgacactccttagttctattctgattcgtatggatgatttatgatacaggtcgaaaagcccaggaatgttctagaatatatgattggcgaggaccctcactggtgccatccacatcttctcttcaggactgggaacgttggca

SEQ ID NO: 478203 - DNA, 612 bp, Homo sapiens
aggtcatttcacatctgcatctagtcatttactttataaacctcctccttctttggcggtttccctcgaggggaagcaagacagaacataattgagggagtctctttaatgatgcatcatttttgttttaatgttttcataaagaaaaagcacttatactattgtgcatcttgggctttaggaataagcccatgaaaggacttcagtatttttattttccttttttagggctggagaaaaagagctgggcttaagctacaccatgagcaaagcttcctttggagctactttgaaaagacattggtgacagtaccatagtatatcattacagggtcatttggagtacatttttggctctctgaggaggctctggggtcaatgtcctaacacgtggggactggaacctttttctccttattgttaaactccaatttcactggaaggtaggtttagtctttaacttcctggttgacactccttagttctattctgattcrtatggatgatttatgatacaggtcgaaaagcccaggaatgttctagaatatatgattggcgaggaccctcactggtgccatccacatcttctcttcaggactgggaacgttggca

SEQ ID NO: 478204 - DNA, 606 bp, Homo sapiens
gtcactctttatctgggaagcactggtgttaaraactggtgcaaattttgttgccacttagtagagtattttcacatcccaaagcagaagcacagaagtaggtaagagatatcaaagtttccttacaagagaaaggatttctttgcttcaccctgccctgcatgaacagctaagtgaaaagcagattctcccacaaggctcaaagatataacagtaatcttgtttaatcctagcatgtggccagaagtgatgaatctatgtgaagattttgatggcaggtgatctttgagcgggcatggcagttgcaccacaaaaggtcgaacacattttcacgggaaagttgcctatgtgctactgaagaagctagactatgaaggagcagccgaaatgcaagaacaccttcccctacttctctgtatccaggactcagctcagtgctgggcacatagcaggtgctccgggaatgggaatgggtgactgtaggaatcataagaatttttcttctttcaggagtactgcacattccgggcccacttcatgccccagaagttactattagacaggaacatcatcagcagtatgacaaactaatagggaactaattag

SEQ ID NO: 478205 - DNA, 606 bp, Homo sapiens
gtcactctttatctgggaagcactggtgttaaaaactggtgcaaattttgttgccacttagtagagtattttcacatcccaaagcagaagcacagaagtaggtaagagatatcaaagtttccttacaagagraaggatttctttgcttcaccctgccctgcatgaacagctaagtgaaaagcagattctcccacaaggctcaaagatataacagtaatcttgtttaatcctagcatgtggccagaagtgatgaatctatgtgaagattttgatggcaggtgatctttgagcgggcatggcagttgcaccacaaaaggtcgaacacattttcacgggaaagttgcctatgtgctactgaagaagctagactatgaaggagcagccgaaatgcaagaacaccttcccctacttctctgtatccaggactcagctcagtgctgggcacatagcaggtgctccgggaatgggaatgggtgactgtaggaatcataagaatttttcttctttcaggagtactgcacattccgggcccacttcatgccccagaagttactattagacaggaacatcatcagcagtatgacaaactaatagggaactaattag

SEQ ID NO: 478206 - DNA, 606 bp, Homo sapiens
gtcactctttatctgggaagcactggtgttaaaaactggtgcaaattttgttgccacttagtagagtattttcacatcccaaagcagaagcacagaagtaggtaagagatatcaaagtttccttacaagagaaaggatttctttgcttcaccctgccctgcatgaacagctaagtgaaaagcagattctcccacaaggctcaaagatataacagtaatcttgtttaatcctagcatgtggccagaagtgatgaatctatgtgaagattytgatggcaggtgatctttgagcgggcatggcagttgcaccacaaaaggtcgaacacattttcacgggaaagttgcctatgtgctactgaagaagctagactatgaaggagcagccgaaatgcaagaacaccttcccctacttctctgtatccaggactcagctcagtgctgggcacatagcaggtgctccgggaatgggaatgggtgactgtaggaatcataagaatttttcttctttcaggagtactgcacattccgggcccacttcatgccccagaagttactattagacaggaacatcatcagcagtatgacaaactaatagggaactaattag

SEQ ID NO: 478207 - DNA, 606 bp, Homo sapiens
gtcactctttatctgggaagcactggtgttaaaaactggtgcaaattttgttgccacttagtagagtattttcacatcccaaagcagaagcacagaagtaggtaagagatatcaaagtttccttacaagagaaaggatttctttgcttcaccctgccctgcatgaacagctaagtgaaaagcagattctcccacaaggctcaaagatataacagtaatcttgtttaatcctagcatgtggccagaagtgatgaatctatgtgaagattttgatggcaggtgatctttgagcgggcatggcagttgcaccacaaaaggtcgaacacattttcacgggaaagttgcctatgtgctactgaagaagctagactatgaaggagcagccgaaatgcaagaacaccttcccctacttctctgtatccaggactcagctcagtgctgggcacatagcaggtgctccgggaatgggaatgggtgactgtaggaatcataagaatttttcttctttcaggagtactgcacattccgggcccacttcatgccccagaagttaytattagacaggaacatcatcagcagtatgacaaactaatagggaactaattag

SEQ ID NO: 478208 - DNA, 651 bp, Homo sapiens
atatgtactagcacagaaagtgctccatgacatggagctgatgaaaaatacagaaacacaagcatgacagcatttgattttctaaaaggcacacacaaaaaaatcccatgctatatagcattcccaaatgtggtccctgaaccagcagtatcagcatcacctgtgaacttgctaaaaatgcaaattctcaggcctcaccgcagacctactgaaccagaactctgtgggtggggtcagcagtctgttttaacaagccctctgagggtgtgaggtcttgttttaacaagcttgagaaccactggcctacatgggcaggcataaaaatcactaataaaaggttggccagacttgcaccagatgaagtgtatgcacaactctctttatctacactcttgcctatctttatctatactcttgtgttcatgtattgctcctggaagttaaaagtaccatttttaagatactgcaggtgctagggaggagcctggggaaatggytaaccatgcatctcagcaaaaataagggagacctcgctgacgggataggagaatgaggttccgggaactaagagctactgaaacactgccgatcacaaaaagcacaaaaaaccacgtccaatcagaattttactccaaaactctcaacagagtt

SEQ ID NO: 478209 - DNA, 651 bp, Homo sapiens
atatgtactagcacagaaagtgctccatgacatggagctgatgaaaaatacagaaacacaagcatgacagcatttgattttctaaaaggcacacacaaaaaaatcccatgctatatagcattcccaaatgtggtccctgaaccagcagtatcagcatcacctgtgaacttgctaaaaatgcaaattctcaggcctcaccgcagacctactgaaccagaactctgtgggtggggtcagcagtctgttttaacaagccctctgagggtgtgaggtcttgttttaacaagcttgagaaccactggcctacatgggcaggcataaaaatcactaataaaaggttggccagacttgcaccagatgaagtgtatgcacaactctctttatctacactcttgcctatctttatctatactcttgtgttcatgtattgctcctggaagttaaaagtaccatttttaagatactgcaggtgctagggaggagcctggggaaatggttaaccatgcatctcagcaaaaataagggagacctcgctgacggrataggagaatgaggttccgggaactaagagctactgaaacactgccgatcacaaaaagcacaaaaaaccacgtccaatcagaattttactccaaaactctcaacagagtt

SEQ ID NO: 478210 - DNA, 545 bp, Homo sapiens
tttaaatagaaaaacctttctaggtaaaaacagtgaagtgagaatgcaatatataaaataaaaagctcgagataaaaggagagagaatgaagggagactgggttcttatctttccttctaacttgactgtataacttcctataatccatttatccacagtgttgacacgcatctgctgtgtgccagacactgtgcatcagagatcctgctaaggctaaagacacaggattggagcatgaaggccaagtattgcccagctgcagtctgtattctatacaatagactggaccgtaggttcttattcccagagccaagaactgtttctcagccaaggtcacggggtccaggggagatcccccaagagtaggagacacttttgacttatttaagctaatgggacctggaaatagggatggggtttcaggcagagaaaataatatgtgcaaagacacaygaaaaatagtgtgttttagagatagcagagatggctgtacaacattgtgaatataattgatgtcactgaatgacacacttagaaatggtta

SEQ ID NO: 478211 - DNA, 570 bp, Homo sapiens
gctaatggtttttgagtttttgtagagacaggatctcactttgttgcctaggctggtctcgaactcctgggctcaagtgatcctcccaccttggcctcccaaagtgctgggattacaggtatgaaccactgtgcctggccaaaatttttacatttattgaagttcttttttagatttattcagacgtttacactgatcataacactcctgtgcatattttctaaaataaaaaagaacatytcctaaaatgtcttcacacccataatctaacttatttgaattgctattcaacttggagtaatctatgtctattctattgatttattttcctcacataaaatgtctgtggtgcagcctttcttaagagacgtctgtaaccggacctggcattttctaagccattttgcaaattttgaagcatgtttgcaggtgataaccatgtcacaatgactggctgattaattgtacagtgcatctcaaagatgtaaaatgtaaaaagtatcttcagattgatgggatgtgtctctgcttgtcttctccatccttacccctgagacactagaactctca

SEQ ID NO: 478212 - DNA, 598 bp, Homo sapiens
ggttggcaccatccaatccattgagggcctgaatagatgaaaaatgtggaaaagggtcaaattcactctctgagctgggacatccatcttctccttccctcagacatcggcactcctggttattgggccttgggactcagactgggactttcaccatcaggccccctggttctcaggtcttcacactcagacttaggctaaattacaccaccagtttttctggttctccaccttgcaggtggcagatggtgggacttcctggtctccattatcatggtgagacaattctcacaatacatttcttcatatgtatatatagatatatatatatgtctcctattgactctgtttctctgaagaattcacattactacacaagcagatatgaagaatcacgatctgtagttatttctcacccagactttcaatatagttgggtaaaaaaccttatcacaaaaaaaaatttataatgacacagtggcaaaacaacagtgcatgtggcatattgcttggattttatagaatgcattcacttttttaaaaagctttctttaactccyactatgtgccaggtaatatgcttggggctagcggtgaa

SEQ ID NO: 478213 - DNA, 634 bp, Homo sapiens
tgcatggtctgcctcctctcgatccagatgtcagcatctgagggggctcacaggtgtttactgaatcactggagcatgaagttgtaccaaacacgtctgcccatagagctgtgtagagaatagactgtgggctattccagcttcctggtgaccttgggcaaataatcaccctgagccacaatttagaaagcagtgataacatcttgtgaagcagtcagttcatttattttctatgttaaagaactagaaaaaccaacagcaaaaaggtgagcttggaggcctgggcaaacatggtgagcagggttaatatctgtagaaagtaaaaagtttcctcttcaaagtgtcccttsttgttaaaggaaaataataataataataaacattagaaataataatttcttttaaagactaactttcttcaagcccccttactttgtgctagtaactctttgttaagccctattctatgtagctgttagatataaaggaataagtacattctatgtccttgtactttaaccaagatatttatgctgaacatgctcacaggtacattccagcttgcagcctatgccccttccttatttggaaatattattacttttctaagtcctttcacaagcaacgtcctctt

SEQ ID NO: 478214 - DNA, 642 bp, Homo sapiens
gtctgcctcctctcgatccagatgtcagcatctgagggggctcacaggtgtttactgaatcactggagcatgaagttgtaccaaacacgtctgcccatagagctgtgtagagaatagactgtgggctattccagcttcctggtgaccttgggcaaataatcaccctgagccacaatttagaaagcagtgataacatcttgtgaagcagtcagttcatttattttctatgttaaagaactagaaaaaccaacagcaaaaaggtgagcttggaggcctgggcaaacatggtgagcagggttaatatctgtagaaagtaaaaagtttcctcttcaaagtgtcccttgttgttaaaggaaaataataataataataaacattagaaataatmatttcttttaaagactaactttcttcaagcccccttactttgtgctagtaactctttgttaagccctattctatgtagctgttagatataaaggaataagtacattctatgtccttgtactttaaccaagatatttatgctgaacatgctcacaggtacattccagcttgcagcctatgccccttccttatttggaaatattattacttttctaagtcctttcacaagcaacgtcctcttttcctttgttgtct

SEQ ID NO: 478215 - DNA, 634 bp, Homo sapiens
tgcatggtctgcctcctctcgatccagatgtcagcatctgagggggctcacaggtgtttactgaatcactggagcatgaagttgtaccaaacacgtctgcccatagagctgtgtagagaatagactgtgggctattccagcttcctggtgaccttgggcaaataatcaccctgagccacaatttagaaagcagtgataacatcttgtgaagcagtcagttcatttattttctatgttaaagaactagaaaaaccaacagcaaaaaggtgagcttggaggcctgggcaaacatggtgagcagggttaatatctgtagaaagtaaaaagtttcctcttcaaagtgtcccttgttgttaaaggaaaataataataataataaacattagaaataataatttcttttaaagactaacttycttcaagcccccttactttgtgctagtaactctttgttaagccctattctatgtagctgttagatataaaggaataagtacattctatgtccttgtactttaaccaagatatttatgctgaacatgctcacaggtacattccagcttgcagcctatgccccttccttatttggaaatattattacttttctaagtcctttcacaagcaacgtcctctt

SEQ ID NO: 478216 - DNA, 634 bp, Homo sapiens
tgcatggtctgcctcctctcgatccagatgtcagcatctgagggggctcacaggtgtttactgaatcactggagcatgaagttgtaccaaacacgtctgcccatagagctgtgtagagaatagactgtgggctattccagcttcctggtgaccttgggcaaataatcaccctgagccacaatttagaaagcagtgataacatcttgtgaagcagtcagttcatttattttctatgttaaagaactagaaaaaccaacagcaaaaaggtgagcttggaggcctgggcaaacatggtgagcagggttaatatctgtagaaagtaaaaagtttcctcttcaaagtgtcccttgttgttaaaggaaaataataataataataaacattagaaataataatttcttttaaagactaactttcttcaagcccccttactttgtgctagtaactctttgttaagccctattctatgtagckgttagatataaaggaataagtacattctatgtccttgtactttaaccaagatatttatgctgaacatgctcacaggtacattccagcttgcagcctatgccccttccttatttggaaatattattacttttctaagtcctttcacaagcaacgtcctctt

SEQ ID NO: 478217 - DNA, 578 bp, Homo sapiens
gatggagctatagaagtgagaacttcgcttggcgggtgatgttgcatatgggtgttacaggaaggtctcgagtgacatttctgagagtacatgaatgagaggtatttgcctagaaggagtgacrgggtggttgtgtgttcccaagaaaattctgggagggaggctggagtgacacttgctgggattctaagcaaggcaggagaggacagaaatagtagcaaatggaagggtcagtggggattcttggggcagtgggaggagggggctgtgaaagtccagctgacagccaggcccactatggcagagatacagaacagaagtggggtgatgttggaatcaacacaacgcactgaactgaggctcacacacctagttcacatccaggtctctctagagacagtgtggtcattaggcaatcattgtagaattccactaccccagtgacttacccctacctcttcagggcataaagtgaggggtctgcatcaaggacccagttacagcatgctgaaattggggtcctgtagttaagacagtagagggcgctgctactctggcagaatttagcaggaagccac

SEQ ID NO: 478218 - DNA, 460 bp, Homo sapiens
gccctgctgaccaggggaaatctcttagctcccaggtgggagactccacagtggaatgagacccaaaatggggagaaggagatgagcctcccctcatgactgactgcatgccacatgctatagtaggatactgctctcttcccacctccaccagtgatccrggcagacaatgcaacattgtccttcagttttctccaaaatgggaatgacagtgtctactccacaaatcttctgaggtcactttgaattttgggcatctagaaggtattcagtaaacgctttgaatgaggatcaagtgagaacatggttgcactttgctacctctagccttatttatatatcaggtcattttcttattcttccctttccagttttttgggtgagcaaacagagacttcactctctccctgagctttcaggctctgggccagatttgaccaaacaattgcccctggagttg

SEQ ID NO: 478219 - DNA, 518 bp, Homo sapiens
agacaggctgccaggcagtcctatgtaggctaagaaaatagagggaggcttatgtttgcatgtccattgcaaaaccatctccttccatcagcaaacattctcttctcrgcttcccccagctagatgcatggccggcctgagctaggaggcagttactggggcttcctctaggccaacctcaaaaggcttctttaggaatgcagggatgttgttgggatctggatgtcacaagggacgtggttggcagggaccctctgatacccgcagggagcttggcctgatggatccgggaaacacctcagggcctccataggaaaggctgttggtggggagggggctgcttggaaatggatccacttgggtagacacctagaagaggtgatgtcctaaactgcagccccagccccaggggcccatctcgcccagctctggccctgaaaagacgttccattccccttccctggaaaccccctcacttacaggaagctgggtgttatcttaaggtctataaacggcct

SEQ ID NO: 478220 - DNA, 518 bp, Homo sapiens
agacaggctgccaggcagtcctatgtaggctaagaaaatagagggaggcttatgtttgcatgtccattgcaaaaccatctccttccatcagcaaacattctcttctcggcttcccccagctagatgcatggccggcctgagctaggaggcagttactggggcttcctctaggccaacctcaaaaggcttctttaggaatgcagggatgttgttgggatctggatgtcacaagggacgtggttggcagggaccctctgatacccgcagggagcttggcctgatggatccgggaaacacctcagggcctccataggaaaggctgttggtggggagggggctgcttggaaatggatccacttgggtagacacctagaagaggtgatgtcctaaactgcagccccagccccaggggcccatctcgcccagctctggccctgaaaagacgttccattccccttccctggaaaccccctcacttacrggaagctgggtgttatcttaaggtctataaacggcct

SEQ ID NO: 478221 - DNA, 584 bp, Homo sapiens
gctttttctcctgctggaacgccagtcccttagctccttgcgtgactacgtctcatcatccgaggcttaacttaaatgtcacctccgcagagaggctctccctgaccactctaagaaaagctgctcctccctgcagaagcaaggacagaagcagaggagatcaccctcctctccctacccaaagcctagtgctagtagctgggggacacagtcgtggcagatgtcycgtccttaccccacatgccactcacactgtgtacacagaacacaccatccctgtacacatacacacatattgcatacaaacagcacagagaacatgcacactgtgctcacagcacacaaaatcagcaccccagttacatacactacccatctgtgcttatatacagcattagcacaacactgcgtgtgcacacaatgaaaacacacaggaccccacacaacacttgttctcattgacagcctgcatataaccttggtgcacacacatgcatatgcacgcgcacacacacacaagcacacacacactttgtcccctccctccaactaaccagtgagaaaggaatgtgcggtgaccgcag

SEQ ID NO: 478222 - DNA, 634 bp, Homo sapiens
tgccacggggttgcagcgggggccgcacccccaccacctggcacgatgctgcggattattagttcctggtaatttagtgcccttgtacagagtcgatttgtgcctttcattcctaattgatctagtggctgtttaaatggcagcaggcatctgttgagagtagggaggttcataaggcgcaataattcataacaccgtctggaatttgcctttcatgtccctcagctaaaccactgcagggctctgcttaaattacagccactgaggctttctttggtattccactcagggccaggagaatcttgcattaaactgggatcaggttagattagactataatatgctgcagtattagtggctgcaaatgaagacttatactggagtttaaccccttcacctggttttctctttgtcttcagccgaatggctaagctaacgcattgttttccctaccagcttcccggtagatctttctcaatggatctcctggcartttggggcagcaaataggccacccttaaatattgaccctttttttctgcagactgcacaccgagtctgcagccctggggcccagcagtttaggcatcggcttccaaaaccagggtcggggagagagtgtgcagggacaggc

SEQ ID NO: 478223 - DNA, 527 bp, Homo sapiens
ctgctgcggctgacctgaaacccagcctcagccttttcttcactcctcaggaaatgaacgcttcttctccaattctggaagcagtgggaactccaggcactagggcagactgtcagrcaaccaacagaggtggaagggtcctgagtcatcatgaggtctgacttcttcccgagacaaataaggaaacttgcccaagtccatgcagcaagttggagatagggccctaattagaacccaggtcccaagtagcaaatccaggcctcatttactgagcacctattctgtgtcaggcactgtgcagggcaatggatgtcccagaaggagaaaacagacgacaaaggaaaagaaatgaagtcgtagcaaaatggagatttccctgtgctgaagcagacaggtgacttcagacttaaaagatcccagcgctaagaaaggagaacagaaagcaaacttcaagccccaacacatggtggtgaaatcagaactttaatgggaaaagaagagagaaccacatgttcccatggatcctc

SEQ ID NO: 478224 - DNA, 527 bp, Homo sapiens
ctgctgcggctgacctgaaacccagcctcagccttttcttcactcctcaggaaatgaacgcttcttctccaattctggaagcagtgggaactccaggcactagggcagactgtcagacaaccaacagaggtggaagggtcctgagtcatcatgaggtctgacttcttcccgagacaaataaggaaacttgcccaagtccatgcagcaagttggagatagggccctaattagaacccaggtcccaagtagcaaatccaggcctcatttactgagcacctattctgtgtcaggcactgtgcagggcaatggatgtcccagaaggagaaaacagacgacaaaggaaaagaaatgaagtcgtagcaaaatggagatttccctgtgctgaagcagacaggtgacttcagacttaaaagatcccagcgctaagaaaggagaacagaaagcaaacytcaagccccaacacatggtggtgaaatcagaactttaatgggaaaagaagagagaaccacatgttcccatggatcctc

SEQ ID NO: 478225 - DNA, 610 bp, Homo sapiens
ccaggcacactggctggctcttgagaactaaggtttatgtttgcccaacaggactttgaaaatccccacctcagaggatatcagcatttggggctccctttctccctagcagagttcctacagtaccaggctcagaagaagatgggctaggacctagcatgagtgcagggaagagaaggagctggagtccagaactcttgatttccaaggtttcagtcccgaatctgtccwgtaccaacctcaaaggcatatgacctgctcttgccacccctcagacactggcccccagcctcctcctatgtcttcctaggcacctctgcctccactgagccctgactctgggggaggcaggcaggcccaggagagtatatatgtcagttagggtttgtcgtttacacgtggagatcattaacgagacttatttttaaattgtaattgcaaaatgtaaatgctccccaaaccgatgtgtaattgctaccccctccaccccagcccttcccctctggtgccagctttgcaaggagagaattagaaaataaaaagggggtggattatgtaagcaaaacgattttaaaaaaagagagcgagagagctaagaatttaagtgaga

SEQ ID NO: 478226 - DNA, 642 bp, Homo sapiens
acatctcatgctcacatctttgcttacttgagtatttccttagaataatcctttcttagtgtactgtgctttgctacacacttgatacacattgtggccttcctcctttcaccctgtttcagttctgtgtagagcttttccagcactccgggttttatgtcataaatgtacttcccatgaccttgtcccccaagtgattttggatcaatattccagtctgtgttgacactggtgatggagtctgagcaggaagatcttgggtcgtcttggatgcagacaccgctttattgccaagttgccctgaaaatctgcaatacagagttattggctagatccagtgagaatctggtgggagaatgaatgggagctctctccttgtgtgttgcctgtgatcccggcactcctttttctctttctacctctctgacctttccatctcactctccttctttggctcctctctggcttttaaaaaatgctcctcaattccagagctctgcctttgccctcccgtctgtccctccacaygctctcccaggcagcctccatctctccagaggctcctgcctgggggttatcaggtggagacccaggtctcatgacgatgtcgtctctcaaatgtaaacttttgaggttttcttc

SEQ ID NO: 478227 - DNA, 511 bp, Homo sapiens
tgcctgagaggaactaaggccttcggttgagaatcagagcccacagcaacccacaaagagagagctggggaagtaaacaaacacacttctgtcctccctctctccagtcgccctgcagtgctcgttatttgccaaacccaaccagaagccagagggcaagggagaccattgatgctgtccatgcaggtcagcttcccattgggtggagcgcggggcagggaagggtggagagtggatctggagggcaaagagaagctttccagcacagtaatttattgactcactggactatttttaagcagaggagtgacttaggcagactgtattttggaaaacttactctggcaggagtgtgggtaaggactgagggagcaaagcctcacatcagagagcatagctagaaggccactgacatgcaagagacaagagcctagactagatttaccagtgtctggaggaggagagcatagatgcaaagttcaaaggtgctrgaatcaataggagctggcag

SEQ ID NO: 478228 - DNA, 491 bp, Homo sapiens
ctcccttactttggcatgactgtatgttattatctaaagagggtaaaacagtaattttctggaccaagagataactgggtacaactaagggcaagagtactatactgaaaacagggattaaatacaaattaatgtatttaatgctgagatcccagctttctgcctcacttggttcctaaaatattggactcagaagggccttcacygggaaatcaaagcatttcaaaatagaacacctaaagacatcatcaggcaatgagatgtactggccacatctccctccagttaagctcatagctcctttccttaaacttgaataaacaaacaaggatcaccagaaatctcagaaagacctctaaccttaaatacagtgacaaaaaaaaaatttaaaagaaaacagcaatttgggaggaactgagactatgcaaggtgaaaaaaattttcctcccaaatgtctattcatactctcagagatgaaacagaagatactg

SEQ ID NO: 478229 - DNA, 324 bp, Homo sapiens
tacccagactacatcaccaacttgcagacttgtgagctgagtaaatatgtattatakgttaagtcactgatttggggggtggcttttacacagcattatgtggcaatacataattgaaacagtagcacgatcttatgagagaagggttaaggtttggtggtatctacctccatattcattttctggtctagcttctatctggactcacacttgaaacctatattgaggacatttttaaggcagaactgatagaattatttgttattagtctgggggaaatagcagaggataaacaaacttgctttaggatcccatctccaggaa

SEQ ID NO: 478230 - DNA, 627 bp, Homo sapiens
tagagattccactgttatgtctctttaaacctgtgatttactaacattccactattctatacaagaacctggtccctccccttttgggagcggggaagggacaccaaattaaacatacctaaaagacctgggaggatatatactgaaattttaataggacgtcattggggtggtaggattacagaaaaaaaaaaatcctctttattaacaaatttactgatataaatataaaaatacttttatagtaagaaattatgtgtacctcttttggaaatatttatatgcatcctataaaattgttgggaggaagtaaatgaaatgtgaagacaccaattccattaatcaattgctgctctatgcacttcaagaataatctgcttttaaaaggtggcagagaaaagacgcatgtctcaagttctgtacactgggttgtgattaaaaaaaaaaaacgatacaagtcttaggccctacatcacaaatgtactgcagaacagtttcaacggcttaagaaggtcaaccttaatacattcagaacctcaaagcaaaaaaaaaaaaaaaaaagtccacaggataatcccatgcctcaaacctgttagytacatgcccaaatccagcaaactagtttgt

SEQ ID NO: 478231 - DNA, 585 bp, Homo sapiens
ttaccaacaatggtcagagcaataggagactgtgcttagaattataagcttcagtgatctggaaactttgctcagccagaatccttctttgatttcaaacaaagaggtataaatcaggcattcttgtggttctgtgtttgcaatcagttactggtgaagtcattaagacaggagtcacaaagcacatacacagctgtgcccaatacatcgtgcagccaagtacacacaataggaggcagtttaacaagtagggaagacatatacctgctccttccgagtttcacctggaggaagagtctacaaagaaagggaagaaggttgcatctggtaacaggtgggggcctgtgcggcttgatagcttaacatgtatcaggcratactcaaagagctttacaggcattcatttatttatgctttacaaccactccttgaggtaggtactactcgtatccctgtttttgaagaagaggaaactgggaaacagagaggcaagctgaaagagactgatcctgtttgatatggtttggctctgtgtccccactcgaatctcattttcgattgtaatctccagcttgtcaggggaga

SEQ ID NO: 478232 - DNA, 616 bp, Homo sapiens
gctgctagattgttacaaggactcagtgaatgactctctataaagcagtcagactagcacctggcaggtcaaaactgtcatcatgttccctgttctcccagccacatcctcagcaccctgagggttaggactctcttttctgttggctctagagatccttgtatacaatgcatgctcaatatgtgtttgttgaataagctactgctgtatagctgggaagacaccttgaggaagcctggttatgtgagctcttctagaccatccccggtgaacccgacagttgcttcaaggcctgctccttgcccctcagggaggtgtgcccatccatttctgcctggcagccccagtgccttggggaggaaggatagcctttgtgatgtttattttagaagctgttttatgtgcacctgggccatgacctccagcccacagaatagcaaatacacctttttaaaatgagcaagctatcaacaaaaacaatattcatgacattcaattgggaaggcaggaggtaaatgatgaaattaaaggtattgctggtgggtgacaaagagcagagaaagccgtgaagcagtgtgcrtgggcttgggggctcacggagacaggggagtcgctg

SEQ ID NO: 478233 - DNA, 650 bp, Homo sapiens
gtaactgctctcattgtctggctttatagtaagtaaatattaaagctcttcccattttatctaataaaataacaactctagcagtttatatatcctaatttcctattatactttatattaaagctactgctattaaaatacacaaaacattctttttaatgttagattcaaggggtgtgtgtgcaggtttgttacatggatatattgtgtgatgctgacgtttgggctgctaatgatcctgttgcccaagtagtgaacatagtatcccataagtagtttttaaacccttgcccaccttcctccctcctcttttggaatcactagtgcttattgttcttatatttgtttccatgtgtacctaatatttagctcccacttttaagtgagagcatgtagtatttggttttctttttcagcattaactcacttaagataatgacctccagctgcatccatgttggggcaaaaggcctaattttgttctctttatgggtacatagtattccatatgtatatgtacattttctttatctagtccactgttaacgggcacctgggttgattccatgtctttgctattataaatagtgccgtgataaacatatgaatgcaggtatgtttttggtaraacaatttattttcctttgggt

SEQ ID NO: 478234 - DNA, 618 bp, Homo sapiens
ctggccattaagggcattgtcgaggcctttaaggtcatcagctcgcacactgcccagcctgcagtgtcaaatgtcctrcctctttgaatgtggttggatcgatgatgagtcctccaaaaaaaacattccttggaaaagctgaacaaaatgagtgaaaactcataccgtcattctcatcggaactgaggtccagcacattgcttcctctggggcctttactagtgagggacaacttccactagtccctataggttctaacacccatggcgttcacaggtgaaggtctcctgtcatattacaaacattccccccactcccctcccaaaaaaaggaacatttcctctgtgtcaggtacacaggtcggagagtcatagggtgactggctgctctgtgatggcatagtggccgtggaagtggatggaaatgtcgcaggcttaggggagtgtggggctggcctcggcttggtgagctcccaggaagggggacctggaaatcgctgcgggcatccttgcatagaggaccaggtacgtgttccagttctgctttcaaggagagcatgaggcccaggcctcagacagtccttggtcttgatctttggttagctgaggacaggggagt

SEQ ID NO: 478235 - DNA, 597 bp, Homo sapiens
caacgtgattactctgaagtccagccttactgtcagtctaaggactcaggatacaaatactcaaaacataaattcttagactctaaatttcacatggtttttcctatcagwacaggttaaggataatggcgtgttgtaggtttttccagtgcaatacaaggaagttggttctagatcctttagtacagttaatgttttgtagagtgtgttctatgttcactgcattggtatgtctcatctttggcatgatcttggctcaccgcaacctccgcctcttgcattcaagcacttcttgtctcagcctccagagtagctgggattacaagcatgtgccaacatgcccggctaatttttgtatgcttttgtggagacaggctttgccatgtttgccaggttggtctctaagtgatccacccgcctcagccccacaaagtgctgggattacatgcgtgagccaccgtacccagccacacctttgcttatttctactatgcatttcaagtgatcatttcaagagaataagtacttaggagctcctatgctctttttttttttaaccctgttgcttgcatcacccggttccaaccctatatgaaa

SEQ ID NO: 478236 - DNA, 597 bp, Homo sapiens
caacgtgattactctgaagtccagccttactgtcagtctaaggactcaggatacaaatactcaaaacataaattcttagactctaaatttcacatggtttttcctatcagaacaggttaaggataatggcgtgttgtaggtttttccagtgcaatacaaggaagttggttctagatcctttagtacagttaatgttttgtagagtgtgttctatgttcactgcattggtatgtctcatctttggcatgatcttggctcaccgcaacctccrcctcttgcattcaagcacttcttgtctcagcctccagagtagctgggattacaagcatgtgccaacatgcccggctaatttttgtatgcttttgtggagacaggctttgccatgtttgccaggttggtctctaagtgatccacccgcctcagccccacaaagtgctgggattacatgcgtgagccaccgtacccagccacacctttgcttatttctactatgcatttcaagtgatcatttcaagagaataagtacttaggagctcctatgctctttttttttttaaccctgttgcttgcatcacccggttccaaccctatatgaaa

SEQ ID NO: 478237 - DNA, 674 bp, Homo sapiens
ggcactcctcagtacaaataggagaaagtayacaacttgaaggttctccttcagaagggagggaggggagtgaagtgtgtccagaattccagctttttggagggatacctgataaaccagttatctgtcctgccacttggggcactgaaaggaagctggcataccttggatgcctgtgaccatggacaacaagggatagtggggtggcttgctgctatagaaccagagaacttgcagtgccacagacatcagaaggagcaagagattacaagttcctgaaaaactggcaaacctctgtaattgaaaaattgaacacacaggcccagaaaagtcacgtccccccacagaaggttttggagacccccagaatctctatttgggctggttggtgtgattcttcccttgtatgaagccagtttgtaaggaaagggagaggtggctgtttttcaaatgcatagatcccaccacaaagttatgaaactcaaaaagaatcagggaaacatggcccaaccaaccaaacaaaataaatatctagaaacagatcctaaagaaacagaggcatatgaattaactgacaaagaattcaaaataagtataataaagatgctgtatgagctcaataataccatccatgaacaaagtcagaatatcaacagagagaaagaaaatattaa

SEQ ID NO: 478238 - DNA, 674 bp, Homo sapiens
ggcactcctcagtacaaataggagaaagtacacaacttgaaggttctccttcagaagggagggaggggagtgaagtgtgtccagaattccagctttttggagggatacctgataaaccagttatctgtcctgccacttggggcactgaaaggaagctggcataccttggatgcctgtgaccatggacaacaagggatagtggggtggcttgctgctatagaaccagagaacttgcagtgccacagacatcagaaggagcaagagattacaagttcctgaaaaactggcaaacctctgtaattgaaaaattgaacacacaggcccagaaaagtcaygtccccccacagaaggttttggagacccccagaatctctatttgggctggttggtgtgattcttcccttgtatgaagccagtttgtaaggaaagggagaggtggctgtttttcaaatgcatagatcccaccacaaagttatgaaactcaaaaagaatcagggaaacatggcccaaccaaccaaacaaaataaatatctagaaacagatcctaaagaaacagaggcatatgaattaactgacaaagaattcaaaataagtataataaagatgctgtatgagctcaataataccatccatgaacaaagtcagaatatcaacagagagaaagaaaatattaa

SEQ ID NO: 478239 - DNA, 608 bp, Homo sapiens
gtccggtaagtaatagagataaatgcagtggccacaagaactcactttccagagagaatgtgaagaacatgaataagctgaagtctgaactcagctattcactcatctatggtttaaaacaatgtgttaaaataagccttgttactaagttgcctgcatctaccctctaaggaagaaggaaggaaggaggaaggaaagaaaggaaaaaaggaaggaaagaaggaaggaaggaagttacaattgcaacttttttctagcagaattaatgaatgttgagtttcaagagttacttgagttttaagaaatgcccactttctgtgcccggcttgtttggaatttagtcccagaaagagtgaccccaggaaaacacgataggaggtcaatttgtagctccattatgatatactctgatttttgcytaaaatgcaagtttttccattttgtgcattggcttttgataagtaagtatgacatgtgcttgtaatgtttttatgaaacaagagtttaagactccatgaaataagtagttattcaaccccaacaggcctacattttcttttgctgtctcctttctcttggtgtttttctctctttaatggcattttatc

SEQ ID NO: 478240 - DNA, 563 bp, Homo sapiens
ctggcttttatttcatcccttatataggcaaagctttgtgctaagcaatttaaatgcatatgrttacataaatttgctcacacaacactaaaatgtgcaatgaaaatgtagcttcctgatgcaattttcctcaagaaggtccgggttttggtggcataacagaaacacccttatactgagtatacgtgagtcaagtctgacttaagtctgacttagtaacttataagaaagatacttcacctgttttaaaaatatatttatcattcagatctcacttgctttcccccacgcctctgcaagtgggcatctgctgatcttgcagcaggaaagaggtctgggcaaggggccgggggcctctgtgttctcagtggtcccgctgcacagtgtattcagactgctcagctccccaccctggagaacactgagcaacactgcctccgactggccctcgggagtgacatgtaggtaataaacctacagctttagtctggcagactgacccaccatccctccccagaagctgtcccctccaccttccccctccttggaggctcctgaaccca

SEQ ID NO: 478241 - DNA, 565 bp, Homo sapiens
acctccaccctgaccttcttagactgtctcctccattctgcactctgtcagttgctcatctaacataagaaggttatccttaatggccagcaagatcctgtccctgtgaagattttatgtttctccacaacaccacaggccctatatgacagttcaccgaggagctgttctcccctggtctcctgcactgccccgtgcccccatcctggsggccaggtgcctgactgcagtcatggtggaacacagcctcagaatgatgggatgccagaaagcagaagagcaagccatgcaaagagacgaggagccctcagagatggcacagcccattttgagcacatccaccaggcaaccttaaaccctcaagatcagagtcactccatacagcaaactccaaaaacaacagctaagggtaccagccaaagggtagttttcaacttcaggcaggagcaatgttcatgttgtggtgtcttcagtctccctcccatgacacagaggtcaacgctcctatcatcagcattctctttgaacaaggagaacgtaatgaaccaacatgcaccccagcttt

SEQ ID NO: 478242 - DNA, 405 bp, Homo sapiens
cttatttttagctttcagtggtttgtgtaaaaccccataataattaggcctcattactctgtgcagctccatgccacggtgcctytgcacagatgaacagggagagctttggccttagaaaaaaggtgcccacaaccctggtccttgcacgcacagctcgccccagcaatcacaagagaaaggccctcacttctaatgcacagtgcacaggcgtacctttcagggcagtgtcattacaaccccaacccaaatcagatcaagaaaggaagacacagtcacatgaggataggaaaagcattaccaggaacacagaggcaactccaacagacccaacacatcttttagtgttagcattcttcatttgctttacagttattttaaagtaattatagctttacaagatgt

SEQ ID NO: 478243 - DNA, 606 bp, Homo sapiens
tccttcaaattgtccctagtgctggccaggcagccccgctctgggatcctgccttatcctgccttttctaacagtcccacaggtcctgctgtggcctggctttggtttcatctcttgagaacatctgccacttctgttgagtctacagactgcattccaaacggtcttttttcaaattgaaaaaaaattcaaattgtaccctgttctgtagaatgcctggccttggcacctgctctctctttaccaggcctgagtgcactgtctcctttctatgacaagcaaatttacagaccaatgatctgcacraagaaacaaactcaaaatgcatcctccacctgaatgtaagatctgaaaccatgaaacatttacagaaaaaaaccttagtactaaatcttcctgatcttgggctcagcaaagatttcttagacatgacttcaaaagcccaagtgatgaaaggaaacattgataatttggacttcatcaaaatttaaaacttcagctctttgaaatactgttaagagactgaaaaacaattcacagccaggaataaaatatttgcaaagcatataactgacaaggaacatgtattcagactatgtaaataac

SEQ ID NO: 478244 - DNA, 606 bp, Homo sapiens
tccttcaaattgtccctagtgctggccaggcagccccgctctgggatcctgccttatcctgccttttctaacagtcccacaggtcctgctgtggcctggctttggtttcatctcttgagaacatctgccacttctgttgagtctacagactgcattccaaacggtcttttttcaaattgaaaaaaaattcaaattgtaccctgttctgtagaatgcctggccttggcacctgctctctctttaccaggcctgagtgcactgtctcctttctatgacaagcaaatttacagaccaatgatctgcacaaagaaacaaactcaaaatgcatcctccacctgaatgtaagatctgaaaccatgaaacatttacagaaaaaaaccttagtactaaatcttcctgatctygggctcagcaaagatttcttagacatgacttcaaaagcccaagtgatgaaaggaaacattgataatttggacttcatcaaaatttaaaacttcagctctttgaaatactgttaagagactgaaaaacaattcacagccaggaataaaatatttgcaaagcatataactgacaaggaacatgtattcagactatgtaaataac

SEQ ID NO: 478245 - DNA, 483 bp, Homo sapiens
gcatcccagccccagagtttctgaataaactggtytgggatgaggcccaagaatgtgcatttctaacaagtgcccaggtgacgctgatactgccggtctggagatcctactctgggaatgagtgcctgagaccacagcagaaggaattaccgttagattgttttaactcagtgattagtggaggtcaccttttaataccaaagagaacatattatgaatttaagaatttaaaataaacctgattaaaccacaccttttgtagaaggctgatgcattttaaaacagccagcgctagcaccccgcctttggagttcacatgctccaggtagaactgtgtcacacaagagtttaccatcctgaactggttcttctggtgcactccatccggtggccgcattagtcagagcagttaagatgaaagggggcggatgaaaatgtcccggactgtgtcacccccagatcctactagaaataagaaaactc

SEQ ID NO: 478246 - DNA, 638 bp, Homo sapiens
tgcatcccagccccagagtttctgaataaactggtctggratgaggcccaagaatgtgcatttctaacaagtgcccaggtgacgctgatactgccggtctggagatcctactctgggaatgagtgcctgagaccacagcagaaggaattaccgttagattgttttaactcagtgattagtggaggtcaccttttaataccaaagagaacatattatgaatttaagaatttaaaataaacctgattaaaccacaccttttgtagaaggctgatgcattttaaaacagccagcgctagcaccccgcctttggagttcacatgctccaggtagaactgtgtcacacaagagtttaccatcctgaactggttcttctggtgcactccatccggtggccgcattagtcagagcagttaagatgaaagggggcggatgaaaatgtcccggactgtgtcacccccagatcctactagaaataagaaaactccactgccaacatctatggtccccacaagtcctgggaggctctgctgcttggcagttcactcctcgggctctggcattggagactttggctggaatcgtggctgcgccctaacccaggtgtgaaacctgcaaccgtgaccctctgttttccttca

SEQ ID NO: 478247 - DNA, 535 bp, Homo sapiens
ttctgaataaactggtctgggatgaggcccaagaatgtgcatttctaacaagtgcccaggtgacgctgatactgccggtctggagatcctactctgggaatgagtgcctgagaccacagcagaaggaattaccgttagattgttttaactcagtgattagtggaggtcaccttttaataccaaagagaacatattatgaatttaagaatttaaaataaacctgattaaaccacaccttttgtagaaggctgatgcattttaaaacagccagcgctagcaccccgcctttggagttcacatgctccaggtagaactgtgtcacacaagagtttaccatcctgaactggttcttctggtgcactccatccggtggccgcattagtcagagcagttaagatgaaasggggcggatgaaaatgtcccggactgtgtcacccccagatcctactagaaataagaaaactccactgccaacatctatggtccccacaagtcctgggaggctctgctgcttggcagttcactcctcgggctc

SEQ ID NO: 478248 - DNA, 326 bp, Homo sapiens
ggctcagcgttcctagcagtctctaaacrtttccagaaaaatgaaacagcaagaggaaacataagagaggaaatggaaaggaatttcccctgcgagatcatgctaaatacacaggcacttcatgtgcccttgttggcctggtatgaggagttccaccagagcggtatttccaccacatgagagctacacttcacactcccagaggaggtgatcttgaaacctctggcagatttctgcctcccactccaacatgtaaagagcctgaagttcatcactcctgttctcacaacaagaaaaaaaagctgaacaaacaaaacaaaacaact

SEQ ID NO: 478249 - DNA, 440 bp, Homo sapiens
ttattacatattcttccatttcttttgtgaactggctatgaattccaaagtgaaatctattagaattcaatggatcatcttgtgaccacactcagggaatcacaattatatacacatttatagggtactgctctgcaaacataaacaacattgtgacaagggacmtgcaacaagaaaaaaggaagagattctttaaatgttcaaaaggataaaaatagaaaagagaaaaaattttaatgacaaaaagtatacatccaagagagaaaacaaatgataaaacagaatgaagagggagggaaggggcaacgttaaaagagggtctgatgggagatgagcgatatttatggggctaatcctccctcttttgggctcattattgcctttcccctgtcgctccccaaaggctcccgcctggcttgtgttcacagatgcatgtttat

SEQ ID NO: 478250 - DNA, 499 bp, Homo sapiens
ttagggtcgggtaatattttggttgctaaaatattgccaaaagatgtatttactctttattacatattcttccatttcttttgtgaactggctatgaattccaaagtgaaatctattagaattcaatggatcatcttgtgaccacactcagggaatcacaattatatacacatttatagggtactgctctgcaaacataaacaacattgtgacaagggacctgcaacaagaaaaaaggaagagattctttaaatgttcaaaaggataaaaatagaaaagagaaaaaattttaatgacaaaaagtatacatccaagagagaaaacaaatgataaaacagaatgaagagggagggaaggggcaacrttaaaagagggtctgatgggagatgagcgatatttatggggctaatcctccctcttttgggctcattattgcctttcccctgtcgctccccaaaggctcccgcctggcttgtgttcacagatgcatgtttattct

SEQ ID NO: 478251 - DNA, 499 bp, Homo sapiens
ttagggtcgggtaatattttggttgctaaaatattgccaaaagatgtatttactctttattacatattcttccatttcttttgtgaactggctatgaattccaaagtgaaatctattagaattcaatggatcatcttgtgaccacactcagggaatcacaattatatacacatttatagggtactgctctgcaaacataaacaacattgtgacaagggacctgcaacaagaaaaaaggaagagattctttaaatgttcaaaaggataaaaatagaaaagagaaaaaattttaatgacaaaaagtatacatccaagagagaaaacaaatgataaaacagaatgaagagggagggaaggggcaacgttaaragagggtctgatgggagatgagcgatatttatggggctaatcctccctcttttgggctcattattgcctttcccctgtcgctccccaaaggctcccgcctggcttgtgttcacagatgcatgtttattct

SEQ ID NO: 478252 - DNA, 595 bp, Homo sapiens
tcagtggttagctttatgtagcatcagaatttctcacccctctccctcaaaagtgacttctatgattcctgtcccatagaaccaatgcagtgaatgtggatcacagtagcctttatccagtatggttgaactccagatggacataagcaataacttaggagatggatcacagaaactccacaaatarcatcggtgacacacctatggctctcatttttattgattccttcagagcatgtttgaagagtcctctgcttctctgaattctttatgccccacccccaaagaaacaaaacaaacacccacaaaaccagtatcggcatagagtcctagaagcttaatccatggacagataattgtaaaatgctggttcagcctcaagtcagccatcgcccctgctgaagtttagagtgggaagggctggctggggtcatagagctagtgatgggtagtgggcaccctctggtaattccagggcacacggctggcatttgctcatcctgtcccattgatcacggggctgatgttcccgtttagtgtttgtgctgtgcccagcacagtcgtccatccagtaaccaggacttggagggagaaa

SEQ ID NO: 478253 - DNA, 395 bp, Homo sapiens
ctgcagtgtagacggggctgtttgcccctcctggcagagtcggtgctaaaccccatgtttatccctatctgygttagggctctcagcagagaaaggcagcacaggcttcacattcctggacctgtgaccacaggagaaaggaccaagggcagtgctcaggaggattatttaggagttctactgaaatagaatttgagctgtgggtgagtaggagtgtgcacgtgcatgtgtatatgaagtgagtgaggagctaaacgtttgctctcagaggtcatctacactgaagatgaaaaagacaaaacggcaaggaacaattgttgagcacctactgaaaggagagcactgtgctttacatacacaacttcatttaatcctcagtataacactagaaggtg

SEQ ID NO: 478254 - DNA, 592 bp, Homo sapiens
ataattcctgttcctagaaccacgcacctggtcagcaaatattcatttactaaaagaacctttggacatcaatgaaggctgccaagatgagaaaaagcaaagctgtttattcagagcttgctgtagcacaggagttggccacagtcacttgcatttgacagagactcaaaagcaggcagaggagttgaaaagcttcatcctggaaataaggaaggcttcaggtacatgctgagcagaggccgttggtgtgggaaagctgagggcgacttactagaagtaggcaccctacgtgcttggtcaggggagcgtatttgactttctttgtgtcgtctcacatttgaagtggagagaracattaggaaggctgtcagttattgaccaagcccttgctgttttgagccaattgccacagaggttgtggtttggcttcctgggctggttggtgcagggtgcatggttttggccttccaggttgctgctgcaggtcgtgtgtcagagttctgttttaatatacggttggccttatgtgtttgtatgttccatctctcaggccttcgagcatgctacagatcccctgctcaactgaactcta

SEQ ID NO: 478255 - DNA, 592 bp, Homo sapiens
ataattcctgttcctagaaccacgcacctggtcagcaaatattcatttactaaaagaacctttggacatcaatgaaggctgccaagatgagaaaaagcaaagctgtttattcagagcttgctgtagcacaggagttggccacagtcacttgcatttgacagagactcaaaagcaggcagaggagttgaaaagcttcatcctggaaataaggaaggcttcaggtacatgctgagcagaggccgttggtgtgggaaagctgagggcgacttactagaagtaggcaccctacgtgcttggtcaggggagcgtatttgactttctttgtgtcgtctcacatttgaagtggagagaaacattaggaaggctgtcagttattgaccaagcccttgctgttttgagccaattgccacagaggttgtggtttggcttcctgggctggttggtgcagggtgcatggttttggccttccaggttgctrctgcaggtcgtgtgtcagagttctgttttaatatacggttggccttatgtgtttgtatgttccatctctcaggccttcgagcatgctacagatcccctgctcaactgaactcta

SEQ ID NO: 478256 - DNA, 592 bp, Homo sapiens
ataattcctgttcctagaaccacgcacctggtcagcaaatattcatttactaaaagaacctttggacatcaatgaaggctgccaagatgagaaaaagcaaagctgtttattcagagcttgctgtagcacaggagttggccacagtcacttgcatttgacagagactcaaaagcaggcagaggagttgaaaagcttcatcctggaaataaggaaggcttcaggtacatgctgagcagaggccgttggtgtgggaaagctgagggcgacttactagaagtaggcaccctacgtgcttggtcaggggagcgtatttgactttctttgtgtcgtctcacatttgaagtggagagaaacattaggaaggctgtcagttattgaccaagcccttgctgttttgagccaattgccacagaggttgtggtttggcttcctgggctggttggtgcagggtgcatggttttggccttccaggttgctgctgcaggtcgtgtgtcagagttctrttttaatatacggttggccttatgtgtttgtatgttccatctctcaggccttcgagcatgctacagatcccctgctcaactgaactcta

SEQ ID NO: 478257 - DNA, 578 bp, Homo sapiens
tgcacttcgcactcacccaggattgcagccccgatgaataagctggtcaccacccgaagcagccagaacagcctctgagtcacaaggtaggtgggttaagtaaagagtgccttccttccacatctacccttcctgttwccagacttgggggaggggcgggaattctaaagctgagatcacttggtcaattgaaatcagagtgtctggcacataataagtgcttatgtatttatgtatgcatttatttatttattagagacaggatctcactctcttgcccaggctggagggcagtgatgcgatcttatatcactgcagccactcaagtgatcctcccacctcagcctcccaagtagctggaactacagatgcacaccatgatgcccagctatttttttttttttaagagatgaggtctatactataaacccaggctggcctcgaactcctgggctcaagcaatcctcccacttcagcctcccaaagttctgggattgcaggcatgagccaccatgccccaccagcgctcaatagtgaactgctgaatcaatgaatggggagctttctgcctggggtcg

SEQ ID NO: 478258 - DNA, 623 bp, Homo sapiens
ctgcacggtctgccctcaggaggagtgaacaatgaacacaggaagaggccacatagatgctggaaggtccaggatcccagataaccttggtctaaaaggagcacgcaggcaccaattagcatgtccttagccccatgactttcttggcctggagagaggtgcttggccagaggagaccagaacagggacctctctaaaactcagagcccagggcragtctttcttgcctgggtttaagtgtactgagaggtgaagccagccggacttcctgggtctagtggggacttggagaactttcctacaaaaggtttgtaaaatgcaccaatcagtgctctgtagctagctagaggtttgtaaaatgcaccaatcagcactctgtaaaaatgcaccaatcagccccctgtagctagaggtttgtaaaatgcaccaatcagtgctctgtaaaatggaccaatcaacactctgtaaaatggaccaattagcactttgtaaaatggaccaatcagcaggacatgggctgggacaaataagggaataaaagctggccacctccaaccagcaacagcaaaccccggtcagattcccttgaagtctgtggaagctttgttctttcactcttcaca

SEQ ID NO: 478259 - DNA, 579 bp, Homo sapiens
ctgaagtgatgaggctacatggaaaaggagttatggttgctctagtggtttgaattgctccccaacattggccccaacaaagaaaaaatgatatcaagttctaaaccccagtgcctatgaatgtgacttcatttggaaataaagtcattgaaaatctaatgaagttgagatcatgctggatcagggtaggcctagatccaatgagtggtgtgttcagtggataaaggagagggaaatctgtacacagaaacacacacacagagaagaccactggagacggaggcagaggtctgagggatgcagctataagccaggaaaggccaaagattgctggcaaccacaagaagctagaagaggcaaggaggggttgtgcttttcaggcagagcttggtcctgcttcctgatttctgacatctaggctccagaagtgtaacagaataaatttctgttttaagycagtcagtttgtggcactttgtaatggagcccccagaaaattattaccgattttgatatcaggatgtagagtgctaagtaacacatacctgaaaatatgggagtgactttggaattgggttat

SEQ ID NO: 478260 - DNA, 469 bp, Homo sapiens
atcttagtacaacatattagaagcgtatttacctcccacaaatatagtaaagcatatctatctcataggctgagagattgaaaatacaaactttgcaggtaaaataagcaaataaaagaagggcttttattttctaagtcgggcacaagcagcaagcccagctgatgcagcccagtggygcctgtttgggggttgggagtggggggttgtttaaagggaagagttaaaacaaatcccctgggaagtagctggttaccacaagagttaaggatcttgctaaatattcaaagaagagtggccagccaagagaaaaaaagagagtagccaaattgtcaagaagttaattttaaattgatggatgatggcgaaaataccagaaaggtgttattcgacccatttagaaaaatgacaggcagcttcctcctaccttctgagaatgactgcacagtaatgttcacaattcatgaca

SEQ ID NO: 478261 - DNA, 537 bp, Homo sapiens
gaattagaaccttagacccatgatgggaggcagagctgcggggctgctggcaggtgaattagtgtccagaaacacattggcatagtcttccacatggacatggatgaggaaaatgtaatttagggggaaggacatcagcttgggagtttgactcctgttctgcaacttgggcaacttacttatcttctttgtgcttcagtatcctcttctgtaaaataggcatgttatctacactgtgaraatgaatgcaataaaatgtagagcgctaaacatgccacaggctctcagtgaatgggggttatttcccatgattactttgtagaaggagtatgactacatttgaaaggtttcaaggacctggggaaggtagttaatattaagggtgcgggaagcaggattggaggtaatttacctcctagaagaatgaatctgaaccagggtgacaatgaagaaggacatgtgaacttccacgtagagacttcataggagcaatttcatgagagaaggataaagggtacttggcttgacaattggttt

SEQ ID NO: 478262 - DNA, 382 bp, Homo sapiens
cccataaatatcttcaagacagatctctttccacttggacctcaaaatcagagtgataggggatgaattaagattcttaaaagccccactgtctatctgaattgttccataatgtcttaagtctttctgaagtcttaacaaagtgtttcacmtatttttgttcctgtgataactcttttactgagaaggccctggatttgatctttattctgaggaaattactaattcactctgagaatcttttgttatgagagatgggatgagaaacagttttatgttggaatcctacagtcgtggtttttctttatatttaccctaaattctgcttgaaaacaaaacttttttctatcttattttattgctccagggttttattataggc

SEQ ID NO: 478263 - DNA, 522 bp, Homo sapiens
cctcttgcaaactttaagtttagtaacagtcaaaaatcttcatagattattttcaaataagattttttgtttttaaacggagtcttgctgtgttgcccaggctggagtgcagtggsgatctcagctcactgcaacctccgcctcctgggttcaagtgattctcctgccttagactcccgagtagcagggattacaggcacaagccactgctcctggctaatttttgtatttttagtagagacagggtgtcaccatgttggccaggatggtcttgaactcctgacctcaagtgatccacccgcctcggcctcccagagtgctgggattattggagtgagccaccagccccggcctcaaataagatttaattctgttttgattagatgtatgaagaacccccaaattactgccaaacccataactgattaaaaatgaccatttttagttagctgccctggcagcatgcttagattgggagggacttgttagattatcaagcactactcagagaaggaagagtag

SEQ ID NO: 478264 - DNA, 519 bp, Homo sapiens
tccacaagggaaagccctgccaggtagaaatatctgtcaccgcaccacggggcacgtggggccaggcagctgcgtgagaacagggaggtgtgcaagaayggcagcaggagcctcagtgtctccgtgtaacacaaacccctctcccttcacccagctaggcgaacactgatgggtcagattcatgctgctgcgatcatcccagtgccctcacgctgtgccagtcgctgggaccatccaacaggaagtagtaataagactggcaggcatgtcatgggtgcgggatgggtttggggagggcggagtgctctgctcccccacctgctgtaacgagttcattcttaggcggccagtgccggcagctgaacggccagaccagcttagctcgtcacctgggcatgctggtcactgtggagcctggctcatggtggggtcgtgctcttcagcatggttgcaacataaaaggacaaaaagcaggcactgtgactgccagtcatggcctccaaggcaggtggcatagga

SEQ ID NO: 478265 - DNA, 625 bp, Homo sapiens
tggcaacccaactcctcagtaaggagggagcacttggacatggggccaggccccacgtaccctgagtgccagcaggtctcgcctcacggaccttcacttcactctccttggacagggatgaatttgtcagtactgcagcagtgcaggcacagcgagctccctgctgcaggggcaggggaagccgatccaagtccattgttggaaaacactttcaatggctctgtctctgcatccacttcccccctctctcctttctttcttcctctcctgggttctactgcccacttcagtgacctgatgggcttctctcctctcttcccgggtgagcttgtgagactgtcacgtggcaacaggckggggggccctgcaaccaaagctctcattaatcctgacaaggggggacccaccgtgcattgcccactgtggaagagaaaaggcgtccagtgtgctcagctcctgtaactggacaccctccagggcggctggccacccgcggagagctacttgaagctatttgggtcatcaatcagatgaaatggggcattatagtccaatgaatggcagactctgaatagagaggaaaacagtttcgctagagtcccagaagggacagcacccagaacga

SEQ ID NO: 478266 - DNA, 596 bp, Homo sapiens
ttgtaaaaattagtctctcagccactagtcacattttgagtgctcagtagccatcccttgcaagtattaggacagtatggaacattcccaccactgcagaaagttctgtggtgcagtgtccatctagatgattctacaaatggaagatttaggggaagaggagaagtaagtagtgaggtgtacctaattgcttctataagttttagtacaaagaacccttcctttaaaatattgatatttggtgaaacattcagatatcacgttttaaagtgatttcatggacactaatcaacagagcaacaacatagatatatcattgactacaaggatggatcaatacttgttctacctgtttcataacttagaggattatagggcactctataacacagcaccttaagtatcagaaaaataaaggctgcaggtgtttgaatgaattgttggatgttctgtttttataaacatgtggtcttctcatatttacaccccatttggtttgggatgaatctccattctgagtcccttaaatgttagggaagcttaagatgagaccctttggattcyacacaccaatctaatttcggacccaatttgaa

SEQ ID NO: 478267 - DNA, 437 bp, Homo sapiens
tttgctctctgtatttctctagcatctgttgctggtggcccttgttatgctaacaagtagatagtgtagctgcataagcagaacagaaaagactctcctggattctcagttccaggctggcctgggaataggcttagggatgtttcaatgcttcaatgcaggtgagctggagatctgtggcaattcttttgacatgaggctggacattctttatagcttccccagacacaggaattkgcagggcttgaaaaagaatcactggcaggaggttcattttctttattgctacctccccagccataaaactaaaagctttttacctaaatcaggttagccatcttgtgggagtaggagatcatttctttcagtctttcccgattgcattctagtcctaggatggtttgaacggtccgtttgaatttgaagagctttctagt

SEQ ID NO: 478268 - DNA, 620 bp, Homo sapiens
tggattcacccacgcggtctgtgatacagaagggaaaaagagttgaggcctattgatcagaagctgctcactttagagttttacctaagggtgatcctatcaaaaagttctggattttgtagagaagcatacaaaggatgtgaatagtttgacttgagcaaattgaaaattgccagttttgtttgctctaaccaatatgtttgctttccctctgaaaatcccttgttacaggtccttagttttagtttgccacattatgacacaatgggaataatgcacggcagggatcctcagttggtttgggttttcaatacataattgatccatggttgtggcatgcattgtagaatgtccagctagaacacctattctttcaattactttcattactttcaatggcaaaaccacaattacttttgcactaacctgatagctttgctacaagtcagttgttcagtttctttgttgttgtttgtttttatttttgcaaacactttagatactgcatagtggatggattagtttgtggttcctgggaycttctgtgtattctgttgaagtgcaataatcacattactgcggacctccaaaattttacaaaggactgcatagtgagtatt

SEQ ID NO: 478269 - DNA, 550 bp, Homo sapiens
ataaaaacaggcttcagttgttttacagcttgaataatagaaatcatgtctgttttatcacaacatgtaaaatgtgaaaagaaactyattgccctcaatgtttttaaaaatatgaatattgtggaaacatagatgccagcctctgagagtgtccagccttgagtccaacccgaagagtctgcaagaaagggccgcacctctgcaccacactccccacccagctgctctgatttccatatctaactgcaattgaatgtccatgctctccttttcagccaatgatcctctcctttcctcttcatagcatggatttcattgcttactcctcgtgtgaaatcatgacccctacactttgcttacctgcgattagcctattacgttaatataggggttcctgcatgctggctgtcataaacagggggtgacatccaaggagatccatgctccctctcacatcacccagctgagaggtgagggtggtagaccttgaattcaggactgcgtggtgacaacgcccgtgctgcctgactctgctctagtgcactgtact

SEQ ID NO: 478270 - DNA, 550 bp, Homo sapiens
ataaaaacaggcttcagttgttttacagcttgaataatagaaatcatgtctgttttatcacaacatgtaaaatgtgaaaagaaacttattgccctcaatgtttttaaaaatatgaatattgtggaaacatagatgccagcctctgagagtgtccagccttgagtccaacccgaagagtctgcaagaaagggccgcacctctgcaccacactccccacccagctgctctgatttccatatctaactgcaattgaatgtccatgctctccttttcagccaatsatcctctcctttcctcttcatagcatggatttcattgcttactcctcgtgtgaaatcatgacccctacactttgcttacctgcgattagcctattacgttaatataggggttcctgcatgctggctgtcataaacagggggtgacatccaaggagatccatgctccctctcacatcacccagctgagaggtgagggtggtagaccttgaattcaggactgcgtggtgacaacgcccgtgctgcctgactctgctctagtgcactgtact

SEQ ID NO: 478271 - DNA, 551 bp, Homo sapiens
gacacccaaaaattatttaagaattacctgtttggtgtgtgctgtttgtatacaaactctggagccacaccacctcaggtcaaatcctggctctcccttttacttggtttataaacctgagggatgttccttaacttttctgcctcagtttgttcatctttaaaatggggataatagtagctactgcagaatcttgttgggaaaataggagagttcatgttcataaattgaaatatgtacacagtggttkgtctaggaagcattgtctgtgttagctgttgttattaagaatatggttaaaataagttattgaataaatgaaagactcccctctttgtgtaaccagctcaatcttatgctcataattagtgtaaaaatgtgtaggtatcacttttcattctaatctcagtgactaataacaaagaacggtatgttattcaatatgaaaacatccatacagcaccaacaaccaaaacaaagtctgactgcgtacattcattcttttcaccttaggcaagtatgtttagaaatcagtcggggtctaccctgag

SEQ ID NO: 478272 - DNA, 706 bp, Homo sapiens
gctgccccttcacagagagccaccttctttgctcctggaggtccattctgacgtgaaagacccttccttcactgcctggtgaaagcatcatctctagatgatgcttttcagaaggacaggagagaaaatgtgtcttgcaaaaacacacctgacaaaaacctctaaaacacagcctgcctgcttcactccacttgtggggctgcagcatctttcccagaaattccttcgctgcccagcggcttcatccctggccacgagccgagagaaaaggtagagactggaaawtggccccacagtagacattgtggagagggtgcctaatccacccaggtgaaaacaaaaatatccaggataaggcatgtgaaagaaagccaccaatcaagttagaaattatccgtacagtagaattagctggtattgaaagaagttcgcattatttgcctattgagtttcagggtggaggtacctaggttgtggcgtagtctgggatggccagttttctccacctacctaagacttcagtgcgtcacggttgcatatataaccctgtttagtcacatctttatgcgacagcttcatggtaacatcagcttgtcattcatgtgtcctcttagaagcctgataatatctatcattatgttatacccagaaatatgctcaacaagcaagtatgctaagatgattacattactgtctagtgaataat

SEQ ID NO: 478273 - DNA, 706 bp, Homo sapiens
gctgccccttcacagagagccaccttctttgctcctggaggtccattctgacgtgaaagacccttccttcactgcctggtgaaagcatcatctctagatgatgcttttcagaaggacaggagagaaaatgtgtcttgcaaaaacacacctgacaaaaacctctaaaacacagcctgcctgcttcactccacttgtggggctgcagcatctttcccagaaattccttcgctgcccagcggcttcatccctggccacgagccgagagaaaaggtagagactggaaattggccccacagtagacattgtggagagggtgcctaatccacccaggtgaaaacaaaaatatccaggataaggcatgtgaaagaaagccaccartcaagttagaaattatccgtacagtagaattagctggtattgaaagaagttcgcattatttgcctattgagtttcagggtggaggtacctaggttgtggcgtagtctgggatggccagttttctccacctacctaagacttcagtgcgtcacggttgcatatataaccctgtttagtcacatctttatgcgacagcttcatggtaacatcagcttgtcattcatgtgtcctcttagaagcctgataatatctatcattatgttatacccagaaatatgctcaacaagcaagtatgctaagatgattacattactgtctagtgaataat

SEQ ID NO: 478274 - DNA, 706 bp, Homo sapiens
gctgccccttcacagagagccaccttctttgctcctggaggtccattctgacgtgaaagacccttccttcactgcctggtgaaagcatcatctctagatgatgcttttcagaaggacaggagagaaaatgtgtcttgcaaaaacacacctgacaaaaacctctaaaacacagcctgcctgcttcactccacttgtggggctgcagcatctttcccagaaattccttcgctgcccagcggcttcatccctggccacgagccgagagaaaaggtagagactggaaattggccccacagtagacattgtggagagggtgcctaatccacccaggtgaaaacaaaaatatccaggataaggcatgtgaaagaaagccaccaatcaagttagaaattatccgtacagtagaattagctggtattgaaagaagttcgcattatttgcctattgagtttcagggtggaggtacctaggttgtggsgtagtctgggatggccagttttctccacctacctaagacttcagtgcgtcacggttgcatatataaccctgtttagtcacatctttatgcgacagcttcatggtaacatcagcttgtcattcatgtgtcctcttagaagcctgataatatctatcattatgttatacccagaaatatgctcaacaagcaagtatgctaagatgattacattactgtctagtgaataat

SEQ ID NO: 478275 - DNA, 612 bp, Homo sapiens
ctgcggaggaaccttacgcgggaccagcagctccatctccagcccgcacttcccttcagagtacgagaacaacgcggactgcacctggaccattctggctgagcccggggacaccattgcgctggtcttcactgactttcagctagaagaaggatatgatttcttagagatcagtggcacggaagctccatccatatggtaagtcccgggaagagatgccacaaaggatacaggtgtgttttccccgttttttcccccaacgagcttcaagaattgcttgtctctggacgttcatgggcaagcatgtgtgttccttttttygccttgctcttttggctctggaaaagttacctttactgtgagtaatttcaaagtttctaagatgtctttgtgctggtgtttggagctcgggaagtcatctgtgtgcttgaacttgtagtgctgtcatttttggactgttttaaagcaaccaagtaaggtgagttagttttgggtttggtctgaagctgtttcactgtgagcagagatttttagattgtgtattttcttttatctcacgttagcgagaattgacagactgctgcagatatatgattgtgctttcctttttct

SEQ ID NO: 478276 - DNA, 612 bp, Homo sapiens
ctgcggaggaaccttacgcgggaccagcagctccatctccagcccgcacttcccttcagagtacgagaacaacgcggactgcacctggaccattctggctgagcccggggacaccattgcgctggtcttcactgactttcagctagaagaaggatatgatttcttagagatcagtggcacggaagctccatccatatggtaagtcccgggaagagatgccacaaaggatacaggtgtgttttccccgttttttcccccaacgagcttcaagaattgcttgtctctggacgttcatgggcaagcatgtgtgttccttttttcgccttgctcttttggctctggaaaagttacctttactgtgagtaatttcaaagtttctaagatgtctttgtgctggtgtttggagctcgggaagtcatctgtgtgcttgaacttgtagtgctgtcatttttggastgttttaaagcaaccaagtaaggtgagttagttttgggtttggtctgaagctgtttcactgtgagcagagatttttagattgtgtattttcttttatctcacgttagcgagaattgacagactgctgcagatatatgattgtgctttcctttttct

SEQ ID NO: 478277 - DNA, 573 bp, Homo sapiens
tgtagtggtgagactagccaagtgttctttttttttttttttttttctgaagagatttgatggtgtagcctataacttgtacttctaataatatcaagaagaaagaaaattgatttcatttctgagttctccctctatggtttctaaattaagacatgatggttaacgggattaaggttgtatagtcttggctgggaacactgagggagcatttactccctttaaaatatgaacttatataacaaaagaamcaggcttccatacccttctgtgacagggaatgtgtagaggatagagaaggtaaggaaaaagaaaataaaaataaatgcattgaaaatgtgtcccaaaacaaatataaatgcatcgattcttaacttccatgactgagcttcagctccctgagacagagcctggaagcctcagtgtgccttcccaagctgtccacagctaccgatttggccccatcctggctccctccctgccaggcacgcccatccccttgcagtttgcccctgtgaacccatccctgtctttatgttactgggcgttttcatccctggtgcatttgttcag

SEQ ID NO: 478278 - DNA, 539 bp, Homo sapiens
gactttctttatgaaacaatttgtttttgctttctctggggttacaaaaagctgtataatttstgtacaatttagcatagtgacattaactaatttggaccatacaagttatgcattatatgtatatgtttacgtggagagcatgatcaacttaaaacccatttaagctcacttaataaattatattacaaaatttgtctattccatatcaatattataacaaaactaaatgtctaaaagcagaagcaataaatgcatttttctttgaagtcattaaagcttcccaaagccaatgacaaagattttattatagtgatttatcaaaagaagcaaccgtcaaaaaccgtctgtatagattaagactacttgaaatatttgtatagctgtagactagttattgactatattactgaatttaaactgttttaaacccaactattaacaaagcaattttcaaccaattaataatgaggtaaataatttagcaaaattttgtatttgggttcattttcaagtgtataaattgctgaaatggaaaa

SEQ ID NO: 478279 - DNA, 539 bp, Homo sapiens
gactttctttatgaaacaatttgtttttgctttctctggggttacaaaaagctgtataatttgtgtacaatttagcatagtgacattaactaatttggaccatacaagttatgcattatatgtatatgtttacgtggagagcatgatcaacttaaaacccatttaagctcacttaataaattatattacaaaatttgtctattccatatcaatattataacaaaactaaatgtctaaaagcagaagcaataaatgcatttttctttgaagtcattaaagcttcccaaagccaatgacaaasattttattatagtgatttatcaaaagaagcaaccgtcaaaaaccgtctgtatagattaagactacttgaaatatttgtatagctgtagactagttattgactatattactgaatttaaactgttttaaacccaactattaacaaagcaattttcaaccaattaataatgaggtaaataatttagcaaaattttgtatttgggttcattttcaagtgtataaattgctgaaatggaaaa

SEQ ID NO: 478280 - DNA, 520 bp, Homo sapiens
tgatgccctcactgtctagtctcatcttaaccttcttgttacttaactcagccttctatgaagcccaaagtcaaaaggttgctcaaatggggccatttaggtaacttccatgtagaggcagtctgccagaatattagagactaagccaaaatacaagaccttataaaaggagaagaaacttgattcttggttttgggagaaaggagagtctcctccccctaaagaaaaaaagagagaaagatggtgaaagtgagataaaggaaaagacattgaactgcttagaaggttgaagggagatcaayatgaaatgaacagaatctattcatatactgtccatagggctcagagggtttgtagcaattctattaatacacataaattccaagtactcctgagacatggaattattgagcatgcatctaagaaatgacatgggtaagtatatactgtgaattataggtacagggaaggagttacatatgatgcaattagaatagtcaggaacccaaatttactctct

SEQ ID NO: 478281 - DNA, 527 bp, Homo sapiens
tctttctctatgtgatctgttttcttctcctgcctcctttttgtagttctgatttattttactgctctttcttttcttccccactgtttaccaaccttgaatgcagaagatttttttctgctgcttaaaagtttgattttgattttgttctcagaatatttttccttaattcagatgcaaatattgggaatttccccaatattccaaatatttatttatatatctttacttcttaaatatgttaatatctacataatttctctaataagacaaatatttaagtatattttcatgattctttsatgtacaactactctccctcaaccacaatgttgatatcatctagaattttagcttagtttttaaaaaatacaactttgttttttttctgaaatagtttttacagaacagacactaataaattttactaagatacttttctaagatactcttacttcatatatttcttgccatatctcttggttttggttctcttgttacttgagagctttttctcttttcaagta

SEQ ID NO: 478282 - DNA, 527 bp, Homo sapiens
tctttctctatgtgatctgttttcttctcctgcctcctttttgtagttctgatttattttactgctctttcttttcttccccactgtttaccaaccttgaatgcagaagatttttttctgctgcttaaaagtttgattttgattttgttctcagaatatttttccttaattcagatgcaaatattgggaatttccccaatattccaaatatttatttatatatctttacttcttaaatatgttaatatctacataatttctctaataagacaaatatttaagtatattttcatgattctttgatgtacaactactctccctcaaccacaatgttgatatcawctagaattttagcttagtttttaaaaaatacaactttgttttttttctgaaatagtttttacagaacagacactaataaattttactaagatacttttctaagatactcttacttcatatatttcttgccatatctcttggttttggttctcttgttacttgagagctttttctcttttcaagta

SEQ ID NO: 478283 - DNA, 527 bp, Homo sapiens
tctttctctatgtgatctgttttcttctcctgcctcctttttgtagttctgatttattttactgctctttcttttcttccccactgtttaccaaccttgaatgcagaagatttttttctgctgcttaaaagtttgattttgattttgttctcagaatatttttccttaattcagatgcaaatattgggaatttccccaatattccaaatatttatttatatatctttacttcttaaatatgttaatatctacataatttctctaataagacaaatatttaagtatattttcatgattctttgatgtacaactactctccctcaaccacaatgttgatatcatctagaattttagcttagtttttaaaaaatacaactttgttttttttctgaaatagtttttacagaamagacactaataaattttactaagatacttttctaagatactcttacttcatatatttcttgccatatctcttggttttggttctcttgttacttgagagctttttctcttttcaagta

SEQ ID NO: 478284 - DNA, 551 bp, Homo sapiens
tcgcagaacatgggggaacagtggggagccctcagcccacctcccttggcctacacgagggacgccgagactgtgagatccaggaggacttgggagaggagataacttgtttgtgtcaccaggcaagtcactgttggagccaggacccggagtcctggattctgactacgggagaggaaaatggggatcccagaggttaagccagttcccaagatgacccagctggatggtagcagaggctggtagctggcaccagggttcctgatactcaaaccagggcagctgagggatcctcccctcttggccaatcttggctacaggagtgacttctgatccttagtgttgcaggatgggtaaggtcatggcctttggcacctcacgggccygggtgccggtcctaccactgctgcctccatgccctgtgactctgcgtgagttacttcacctctctgtacctcagtttgctcatctggaagttgggaataataatagggcatgtccacttgagctgtggtgaggattaaatggggtatggacggcagctgacacag

SEQ ID NO: 478285 - DNA, 607 bp, Homo sapiens
ctgcaggccaagcccccgggctgagagagagctgcccagggcgggcactgtcagggctggagaagccagggtccccaaaggctggtgggagcctgcaggggcaagagtgctaagctgctctgaggaagcacattcctgttcattactttttagccaggccagacaacagtcccctttytaagagctactattcagattaaaggaaaatctatgactctcttaaaaacaacaaaactgtgaacagaaagctgctctgggccttttcataaagaaatctgattaggccaacgctgcatccaatccctcctccaagataagaggttagagggaacacaagccaagtgtggatttgagaaagcattgaggggagaggttctcccattccgggtatcagaatcacctggaggcttggaaaaaccaaattaccaggcctcctgagtttctgattcagcaggcctggagaatttgcttttctaagaggttccctgggtgacattgatgttgctggtttgggaaccacactttaagaaccactgatctggtgaaattttgttttccccatgggcaagttgactttggctccaatcaaatccctctgccctaaaga

SEQ ID NO: 478286 - DNA, 506 bp, Homo sapiens
taataatgaatgactgcatcttgtcaagtgagcagctgggaaaaccaggctgacctggatcatgttacatatattcaagcatctggaccctgcttgtcattctaacagggtggccaggcctctccttgcagcccctgcagtgtgagcccacactgctccacctcctctggcctatctttcctgcatacactgggcagctcatgtggccttctgctcttattgtcatgagggttacgtgaagaaatgcrtggaagacatttagtctagtgttggcactacgggcaagtgcgatgctaatattatgatcctataatgtctattatgttcgtctcattttttcctgtctaccttttctcttttctgtgtctcatgtccagctacacagacatcttgacataaccccaaggcaacacctccaaggcttcttgacttgatccttccctttccccttctaggaccttggtctgtccctccccagcctcacccccatcccaacctcattcgta

SEQ ID NO: 478287 - DNA, 506 bp, Homo sapiens
taataatgaatgactgcatcttgtcaagtgagcagctgggaaaaccaggctgacctggatcatgttacatatattcaagcatctggaccctgcttgtcattctaacagggtggccaggcctctccttgcagcccctgcagtgtgagcccacactgctccacctcctctggcctatctttcctgcatacactgggcagctcatgtggccttctgctcttattgtcatgagggttacgtgaagaaatgcgtggaagrcatttagtctagtgttggcactacgggcaagtgcgatgctaatattatgatcctataatgtctattatgttcgtctcattttttcctgtctaccttttctcttttctgtgtctcatgtccagctacacagacatcttgacataaccccaaggcaacacctccaaggcttcttgacttgatccttccctttccccttctaggaccttggtctgtccctccccagcctcacccccatcccaacctcattcgta

SEQ ID NO: 478288 - DNA, 506 bp, Homo sapiens
taataatgaatgactgcatcttgtcaagtgagcagctgggaaaaccaggctgacctggatcatgttacatatattcaagcatctggaccctgcttgtcattctaacagggtggccaggcctctccttgcagcccctgcagtgtgagcccacactgctccacctcctctggcctatctttcctgcatacactgggcagctcatgtggccttctgctcttattgtcatgagggttacgtgaagaaatgcgtggaagacatttagtctagtgttggcactacgggcaagtgcgatgctaatattatgatcctataatgtctattatgttcgtctcattttttcctgtctaccttttctcttttctstgtctcatgtccagctacacagacatcttgacataaccccaaggcaacacctccaaggcttcttgacttgatccttccctttccccttctaggaccttggtctgtccctccccagcctcacccccatcccaacctcattcgta

SEQ ID NO: 478289 - DNA, 482 bp, Homo sapiens
gactgcaactgcatgggcttcaattctgagttctgatgtctactggggaggtgatgtaaagcgtcttggatttgcgggtcttccaagaactcaagcaggtggtgttagagtcattactgggcaaggcaagaagtgccaccatcagccccatggacagagcttcctttgggtagtaagtgtttgcctgtcttttcacccactttgtctggctcccagaccttcctgagatcagcgtgagccacgtcaacctgaccgtacgagagggtgacaaygctgttatcacttgcaatggctctggatcaccccttcctgatgtggactggatagtcactgggctgcagtccatcaacactcaccaggtaggcatcctgggcttcagccccatcaggaggctagggagtgatcacactgtagtcttgaagaagagggaaaatttgcggtcttgttactataggaaaaaacacatagacttgggttacatg

SEQ ID NO: 478290 - DNA, 595 bp, Homo sapiens
tcacccgggatggacctaagcagcatgcccagctccagggcaaacacggccccccactgccccacctggccccaataactgtctccctcgtgcagatattcactctgcgtgtaggcattcattccagcgttacatctccgttgacgcagagctccccgtggctcccctgaaacgttccgtgctagacactgtgtcctgcgatgccaggagggagccactgagagagaaatcaaaagcatcaacaggcagctcagsggagccaggctggggctgggaggaaagctgggggaagaggcccaaagaattctagaatgagagatccagaaatagagggtctaatgctagcaacacaattgcataacaaagaggggcaaactgcaaattaaatgcaaaattggtcacctctggtgagagaattgcaagtccattctcttgagggagagaattgacactgggcaaagcagtaccagggtaacatctatatatacttttaaaatatggaaccacaggaagtttcatatgcaaagaatatgaaattgaaaaatgcaaacatgaatgcaaagatttataactctctgtgctgttctttccctgg

SEQ ID NO: 478291 - DNA, 609 bp, Homo sapiens
taattggagaaagcaattctcacattcattaggttgtcataagacttgaacaaaaagatgttcacaaagcacccagtacagtgtctggcccaaggtcatggctaggggatcttagtgcccccactcaatagtgctcccatttaagccaggattaaataaggggtgagagcgagttgttatgttgtagctcactggggcagggaggacaggagcagttgatcactgacctcagagggacagccactaggatatcaagtttggtctgcattaggaaggactgtctcccgaaatcagatggaatatcttgccccggaggctcagcatcctggccatcctgggtactgaaaaactacacagcagccctaggtacttctcctggctcagaaagagctcacccctgtgggcctggagcttgagaaggagggaaacttagctacagaataaaatgtactcaaatagctctccctggggctgaccagcccagccacgtgctggtcatggcagggaggcgrttctgcacgaccccaaattagcagtgagaccatcccttttggcaaagggcacacaggaatggccagtgggagagctgtctctggatccaagtggagc

SEQ ID NO: 478292 - DNA, 561 bp, Homo sapiens
gctgtaacacatacatgcamctatatatgactcttatgccagcttagttctgaatctgacacatcacccacactaaaacctcacaacaaggctatgcagcaggtactgttattattcccattttacagaacaggaaactgagacaggttcaatggcttagccaaggtcacacggctggcaagaaaagcagctctagtgttcaaattcaggcaggatccacagtttacgttcctaaccctgaagctgcctttcaataatacaacaatcatattttttaaagatatatcatccctcattttaatcatccatttcagtttatggagcacatttctagaacatttcacacagaacgcagaacattaatcttgtgaaacagcctgtgatttccattcataggtggggaaactgaggcacatagagctcaaagacttgcccaagaagtttaggttgcccagttgtgaggtgaaagtagacaaaactgccactttcctggcactttgaggtgattgactgcttcctggaggtcatggccataatctgtgaccagagtgcccacttctg

SEQ ID NO: 478293 - DNA, 656 bp, Homo sapiens
attttaatcatccatttcagtttatggagcacatttctagaacatttcacacagaacgcagaacattaatcttgtgaaacagcctgtgatttccattcataggtggggaaactgaggcacatagagctcaaagacttgcccaagaagtttaggttgcccagttgtgaggtgaaagtagacaaaactgccactttcctggcactttgaggtgattgactgcttcctggaggtcatggccataatctgtgaccagagtgcccacttctgaagtgtggggtgccaggcacttggaattctcacaatcaccctaggaggcaagtaccattattaacagcagattaagaaaccgaggcccagggaggctcaatgactcactgaacatcccgcagtcaggcagcggcgaagtgagaccaagrggtccctgaggaacccgcaggattcttttggggttctggactgcctcacactgggctgagagccctccaagctcaaaccaagaagtggggagaggagggagaggaaggagatggggcgatggggctggcaggagggtgggcggcaggggagaaaaggtgcttgcctccctgctccctccagccagagctgcgggctcgggaggcgggtgggattgggcagaaggcagatgtcagccactc

SEQ ID NO: 478294 - DNA, 656 bp, Homo sapiens
attttaatcatccatttcagtttatggagcacatttctagaacatttcacacagaacgcagaacattaatcttgtgaaacagcctgtgatttccattcataggtggggaaactgaggcacatagagctcaaagacttgcccaagaagtttaggttgcccagttgtgaggtgaaagtagacaaaactgccactttcctggcactttgaggtgattgactgcttcctggaggtcatggccataatctgtgaccagagtgcccacttctgaagtgtggggtgccaggcacttggaattctcacaatcaccctaggaggcaagtaccattattaacagcagattaagaaaccgaggcccagggaggctcaatgactcactgaacatcccgcagtcaggcagcggcgaagtgagaccaaggggtccctgaggaacccgcaggattcttttggggttctggactgcctcacactgggctgagagccctccaagctcaaaccaagaagtggggagaggagggagaggaaggagatggggcgatggggctggcaggagggtgggcrgcaggggagaaaaggtgcttgcctccctgctccctccagccagagctgcgggctcgggaggcgggtgggattgggcagaaggcagatgtcagccactc

SEQ ID NO: 478295 - DNA, 526 bp, Homo sapiens
aggggaccttgggtacattatgaaccrctaagcctcagtttcctcttctgtccaatgaagctaatgacagtattaatttgaatttcagataagcattgttattcctgagatcatctctataaagtccatagcagggcctggaacctattaagacttcagtcatcaggttctatcacgactgtcattattctcacccatgctgttatctggcctgtgacactgcttctacagcagaaacgcactgcccaggtacctaccaggagtgctgcgactctgggaaggtagggttgataaggcacagcctgctgctgaccttgaggtgtccctgtcttgttagggaggcagctacataaattatcctggcacatggaggcaggcagagtggcagaggtgtgcacaaggccctcactcttggcactggagctggagaatcaaaccaacccctggggagcagggtgtcactagtgcaggactgcagtcccttgccttgcaaagtgggctattttgatcctgtttgcctttttat

SEQ ID NO: 478296 - DNA, 408 bp, Homo sapiens
ccacatgagataaagcaatcaatggtacaaatattttatctacttccccacatggttgtcttatacaagatgaatggatcagtgtagcccagggaacatggagcagaatttctcactggactgacatcaggaacatttgttccggcttggaaaatctaaccaagtcacaatgcrgccattgtacagaactgggtagcacagggtggtcccaccacctccagatgtaggttggacaaagagtccagagagaccatagactgtcatctgtaacttgtaggggtgtgagcgtgtgctctggactccaatctagttagtgttgctagctggatgaccttggccatgtgacctcagttccattgtctcagtttcttcatctaaaaagtgggaatcataacacctaccttgttc

SEQ ID NO: 478297 - DNA, 408 bp, Homo sapiens
ccacatgagataaagcaatcaatggtacaaatattttatctacttccccacatggttgtcttatacaagatgaatggatcagtgtagcccagggaacatggagcagaatttctcactggactgacatcaggaacatttgttccggcttggaaaatctaaccaagtcacaatgcggccattgtacagaactgggtagcacagggtggtcccaccacctccagatgtaggttggacaaagagtccagagagaccatagactgtcatctgtaacttgtaggggtgtgagcgtgtgctctggrctccaatctagttagtgttgctagctggatgaccttggccatgtgacctcagttccattgtctcagtttcttcatctaaaaagtgggaatcataacacctaccttgttc

SEQ ID NO: 478298 - DNA, 648 bp, Homo sapiens
aatacacattaccattgggtcaaatgccaagatctttaaaaaaagacagaatataaacattacaggtaaagttaagagccctgtacatacccttcttttcctctctccctctctccctagaggccaagactgtcacgaaattggtttgtattcagcccacgattttatctttctgtctataaacaacgtattatatcrgtcattgtgatgtttaacgtgtatatatggtatgtcactctgcaacttattatatttttcaccagcattatgttttcaaaatatagccatgttaccacacagagaacaaggttttcactgaaactgctgtacaggatttcatcatctcactatgccgtgattcagctcttgattcaaatgcctcctgataacatttcagcttgtttccagttgttttgctcttgcacacacttctgcaataaacatgggaacatgggctctggagtcagcctgggctggaatcctcactgttatttaccgctgtggccttagacaagctcttgcatcttttggtctccatttcctcatctgtcagacgagagcagttctccactcagacagtggctgtgcggattaaatgagtgactatatacactgccaggcctgaatacagtgcttaacacacagcag

SEQ ID NO: 478299 - DNA, 243 bp, Homo sapiens
aaattgcaccctctccaccttagggaagccacattttcatatatataaatttttctttaaactttacattagatccgttttctaaaattctgcccccgcttctcttgagataaccctttgagctgtagatcatttgtctaatacctgcctccctccattcacctgtagctccaagaaggaagtatcacggtcttttattttstcaaggctgtgccccagggctcagcatgggtctggcccaca

SEQ ID NO: 478300 - DNA, 567 bp, Homo sapiens
cctaaaaattaggcccttctttccaccctcttccttcaacaccagggactttgaggagccctgagctgaactcctcttccatttctttcttgctcctgagtgcctcaaagacaaggtttctgccaagagaataaaattgcacccctcctccacgcccttgccccctccccacttcttatgttatttccctctctgtgtcttatcgccacatttgttcaaatgactgccacttaagaggtggcagggagtcagaaacacaatctggagcaaagctgatattaaataacttcctgagcctggcccgtctgccaacgctccctcctggatctcaggtggagaaatgaagaggctgcaaggatgagagccagggtcaccccaaaccagcctcagagctactcctctgctgagaggaggctggagtttcttcaccagtaaagcccaaagcttagcagtgacccctacccctgcttctcacttgatcccatcccccatagcatgcacacacacacacacacacacacacacacayacacacacactgagcaaaaggtattcaatcatgtctga

SEQ ID NO: 478301 - DNA, 619 bp, Homo sapiens
gtctaactttttttttaagggtaacatgaaactatggggtctgaaactatggcctgcaggccaaatctggcctggcacctgtkttttataaataaagttttattggaacacagccatgctcattcatttacatattggctatgattgttttcatgctacaacagcagccttgagtgattgcaacagaaaccatatggccagcaaagtctaaaatatttactctctgctcttttatgaaaaagttggcaaattcctgatctacacaatagtttctcaaactttaatggcagtatgaccacccagcctgttttttaagaatgcaaattcccagggcctactatcaaggtatgagattcagtagatgtgacccaggaatctgcactttaatcagtaccccccccaccaccaacaacaaccacacacacacaccaccatcaatgactgtcaagcatgtggcatgaggcaacattatgggaatcctgctctgtgcagtcagcaatcctaagtgacaccagagccgtggctttcaccacaaaggggcagatggatcctgggtgggggaatgagtcagcctctggatccactgagggaggaacagctcccctgtcctcatgggtct

SEQ ID NO: 478302 - DNA, 612 bp, Homo sapiens
agggtcatacctttccacaggcatatttcaggcctcgcctggacccctcagatgggtttcaaggtgcatcttgggagaccctgtctgcagtttgcatgaagtcggccagaggcagtgcatgacttactccatctgggagacccagtaccctttaaacccagaacaatcgcagtggctgcatcacctagaataccacccagaaagggcagaggcctcttggrcccaaggcaagccccaacaggcaaaggggttaacccagcaagaaaagagactttcaaagacccattaagaggaaacaagggagaaagagacacaaacctgttagcctgctaaggaatgaagaggaacagaaattaatgatgactccaaaatagccaagagactaaactcattttctaaatctgtctttaacaagaaaaatggagaaaagagatgtgaacaaatgggaggtaatgaagccttagggaagagggggaaaaaagagaagaaaatctactgagaataatcaaggatggaaaacatgagcacagtgtctaatccccaagactaggagatgcacagcccagaggccagaatgtttactcagcattacactgagtttttgaaaggcaa

SEQ ID NO: 478303 - DNA, 563 bp, Homo sapiens
atatttactctctggccctttacagaaaacagttgtcgactcctgccctaggagctgatggtcaaaatgcatatcctggccccaccagtacccctatctatatgaccctgtccaggttacttctctgtctgtgcctcagttttctcatctattaaatggggataataaaataactgcctcgtaagaatgatgtgaagatcaaaagactatgataaaaaagaaaacccctttgcagtgtggggcacatgtaagttctcaggcagagctggctgtgctgattattttcctcctgtgccttacggaaactgagcagtcttgttctcagttttcaagctaaaaatggtatcaggcttctgctggaagttgtcatgtctcagcaatcattgataaaaaccccatgtggcagagtgtggaggggwaggaaacctgtcattcatggcctccaggaaaactgttccagcaggagtttatacacaggttcaaggagtgcatagatgccacatcagagcaggttccgaggaagagcaagaggatgaagatgaggccctgacatttccggatgg

SEQ ID NO: 478304 - DNA, 677 bp, Homo sapiens
taaatatttttactgtatttcttctaacagcagcaaatgcatttaacactttattgagattctcaacagctgccatttggtttgtatagcaaattgtttacaaagtaacttttttccatttttgatattttaatgaaaattatgttcttcagttttaaagctctgtccctctcccaaagaaaggttaataactaactaccaagtaatgattatttgggaaaagaagaaaagcaaaaccagcttgtaaacacttctggaacgtgggtaaggggccaaagtcaagaccttctgggcccagtgcaggtgctaggcttgcctcgggacaccatcagcacttccccatccacaacatcctcaacagctgggagccatgtgcagaccccagggggcttcctgttccacaagctsccctctctttttcctctccacccttgctgttgggcctcccttccaaatctgcctaacaaaggcagcaggatctttaatactgttcagctttgtcaatggagacaggatactctagaaagttgagagattccctggtccagtctgggggaggaaaaaatatgcagtgtagcatagatggttttacttgtccactcagacacatgctcatacttattagatggatgtatcagatgcttcaaaagtcctgatgtgtagtagcacaaaagctg

SEQ ID NO: 478305 - DNA, 537 bp, Homo sapiens
gggagccatgtgcagaccccagggggcttcctgttccacaagctcccctctctttttcctctccacscttgctgttgggcctcccttccaaatctgcctaacaaaggcagcaggatctttaatactgttcagctttgtcaatggagacaggatactctagaaagttgagagattccctggtccagtctgggggaggaaaaaatatgcagtgtagcatagatggttttacttgtccactcagacacatgctcatacttattagatggatgtatcagatgcttcaaaagtcctgatgtgtagtagcacaaaagctgcttgtaaaaaggaagttgcaaaatgataaaaatttctgcagcagttcaggctcctgatgacaaagctggttctgataagtagttcttttgacatgcacagcagctttcactgttaagtcctgtgttccagcggtttcatttagaccataggaagttgaaagcaaagtttaaatgttctctgctgacaaaatgtggtatatatccatcaatggacttctactca

SEQ ID NO: 478306 - DNA, 537 bp, Homo sapiens
gggagccatgtgcagaccccagggggcttcctgttccacaagctcccctctctttttcctctccacccttgctgttgggcctcccttccaaatctgcctaacaaaggcagcaggatctttaatactgttcagctttgtcaatggagacaggatactctagaaagttgagagattccctggtccagtctgggggaggaaaaaatatrcagtgtagcatagatggttttacttgtccactcagacacatgctcatacttattagatggatgtatcagatgcttcaaaagtcctgatgtgtagtagcacaaaagctgcttgtaaaaaggaagttgcaaaatgataaaaatttctgcagcagttcaggctcctgatgacaaagctggttctgataagtagttcttttgacatgcacagcagctttcactgttaagtcctgtgttccagcggtttcatttagaccataggaagttgaaagcaaagtttaaatgttctctgctgacaaaatgtggtatatatccatcaatggacttctactca

SEQ ID NO: 478307 - DNA, 537 bp, Homo sapiens
gggagccatgtgcagaccccagggggcttcctgttccacaagctcccctctctttttcctctccacccttgctgttgggcctcccttccaaatctgcctaacaaaggcagcaggatctttaatactgttcagctttgtcaatggagacaggatactctagaaagttgagagattccctggtccagtctgggggaggaaaaaatatgcagtgtagcatagatggttttacttgtccaytcagacacatgctcatacttattagatggatgtatcagatgcttcaaaagtcctgatgtgtagtagcacaaaagctgcttgtaaaaaggaagttgcaaaatgataaaaatttctgcagcagttcaggctcctgatgacaaagctggttctgataagtagttcttttgacatgcacagcagctttcactgttaagtcctgtgttccagcggtttcatttagaccataggaagttgaaagcaaagtttaaatgttctctgctgacaaaatgtggtatatatccatcaatggacttctactca

SEQ ID NO: 478308 - DNA, 537 bp, Homo sapiens
gggagccatgtgcagaccccagggggcttcctgttccacaagctcccctctctttttcctctccacccttgctgttgggcctcccttccaaatctgcctaacaaaggcagcaggatctttaatactgttcagctttgtcaatggagacaggatactctagaaagttgagagattccctggtccagtctgggggaggaaaaaatatgcagtgtagcatagatggttttacttgtccactcagacacatgctcatacttattagatggatgtatcagatgcttcaaaagtcctgatgtgtagtagcacaaaagctgcttgtaaaaaggaagttgcaaaatgataaaaatttctgcagcagttcaggctcctgatgacaaagctggttctgataagtagttcttttgacatgcacagcagctttcactgttaagtcctgtgttccagcggtttcatttagaccataggaagttgaaagyaaagtttaaatgttctctgctgacaaaatgtggtatatatccatcaatggacttctactca

SEQ ID NO: 478309 - DNA, 513 bp, Homo sapiens
cttttgaaagtggcaaaaagaatatgtgttaaaagaaaaaatagggtagaagataaaaagaatagggcagaagatattagcttcaattcctccttttttttttttttttttgatcctttggaatgatttcttcctagactgccagtgttgcgtagtaaccccgcccatgaagaggactggaatactgaaaaactgcatgaaactaagcgctgtgggttgggcrgggtggctcacgcctgtaattccacactctgggaggccaagttggctggattgcttgagctcaggagcttgagaccagcctaggtaacatgatgaaaccccatctttacaaaagatacaaaaattagctgggtgtggtggcatgaagctgtagtcccagctactcaggaggctgaggtgggaggatcacttgagcctgggaggtagaggctgcagtgagccgtgattgtcccactgcacttccgcctgggcaacagagcgagatcctgtcccaaaaacaaaaaaactaag

SEQ ID NO: 478310 - DNA, 508 bp, Homo sapiens
ctgcataacgtcacatcatataaatttacactgatttattaaaccattgtacttgggacataataagatgatcaatttttcaatattataaataatgttgcatgtaacattctttggccacatrcctgattatctttgaaaacttccctagaattcagattgttagatcaaagccttaaatatttttaaggtcttaaatacacaatactcaactgctttcttgaaagactgtaatagttttacttctaccagctacaagagtgtctttcagtcatgcaacaaagcccacacctcaaaacaatgagtattagctttaaaaaagtcattgtcaactgagttcaaatggtttttcctttaatttgcagttcttacttggcaatggttaagtcaaactttccaaaaaaaactttgttctcttttttcataaattatatatgcatgctttttgtcattttctatggaactgttaacatttcttcttagcattctagtcttaatatttctcagt

SEQ ID NO: 478311 - DNA, 520 bp, Homo sapiens
tctatccagccgtgtactcagtagktattttctgagaagctactatattccagctttcttgttcccagtttagagctgggtgggatcaggaggaagggcatggaaggggttgctggagaatgtgcagtggcatcagagccccattctggctctgggtccaaggccctcctagagaggcacagtctggaagatgtgagagccccacggtaggttggggtggatcatggaccccatcctagaagagtgggtgggtttgcccattcagagcccaggccagaagagccctctcggcagaagggccagcctggagtgtggcaccctgggcatagggagggccaagtttttggcagcaggattatgtagtttgtgtaggtcagagctggagatgggggttggggggcagttcctgaccattaggggcttggtagccctggagagcccttgctgtgggttgggagcaaagtaggtgggccaataacaacacatattttaccaagtgaattctaggagagtgatttct

SEQ ID NO: 478312 - DNA, 679 bp, Homo sapiens
gcttcctccaaacgtgaggacccccaggcagtggtggtggccccctggttgcacaggcagatgaggggtagggagaagagggtagggtacagctctggttctcaaagcaggtggtggggccagcatgtgtgactcagtggccaaagggtccatggaggtggaccaaactggttgaggggagcccccaccctgactgtaccaggagatgctgcccgtgccaccaaatttccactgggacccatggccccaggggaggccctggaatctgtgaagctcagggtcatcctcagttgttccctgtcatttatgttctagcsttgaccttggagtgtccgccctgcaggagctgccagttgctgtgagttcctcgtgcttccttgtgacaagtggtagggagtggctactgctaggttagattttgttattttgcacatcatagactttttacactagtttccatcattttcatttagtctttgttcagggtgttaacagctatcaataccagctaacaatgtgtttatggtgatgggcatcattttctcatcttatgagataaagcagccaacctagtgccttttgcatgaaggtactgatgctcggggacttgggactgatgggtgggtgttgccaggatttcagcctcttccaacaggagctgcagggtggcgtgatgtgg

SEQ ID NO: 478313 - DNA, 679 bp, Homo sapiens
gcttcctccaaacgtgaggacccccaggcagtggtggtggccccctggttgcacaggcagatgaggggtagggagaagagggtagggtacagctctggttctcaaagcaggtggtggggccagcatgtgtgactcagtggccaaagggtccatggaggtggaccaaactggttgaggggagcccccaccctgactgtaccaggagatgctgcccgtgccaccaaatttccactgggacccatggccccaggggaggccctggaatctgtgaagctcagggtcatcctcagttgttccctgtcatttatgttctagccttgaccttgsagtgtccgccctgcaggagctgccagttgctgtgagttcctcgtgcttccttgtgacaagtggtagggagtggctactgctaggttagattttgttattttgcacatcatagactttttacactagtttccatcattttcatttagtctttgttcagggtgttaacagctatcaataccagctaacaatgtgtttatggtgatgggcatcattttctcatcttatgagataaagcagccaacctagtgccttttgcatgaaggtactgatgctcggggacttgggactgatgggtgggtgttgccaggatttcagcctcttccaacaggagctgcagggtggcgtgatgtgg

SEQ ID NO: 478314 - DNA, 410 bp, Homo sapiens
tggctctttgattttcaattttaaacccttatcttgccacagtcagtcttttatacagagcagagtgctggagatgggctgcaatgacagtgttcctaatgggatgggttttatttcgagtgagtggactgtgacaacttttaggtaccttcatgtgactcttctcacaatagccgattttcttctcgtttaatggaaaattagtagctgcagcctgcttcacgtctctgcccccgtggtggcctgggcagaccctggctcatctcccagrgcaaatgtcagacaggccagccacagcccaaggaagtgggggcaaagggggcgccccagtgtgatctcgagggcccatgtggttttgtatggagggcagagttgttgtgctgttggcttttcagcaggagccaggcaga

SEQ ID NO: 478315 - DNA, 544 bp, Homo sapiens
aagtcccagccttgctagtgcggacgttttattttacccttctttttttttttttttacaaggatttataggatttctagattaaattgcccctgttctccaagaagsagcgggaacagcagcgctgcagggtgatgggctgcagatgcctctgcagcagggtggggtctggggagacattcaggtgcctcctgtccacggcctcgataggccagggcgcctgcagcttggggccctcttcccctttcaggtggagggagctgttcatcctctgggggctgctgggcaagaaacatttcttacctgataatgtgaagcgtcagaggtccctgttttatgggtaagttgctgtatgttttggagctgcaggcagtctgtttttctcactagcatggtgtggaggtgggggacagtattccctcccgtgaggcccatgcccgcttcattatccctgtctgctggggctgcgctggttgctggctgaggctacctttgttacttccatgtgctgtagctggaaaggcctgctacttgttaggctcct

SEQ ID NO: 478316 - DNA, 544 bp, Homo sapiens
aagtcccagccttgctagtgcggacgttttattttacccttctttttttttttttttacaaggatttataggatttctagattaaattgcccctgttctccaagaaggagcgggaacagcagcgctgcagggtgatgggctgcagaygcctctgcagcagggtggggtctggggagacattcaggtgcctcctgtccacggcctcgataggccagggcgcctgcagcttggggccctcttcccctttcaggtggagggagctgttcatcctctgggggctgctgggcaagaaacatttcttacctgataatgtgaagcgtcagaggtccctgttttatgggtaagttgctgtatgttttggagctgcaggcagtctgtttttctcactagcatggtgtggaggtgggggacagtattccctcccgtgaggcccatgcccgcttcattatccctgtctgctggggctgcgctggttgctggctgaggctacctttgttacttccatgtgctgtagctggaaaggcctgctacttgttaggctcct

SEQ ID NO: 478317 - DNA, 544 bp, Homo sapiens
aagtcccagccttgctagtgcggacgttttattttacccttctttttttttttttttacaaggatttataggatttctagattaaattgcccctgttctccaagaaggagcgggaacagcagcgctgcagggtgatgggctgcagatgcctctgcagcagggtggggtctggggagacattcaggtgcctcctgtccacggcctcgataggccagggcgcctgcagcttggggccctcttcccctttcaggtggagggagctgttcatcctctgggggctgctgggcaagaaacatttcttacctgataatgtgaagcgtcagaggtccctgttttatgggtaagttgctgtatgttttggagctgcaggcagtctgtttttctcactagcatggtgtggaggtgggggacagtattccctcccrtgaggcccatgcccgcttcattatccctgtctgctggggctgcgctggttgctggctgaggctacctttgttacttccatgtgctgtagctggaaaggcctgctacttgttaggctcct

SEQ ID NO: 478318 - DNA, 649 bp, Homo sapiens
agctggggaccctgaggttcagagagggaaattaacttgtctagggtcacggctgggttagcggtggcaagaaaacgatctgagctctctccccatctgtyctcctgcccggcatctcggttgtgccgcaaggcacaccaggaggggttgcaccttgaagatgcccttgttgtgaggtcaacctgatgcaaaggagcttaaagctgcccctggcctgaaggaggcagtgagtagtgaccagacacgaaaatacaatgaaaaaggtgattctcgtctctttcggaaacagactggccattatccgtctttcttatgggatctgcagtcttcttggacctattaaaaatgcaggtataaacaaacacaaatggtttgaggatgacccagtgttttggattttccactccttggtacacttttattactgcagggagtcacagcatctgccaaagtaaaaaattgtcacacaaagaataaaaaactttctaatcggtcctaacaaaaggaatgtatggccccatggactcacaagccttttaataaaacccccacacgggggggaggaggctgagcattttatcatcattataatcacaatcattttataatcacaactgaaacctacaaaatgacaaccagccttccagga

SEQ ID NO: 478319 - DNA, 583 bp, Homo sapiens
gcccctctgggttggcaggaagtcctgcgtgtctctcggaacctgcagctsacagcccctctgggttggcaggaagtcctgcgtgtctctcggaacctgcagctcacagcccctctgggctggcaggaagtcctgcgtgtctcttgtcccagagaggaaatgatttgggcaaacgctctgccctgagatctctctcgccctaactagatattaagcacacctcgggggcagtgctggaattacagcatccacaggtgctgggctttcctggaggctgcaagtaagtgctcagtcaaggaggggacaaggcttcggaggctggtggtggggaggtccaaaccagaggggagtccctgctgctccttcctaactgggatcttgagaaagacaacagccccagcccactcaaaggctacacctcaaaaacatgttgcaatctacatgggctgcctcattttcaaagcagaagtttagcaatttcctgcatttgcaggcatgttcaaactgtaagcccgttcgattcctgagttatttttaccaaataaattcaagtccagttatcgaataactacatgcatcccat

SEQ ID NO: 478320 - DNA, 620 bp, Homo sapiens
agggaccctgtttcactgaacaactgtcacttcaggatgcattaaaattttcagaaaaagaaaagcacaactacgtaagaacttatttaatgcccctgatggcttggtaaattttaataagaatgtgctgcataaagaagtaacccacaaaatgtatacagcctttgggaatgtaacgatattttcaatgcacaatattttacatctcacttcggcccgcccctccttgacacactgttcacttggacagacataattttgtgccctaacactggatctaatgcctcgctcactggccatataaatatgtkagcccctccagctccttttctgaggagatctacaaataagtatgcagccgtttcttccaaaagtttatctgcattgtcaaggtgatccctttaaaagacagacttgaaaggctgggttggttgtgagtgtaaaagagggcactgccgctccaggaaggtgtggttcatcgtggggagaaggaaagaatgagaagatgaatcctcagctcccaggcctccaccacggcccaggctccccggcgccaggaggctccactggcacaggtctcctcagagcatgggatcccctcaaatccctcacccagggtg

SEQ ID NO: 478321 - DNA, 640 bp, Homo sapiens
aaaaataaagtccaaaaaaagggattctaaaattggaacaagaatatgtctttcttcacataaaaaaaaatcatagtggtagtagaaatgtactcctagaactctgtgagactgataaataaaacaacatataaaagatcacctgatagatgaaatcaaacacatggaaagattctgaacctgctaaactcaagaacaagtgttgttctctkggagaataaatgtgatttttctatctcatggagaaagaatattttatcaaatattcctacagcttaggtgaagggtatgtcaaaatatctactcatctttgctctccgttcatgaccagtgaataatttttggactgctaccttgattgctatggcaagcagagggcattctttgcagagagcatatgaacttcaaagttattgcccatgaaaagagctattactcactgcaaattgataaattaatattttgccttatacatcatcttatataaacttggctactgagaattcatcaccaagaaaactaatctgatttcagtataaagacaaaaataaacatgagactggaaaactggaatataagccttgcagtggggaaactcaagacaagtgacataattaataggcttcattagtaatggagc

SEQ ID NO: 478322 - DNA, 640 bp, Homo sapiens
aaaaataaagtccaaaaaaagggattctaaaattggaacaagaatatgtctttcttcacataaaaaaaaatcatagtggtagtagaaatgtactcctagaactctgtgagactgataaataaaacaacatataaaagatcacctgatagatgaaatcaaacacatggaaagattctgaacctgctaaactcaagaacaagtgttgttctctgggagaataaatgtgatttttctatctcatggagaaagaatattttatcaaatattcctacagcttaggtgaagggtatgtcaaaatatctactcatctttgctctcygttcatgaccagtgaataatttttggactgctaccttgattgctatggcaagcagagggcattctttgcagagagcatatgaacttcaaagttattgcccatgaaaagagctattactcactgcaaattgataaattaatattttgccttatacatcatcttatataaacttggctactgagaattcatcaccaagaaaactaatctgatttcagtataaagacaaaaataaacatgagactggaaaactggaatataagccttgcagtggggaaactcaagacaagtgacataattaataggcttcattagtaatggagc

SEQ ID NO: 478323 - DNA, 575 bp, Homo sapiens
aatccatataagcaataattttgacttgggggtttctcagggccacaatagtcataagatttaggctacatagctacataagtagaagtttgaggctaaaaatcatcaggggaaactttttctgttcctctcaaactaaggctgagagaattatgcatatcatggtttcattttgtggggtcaggtttttctgttttgctctgagagaatgttaccctttgggaggccctgtttcagtgtcatgagggttgtctcttttttgggggggggggttcttttttattattatactttaagttctagggtacatgtgcacaacatgcaggtttgatacataggtatgcatgtgccatgttggtttgctgcacctatcaacccatcatatacattatgtatttctcctaatgctatccctcccccagcctcccaccccccaacaggccscggtgtgtgatgttcaccgccttgtgtccaagtgatctcattgttcaattcccacctatgagtgagaacatgtggtgtttggttttctgtccttgtgatagtttgctcagagtgatggtttccagcttcat

SEQ ID NO: 478324 - DNA, 532 bp, Homo sapiens
aagctattttccttgtttgtttttgcattttaattttcatttcctttcatagtcacattgccttctttcctgcatattagttctggtccctcatgtgcacattagatgtcttctttaaatatcctgggatccttggatatctgctcttatttaaaaagccattgaaagctccaccgatcgggctttacggattatgatattttcctctagggtgacatggccagggagttygtttccttggaaaaacctggcagcagtttttataagctttttctccctaaatgattagattaccccgaaagacttccaatttcttgcctggaaaatacgcaccttgcaacctgtgctctgagaattcctcagaagaagcaaacaggggatctcaatattttgtatttacctaacctcctttatcgaaccagttacaatgttaatttcttaccctggaaatccaagcccttagcaagtaccaggtccaggaaaccattatacctcaaacaccctgtccccatttttccaaatgccacttatc

SEQ ID NO: 478325 - DNA, 325 bp, Homo sapiens
tattaaatgggtgtcattatttagcaccacagcaataccaagatttattatatctaagtattgtcataaaagctaagacctatagaatataatttaaacccaagttaaaggatttatcttttttttttttttttttttttttttttctgaaacagagtcttgctttgttgcccagcagtgcagtattgccatytgggctcactgcaaccttcacctttccagctcaagcaattcacctgccttagcctcccaagtagctgggagtacaggtgctcaccaccacacctggctaattttttggatttttttgtaaagatggggtttt

SEQ ID NO: 478326 - DNA, 486 bp, Homo sapiens
aagagattattctaaatcagacaaaaaatttcccaccagtgtaatggctatttccaaacacacgcctgggtgaccctccacagatctagccccagatgcctacttgttcccactccccagccttggggtggccccacacaggaccaatacttcaatctcattttgttcagaggccagttccaagaggctgaattgttctcatgcaatcgatacaacctctaatggggggcatggggcatagactcaggaaaaacatccctgtgaacttggcctccccttctctgggtgggtgaatctcaagaggctgctggtttgaaaaaactctatgctagggtccagagagtggggcttttgtcctgttccggcgtgtccttatgggccagtcttatccccttttcttccctagtgttaacactaggggtgctgggccaaatcagtttctcaccattagtrcttattattatgcaggtttccaggcccacccag

SEQ ID NO: 478327 - DNA, 516 bp, Homo sapiens
tgggctgtcctggggccgcgggctggagccgctaaactgggccgcggcgtgggagctgcagccacagcagagaccacagcccgggcggagtcctggtgggggaggggatcccaggacgtggccaggcctggggcagggctgggagtgggggcgtgtcttggctcatcagacccctccctgggccccttatggatcgattccaccctctgcccatccctctgccagtgcccccagccctactgatgtgaagcagttagtccttggcctgcaactctgtgtgtatccaaagattgtgcaatgccagcactttcaggcagtgttggccctaggagcgatgcccagaatgttcataataatgacmagcatttattgagtgcttactttgtgccagttacagttccggcgctttacctgtattaactcactgcttacaacagcacgttgagatcagtgctattttatctctataaatgtctcagatagaaagattgagactcaaaaatagttcatttgaca

SEQ ID NO: 478328 - DNA, 632 bp, Homo sapiens
ctgccccatagaggttaacagactgcctgggctcaaatcctaaatccacttacttagcttcctgtgcctcagttccctcctctgtcaaaagacagacatgagagtgcccatctcatagggttgggagcagtgaatgaactcatatatgtagatggcttcgagcagtgcctggcacacagtgagcactcaatgaaagccagctyttatcagttcatcttctctcttgactcaacggaatagataataatctgctataaggccaacccctttggagaagttccagatccttcccctcccacctactcagggatggcactcgtgattaacccttctctactggaggtgataattggcatctaaacatgctgctcccatttcaaacacacaccctcccaatatgccaaataccctccagctaccgccctctgcctccctcctcctttcacagccatcaggacagagtggctggcacgtgttctcttcactgcctcgcatcccactggcccctcagccagctgtgaaccgcttccagctccccactccccttacccgctcttcctgatatcatcaacctcctccttgagacattgcccagtaggcgcatctcagtcctcaccccaccctgactacaa

SEQ ID NO: 478329 - DNA, 582 bp, Homo sapiens
ggccaggttctccgcttcattgaggccttccagtgagcactttctcaggagctcagagttgctccaggcaacgggaactgtggcctaacctaccccaaagccaaagagtggagatgacagcgatggccggctcctttggctggaaggctgaggtagtcagggagagatgagcgactttcctaccagcctttggctaccttctcagaacaatggatagaagggtcctactcccagattctgccaggccagcttccagtcaaggtcaggcctggtctgaggagagcgggtaaggccagggaagggagaggacagagcccagaataagcctcgatgtctacagccctcctaccaggacttgatctgtttttcagtgtttggcttgatcactgctttctgagacwagactaacgcagagaggggcgacaatggggcaggaagggagtacaggacgggggctgggggattctgacaaaggggctaggcccccatccccacatctggattgcttcagttttccgttactagtaggtacagacagccccgctgctccaggtggggggttgggggggccctctcgcctgt

SEQ ID NO: 478330 - DNA, 599 bp, Homo sapiens
gggctggtgagttcagggaagaggaattgaggatggccggtcccaccactatgtaatgagaaggctgaaatttatgtggagacctggagcatgggtaggactctggggacayagccgaatttccagggtgcttggcctaggcctgccggtgcctaccccgtcttatcactcctccagggagccctgggcatcactccattccggagtcctgaccccaaccacagtctgctcctcctgtgtcccccggcagcgtcctcgctccttgcagagtttgcctgatccacctcctagcacggggctccctacggagcctgggccacagctggaggggcaccctctctacggcgggcccgccccctgccccgcgcgccaggcgggcgtggcccgcggggcgggcgcccggcgaggggctccggcgcggcggccgtcactcacgcactcacgcgggaggaatgcagacggcagggctgccctgtggtcacgtccccgccccaccgacggaggtaggcgcccaggtacccagcctgtgggccttgggagcccgccaagctgctgatgaaaggcgctgccagattaaccctttcttggccgcaccccct

SEQ ID NO: 478331 - DNA, 511 bp, Homo sapiens
gaggggcaccctctctacggcgggcccgccccctgccccgcgcgccaggcgggcgtggcccgcggggcgggcgcccggcgaggggctccggmgcggcggccgtcactcacgcactcacgcgggaggaatgcagacggcagggctgccctgtggtcacgtccccgccccaccgacggaggtaggcgcccaggtacccagcctgtgggccttgggagcccgccaagctgctgatgaaaggcgctgccagattaaccctttcttggccgcacccccttgctgctgccggctgccgggtggtcgcagagcaggagggtgaggggcaggagaggagtctagacacgcctggctaacgagggggcggctttggcctctgcgcgcttgccgggtgggtgcaggtcccctgcccctgccctccccctttctctggccttaggaccctagggctgacatggttgagggacaggactcccaataacatcataaacctcaccacggggattctccactgggc

SEQ ID NO: 478332 - DNA, 567 bp, Homo sapiens
acccacaggtacctggccgccatggcccactctggtcccggcacccccgcggggctgctgagcagggagggccgtgtgaggtgcccacaacagccacctcttctgggccagttttggttcctcctcacacttagcacaatgcctgctggcacaaatgagtcaaaaatgcttggggggaatcaaagctatgaatgaatgacgattgaataaataaatgatggatggataaacaaatccatcaaccaaccagttatcggagttccagcagccaatccttcagaaatgggcatgcttgccacctggtggcgactgcgctaactgcagccatggtcagggccagcatcaccggtcaccacacagcagaagcctgggctgccaccaccaaggcagatcccggggtcaccctgttcctcctcctgcctctcagccatgctgccttattttccagcacacttaagcaattttctgttatgtttgaaaaccctcttaggtaagagattccttcctcgcctgtgccctttggaaactcctacstatgccctgacctttgttttcgtctggttctct

SEQ ID NO: 478333 - DNA, 554 bp, Homo sapiens
tgggagggaaggagacaggatgaaggtgaagcaactgacaactggagagaaagcaactggagagaaagctacgaacttcagatcctgggagggaagaactggaggtggaaaacctcccagtaccctagagcaggaaggacaccttggaagaaatgtaacggagcccccatcctgtgtgggggtcccccctcatgatagctctcacaacacttcagtgaggggaagcttaccacctatcagtgaggcgaagcttaccactggccatttagcccagtctgtggtgggacagctccagctaatgggtgagggcttccataagtcctgttcagacaggtaaatgtaaaatgggtcaatgaatggacagatggatggataagtgggtgggtgcagaagaacacacaggcatggaggcagagggttaaaaagcaggtctccacatccctgcacccaaccccgtcgcaccagtcctgatcctccctckatctttcctaccctcctccaggaagcctgcccttacctccccacccatccaactttctcctcaatctcacctg

SEQ ID NO: 478334 - DNA, 638 bp, Homo sapiens
gaggtggtgcaacatgaaagagaagacagagacgggcttgggagaatgtggggtttggagctcaaatctgactggatttcaaatcccagccyggccacttactagttatgtaacattgggatggttcctaaattgtcctaaattcctacctacctgatttcttcaaagattaactggaattataaaggtaaggcacttagtgtgtttggctttaagggccatagaaaaatgaggaaggcatggtttctatccaccaggaactcacggctgagtgacagggacagatgcctaatggtgatgtctggcatttattgagtaacctccagggctggttgccccgctccacatgcttcatctctgttgctcgcagcaactgaagcagagacttgactaactttgatttgcaagaatgaaactcagatccagagaagctagttgatggctgagctaggtcaggtctgcctgactccgaggctggggtgcactcactgccctcatgcccacactgcccacactgcctctacaagcaagcaggtaccaggagtgtttggtattataataagatgctgtggggcatagagaggagagcttccatggagaggaaagcctggctgcttcacagagggggtggcatttca

SEQ ID NO: 478335 - DNA, 610 bp, Homo sapiens
ttggcctggacatattgttaactaggctgtctgaatctcagtttccccatctgtaaactgggrgtaataataccatagagtcaatatgtgagttaaataaagtaacatgcataagtgttcagcacagtgcctggaaaaaattacaagtttgattaatctgctactcaatttccaaaagggactcacttgtataaaaaagaaactaataattttgaaaaaactcattaagttagcctgctgtcaattatggaaatgattctgatggggtctcttccttgcctcccatcctcccttggggtccccctccctctctttctcccttccttctcaaaatgctctgtttatcatcagctatcgatatacaacatacagccttggtgttttcatttcttttttttttttttaatccctctcaataccaagaaaaactttgagcagaacacgggatccatggggcatccttgtgtaggtcctccgtggcttggatccctgtgcactgctcagctcggcagcctttcccagcggcgctcaaggctcagccggcctctgtgcgaggctgcccagtacatgcggggcgagctctggactgacggcgctcccactcccagcg

SEQ ID NO: 478336 - DNA, 396 bp, Homo sapiens
tattcattatgtgtttccacgggttcaggcgtcttccatgcattagttcatttcatcctcacaacacaactaatacatattattgtcrtctccacttttaggagaactactggggttctgtgtggctctcttgcccttgacagacactgtggacacagtaatgaattatccaattcctatcctgcagaggcttgaaatctcaatagaacatagcacaggggcagggagggggtgatggggaaattgtgggtgctgtgagagcaaagagagggcaatgtgactgatcctgggaggctggtgtcaaggcaggcctcctggaggaagtggtgacccaggagctgaattagccagacaagggggttgagggtgttacagacagaggcacaggcgaagagg

SEQ ID NO: 478337 - DNA, 396 bp, Homo sapiens
tattcattatgtgtttccacgggttcaggcgtcttccatgcattagttcatttcatcctcacaacacaactaatacatattattgtcgtctccacttttaggagaactactggggttctgtgtggctctcttgcccttgacagacactgtggacacagtaatgaattatccaattcctatcctgcagaggcttgaaayctcaatagaacatagcacaggggcagggagggggtgatggggaaattgtgggtgctgtgagagcaaagagagggcaatgtgactgatcctgggaggctggtgtcaaggcaggcctcctggaggaagtggtgacccaggagctgaattagccagacaagggggttgagggtgttacagacagaggcacaggcgaagagg

SEQ ID NO: 478338 - DNA, 537 bp, Homo sapiens
caaagcaatttggtagctttccaaccaagccatgcctttgtctttgtaaattatcttggcctggattgctgttctcactttgtactagaaattcatatatagtgcaattgttacttcttccgggaagctttgcctggccttatcacaaaaaattcagtatttcctcctggctattatcctcraatcttgttcatatctctattatattatttatcgtattgccatgattattagcttttatgtctgtctcttgcacttggctatgagtactgaaagataggacagtgttctttatagttgtgtgtgtgtataatagtttcaaaattacaatactgtattattactaacaatatgattatggaaaacagtttaaggtcattttattacagtgctcgttgtcattagagtatattttgcacaagctatacagtcaaataattgtttcaaaatcccttggggaaaaaaatctggataaattatcagctttattcatttgttataccttcttggaaaacggatcctttcattattatttag

SEQ ID NO: 478339 - DNA, 597 bp, Homo sapiens
ctgctgccatcatgaccaaccagaggcagaccttgttcccctmctaacatcctgccctaagcacgagggaaagaaaatccctttccttggctcctctttgaccaagttgacattgtgaaaagcagagaatgaaaatctgatagtcacagaaaacacaaacacagtagaaataattaaagctcctgaatacaggtttcagatcctgtaataactcacatcttctatgactttttaacatcccagcccctgcctgtttccctgtgactgctgccaccctctcaccctccttgctcttctctctccctgctacaaggccccaggacctattgtgcctacttaggatcctgcctctccatcccagggctgtgggacacagggagtctcaagagattgacagtggagtacaacccaagtgagactctgtccctgccacaaagaccgtgccctgtccaaggccacgtagagccatacaatatcccttgatgagtgtgctgtgtgtacatggggagagggacagaccctccacctgtcttcccagagctcacaatacattccaaattaccggcagttacgaattggagggctccagtcagtggt

SEQ ID NO: 478340 - DNA, 597 bp, Homo sapiens
ctgctgccatcatgaccaaccagaggcagaccttgttcccctcctaacatcctgccctaagcacgagggaaagaaaatccctttccttggctcctctttgaccaagttgacattgtgaaaagcagagaatgaaaatctgatagtcacagaaaacacaaacacagtagaaataattaaagctcctgaatacaggtttcagatcctgtaataactcacatcttctatgactttttaacatcccagcccctgcctgtttccctgtgactgctgccaccctctcaccctccttgctcttctctctccctgctacaaggccccaggacctattgtgcctacttaggatcctgcctctccatcccagggctgtgggacacagggagtctcaagagattgacagtggagtacaacccaagtgagactctgtccctgccacaaagacygtgccctgtccaaggccacgtagagccatacaatatcccttgatgagtgtgctgtgtgtacatggggagagggacagaccctccacctgtcttcccagagctcacaatacattccaaattaccggcagttacgaattggagggctccagtcagtggt

SEQ ID NO: 478341 - DNA, 474 bp, Homo sapiens
cacagtcatgaaaccatcagtttctcgtttgcactgaggaaagaaaaactgtacagagtatcggcagacttgagttctagaaagcaaattgcctagttgatttaaacttcaggcagtgcgactgctctctctgaaggcttgggattttggaaccagatggagaacagcccagaagccgggaaagttcccccacagaggacggggtgcaacaaggatggtactgctgattggatttgccttggctgtaggaacatggccacaaaaaggaaggaaaacctccraacatcagcaaaggaacatccctcagttgggcaaagcttcttgttccccaagagaatctgagggagctaggcccctgaagacacaggagtgggaaaagcatggagaggtctgactatctgcatggctgtaccatgatctcaggcttcggttggttggtctccttcgtgataaaaccagcaggaggggtgttca

SEQ ID NO: 478342 - DNA, 510 bp, Homo sapiens
tcacctggttgctggaagtgagttctgtttctcaaccctgggattgaagactgactttcaataatttgattgtggagttcttagccttcctgaaacagggctccatttggatgctttgcaaagccaagcagagaacatgtccttccagtgagaaagtagcccatgggtcttcattccaatatacctctgtggtttctcaatgcattygtccattctaatttttctgtctacctaaaatctccaagaatagaaagaccactttttccttatttgatcatcacatactgcctaaaatcacatcttgctcaacagtaactgttaagcggaagatggcagtagtgccaggaaattatcagaggaaaacagaaacaaaacacaacataagcctggtcagtcacagtttcccttgatcagtaaacaaccaaggtcggtggtgactcccctttgggagagaggacaccatttgccactgtcacaactggccctgtatactgtcgggttcagtggcag

SEQ ID NO: 478343 - DNA, 509 bp, Homo sapiens
gtccgttgcatagggtaagaagacatcagagattttcccaagctcacccatggtggggccaactggatctttagaccaaccttttcccaccaaacctttggttccttgggctattggaactccctgcgttcagcaagggaaataggcactagatgaagacaaggctatttacttttcctcacttactaatttgcttaagagcatttatgaaaaacctactaagccccaagcactaggtgagcccctaagaatagaaagatgaaaaagtctcagttcctgccccaaagaactgcctctttcccagtgtggggatggacagacstgggccatgactagacaaagccatctgggccctgcttcagttatgtgcctgggggagtccagagaatggaccaccaactgccttggggagcaggcatgactttgaggaagaggcgaggtctgggctcacgtccaagttctctggcttatgaaacagtattctgcccctctttcacacatcatatttc

SEQ ID NO: 478344 - DNA, 481 bp, Homo sapiens
gaacaggcaggattccaagagcttccggagagatgtgagcctgcaaggaagatgctgaagaagcccaaaggaggaaatgagaacaacgtggccaacgttgtcttcaggcttggaagagaatctgaggtcacagtccctctgccgtccttcctttccaccctcaccagtattctgtggccaagggcaggccttagcatggactggctaccattttaccccatctctgccacttggcttctgtgcaaygttgggcaagcgacttcttccctctgtgagcctcagtgtccccatctgtaaagtggggaggatggtgatgcatgggccatggtgagggcttgagatgacagtgcacagtgaagccacggtaaaatctgcatgtgaggggtctcattcgttattctgatcaggtggagcttttgttttacagataagggcactgagggcccagagtgggaaagcaactcacccacatcacatagcc

SEQ ID NO: 478345 - DNA, 512 bp, Homo sapiens
tcatgagtgcacacacttatggttctcatgtaagttatgctcacacaagcacatgagcccacacctgcatgagaatgcacacatatgcacacattcacacacgtgtccacacacacaccttactctaccatgaaagcaaattgttcgttttytcagagtcttaaaagtcaagtccaagcaagcacacagtggaattgctcctgttccccatgaattcactccatgtcactgggatggggtctgccttccccactgatggtttcagcataaacccggggcaacccacaagcctcagaaccacgcagaaaaaaatcacactgaccagtccactgcattccctgacaatttcatcattcccccatgtgtgcatacgcaggcacacacacacacatgcgtacacacacacacacaatgctgtaagacacttctttccccagcttgacttttcctgccaagaacagtagccttgtctgcccagcatggggtagttctcaagcgtcagctgagtgccc

SEQ ID NO: 478346 - DNA, 477 bp, Homo sapiens
gccagtattaactgcagggggacacaacccctcaacttggcccattagaagccccctccccttcccctagagctgtgatgaggagacggccttyttcctcccaaagtttaattaagtgacctgcctccatggggttgttaatcctgttaccgctgcctggcgctgaccacaggggaaagcgtggggcggtgtaaactgtcagttgtctagaaggcctggtggggcactgaaagccactggaatctggggaaaggtagggggtgggatggaagccggagcccccatgggggcaggatatctgctttccagacggaacacaaaggggctaagctcagtttgaatcccgtcccaggaggagatggggaggaggagggagtttgctaagaagcttctggcttggatgggctttgctttgactgctgcccatccgggtaccacattccagagctgaaacctcagctggctcacattcctgcc

SEQ ID NO: 478347 - DNA, 575 bp, Homo sapiens
tggttttcacaacatgtcatcagctgttgacacatggatggatatgtccctgcctatgcaatgtctttgccttgcaatgtctgaaaggatggatggagactaaagggacaaagagcagggacagaggctatgtggccttggcatttggagagcacaggccaccctccagacttcaaagcaaatatagcaatccagcagaacatgccaaattgagccctggctcccattctgtttgccctatacaggttatacattttttaaattactcgaagatcctacataagcattttatgcctctcactatttgagcacttggggtatgccaagatttttgcataatttttgtgttttatctttacagtggctctgtgaggtggatgcaatgagtctcatttgatggataagaaaagtgatgctctgagagacaaatatgattcctaaaaccacacaggaggctagtggcagaaccacacaggaggctagcggcagaaccacacaggaggctagcggcagaaccacacaggaggcyagcggcagaaccacacaggaggccagcggcagagtcaggatgtaaa

SEQ ID NO: 478348 - DNA, 561 bp, Homo sapiens
caatatagttctggggtcagtaacagtggctttgggggctgtaggcagagtgctctgaggccctgggccagactcaggggctgggccaggctgttggcatgctgctgtttctctrgaggaattatgtcctgcagccagaccaggtaaggatgaaagccctgtttctgcggcaactttgccctgccaagcatggaacttgttccaggaaggaagcagagcttgtggagttgtacctgagtctgagttgtactggagggcttccagggcctgacagagcagacccaagctgttttcctgcaggaggaaatctagtgctgggcccctagccctggttctctagcaatcctactgcattccctagaagccaaggggacaggtcttctgaagcgtgctggcctaggagttcctggctgattttgagggataaattaagagaaaaaaatcttttggggtagactgaaaaggcaaattcctatctcttttcttgaggcttctgtgtcaaatcctgttaaaatatggagaagattctcaagccagaaggccaggaagtcctgtatctac

SEQ ID NO: 478349 - DNA, 640 bp, Homo sapiens
ctaagtcagtaggttagacaatgctgtgtctaaatcaacaagaaaagtctaaaaaatctgcaagcccatggcagagttacttaggcctagaagtatcacaagatttaatcaaacttgttttttagtttgagaacgatgcctttcttcccagtgcacagatctagatttgaggctcgtttttaaggaaacatttgttgrtttggcctattgttgaaagctttttacctcccctgagttaggtcatcagtgtgaattgatggttatattaaagtaaattcccagcaagtcagaaatattttagaaagcaaactgaattttggaaacatttctattgtgaatgtcgtgcctctcttctttagtgtcaagaattctgtggaggagagcggggacataatggagagggatgggttctggaatcaaactgcagtagttcaaatctggattctgccacttaccatgtggccttaggcaggttccttagctttgttctgtctcagtttcctcatctataaaatgaggataataagagtatctactacatagaattgctgtaaaactaagggatgagaacagtttatcaggctgtgggtataaatgaaggctcagttaagtgtgatggtgataattccgaggtgccgct

SEQ ID NO: 478350 - DNA, 503 bp, Homo sapiens
ttcatctccaccgtctgctcatctttcaggtctcagtttacagggcacttcttctaggtcgtctttctgcccccmaccacctgctccccaaataccttctccttcccctgttgtgacacctgtggcaatttattttgatttttgtttgtttgtttctcctctattagacctgggctctatgaaaacagggagagcgttttgctcactgtcatatccagcatgtagagacctgcctggcacacagggaacactctttaaatagatgttgaataaatgttgggagggagggaatgagaatggatccaggtaacttatgaacggattgtttgactatggaccctgagtctcatgacaggaggaaagaaaggagatttcacaattctttagcagtaggagttgttgttttaaaatttgcctctgtgggcccttacttgtaagcaaggcatacttgtatctcagaaattatttcatcttacattatgtttcattaaaggtttatcaac

SEQ ID NO: 478351 - DNA, 437 bp, Homo sapiens
tgcacttgccacaagaagtacagatttcagccaaccatctgctatgcttgtgaaaccatcaaaacccaaccttccctcaaatattggaatcctgtgattttttttttcaaatgtagtaaatttcatgtttaaaatgcataatagggctgggtgcagtggctcatgcctgtaatccccacactttgggaggccaaaatgggagaattgcttgaggccaggagttcaagaccagcctggtcaacatagaccccatctccattaaaataataataataatataaaatgcataacgataagcatcatttgtcatgcccacacatttaagcaaaaaattatgctgaaaataaaattatgatgcttgttgaagcactaatagaactttaatagactgatttagtttgttttgatwtttttcttattaaattaagaactacaag

SEQ ID NO: 478352 - DNA, 674 bp, Homo sapiens
gaagaataacaggactaatatggctagactgcagggaaccttggaaatcaccaggaaatgaggtcagtcagcctgagactttaggtttaaaaatataattgtttaatgtgttatcaatggaataaaatctgggatttcaacaatattcacttttctctttaatccattttgcctaaatacttaaaagctagaggaaaaatctactaaaatattaattagctgttctatttacatgatctaattttttatcatattcttatggcatactccaaaacttttgtaaatgttgtctaacatcagggtctaactccatttctgtaaaaggaagcaatgtacaactttaaaaggcaatgtgactaaagatgttattggaacaactaggaaaatatgagtataaactgtatattagatattagtactatgtaagtattagattgaatgcagtaactrtattgcaggtatacagaagaatacttttatttttagaagacacatgcagtggtatggccgtaaatgtttaacggctggctcagagaggaaaaaaggccttggtttgtagcactgccaatttccatggtataaataccattaccatggctgatttcaagtaaccaactaggtgaagagttgaaatgaaatatacacaatcggcttttgcaagccagtacctgcca

SEQ ID NO: 478353 - DNA, 583 bp, Homo sapiens
ttacaactaaaaatattttgacgtttaaaaagtttcaattatccagaaaattcatttatataggatagttctttggacaccaatgtagtttaaaaaaaaaaatgaagtgtaactgttttctcgttaagagttgtccataactctgcctttcaaattgcaggtcatcatgacccattaattggtgaagaaatcaattcaatgggtggtgacagcaatttttcaaaacgtgaaatagaatagaaaatacaacattacattgcgcacagtaagggtaagtacgtttgtgaaaagcttatttcaatatttctgtactagtttgctaagtaaaagattacttacactggttttagtaaaagaaaaaaaaagccatgggtctaaaggtttatgytattattatggaatataatcacaatactaaactcacaatcccatcatctttacctgagaatgctaaagaaagctacaatttttaaggtgaaaacttctttggaaatcttgatgaataaatttgtttcccctaaaaatctatatcagtacgtaactaaacattttattgtgtttaacactagttttggctgcaaat

SEQ ID NO: 478354 - DNA, 606 bp, Homo sapiens
aaatttgcaaggctctttggtttcattagaaaaagttttttttttagatataattttgcataaaaggatcacaggaaagtattaggacaagtctaaggggattttttttatttgtgcccttctgttttaaaattttttttacaatgagtctattattttcacatcagaagagttttataaactgcaagattggcagttccatttttttggcctcaggtaaagttcttatgaaaaaggcatgaaatatttaaaaagtaacattttctagtgcttagatatgtacagtaaaataacatgtacaactgaaattgttaaccttaactccacgattgtatctaatcagagcggagagaacattcaggagggtaacatttcattttctctgaaatgttctggcatcatgacgatgaaactgacaaatggaaacagttctttaatctataaaatgctacaaatgttaaatcccagtggatttgactttgatattattgaatactggattatgtagtttttaaaaaatgaactgaagttttacttgttctacaakcacttggtaatgggagacagaacagttacagataagccaaaaacctaaatttagcacaa

SEQ ID NO: 478355 - DNA, 570 bp, Homo sapiens
tttataagtaatgatcaaatgaacaatgcttcttactcctagggtggacaactactgcctggaatctctatgttctcctgcaacaccagcacttctggtcagtctaccttcctcctcactggttttccaggcctggaagcctctcatcattgggtttccatccccatcaacctcttctgtgtggtttccatcctgggtaataatatcatcctcttcctgatccacacagatccagccttacatgaacccatgtatatcttcctgtccatgttggcagcctctgatctgggcctctgtgcctctaccttccccacyatggtgcgtctcttctggctgggagctcgtgagctgccctttgatctctgtgcagcacagatgttcttcatccataccttcacctatgtggagtccggtgtactgctggccatggccttcgatcgctttattgccatccgggaccctctgcattatgccataatcattacctgctcagtcacagccgaggtgggaactgccattctggtgagggctgttctgctcaacctcccgggacctatcctcctgcagcag

SEQ ID NO: 478356 - DNA, 455 bp, Homo sapiens
tcctcactggttttccaggcctggaagcctctcatcattgggtttccatccccatcaacctcttctgtgtggtttccatcctgggtaataatatcatcctcttcctgatccacacagatccagccttacatgaacccatgtatatcttcctgtccatgttggcagcctctgatctgggcctctgtgcctctaccttccccactatggtgcgtctcttctggctgggagctcgtgagctgccctttgatctctgtgcagcacagatgttcttcatccataccttcacctatgtggagtccggtgtactgctggccmtggccttcgatcgctttattgccatccgggaccctctgcattatgccataatcattacctgctcagtcacagccgaggtgggaactgccattctggtgagggctgttctgctcaacctcccgggacctatcctcctgcag

SEQ ID NO: 478357 - DNA, 455 bp, Homo sapiens
tcctcactggttttccaggcctggaagcctctcatcattgggtttccatccccatcaacctcttctgtgtggtttccatcctgggtaataatatcatcctcttcctgatccacacagatccagccttacatgaacccatgtatatcttcctgtccatgttggcagcctctgatctgggcctctgtgcctctaccttccccactatggtgcgtctcttctggctgggagctcgtgagctgccctttgatctctgtgcagcacagatgttcttcatccataccttcacctatgtggagtccggtgtactgctggccatggccttcgatcgctttattgccatccgggaccctctgcattatgccataatcattacctgctcagtcacagccraggtgggaactgccattctggtgagggctgttctgctcaacctcccgggacctatcctcctgcag

SEQ ID NO: 478358 - DNA, 565 bp, Homo sapiens
acttttctcttcgtgtttcctgtgcattgaagcccttccctttactcaacttctcagattggagccttccttgaagcccatcatattctcataaccccacattgaatcaatctaccaacaaattctatcaactggaccttcaaagtatatcccaagtgtaatcacttctcattgcctccctgctgccactctggtcyaaggcaaaatcatttcctgtgttggctataacaataacttttgtaacaataacgactcttttatccttgtcccttacatcgaacccggtgcaggtattttaaagtttaagtcacagtataacagaaccctgttcaaaagcttctaatagctttccaccacagatcaaacaaaattcagtcttcaccatggtttacaaatacctttttggtctctggacctttgctacctctcctaccatctcctcctagtcactccagtccagcaactggtggccttatactgtccctcaaattcaccaaacacattccagaaatcaaggcctgtatgtctgttcctttcgcctggagcactgtcttccatacagctg

SEQ ID NO: 478359 - DNA, 536 bp, Homo sapiens
taaatggatctaaatggctataggaaaaaaggagatgcgcgcttaaaagaactaaacttcctagccgcaatgttaggagaatcactggaatgaattatagtgaaagttgtgtaccttctttctctgaacctttctgaaaagtgaaaagacaggagaaggacaaggacaagttagctgtcctcatttgcagtgttcactccatatgtctcctcctgacagatgctttgraaagctttatcttgactggtttgtcagtgtaagcaccttctcatctcaaggttttttgcacaaagactttaattggttaagccaatttgtagttgtaactacaaatacccactttgcagcaagagctgaatcacaaatcacttttaaacattattttctaatcatagaaaatggattggggagacagagagggaaaaaacagatacgtaatctgtttgaagtgacttaaattaactcttcctttgagccagagggctatctctgagctttccacagccacaaaccatttcctaaagatattcttctta

SEQ ID NO: 478360 - DNA, 536 bp, Homo sapiens
taaatggatctaaatggctataggaaaaaaggagatgcgcgcttaaaagaactaaacttcctagccgcaatgttaggagaatcactggaatgaattatagtgaaagttgtgtaccttctttctctgaacctttctgaaaagtgaaaagacaggagaaggacaaggacaagttagctgtcctcatttgcagtgttcactccatatgtctcctcctgacagatgctttgaaaagctttatcttgactggtttgtcagtgtaagcaccttctcatcycaaggttttttgcacaaagactttaattggttaagccaatttgtagttgtaactacaaatacccactttgcagcaagagctgaatcacaaatcacttttaaacattattttctaatcatagaaaatggattggggagacagagagggaaaaaacagatacgtaatctgtttgaagtgacttaaattaactcttcctttgagccagagggctatctctgagctttccacagccacaaaccatttcctaaagatattcttctta

SEQ ID NO: 478361 - DNA, 536 bp, Homo sapiens
taaatggatctaaatggctataggaaaaaaggagatgcgcgcttaaaagaactaaacttcctagccgcaatgttaggagaatcactggaatgaattatagtgaaagttgtgtaccttctttctctgaacctttctgaaaagtgaaaagacaggagaaggacaaggacaagttagctgtcctcatttgcagtgttcactccatatgtctcctcctgacagatgctttgaaaagctttatcttgactggtttgtcagtgtaagcaccttctcatctcaaggwtttttgcacaaagactttaattggttaagccaatttgtagttgtaactacaaatacccactttgcagcaagagctgaatcacaaatcacttttaaacattattttctaatcatagaaaatggattggggagacagagagggaaaaaacagatacgtaatctgtttgaagtgacttaaattaactcttcctttgagccagagggctatctctgagctttccacagccacaaaccatttcctaaagatattcttctta

SEQ ID NO: 478362 - DNA, 536 bp, Homo sapiens
taaatggatctaaatggctataggaaaaaaggagatgcgcgcttaaaagaactaaacttcctagccgcaatgttaggagaatcactggaatgaattatagtgaaagttgtgtaccttctttctctgaacctttctgaaaagtgaaaagacaggagaaggacaaggacaagttagctgtcctcatttgcagtgttcactccatatgtctcctcctgacagatgctttgaaaagctttatcttgactggtttgtcagtgtaagcaccttctcatctcaaggttttttgcacaaagactttaattggttaagccaatttgtagttgtaactacaaataccyactttgcagcaagagctgaatcacaaatcacttttaaacattattttctaatcatagaaaatggattggggagacagagagggaaaaaacagatacgtaatctgtttgaagtgacttaaattaactcttcctttgagccagagggctatctctgagctttccacagccacaaaccatttcctaaagatattcttctta

SEQ ID NO: 478363 - DNA, 627 bp, Homo sapiens
tgacttgaaacaaaacaaatgcccataaggaaaaaagctgtattttatctaaatttactttcagtcaatagttcagtaacattttcttcccaatacaatactccctctctctataaggctgttcctgggagccagacaagtttaggtaataagggagttaagagagttaactgcttgcagttttaaatagacagtaactttgcttccctcttaatgtrctaatagttgtgtctaaaaaaatatgcaattcttaaaaaggtaccatttctgatttctttattatctgtaacctttggaaactaatcacatgaaactacaaaattagcaaatgtcttgaaatctgtatataaaacataaattacctctaatttcaaactctcatttattagtgtaccactcaatcttttaaaaaaatgaaaaagaaaaaaaaagcggctccaaagatagtcttataccattctttaaaaaaggaaactgttccttttaactttacacccaccccacaccccaatttcaaaacatcatttaattgtcttggtcatggacatttccaagatgagattttatatttcgctcccacagcttctggttatcagaaaacccatgctttcctttattgaaggagtt

SEQ ID NO: 478364 - DNA, 526 bp, Homo sapiens
tcttcccataccaattcctttcacagggcttctttcctatgtgggttttctcatgcttggtaaaggtggagccagcaytgaaggctttcccacttcttgcatttataggatttctctcctgtgtggattttttgatgtacaatcaggttgtaattcttagagagggattttccacagtcattacaggtataagggctctctccagtatgagtcctctggtgactgatgaaatgagatttcggtctaacggacagtccacattcactgtcattgtattcatttccagagatacttccattgtgttcataaggacatgtgtccctatcaaacacctcctcgtgtccttctcctttgtgttgttcctttctctggcaattacatgttgttcactaaggtgtgtagaaaggctgaaggagttaccaccttcgttacattttgaaggctcatctccttgttagatcttcatcaaggtggctaggttgtccaccctggctgatggctgctctacagtcatcattttcctcaa

SEQ ID NO: 478365 - DNA, 526 bp, Homo sapiens
tcttcccataccaattcctttcacagggcttctttcctatgtgggttttctcatgcttggtaaaggtggagccagcactgaaggctttcccacttcttgcatttataggatttctctcctgtgtggattttttgatgtacaatcaggttgtaattcttagagagggattttccacagtcattacaggtataagggctctctccagtatgagtcctctggtgactgatgaaatgagatttcggtctaacggacagtccacattcactgtcattgtattcatttccagagatacttccatygtgttcataaggacatgtgtccctatcaaacacctcctcgtgtccttctcctttgtgttgttcctttctctggcaattacatgttgttcactaaggtgtgtagaaaggctgaaggagttaccaccttcgttacattttgaaggctcatctccttgttagatcttcatcaaggtggctaggttgtccaccctggctgatggctgctctacagtcatcattttcctcaa

SEQ ID NO: 478366 - DNA, 526 bp, Homo sapiens
tcttcccataccaattcctttcacagggcttctttcctatgtgggttttctcatgcttggtaaaggtggagccagcactgaaggctttcccacttcttgcatttataggatttctctcctgtgtggattttttgatgtacaatcaggttgtaattcttagagagggattttccacagtcattacaggtataagggctctctccagtatgagtcctctggtgactgatgaaatgagatttcggtctaacggacagtccacattcactgtcattgtattcatttccagagatacttccattgtgttcataaggacatgtgtccctatcaaacaccwcctcgtgtccttctcctttgtgttgttcctttctctggcaattacatgttgttcactaaggtgtgtagaaaggctgaaggagttaccaccttcgttacattttgaaggctcatctccttgttagatcttcatcaaggtggctaggttgtccaccctggctgatggctgctctacagtcatcattttcctcaa

SEQ ID NO: 478367 - DNA, 536 bp, Homo sapiens
tatagattaactatgtgtttggcaaagtgtattcactgggcagatcctggaatactgacacactgaaaaatactacagaaaaaactcctgatggagactctgattcagcttgtgtgacactartattttcattttgggtggtgagcaaatgtctttcctcactcagagaagggctcagtatccctaaacagcatagctgagttatgactggcctaatttagagctgcaccaacttcatgtaccaaatagggacaccgctggcctctgtgcttccctctgactcgaatacaccagaactgggatcatttctgcaccctggaaactgacctagaggtcctcctttgtcacatgcactgtcattctgtctcccagaggggctcacgggttgactatgcctatgtggacaaagtggaatcagccctcagtggtcttctgtccatagacaacatcaaattctgtaattaaatctccgttggcatcaaacatgatctctgtcccatcaggggtcttgaagtgcacgttcttgagaggacgaa

SEQ ID NO: 478368 - DNA, 536 bp, Homo sapiens
tatagattaactatgtgtttggcaaagtgtattcactgggcagatcctggaatactgacacactgaaaaatactacagaaaaaactcctgatggagactctgattcagcttgtgtgacactaatattttcattttgggtggtgagcaaatgtctttcctcactcagagaagggctcagtatccctaaacagcatagctgagttatgactggcctaatttagagctgcaccaacttcatgtaccaaatagggacaccgctggcctctgtgcttccctctgactcgaatacaccagaactgggatcatttctgcaccctggaaactgacctagaggtcctcctttgtcacatgcactgtcattctgtctcccagaggggctcacgggttgactatgcctatgtggacaaagtggaatcagccctcagtggtcttctgtccatrgacaacatcaaattctgtaattaaatctccgttggcatcaaacatgatctctgtcccatcaggggtcttgaagtgcacgttcttgagaggacgaa

SEQ ID NO: 478369 - DNA, 536 bp, Homo sapiens
tatagattaactatgtgtttggcaaagtgtattcactgggcagatcctggaatactgacacactgaaaaatactacagaaaaaactcctgatggagactctgattcagcttgtgtgacactaatattttcattttgggtggtgagcaaatgtctttcctcactcagagaagggctcagtatccctaaacagcatagctgagttatgactggcctaatttagagctgcaccaacttcatgtaccaaatagggacaccgctggcctctgtgcttccctctgactcgaatacaccagaactgggatcatttctgcaccctggaaactgacctagaggtcctcctttgtcacatgcactgtcattctgtctcccagaggggctcacgggttgactatgcctatgtggacaaagtggaatcagccctcagtggtcttctgtccatagacaacatcaaattctgtaattaaatctccgttggcatcaaacatgatctctgtcccatcaggggtcttgaartgcacgttcttgagaggacgaa

SEQ ID NO: 478370 - DNA, 492 bp, Homo sapiens
acattctccagcttgctattccaagcacttggttgcctgcttccagttaatctctccaagttcattccttcctcccctgcctgtctcctgtgcttcagaatccctgatggaccctccagcctccacaacaaggactgtatggtatttctctttgtggcactggtgcctaacgccattcttggctcatggtagctgtgcagaacatgttattgaagaaatgaatgatggatgcatgcatggatgatttttaacagcagttatcttatgcctccttgaagcctgcttagtaaacatttgckgaaggatagcttccaaaacttttggattcactttgtcactgttctgagcaccttagttccagattttaatagctaggccctcccggtcatcttcatcccttcccactttcataaggagtggagagccacagcccctcccaccaggatcagctccccatgggctgcaccaccctgtcccaggaaaccttcccat

SEQ ID NO: 478371 - DNA, 591 bp, Homo sapiens
tgctttccagggcagtagtgatcctccagcgctctttcccttggcctctccttgtttgtccactggcgccttctcccttgtaatttttattttattattctcctctcctcattctgaggaacttccaaatgtcattctttctttagtttttcacctccacagagccctccttttctttgtctccctccctcaggcaggctctttccctgtgaagggctctttttttctcctcctacagagcacactgaccttttcctcttctccgtaggacaaagcccggcctggcatgctcctaacgggaattggctctagaagttccggtaattgctctgtccttattattgaatctgtgaagccagttttggtcagggcascccctccctttcacccactcacttgctggagtcagactgcagatgggctgctaacgaggtgaccaattaataagcgctaaataaccccaaaatggtctttttctccctggcctgattttcaggcccctttgttcctccttgggaatctgtcctctatgacaagaccacaatggggactattcccaaacctgaccctgtgagatgctgacgcactcaa

SEQ ID NO: 478372 - DNA, 617 bp, Homo sapiens
cagggttcttgataaacacatggatccccaagcccaaagccagactaaaagaaaaatcagtatctaggtggtggggtaagacccacagacttatattttctaccaagcatctcaggaaattctgaggaacaaccaggtctgggaattgttgggttagatgtcctgggtgccatgttagagtagcctagtgacatttagaccactagttgatgctgatattgctgcaaaagcactggtgtagggagcagaagatgttggttcacacctggcagccaactgtgtggttcttaggtgaggcattcaccctgtctggcctgggtattagtgggggaatttaaatggggtgcaagagcacattggagatgtccttgagatgaagaggaccttcctcctggcccctcagcctcctctacctatatggggatgaagttcaagaagcaaaaggcacctggatacaggtccagcaaatgcatcacataccaagcctcctgaaagagtggaaggacccagaccccgatcccagttccctgcscctctgatagtcacctaggtctcccggaaatggcaccgaggcgaagctctaaatcacgtgcagaatatagtcgttctgtttgcct

SEQ ID NO: 478373 - DNA, 537 bp, Homo sapiens
ccaagtgcctgagggttgatggtctttttctaacgaagacccaggtcctttctcctgatattgaaggtctctcctctcaataaatgaataggctttttttttttttttttttttttagagatgaacgcttgctctgtcacccaggctggagtgcagtggcgtgatctcggctcactgcaaactctgcctcccaagttctagcaattctcttgcctcagcctcccgagtagctggaattacaggcacatgccaccacgcctggctaattytttgtatcttagtagagacagggtttcactgtgttgcccaggctggtctcaaactcctgagctcaggcaatccacccgcatcggcctcccaaagtgctgggattacaggtgtgagccaccacacccagccatgaataggtttttattgctcacctactccatgcttggccacataccaaagctcaatgagggacccatggcctatgtttgggctcctgcctgctcctaagtgctgaacttcacttaaggagaacagactttcacctgg

SEQ ID NO: 478374 - DNA, 530 bp, Homo sapiens
tttcctggtggtcccttccccaaccgtagactcacagcccctctctatcttctccaccagcycactgtgtcccttccttgcctctcctaccctgggggaagtgagtggggtttggcagtgggtccaagccaggagactaagagattggcaaagtgccaagagcaggtctgagtccagctgcctaatgccatttcctgagcactaacaaatccgactccaagacaaacagccagcagcacctgggagagaaggagagtggcagctcacgcagagggaggcaggggagagaggaggaaacgggactggaagaaagacaaagtgagaaaaaaaaacccacacagcacacccagcccaatggcccagaatctctcccacatctgcagaatcagaaacacttattaatagccagcaaaaggcaaagaggaagtgtctcattgtctgctgctgtcattcctcactctgacgagcacttaaaatgtcaagacccctttcagcagctatgcacaagcaatcaggccctctcgtcggtc

SEQ ID NO: 478375 - DNA, 476 bp, Homo sapiens
ttttaaaaaagaatatcactttgctgtcctttctaatatagcatttccccaattatgtacctgtttattgacattttatartgtaggtaaatttttaatcagtttttaattgatacctaattaacctcgagctcttgtcctcctgccttttttcacttctttactcttgcagcattccttcctagtagcttctgtatgtacactacgttgatagccatgactggatggtatatggacaagacttccattgctgtgctgggagtagcagctggggctatcttaggctggccattcagtgcagctcttgggtaagaaactaacagttctcctcccatatatcgctgggcatatagtaaatcttaatgttggattagctccatattgtctgcatagaatctgaagttaatcaattgggctttcaaagattctgggaaatggaagaatatttctcttagcacttactattatgattaatt

SEQ ID NO: 478376 - DNA, 640 bp, Homo sapiens
tgctaaaccaggagaacactgggcaacagggcctctccctctacagtttcatatccaagcagtggagaaaaataagaagctttacgataagagtgtcaccatttttaaaagtcagaggaatttaagtaaaaggcaagaggacagaacaagcacctgacctgtttggccaccctgccctgccatcgccacagggacagagccaatgtgacgtctaagggcaagccccagcctttcagtttagtgacaacacaacagttaacaaargaacaaaagtgcaccaggttaaccgccgggtcaggaaggacaggcttgcttccctggaagtctacgcaagcaacctgaatgcctggacaagccagctcaaaggtcaggctgccgtctctgttgagtcaggacaagttgtctggcaaagacccctggggctctgcatcacagtggctgagctgtggtatttctgtgagctgagggcagcccgttatttcaacaagacctcgttagaaaccacatattcacctgccttccttcttatgaaacaagatgcatcctcaggttcacatcttcttggtagcacagagagagaaacaagacctggtctcttaaacctgtgaggggtaaaccccacacaaattacagagagaaa

SEQ ID NO: 478377 - DNA, 630 bp, Homo sapiens
acgggcaattgactagctaaagagggaggggtgggtgaaaacattccaagcaacagtaagagctgtgtgaaactgaggattaaaaaattggcattttgaggaaatgccaatataaggaaatctaatatgacccccccgccaaaaaaaaaaaaaaatgaagaggggtcaaaaaaaatgaagtaagggtcaaaacttggaaatgtttttaaggatttttgattttattataaaggcaaggataagttaaataaggttttttttttttttaaaaaggtggtgacataattaggtttgcattttgcatcatttacaagaaaccacrtctgttgcattaatgagtgagagagatgatattggctgggactaaagcagtggttctcacctgggagcagtattgcttcccagtggatatctggtaacgtttgcagacatttctgattgtcgtaattctagggggagggcgggaaggttgctattggcatctagtggatagagggcagtgatggtgctaaacattctatgatgcatatgacagcctaccacaacaaagaattctctgatccaaaatgccaatggtgctaaggttgagaaaccatggagtagattgaaggtagtaaaaatgaagagaag

SEQ ID NO: 478378 - DNA, 616 bp, Homo sapiens
accacaggtaccacagccaacaaattaaggacccatggcatacgatatcgctctctaagagactcacagcacattaatatatcaaagactcagcaaagtccttgcatttaaaaataaattaactgttccacctggatataggatttcccacacttattagaatcactgatttagattagcatgatgaatttactgtggaaacttaatgattgcttattggtgtgatgtcttgttttttggcatatttctctgagtaaatcctagagaaactctataatgagatgctgtgtttctttaaagtgtcagtgtaagtgctgggtaccaagtaaaaaagagtttcttcgatttacgaatcagtatatccaaacactcaatttcaaggaaagatatactgcagttatrgaatagtttggagaaatttagacttcttaaatcatccttaagtaacctgttttaaatgctgtgactctattttattgtcattaaaggcttaataaataaagttcattttatttcctatttgaaagtgactgtagtaaaacttccttcagaagcaatggacacacacacatcttgcaatttagttattgtagtcaacattttaaaactagattac

SEQ ID NO: 478379 - DNA, 616 bp, Homo sapiens
accacaggtaccacagccaacaaattaaggacccatggcatacgatatcgctctctaagagactcacagcacattaatatatcaaagactcagcaaagtccttgcatttaaaaataaattaactgttccacctggatataggatttcccacacttattagaatcactgatttagattagcatgatgaatttactgtggaaacttaatgattgcttattggtgtgatgtcttgttttttggcatatttctctgagtaaatcctagagaaactctataatgagatgctgtgtttctttaaagtgtcagtgtaagtgctgggtaccaagtaaaaaagagtttcttcgatttacgaatcagtatatccaaacactcaatttcaaggaaagatatactgcagttatggaatagtttggagaaayttagacttcttaaatcatccttaagtaacctgttttaaatgctgtgactctattttattgtcattaaaggcttaataaataaagttcattttatttcctatttgaaagtgactgtagtaaaacttccttcagaagcaatggacacacacacatcttgcaatttagttattgtagtcaacattttaaaactagattac

SEQ ID NO: 478380 - DNA, 551 bp, Homo sapiens
attgtgcatactggctgcttgttatcagatttttctagatggatctgcattatctattaattcatttaggattaagcagagctaatttttttaagtcctttcctcagracttgatcgagtaatatgcaggttgaagtttgtgcagtcatcagatatagcccatagatggatgcctgaatagacccggttttcatttatatgactatttatcaatgcatgtacttttcctctctgtcaccaccattctgttaccagacagtttctgttggatcaatcactccctattcagttattttctctacttgaccaaaagtattcctaacccactaagacttctgacttccccctaagacagctctacccatgtgactttgtttctgaatgtacccgagattttgtttttattcaggtatgatgaggccaacagtggaggagacaattgcattgagaagaatagtttgctacagctcccaagaggagagggatcccatgtgcaaagattaatttcatgtgtcaacttgtctgggccacagtatgctcagatagccgat

SEQ ID NO: 478381 - DNA, 551 bp, Homo sapiens
attgtgcatactggctgcttgttatcagatttttctagatggatctgcattatctattaattcatttaggattaagcagagctaatttttttaagtcctttcctcaggacttgatcgagtaatatgcaggttgaagtttgtgcagtcatcagatatagcccatagatgkatgcctgaatagacccggttttcatttatatgactatttatcaatgcatgtacttttcctctctgtcaccaccattctgttaccagacagtttctgttggatcaatcactccctattcagttattttctctacttgaccaaaagtattcctaacccactaagacttctgacttccccctaagacagctctacccatgtgactttgtttctgaatgtacccgagattttgtttttattcaggtatgatgaggccaacagtggaggagacaattgcattgagaagaatagtttgctacagctcccaagaggagagggatcccatgtgcaaagattaatttcatgtgtcaacttgtctgggccacagtatgctcagatagccgat

SEQ ID NO: 478382 - DNA, 564 bp, Homo sapiens
gaaatgtttcaaatttaaagatttaaagtctcccaaccaattcacatgacatgtcagatgagtgtgttaaagagctcaaaacaatttctttaaaattctaacttcatctctatagggaaagaaataagttgggatgttgtttcttaattggcacactcattgagtgtctctccatgaagggcaatcagttagtttctatgaagcaaagaccagtaagctctggcctctgcattaacaagtgatcatttagtaagagtcacaggaaagcagaattaaggataaggacaaaatctcaggtggaaatgtgggggaaaggtgtgctgagtaatttctttctcatgtyatagagaaagatgagcaagaatatagacaaagatcgaataggaatgtgtctgcctagactgtgttagactataaaaattagcttcattgatacgtgcttaaaagcaggagtaggattcaaaatatttaccaactggtatggtttgggcaccaacccttcagtacagctcctgagtctaagcaaccgatcgggcaatgagtaccagcagtgggcgccctact

SEQ ID NO: 478383 - DNA, 662 bp, Homo sapiens
aaatcatatacaaatttctcaaccttcttggatatataggctttgtgacatgaaatatttttagattttaatgttaycaatgaagatttatgcatccattagcaacttaaccaatagcctcaaaatggggccttgacaacaattagagggccttcccagggccaggcactgggtgttgtgcatgtgttgtcttacttagttcatacaccaaccttgcaacttacgatcttttctatcctcaatttatagttgagaaaactggatcctagaaagattaactaatttattgaaagtcagataatctatgtcagatctgggattcaaaacttcatcgtttgaatacatagcctaaacttttaaaagcagtactcatccaaaattgacctcctgatcatccttctatggctgtccaatcattttctccacttctaacacctcagagttaccaagcatccagtctaaatgaatctctgtcttctgcctcctctttcatctaaacattttactatctagtcccctgttataacccactctgtgagaaacagacatagccatcaagggccctgcccaagacaagaggtctcatgagtccagtctcttaaagtggttctggggcatgatccagagtttctatcaaaagtcaagccccctcagttcctgca

SEQ ID NO: 478384 - DNA, 662 bp, Homo sapiens
aaatcatatacaaatttctcaaccttcttggatatataggctttgtgacatgaaatatttttagattttaatgttaccaatgaagatttatgcatccattagcaacttaaccaatagcctcaaaatggggccttgacaacaattagagggccttcccagggccaggcactgggtgttgtgcatgtgttgtcttacttagttcatacaccaaccttgcaacttacgatcttttctatcctcaatttatagttgagaaaactggatcctagaaagattaactaatttattgaaagtcagataatctatgtcagatctgggattcaaaacytcatcgtttgaatacatagcctaaacttttaaaagcagtactcatccaaaattgacctcctgatcatccttctatggctgtccaatcattttctccacttctaacacctcagagttaccaagcatccagtctaaatgaatctctgtcttctgcctcctctttcatctaaacattttactatctagtcccctgttataacccactctgtgagaaacagacatagccatcaagggccctgcccaagacaagaggtctcatgagtccagtctcttaaagtggttctggggcatgatccagagtttctatcaaaagtcaagccccctcagttcctgca

SEQ ID NO: 478385 - DNA, 495 bp, Homo sapiens
cccttcaccaagggaactgaattttacttttgtggcagaacctaaatttcaaactgagttagattggctttgggaagaaaatcaagcagttgtcttgacatgaggattcttcaactgcctccagtagtgctttcagctaacactgttaagtgctcaatgtacgtcaggcattgctctaaactcgtgacgtatgttaatayttaatgctcacaaaagccctatgaggctgatattgttattagccccattttacagttgagagctctgagtcacaaaacaattcatgttgcctagttagcagcaaagctgggataaacccaggtgcctgctctttatcattacctttacttcctttcatgtatctatctgctctgtgatatattctggcaaaagaaagacctttattctacagataaaagatgcagatgctgtaaaatttgcattctaggcaatttatagggtggtaagagagatgagaatgcagccttggaagcc

SEQ ID NO: 478386 - DNA, 640 bp, Homo sapiens
tttccttatttacatgtaattttttaaaaggaccagtttgtaatattgaagtctataaatgtgaaaaaatgatttgtggtatatagtcataattgacgaatggggatgtgggaaagcctgttttgcgtttagatttctaatatcatcttgttacagtgtctagaatatcccctttggttaaagcaatgccagaaatcttgttgggaaatggtgagaaattctgacctcgccagatgctcggttgctggataagtcaaaggagtccggggaargaagactctaaggtgcacggccagcctggtgtcccagccctgggtatcaagagcaagccccgctcggtttctcaacagatgtgtgcctgaggcaagtcatttaacttcttaactgtaaaatgaggaatatgagctcattgatttcaaaaagtctacaattgtgtaatttctaaaatccccgacccatcccactgagccaaatgagaattctagaaaatgttttacaatgataggagctgattgaacaagcatgtattggatggctattgcttttatcctctcgaatccactttcctttctttgggtaaaaccccgcagtgttccctttgaactatcacccttcccctattctcaagccatatgggaaa

SEQ ID NO: 478387 - DNA, 619 bp, Homo sapiens
gtttgctggcatccacgcggtttcctgggatgcaggactttcagtactaaaatcagaatcttaggctaaccaggatggtggtcacattagttcccacctgaccacacacacacacacacacacacacacacacacacacacactactataatgtgttgcttttgatataagtagttcatcaagctgattagaagttcagccaatttcaggctcttggctgtgtttcagatgtatgtgtgcattacctaagtgaccttcaaaattactttcatgtaaaggatagaatactgcaaataataatttgcatatgccttctatagaaatgcagacccttgattattttaaatttcctattagagtttaattttgtttacttttcctgaaggccatccattcatctaccctcactttcatcccaacattactggctctagaacactctacaataatgaattctgactctagaacagaggttctcaawgggaggtgggcagttttgtcccccagggaatctttggcactcttggttgtcacagcttgggggaaagcactactggcatctagtgggtggaggccaaggatgctgcttgacatcctacaatgcacagaacagacccca

SEQ ID NO: 478388 - DNA, 546 bp, Homo sapiens
gctgaaaatcctcatacaatgtttgactatgtttttggaaatgtaacagctaatagcctactattgactggaagcctattgataatataaacaatcgattaacacatattttgtatgttatatgtattagatactgtattcttacaataaagtaagctagaaaaaagaaaacattaaaatcataaggaagaaaaaatatatttactattcattaagtggaaatggatcatcataaaggtgtactaacataatctaaaatgtattgtttaaaartagattatcaaagagcatgtataaaatactccagattttttaaaatatgaatatacataccactaatgcccaagtcaatgggaattacattggaatgtacataccactaatgcccgaatcaattttcccagtgcaaaaattaaaaaaaaaatatgtcccagtgagtgaacagaaatgctggggttgtccagattatataagcttttagggaaaacaaatatgtacttataatactagtttagatgcaactatctatctatatgatatatttta

SEQ ID NO: 478389 - DNA, 400 bp, Homo sapiens
ctgtcctaggcttgaggcctgcaccacccatcctctggtagtgccccaaggaaggcagttaggcctgggtyctggtcctggtcatcaggaatggacctctctgtgtggtccacagagaagacctctctatgtcttctgggatcctggtctcagcctcctccttcattggatggcattgagtgccggggtgaggctctgctctgccggagctgtctgcctccaggagggaagccagtcaatgcgaggtcaaagatagggcaaatagaaaaggggccgggcctctggcttcaggtggccctgagcaccccacacctggattccatgttattcaaggtaataattctccccttgtctgaggccattcaagttgggtttctgggacctgcgtggggctcactga

SEQ ID NO: 478390 - DNA, 593 bp, Homo sapiens
ctcctgttcctgttgtccccctccttcaatgcagggctcttgagcagaaggcactgctgcactgtggccgtatctccctctctggccgtcttgtggatcctgccgagctctcaatctcggcggtgctaccaggaatccgagtagaagtggtcagggatggagcccagggccacctcatccttcttcctcctggagccaaacagcttcttcatcgcggcagcttcggagaagcctcagctaccctgcagctccccttcgccttttcgcggaatccggagtccagtcacaattagctaagcccggggcaccaaagcctttagcagcgaaaccgccgcttccgacctctcggacctagtgagccaggcagagcctttaggcccacgcctgggcaccacagccagcccgaggcccaggaagccgctcccaggctrcgcgcggctggcgctgggcttccagtgccggactgccagaacaggctgggagcgctggggtcttggcgctctgcagccaccagagatctggccgagtgggtctggttacccccacccctgtgctgccacagcccggcagatcgcctagcttggctgccccag

SEQ ID NO: 478391 - DNA, 593 bp, Homo sapiens
ctcctgttcctgttgtccccctccttcaatgcagggctcttgagcagaaggcactgctgcactgtggccgtatctccctctctggccgtcttgtggatcctgccgagctctcaatctcggcggtgctaccaggaatccgagtagaagtggtcagggatggagcccagggccacctcatccttcttcctcctggagccaaacagcttcttcatcgcggcagcttcggagaagcctcagctaccctgcagctccccttcgccttttcgcggaatccggagtccagtcacaattagctaagcccggggcaccaaagcctttagcagcgaaaccgccgcttccgacctctcggacctagtgagccaggcagagcctttaggcccacgcctgggcaccacagccagcccgaggcccaggaagccgctcccaggctacgcgcggctggcgctgggcttccagtgccggactgccagaacaggctgggagcgctggggtcttggcgctctgcagccaccagagatctggccgagtgggtctggttacccccacccctgtgcygccacagcccggcagatcgcctagcttggctgccccag

SEQ ID NO: 478392 - DNA, 613 bp, Homo sapiens
ctcgcccagccaactctgcggccggagggaaccctggggggcaagccatgaccggggtcccaggtcacagccccagagctgaccgcgggagggacggggccaccagctccatatgcggcccgccagccgcatcccgccggctccaccagcccatccccagtctggggacgcctgcccctttcactcaccawtctcgtcttcggggctgtcctggcgtcctccctatggctcctggagtgtgcagatctcagcgaacagcagagacgccaaacccagtgcagcgggcgcgagaagcaggactctgccagaaacagcaacgaagcccagcacctgcgggtgacagcttcacacctgactgaacagtgtgcacggtccccagcccccctgattggacactgactcaggttccccgccctggctggaggctgagtggagtgggaatgacaggttcatggctacagggcacgcatcctccctgtgcccggacgtgatatttgcatttatacaggactttcttcaggctttgccaagtagacactggcattgcctgtatgcagtgggcccttcctgatttttcctcctgggcagggtgggtcacaagtaggaggaggaa

SEQ ID NO: 478393 - DNA, 603 bp, Homo sapiens
caaagcatttagtcttttattgcaacatggcctggcccaaatacacattagataatgacatctgatggcccaaaaatggcacttctgagttgcaaattctcagggaccttgacaaatttataaccaggaatggcaaatgcaagaggttatctatattcaggctttcttctaccttagatctcgcccttccctatatcaagcttgcactcgtcatgaaatccttcttctcgagaaaggatttcctccttcctccaaaaccccttttgactttgcagatgaacctcctccatattcccatcccactgcatctgytcctcatccatcctaaccctccgccctggtggtccctcctgccccagattctccagccccaaaccctgctcctccttcttctccacctgttacctgtccaaaaactgctcaaaccacccatgctattctccctatcctggaagtggctggggctgaaggcattgctcacattcatgtccctttctccatgtctgatttgttgcagatgaaacagtcccgaggaactttctctaaaaatccctctcattattgcagggaattcctgcacataacccaatcaaagagagcgct

SEQ ID NO: 478394 - DNA, 554 bp, Homo sapiens
ctgttgaatgttcatagctgaactattgaggccattgacataatagtataagcgttatactctctactcacatgggttcattcaaatcccatttctaccacttaccagttgcrtgaccttggccaagttctttagcctttctgtgcctcaatttctcatctgtaacagggttgttatagataatgagtgagatattgcatttacagcatttaagacagagcctaggatatagtaaggactcgataagtggaggttgctatcatcattattattaatcatagctaccaactccacctccagaataatagccacaaatgccccttattgagcacttactttaccaggtaccttgctttgcttttttataggcaggatttcattaatcttcaagccaaccaattattaacccattctataaactttcccagctcataagtgacagagctagaataagatatcagaatccaagaatccagattcttgccctgagaggcaagaaagaggaaagccaactgaagaagcttgcacaaaatgacaccaggagatctctaaaa

SEQ ID NO: 478395 - DNA, 441 bp, Homo sapiens
ctttgctgaccagctcctactcaccctccagggcccaagtgggaagtgcttgccccaggaagcttttccagtcaaattggccycctattctgagtcatttctccctatattatgacattctgtgcaggggccatttccctgggtttcttgatttgtggtatggtgttagctaccatttattaagtacctattggattccagactttgtgacatagcagaagtggtactagtactagaagtatgacaatagtaactatgacactcacagccacaatagcaattgcggctggcgatcttgaagcacccgctggatgtgaggtattgtcatgggaaagactttggttgtcactgttcattgaacactcactctataccagattccgaggtgacagcagcaaccaccaccccggcttcccctacccatggagtgtgcccactgca

SEQ ID NO: 478396 - DNA, 441 bp, Homo sapiens
ctttgctgaccagctcctactcaccctccagggcccaagtgggaagtgcttgccccaggaagcttttccagtcaaattggccccctattctgagtcatttctccctatattatgacattctgtgcaggggccatttccctgggtttcttgatttgtggtatggtgttagctaccatttattaagtacctattggattccagactttgtgacatagcaraagtggtactagtactagaagtatgacaatagtaactatgacactcacagccacaatagcaattgcggctggcgatcttgaagcacccgctggatgtgaggtattgtcatgggaaagactttggttgtcactgttcattgaacactcactctataccagattccgaggtgacagcagcaaccaccaccccggcttcccctacccatggagtgtgcccactgca

SEQ ID NO: 478397 - DNA, 529 bp, Homo sapiens
aacagcatgttgtgaaaatgcttaacacagtacctggcacagggtaagggcccaataaaagcaataataataatattaaatattagactaaggagttggttactatttcactcattgctgctgccttcattcacagctgctagtccatcacaatagttcycttttttttttcttttttaggcaaggtctgtctctgtggcccaggctagtgtgcagtggcatgctttcagctaactgcaacctccgcctcctgggcttaagccaacctcccacctcagcctcccaagtagctgggactacaggcagacaccaccatgcctggctaattttttgttgttgtattttttgtagagacggggtttcactatgttgcccaggatggtattaaactcatgagctcaagtgatctgcctgccacagcctcccaaagtgctgggattacaggcatgagctaccacgcctagcccatcaaaatagttcttattaagcattggcaaggggctgaaaatcatctgtagcatgtttaacc

SEQ ID NO: 478398 - DNA, 529 bp, Homo sapiens
aacagcatgttgtgaaaatgcttaacacagtacctggcacagggtaagggcccaataaaagcaataataataatattaaatattagactaaggagttggttactatttcactcattgctgctgccttcattcacagctgctagtccatcacaatagttctcttttttttttcttttttaggcaaggtctgtctctgtggcccaggctagtgtgcagtggcatgctttcagctaactgcaacctcygcctcctgggcttaagccaacctcccacctcagcctcccaagtagctgggactacaggcagacaccaccatgcctggctaattttttgttgttgtattttttgtagagacggggtttcactatgttgcccaggatggtattaaactcatgagctcaagtgatctgcctgccacagcctcccaaagtgctgggattacaggcatgagctaccacgcctagcccatcaaaatagttcttattaagcattggcaaggggctgaaaatcatctgtagcatgtttaacc

SEQ ID NO: 478399 - DNA, 529 bp, Homo sapiens
aacagcatgttgtgaaaatgcttaacacagtacctggcacagggtaagggcccaataaaagcaataataataatattaaatattagactaaggagttggttactatttcactcattgctgctgccttcattcacagctgctagtccatcacaatagttctcttttttttttcttttttaggcaaggtctgtctctgtggcccaggctagtgtgcagtggcatgctttcagctaactgcaacctccgcctcctgggcttaagccaacctcccacctcagcctcccaagtagctgggamtacaggcagacaccaccatgcctggctaattttttgttgttgtattttttgtagagacggggtttcactatgttgcccaggatggtattaaactcatgagctcaagtgatctgcctgccacagcctcccaaagtgctgggattacaggcatgagctaccacgcctagcccatcaaaatagttcttattaagcattggcaaggggctgaaaatcatctgtagcatgtttaacc

SEQ ID NO: 478400 - DNA, 412 bp, Homo sapiens
ggttggggggctgtccagggttgggcggctggggcgctccagcctgagccctgccactgcctggggtctctgccctgaaaagcacwgcctggcattttgcccacaatttctaggggccccggtccggtctcaaggtctaatcccccctcaggcttccggatgtgctgaggttagtgatggggttatcttcccttcccttctgcgtctacctgggtgcctagctcctgccttgctaacactgccactgaacccactttctaagagaaattgcctcttcctaacctgcgttacaactcagaagtgcagatgcctctcagacatagacagtcttggggtctctccaaattcagaagcttcagaatagaagaggagaggtgctttcttgagccctcagccctgggaagaacaggac

SEQ ID NO: 478401 - DNA, 538 bp, Homo sapiens
tatttattgttcgtgtctccatccttccaccttaccatcagcttcatggggttggggactttgtactagtacagtcttcacggtgccttgcacacagtaggtgcttgccaaatattagatgagtgaaagcatgattcaaagaaagaaaaataccaatcaatgatgttgctcttatagaatcattaagcatataaaagggaatgttgaattttttttattcttaaccacattttatgggagaaacaggctatagtgtgagcttgggagtttgtaatccctccytttccacccctgtaggatatgattcttggggacatgttttttgggtcttctctccacacttctgagggtttgagaataggcagccctggttgttggggagaggttaaagcttcaaaagtttatcagttagcttatgatgtgtaacaaatttcccctgaatttaaggtttttaaactacaaccaattattattgctcactattttatgggtcaactgagtgttttcttcaggccatggctgggcttcctcatacatc

SEQ ID NO: 478402 - DNA, 538 bp, Homo sapiens
tatttattgttcgtgtctccatccttccaccttaccatcagcttcatggggttggggactttgtactagtacagtcttcacggtgccttgcacacagtaggtgcttgccaaatattagatgagtgaaagcatgattcaaagaaagaaaaataccaatcaatgatgttgctcttatagaatcattaagcatataaaagggaatgttgaattttttttattcttaaccacattttatgggagaaacaggctatagtgtgagcttgggagtttgtaatccctccttttccacccctgtaggatatgattcttggggacatgttttttgggtcttctctccacacttctgagggtttgagaataggcagccctggttsttggggagaggttaaagcttcaaaagtttatcagttagcttatgatgtgtaacaaatttcccctgaatttaaggtttttaaactacaaccaattattattgctcactattttatgggtcaactgagtgttttcttcaggccatggctgggcttcctcatacatc

SEQ ID NO: 478403 - DNA, 627 bp, Homo sapiens
agggggatatttatctgaactcggcaagggatgaaaggtatgggatcatgtaccctcagtcgctgggcacaacacgccactgttgggggaggggctcgggcggggcctcctgggcttctttgtgaggaagaggaggaggctttgggctgggccagaccgggsaggggtgatggtgggggaggcaggagattgttcctccctggactcttatattgctgtgtcgtgggtaattgcttacttggctgctgccccctagtagatggggagctccccaaggggtgcacctgtgacttccacagctccctacttccccagtgtccagccccatgctcagtgcatactcagcaggcatttaaaggtggagaaaaataccttttatctggaaagtgccccatcaaagaaggaggtatagggggtctcacctctcatcccagggctgtttctgagattgtcctggaagccagtcttggcatatgggtgcactaccgggattaagaaagggaatgtggagtcagacacccccaggcacaatccctggatccatcacttcttagttttcggagcttgaacaagtcacttaatgcccccatgcctccacttcatctggaaaatggatttgataacaat

SEQ ID NO: 478404 - DNA, 473 bp, Homo sapiens
ccatctctcctaaagcctccctcccctgggcccactatatggcaaacacacttatccttgcaggccttcgaaagcatccaaactcattcctagtaagtcacctcctccagggggcccttatggaatgcccaacctgagggagtcccatcacctttatacatccccactctaattctcttcttggtcttattgctggccratttgttcttgttaatttatttcttcatttattgtttttttctgccctaattagaatgcaagctccatggtttaggtatgatttggtcacgactgtatctccagcctggagaccatagggggctcaataaacatttgttgaatgagttataataaattgcacatatagagtagttattacatgccaagagctatctctgcgatttacataaattagctcatttaatcctcccaatgccctgctgaggctgatcctattatcatccccattttac

SEQ ID NO: 478405 - DNA, 617 bp, Homo sapiens
ccgctcgacaggcttatttccctccatgctggagcaaaccccggctgaaagagggccgcactaattggtttgcgtacccgaagtgggaatagagagggaggaaaaccatgtttcaggtgttacggggggaaaaaagtgaaatgcgaaccgcaggggagagagcgaccgtcaggcagacaccttgtgaaccgcggtggagagcacacctaggtggggaggtcaccggcccaacccaccaccctccgggagaatgmgggcagggacagcagcaggggggcagcatccacgtctctacgcttgcaagggttccccaagtccctggccactgctccccacttcctgcagcctcggtgtccgccgggggcgtgtgtgaggggcggggccgcatggggaggagggatttaaaaaaaaaaaaaaagcgaggtaattagcattctccgattccactggctctccgccgcccctgctttgcatacgcccgtcccactggctgcccggggtttgctggggttcggcaaggtttgcagccgccacggccgctgctgcgctccggtgcagggcaggctggcgccgagcgaaccagggccgggaactgggagccgggagccgggagccag

SEQ ID NO: 478406 - DNA, 582 bp, Homo sapiens
tgtcaatctgaatgagtgggtgctccaggaaaattgtattacgtgtctgtcttttcttctttgccttctcctgcattttatccacagggggaactaccagttgctgaaccagggactattccaggatttccacacacatgacttcatttaatctccacactcttcttgtgaaatgactgtttcttatccccattgtgctgaggaagaaactgaagctcagaaaagttcagcaactagttcaggatgccacagctacaaagtggttgagttgggacttgggctcaaaagcctgtgcgctgaactgccgcagcccagtggtgaaatctggatcataggggcccccaggaggatcccagaaggactcaagtgcagcctgaggggcgtgtggggtagagggcggggcttgccttggtggtggtggttatggttgatgattgtccttgcgcataatatgtggtcgcaggtctttttttagtccccgccggcttcccctctccctggctgccccatgagtcacttcccagctgtccatcaratcacagcgtagcctcctcagctggaggccctggggaaatagctggc

SEQ ID NO: 478407 - DNA, 612 bp, Homo sapiens
aaattagtttcattttatttttaaatggcttatagaaaattagaaataatgaactgtctgtttcctctacaacaaaggttatcctttgccttgagagggaaggaaacagagttcagcctcctggattactcagtggaaaagcaaacttgaaccatctgtattacttaatgtgctagcattttgtgctctcgcaktgtcaatctcacagtcaccggggtatttgacaagcctgctagaaatcagcaagcatgggtctggattcttaggagctcaaatggagatgtctatgtttccacagcactctgtctgtgcctctgccatcagtcaaattgcccttcagtgtttgattagcctgtgctcctccaagaaaggcattttttaaattaatccttatccctgggtagagttgcagttaaaatataggatgcacagttaaagttgaatatcagataaacatgcaatacttgggacatactaaaataaaattcctcatttatctgacattcaaatttaattgctgtcctgtctttatttgctaaatctggcaatcctatctccataacttctcatcaaatcctcacaactcttaaaaatagagattgtacccatttt

SEQ ID NO: 478408 - DNA, 612 bp, Homo sapiens
aaattagtttcattttatttttaaatggcttatagaaaattagaaataatgaactgtctgtttcctctacaacaaaggttatcctttgccttgagagggaaggaaacagagttcagcctcctggattactcagtggaaaagcaaacttgaaccatctgtattacttaatgtgctagcattttgtgctctcgcattgtcaatctcacagtcaccggggtatttgacaagcctgctagaaatcagcaagcatgggtctggattcttaggagctcaaatggagatgtctatgtttccacagcactctgtctgtgcctctgccatcagtcaaattgcccttcagtgtttgattagcctgtgctcctccaagaaaggcattttttaaattaatccttatccctgggtagagttgcagttaaaatataggatgcacagttaaagttgaatatcagataaacatgcaatacttgggacatactaaaataaaattcctcatttatctgacattcaaatttaattgctgtcctgtctttatttgctaaatctggcaatcctatctccataacktctcatcaaatcctcacaactcttaaaaatagagattgtacccatttt

SEQ ID NO: 478409 - DNA, 546 bp, Homo sapiens
agagcagggaccaaagaaatcatgctggtgggacccactcccccaatattccctacaggaaaactaaggataaaaataagcatcaaggggctgggcacggtggctcatgcctggcaatcccagcactttgggaggctgaggcaagcagatcgcttgagtccaagagtttgagaccagcctggacaacatggcaaaatcccatctctccaaaacctcctcccagcattcccttcaaaattagtggggcgtgatggtgcatgcctatagtcctagctgctccagaggctgagatgggaggatcactcaagcctaggaggttaaggctgcagtgagctgggctgtgatcacatcactgtactccagcctggtgacagagtgagatcctgtgtttggaaaaaagaaagaaagaaggaaagaaggaaagaaggaaggaaggaaggaargaaagaaagaaagaaagaaagaaagaaagaaagaaagaaagaaagaaagaaagaaagaaagaaagaaagaaagaagaagaaagagagagagagagaacgagag

SEQ ID NO: 478410 - DNA, 533 bp, Homo sapiens
tgggcatgctcttccctactcaaaagcattccacagctccctgtttcctataggataacatttttatttttgggtcatgcaatgccctccacaatcaggtgctattttagccttccacatacctacctatactttagytaatgctaactacttctgtgcttaaacattctctgggtttttagcctctatatctttgttcatgccattccttctacctggaatgcctttccctatcctactgtccatcctttttaaggcctggctcaaagtccacatccttcagtagtctgtaacccaaaccctatagcatgtgccactatatgttctggctgtatgccatgccaggagttttctatttggttgtgttatttctcaatctctgggtagtggttgagaacatgggatctgaggctggctatcctggaccaagtcctggatatgatttgctttctcagttcctccctaagccttcttttccttagctgaaagtggggctaatcatagtgcctacatcaaagaattattgtatgcac

SEQ ID NO: 478411 - DNA, 596 bp, Homo sapiens
  misc_feature (1)...(596): n = A,T,C or G
tgcagaagagagnttatcattnnntgtttgattgttgctctgggaggttcctgtggatgaggcccatatttgccaacaaacttctggaggctctaggaagaaattccacttcaccacactgaccctgtcccccgagcctcatcttattttcaaaccccccaaaaaatgcagtaaataacaatggttaaccccttaagaatcacctctaggaagccagcacagatgagtaatcatgggttttccagcaccaccacacccttggtccttgttctgtgaattaaatrtaattcctcttctttataagagtctctcaaatatttgaaaacagttatcatattcttctattcattttgtcttttccagattctctacattcttcatctattccttgtatttcacagttttcaagccctaattcatgatactcaggccgggtgcggtggctcacgcctgtaatcccagcactctggaaggccgaggcgggcagatcacgaggtcaggagatggagaccatcctggctaacacggtgaaaccccgtctctactgaaaatacaaaaaagtagccgggctcggtgttgggcacctgcagttccag

SEQ ID NO: 478412 - DNA, 596 bp, Homo sapiens
  misc_feature (1)...(596): n = A,T,C or G
tgcagaagagagnttatcattnnntgtttgattgttgctctgggaggttcctgtggatgaggcccatatttgccaacaaacttctggaggctctaggaagaaattccacttcaccacactgaccctgtcccccgagcctcatcttattttcaaaccccccaaaaaatgcagtaaataacaatggttaaccccttaagaatcacctctaggaagccagcacagatgagtaatcatgggttttccagcaccaccacacccttggtccttgttctgtgaattaaatgtaattcctcttctttataagagtctctcaaatatttgaaaacagttatcatattcttctattcattttgtcttttccagattctctacattcttcatctattccttgtatttcacagttttcaagccctaattcatgatactcaggccgggtgcggtggctyacgcctgtaatcccagcactctggaaggccgaggcgggcagatcacgaggtcaggagatggagaccatcctggctaacacggtgaaaccccgtctctactgaaaatacaaaaaagtagccgggctcggtgttgggcacctgcagttccag

SEQ ID NO: 478413 - DNA, 571 bp, Homo sapiens
agcatctgttctgctttctctacctctgtctctttcccttaggcctaaaatgaagctctaagccaagcaaaggtctgaagtcatccagactaattgggaagcgggtaggctccagggagtggctctcagagagcagaccatttactgagctctgtgtgagaaagactcaaaatggttcacagcaatacagagttttgttctctcctcttatcctgctttctcctccctgctacttttccctgacacctatcttgttgtgaagacaggaattgcattagataaaatcaaatsttttttatttttttttgagatggaatcttgctctgttgcccaggctggagtgctgtggcacgatcttggttcactgcaacctccgcttcctgggttcaagcgattctcctgcctcagccttctgaatagctgggattacaggcatgcgctgccacgcccatctaatttttgtatttttagtagagacggggtttcaccatgttggccaggtgggtcttgaactcctgccctcaggtgatccgccctcctcagccttccaaagtgctgagattacaggcgt

SEQ ID NO: 478414 - DNA, 571 bp, Homo sapiens
agcatctgttctgctttctctacctctgtctctttcccttaggcctaaaatgaagctctaagccaagcaaaggtctgaagtcatccagactaattgggaagcgggtaggctccagggagtggctctcagagagcagaccatttactgagctctgtgtgagaaagactcaaaatggttcacagcaatacagagttttgttctctcctcttatcctgctttctcctccctgctacttttccctgacacctatcttgttgtgaagacaggaattgcattagataaaatcaaatcttttttatttttttttgagatggaatcttgctctgttgcccaggctggagtgctgtggcacgatcttggttcactgcaacctccgcttcctgggttcaagcgattctcctgcctcagccttctgaatagctgggattacaggcatgcgctgccacgcccakctaatttttgtatttttagtagagacggggtttcaccatgttggccaggtgggtcttgaactcctgccctcaggtgatccgccctcctcagccttccaaagtgctgagattacaggcgt

SEQ ID NO: 478415 - DNA, 656 bp, Homo sapiens
cttgggaggctgaggcatacgaatggcttgaacccatgaggcagaagtagcagtgagccgagattgtaccactgcactccagtctgagtgacaaagcaagactctgtctcaaaaaaaaaaaaaaaaaaaaaaaaaaaaaaaaaaggccttaaaagtgtgcgtaccctttgacccagaaatttaacttaaagaaatatgcagaaatctatgaaaagaggaaaatcaatgggtgctcactacactgttatttatgagtgcctgaaattggaaagggcctaattatcaayaataataagctggttaaattactatttaattctgggccttccatacattggactcttacgtaacaattaaaaagatgatgtagctctacatttattttcaaggaaatacgtcctgacatactgctaactgagaggttatataacagtatatactgtataactctattttaataaaaacatatatttatgcataaaattattggaaagctaaaccacaacatgttaatgatgttatgtctaggcagagggattagaaatatatatatgttttatttcttttggcttgcctgtgttttttaatttttattttaaagttatggattactttgggaacatatagagttccaaatacatttaagtaaggctccc

SEQ ID NO: 478416 - DNA, 607 bp, Homo sapiens
gtcaaatgatagaatctttacagggcagccacatgggtggagaaaaatggagaatggatgggaaggggcaaatggmagattcccggcatgtgagtctagtgtgtctgtcaggattgcattgctctactagtcaaagagacctaggacaagcaagatagggatttgtcttatcttatagaaaaaagaaaagtataggccgggcgcagtggcttatgcctgtaatcccagcactttgggaggccgaggcgggcagatcacaaggtcaagagatcgagaccatcctggccaacatggtgaaaccctgtctctactaaaaatacaaaaattatctgggtgtgggggcgcacacctgtagtcccagctactcaggaggctgaggcaggagagtcgcttgaacacaggaggcagaggttgcagtgagctgagatcacaccactgtactccagcctggcgacagagagagactccatctcaaaaacaacaacaacaacaaaaagtacagaggtaggcagggccaccatgttgcctaactccagggacctctgttcacagcataaacagcgaatggtgctccctgaagttaagaaacaaaggctagcaagtgaca

SEQ ID NO: 478417 - DNA, 607 bp, Homo sapiens
gtcaaatgatagaatctttacagggcagccacatgggtggagaaaaatggagaatggatgggaaggggcaaatggaagattcccggcatgtgagtctagtgtgtctgtcaggattgcattgctctactagtcaaagagacctaggacaagcaagatagggatttgtcttatctyatagaaaaaagaaaagtataggccgggcgcagtggcttatgcctgtaatcccagcactttgggaggccgaggcgggcagatcacaaggtcaagagatcgagaccatcctggccaacatggtgaaaccctgtctctactaaaaatacaaaaattatctgggtgtgggggcgcacacctgtagtcccagctactcaggaggctgaggcaggagagtcgcttgaacacaggaggcagaggttgcagtgagctgagatcacaccactgtactccagcctggcgacagagagagactccatctcaaaaacaacaacaacaacaaaaagtacagaggtaggcagggccaccatgttgcctaactccagggacctctgttcacagcataaacagcgaatggtgctccctgaagttaagaaacaaaggctagcaagtgaca

SEQ ID NO: 478418 - DNA, 607 bp, Homo sapiens
gtcaaatgatagaatctttacagggcagccacatgggtggagaaaaatggagaatggatgggaaggggcaaatggaagattcccggcatgtgagtctagtgtgtctgtcaggattgcattgctctactagtcaaagagacctaggacaagcaagatagggatttgtcttatcttatagaaaaaagaaaagtataggccgggcgcagtggcttatgcctgtaatcccagcactttgggaggccgaggcgggcagatcacaaggtcaagagatcgagaccatcctggccaacatggtgaaaccctgtctctactaaaaatacaaaaattatctgggtgtgggggcgcacacctgtagtcccagctactcaggaggctgaggcaggagagtcgcttgaacacaggaggcagaggttgcagtgagctgagatcacaccactgtactccagcctggcgacagagagagactccatctcaaaaacaacaacaacaacaaaaagtacagaggtaggcagggccaccatgttgcctaactccagggacctctgttcacagcataaacagygaatggtgctccctgaagttaagaaacaaaggctagcaagtgaca

SEQ ID NO: 478419 - DNA, 610 bp, Homo sapiens
acattgcaggcactttactcagatccagctctgtttgagaaattgtttcactacttagttaagctgattgcagggtgttgtcaacagatggatttttacacttaatttagaaattaagccccctctcccaaaccaacacaaactctagactataaatatctgttgtagatcacacagagtaaaagacttgaagctagtaagagggaagctgcttccagtgatgctgactcagaggctaaagggcrctagttagctgtaccctgaagcactggctttaaggcagatgccagcaataagaccagaggcagattgtcatctacaaagatgcaagtggaagtttcattttccttaagaagttctctcgacactccccacacccacctcttcttctttcttctgctccacctaccctccttaagcacatgactttcaaatatacccctgtgtgcatttttttgttttgaaaaaaaaaaattgaatctttaattctattctagtttcctgaagaatcccttgagtcttgtcagaatgattttcaagaagaaagaaacatgaaagaatataagtaaggggactaaatggaaaaaaaaaagtttgaaaaagaaaaagc

SEQ ID NO: 478420 - DNA, 688 bp, Homo sapiens
tgactgtctggaaccaaatttctaagcaggacagattctggagaaataagtacatagatgtctgcaggcgggtgtccagcaaggtcaggctgatgatgatcaggttcccagagacagtcacaaggtaggcaagcagcaggagcagaaaaacagccacctgaagctctttggtatccgtcaggccttggaggaagaactcagtcaccacagtctgattggccattgtggacctcaagccctttccagaaatgtgcaattctgggcaaataggaccatcagaaattaggatgaaaagggaaaaatttctcctgaaatgcatcatttytttccccctccctgctgcttccccatggattcaggaaagcagagcagaagcttctggaggttcttccctagcaagaaaagttgcctctttcagaatctgaggaactattgaatgacaatgactttcctgtctcctccctttattcctccctgtttttttcttttattccttccgtttttttccctctgagaaagcctacaaagaattttctgctgctcttctcagtcctctttagaactgtcactcactcatctttcaaaatccagctcaagtgtgacctcttctatgaagacttttctgaagtcctaggctgaattagctgcttcctcatggctcccataacatagtttttgcctctgctat

SEQ ID NO: 478421 - DNA, 307 bp, Homo sapiens
acagaactaaacttctcaccctttccaggagagggcatgctgtctctgtcctgtacacmtactttttcctctgccaagagcacccttcccttcctatggcccctctgaagtgcctgacctgaggacgaaatgaggccaggatatgtcccatgagtcaactctgtccccagcattcaccactaccaacccacccccaacgccctgccagcccccgacactcccccgccatgagtctgtcatctgaaacatatccccttaccccttcccactccctctgagatgactcagcagcccctgccccccttca

SEQ ID NO: 478422 - DNA, 448 bp, Homo sapiens
gagcagttaatcttgcccagggtgggccaccctgctttaaaggartgagtggaggtagaggtgcctatattgtttcatgtctaacttcgacaaatcaagtgaatttttttttttttgatagagtctcgctctgttgcctaggctggagtgcagtggtgcgatcttggctcactgcaagctccgcctcctgggttcacaccattctcctgcctcagcctcccgagtagctgggattacagatgcccaccaccacacctggctaattttttttttttttttttttgtatttttagtagagacggggtttcaccatgtcagccaggatggtctcgatctcctaacctcctaacccaaggcctgtcttggcctcccagagtgctggattacaggtatgagccaccgcgcccagcctcaagtggtattcttaatgacttagtgtgaatgtttc

SEQ ID NO: 478423 - DNA, 625 bp, Homo sapiens
ctgcaggttactcctcagcaccatcgacaagctgggaatcgatcaactcagctagaagcagaggtggtgtggggaggtgagggtgtccaggcaggcctccactagcagaaacaaattaattatgtctccagggctgcctggcaggagggccataaatcacggcgataatcaatgttttttgggggtggacaaccctgagatggacatgggggctcccraagaggtgaaatgacctggatcccagcagggacatattgcaaaaagtcacacagccccaaacccagctctgctctttctagctgtgtgaccttgggagaatcacttaacctcgcaggcgtcatttcctcatctacaaaatggagctcttgatacctcgtggggctactgggaacactaagtgagaatccgatcatctgctactgtcctgttcacaatggcagcctcctgtgtctatcgtgcagtttaagtgcagcaggtccaaattaagatgtgctgtaagtgtgaaagtccacatccaattccagcgacttagcatgaataaaaggaatgtgaaagaactcatcaatgctttttcacattaattgcatgttgaaattatacttgggacatattgggttaagtaaaa

SEQ ID NO: 478424 - DNA, 588 bp, Homo sapiens
gagctttgggctcaaggagcagagcatggttgcactttaggaactggagacaatagagcttagtggcaactcaaatcccaggaaatgaagcaccgcatagtagtaactctatacccttggayagcatagctggaaagtatcccagactctttgaggccaggtgcagtggcaacaagtacccttgaacggtggaaacagctgtttggatcctggtagggacagggaactacacagtgattcctctactcctcagtggagtcagtagctccaacttttggaagcaagtccagctccaggaaagcagaatattagagctgcttggcctagagggtggggtgtctcagatcagccactattctgtttccctgggatgcagggtactacatcagctaagccctgagatgtgcagtttctcagctcagccagggcaccaattccccaagggggggatatcccacttcagctgaggtttcaggcaccatttccctgagattcatggcactgcttcagcttaggtactggggtgcatagccactctgagttgccaaggtagcatttcctggggtgaaaggtgctgcttcaacttag

SEQ ID NO: 478425 - DNA, 550 bp, Homo sapiens
gaatgagggcttcttaaaagaggggcttcccattcagatgttgaggggcaaggtagaggtatagcagcaaaggaggaacttagcttatatctggagatgacagaccaaaggtacggagtgaaaaatgagacaatgcaccaataattgggagctctgatctaacctgtgtcagggaaatgatttctgccttataaacagccacatcagcacaargcacacagaagacaggaggaggaagaaatcccatgaggaagatgtggaatgttagatcattgttcaccaaatatccactttgtccctcatcatcaggggagaagtgtacttcccacctcttgacttgggcttggccatgtgacttgctttggccaacagcaagtaacaggacatgatgcaaatggaagcttgatgtgtatttgtgcagttgggcttgccgtctcttgctcctgcctttggcatgagtagaacatgcctctcaagggtcaggttgctggtctaaggagggtgagagacctgtggagcagatgtagatctggcctgtcctgagcccaac

SEQ ID NO: 478426 - DNA, 345 bp, Homo sapiens
ctgaggaaggagttgaaagagacaagctggaatagagatacatccacttgagtcaagggaactgcaggagagggggcctgcagggagcctctccagcattcctattcaagggccagaagagaaagaatcagcttgagcyatcgtccaggccccctgggggttaccagctttaatcatctgcagccccagagagcacgaagctaccagatcaagtagtgactcacttacccctttttcctctcatctctaccctaccttcaaccctggaagagaaagaaaatgacagctagtgggtagaagtgagggtgagcagggaagaaaaaccagagaagccatcagaagttt

SEQ ID NO: 478427 - DNA, 382 bp, Homo sapiens
acagaaaagttaaattatttccctaggaacgtactgccaatgagctgtggccttagccactgtgctatactgcctctatatagaagcatcctgttttttgttgttgttgttgttgaatgggtataacaggtgggaacctcttagagagatgaaagtcacaccatcactctcttaaatataagctgaagactggatggctcatatattcttgctgctctcccagaggttaatctgaaaattcttgggaagacataaatagaatttaatgaccatttgtttctttatccaggactgatagccatgcatgtaagatatcatttacttcttgcttaacacacyttcacaaagagaattgtgttattttcctaaatcagtaaggtat

SEQ ID NO: 478428 - DNA, 631 bp, Homo sapiens
tgtataattttcctatgtattatggaaaattctttgttatactgtatttttagaatcttcttcttgggtagtataatccatttatcttctagattaacttaggatctctttttttattttaccagagtgggttttgattggcactgaattaaaatgataaattaatttgtggagaatttacttctgtcttatctaagacagaatatctgtacagtttttcaaaactgcttttgtgtctctatgtttttacttttctttgtaagtgtattatactttacattgtaagattgcttgttagtattttatgttttgggctacaattatcaatgatgagcaggatttatctcccattttctttttttttaagctggctattgttaacatgtaaaactttattcttatggtcttatttttcatccaattattttgaaagttgtataattttttgttggattcatgttcattgctttgttttgctctaattctctgtttttagtagatatacaatgactactaatgyagggaatgatagccactcttgccactaattttagagagaatgtgtgtagtgtccacaattgagattattgctgaatattgacttcagatgtgtcttatctgctatactttc

SEQ ID NO: 478429 - DNA, 615 bp, Homo sapiens
caagtccaattgtataaggccaagagcctacaagggtgcactctcttcacaaatataaagtttgactttccagcctggaaaagcaacaaagaaacttgttaaacattcaagactttttcatccactgattattctttgtccctttgttatgagagagttctttgaaaacaaagcaaagcaagtgcatgaaaggaatactgaggctattttctccaggtgacacacttatgacaaagctcattcttaggcagtctgtcttctatctctctataagaatatgtattactatttatttaaattgaaaatgacaatcatacaaagtatgtttgatwtggtccattcttttgacaatgaggcagagtcagcactagggagaggtaaataaggtgcccagagcacagaatttaaggaaacatcaccctgaatgtgatgcctctttaaattttgtaccctaaacacctcacttgtttaagcctagtccaaaatcagcctttgcaacaagatgacatggcaggaattttccatacattgaatgagctaaataagtatgtccatggtattgaagaaaatatatttaaaacaaatgataaaataaaagcattttatcagattcct

SEQ ID NO: 478430 - DNA, 615 bp, Homo sapiens
caagtccaattgtataaggccaagagcctacaagggtgcactctcttcacaaatataaagtttgactttccagcctggaaaagcaacaaagaaacttgttaaacattcaagactttttcatccactgattattctttgtccctttgttatgagagagttctttgaaaacaaagcaaagcaagtgcatgaaaggaatactgaggctattttctccaggtgacacacttatgacaaagctcattcttaggcagtctgtcttctatctctctataagaatatgtattactatttatttaaattgaaaatgacaatcatacaaagtatgtttgatatggtccattcttttgacaatgaggcagagtcagcactagggagaggtaaataaggtgcccagagcacagaatttaaggaaacatcamcctgaatgtgatgcctctttaaattttgtaccctaaacacctcacttgtttaagcctagtccaaaatcagcctttgcaacaagatgacatggcaggaattttccatacattgaatgagctaaataagtatgtccatggtattgaagaaaatatatttaaaacaaatgataaaataaaagcattttatcagattcct

SEQ ID NO: 478431 - DNA, 615 bp, Homo sapiens
tcacatatggctaaccacaagagcatgtggtttgtgggcaatgtcctggagtgatggggaatttgccctggaccagccttccccttagtcccttccaccacccttcttgtggctatcgtcatatgtaggtgatgactgaatgggggttggtggccattaccaatgagctatcactgcagatggccaactacaacctgctcatttacttttatttactgaattagactaatagatattattatcctcactttataggtgaataaacagcctctctggtgttaagttgcccaagaccacacagctagtaagtaccagagctaagatttgaacctctggctgtctgactcccaggcctaagttcttcccgctacactgggctgccccccattggcagtgggagggggaagcctgtgggctgtagagcagtagctgggacaacattgactctgygtcctgtagggccaacactccatgagcactggcttttatttaccttatatggtgaaaagagagatgcccattttttcccatttctccagactctaacagatgggtgctaatttggtaagtgcaaattatctggcttcagttctatccaccatctgcctgcttgaa

SEQ ID NO: 478432 - DNA, 341 bp, Homo sapiens
atggtcgttatttggatgggtccttaggtgacttcactccaatccaaggaccaaggtaaggtcccctttccctggattcttataagccccaggaacaaagattgtaaaactttttagagtttagagacagaaccttttcttygtataaaatcttatgtggaagccaaacattaaactggtaaaaatcatttcaggttgagggtgtatgttggtgggtacgaagtggtttcagagcttccctctcagttttcccagtgttccccaaagactcctaggacacctcgggggagctcaggggacccaatgcagcacaactagaggccccagcctccacactgcct

SEQ ID NO: 478433 - DNA, 531 bp, Homo sapiens
cctccttggccattgttcctatagcaggctgagcaggttcctctgctccaagaattctggagtgatgccaccrttgacttcagttgagggcagggtcctggcctttccagccttcccagtccacccttctcagtagctgagtgaccaaggagttggagaggaggagtgaaatgaacatgatcactggctgctgatagaacagtaatgagattaatggctcttagagctttctcattaacagtggaaacggtgtgtcagaggcatttacggtattggttctgaagacatcaccccagtacacacagagctaatcacgtgtcccgcctacctctgagcaaagacctacctgcttccttggaggagcactccctcccattttgaaacttcatgtatgaggtttcatacctccttcatagctgaggaagagtagaggccagggttttgatgtggttgcttctgagatccacaaacacagcactgtgtggctgcattaaattctagaaagagccacagcctcctggacctacatcc

SEQ ID NO: 478434 - DNA, 531 bp, Homo sapiens
cctccttggccattgttcctatagcaggctgagcaggttcctctgctccaagaattctggagtgatgccaccgttgacttcagttgagggcagggtcctggcctttccagccttcccagtccacccttctcagtagctgagtgaccaaggagttggagaggaggagtgaaatgaacatgatcactggctgctgatagaacagtaatgagattaatggctcttagagctttctcattaacagtggaaacggtgtgtcagaggcatttacggtattggttctsaagacatcaccccagtacacacagagctaatcacgtgtcccgcctacctctgagcaaagacctacctgcttccttggaggagcactccctcccattttgaaacttcatgtatgaggtttcatacctccttcatagctgaggaagagtagaggccagggttttgatgtggttgcttctgagatccacaaacacagcactgtgtggctgcattaaattctagaaagagccacagcctcctggacctacatcc

SEQ ID NO: 478435 - DNA, 531 bp, Homo sapiens
cctccttggccattgttcctatagcaggctgagcaggttcctctgctccaagaattctggagtgatgccaccgttgacttcagttgagggcagggtcctggcctttccagccttcccagtccacccttctcagtagctgagtgaccaaggagttggagaggaggagtgaaatgaacatgatcactggctgctgatagaacagtaatgagattaatggctcttagagctttctcattaacagtggaaacggtgtgtcagaggcatttacggtattggttctgaagacatcaccccagtacacacagagctaatcacgtgtcccgcctacctctgagcaaagacctacctgcttccttggaggagcactccctcccattttgaaacttcatgtatgaggtttcatacctccttcatagctgaggaagagtagaggccagggttttgatgtggttgcttctgagatccacaaacacagcactrtgtggctgcattaaattctagaaagagccacagcctcctggacctacatcc

SEQ ID NO: 478436 - DNA, 538 bp, Homo sapiens
aacatggtatcccagtccccttcccacctctatctctcagtccatttggtcttcctcataatcccctttctcctccacaagaggtccaattaccccagctatggctgaaaacatcagtacttaggagatcaaaattcacctggtcccacctcccaggacattttccacagttttcccctccttcccttcccattgagaatcttgaaggactgaggtatgcatatccatcaatcggttaatggggacagagtctagagggcactgagttctgacacagtgagagcactgagagcaggaagtaggggatgaggtccaattctgcttatccaggtgatgcgctattccattctgggctctagtgggagcctggtgagccaactgcaagcctctaaggkgaaatcaaccggaaatgtcagttaggcagtggagcggggccagaaaaatcaatgctgaatttcagatgtcaggagggcaagagaggggataggaggatgaaatgagagcatttgtttgcaattctaatataacaaatcagcag

SEQ ID NO: 478437 - DNA, 648 bp, Homo sapiens
ttctgcattttgctgttgtttttcagagcagcatacatagatttacttcattttgttttcattttgttttacatctgcaccatgttctgtggtatggatgtatggtaattttagtgcagtgctttgaggaaatgaaaatagaatttctgccaaacccagtgcactaatcttaagtttgaggtggagggagtaaatgacaggtgttaccagatgtacacttcaagcttcctacacacccatgggtcacgtcagcatctcttggctcagtttacctagcaggaaagaataacaatttgattttagtgtcaaaaaccacgagtaaaggctccttacctacaggacttggaaagaacagttaatagaaagagtccatattaatattttcttttaattaaaaggtggggtatggacagaaagaaactcctactctgaccctgaactgggctgatgcagttcatgtatctgatgggttcccatgcasaatcatttgagaactgggcaggcctgggctgacctgtcttatccaggcccatcaatgaccctgccagaagtgtgctggcaggtgtttaacaaccagctctccacaaaatcaaaagtcccaatttgtagcatgtgcctattcccatagtgcaaatacatccacagtgg

SEQ ID NO: 478438 - DNA, 545 bp, Homo sapiens
ctgcagtttcttagactagcagagcaaaaggagaacagaggcccagagcatcaaatagagaaaaatggttttcttgtggagccaaggttttttgttttaagtaagcacaggggagtcctgatgtggatgggaatccttgaattattagaaggtgcttgggttggaaaattgggctaaggctggcctctgtggattccagggaaccctttgaacaggtgatgtctggagacaagttaattcttttcatgttgggggccttgcacctctccagttcctgagtttatgttccacccaaggatttggctacctatgatgggacctcagagcacygcaagggcagctctaggaagcaatttaaggtaaaacagtcctgatcatttgttcctcctactttgagtgggtgtttatactgtgctgagtactgtgcatgcaactgaaaataagaagcatatcttcaccttaatggggtttccttagctgcaaagggaatacaggtataaacattatggcaagtgcaaagtagaacatgataatgataatgtgta

SEQ ID NO: 478439 - DNA, 405 bp, Homo sapiens
ctctgagtgcaattcttaactgatacctctagaggtcagattaaaatatatcatttatgttgcattcatataatgcctaagtcagtttcttcaatattgtatattctgatatttcaaatgatatttatcagktgtatgaatgaatatattaattcattaatggtggactttccaaaaagtctgaatggcttaggtataaaaatcataaagaaaattattctcgatatccaaaaagagtttgtactgtataaaaagatgaacaggcttaaggtagattaaattcacttctcaggaacatattaaagtgaaactaagaatacttgagttacattattgtaaggtgactgttggggaaggaaactactacattctagatatttaggttacagaaaaagtagcagctga

SEQ ID NO: 478440 - DNA, 502 bp, Homo sapiens
ccttgtcctcccagcccaaccaccctcttcagtgaagagtgcagaagccagtgaaagctgtctccaacattccaactccagcaggtgacagatggagagtactaaaggaacctagtcctgtaccgggcacaaggccacagtcaagcatcccagccctgtccagccattagagttgccctataggaagctcaggagactagccaatcccactgtgacctgtgtgaatgtccarcccagaacatcatgaggaaaaataaaatggttattttatacaactgagttttggggggattgttatgcagcactagataactggagccaagagccggtgggaaagggtggagaagatgcagggggtgggcagatgatgcccagcacagccatccctcgcattcctgctgaagctgaagaccaagctgttgcctgcgtggcacccagtccctaataaaatgacccaagtaagaaaaatcaacaaagaggaagcaaatcgcagcagcaaata

SEQ ID NO: 478441 - DNA, 150 bp, Homo sapiens
tggtgaccgcatcacacagtgaggarcaacactaaggaggcagcaagtggaagtaagggatgctgtctccatggcaactgccgttcatcctcagcttgtcaggctgggcatgctggaattgaacagggctgaattgttgcccccatcatg

SEQ ID NO: 478442 - DNA, 595 bp, Homo sapiens
attcccctgtgtatggctccactccccactccaggaagaaatctgggcgtaatgatgagtgaagagggctcagcacaaagaagacactggactgactgtcccaacaagagtccttagagattatttagctcttacatcttttgtgatgaggaaacaggcccagagaagggaaacatctgttatgaggatgcatcacaggggccagtggtggggctagaactgaggtccagcccagggctaacttctgtttgctgtcctgtggccataatttgaatttggccatgacggtctcaggggtgtaggtacatgtataattcatcaaatatttttccaggaatttcactgtactttttccaagtaacttaaaaaattgctttcaacaattcctgtttcctatctcaattagtattttccatgcacttgctaaataatcccttgctgaagatttgagaaatcactcctgccaatggtaccttcacacagccatagmccttcttgttccactgaaattggccttcctggctattggtggatggtgatgaattgtggggcaagatgctgcagtatgaagtctgagctccaaaaaaaagagagg

SEQ ID NO: 478443 - DNA, 629 bp, Homo sapiens
ttttgaagcacattgcttagcaccagtggtttcctttaactcttccctaaaaaaaaagtccaggttgattgtctattttttgccaatatactacaaaatttaaacctagaaaattaacatcttttaaattacacatgattttgctaaacatatgaatactggatctccagtcaaagctgatagtttatgattaaaattaaactttatgacctctttgactgctgctttcattttttcctttagagtacatttaagacctaaaatgataggtatctamtttaattgtttgctaaaaggagacaaaaatctctaacataatcaaaaatttctaagatataagaatatgaggaacagttctaggctcaatgtactgaaatcccccaaatattagaccacagcaaccctctccataccatgtatatacctggctcccctacccatgcaagcaaaatccaagtgggtagtctggacttccaccctagtgaggctacaaggtggcatctcaacaccctaactggggtagagtcaaaggctatgtagacaagtagggagccatgataatggtgtcagcggagaccacctagagagcctagatttccacccatacaggaagtaatacggtgttactt

SEQ ID NO: 478444 - DNA, 629 bp, Homo sapiens
ttttgaagcacattgcttagcaccagtggtttcctttaactcttccctaaaaaaaaagtccaggttgattgtctattttttgccaatatactacaaaatttaaacctagaaaattaacatcttttaaattacacatgattttgctaaacatatgaatactggatctccagtcaaagctgatagtttatgattaaaattaaactttatgacctctttgactgctgctttcattttttcctttagagtacatttaagacctaaaatgataggtatctaatttaattgtttgctaaaaggagacaaaaatctctaacataatcaaaaatttctaagatataagaatatgaggaacagttctaggctcaatgtactgaaatcccccaaatattagaccayagcaaccctctccataccatgtatatacctggctcccctacccatgcaagcaaaatccaagtgggtagtctggacttccaccctagtgaggctacaaggtggcatctcaacaccctaactggggtagagtcaaaggctatgtagacaagtagggagccatgataatggtgtcagcggagaccacctagagagcctagatttccacccatacaggaagtaatacggtgttactt

SEQ ID NO: 478445 - DNA, 488 bp, Homo sapiens
attgttcatcccctcccaagaaaccacaaaagtctcataccattacgacttcagggtcaggcttgaggcccaagatctcatcatataaagctcctcagatgtggttcttcaattatagcacactgagtcacattcttcatgatccaaaggcttgtgaaakagagagagaattatctcctctcttcccttccacatgcaatatgcaatggtggtacaggcttagaataaccgcaatagacacactatccaaaaacggggaaagggaaagcacatggcaatctctggtctatggcagttctgaaatccagccaggtacaccctgtaaggtccttgactagggtttggtcctactctctggggttttttctccatgattcttcgctctgctttctgtgtttgtttctaccctctgggccatcctttctttttcattaaaaaaaaaaaaaattgtgtttacagctgagtagttttctcagtctactgcctgc

SEQ ID NO: 478446 - DNA, 497 bp, Homo sapiens
tgtccccagagcgggctgtaggcgcgttggggcggccaagccactgctgtgcacctcccacacatacagcctgcagctccaggaaacagaggtttgagaccrcaaactaaatgtacaggagggctgaccggcccctctatttcttccttctctctttctccagcaaagccagcaattgagaactccacatcatagattactgtggctaaaaggggcctcttgaggtcactgatatggttcccctggatcaagaccagtctgtcctgggtcatcacaggatccaggctataaccctcatgaaagggatctcaagggagagctggtttcctttattgctaccagagcagcctgcacctttctgaatcccagcactcatgacatttgacttttgccttctattccagtatctatcgcctcctcatgatctgtgagtccttaagaccaggggctgttttagccttttctgtgtcttcaggacttaacacaaggcctggtcc

SEQ ID NO: 478447 - DNA, 590 bp, Homo sapiens
gacatcatgcctgcacatgctyagcattgtgcccagcatggtcagggattgataaaaacacttgtgtattctctttttattatcatcaccaccattataatcattactgagagatgcatccgtagagacatcatgtcagagagaagcagaggaacccagaaggcagcaatgaaactaacatttagaagcaacacaggtgatggggcagcccagaaagctgaagacagaaaccatttcggagaattagctgcaaaagaagtagggaacaggcatgagaaggggacagttctttctggagctaactcagtgaacacaccagagcctgtgggaacatacatttttgcatcagtttcctcattgataaattggaagaaaggtacatggtagagaaggttacattagtcgatatttgtaacaagtcagggcacataacaggccctcactcaagagaagacacttttgttctcacatctcccttcttaaattaaggagcatctgccctgtatacaatcctgcacaaaaataaatccacgtaaacaaaatttcacagtaactacaaaagcctaatgatcattaaaaattcctgggag

SEQ ID NO: 478448 - DNA, 590 bp, Homo sapiens
gacatcatgcctgcacatgcttagcattgtgcccagcatggtcagggattgataaaaacacttgtgtattctctttttattatcatcaccaccattataatcattactgagagatgcatccgtagagacatcatgtcagagagaagcagaggaacccagaaggcagcaatgaaactaacatttagaagcaacacaggtgatggggcagcccagaaagctgaagacagaaaccatttcrgagaattagctgcaaaagaagtagggaacaggcatgagaaggggacagttctttctggagctaactcagtgaacacaccagagcctgtgggaacatacatttttgcatcagtttcctcattgataaattggaagaaaggtacatggtagagaaggttacattagtcgatatttgtaacaagtcagggcacataacaggccctcactcaagagaagacacttttgttctcacatctcccttcttaaattaaggagcatctgccctgtatacaatcctgcacaaaaataaatccacgtaaacaaaatttcacagtaactacaaaagcctaatgatcattaaaaattcctgggag

SEQ ID NO: 478449 - DNA, 590 bp, Homo sapiens
gacatcatgcctgcacatgcttagcattgtgcccagcatggtcagggattgataaaaacacttgtgtattctctttttattatcatcaccaccattataatcattactgagagatgcatccgtagagacatcatgtcagagagaagcagaggaacccagaaggcagcaatgaaactaacatttagaagcaacacaggtgatggggcagcccagaaagctgaagacagaaaccatttcggagaattagctgcaaaagaagtagggaacaggcatgagaaggggacagttctttctggagctaactcagtgaacacaccagagcctgtgggaacatacatttttgcatcagtttcctcattgataaattggaagaaaggtacatggtagagaaggttacattagtcgatatttgtaacaagtcagggcacataacaggccctcactcaagagaagacayttttgttctcacatctcccttcttaaattaaggagcatctgccctgtatacaatcctgcacaaaaataaatccacgtaaacaaaatttcacagtaactacaaaagcctaatgatcattaaaaattcctgggag

SEQ ID NO: 478450 - DNA, 665 bp, Homo sapiens
tatcagctgccagaagtatagacacatcagtgaggggattctcctacgattctggtacatttatgagattaaaaccagccatacattgccaagtgcaatgtccatcccagatgatagccaatcaatatttatcaagcttctctagaatgagacagagaaggctgagagctaagagatctgtccamcttctgccactaatgagctatgtggttttgggaatgtcacttagtgtttcctggcctcggtttcttctgctgcaaactgggcaagataatctgtggtcccatccaaagaatttccctgctcagttaacaaggtcatggtcatttacagagaagtttcattttggagtccatgggaggccagaacataaaacttcataatttcaagcacttttctattttaagcatcattatgtttgagggaaaatagtcccaaatgtgttaaactaattcttcttagcaactttctaacagtccccaaatttattcaaattaagtagcaaattgagacatcctagagcagatatacattcagttttaaattgctgcctttatattttacatatcattgaattttcaaataatacaattagcaaaagtgcaaaaatataagtgaattgaatttaaactgtgaagctagagggatggaagtttttaatcact

SEQ ID NO: 478451 - DNA, 584 bp, Homo sapiens
tttgaactcaggctgacttagattgtacaagcccacatttctactcctgcctcagcctcccaagtagctttgactacaggcatgygtatcaccatggcccagctaatttttgtatttttgcagacatgaggtttcgacatgttgcccaggatggtcttgaactcctgggctcaagcaccctccagcctcagcctcccaaagtgctggggttatgggcatgaaccaccatgcctggcttaaaacaacagatctcttaaacatgacttgagttattccaaattaacccactaaatagtgggaatagaatttcatgctttgggacagaaaacaacttgatactttgtacccaaacacataactcatttaaatcctataatatccgtttcttccaagcagaatgaaattctatcagttgtagctcatatcttcttttattacatgagatgaataaaatagatttgtacatttttagggatttaaagtctagcaatagaattatagtctttataccttttgacaatgaccctgatactgcataaatgtcaccagtgaatgaaaactaattatagttcttccaggctaaa

SEQ ID NO: 478452 - DNA, 613 bp, Homo sapiens
gaaataaaaaaatcttaaataccttgataaatctgtggccaccctcatgacctacttctttcaggctgaaacagacagcctacaaaactttttaaaaagtcatgtccctaagttttctactgtgttatttcctgagaccataaatccaagttgttatgtatacctagaagctgcctctagaaatcttgtgcttggtgatgtttcaaaaatacaagtagaaaacaaaaatccaataattcttcacatgcacatcttctcggtgccattgtaccctgacctcagaaaatgtcatagtggctatttcactctataaagttgaataggyattacatttcctgcagtagccatgtaatttagaagagctatgtatttgaaattttaaatcctggatgtgaatttcagctttgtcactgattgtttcattgtaagcaagacatttaactctgttccaacccacatcccctgatgcgtaaaatgaactataaaagctgccctgccctgccctgttcactttacagggatgttatcaggagctaatgagaaaaatcctttgcaaacttatagaaaagtatactattattacacataacaagatattgctgtgcctaacaat

SEQ ID NO: 478453 - DNA, 439 bp, Homo sapiens
agctgccactgtgctttatttctgtatttttactggttaccaacattatggaccattatcttactactccaaacaattactaataacgccctttcacttgcactgcatcctaacttctgcacattacagtggttcaacaactgtgcaagaaaattcccattagccttattacttccaacaactgaatattttatcaatcagctaggctttcaggatcgccttctttcttctccactgtttccccctacttggagcatgtaggctttaatatcacacacgaatcccacttcaacttcactttcctgagtgaatcactatggtttgagctatatgtgtatgtgtgagtgcttcagcctgtttgctccagagttaattctttctgctactttgggaccatgttctttgactaaacrcaatgtatttatgggagggaagtctt

SEQ ID NO: 478454 - DNA, 439 bp, Homo sapiens
agctgccactgtgctttatttctgtatttttactggttaccaacattatggaccattatcttactactccaaacaattactaataacgccctttcacttgcactgcatcctaacttctgcacattacagtggttcaacaactgtgcaagaaaattcccattagccttattacttccaacaactgaatattttatcaatcagctaggctttcaggatcgccttctttcttctccactgtttccccctacttggagcatgtaggctttaatatcacacacgaatcccacttcaacttcactttcctgagtgaatcactatggtttgagctatatgtgtatgtgtgagtgcttcagcctgtttgctccagagttaattctttctgctactttgggaccatgttctttgactaaacacaatrtatttatgggagggaagtctt

SEQ ID NO: 478455 - DNA, 595 bp, Homo sapiens
atagatcaagaaacaatattatcctcagaagctctcctcwtgccccattacaattactatttatccttactctcaaaccccagaatataatgactatcctatttctccatgagtttcactgacttgatagctcatttctttttattgcatactgtctgacttgtgtacatttttgattaactttgtggaggtacattcatatctcactgtagttttaattatcatttccttaattaccaaagcagtttagaatgtgttttatatgttcattgaccatggagttttgtttgtttatgaaataactatttatatctttgccatttttctatcagattttttttgtcatttacccattgattcattgattttcttcctacattttggatcccaatcttttgtcagtgatatgtattagacattaatttttgtccttttagttgcccaatttgttgtctttttagtctattttttctgactttgttgagcaaaaatcttaacattaatgtggttgaatttatcaatctcatcctatataacttccacttcttgagtcttgttaaagaaagccttttgtatcctgaattcatacagaaaa

SEQ ID NO: 478456 - DNA, 595 bp, Homo sapiens
atagatcaagaaacaatattatcctcagaagctctcctcatgccccattacaattactatttatccttacwctcaaaccccagaatataatgactatcctatttctccatgagtttcactgacttgatagctcatttctttttattgcatactgtctgacttgtgtacatttttgattaactttgtggaggtacattcatatctcactgtagttttaattatcatttccttaattaccaaagcagtttagaatgtgttttatatgttcattgaccatggagttttgtttgtttatgaaataactatttatatctttgccatttttctatcagattttttttgtcatttacccattgattcattgattttcttcctacattttggatcccaatcttttgtcagtgatatgtattagacattaatttttgtccttttagttgcccaatttgttgtctttttagtctattttttctgactttgttgagcaaaaatcttaacattaatgtggttgaatttatcaatctcatcctatataacttccacttcttgagtcttgttaaagaaagccttttgtatcctgaattcatacagaaaa

SEQ ID NO: 478457 - DNA, 595 bp, Homo sapiens
atagatcaagaaacaatattatcctcagaagctctcctcatgccccattacaattactatttatccttactctcaaaccccagaatataatgactatcctatttctccatgagtttcactgacttgatagctcatttctttttattgcatactgtctgacttgtgtacatttttkattaactttgtggaggtacattcatatctcactgtagttttaattatcatttccttaattaccaaagcagtttagaatgtgttttatatgttcattgaccatggagttttgtttgtttatgaaataactatttatatctttgccatttttctatcagattttttttgtcatttacccattgattcattgattttcttcctacattttggatcccaatcttttgtcagtgatatgtattagacattaatttttgtccttttagttgcccaatttgttgtctttttagtctattttttctgactttgttgagcaaaaatcttaacattaatgtggttgaatttatcaatctcatcctatataacttccacttcttgagtcttgttaaagaaagccttttgtatcctgaattcatacagaaaa

SEQ ID NO: 478458 - DNA, 595 bp, Homo sapiens
atagatcaagaaacaatattatcctcagaagctctcctcatgccccattacaattactatttatccttactctcaaaccccagaatataatgactatcctatttctccatgagtttcactgacttgatagctcatttctttttattgcatactgtctgacttgtgtacatttttgattaactttgtggaggtacattcatatctcactgtagttttaattatcatttccttaattaccaaagcagtttagaatgtgttttatatgttcattgaccatggagttttgtttgtttatgaaataactatttatatctttgccatttttctatcagattttttttgtcatttacccattgattcattgattttcttcctacattttggatcccaatcttttgtcagtgatatgtattagacattaatttttgtccttttagttgcccaatttgttgtctttttagtctatttttkctgactttgttgagcaaaaatcttaacattaatgtggttgaatttatcaatctcatcctatataacttccacttcttgagtcttgttaaagaaagccttttgtatcctgaattcatacagaaaa

SEQ ID NO: 478459 - DNA, 593 bp, Homo sapiens
tcaaaagctattaagagctactggactgcatgatagctgaggagattgtcttttatgtttttgctctgaattctctactttgagcgtgtatatgtgtgtgtattgtgggggacagttaactgaagtagaaggaatacatatatatacttatgtatatatacacatattctaaaaatacattaaaaaatttttttttcagatggagtcttgctctgttgctcaggctggagtgcagtggcagaatctcggctcactgcaacctgcgcctcctgggttcaagcaattctctgcctcagcctcccgagcagttgggattacaggcaccagccaccatgcctagctaagatggggtttcaccatcttggccaggctggacttgaactcctgatctcatgatccacccgccttggtctcccaaagtgctcggattacaggcgtgagccacwgcgcccggcctaaaaatgcactttagagcagtcttcagtccacagtaaaattgaggtgaaagtagagatttctcatgcatttcctgcccccacacgtgcacagcctcctccattatcaacatcctgcaccacagtggtacatttgtt

SEQ ID NO: 478460 - DNA, 593 bp, Homo sapiens
tcaaaagctattaagagctactggactgcatgatagctgaggagattgtcttttatgtttttgctctgaattctctactttgagcgtgtatatgtgtgtgtattgtgggggacagttaactgaagtagaaggaatacatatatatacttatgtatatatacacatattctaaaaatacattaaaaaatttttttttcagatggagtcttgctctgttgctcaggctggagtgcagtggcagaatctcggctcactgcaacctgcgcctcctgggttcaagcaattctctgcctcagcctcccgagcagttgggattacaggcaccagccaccatgcctagctaagatggggtttcaccatcttggccaggctggacttgaactcctgatctcatgatccacccgccttggtctcccaaagtgctcggattacaggcgtgagccactgcgcccrgcctaaaaatgcactttagagcagtcttcagtccacagtaaaattgaggtgaaagtagagatttctcatgcatttcctgcccccacacgtgcacagcctcctccattatcaacatcctgcaccacagtggtacatttgtt

SEQ ID NO: 478461 - DNA, 592 bp, Homo sapiens
gctgtttttcattacaaagattgaaaagtagaaattcaaaatagagaaaaggaaaaagagacaagatgctatagaaagtagatgataataaaagctaaattcagcctaacacacatacaagtttcccatgtcatatcttggagaactgagcttggcaaacctctgaaatctcattttggctgggcgtagtggctcatgcctataatcccagcactttgggaggccaagacaggcagatcacctgaggtcaggagtttaagaccagcctggctaacaggtgaaaccctgtctctactaagatacaaaaattagccgtgtgtggtggtgcatgcctgtagtcccagctactcaggaggctgaggtaggagaatcgcttgaacctgggaggcagtggttgcagtaagctgaggttgtgccaccgcactctatcctgggtgacagagagagactccgtctcaaaaaaaaaaaaaaaatctcattttgattttgaaactggaattttactttgatagtgggttttcttgaaggtttaggcagacttttttttycccccaatttgacattgctacaaattccagagtttgattttcct

SEQ ID NO: 478462 - DNA, 215 bp, Homo sapiens
gctgctcactccatggcagactaaccagctctgtgaagcctttacagaaaagaactaagatgtctgacaatcctagccraactcttaggtgataaccagcaccaatttggcagccataggagtgaactcattttggaaaaaaacatcgtttagctccagtcaagctgatgcaaagagaccagtgattaagtccccctgccaacctccgcacaaat

SEQ ID NO: 478463 - DNA, 532 bp, Homo sapiens
atgggtttctgtcctggtaagttgtaattttttgcatccacttgtctgtctctccatttyggggtttagtggtttgccctgtgacctcatttctgtgatgactctaagaagagttgttgcttttacggtttgttccgttttttacttactgttagaacaaagactttcaaatttcctacatgctaaactgaaaactagaagtccatattgttatttgaaaggaaaaaaaaaatttcatatccaagtaggagaataaaactttgaaagcaattctgaatccaattctacagtgtactattggcttctctcagttcagactagaacctttttcatgaaattttttatttcactggttttcttttccatttccatgacctccacaaggcaccttgtttttgctgggttctattacctgttattgcctcttcacttcttgagtgaacagggtagacttcagtcgcctgcttaaatattaatttctccagtctttgagccagtttacatattgatgcatcttgccctctctaccatt

SEQ ID NO: 478464 - DNA, 532 bp, Homo sapiens
atgggtttctgtcctggtaagttgtaattttttgcatccacttgtctgtctctccattttggggtttagtggtttgccctgtgacctcatttctgtgatgactctaagaagagttgttgcttttacggtttgttccgttttttacttactgttagaacaaagactttcaaatttcctacatgctaaactgaaaactagaagtccatattgttatttgaaaggaaaaaaaaaatttcatatccaagtaggagartaaaactttgaaagcaattctgaatccaattctacagtgtactattggcttctctcagttcagactagaacctttttcatgaaattttttatttcactggttttcttttccatttccatgacctccacaaggcaccttgtttttgctgggttctattacctgttattgcctcttcacttcttgagtgaacagggtagacttcagtcgcctgcttaaatattaatttctccagtctttgagccagtttacatattgatgcatcttgccctctctaccatt

SEQ ID NO: 478465 - DNA, 599 bp, Homo sapiens
ggtgcaactttattataacacgtagtttgaatttaagcacctggatttgaaatgttggaaaataagtgtgattgggttttagttgtgtattcataaacagttggtgaggtgtttatgtctaggcagctcaaccctaaccctggagagggtcatgtgcttggcctcagagatggagaggacagggctcagtggccgcacctaaggcagagtagtgtagcaggccccttctgttgcagtcggtcactggagtgcccttcctctgggccagtgatggaggctgggcttctttggagacccacaatctttcaggacctccacttcctttccctgccacctgtgtccatgtatctggaatggggaaatggtaaggaaccctttactgtaaccctccaggaataggacaagaggtttcttcttcttmttattattattatttgagtcagagttttgctatggttgcccaggctggagtgcaatggcgtgatctcggctcactacaacctccgcctcccaggttcaagcagttctcctgccccagcctcctgagtagctgggattacaggcatgcgccccacgcctggctaattttgtatttttat

SEQ ID NO: 478466 - DNA, 455 bp, Homo sapiens
ttgttttcaaatgtacaaaatgttgttgattgttttgttgttgttctatgtgtcacatttaattgcttcrtttcattaatgtatagtggttttcttctgtccacttgagacttatatttcttaggcctatttgtctccaaacgactagttctcctcccataggggtgatttttaggttcaggttataaaagcacacattttaaggttgccaaggtagtacagtgtacttgttgtttataaaagtttattattctaaaataagtagcctggtctctgagtgtaggtcactttgcttatgatggctgaagggtgcagagtgttctcagcaggcttcattgtcttctcttcacctcctccctgcaagctctgatccctgagggggtccagaggtggctcctgtgggggccttaactctctactattctgagaccagaaagcacctcagtggtttgtgg

SEQ ID NO: 478467 - DNA, 306 bp, Homo sapiens
tgggggcacattccaatttttttcagattatcttaaaatgttgaaatcttgaactctgcaaacagatataaaaactcttatcagtcttgacataatcctcattagtagaaacaatattataaatgaagtttctatttttccaggacagatgtcyttttcagtaaatggcctcttgatgattgttctgtgaacatctaaagcctgtgattagagctcttcaaatgaccagaagtcactactcaaaatcttccttaccacacaattactggatcatgtgcttctcttgtgcttctgtgctactccagc

SEQ ID NO: 478468 - DNA, 491 bp, Homo sapiens
ggactgcaggtgcatgccaccatgcctggctaattctttaattttctgtagaaacagggtctcattatgttgcccaggctgatctgtaactcctgacctcatgtgatcctcccatctcagcctcccaaactgttggtattataggcctgagccactgggccaggtctgtgtgtttyttaaccagagaatagatcctagagaatcaaaaacttgtatgtatgggagtaactgagattattaacaaaaaaatatataactggtttccagactgactagtagtcagaatcatcagtgagactttgaaagtgtggatccaaggactttgacacagactttgaatttaggatatttagggattcattagattccacatttttaacatgctttctagatgtttcacctgcaccagttgggttccattttgtatacttatgtttgggaaccatatgtagctttgcttttgtaaaaacaaaaaaaaaattttattatag

SEQ ID NO: 478469 - DNA, 613 bp, Homo sapiens
actcacagctggcagcaaagctgctggactcagcctaagtagtgacaagagggaccttgggactcaggactggtcagaggaggacagtgggttttacatacaaaaaaagctctcaataacaagaatcaaaactaggggytgggcgtgatggctcacatctataatcccagcactttgggaggctgaggcgggcagatcacttgaggccagaagttctagaccagcctggccatcatagaaaacgtctttactaaaaatacaaaaactagccaagcatagtggcactggcctataatcccagctacttgggaggctgaggcacgagaatcgcttgaacctgagaggtggaggctgtagtgagcccagattgtgcaactgcactgcagcctgggcaacaaagcgaggctctgcctaaaaaacaaacaaacaaataaataaataaataaataaataaataaataaataaatctaggttctagttatcagaattagaacacaaggtgcaaatcataactgggaaccatgtgtagctgagtctgcccccgacactaaaaaccattttcttcttcccccagagtaatagaattatagttgagtgcatacatatccaata

SEQ ID NO: 478470 - DNA, 613 bp, Homo sapiens
actcacagctggcagcaaagctgctggactcagcctaagtagtgacaagagggaccttgggactcaggactggtcagaggaggacagtgggttttacatacaaaaaaagctctcaataacaagaatcaaaactaggggttgrgcgtgatggctcacatctataatcccagcactttgggaggctgaggcgggcagatcacttgaggccagaagttctagaccagcctggccatcatagaaaacgtctttactaaaaatacaaaaactagccaagcatagtggcactggcctataatcccagctacttgggaggctgaggcacgagaatcgcttgaacctgagaggtggaggctgtagtgagcccagattgtgcaactgcactgcagcctgggcaacaaagcgaggctctgcctaaaaaacaaacaaacaaataaataaataaataaataaataaataaataaataaatctaggttctagttatcagaattagaacacaaggtgcaaatcataactgggaaccatgtgtagctgagtctgcccccgacactaaaaaccattttcttcttcccccagagtaatagaattatagttgagtgcatacatatccaata

SEQ ID NO: 478471 - DNA, 613 bp, Homo sapiens
actcacagctggcagcaaagctgctggactcagcctaagtagtgacaagagggaccttgggactcaggactggtcagaggaggacagtgggttttacatacaaaaaaagctctcaataacaagaatcaaaactaggggttgggcgtgatggctcacatctataatcccagcactttgggaggctgaggcgggcagatcacttgaggccagaagttctagaccagcctggccatcatagaaaacgtctttactaaaaatacaaaaactagccaagcatagtggcactggcctataatcccagctacttgggaggctgaggcacgagaatcgcttgaacctgagaggtggaggctgtagtgagcccagattgtgcaactgcactgcagcctgggcaacaaagcgaggctctgcctaaaaaacaaacaaayaaataaataaataaataaataaataaataaataaataaatctaggttctagttatcagaattagaacacaaggtgcaaatcataactgggaaccatgtgtagctgagtctgcccccgacactaaaaaccattttcttcttcccccagagtaatagaattatagttgagtgcatacatatccaata

SEQ ID NO: 478472 - DNA, 640 bp, Homo sapiens
ttttatgttttttcttctgtcaagaatgaagaaaataagcattaagttaatttgtttttcaaggttttttcagaatcaattaatgtcacctctgtaccattacaacttgtgctgtaggaggaaggactgtgcagtaagtcccacctttgcctgtgccctgtcctgtgttccccaaaagagtcatgtctcctctctgaacctcagttcttggaaaagaaaagagatgtcctggtgacctctgaagtcacttcctactctattatttcatgacakaattttccccctgaagacatttctctgtcttacatgataattgaatgaaaactaagtccaaaaaggcacagagctcatgggctgagagttacaggtacacaagttacctttgtccccaagtctagcaagaaaggcaaaattctcagatcaaaggaaggccacccattctgataatcccaggtcacaggatggacttactatttataggtactaagaaaatgcaaacaaaagtgtaatttagagagaatttttttttttttggtgagattaaagtgtcttcctagcagttatcaagaagaggcaaccaaaatatacctattaaaggaatttgtatatttggaattttcttatatctcaaaaacagatt

SEQ ID NO: 478473 - DNA, 484 bp, Homo sapiens
tgtaaaataaaagaaggaagtggcagaagaaactggagaaggaaggaagactttactcacgggaagaccttgtgtttcaagaaaaggagtttatatatttatcccgggggcatatgaaagcactgaaaatttttgaggaatgccataatcatgttttgttttctaaagatatgctgatggcattgtgaggattgcattaatgataatgagaagtgtggagaaaggagaagagagggagggggcccagtaagcctaggctgggcatagtggttcatgcctgtaatgctaacactttgggaggctgaggccagaggattgcttgagctcaggagttcaagactagygtgggcaacatagggagacccatctctacaaaaagttaaaaaaaaaaaaagtcaggtgtgctgtcatgcacctgtaatcccagatacgtgggaggctgaggcaagaggatcacttgagcccaggaggctgaggctgcagt

SEQ ID NO: 478474 - DNA, 680 bp, Homo sapiens
ctggccagcctaccacacctgcatgtacctggcctgaaaatgacaggtgccccaatccacagcaaatgtgcaccaccaccactccatcacaaacactcacagcttggaccactgaggcaactgcagacattattgatgawgactacaactgaggaaactgcatggatattatgctaccaagtccaccctaaaccaaagccaatataccatacccaagcaataccataatattttaatttaaaagccttttaaaactaggtttctatagttaattccatctattttgattttatggcaaaataatttctcgaataagttaaacgatttaaccaagtgctaagggaatctgttactgctagaccagccttacaagaaatccttaaggaagttttaaaaatggaaacaaaagaatgatacctgttacttaagtacgtagcacacacactttataaagcaaccacacaatagaaaccacaaagcaaccagctaataacttcgcaataggatcaacacctcacatatcaatattaaccttgaatgtaaatgggctaaacaccatatttaaaaagcacagagtggcaagttggattaaaaaacaagacccattaatgtgctgtctttaagagacccatttcacatgtaataacacccataggcttaaactaagtggttggaggaag

SEQ ID NO: 478475 - DNA, 634 bp, Homo sapiens
aaagcaaaacaaaacaaaacaaacaaaagaaaatacagcaagtattagaaagaaggaaaacaactttaagtctaatattaaaaatcagtgactttactatattgtgggtgatatagaaagttaacagattggtcagatttttacaagaaggtaacacgtatgacatagttaaggctttgaatgaaatgtagaggcatgccatatttactatcaactgtttcatatatttccatgagaaattaccacaccatttgtaaggagtatatattcatctcatctcacgaaaggtaggtatagccccagaaacttaaatatctgaatgtcttaccagctccaagccagtggacacatcggcaatttcatctggaagcaacaagaacatgctaacatctccagcatatgggagttctagaatctgagcctttaggtcttctatgtatccaatgtttagcttttcacgcaagtacatcatctgtacaggtgtgcgctgagcctaatattattaaaaggtaaaatatggaagtcgattataagatatcaagagatttacaattagacataaaggaggattggttctactttagtgtwggataaatgtgatttttttaaatcaacaaaataaattatttgtaca

SEQ ID NO: 478476 - DNA, 486 bp, Homo sapiens
gctgtttattcacccacattgaagaaactcccatcattcttaatcattgagcaccacaacattccaatcatcaaagaatggcttgaaatagaacctccttcacaaacccttcccaaggcatgttacctttttggggggaataagctgtaggcacttattatatcctgtcttgcactcacacattgctcttcacatccatcaaagtctcctttcttttcatttcacacccactctgtaaytggcctcctctgtcctcacttcactgtgtcaagcagtcaagcagtccctaagcagtagcaacaaactgctatagctggtaggttggtgcccacactttcataagttcaagcagaaaggatgtaatgattccaaatgaatttcaacagtttactgctcacagcacagaaggcctgggtttcttgttcacatgagttcccctaactagctttgcaagtaccacaggggtgaggtcagtgctgcacacac

SEQ ID NO: 478477 - DNA, 650 bp, Homo sapiens
cactgagggacctgagcagtgggaaaaaccacccagagcatacacatgagcaaagagggtcagcagtgcttctcacccggtaagccctccaagtaaccagggtaggcttggttctggagctcatgccttactcagcctggtgcaacatgctccttgggagaggttgcttggaatatttgaaaaaytcttattaatgccccattcgtgcagattacaaggctatcaaaaaggaaggtaaaggcctggtgtttagaaaagaaagaatactctaaaggtatacatcgggttgggagtgtaagagtcattgactaccataaggttcaaccccctagaagtccttcttggtaggcagtaggcagagtccctgagtggaactgaagagtctgtacaaggaggggacaagtggaggagaggagaaggtcaccaccatcaaggccaaaatagcccagtaacagacccaggctcctcttcccagttgctcccatgtggaacagcattgagttgacaactaggaagtcatttcgttcctacagtaccagggtccacatatcaggtaacacattgggtccgggtgtgttagggcacctgagatgccagaaagctccatagttgaagaaatgtccactcatgctattcagtggcatggcagc

SEQ ID NO: 478478 - DNA, 606 bp, Homo sapiens
tgaaaatgatatgaaatttaaaattcagtgtccacaaataaagttttattggaacacagcctggcccattcaatgcacgttgtctgtggctgctttcgtattgwatcagcagagttgagaagttgggacagtgtggccagcaaagctgaaaatattgactctctggacctttagaggaaaaagtttgctgacttctgttcaaagcgttatttatccacctatactgtgcttccggccctggtgtagaacatacacaatgcagattccttagctccagcctccaggtgtgggtttggttcaatgaatctgcattttgttaagtagctgagagcattgttcagatccctactctgctccaagccaggtgctaagcctttatgagcatcacttcatgtaatcctggtgagtcagacactggaaaatccccattgtacagaggaggaaactgaggctcaaagaggtgagaggcttgacctcacacccaacgcaggaggtgcgtggtgatcccctctgctgttgtgcagaggaatgtgcccacccatctcctctgacgcctgggcctttgtgctgggccggaatgtcttcctgcctttctctagttgtgtt

SEQ ID NO: 478479 - DNA, 606 bp, Homo sapiens
tgaaaatgatatgaaatttaaaattcagtgtccacaaataaagttttattggaacacagcctggcccattcaatgcacgttgtctgtggctgctttcgtattgaatcagcagagttgagaagttgggacagtgtggccagcaaagctgaaaatattgactctctggacctttagaggaaaaagtttgctgacttctgttcaaagcgttatttayccacctatactgtgcttccggccctggtgtagaacatacacaatgcagattccttagctccagcctccaggtgtgggtttggttcaatgaatctgcattttgttaagtagctgagagcattgttcagatccctactctgctccaagccaggtgctaagcctttatgagcatcacttcatgtaatcctggtgagtcagacactggaaaatccccattgtacagaggaggaaactgaggctcaaagaggtgagaggcttgacctcacacccaacgcaggaggtgcgtggtgatcccctctgctgttgtgcagaggaatgtgcccacccatctcctctgacgcctgggcctttgtgctgggccggaatgtcttcctgcctttctctagttgtgtt

SEQ ID NO: 478480 - DNA, 639 bp, Homo sapiens
gactgaatgtgtcataattgatttagccacttccctatcaataaacatttaagttttttctaatctttcaccatgacaacaataaagcaaagcccattcttgtgcttagctttgactacttctagtcaaagaatggcaaactaaagaaatacaacaggcttcttaaggcagctcctggcaatgtcactggaattgggtgactgcttgaagcagaaaatgctgatctgattggatacattctgaatgttttctcaaaaaacatctcattattctattcctggaatattgataccaccctcaaatgctacttatttgaaaagtgagccaggcacagtggctcattcctatgatcccagcactttgagagtcgaaggcaggaggatcacttgaggtcaggagttcaagaccagcttgggtacatactgagaccctgtctctaccaaaaaaaaaaaaaaaaaagaaagaaaaaaagaaaaaaatgcagaatctatgtaataataatacagaatggtgacattttagtccagacagaactgccatgaaacccctccaggaygtataatacatagacaaatctttctttcgctggcagaaaagagtcaaggatgcagagatttcagacagccactctagaagcag

SEQ ID NO: 478481 - DNA, 626 bp, Homo sapiens
tttggtggcccagcctcctttgaaagggttctagaatgtcggatgtgcatctgacctctatgtctttgctaggccatcccccctacctggaaccccctactmctcccaaggtccatcatccccggcctccacaagcctgtcctgagccctcagtgtatgctcacttcacccagccctaagcagaagaccagcagcctccgcacttagctgagggactctcctgtcccttgggcctggtttcccaacccatctggcctcttctgcctaggaagggaccgggctgcaagcctcctgccagggccctcagcacatagttctgcttttgccagcaagagcaagtaagtcatgtcctgattgctttgttgttttcccagacagtaatagcaacatttaatatttattcaatgctacatgcctagcagtttacaggccctctctgcatatttaactggcttagtcctcacgataactctgtgacatagatactattctattaccatccctgttttacagataagacatatgagtacagagaagtgacataacttgcccaaggcatatagctagtaggtgagagagctggaatttgcacctgggaggcctggccccagagcccacattcataa

SEQ ID NO: 478482 - DNA, 626 bp, Homo sapiens
tttggtggcccagcctcctttgaaagggttctagaatgtcggatgtgcatctgacctctatgtctttgctaggccatcccccctacctggaaccccctactcctcccaaggtccatcatccccggcctccacaagcctgtcctgagccctcagtgtatgctcacttcacccagccctaagcagaagaccagcagcctccgcacttagctgagggactctcctgtcccttgggcctggtttcccaacccatctggcctcttctgcctaggaagggaccgggctgcaagcctcctgccagggccctcagcacatagttctgcttttgccagcaagagcaagtaagtcatgtcctgattgctttgttgttttcccagacagtaatagcaacatttaatatttattcaatgctacatgcctagcagtttacaggccctctctgcatatttaactggcttagtcctcacgataactctgtgacatagatactattctattaccrtccctgttttacagataagacatatgagtacagagaagtgacataacttgcccaaggcatatagctagtaggtgagagagctggaatttgcacctgggaggcctggccccagagcccacattcataa

SEQ ID NO: 478483 - DNA, 633 bp, Homo sapiens
tacataacaagggtatagctgacattggtggtttgctccccaacatttatccgttttccctgctgaaagaaccctcattttgttccagtatacacccctccctcctatgcctccaggtaaagccrctattggtttaaacgaatcatgatgatcttgatccctgtagcagtggttggctcaagcatcatcatgtcaattctggtcaatgaactgtgacagaaaatttctagaagcttctggaatcactttccttcattctaaagaaaggcccaaggaagaaaaggcaaccttctccttctaatcattattgtgtcaggatattatacctggatttgttgcagccattttgtagccatgcagtgagtaagctcaaggaagaagctagtgtgttgaggttggcagagaaaaaatatagaaagatggggttcttgttgatactattaagccacaacccctggaaccactcaagctcatatgtcttgttataggagatacaataaattcccttactgtttgagccaattagaagaggtatttttctaggcctcagagcccaaactccctaactgataacatggggataccaggattctaaagtcaatgggtgaatagagtaggtctgcaatgaatggt

SEQ ID NO: 478484 - DNA, 601 bp, Homo sapiens
tttttgtccaaaattgttagaattccaagatggacaggctcctaggggttcccccacccacttacaaataccatgtaagctagatattcagtccttctctgtgtgctccgtcacggtgtgctggaggggagaccattgcctgtttgccttacttgttgtgttctcggtaggacgtggtggctcacacctgtaatcccagcactttgggaggccaaggcaggcagatcacttgaggtcacagtttagaccagcctggctaaagtggtgaaatcccctytctgctaaaaaaaaaaaaaaaaaaaagttagtcaggcatgatggcgggaacctataatcccagctacttgggaggctgaggcaagaggatcacttgaaccctggaggcagaggttgcagtgagccaagatcatgccactgcactccagcctggatgacacagcaagactgtcaaaaaaacaaacaaacaaagacttactgtttcagtatggtagccactagccacatgtaacctcttaaatttaaagtaactaaaatgaagtaaaattaaaagttcagagtcctagttacagcagccatatttcaagtatccattggcctcatg

SEQ ID NO: 478485 - DNA, 601 bp, Homo sapiens
tttttgtccaaaattgttagaattccaagatggacaggctcctaggggttcccccacccacttacaaataccatgtaagctagatattcagtccttctctgtgtgctccgtcacggtgtgctggaggggagaccattgcctgtttgccttacttgttgtgttctcggtaggacgtggtggctcacacctgtaatcccagcactttgggaggccaaggcaggcagatcacttgaggtcacagtttagaccagcctggctaaagtggtgaaatcccctttctgctaaaaaaaaaaaaaaaaaaaagttagtcaggcatgatggcgggaacctataatcccagctacttgggaggctgaggcaagaggatcacttgaaccctggaggcagaggttgcagtgagccaagatcatgccactgcactccagcctggatgacacagcaagactgtcaaaaaaacaaacaaacaaagacttactgtttcagtatggtagycactagccacatgtaacctcttaaatttaaagtaactaaaatgaagtaaaattaaaagttcagagtcctagttacagcagccatatttcaagtatccattggcctcatg

SEQ ID NO: 478486 - DNA, 516 bp, Homo sapiens
aaaacagaatatgcagttaatcttaggctaatttgggcatggatttttttttttttggtagcatatctttcaacagtgtgttccttagaaaccactgtcttaaaggactgttgtcttcccagctctggaggtgaggttccaatcatcgtgcagttcttaagattttcttcctctacctagagaggcggggtttctgtagggtttgcagaactcyctccaggtgtgaggagggggagagatgttgggctccctgagggcagtgatgcagggaactccaccagagctggtcagagcccacttcgcctgtgtaaccaaccactggcttccctatcttccacctggccatggggtgatctgccagtacgtgcaaactctccagcattcctgaacatgaacaaggcactcccttcctgcttctaaacagatgccccaaacctctcagcaagtgtggataaagaaggtaccttcttgtttggagctgacaagaaggcctgcctctcacttctgtgtggagat

SEQ ID NO: 478487 - DNA, 476 bp, Homo sapiens
actgactagtctgaacacctacagtttccagatgagaaagctaatttggagaggaggggctggaatgctggagttaaggtgagraaaggaggctggagggaaccctgtgcctaggtgatgaggccagaggccccgcagcaggtccagcctcaggcctctaaggagcagctctgattcagtggctggagtgcacagggggaacgcccaggtctcctgcctttcaggttttccaaattgcctgagagccagggggctcagatggactcagtgacctgtgggtccagcgtccatgccacagctcccagcctacctgtgggaggaaggatgcatcttctgtgcactgacctggcacaaccaaaatgaaagcaccacccgctcccaactgctcgtggagctaagtctggctgcgctcattgtggtgggtgacatacgatgcagggtcacaggggtgctagaaagctcatgggcttttgagg

SEQ ID NO: 478488 - DNA, 240 bp, Homo sapiens
ctgagagccagggggctcagatggactcagtgacctgtgggtccagcgtccatgccacagctcccagcctacctgtgggaggaaggatgcatcttctgtgcactgacctggcacaaccaaaatgaaagcaccacccgctcccaactgctcgtggagctaagyctggctgcgctcattgtggtgggtgacatacgatgcagggtcacaggggtgctagaaagctcatgggcttttgaggca

SEQ ID NO: 478489 - DNA, 601 bp, Homo sapiens
gactggaaggattacctcctagaaagagatgagagccggagctcggcatctccccaaaagtgttccctcgcctctgggggcgtggggctgccccagtggtttgctgagtgagtacattttgaaagcactgactagtctgaacacctacagtttccagatgagaaagctaatttggagaggaggggctggaatgctggagttaaggtgaggaaaggaggctggagggaaccctgtgcctaggtgatgaggccagaggccccgcagcaggtccagcctcaggcctctaaggagcagctctgattcagtggctggagtgcacagggggaacgcccaggtctcctgcctttcaggttttccaaattgcctgagagccagggggctcagatggactcagtgacctgtgggtccagcgtccatgccacagctcccagcctacctgtgggaggaaggatgcatcttctgtgcactgacctggcacaaccaaaatgaaagcaccacccgctcccaactgctcgtggagctaagtctggctgcrctcattgtggtgggtgacatacgatgcagggtcacaggggtgctagaaagctcatgggcttttgag

SEQ ID NO: 478490 - DNA, 621 bp, Homo sapiens
taaacaatcaggcatggggatgcaggtaaactttctaggagtgagtgccgagaggtgctggaagtagtgccaaagaaaggctgtgccgtttttgtccctagacccctaaggaaccacccatgtactctatctccccagattggtggagtcaggggaggggacaggctgacttctagaaggccagccttgctttgcacattttgacaacaagcacaaaagatacactcggtatcacatccaacccaccccagtgggctctttgtgagactccgtagtgagtactgcccaggacatagggcaagaagtttacttcctcttcctctcgcttgaaatcaccaagtcactttattacagatctaaaaacacccgcccgggcttctgcctgctaatattctcttgaaatagactcattccttcagagtcttattgtactttcccttatgatcaaaattagcaagaaacttgcataaaagaggacaataattgctcaacgagcatctcgtttgtaatttattagtttctattattgtgggttaccatggtgacrctgcgcagtcccggtgatgggagagatgcaagataggagctgaggaggctgtgaggcctcgccaaatggagatg

SEQ ID NO: 478491 - DNA, 368 bp, Homo sapiens
cattcctgctaaagacagggataaaactagaaacccacactcattacattggcagtggtaaacaatgtagacaggaagaagatggtrtttaaaatagtaacccaaaagatatgcctttatgattaccattttaaatattatcttattttctactatattgttaaactatgtgtgtgtacttttatatgtgtgtgtgtatacatacacagatatagaaaatgagagaatgaatcgagagatcagagaggatgtccagtgacacattgatagattatttctgatatgtgtcaggaggtattttgaaaaattgtcactttcttttttgtacttttctggatatcacttgtgtttgattttacagaaaacat

SEQ ID NO: 478492 - DNA, 479 bp, Homo sapiens
gggtaccaatatgcatcacaattgggatctcgggtgcaagtcagataaattgttaacttataagaaaagatattttggagggagcagataattggaaagctcataggatttacgggaagcttggaaaaccattcccccaaaaaaggagtgtaggggcagcagagaacactgcttacagcatgtcttaggaacagtctatttaagacaccactgctccagctatgggtctctgggccacactgaaacaccattgcgaatcatctctaaatgaccccaagaatttttgtcacttctgrttggaataccaggtggtaacacctgttttttagagccccagtcatgtgcctattcattaagaaacagaaaggagaaattttttgtttcctgtggctgctaccaaaaccacatgtaatggaaagtataaacaaataggaaggaagctcagaaggagggcagccaaaattgggaaaactctctat

SEQ ID NO: 478493 - DNA, 480 bp, Homo sapiens
gggtaccaatatgcatcacaattgggatctcgggtgcaagtcagataaattgttaacttataagaaaagatattttggagggagcagataattggaaagctcataggatttacgggaagcttggaaaaccattcccccaaaaaaggagtgtaggggcagcagagaacactgcttacagcatgtcttaggaacagtctatttaagacaccactgctccagctatgggtctctgggccacactgaaacaccattgcgaatcatctctaaatgaccccaagaatttttgtcacttctggttggaataccaggtggtaacacctgttttttagagccccrgtcatgtgcctattcattaagaaacagaaaggagaaattttttgtttcctgtggctgctaccaaaaccacatgtaatggaaagtataaacaaataggaaggaagctcagaaggagggcagccaaaattgggaaaactctctatt

SEQ ID NO: 478494 - DNA, 479 bp, Homo sapiens
gggtaccaatatgcatcacaattgggatctcgggtgcaagtcagataaattgttaacttataagaaaagatattttggagggagcagataattggaaagctcataggatttacgggaagcttggaaaaccattcccccaaaaaaggagtgtaggggcagcagagaacactgcttacagcatgtcttaggaacagtctatttaagacaccactgctccagctatgggtctctgggccacactgaaacaccattgcgaatcatctctaaatgaccccaagaatttttgtcacttctggttggaataccaggtggtaacacctgttttttagagccccagtcatgtgcctattcattaagaaacagaaaggagaaattttttgtttcctgtggctgctaccaaaaccacatgtaatggaaagtataaacaaataggaaggaagytcagaaggagggcagccaaaattgggaaaactctctat

SEQ ID NO: 478495 - DNA, 549 bp, Homo sapiens
gggtaccaatatgcatcacaattgggatctcgggtgcaagtcagataaattgttaacttataagaaaagatattttggagggagcagataattggaaagctcataggatttacgggaagcttggaaaaccattcccccaaaaaaggagtgtaggggcagcagagaacactgcttacagcatgtcttaggaacagtctatttaagacaccactgctccagctatgggtctctgggccacactgaaacaccattgcgaatcatctctaaatgaccccaagaatttttgtcacttctggttggaataccaggtggtaacacctgttttttagagccccagtcatgtgcctattcattaagaaacagaaaggagaaattttttgtttcctgtggctgctaccaaaaccacatgtaatggaaagtataaacaaataggaaggaagctcagaaggagggcagccaaaattgggaaaactctctattacttaccccaagggcagcctgattctagactagcctgaagcctgtcrggtagtctagaataagtgctct

SEQ ID NO: 478496 - DNA, 640 bp, Homo sapiens
cccatgagcagctaacacatcaattatggaaagggagaagcatccaaatccagatgttttgaatgtctttggaatttatacactttcttaactatggctagttgagttactgtatgctgataactgaaataacttcttaattgcaygtcattgtaatttcaaagacagctcttggccttttaatagtaacagaggtgattctgctcaatgagaagcagatgccaacacagaactaaatcagatgcagagcatatagataaaatttttctgaattatttcgtcagagcagggattcaaacatatttccttttgccagtcttactttatatcttggtgcagttgatacatctcaaaggagcttacaactgttccacatgggaacttattccaagtcagaaagaggcaaatacagtgcattatgatttagagtccgttgctgaaaataggatattgtggcttaaagaaatatttagacattacttaagctaattattatgggattgaaatgaaggtctaaatgttatgactggaactgcactcatgtttccaaacctttttaaccaagccagtagcttgcagaacaaacttcactttagtgtagaacacacacgcacacacatacatgcacacacacgcacat

SEQ ID NO: 478497 - DNA, 622 bp, Homo sapiens
ctggtcttggactcctgggctcaacctatccaccggccttggcctcctaaagtgctgggattacagatgtgagccaccgtgcctggccaaagttattattatttttttaaagtaaacatgtactgcagttacctgatgctaccacatattaactgcatgaaaaatattccatagaagtagaaagtccttttgactgtgaacttacaaacatgtgaatggaaactattatgagctayaaattgaatataattatttttttcttaatgactttgcagaagggatctgatacaagcttaatatgaaaactaaaaactgccacttttagcaactgaagctaaaatattgtaagatcagaatactcccatcttgtggactgatagaaggctatttattacaattttggggaaaaaaatttctttttttaatgtcttgagtcaattcgaaaaagtgtggtttttttaaaaaaaattttaatagaaataaaagtcataaagtttttccttaaaaacttactgttattaaaacttctggcccataattgatttgttggataatagtcattagtatagtgctattatagcatttgccatcaaaatgccatttatatggccaatacacataa

SEQ ID NO: 478498 - DNA, 622 bp, Homo sapiens
ctggtcttggactcctgggctcaacctatccaccggccttggcctcctaaagtgctgggattacagatgtgagccaccgtgcctggccaaagttattattatttttttaaagtaaacatgtactgcagttacctgatgctaccacatattaactgcatgaaaaatattccatagaagtagaaagtccttttgactgtgaacttacaaacatgtgaatggaaactattatgagctataaattgaatataattatttttttcttaatgactttgcagaagggatctgatacaagcttaatatgaawactaaaaactgccacttttagcaactgaagctaaaatattgtaagatcagaatactcccatcttgtggactgatagaaggctatttattacaattttggggaaaaaaatttctttttttaatgtcttgagtcaattcgaaaaagtgtggtttttttaaaaaaaattttaatagaaataaaagtcataaagtttttccttaaaaacttactgttattaaaacttctggcccataattgatttgttggataatagtcattagtatagtgctattatagcatttgccatcaaaatgccatttatatggccaatacacataa

SEQ ID NO: 478499 - DNA, 513 bp, Homo sapiens
tatttctgtcactcctatattgtttgcccagttggagtaaaaacagagtgaagagtaggccaatcaggaagcttctgtctggaagactccccttagaaacaaacattttgaaatgggaagtagaattaaaaccaaatgtaaaccaacttatataataagtaacctgtttctggctatcttatgcatctgatgcattgatatctttttgttgtatttatttatttattttgagatggagtcccgctctgtcgcccaggctggagtgcagtgacgcgatctcagctcactgcagtctccgcctcccaggttcaagcgattctccctgcctcagcctcacragtagctgggattacaggtgcccgccaccatgcctggctaatttttgtattttttatagacacagggttttgccatgttggccaagctggtcttgaactcctgatctcaggtgatctgctcccctcagcctcccaaagtgctgggattacaggcgtgagccaccatgcccagcct

SEQ ID NO: 478500 - DNA, 513 bp, Homo sapiens
tatttctgtcactcctatattgtttgcccagttggagtaaaaacagagtgaagagtaggccaatcaggaagcttctgtctggaagactccccttagaaacaaacattttgaaatgggaagtagaattaaaaccaaatgtaaaccaacttatataataagtaacctgtttctggctatcttatgcatctgatgcattgatatctttttgttgtatttatttatttattttgagatggagtcccgctctgtcgcccaggctggagtgcagtgacgcgatctcagctcactgcagtctccgcctcccaggttcaagcgattctccctgcctcagcctcacgagtagctgggattacaggtgcccgccaccatgcctggctaatttttgtattttttatagayacagggttttgccatgttggccaagctggtcttgaactcctgatctcaggtgatctgctcccctcagcctcccaaagtgctgggattacaggcgtgagccaccatgcccagcct

SEQ ID NO: 478501 - DNA, 448 bp, Homo sapiens
gagctgtgtacccaacaggtactcaacacaygctggtgggctgaaggcatggaccagacttcaagctcttcagaagaggtttaagtgacagtcattgtttaaactgcagaggccacagacaggcagggaagatcaaacagaagtgcagagaacctccagtccccaggactcctgcctgccctggactcacagacccacattgagctttcctcccacctcagagcacggacacacgtgcacaggagcggctgaaaagtgcaacctcgtccaagaccaggagaaacctagcaccaatccacccagaaatgggccatccagaatggagttttctctttctcagactaactaggtaataataatgagaaaagccatcatcttttgcattcaaagtcatagaactagttggttgctggatgggattcaaacccaagacttggctgcttaccag

SEQ ID NO: 478502 - DNA, 387 bp, Homo sapiens
ttaaagagtctaaaaatattccccttccaaaatgagaagaaaagaggccatgatattaatactaatacgttgactaaaaataatgattttctctaacaatataggcatgaataaaatctatacttttataaaataagaaataaataataatttgctggtacaaccacagaatatgttagtccccttatcccacgcaatgaggcttcaggggccaggcttcctttctttacaaggggtcatctaaaacrgacttaagcatacatgacagaggaataagtgtgacagtctgagacatgacgggccctcagaaaaccttagctggctccgaatctttcctcaaaacaggaattctctgcaccgacgcgtcactgccacctttacccagat

SEQ ID NO: 478503 - DNA, 671 bp, Homo sapiens
gctggacatgttaattacctgtctgtctagggaaagactctgtaatgtgtgcctcttaggagcagagtgttaaatatttagtacatatttgggaagaaagatacaagctaaatatgttcttagaatttcagccagctacacctgtgtaaaaacaaacagaacctgcattaggaatggaagttaaactttatccattttgaatttcaacatgtcaaaacattatcatggtagtctaggtggatttttttcattaacacagaacttagaaaaaattttaaatgatgacgtttggccaagacaagtaataataaaggagtgtgtggycttcaactgcctgctaaagacttgctgatcacattaggattactttttttttttctttcaacaactttaagaccaagtgtcctagggaagctggaataaagcagtcacagttcttatttgtgactgtggtcttttcctgtgactccatttccctattatctgtttcagaaactgtctgggcagaagataaatccagtgctccggatgtttggtcagtccatatcgggaggcattgatatggatggaaatggctatcctggtaagctgtttttctttaaaggcacatgagataaatgaagataaatgcatgaagtagaataattttcagtctggttagcaatcatcac

SEQ ID NO: 478504 - DNA, 671 bp, Homo sapiens
gctggacatgttaattacctgtctgtctagggaaagactctgtaatgtgtgcctcttaggagcagagtgttaaatatttagtacatatttgggaagaaagatacaagctaaatatgttcttagaatttcagccagctacacctgtgtaaaaacaaacagaacctgcattaggaatggaagttaaactttatccattttgaatttcaacatgtcaaaacattatcatggtagtctaggtggatttttttcattaacacagaacttagaaaaaattttaaatgatgacgtttggccaagacaagtaataataaaggagtgtgtggccttcaactgcctgctaaagacttgctgatcacattaggattactttttttttttctttcaacaactttaasaccaagtgtcctagggaagctggaataaagcagtcacagttcttatttgtgactgtggtcttttcctgtgactccatttccctattatctgtttcagaaactgtctgggcagaagataaatccagtgctccggatgtttggtcagtccatatcgggaggcattgatatggatggaaatggctatcctggtaagctgtttttctttaaaggcacatgagataaatgaagataaatgcatgaagtagaataattttcagtctggttagcaatcatcac

SEQ ID NO: 478505 - DNA, 671 bp, Homo sapiens
gctggacatgttaattacctgtctgtctagggaaagactctgtaatgtgtgcctcttaggagcagagtgttaaatatttagtacatatttgggaagaaagatacaagctaaatatgttcttagaatttcagccagctacacctgtgtaaaaacaaacagaacctgcattaggaatggaagttaaactttatccattttgaatttcaacatgtcaaaacattatcatggtagtctaggtggatttttttcattaacacagaacttagaaaaaattttaaatgatgacgtttggccaagacaagtaataataaaggagtgtgtggccttcaactgcctgctaaagacttgctgatcacattaggattactttttttttttctttcaacaactttaagaccaagtgtcctagggaagctggaataaagcagtcacagttsttatttgtgactgtggtcttttcctgtgactccatttccctattatctgtttcagaaactgtctgggcagaagataaatccagtgctccggatgtttggtcagtccatatcgggaggcattgatatggatggaaatggctatcctggtaagctgtttttctttaaaggcacatgagataaatgaagataaatgcatgaagtagaataattttcagtctggttagcaatcatcac

SEQ ID NO: 478506 - DNA, 502 bp, Homo sapiens
tgcatgacctgctcctgtgtaggwgtcatagcacacattggcattgtccctggataccaattaacacatcttgttttttcatccaggtaccccttggcacaagtgatgtccagcggcaagggatggctctttttggagatacatgatgccacctgtgaatagttgtgtagccagcagtttcaaggcctggagatgaggcccttcttgagagcctggaatggcaagactttctgtccagagtagggaactctgtaacctatcacagactcctctgctgagagtaggtctcatatatctatgaatctctcaatctgttcttcactgcctcatctatggttatccaaaaaatcatggttgttatgtctggtgctacctgcacctccagtgaatccatggatacctccagcaggtttttctttggtcatgacagatgctaatttattgccctgttgccatcagtcacacatttttgaccacagcatgatgcataactgcatgagct

SEQ ID NO: 478507 - DNA, 597 bp, Homo sapiens
tttattcttattttatttatttatttatttttattatttaccagtagacctcaaattttacccatctgtgctgctgctctctctcttttttttgcgggggggacaaggtctggctctgttgcccaggctggagtgcagtggctcactgcaacctctgcctcctgggctcaagccatcctcccacctcagcctccctaatagctgggactataggcgttcaccaccacacctgactaattttcacattttttgaagagatggggtttcaccatgttgcccaagctggtctcaaactcctgagctcaagcgattctcctgccttcgccttccataatgctgggattacaggcgtgagccacggggcgcctggcctgctctctcttttaagaccttaattgtgatgttcagcctcccatcccacttgatttccagaagattctctccattcccctttccctttcttcctttccttttgytttttttgttttgttctggttttcgtttttttctccttttcactttcctttgtacgaccaggtttccctcgctggggagcacgggcatgctccgcagatccatcttgcctgtcactgtagc

SEQ ID NO: 478508 - DNA, 562 bp, Homo sapiens
ctatgaaatattttggtcccaaactcatttgagtttgtggtataatgggaaggaataacagttttgaatctgtatgacaagagttttgctagagttaaatagggaagcaatggaattaagacagaggagmaactacagtcaagataaggataatgagagagtttctatcgggagacttattctgcctgggttagagagtatgaataaaagattaaattatttatagtcataagtcataaacatatgcagtgttgtggaagtgtggagggcatatgtgatggttaatatataatatcaacttacttggattgaaggatgcaaagtattgttcctgggtgtctgtaagggtattgccaaaggagattaatatttgagtcagtggactgggagaggaagacccaccctcaatctgggtgggcaccaactaatcagctaccacctgactaatacagtacagaaagaggaaatttaacatggctaggataaaaacaggcagaggaatgtggaaggactagactggctgagtcttccagccttcatctttctctcatgctggatactt

SEQ ID NO: 478509 - DNA, 370 bp, Homo sapiens
atctgaaattattagaaaatcaatagactgaacaaaccgggaggatttgagcaaaggagtaagtgtagtggttctggatgagaagtgacagtaaaaatgatcaaacagagtaaggactgagttgaaagtattggttcagaactgctagagagtaggcgatcattcataatctattaagtagttggctaggcagtgtggctaacgcctggaatcctagcactttgggaggccgaggccagagtatcagttgagcccaggagtttgagaccagcctggtcaacataatgagaccccatctctataaaagaaaaaaaaacttttttttaattataaaaaaagaaaatctrttgaatagttgagctgtgatgct

SEQ ID NO: 478510 - DNA, 646 bp, Homo sapiens
tgtgaaccactgtaactggctgcaaacagttttcttttcttttcttttcttttttttttttgtaacagggtctcactctgttgtccaggctggaatgcagtggtgtgatttggctcacagcaacctctgcctcctgggctcaagcgatcctctgacctcagcctcccaagtagctgggactataggcgtgtgccaccatgcctggcaaacgttttgtattttttgtagagacagggttttgccatgttgcccaggctggtctcactactgggctcaagcaatccgcctgctttggcctcccaaagtgctgggattacaggcatgagccaccacgcctggtgcttgcaaacacgaaaattaagattttctcatttcaatcaagattttctcaggattaggcaacgaaagtaaaatgaatttggaggttgacatcagactgcagctatcatccgcagtccctaattttaagtttttaataaaaatagcttcatgatttcagtaagaaatgatataaatttcataaatacatgatataaattaaactttatcactttatacttatcatgtactggttttatatattggaagctgggaygagatttcatttgaaaagaggtttctattgctaaaaatgtttaaatatcac

SEQ ID NO: 478511 - DNA, 525 bp, Homo sapiens
gctgcaacaacacattagtctaaattaattgttcaaatgcgttgtcaaatgaatgacatggatattacagtcaatgattgtaaatactttagctgacagtgacgagcacattccaggatatatttatagactaggagaaaaaataaatactgtaggatggaaactcaaagtaattactatatcagtgatagaagaatagtaacattgttaaaaattcttcascaattattttgtgttcatccaaagaaatcctttaaatcagcaatttctccaacaattcccccaaatgttgaaaaaggtcctctaggtgtttacgttatcaaatgtaataatgtcacaattttgttttaatcaacaagtaaaataagtttttaaaaagatccctataaaacagaatggtttgaagccatctgtaagcatatatgacagtcaatagttatatttagtcatccagtagatttattattcagtaaaaaccaagagatgtctttgaagtttgatcatcatttcattctaaattatttt

SEQ ID NO: 478512 - DNA, 445 bp, Homo sapiens
aagtacaaaaacggcctcaagattgtcagtaatgcctyctgtaccaccaattgctcagttcccctggccaaggtcatccatgacaattctggcatcatggaagaattcatgaccacagtccatgccatcacggacacccagaagactgtggatggcccctctgggaaactatggcacaatggctgtggaattttccagaacatcatgcttgcatctactggcactgacaaggctgtgggtaaggtcatccctgagctgaacaggaaggtcactggcatgatcttccatgtctcccaccaccactgtgtctgtcagtcatggatctgatctgctatctagagaaacctggcaaatataatgacatcaagaaggtagtgaaacaggctacgtgcagtaaaactcatgcctgtaattctagcactttgggaagacgaggtgggtggat

SEQ ID NO: 478513 - DNA, 496 bp, Homo sapiens
tcttatatacctccttctggaacttagcactataagattcattcagttactgattcccatttttcccatcacaaaatcttgttcacattaatgtgctgtgatttatcttcttccaaagtctcttgtgcttagaaaagagaagctaaaattagttaggaaagcattcattaaggactggatcatgggcattccactaagcactggtgataaggagacttataagttatgttttatgttcttaaggaatttattaacctggttgaagaaacaggatatatatgtgtgtgtgtgtgcatgtgcgtgtgtgtgtgcrtatatatctatatatatcaggctatatatgtaaaatgtaaataatatcataaacatatgccaagtgctaaataagcttgatttcataatgcttgtttcacaaacaggttaaaaaccaccagtcaggtatactgtaacacttaggtggatttaacattttcttctcctgaagaaaaatacttaa

SEQ ID NO: 478514 - DNA, 583 bp, Homo sapiens
ctgatgttgtaaatctgtacttcctggaacagaattcctggcataactttaggcagactaaatgggaatgaacatgtgtgatcattacaacactgattttttttttttamaaaattaatttttgttgaactggggtgaggggtgagggaaggaggggaaattggtgctctaataagatttacgtatccaaatcccatacccagagtcagattatgaagagcagaatcacaaagccactccatttataaatcctgattctgccctctactgtttgtttatttttgtatttacttctccttgagcaacagtataatgtacaactgaaaatacttagtgttactgacaagatttataattcagcactactttatgtgttaatgacttcaaagccctggatgaataaagcgaacagggattgactcagtgaaacttctagcttcctgtaaacttcattcattctcaagcttaatggaaacaaaaccctatgctaggaaaaagcaagtatgtttccctttctgagtctccctagttaaacactataatcaatggcaactccaccttgtagcaaagctcagtgatacca

SEQ ID NO: 478515 - DNA, 605 bp, Homo sapiens
ctggaattaattccctttgcttcacttattccatagcaactttgtgcatctattaaagcacttatctggaagaccaaatgttgtgtctccctaactaaactataacctgcttgmgggcagggatcagatctcattcattttggccagggtagacacatggaaagagggctggaccaagagccataagcctctagaacttcctgtttttataatcttgggcatgttgctctctagggctcacttttttcatctgaataatgggaacagttctacctcacagggcttagaaagaaataaaggagctgaaaatcctctggcatgtgtatgaggtgctaaataaacataggctattatgatccctgtaggtaggaggcagtaactgggaaggccccaattttagaaacctttacttaactaaagaagttggaagatttaaaccttaatagggcatgtaagaaactatgtctttcaagggaaggagctcttaaatgtagcattttctggtaatcttgcagcacagtcatctgctctgaaggggcctggattccttctgaaatggggacctgagtggtggcagacgagggcaactcaggggaggactggtg

SEQ ID NO: 478516 - DNA, 605 bp, Homo sapiens
ctggaattaattccctttgcttcacttattccatagcaactttgtgcatctattaaagcacttatctggaagaccaaatgttgtgtctccctaactaaactataacctgcttgcgggcagggatcagatctcattcattttggccagggtagacacatggaaagagggctggaccaagagccataagcctctagaacttcctgtttttataatcttgggcatgttgctctctagggctcacttttttcatctgaataatgggaacagttctacctcacagggcttagaaagaaataaaggagctgaaaatcctctggcatgtgtatgaggtgctaaataaacataggctattatgatccctgtaggtaggaggcagtaactgggaaggccccaattttagaaacctttacttaactaaagaagttggaagatttaaaccttaatagggcatgtaagaaactatgtctttcaagggaaggagctcttaaatgtagcattttctggtaatcytgcagcacagtcatctgctctgaaggggcctggattccttctgaaatggggacctgagtggtggcagacgagggcaactcaggggaggactggtg

SEQ ID NO: 478517 - DNA, 321 bp, Homo sapiens
tgaggctgaagtttgaaaagctgtcactgaaggaccctgagacagcagtgaggcaagagagcagcattgcaggggcgcatttatgctraaagtacagtcaggagggtggatgacactcacagtgacaagaaaacgtgccaaagaagagggcagggagggagagcagggagcaagcctccccctgcccttcacccagatggatgagttcatgagtggccacctgaagtgtcaatagtggtgtcaactcctgctaaacatgactcgatgggcactttcccaccctaacacaggtaactggtcctgaagcactttgaagttctc

SEQ ID NO: 478518 - DNA, 615 bp, Homo sapiens
aattcataatgtagtcagtgaaaatgtaggattcaattcatgtacccatccattcttcttgcaaatattaactgaaccgtactgtgtttcaggtactcttttatactctagagatatagcagtgagccaaacagaaaaagaaaatgacttgacctttctggagcttagaatatagcagaaatttttattttggatagcaataaataataaggttaaaaaaagcagagaaggggacataaattgtttggaggtggtaatgaaattttagattaggtggcctggaaatgactcattgagaaggtgacattgtatagtgacctgattataatgaaggagaaatctgaagagaacatttgaagcagacagactgccaaatgccaaggtcgtgaagcrgatatatgcctgatctgtttgaggaagatatgtagcaaagtgaatgaggggagatggtagtaggagatgaggttagagaggtaatatgtgtgtgtgtgtgtgtgtgtgtgtgtgtgtgtgtgtgacattcagaccatattaaggatttgacttatgttctgagattggcaaccactgggtgggtttgagaagcggagtgatacaatctgactcggattgtgg

SEQ ID NO: 478519 - DNA, 540 bp, Homo sapiens
gctgccactggggaactcgagtatggatttgcctggtccagctctgtacagcttcaccccctgctccaaggctgaatgtaaaacccaaacactgagtgttccacagccaagcctatgcctgggacaccagagtgctttttctgataaacaaagatcaaacataaaacctattgcaccactgcagccagatcttacctgcaagtgtgacctactgtcctagaggtcagtctacacaatccagtgacctctgccactccagcttctcaggaagctgtgagcctgctcacccgcctggtacaccaccactacaaccaatatttgagaaagccatcacactaagtctacctataatcaaaaaattcatagattcttcaccaccaaacatacccagaagcaaagccaaacacccctactcagcatacattataatcacaccctaaaggaaacaaagtcctgtcacaatggaaktgaattcaaaaataagaagtgactgcttctctagaggagaagtataagcataaaaatactggaatatgaaaa

SEQ ID NO: 478520 - DNA, 628 bp, Homo sapiens
ttttttattatgattttttaaaaaagtactttatatactttttccctttgtctgatatgtcatgacaagtgtctttccagtttcttaattttcttaaaaaaaatttaaaggaagattttcatgaacagaatttttactttttaatgcagtcaaatgagtcaaatttattttagggttaacatcgttgtatcatttttaagaaattttgatctatgctaaggctcaatatgtttactcttatattttcttccaaaaattttacaattttgttcttaactttggatccaaatttgctatttgtgtgtggtgtgaggtagcaatccatttaaactttccawgtaaaaaaatatttttttcagaccagtgtctctgctttttcactcttctcttctatgcctcctttgtcatatgtgaaaattccatatataaatggatctgtttctgtgttctcaatttcgctcccttatggaccttaatttccatataggaagagagtcaggatgatgaaatgctgataattggtgcaaaaggggcattggcagttaccaagaatctatcaagcattgtattgggcaatttacatgcattttatcctttaatcctggcaataacctctgaatcatgcatc

SEQ ID NO: 478521 - DNA, 649 bp, Homo sapiens
ttgaaagtttatcacagctgaaatgtacaagacagtagtgacactgagctctccaattatttttaagaatggggcaccaaaatgttcattggtagctgttggtgtttgtatggggagcataaggcttatcaacttgggttgctcttagagtgcaactcttgttgagttttatgttgcaggaacccttcatgtcagtgcctctaggtttattcttggactggtcagcttccccaaaggaggctcttccaaactcctgctaagctttgtaagtgtggcttccctttctgaggctaagtgagagaagagagctgaatggtggtagggttaggggtgggggttcaactttttcttcttctcagctatacttctcttcatatgccaagagagcctctgttttgcaatcaacagagaataagtctttattcttctgccgaagtgaaggaagaaatctagggttttacagcatcaaatataattttaattgattctcctgtttttaacttcacctgtatctccacttttagatgtayatagagccacaaattccagaaccttttgagatttcttctgtttctggaagctttctccaacactggcttaggatacagctttctggactcagccaagccactaatccacgggccctact

SEQ ID NO: 478522 - DNA, 595 bp, Homo sapiens
gaaaccctctggtagagagtcccatgggtgagaagggtgacagtcacagctcttgcctctgtgggcttcmcttcacaggtatgtataaactggccacagcctcacagatttcaagcccccttggagggcccagccaagaaagtttcttctccccttctctgtccagcgccagcataaagggcacatctttttgaatcaaattgtactgaattgaaattgcacacctgtgttgtcaatggccctgttttgtgaggacatcctgctgcctgaaggggaggatgcaggggctaacatgactcagagaagtcatgctgataatgtggagattaacagcaatggatgggtctgtgtctccactctgcatggctggggtatcaaggtcctggcaccagcaatgatttgctagggtgttgcaactggtgctaatgatttctagaaacctagaagttataggaggggaatttaatgggaaagaggctccacctcctggtaatactcaaaaccaacatttcttcagcgctttacagtttataagcttctgtcagcttttaaaatctcatttaattctctatcttgatctgggtggtggttacca

SEQ ID NO: 478523 - DNA, 444 bp, Homo sapiens
tgaactgaatgttgaagtcaattggggaaatgatgaggaaaggggttttaggcagagggaacaacatgtactaaacactaacatgagaacgcttgagaaagcttgcccaaggatgtaggaagaatgcaaccaacaaattttaacatgttgtacaaattaaatttaaaattgtttgcttctctgtttgcttttccagaagaggtcattggtgactagtgaaagaagcactgaacttggaatagggataacttgaaaaaaataatgattccatttattgttgctaagyttatactgtatattccaggctctttactaacagtcactgcatgatgggagaacttttacctcgctccagtctgcagatggggaagctgatgttcagtgagtactagcctgtaccaacataattgttttacttctcagtcttcttagctgagacccagg

SEQ ID NO: 478524 - DNA, 623 bp, Homo sapiens
actgggtgtgtgaatatgactgaatagtacttcccaactatatcaaagatcacaagacttttgaactagaaaggctgttagagattctaacccctgcattttaaagagattgcaactaaggcctaagctggtaaagtgctttactctgtttatgttttttaactgtgtaaggacaaaaagtcagtatcataacaaaataaatctcctccttcatgttttcataaccttctctaatattaaaaaggaaaaagagaaaatagtctgtaaatgcagctccaagacagatgcctgcagtctgcagggaggaggaggaagagggagtgtactgaggcgtgaggctgagaggaaggcgaagagagagcactgatgagagaaagggccagggagaagcaaagatgaccttggcagtccaaagagctccatattccaaggatgcaaggaagacctccttcatttattttgcaaactaaattaraactgtttcctggtcccatccaccaaaggcagaggagagcactatcttactctcatgactccctcccctcccccagatcgtacaaaaacctcaagggcttacacattttgaaaatgttgttaggcaggaaaagccccctacagctctc

SEQ ID NO: 478525 - DNA, 375 bp, Homo sapiens
tctgaaccagaatctgcaattttaaaggcttgaatatggggactcmgggggcatttggttcccacatgtttaatgacactttcagaaactaggctacagagggaagtacatcctacgatgggctctgtattctgtttccagcacagtctgatgtggattcaaatctcagctctcctctctcaaaaatgcagtaagctataatccaaattgactgttgggaggaaaaacatgggatttgacaacatggggtttctctgggaccctttagtgcccacaatgccttttctggtgtcctttttagattctgacatgtctgtatttcagatgactcatcaactgaagaagtagaccaaggaagtgcagatggggttctga

SEQ ID NO: 478526 - DNA, 375 bp, Homo sapiens
tctgaaccagaatctgcaattttaaaggcttgaatatggggactcagggggcatttggttcccacatgtttaatgacactttcagaaactaggctacagagggaagkacatcctacgatgggctctgtattctgtttccagcacagtctgatgtggattcaaatctcagctctcctctctcaaaaatgcagtaagctataatccaaattgactgttgggaggaaaaacatgggatttgacaacatggggtttctctgggaccctttagtgcccacaatgccttttctggtgtcctttttagattctgacatgtctgtatttcagatgactcatcaactgaagaagtagaccaaggaagtgcagatggggttctga

SEQ ID NO: 478527 - DNA, 375 bp, Homo sapiens
tctgaaccagaatctgcaattttaaaggcttgaatatggggactcagggggcatttggttcccacatgtttaatgacactttcagaaactaggctacagagggaagtacatcctacgatgggctctgtattctgtttccagcacagtctgatgtggattcaaatctcagctctcctctctcaaaaatgcagtaagctataatccaaattgactgttgggaggaaaaacatgggatttgacaacatggggtttctctgggaccctttagtgcccacaakgccttttctggtgtcctttttagattctgacatgtctgtatttcagatgactcatcaactgaagaagtagaccaaggaagtgcagatggggttctga

SEQ ID NO: 478528 - DNA, 613 bp, Homo sapiens
ctggcctggggcatgactgacctgagcagaccacgggatgtcctccctgatctaaaccagtgggaggttcctctcactaatacacagctccaagttctcagcttgccttgctgtctttgagactcagaagggaggtgttactttcggtggtaagccacaatatgtaactcacagagggcatgtaagaggcaggtgaaagatgttttgcagcctgtttaaatgtcagtgactaagacccaggggtgctctgagaacattctcacttctcagttgtgggcayctaaaaggttactgtccacccagttctcctgccacgtggacttacggcatcacggcctcacatcctcatgggaccaatggcaaattatggaacctcaactcaggctgcttaagtaaaatgggaactctttgctcacctctgtggcttggcccaaggtgactcagaattgaaaaagaagctataggaatctgggatttaggaaccatgtctggtctcacacatgccaggactctctctctgtctatcccgttctcatctctgcatgtccttgtatgtgggcctaactctctcttgctgcattcaggagaaagggtaccatgcccaccaaggcag

SEQ ID NO: 478529 - DNA, 431 bp, Homo sapiens
ctggcctggggcatgactgacctgagcagaccacgggatgtcctccctgatctaaaccagtgggaggttcctctcactaatacacagctccaagttctcagcttgccttgctgtctttgagactcagaagggaggtgttactttcggtggtaagccacaatatgtaactcacagagggcatgtaagaggcaggtgaaagatgttttgcagcctgtttaaatgtcagtgactaagacccaggggtgctctgagaacattctcacttctcagttgtgggcacctaaaaggttactgtccacccagttctcctgccacgtggacttacggcatcacggsctcacatcctcatgggaccaatggcaaattatggaacctcaactcaggctgcttaagtaaaatgggaactctttgctcacctctgtggcttggcc

SEQ ID NO: 478530 - DNA, 589 bp, Homo sapiens
atttactcttcaaattcagtcacagtatccttgaccatatatactcttaccaaaaggactatattacgacataacttccaacaatttgtatataaaatcataagtgtcaggagaagaaacagttgccgagagcagcatgtgtactgcccaggtaggtgacccagtcagtggtggggacgaatttactgaccctctcaatcccgtgtaggtcaggcccawccatggttaaggctgaaacaggcaagtcctagtgggaggaatttgaaaaccaagttaggtgaaaaggcctaggggtctccaaccttggcctccgtccctgatagaatcagaggagagaggcctggggtgctggaggcagaagaggccctgccctgtccaaccctgagaggcagattctcagtccccaggatgtcggacacttttttctctcttgtcactgagtctcctctccacaggcagaactgtgggctgaaccctgaggccagcgcctctgctctctaatgaccaccaccaaatactcaggcccactgttcactaggtggcatcttactctgagcattacatatttatttccgtgaatgttttagct

SEQ ID NO: 478531 - DNA, 589 bp, Homo sapiens
atttactcttcaaattcagtcacagtatccttgaccatatatactcttaccaaaaggactatattacgacataacttccaacaatttgtatataaaatcataagtgtcaggagaagaaacagttgccgagagcagcatgtgtactgcccaggtaggtgacccagtcagtggtggggacgaatttactgaccctctcaatcccgtgtaggtcaggcccaaccatggttaaggctgaaacasgcaagtcctagtgggaggaatttgaaaaccaagttaggtgaaaaggcctaggggtctccaaccttggcctccgtccctgatagaatcagaggagagaggcctggggtgctggaggcagaagaggccctgccctgtccaaccctgagaggcagattctcagtccccaggatgtcggacacttttttctctcttgtcactgagtctcctctccacaggcagaactgtgggctgaaccctgaggccagcgcctctgctctctaatgaccaccaccaaatactcaggcccactgttcactaggtggcatcttactctgagcattacatatttatttccgtgaatgttttagct

SEQ ID NO: 478532 - DNA, 589 bp, Homo sapiens
atttactcttcaaattcagtcacagtatccttgaccatatatactcttaccaaaaggactatattacgacataacttccaacaatttgtatataaaatcataagtgtcaggagaagaaacagttgccgagagcagcatgtgtactgcccaggtaggtgacccagtcagtggtggggacgaatttactgaccctctcaatcccgtgtaggtcaggcccaaccatggttaaggctgaaacagrcaagtcctagtgggaggaatttgaaaaccaagttaggtgaaaaggcctaggggtctccaaccttggcctccgtccctgatagaatcagaggagagaggcctggggtgctggaggcagaagaggccctgccctgtccaaccctgagaggcagattctcagtccccaggatgtcggacacttttttctctcttgtcactgagtctcctctccacaggcagaactgtgggctgaaccctgaggccagcgcctctgctctctaatgaccaccaccaaatactcaggcccactgttcactaggtggcatcttactctgagcattacatatttatttccgtgaatgttttagct

SEQ ID NO: 478533 - DNA, 589 bp, Homo sapiens
atttactcttcaaattcagtcacagtatccttgaccatatatactcttaccaaaaggactatattacgacataacttccaacaatttgtatataaaatcataagtgtcaggagaagaaacagttgccgagagcagcatgtgtactgcccaggtaggtgacccagtcagtggtggggacgaatttactgaccctctcaatcccgtgtaggtcaggcccaaccatggttaaggctgaaacaggcaagtcctagtgggaggaatytgaaaaccaagttaggtgaaaaggcctaggggtctccaaccttggcctccgtccctgatagaatcagaggagagaggcctggggtgctggaggcagaagaggccctgccctgtccaaccctgagaggcagattctcagtccccaggatgtcggacacttttttctctcttgtcactgagtctcctctccacaggcagaactgtgggctgaaccctgaggccagcgcctctgctctctaatgaccaccaccaaatactcaggcccactgttcactaggtggcatcttactctgagcattacatatttatttccgtgaatgttttagct

SEQ ID NO: 478534 - DNA, 496 bp, Homo sapiens
aagacaggaaggaactcagtttgtcagattcccaaactcyatttatctctactgcaccgacttggtcagtgcctgacagagcccatccttaccccagggaccaggcacagggcctcacagagcccagtgtgggtccctgggacagagcggcagagggagggtcactccaggagcagacttggcagcatgtctgggcctggcaccagcctccaccctacaacctcaggccccaaggacagccactcagggtggctttgccgtctccctcttctcagggctgactgaggcaaagaaaataaattgagggtggaaggttctggaaatgaaatcaaccaagtcatgatgaggctgagcttggtggaattacagaaaccatgttctggaaaactatctatttctctacttttaattttttaatctttccccttatagtaaaagttatttttgagaaaggtgtgtctttgtttctgtgagcaaaggaaaaaagagattcccc

SEQ ID NO: 478535 - DNA, 441 bp, Homo sapiens
gtggggaaaaaagaaatggcaggaagggtgggggrtgtcaagttgggcaaaaattagggtgagctaaaaatggcatagggaaaggacgtgggaggtaagaccggggctgggggttgagatgagggtatggtgagacagtgatgctagacagggagtgggggctggggtgggggcaggagaagaggaggggtggcatgtgggagggcctgggaggggtgggaggacctgccctatctccgctcccctccctgacctcatcctggtcctccccttctcctcccctgctcgctgcagactccctcctcactgtcgctgccgagatccacagtcggttgtggctcagcccctgttgcaggggacaagtgagggagacttccctgtcctgccctgagacgccgccctcccggggttggggacagagcaggtgcagaggcactgcag

SEQ ID NO: 478536 - DNA, 514 bp, Homo sapiens
tttagacttttctaaacaatacagttgtgtatggatatctacatacacaaactagtttcatgaattccggggaagggagatgaaacaaacacatgtatttcttttttttccacttgtagcttttgttgtttggttgttactgttgttttgatgttgagttgggttttttttttttttcatggttttttggttttgcttccgtattaccaaatatggaaraggcactggatatcatttaaggttcaaaaaattgagtttgggggcccagccctgccatatttagtctagagcaagtcatttaatcttttggaagctcaatttcctcattttaaacaacaataatatttgcccaaccagccttactgtgacaaagctttgttagtttctgagtcctttgtagactcttgtttttattctaatgatctgattaactttttacttttcaactagttatttgggaagtaagaaggagagggttgagagttctccggttgatttcagcttgttggtagtt

SEQ ID NO: 478537 - DNA, 514 bp, Homo sapiens
tttagacttttctaaacaatacagttgtgtatggatatctacatacacaaactagtttcatgaattccggggaagggagatgaaacaaacacatgtatttcttttttttccacttgtagcttttgttgtttggttgttactgttgttttgatgttgagttgggttttttttttttttcatggttttttggttttgcttccgtattaccaaatatggaaaaggcactggatatcatttaaggttcaaaaaattgagtttggggkcccagccctgccatatttagtctagagcaagtcatttaatcttttggaagctcaatttcctcattttaaacaacaataatatttgcccaaccagccttactgtgacaaagctttgttagtttctgagtcctttgtagactcttgtttttattctaatgatctgattaactttttacttttcaactagttatttgggaagtaagaaggagagggttgagagttctccggttgatttcagcttgttggtagtt

SEQ ID NO: 478538 - DNA, 514 bp, Homo sapiens
tttagacttttctaaacaatacagttgtgtatggatatctacatacacaaactagtttcatgaattccggggaagggagatgaaacaaacacatgtatttcttttttttccacttgtagcttttgttgtttggttgttactgttgttttgatgttgagttgggttttttttttttttcatggttttttggttttgcttccgtattaccaaatatggaaaaggcactggatatcatttaaggttcaaaaaattgagtttgggggcccagccctgccatatttagtctagagcaagtcatttaatcttttggaagctcaatttcctcattttaaacaacaataatatytgcccaaccagccttactgtgacaaagctttgttagtttctgagtcctttgtagactcttgtttttattctaatgatctgattaactttttacttttcaactagttatttgggaagtaagaaggagagggttgagagttctccggttgatttcagcttgttggtagtt

SEQ ID NO: 478539 - DNA, 514 bp, Homo sapiens
tttagacttttctaaacaatacagttgtgtatggatatctacatacacaaactagtttcatgaattccggggaagggagatgaaacaaacacatgtatttcttttttttccacttgtagcttttgttgtttggttgttactgttgttttgatgttgagttgggttttttttttttttcatggttttttggttttgcttccgtattaccaaatatggaaaaggcactggatatcatttaaggttcaaaaaattgagtttgggggcccagccctgccatatttagtctagagcaagtcatttaatcttttggaagctcaatttcctcattttaaacaacaataatatttgcccaaccagccttactgtgacaaagctttgttagtttctgagtcctttgtagactcttgttkttattctaatgatctgattaactttttacttttcaactagttatttgggaagtaagaaggagagggttgagagttctccggttgatttcagcttgttggtagtt

SEQ ID NO: 478540 - DNA, 655 bp, Homo sapiens
aagtgggatcatcgtgggacctgatgattcagcagttggtcagttgcctgtgctggattctcagcatttctcagtattctcaatctgcttcttctctagttattcttatttttctccatctatcttggaaaattaagtgctacttttttgtcycttcatttagatagcaattatattattgcattattagataatcttttgattaaacactgaaatgatcataatttatcttcacgtttaaaaaataccttgttattcactattttttttctcttgcttaagatatggacgaatgcaaagaacccgatgtctgtaaacatggacagtgcatcaatacagatggttcctatcgctgcgagtgtccctttggttatattctagcagggaatgaatgtgtaggtgagtaataagttttcttccataggaactttacaaattaaaaattaagctatacagtattcactgtatagccatgaatataggtaccaagatggcactgaaataagttttatccatccactcatacatcattcatttagaatactagtgagtcaccatcaggtcccaggcactgtgctaggctctggagctgcagcactgaaccacaaagacaagttccttcctttcatggaccttacagcctaatggtgaaggc

SEQ ID NO: 478541 - DNA, 627 bp, Homo sapiens
atgtctacgtagccttgtttaagttactattctttaacaacttgtggtgtaactagcaaaaattgtaaaaagtggacctagattcttgcaaaattaccctgtagcgttctcaaggtgggggaaagaaaaatatggacaacaattgaactaaatttaattttatcaagttaataatgcctttaagattatagataggccaggcgcagtggctcacgcctataatcccagcactttgggaggccgaggcaggtggatcacctgagatcaagagttcaagaccagcctggctaacatggtgaaaccacatctctgctaaaaatacaaaaaaattagccaggcatggtggcgggcgcctgtaattccagctacttgggaagctgaggcaggagaatcacttgaaccagggaggcggaggttgcaataagctgagattgcgctattgcactccagcctgggcaacaagagcaaaactccgtctyaaaaagcaaaacaaaacaaaagatgatagataaacagaggaatttgggatttgaaatgtcatcttctcttaagatgcatctagacagttgataattgcccaaataagtttaatatgggatagactgcgaactttttttgcatgcagat

SEQ ID NO: 478542 - DNA, 385 bp, Homo sapiens
tgagaaggctcctgcagtgatccaggtgagaaatggtccagtggcaacatgggtcagagaggsagaagtggagatggtgacaagtgagtagattctggatatattctgaagccaataggatttgctgataaatcagatgtgcgtgtgagagtcaaagatgactcgaagattcatgccaaggatagcattgtcatgcatggagatgaaggaagagtgttaaagagcacctttgggaaggaagagtaagagctcacttttggacacattaagtcaaaagtgcacaaataatacttttttttagtagaattcattttgtaaatgtatctttgagcattaggaaatcacagtatggtgatctgtttccaatgtgcgtgttgtgttagca

SEQ ID NO: 478543 - DNA, 385 bp, Homo sapiens
tgagaaggctcctgcagtgatccaggtgagaaatggtccagtggcaacatgggtcagagagggagaagtggagatggtgacaagtgagtagattctggatatattctgaagccaataggatttgctgataaatcagatgtgcgtgtgagagtcaaagatgactcgaagattcatgscaaggatagcattgtcatgcatggagatgaaggaagagtgttaaagagcacctttgggaaggaagagtaagagctcacttttggacacattaagtcaaaagtgcacaaataatacttttttttagtagaattcattttgtaaatgtatctttgagcattaggaaatcacagtatggtgatctgtttccaatgtgcgtgttgtgttagca

SEQ ID NO: 478544 - DNA, 680 bp, Homo sapiens
ctgctgtacaacactttacatacrttatctcatttacttctcaagagctctttgacataaggaataatttgctcaaggtcacatggctgaaaagcggagaagccagcaacggaggcagttctagatcttgtgctttaaactctggcctgcctttcctaattctcagaccaacaagtagtgttttcccattcgtattgcttatcataaaatgagagagtcttctgtccatcatctttattgaaagttgaaccactgtaagcaaaaataccaaggagaggtctgatcccgctattgaaataaaaagaaccatgagggccctgcagaattcaactggaccttggggattactcactgaagaaggttttctattttgaatgtttattgtcttcctaccccagtctccccaacaagaaagacttggggtggaaggtgacatataacagcaaagtaagaactgtttgcatttttccttcttggtttgtaaaagacttgttcccaaattgtcctcaaaggtacataaatacatacatatgatatttgtatatatataaacacatatgtatagtaatatccttcatttaccttggggtgagacttgaagaaactccagccttctttctagagagcctctgcttctggtatttacctgtcacaaagcccatacctgttgtcaaaccctt

SEQ ID NO: 478545 - DNA, 680 bp, Homo sapiens
ctgctgtacaacactttacatacattatctcatttacttctcaagagctctttgacataaggaataatttgctcaaggtcacatggctgaaaagcggagaagccagcaacggaggcagttctagatcttgtrctttaaactctggcctgcctttcctaattctcagaccaacaagtagtgttttcccattcgtattgcttatcataaaatgagagagtcttctgtccatcatctttattgaaagttgaaccactgtaagcaaaaataccaaggagaggtctgatcccgctattgaaataaaaagaaccatgagggccctgcagaattcaactggaccttggggattactcactgaagaaggttttctattttgaatgtttattgtcttcctaccccagtctccccaacaagaaagacttggggtggaaggtgacatataacagcaaagtaagaactgtttgcatttttccttcttggtttgtaaaagacttgttcccaaattgtcctcaaaggtacataaatacatacatatgatatttgtatatatataaacacatatgtatagtaatatccttcatttaccttggggtgagacttgaagaaactccagccttctttctagagagcctctgcttctggtatttacctgtcacaaagcccatacctgttgtcaaaccctt

SEQ ID NO: 478546 - DNA, 680 bp, Homo sapiens
ctgctgtacaacactttacatacattatctcatttacttctcaagagctctttgacataaggaataatttgctcaaggtcacatggctgaaaagcggagaagccagcaacggaggcagttctagatcttgtgctttaaactctggcctgcctttcctaattctcagaccaacaagtagtgttttcccattygtattgcttatcataaaatgagagagtcttctgtccatcatctttattgaaagttgaaccactgtaagcaaaaataccaaggagaggtctgatcccgctattgaaataaaaagaaccatgagggccctgcagaattcaactggaccttggggattactcactgaagaaggttttctattttgaatgtttattgtcttcctaccccagtctccccaacaagaaagacttggggtggaaggtgacatataacagcaaagtaagaactgtttgcatttttccttcttggtttgtaaaagacttgttcccaaattgtcctcaaaggtacataaatacatacatatgatatttgtatatatataaacacatatgtatagtaatatccttcatttaccttggggtgagacttgaagaaactccagccttctttctagagagcctctgcttctggtatttacctgtcacaaagcccatacctgttgtcaaaccctt

SEQ ID NO: 478547 - DNA, 680 bp, Homo sapiens
ctgctgtacaacactttacatacattatctcatttacttctcaagagctctttgacataaggaataatttgctcaaggtcacatggctgaaaagcggagaagccagcaacggaggcagttctagatcttgtgctttaaactctggcctgcctttcctaattctcagaccaacaagtagtgttttcccattcgtattgcttatcataaaatgagagagtcttctgtccatcatctttattgaaagttgaaccactgtaagcaaaaataccaaggagaggtctgatcccrctattgaaataaaaagaaccatgagggccctgcagaattcaactggaccttggggattactcactgaagaaggttttctattttgaatgtttattgtcttcctaccccagtctccccaacaagaaagacttggggtggaaggtgacatataacagcaaagtaagaactgtttgcatttttccttcttggtttgtaaaagacttgttcccaaattgtcctcaaaggtacataaatacatacatatgatatttgtatatatataaacacatatgtatagtaatatccttcatttaccttggggtgagacttgaagaaactccagccttctttctagagagcctctgcttctggtatttacctgtcacaaagcccatacctgttgtcaaaccctt

SEQ ID NO: 478548 - DNA, 510 bp, Homo sapiens
tgacatctgctctaaataggttcactgtctctctgagagcttgaggactggaaagtcaatattttaaaaacagtgtagacaccaaattaagtgctggcctcatccatcatacatacaactttctgcttgccaaaggagtggctgaaaagaggcaagaggcagtggggaagaagaggttacagaacaggagaaaaaaaacattggggtttgagggcctagtaacgtagatgtgtctgttgagatgactcttcaggacatttgccatcyttagaatgaatattcactacacaatatataaagaactctccaattctttgcattatacatgccactcctgaagtgccaggtagatagatgtgttcaatattacatccttgatggtgaaatttgcctttgtatgataagataaatacaaaataattgagcctttataaatgttgccccacaagtttttctggagaacccagagaaaggtactctagcaattctccttgggagatttgatgagat

SEQ ID NO: 478549 - DNA, 510 bp, Homo sapiens
tgacatctgctctaaataggttcactgtctctctgagagcttgaggactggaaagtcaatattttaaaaacagtgtagacaccaaattaagtgctggcctcatccatcatacatacaactttctgcttgccaaaggagtggctgaaaagaggcaagaggcagtggggaagaagaggttacagaacaggagaaaaaaaacattggggtttgagggcctagtaacgtagatgtgtctgttgagatgactcttcaggacatttgccatccttagaatgaatattcactacacaatatataaagaactctccaattctttgcattatacatgccactcctgaagtgccaggtagatagatgtgttcaatattacatcyttgatggtgaaatttgcctttgtatgataagataaatacaaaataattgagcctttataaatgttgccccacaagtttttctggagaacccagagaaaggtactctagcaattctccttgggagatttgatgagat

SEQ ID NO: 478550 - DNA, 503 bp, Homo sapiens
cacattttgaagaacaaatagatgtatttagaaaggttataccatgataattccatttaatccaaaatgaaggccttgtttgtcataatcaggacactcaaaaaaaaaagtcctcaaagtcaggaaatgtctaatttctctgtttcgctccttttaaaatttgcactgggccaggcaaggtgacttattccatcactttgagaggccaagatgggaggatcatttgaagccaagagatcaagaccaccctgggcaacatagtgagatctcatctctacaaaaaattaaaaaattagctgggcatagtggtgtgcacctgtaattccaactaattgggagtctgagatgggaggattgcttgagcttaggagtttaacgctgcagtragccatgatcacaccattgcactccagcctgggcgacagagtgagatcctgtctcaatcaagcaagcaatcaataatcttcactggaaatgatcccttgatgtattagtttgttttc

SEQ ID NO: 478551 - DNA, 391 bp, Homo sapiens
gctgtttttccagcacactrttgagtatgcttaaataagccatacatctgagggttctttttgggagaacagaaatgtcctaaaactgatttatggtgatggttgtatcactctgtaaagttagtcaaaagtattgaattgtacacttgaaacgggtatattttatgatatgtaaaataacctcaataaagttgctaatcgaaatgcccctaaaccaacaaacaaaatatcaacatttattagtaattttaagattcaagtacacacccaacagacttaaaatgaaaaacaagaccacatttacctaatgcatttggtagatacatattctatgcagtgatcatcaacctagggtctcactttggaattacttggagagtttgacaagaaa

SEQ ID NO: 478552 - DNA, 641 bp, Homo sapiens
tgagtcagtccctgtgctcatccttttaaatcttgtccagagaaagtaagagagtttattagccttaaatccaagttaccgccccatttccacctgtggatggggtggaagtggtttggggtggaagatggttggctcttctggttcattccttttcactaatgctatagcatggggagacatatttgatatttaaccatggaggtaacaacaaaagtaagctatttagatactagccgggtccttggaatacatacatctatcctaaataacttcccccccagatctctaagatatctgtgaagtctaaaactagctcccacaggagccattctgattcttgggaactttctaaggacttctgaaaatgcctactcagttagtgcctgagctcatagtagtaggaggtggtaattatttagtacccaatgagagcccaagataaatagatgttgaccctagcccacaggttgtagttttacccagtcacctttctgactgtcagttccattagcaggcttactaccttaaaatctggggtcagacccatcctaatctggcattgtttacccagaattggaaagagagcaactgtcattccctcagcatagkgagtggacaagaagcctctgcatggttat

SEQ ID NO: 478553 - DNA, 650 bp, Homo sapiens
gctggccaggctttcttgttaaccatttcatgccccaaacacttagagtacaaaagcacttaaaaactgtaacattctctacaaacgtgtcaaaaagtcctaaacacatatactgacagtgcaacaagaaggcttggaaattatctaatctagctctttcactttagayttgggcatattgaaacctgaagaggttaagtgactcactcgttaccattttctttgcatttctaatcatctcaaaaggcaatctgaatcattctgtaatctttttagtgtatcatgactaatctttattttccaatctttcctatacttcatggtcccctcttttaagcttgaaatagtaagttccttttagtataggctttggagatgtttcatctgaaagaggtgatagatgttgtttttaaaacactgagttctatgtatctgtttttacaagtagcacaaggtttagggtaattaacaagtttttattttttgcatatatttagctatgggagaatatatatccatgtttagatttactatggtacatctatttatttattttaaaattttattgtggtaagaacacttaacatgagaactacttaattattgttggctatatcagaattgagtcagttttccatattatccagtaa

SEQ ID NO: 478554 - DNA, 562 bp, Homo sapiens
ttctttgggagttgacctaattggaaatctttcccatttctctctcttctgggtaatagagttgttttccaccaatattttattttgttggctcaaaagtaaacaacattaagcttcttaccattttaatctgttccagatattaggtcctgtttgaaactaagagaccatttcttcaactcaataaggtttagttcattcaatttgagtttggaaaaagataatgtgtgcactctcttatttccaatatttagtgaatacacccattgcttaatttttaaattctgaagtggagcataaattcttctggaataaaaagtacaaattggtttcatgagaacttttagcctatttgaggtgacaggactgggatttccatgactagcctgtgttatgatcttcctctttaattttaaatagttaacacaatctagaaccttcccctcacctacaaataccrcataggctagtgcagcacaaacatattagaaattaaatttttggacccacaggttatagctagctcttggtgagctgaaaatcaagacatccactaaaccat

SEQ ID NO: 478555 - DNA, 625 bp, Homo sapiens
acctcggagagaggcaatccattaccagagtaaccacttgacttggaagacaagaaacagcaacgcctgagcctcttcgtccaacttctgggaaagagcctctaacagcaaggctgtcaataaaacaataggttagggatctcttctggggaaaggaaaagatgtaaaaatactttactatagggtctgctctggtttgggatcctgsagttcctgcttctttcaggctacctctgttcctaaatgacgcttgtctttccctccctctctctttttattccctccccctcgggtttgcccctccctaacatttttttttttccttcgttcttttccttgccagcagattctgagttttggcttcccccagctttgctcagtgacatgatgagtccgaatcatttctacagattccccagagacaggagccagcttttactttttctcttgcagcatttactaagcggactgctttgtgaatttgaatgactcattttttcccccgccgacctccagatcttcctcccgtccatcaggcatttttataagaaaatcccagagtcagcgttgcagacccggctgaggggacagagccgaggggacagatactctagggtggcagaaa

SEQ ID NO: 478556 - DNA, 624 bp, Homo sapiens
ctggtattcactatatgtactatagcaggtatatataaaaatatatatacctactggcattatatatacacatatatatctgctggtattatatataaaatatataatatataaatatatgtaatatatattctatatataacattatatttatgtagaataatatttctatatatatttrtatatattttttctgagttagttattcaaaggagacagtactttttataacatggcatgtagggtcttgtacgcatttgtgcaaaactaaatgttgtatctcaatttaatatccattaaagtgtccattatctcttccttgacagtacattttagcaacatttatgtacttctgtactgttttaatgaatttatgtataattatatttcttgtaaatattcataagtcttaccagcactattctgtcagtctacttttttaccttgatgtcagatttttaaaaataaatctggacttggtaaggagagacttgtattcaaatggattatttcaaggagttagggaaagaagtattacagtaggaaaagtgctttgccgataagctctgcaggcatcttgggagttgcagagccgttcttttataaagaggagcaaagaacgtt

SEQ ID NO: 478557 - DNA, 233 bp, Homo sapiens
ttgtgccttgaatttaatatatctgaaaaggctaatgtcccagcctgggatgtgaggtgtgcatgggtgtgtatgtatttgtgtcttcytgaataagaaatattgaaatatatgtcagaaaaaagattatgacagtagaatataggtaaattaagatttgaatgtatcacaaacattcaaattcaagggatgacagttctgagaagaaagtttccaaacccagaaagactatc

SEQ ID NO: 478558 - DNA, 493 bp, Homo sapiens
ttcatctccaccgtctgctcatctttcaggtctcagtttacagggcacttcttctaggtcgtctttctgccccccaccacctgctccccaaataccttytccttcccctgttgtgacacctgtggcaatttattttgatttttgtttgtttgtttctcctctattagacctgggctctatgaaaacagggagagcgttttgctcactgtcatatccagcatgtagagacctgcctggcacacagggaacactctttaaatagatgttgaataaatgttgggagggagggaatgagaatggatccaggtaacttatgaacggattgtttgactatggaccctgagtctcatgacaggaggaaagaaaggagatttcacaattctttagcagtaggagttgttgttttaaaatttgcctctgtgggcccttacttgtaagcaaggcatacttgtatctcagaaattatttcatcttacattatgtttcattaaag

SEQ ID NO: 478559 - DNA, 636 bp, Homo sapiens
gagcttcggccaggcgcagtggctcacrcctgtaatcccagcaatttgggaggttgagatgggtggatcgcctgaggtcaggagtttgagaccagactggccaacatagtgaaacctcgtctctactaaaatacaaaaattagctgggcatggtgatgggtgcccgtaatcccagctattcaggagggtgaggcaggagaatagcttgaacccaggaggtggaggttgcagtgagccgagattgcgccattgcactccagcctgggcaacaagagtgaaactccgcctaaaaaaaaaacaaaagagcttcatctcttgcccatgggggctacttaacatggaggcttaatgtggctggctgccactgctactacttgagaccatcattaccacagttactactgttactacttgagaccatcattacaagactgaacgaagggatgaatgtagaaatggtaaaaaacagaagaaactgttttaaggaaaggctagcatgcggaataagaaaagagaaggagaaaagaagagaagaagaaagggctccctgcttctagtgagcaaaggcagccgctgagtgtctaccgcccttcatatttatttagggtagcaagagcaaggaggaggaggtaatga

SEQ ID NO: 478560 - DNA, 548 bp, Homo sapiens
gtgactgtgtcaagggaagccacgactctgaccatagtcttctctcagcttccactgccgtctccacaggtgggcttcactttcgtggaatccttgggctgccgagttacaccttaggaatcctctaattttctttccaccttttgcaygcacgccaggagatttcttttcttcatctgtccagtgaggttaccgtttttacttcacaggattgttgtgaagaccgaattgccaagtgcagttcctggcgcggagtaggcaggtcttataaatattggttcagtctgaagtttatcctggttgtttcccttctgataattttttaagcactttttatttgctgggtgttttcacatacttgatggccatctgacagatgagcaaggaggctcagaagctcagcttaagatttaaaaaaaagcaggggggctagagtttaaatcaaggtctatctgatgtctaagctacctattctgttatactgcataataccctttttatattattttttatatttaatcagtaacatatgtagatagtacaaaatt

SEQ ID NO: 478561 - DNA, 548 bp, Homo sapiens
gtgactgtgtcaagggaagccacgactctgaccatagtcttctctcagcttccactgccgtctccacaggtgggcttcactttcgtggaatccttgggctgccgagttacaccttaggaatcctctaattttctttccaccttttgcatgcacgccaggagatttcttttcttcatctgtccagtgaggttaccgtttttacttcacaggattgttgtgaagaccgaattgccaagtgcagttcctggcgcggagtaggcaggtcttataaatattggttcagtctgaagtttatcctggttgtttcccttctgataattttttaagcactttttatttgctgggtgttttcacatacttgatggccatctgacagatgagcaaggaggctcagaagctcagcttaagatttaaaaaaaagcaggggggctagartttaaatcaaggtctatctgatgtctaagctacctattctgttatactgcataataccctttttatattattttttatatttaatcagtaacatatgtagatagtacaaaatt

SEQ ID NO: 478562 - DNA, 505 bp, Homo sapiens
catatagtcagtactgagagagcaagtgcatcatgcctttctttgtgcagaactttgtgcagtgccacaagaggagataatgatcagaatttttttgtgttcagtaggacccagaaagcgtggagtttgcatgaccataaacacaggctgcaactaatagaaaactctgagagtattccatttcccactcaaagtctacctcattgtgttattcagccagctttatctccccagccaacccaaggccatccaggaccacagtgcgtcagtgagttttgagtgaataggctggtactgttaggactgagggacctcttagatrtcatatgggaaaggattcaaaggaaggccaagggtgaaaggtctcccagacttttttttccccccaagacacaaagatggtaggtagtaagtagaaacacctgtgagtttttgttttttctagctggatcatggctgatacaccacctgtgagtatctcacttatttgtggacgtgttcattg

SEQ ID NO: 478563 - DNA, 623 bp, Homo sapiens
gaccctaacttctcgctaagtagaaagaaatagattttataatacacagtttatctttgaattatctagcctttaaaaattgtaacaggattgccctctttaaccagcaaaggggttggtaacttaaatttttctctggtacataaatctgctccctcaacattttctgtagtttataaataactacatattaaaacaagtcagaagaaagcatcaccaaaacatgggtcccaagtacagtcatccctcagtatacagagggatttgttccagtactcccaagtatatccaaatctgtgcataatcaagttccacaatcaactctgcagaacttgggtttacagccctctatatacatgggcttcgcatcctgcaaatactttatttttgatctgtattgttggaaaaaatctgcatgtaggtagatgtgctccatcaaatccaagttgttcaaaggtcaactgcagtgttaaacagttagaaattaatgctaatgtaatatatccagaactacatctttgtaattgatcagctttcttgtgaaatctcttctatacgatagtgaatataygttgctacaagaggaaagatgtacaatatgctcaaaattgttaatttctacc

SEQ ID NO: 478564 - DNA, 622 bp, Homo sapiens
tcacaaaaacataagcattttataggaatcatatctgtcttcaagtccaatacaaaaaaggtaaatctaataacaagccatgattttgctgcaatgagagctctaaggagcagatattttcattaagttggtctatcacaggccccttctaaaaagttttagctaagaaagtgcccagaagttcattacatggtaggtttaatacccaaagacatgcctgtatactgactccaagtacagcagtattctaactaggttctggraagttctacctgagttatactgaatctaaataaccatagtattaagatcaaggtcaaaactcctttgggtccatttcagcaatttaaattttgatgaaaattaccactggttggattggcctaatcaaagcaaaattgatttagttgatggatgctcaaccttaaggtcccttatggttctagcatacttccattgtattgttgcaaaaattgttgaaatatgcagtccttccatcctaagggctattaattttgagacgatgagtacccacagtcttgagtttatgattgcctacttcattgtttaataaaacattaacaattgtcaattaagctttaatgatagtattaaaatgcaa

SEQ ID NO: 478565 - DNA, 622 bp, Homo sapiens
tcacaaaaacataagcattttataggaatcatatctgtcttcaagtccaatacaaaaaaggtaaatctaataacaagccatgattttgctgcaatgagagctctaaggagcagatattttcattaagttggtctatcacaggccccttctaaaaagttttagctaagaaagtgcccagaagttcattacatggtaggtttaatacccaaagacatgcctgtatactgactccaagtacagcagtattctaactaggttctggaaagttctacctgagttatactgaatctaaataaccatagtattaagatcaaggtcaaaactcctttgggtccatttcagcaatttaaattttgatgaaaattaccactggttggattggcctaatcaaagcaaaattgatttagttgatggatgctcaaccttaaggtcccttatggttctagcatacttccattgtattgttgcaaaaattgttgaaatatgcagyccttccatcctaagggctattaattttgagacgatgagtacccacagtcttgagtttatgattgcctacttcattgtttaataaaacattaacaattgtcaattaagctttaatgatagtattaaaatgcaa

SEQ ID NO: 478566 - DNA, 613 bp, Homo sapiens
aaagacatcactggaagttgaatattttgccgcagctcacagactattggctagaacttaatcccatgactgcatcattttcaagggagatgatatgtagtttttattctggctagccatgtgcccaaccaaatattaagggttctactactgcagaagaagacatgatggatattgggtacaactcataatgtgtactataaagccatatcccactctaccaactcattctcagatcaaaaacgaaacctgtcacctgctccctgtttcttgtagcgattcagcataccctttgattctaytgtcttagccaccatttgtaccaggcatgacaagaatggcctgggacagttttattaagtaggtgggtgagacttttgttaggctttcagggatagatggaaaggaagaaagaaagcattccaggttggggatcattagaggtaaggcctgaaggcttctttaagatcctttggaatcctgagacaaaaatttatacacatatagtttatggggaattgcttttaggatcaacacccacaaagggatgaggaaaaaaagattaaacagtgggagaaagttgaccatcaacacagttgctgccaaggatcca

SEQ ID NO: 478567 - DNA, 519 bp, Homo sapiens
catactccaggccattctttgacataatgataatagttatatttatagatcccattttgaaacctaactatgcctagaactctactgaatcctttacagacatgatttttaaaatcagtacaaacaccctatcattttagtgcctttattattttcctatcttcatgaaaactggatcttagaaaaattgaaaaatgtgctgccaagtcacaagatttgcctatcaaacctacattctatatcactacacaagttgccttcctcatgaagattagctaggtattgagacagcaaagatgccatagttttccsataaatagctcctcttggagccatcggactaagttatcgtataaaaacaagtaatagttgttttatccactaagttatttttgactaatccatgacatagctagggtgaccctggaacatccagagaagggacgaaagaagaaacagagctgcagagtagggccaacagggctgtgggttagggaaaaatattactttaaaagaaca

SEQ ID NO: 478568 - DNA, 519 bp, Homo sapiens
catactccaggccattctttgacataatgataatagttatatttatagatcccattttgaaacctaactatgcctagaactctactgaatcctttacagacatgatttttaaaatcagtacaaacaccctatcattttagtgcctttattattttcctatcttcatgaaaactggatcttagaaaaattgaaaaatgtgctgccaagtcacaagatttgcctatcaaacctacattctatatcactacacaagttgccttcctcatgaagattagctaggtattgagacagcaaagatgccatagttttccgataaatagctcctcttggagccatcggactragttatcgtataaaaacaagtaatagttgttttatccactaagttatttttgactaatccatgacatagctagggtgaccctggaacatccagagaagggacgaaagaagaaacagagctgcagagtagggccaacagggctgtgggttagggaaaaatattactttaaaagaaca

SEQ ID NO: 478569 - DNA, 519 bp, Homo sapiens
catactccaggccattctttgacataatgataatagttatatttatagatcccattttgaaacctaactatgcctagaactctactgaatcctttacagacatgatttttaaaatcagtacaaacaccctatcattttagtgcctttattattttcctatcttcatgaaaactggatcttagaaaaattgaaaaatgtgctgccaagtcacaagatttgcctatcaaacctacattctatatcactacacaagttgccttcctcatgaagattagctaggtattgagacagcaaagatgccatagttttccgataaatagctcctcttggagccatcggactaagttatcgtataaaaacaagtaatagttgttttatccaytaagttatttttgactaatccatgacatagctagggtgaccctggaacatccagagaagggacgaaagaagaaacagagctgcagagtagggccaacagggctgtgggttagggaaaaatattactttaaaagaaca

SEQ ID NO: 478570 - DNA, 526 bp, Homo sapiens
taacagccaacatagcttaccacagcaagatttttaatgcatcagtatgtcttgataaatatgcacttccatattctattgcaccttctgcattacaacttgctatagaataagaatagaaggccgggcgcggtggctcacaccagtaatcccggcactttgggaggctgaggcgggtggatcacttgaggtcaggagttcaagaccagcctggcgaacatagtgaaaccccgtctctactaaaaatacaaaaaraaaaaagaaaaattagcttggcttggtggtgggcacttgtaatctcagctactcgggaggctgaggcaggagaattgcttgaacctgagaggcagaggttgcagtgagctgagatcacaccactgcactccagcctggcagcctaggtgacagagtgagactctgtctcaaaacaaaacaaaacaaaacaaaacaaaacaaaacaaaaacaaaaaaaaaagaatagaaaagctacatcgatgagtaaaggatttcaggttttatatgacag

SEQ ID NO: 478571 - DNA, 514 bp, Homo sapiens
tgtgacagattaaaattttgttytgcaaatattcactctgtccctctttatcttcatcctattgatgctgggtttgaccatgtagcttattttgcaataggatgttagctgacaacatgtgaacaggggcttaagatatgcttgtgtgggtaggtgggcttgctccctttgctcctgcctttaactgtgagaagctcatactttgggtacccaatggttcagggtgatgagagacatgtagacccatttcacatctggaaggccagcctggaggaggagcccagctaagataggccaaatctcagggtactacagacatgtgagcaagaaataaatgcttgttgctgattattacggaaattttgtgtggcatgttattcagcaacaacaacaaatgactgctacacaatctgcttgcctcgtagtaggcatgttgttttattttgtttactacccacctcacactatgaaacttatgttaaatgtccagatttttatcacatagtatctattt

SEQ ID NO: 478572 - DNA, 514 bp, Homo sapiens
tgtgacagattaaaattttgttctgcaaatattcactctgtccctctttatcttcatcctattgatgctgggtttgaccatgtagcttattttgcaataggatgttagctgacaacatgtgaacaggggcttaagatatgcttgtgtgggtaggtgggcttgctccctttgctcctgcctttaactgtgagaagctcatactttgggtacccaatggttcagggtgatgagagacatgtagayccatttcacatctggaaggccagcctggaggaggagcccagctaagataggccaaatctcagggtactacagacatgtgagcaagaaataaatgcttgttgctgattattacggaaattttgtgtggcatgttattcagcaacaacaacaaatgactgctacacaatctgcttgcctcgtagtaggcatgttgttttattttgtttactacccacctcacactatgaaacttatgttaaatgtccagatttttatcacatagtatctattt

SEQ ID NO: 478573 - DNA, 674 bp, Homo sapiens
ataattgaatatgctttacaagcaggcagtgtggacaagcatcccaacaggtttttaattctctctaaagaacacatatcttacagagggatgtgaattgattttattcttatctacttgccaaggccttttgtggttgtattttctccgtgagggtttagaagagcccttgcatcatagtgtgaaatctcataaaggatgctttggrgagtccttttcagtaagtagctgaggacttaatttcaggctaggaacctgcagagaagttaaaaaaaaaatatgggtttaggcatgatggaaattatgctatatcctggccttctttatacttgttggaagataatttccatggggaacttttcttcgaaaatgcatgtcttgctgggaatatctattatcaattggggctatgttgatttctgagtataattcttgagagaattctgctccatgtctgcaaatatggaaaaaatgatcctggccagaggaatgggaactgaaattatattgcgttttgaaaccaggtttatcttgggcttccttttatgcttgtcctttcctctgtcaacaaaatttttctataaagattagatagtaaatattttagtttttgcagactatacagtgtctgtttcaactactgaactctgccattgctgtatgaaagcagacat

SEQ ID NO: 478574 - DNA, 629 bp, Homo sapiens
ctgtcaagggcctatcatgacttaaaatgtgtaaccctatgttggcttttggagccaacagatttgaagtaaagttatccctaaagaaaatttggcttccccaattttaaattggtgaaataatgaaacttagtgaccaaaatatgtaaatttaagcattaaaggggaagaaataaagagatgaacagaaaaaagaaagaaagagagaaagaaagaaaggaaggaaggaaggaaagaaaagaaagaaaaaagaaaaggaaagaaagaaagagagaggagagaagaggaaaggaaaggagaggaaaggaaaggaaaagaagagaagaaagaaaatatactgaatataatgtttggatattgtgagtcccttagaaaaggtgttaataatcagtaaaggagagaagagttccagggagaaaggtacagacaccttttcatagcaaaggtcaattattcaataaggaaacatttaggatgatgtctatgtgccaagcactgcgagagttatcagaatgtctcatttcctcaaagtttctactattattccaatagaaaaacaacagtacaagatacaggatggagaaggtgagttgaayggttttttaattcaacacaggaatttttggtcc

SEQ ID NO: 478575 - DNA, 659 bp, Homo sapiens
gttctacctgaatccttaaacttcattttcatgcaaggatggtgaaacacatatcatcctagtcaaagacatgtctttccccttccttatgtttctccagtaaaaattattttttaagagcccaatggctaaaaataaactttcttctatagatttctataatgatatttgtggtcacacttagaatgagattcatgattagggtacttaaaatgctaacttcactttgggaggccgaggcmaggtcaggagattgagaccatcctggctaacacggtgaaaccctgtctctactaaaaatacaaaaaattatccaggcatggtggcaggcgcctgtagtcccagcaactcgggaggctgaggcaggagaatggcgtgaacccgggaggcagagcttgcagtgagcggagattgcaccattgcactccagcctgggcaacagagcgagactctgtatcaaaaaaaaaaaaaaaaaaatgctaacttaccacctccaagaagtgcagttcactgaaacacccctacattatctgactatattgaaatataaagtactatatttaatagaaaatataatatgtcacctttaaatatttatatatacataagaaaacatcttcttttagagccaacgtaacaatatcctaacataattagta

SEQ ID NO: 478576 - DNA, 536 bp, Homo sapiens
ttttttctctatgtacagattaaataataatggatagcaggtgaaaaaattcaatcagtagtcaaggtctgagatttatttttatgttgctatttttcatctccatatttttcaaaaatgttgatatcttcataaaacagaacttgagacacattccacttctctsaaggatgactatggttcaaggaatgccttgtatttcttatttgcataatatgctcttccattcctctacagacatggtaatgaagtattatgcttccccctctatgattactctttaagaaaataaaataataaggacttgaaacattatttttcacattaacttgttctttctacaatagtcagtgtcacttccctgaagagaatattgttggtgttccacagagaatgggagtaatatttatttagtagataattgagttctactatgttatctcttacctcttattttatctagttgaataatagattattttttctaataaaaatatacacacatacatatatatacacatacatatatatgttaa

SEQ ID NO: 478577 - DNA, 661 bp, Homo sapiens
gctatagcaaggtgaaaaaggcagaaaaagaagtattcaaggtaaagacaacaggaaatataaaatccatatgcaggaaggagcatggcaaataaaaatgttatggtaggcaaaccagaattttcagcattcttgaagtgaggagaaaaaaaatgtattttgaagtctgttcattcrtcgggcacagtggctcatgcctgtagtctcagcactttgggaggtcaaggcaggaggagagcttgagctcaggagtttgagaccacactgggcaacgtagcaagaccctgtctctacaaaaaatacaaaattaaaaagtagctgggtgtgatggcacgtgcctgtggtcccagccacttgggaggcttaggtgggaggatagcttgagcctgggaggtcaaggctgcagtgagccatcattgtgccattgcattctagcctaggcaacagagtaagagcttgtctcaaaaagaaataaataacaataggtaaaatatgttaatgagagggctcgttaatgcaaagttgggaaactatgagagttacaaactgtgaactgtgaggtgaatcttgtttctgtatctgtcattttctgagccttactgtccctaagagtctggcatactgtctccaagcagctccaaaattcagatactaacctatt

SEQ ID NO: 478578 - DNA, 308 bp, Homo sapiens
aagtaaaataaattttgaaaatgccttatgaaaattacactccaaagaactcgcgccagtgtcagtgttctcatgttcctcatctcacatgatcacatttcgcggattaggaagctgagtctgagaagctccgtgtagtgctttttcggaggcaccgtgatgtgatggaaggctcactcgttaggaagtcagaacagagtctctgagggatcatytccttaatctgtcagtttcctcatctctgaagttgggctcatttccttccttcatggagttattgtaaagatgaagataaataacgtgtaaaa

SEQ ID NO: 478579 - DNA, 600 bp, Homo sapiens
agccatatgccataccttggcagtcatgtccatggctagtgtacagacattcctgcacccccagttttctacagaagtagcagataaatcagactgaaagagtgatgtgaacagggttgtgactwtccctgagcaggatggctatcactcatgatgatgatcattggtccaacagtcaccctggctgagggatagtcactatcctgcttcctaccacctggacagcttggcatggtgtgagatcctagaactgtggcccaactttgtgtggaaagtagcagggcagggaaaggggactccaagaaggactggggttaaatttccactaagccagtaggatggcatcctcaaatagaaattaatttgttctgagcataaagtgacatttcttatgcacctgaatttatggtcatgattcatgttagcaagcttctttgcaatttatagccagaggtttgtttgcttcaatactgaatttagaacttatttttccaaaagaaaatttagatgcctagtaataatcacgaggagagaatttaggtcactttaataataataaatagggggagggtgggaagcaggagagcattcggaaaaaga

SEQ ID NO: 478580 - DNA, 465 bp, Homo sapiens
agagcagccatatgccataccttggcagtcatgtccatggctagtgtacagacattcctgcacccccagttttctacagaagtagcagataaatcagactgaaagagtgatgtgaacagggttgtgactatccctgagcaggatggctatcactcatgrtgatgatcattggtccaacagtcaccctggctgagggatagtcactatcctgcttcctaccacctggacagcttggcatggtgtgagatcctagaactgtggcccaactttgtgtggaaagtagcagggcagggaaaggggactccaagaaggactggggttaaatttccactaagccagtaggatggcatcctcaaatagaaattaatttgttctgagcataaagtgacatttcttatgcacctgaatttatggtcatgattcatgttagcaagcttctttgcaatttatagccagaggtttgtt

SEQ ID NO: 478581 - DNA, 631 bp, Homo sapiens
tttattcatttaacagatacacattgttaaattgcgatcctgaattctgcaacaaatccagtaaaagatattgtctttgccttggaagtatgcataagcatattgaggaggagaacagttttataagtcagtagttacgataaaagttctatgatatgcatttgtacaaagtgccacagagtataaactctgcaaaggagagccaagggggaattctattagactttccctccccacgagcacaatgtattacagaatttagtataggcaaaacatttttccctctagatggcatgggtcctacctagattgaaaggactaagaacggcacagagctcagtgctcagtcttctaaaaaactaataaaatattaagtctcacaatgataagcatggtctatttattttttcctgagtggaacaggaggcaacaggaaaataagtttttatggtgtgttcagcaagatgttactcctctttttgtataagattggtcctattgctgacrttttctatatgtcacacagcattttatgtcacacagttcctcagcgtaaccttacttgcccatgctccatattgaatcatggacaatttaactctgacagtaatctcacttccagctgggaact

SEQ ID NO: 478582 - DNA, 612 bp, Homo sapiens
ctgggaactgtcctctacgcgcccttctagctgaaccaagaaaaacattgagaatgattgcatgcaagtattcatgaggtcaatttaatgacgaaccattctgtgaccttaaatatgatagattctggaagaagacacaatatttgtaattattatatataattatttcatgcttaagccagtgatattcaaacatattttaaggaacaacaacttgcagtggccatcttattgtgattaacaaaagattacctgaaatgttctttcatcacatttgcstggcaggcttctttgacatttagctttcaatttatacattactttatcagccaggcctttcctaaccatcaaaagcagtatctctttattacattgcttcatttttttgctataacatttattttctgggccttttgagaaagctgtacagaatatcagctaaatattgagaatatgaaataaaacatgtatttttaggaaattaatatttgtgttaaattaatattgaactgagtttgccataatccagcagaattatctcaattcaaccatagtgttgctgcctttatgtattgtagatatggagagtatgtgtcagattttcatctcaag

SEQ ID NO: 478583 - DNA, 622 bp, Homo sapiens
agaataaaacattcatggtcatgcatgcaaaaatctccctatgtaggcgtggtattatcatattacccaagttgattaatgcttcagttgcaaactaaaggcaaaatattcatataactttctgtttctacaagtaaaatgaaaataaaatagctttttccaaagttacacgaaatgtcaagtaaaagtggtttgcaaattaaattaactagaaaattgcctcagttttccagtgatacaatctcattttcttccctgaattsttatgagataaaaaatggtcttattattaactcttactttatttgactacaatcaaaaggaaattgaattactttttaaaaaatgaaatggttgtaattgtccaaagagaaatttccaaatggaaccaaatgcaaaatttctggtaaatatacaaaactctcttgaagctaacaattaaatgacctacttcgcatgtactttaatagttttagtcaatcttgttataatttacacagaacttcattactaattccagcaaatcatagaaaatcaaattcaaagaaatcatagaaagactttaaagttacctatcttaacatagaattcactcattagctttcattattgtttcttctgg

SEQ ID NO: 478584 - DNA, 592 bp, Homo sapiens
ctgccacttattcaaagtcaagaaagcatactaagttacctatctcaaagttacagcatatcgtccttcttttatgcaaaaatccaaaattaaatgcaaaaaacacctacttagagtatgcttatgtctacaacaagactgagagccactccattcttctgtatattaaaaatgtgcctttggtctaagaagctagatatattgaactatgcctaggaatcaagttggctatgaaaatcactaactttagaaaagggaaaagaatgtgaatgaataatctgatgacaaaaatttcatttttaagtggtatagtgactgcmctggctatataagaaaagggctttgaaggattgcagcattcatgatttatagaattctttttcagtactgacctaattgacttgtgctttcagaaaattcattaattaatgattattaaaataacaccttgaaccacgtggcagtctcagggcaaacggcctgagtttcagagtctcaaggcagaaaactgatgccatttcaatatttcccaccctaggtcagtgttctgttgttgtttcaaccgtggtggtcttgtccaccacttaggtgt

SEQ ID NO: 478585 - DNA, 592 bp, Homo sapiens
ctgccacttattcaaagtcaagaaagcatactaagttacctatctcaaagttacagcatatcgtccttcttttatgcaaaaatccaaaattaaatgcaaaaaacacctacttagagtatgcttatgtctacaacaagactgagagccactccattcttctgtatattaaaaatgtgcctttggtctaagaagctagatatattgaactatgcctaggaatcaagttggctatgaaaatcactaactttagaaaagggaaaagaatgtgaatgaataatctgatgacaaaaatttcatttttaagtggtatagtgactgcactggctatataagaaaagggctttgaaggattgcagcattcatgatttatagaattctttttcagtactgacctaattgacttgtgctttcagaaaattcattaattaatgattawtaaaataacaccttgaaccacgtggcagtctcagggcaaacggcctgagtttcagagtctcaaggcagaaaactgatgccatttcaatatttcccaccctaggtcagtgttctgttgttgtttcaaccgtggtggtcttgtccaccacttaggtgt

SEQ ID NO: 478586 - DNA, 612 bp, Homo sapiens
ttgtgtacttcttttacatcataaagtgcgtttttttttttcagaataagcttgtagaaacagtcaacagcatttccagtagtcactcgcatttatattcattttagatactatttttttttcacttgattcttggttgagtgaaaagaaaaccaggctagcttgggtggttggttatactttatatcacatctttgtaactttgggggtgacaaagaagtttcacacttttcagtacagcttttctttatttcaggaaccttgagcttttgaagagcatagttaacctctttcctcattaacgaatggttttaaacaatccttatctctccagaaagacttgatttactcattaacagatgagtggataaagataatgtggtacatatayccaatggagtaatattcagccataaaaaagaatgagatccacacatttgcaacaacatggatggaactgtttgtttttgagacagggtctcattctgttgctctggctggagtgtagtaggacgatcctggctcactgcagcctggacctcttggagtgaagcgatccttccacctcagtcacccaagtagctcgcactatagaaacatgccaccatgctc

SEQ ID NO: 478587 - DNA, 378 bp, Homo sapiens
gaaaacaatctaatacatgggggactctcatggcttagacctgtggcccccaacctttttggcaccagggaccagatttgtggaagatactgtttcagtggacttatggggtgggagatggttttgggatgaaactgttccacctcatatcatcaggcattagagtgtcacaaggagtatgcaacctggatccctcacatgtgcagttcacaatagggtttgcaatcctatgagaatctaatgccgccaccgatctgacaggaggcaaagctcaagcggtagtgcttgcctgccactcacctcstgctgtgtgtcccagttcctaacaggccatggaccaggggttgaggaccccggcctacaccaaattataacaag

SEQ ID NO: 478588 - DNA, 495 bp, Homo sapiens
aaaataagcgtgctaaattaaattgtcttaaggtttttccacttcattttgtgactttgtgtggttcgaatttctcagtattttaaccagtgtgttgatgttaaagtcaaaggcygcagtatgtctatattcttgctgtactcattggtagtttcagtatatgtaatgtgagtttaaatagtgaaattgtatctcatattaacatttcaaatgctcatattgaaaatggaaaatagtaaacacgggaattgattttattctggttgtctataatacttcattttaaatgtaaatggccactctgcatttgcaaggcccggtggttgacatctgtgtggtttgttagatgagacaaaatgaccattaaatgagtttatagattattctgtatcaagataaatctgattccagttaagctataaacttgtgggattttcttgtagccctatagttctgtgacttcatttgctatacgctttaaatgtgttgagcagc

SEQ ID NO: 478589 - DNA, 495 bp, Homo sapiens
aaaataagcgtgctaaattaaattgtcttaaggtttttccacttcattttgtgactttgtgtggttcgaatttctcagtattttaaccagtgtgttgatgttaaagtcaaaggctgcagtatgtctatattcttgctgtactcattggtagtttcagtatatgtaatgtgagtttaaatagtgaaattgtatctcatattaacatttcaaatgctcatattgaaaatggaaaatagtaaacacrggaattgattttattctggttgtctataatacttcattttaaatgtaaatggccactctgcatttgcaaggcccggtggttgacatctgtgtggtttgttagatgagacaaaatgaccattaaatgagtttatagattattctgtatcaagataaatctgattccagttaagctataaacttgtgggattttcttgtagccctatagttctgtgacttcatttgctatacgctttaaatgtgttgagcagc

SEQ ID NO: 478590 - DNA, 534 bp, Homo sapiens
actttcataaacatggagtggattggaaagaggaactggactctggggaatcccacgtgacaaggctgaaagttacctctctcagaatatctaaaacactaaactggtttgccaagccctgctgaaatatgctatcaaccagttcagcctggagtaagttaagatccatgagtttaattgctatggcattagtagaatgaattttattgcttttttctcttctaatttctctctctctctctctctctctctstgtgtgtgtgtgtgtgtgtgtgtgtgtgtgtgtgtgtgttttcttagcaggctccccaagggatatcctctgttaccttgtttattcgttggaaaacaaacatatttcagtagctagaattcctttcctttcaagtatagtgccttgcccatggcaggcactcaaatatttgttgattgattgatacctgcaagttgctgcattccattaatttttgtgccccatgtgttatactctaaaaaaggttgttgaaggtttaatttttaacatttacattttta

SEQ ID NO: 478591 - DNA, 534 bp, Homo sapiens
actttcataaacatggagtggattggaaagaggaactggactctggggaatcccacgtgacaaggctgaaagttacctctctcagaatatctaaaacactaaactggtttgccaagccctgctgaaatatgctatcaaccagttcagcctggagtaagttaagatccatgagtttaattgctatggcattagtagaatgaattttattgcttttttctcttctaatttctctctctctctctctctctctctctgtgtgtgtgtgtgtgtgtgtgtgtgtgtgtgtgtgtgttttcttagcaggctccccaagggatatcctctgttaccttgtttattcgttggaaaacaaacatatttcagtagctagaattcctttcctttcaagtatagtgccttgcccatggcaggcactcaaatatttgttgattgattgatacctgcaagttgctgcattccattaatttttgtgccccaygtgttatactctaaaaaaggttgttgaaggtttaatttttaacatttacattttta

SEQ ID NO: 478592 - DNA, 622 bp, Homo sapiens
tttatgtgtattggccatataaatggcattttgatggcaaatgctataatagcactatactaatgactattatccaacaaatcaattatgggccagaagttttaataacagtaagtttttaaggaaaaactttatgacttttatttctattaaarttttttttaaaaaaaccacactttttcgaattgactcaagacattaaaaaaagaaatttttttccccaaaattgtaataaatagccttctatcagtccacaagatgggagtattctgatcttacaatattttagcttcagttgctaaaagtggcagtttttagtattcatattaagcttgtatcagatcccttctgcaaagtcattaagaaaaaaataattatattcaatttatagctcataatagtttccattcacatgtttgtaagttcacagtcaaaaggactttctacttctatggaatatttttcatgcagttaatatgtggtagcatcaggtaactgcagtacatgtttactttaaaaaaataataataactttggccaggcacggtggctcacatctgtaatcccagcactttaggaggccaaggccggtggataggttgagcccaggagtccaagacca

SEQ ID NO: 478593 - DNA, 547 bp, Homo sapiens
tctactgcccttgagctaagtcagcctagtcattcctgagtgccttcgttcacttcattcgctctagattgctttccctcaaatccctgcccaggctgggagtaatggtttaaatcataactctgtatcttggctacaacctcttaaaacctcaatttctttttttttcaaacatcaatgtcttcatctgtaaaatgtagataataaataaaagtaccactctagtgagcatctcatagtaggtcttcagtaaatggcagtcatcattgttggttttgttattattttccttctttcaggcttcacctttctagcttatctccagtaattgtttataattattaataatttttaaacgacygttcaaaattatgttgcatttgtaagttttgcttcttgagctaggtttaagctctttgaaggcaaatgttctactgttgctatttacatactccactaaatgtgccttgtgtctaaagcagtgattgttaacaatacaattaatccatatcacttgaagtggttccttgaggaagaataaaatatt

SEQ ID NO: 478594 - DNA, 637 bp, Homo sapiens
cttgttctgttgcccaggctggagttaagtggcacgatctcggctcactgcaacctctgcctcctgtattcaagcgattctcctgtctcagctcccaagtagctgggataacaggggtgcgccaccacgcctggctaattttttatatttttagtagagatggggtttcaccacattggccaggctggtctccaactccacacctcaagtgatccacctgcctcggcatcccaaagtactgggattacaggcgtgagccaccgcacccggcctatcatgtataattgtaactatttactgaagggtctctcccagtagattatacacttcttgtggscaaggctaataatgccttttctctttggaccctagtgcctagcatagtattcaacacatacgagtactatccctgagatactgcaaggtttatataatggtatgtagataccaatggtagtatctaaatacctgggtaaacaaatactttcaaaagcaagtctttttcaatgaatattttacatctgactgatttatttagcgaccgtaggttttatttttcaaaaatagccaccataatatatttcatttcacatgctacttgtacaatgagaaggtgacactcctcccatcaagtagt

SEQ ID NO: 478595 - DNA, 434 bp, Homo sapiens
gtgggccagatttggtccacaggcaatagtttactgatccctgctgtgctcatcttgtacttttgtctttcaatttgcaattgctgcccattggaggcactcamttactgttaaaaatgattatatttataatgatatagtattattaaagtaaaaaacttagaatatcatagaaatgtatacatacagatcttgtgaagttctgatggtttccattggtagaaatagactatggcttatgactgttaaggataataaagtaaaagcagaagaatgattttttgattgtctccagttgtggcccattttcttttttttttttttttttaagttattctagatataaaacccttaagaatcttctccaaaagacaatttaatactgagttacaactatgattatttttaaaattgtttccatttttaaattcctt

SEQ ID NO: 478596 - DNA, 599 bp, Homo sapiens
agacagtgtcaaacaggaggaaatatttagacccctaagtggtaagaaaacaaccaggctaaagaagtagcaaattggcaaaacaaaccttttttcaagtggcaggaataatccaaaaaaaaaaaaagactgggctaaaaacactctggtgaggaactctacattgaatctttacacttttatagtargatttattttaatgtgttgaaaccctgagacaaaagctctgtctttctccatctgccttcccagaccaccctggtaataaatgactcaactctgcttatacctaaataaaggaaattggactttcccatttctgtgctcatccgagagcttcccctcctgctaatggataagacatagaggcctaacttctctccacggtgccaaggactcagggtctgactgccttgaaccatccctgattatgaagagaaacatcagactgtcaaactcacctaggtaactggggcacagccttgaggttaaaaaaaaaaagttgtcggaaccaattttataattcaccaggagcccctgtcagacaaatgaagcagcagtgatgaacggattcagatagatcgtgatgggagtcaagc

SEQ ID NO: 478597 - DNA, 644 bp, Homo sapiens
gcaacatagaaaagctgacctttagttgtgtagcagggtatctactcatatattcaacagttttaccaaaaaagagatttgtcctaagggtttccagtttcttcataygtccagagtctacaatctagccttgcatggagtcagattaatagaaatgaaaatctctgacccatactctcaagttctctaaaactgccttcactacattgtttttaggaatgttgtcatcaggctatattttaaattgtcttttaaaagggccctgtgaaacttgttagatgtactgtaggtgcgccagtgaagacatcgttatcttccatagtgtcttctttatgacaatcctgggagtgatttctatttaatcttagtgccaagaattgttgtgcctctcccacgtaatggtctgtttgtgcttttaactcacaaatattggggatgagttactgagcacatttttcagtaggtagaaatgtgttttcttccctgctttctgaaaaagtattcccaagtatcctgaagctttctaaaagatgcttttcattttgtgctttcatctcataataaccatttttaaaaatgacataagtatattctaggacagggatcagcagcctttttcttttaaagggccagatactaagtat

SEQ ID NO: 478598 - DNA, 644 bp, Homo sapiens
gcaacatagaaaagctgacctttagttgtgtagcagggtatctactcatatattcaacagttttaccaaaaaagagatttgtcctaagggtttccagtttcttcatatgtccagagtctacaatctagccttgcatggagtcagattratagaaatgaaaatctctgacccatactctcaagttctctaaaactgccttcactacattgtttttaggaatgttgtcatcaggctatattttaaattgtcttttaaaagggccctgtgaaacttgttagatgtactgtaggtgcgccagtgaagacatcgttatcttccatagtgtcttctttatgacaatcctgggagtgatttctatttaatcttagtgccaagaattgttgtgcctctcccacgtaatggtctgtttgtgcttttaactcacaaatattggggatgagttactgagcacatttttcagtaggtagaaatgtgttttcttccctgctttctgaaaaagtattcccaagtatcctgaagctttctaaaagatgcttttcattttgtgctttcatctcataataaccatttttaaaaatgacataagtatattctaggacagggatcagcagcctttttcttttaaagggccagatactaagtat

SEQ ID NO: 478599 - DNA, 406 bp, Homo sapiens
tcctatggccatcttgcagccatgagacaaccctgagaatggaaaccgtgtgttcagatgtcagaacagagagttagaaaaatactgagaaayggataaacctgaaatctctaacaagccctgggtctccttcctcttgactcttggtcttcaagttacatgagaaaattaaatcctgatcttggtcaaataaataaatatggtgtgtatacatgcacacatatatatacagatacatattcacatccacacagagacatttcttaagtaatgcaaatctatacatgtatttaaaaatatctatgaacattaagttgcaaaccctctctcatagggaaactgataatttcaacaaattcagtacacccttctgaaaataagttgttaacctatttatatggtatca

SEQ ID NO: 478600 - DNA, 397 bp, Homo sapiens
agggtttgttattctgctcagatcaaaactggcaccaatggcacgtgtaattccgtgcagccttaaaggggaccggagggggctgcacacttgtctgaggtcaaccttcaaagagacaggcttccatttatgggctcaagcactgacacacacacatccacagtagctcagggctgctgactgagttatttttagagccctgccgaggactaggcaataccaggatcttcatgatccattatatcatgattctcacacgctttagcctgaatccatttggtgcacaaaaaatgcctcatttctttayaggagaattttttttttttttttttgagatggagtcttgctttgtcgcccaggctggagtgcagtggcacgatcctggttgactgcaacc

SEQ ID NO: 478601 - DNA, 579 bp, Homo sapiens
atcctaacagctaccatgtagtgggtgcactgattgatccccctccctgtgcaccaggcactatgccaagtgctctgtcacactgaccaactgtcaccccaagttcttgtgaagtgctcttattagctccatggtacagattggagaacagggttagtcatctgcccaggagtgcagagccaggagctagggtgtcagcagggccacctgacctcgaggctgtattcttaacctagcgcatgttcattccttaagccttctggaacgaagcctcctcccacccatcttgcctctggagaggagacagcagagtcccagcccctggcctctgtgcaaggcatctcctggcttaccttggccagcctcgctcgcttgatgaggtcgttgagcttgcgcaccgctgccttctgggggaggctctggatgtctctraagaggtcctgggcctcagcctcgaagagccggcggttgtccgtgttctgcaggggctgcgcccagaaggagccaatgtagacgcgcagtacctcgggcgtgttgatgaccttgcctagggaccacatgagggccccgtagacccgc

SEQ ID NO: 478602 - DNA, 633 bp, Homo sapiens
tggtgccagggaacggccgtctcccagcagagagaaaacacccgaatctggtgataggcgtctggataggatatcaggatctgggtgagtaggcttgagcaaatggcagagtctaaatggtctatgaccactaaggggcaaaatggcagagtctaagttgtctatgaccttcctctaggagcattcgactggtaatgggaaaatgcctcaattgagcgtatacacaattccagtaaacacactgcacgtgcgcccactgccaagtgctggcaggccactgcacgtgtgagagtccaccccaagggaagaatcgggggagaagtgacataaccccagaagyatgctgatgtataagaccccaggtcaaggtcaaccacgcacttgacactcaggttgcccattcgacctgcctccaagtgtacacttccttttgttcctattctgaagatttttaataaacgttcattcctgctataaaatttacctcagtctctcacttgagcttatgcccctcagtcaaattctttcttctgatgaggacagaattgaggttgctgaaggcctatacggattcaccactgcttacaatatccttgggtaattttgtttggccattcccttagcactggcaac

SEQ ID NO: 478603 - DNA, 611 bp, Homo sapiens
ctgttatctgatttgcatttactgaaatagctctcaaaagattcaaaatgaatttctgaataatctcacaagtgaaaactctaaaattaacaggaactctactaaaaccactaaagtttcaatttcagaaatcaaagaagagatccttttgcatttcgctttttcctgtgttggtgctgaagtcaagggaaaaagactgcagagtaagctgaacaggagctattcaaattgtttaatggcagtgataattaatgacctaccctgttatcttacaaagctggtatggaaagcaagtcatattaatagccatattaacaaagtctacatgaaaatttaaatatattatcatttgcatagaggaataaaaaatatgagaacataggacctcttaaaggagctataatttttctttataaatattgagaaaaattggggaaactgcaatatccaamcacaactggtatgttaaatgcgtttatacaagagagccacttaatgggattatttggatatatacatttttaacagcaaaatgtttttataatataataagtgaaaataatcactttaccaagcaagatatatatagaagaattccatttttaaaaata

SEQ ID NO: 478604 - DNA, 630 bp, Homo sapiens
catatttgtctttctaagttatttgcacccagcaaagggtttttccttatattgctattgttacaaagctgctattcagaagagaagtcattgagcttttattatcaacgttcaccactagsaaaaaaaaaggaaagaaaattgatatgggtagggcttgggtaaccttatttttttccttttatgagatttgaatttctgtacttatcctaaagaataaaaaaaaaggggggggggtggggagctaaataaagtcatcttctaatgcaactaaattaaattacttctaattcaataaaattagaatatcaaaagatgaaaactgaaaatttgttcgtgtgacctttcatgatatttaggcatctggcttcttagatcaagtaatcaacacactaattaaaattacatttttttcgaatgtcaaaactgtcatctgcatttcaatgttataattgtataagattaaaagaaaaaggttgcacatcaatgaaatcacattataaatgtatctcaatgactatgtagtggagacaaagaccttgcaatccaggatacgtgggtaaatttgaggacagctccaatttacacatacaatgatctacgtcactgcattgaaagcacctggccagc

SEQ ID NO: 478605 - DNA, 326 bp, Homo sapiens
ctggctccacagcagggacttggcttgtcattgtctttcttgagaccactttctgtgtcctgtaaggcatctcaagagaaaacagtacccttatggacactgtaggccaccagcaactgcctcttggtactatggttttagtgaccctactgtaaaaccatgagtaggttttccttatatttagtatttatgccatattttaacctaataattgattcatgaatgcttaagacattcacatattcacttagtatctmcccagactagtggtaccatgtaagccttgaccttaatttatttgtgcataccatctgtttgttcctgag

SEQ ID NO: 478606 - DNA, 588 bp, Homo sapiens
gcacaggagacatggccctagaggtgtcctttgtccctaccaggcctgagacctctccttcacctagagccaccagcccatcatgcaggcctggcgaagctacttccaccacctcaggcagcaccaccagagatcagctaaagccacaagggcaccagataattcaagcagacaaaaatggcaccacaaagtctctgaaaattaagttgctattaaaaccatagcccatccataaccattgcttggtcacaaaatgagaggaaaaaaaaaccatagcccacaaaagtaggccaggacttgcatgctaaacctaaacagagtgactgcctgtcaaaataaaatatttaaataagatccaatacttcctgatataatagcctagatatcccacatatataccacacacaagataacagttttcttgaaaatacataaaaataaaattmaaaaaaaccttttgtccctttattggaataaaattaaccagtgagcttaaaaatataagcttctgggtcaggtgattactgtagagagaggagttagtaaggtctctccttgaagatggtgtctaagatcgcaagaaaatga

SEQ ID NO: 478607 - DNA, 598 bp, Homo sapiens
agtaaattcctaattatagagaatcaaaacaactggaaactttttttcaccaaagcctgcaaaggtcctgatcaattagaaactttataaaaatatcctgaaagaggagtctgtttgccatactgtagaataaataatgtcaataataagatatccacagtaccttttgaatcttaccagaaataaaatgatattcaggatagctttaatggtaagtaaaatgttggtgttttgctaatacaagaactcttttaagtagacttgaatattttattaacttgcaaaacatcttattccgccacttgtgtttagttagggcaagaagggaaaggctaaaaagaaaacttcattatgctctcctagcccagccgttggagagattatttccagggaggtaggaaggaccgcagacatcctcctgcaggagctcccgctgagtcccaggtgctgtgctgggaatgttaatgacacaagcccagggcagagasgggccaggggctccatttcccagagggtgctgaggggaaacagtgcaactttgccaaggatctgtgtcccttttctctttcggactggagatgttgttcagccatatttt

SEQ ID NO: 478608 - DNA, 582 bp, Homo sapiens
tgtgtgggctggcagccacattaaaacttttcccaatataccttcctccctctgcagcatatcagacacatctttcctctgactgtcttctttagagccccatgagcatgaggtaaactacccagaggcatagtaatgtaataaacaaagtgattgcattagaatcagaaaaacctgcatttcaccgcttatcaaaactatgcaacatttggcaagtcatttgtccattaatctctctgagcttcagactacctacctctcaaaggtatacagattagttgaaagaatgtgtgtaaaagctttttttaatgcagtatagattatatgcaattttccaaactgtatctcayagaattctgtgtagaacaacagaagtttgtcttgcatggagtcagatttgtttggtgtttggtgaaattatggacccttttcatgcaagtatctgtgaaaatgtgatttctgtctgaaattcttgcaggaaagaaacatctcatttctgggtctgtttgattctgagaggttatgagcctcaggaggaatttcctgttacttcatgttttagcaacccttatagaaatagca

SEQ ID NO: 478609 - DNA, 590 bp, Homo sapiens
gggatttatttatttatttaagggatatttattggagatgtactacaaagccaggcactgttctggatctcagagcaagctttggtgctcatgactgcacaggaatcatgacgtaaaatacataatacactgaaaactttctttaacaaacattatttgtatgctgttctttccgattttccccctttactttccatttaatttttgaagcaaaatcaaaaaaataaaatcaaagtttagatttaactttcaaatatctgtctccccagtcctctgctttttttcacatttaaaaatatgatttttagaggtagcttgcctttttttctatgttrtttatatataaacttgagactcttgattacatcccctctttggtaattggaaaagaaaatgaaagtgccacctgtttgctaccgtaatagcattggtttacatatctcagtttcagtactttatttgacaggatattactttgttccattaaattgaaagcttctgttttcattttgtttccagtatattagtcatcatcactctgttacctaagagtttctttctaggtaattaaagatctctttgtatcatgc

SEQ ID NO: 478610 - DNA, 258 bp, Homo sapiens
ttctttgacttttaatctcattgaaatgcgatcacttgcagtaacktcttcgtgggataacttccttttctttgatcgttttcaaatacaggcagacaaaatatattatttcaatgtagaatctataacttaaaaaatagtccacaaaagaaacctgtcatggcctccaggcagttaatggttgcagctttgcaaataaaactgaccctcctataacataattgatcgagccagtcagaaactgggtctgaatatgtg

SEQ ID NO: 478611 - DNA, 668 bp, Homo sapiens
ttcacagatatgagaaaccttcttcagaaatccttgaaaaaacaaatgtaaactactttttttaacaatcaaattgcattttcctgttgacatatttcaatttcagaattatcttctcactattagtattcaattggcagtggttcctaagcagttcagctctgcatgtcagtaaaatatatcaaactacagtttaaatgtattaaatgattccaaaatgcatccttttagtgttaaaatggtttataaacatctcaagtaaattatcttttaaaacacaatggttctcgagcctgtatgtgcatgacaacaaacactaggggagatgcttaaaatgtagagatgcttgggtcatcccttgcccacagattctaactgcataggcatgggttaagtagagcctaggaagctttaytatttcttaaaaggtctacaggagatcctcatgctggcggaggcagatctagttttgtgggtcctgaaacctacacacaactgggcaggtggtcacggggagtctctttaagaaaaagaacaaaaaaatggcaggtttctgggagccttgggaatgcttcctgcattggcttcatagaaaatccatctctggatgctacttggggttgcaaagtgtgacataatgaaactcacaactggaacacatgggcaaa

SEQ ID NO: 478612 - DNA, 308 bp, Homo sapiens
gctgagttccaacaaaactttatttacaatacagggcaggccatatttggcccacagatcatagtttgctaatgcatgttctaaggtgtctaaattcattaagaagtagaacctacagaagattcttgaactaggcagtggcaaaatcaaagtcatcctttgagcaggttaagtttttaacagcatgcaaaacacgactttgagcaaagtctggagtcaggttattatgattgtccaaacatgaaacaggaaagatctgagctctaagtagtgaaaataygaaccatgcagaatagaatgacatatgc

SEQ ID NO: 478613 - DNA, 569 bp, Homo sapiens
tgcaggaaaaaagcatttggcaccactcatcatccrttcacattaaagtgttagcatagtaaacatagaaataaatatatttaatttattaaagaacatctacaaaactcttattatacactttctgattaatggtaaaatatttgatatttacaccataagatcaggtgaaatacagggtgctcactgtcataactcttctatttaacattgtactgaagattctagccagcaagaaatggcccaagttttggaaaggaagaaataactcattatttgtcctggataacatgattatagatgtgaaaaatccaaaagaatctattgataaactgtaagaattagcaaatgaattcagaaattttagcattcaaataacaatttgcattaaatttagcatatacatatcaatttgcattttgcacaccagcaaaaagcaactggaaaaaaggtaaaactctatctaaggactgatatacaacatttttgaacatagagcactacacaacatttttgagagactgtaaacatattcagaaagaatccagatcaaaagcaaacatattcag

SEQ ID NO: 478614 - DNA, 596 bp, Homo sapiens
ctactctgaaaatactatagtttaggattgcatgctgtggaaaagatgattagctgccctctgaaatccattcttctcttaggcacacagctagactgcatttcccagacagactcgcttacagttaggtgaaacatgagctcaagttctatactgaaatgtgagcagaaggtctgccattactgggctggggttcttaaaagagtagccatgcctcctccatgttcttyttctctttctgctagagaaaaaggaatccagcagttctaaagtaaccctgggagctccctgctgaagacggcagaacttctgccagccaggttttcaaatgtctgcatacagaagagatacctgcaacaaggatcttgcctcagactgatgtacgagttaaggaatgtgcttatactacatgtaagtttggctttatttattagtttaacatatcttaactatgatatatgccatattttaaaattacacactgttactaaaatcacatgggagcagagacatcttaacttcactttagtgctttttactttgccaaaggtgctttcacatgcattattgcttaggagtctcaccacaacctttga

SEQ ID NO: 478615 - DNA, 521 bp, Homo sapiens
ttttaagaggttactctctgacatgagcagtaatacagaaaaacatgcaaaagaacaaacatggaattgtataagacccaaggaggcaaattaaatccagagcagagtttcaaaaaagagtyatataaactacacacaaatatttgcattacagtaacagagataatcaagttggaagttaaattattggtcagattctactcttgcaacgggtttaggtaggaggggaagtaacatatttttaagtaatacattggtaacaaaggttccatggtgttttctttatgtaaacatatatcatcagttcctgatgtgaagctgaaaagtggcctatgtcagcagagtcccaagaaaaataaaggctggataaatttcaatggagaaggaactaggcctgttagttataactaaaggatcacaataaaattcccctggtcttccagaatttcctatttgcccatgatattggcactttccagctcagagcaggtattcacacaggctacattaaagcaaacatg

SEQ ID NO: 478616 - DNA, 521 bp, Homo sapiens
ttttaagaggttactctctgacatgagcagtaatacagaaaaacatgcaaaagaacaaacatggaattgtataagacccaaggaggcaaattaaatccagagcagagtttcaaaaaagagttatataaactacacacaaatatttgcattacagtaacagagataatcaagttggaagttaaattattggtcagattctactcttgcaacgggtttaggtaggaggggaagtaacatatttttaagtaatacattggtaacaaaggttccatggtgttttctttatgtaaacatatatcatcagttcctgatgtkaagctgaaaagtggcctatgtcagcagagtcccaagaaaaataaaggctggataaatttcaatggagaaggaactaggcctgttagttataactaaaggatcacaataaaattcccctggtcttccagaatttcctatttgcccatgatattggcactttccagctcagagcaggtattcacacaggctacattaaagcaaacatg

SEQ ID NO: 478617 - DNA, 514 bp, Homo sapiens
ttgggtgttcactcgagtgctctgaggtttaggtcagtgttgctaggaccctccagagggcctcctgtctgataagacttcctactggataatcacagaatgaataaagttattctctccactatgcacgggagggtccaaacagtatgtggaatcttttaagagcagaaaacctgcatttccttctccccatcatagtgtgaaattargagaagctaatctgacaactcgttcatgaccaggagggctaaattgccaaaaagtaaaaagagccagtcctgaagaattttctaggactgatatgatttggctgtgtccccactcaaatataatcttgaattgaagttcccataattcccacgtgttgtgagagggacctggtgggagataattgaattacagggacagtttcccccatactgttctcgtggtagtgaataagtctcacaaaatctgatgattttataagggatttcccttttcacttggctctcattctctcttttctgccacc

SEQ ID NO: 478618 - DNA, 566 bp, Homo sapiens
tgtaaaccttccagtgccattgaagatataccactgagacttggctttacttcttacatacaatggagccaaatttcttatcttccacttatttaaaaagtattgcaaatgccattgaatttaaggaaacacgcagtggctgcagcattcagctccgtgtcctaaccccaggagggctcacctttccttctagatcctactcttcatcattaattacttcctcttcattttgatttcaaacattcttcacagtcagttgataattgataatgaatttgaagagcataatgaatccacataaaggatgaggttatttaatgttttccagatgcaggcagctgtcaggagagcaaagggaagggagatrctgggtccggaaaccctgctgctgctgcgacaagttctccgggtccaggctgtgatttccacaatctgcatccaaaccacagagtgaagccgaaattgtgtgaatgatcgggagtgtttgcagagttcaaccacagtgttatcacgttttatccaaatctcctagtccaaaaaagaataccacgccctgtttttatctc

SEQ ID NO: 478619 - DNA, 463 bp, Homo sapiens
gaaggatttgaggcctgcatatacacgacgtcagatgtacattaagtaccaggatatttcatttatagccagagctcattaaaatagtttgtagttaaaatgaaaaattttgatgtgcaaaaaaaatactagtttaacatattttgaaaattgatacatgcttaactctgttaccggggattgggttttacatgttgaaggtgttagtatggtactgactattcaattcattatggggatgtgttgtaataattttytaatagagcaaaaattttaaaatgtccttatttcactttcacaaaaaattaaaccaacctcttcttaaaggcataaccaaagtcatttttgcagttttgaaagttgcagttttcaaatatatatatatacttgaaatatgtatatacttgaaatatatatatacatatatacatatatatacttcaaatatatatacacacacaca

SEQ ID NO: 478620 - DNA, 396 bp, Homo sapiens
agctgtcagtttgttggatgaaatagtattaaaactagtgagataacaatagcaacagacatttccagcaaaaaagtgatttcttgagacattttctcacaatagttaaaaacaattgattttactctccctgttagaaacttttccatatggtttgaagggagtcaaatatatatatatatacttgttttgatgtcctataatattaaatatttatacattatatatacacacacacatacattatttcatcatttggtkgtagatggaattttgttgttttgtgttttcttttcatttcaaataaagtttagatggataatttattaaagttccaaagtaattccacatttattcttataataaatttggtaaacattgtatatatgtatcaat

SEQ ID NO: 478621 - DNA, 627 bp, Homo sapiens
catataaaattaaccacttcaatgtcaacagtacccaagtgatctacatattcagtgcaattcctatcaaaatcccaacacatttttttttttttttttgccgaaatagaaaaagccatcagtttgggatgatgaaaaagttctgaatatggacagtggtgatggttgcacaacaatggaaacgtattaaatgcactgagctgtacacttaaaaatggcttaaatggtaacttgtgtatattttctcatgataaaaaaattctaaacaatatgcacttctctgattttacagaaaaaactctaaacctttaccattatattcagygctctttcttctacataccagatatctttccatctcagaatatttgtacttgatgtgccctctaactagaatcttaccctattattctctcttctacttaccactttttaattctctatagtttttaatatcattggaaaaagaatttatgtatttgttaatttatctacttctactttgtttgtaaatatgtaagctcagcaagagtaggcaatttatctgttttattcactgatttatcttttggttcctagaagagtatttggtacagagtaggtacttaataatattagttgaatgga

SEQ ID NO: 478622 - DNA, 656 bp, Homo sapiens
aatcacttcactaagggttttgaacatcatcaaaagaggtacttaaaatgcttggtggttgaaaagatacagatttctgtgtgtgcatttataaagctacctaccaatattcaggtgtatgtgatgtatcagaaacaggaataagtgattgacatatgatgagtttaaagagtagttgatagaagtgacatgaaagtaaagagacagagcatgtgtgagyattccctatgtgccagaaattgtatatccactagatcatgttttatgaggtcaacactgctaataaaaaaagctaccatattttggattggatattatatattagtcattttacgaataagatcattcaatttccataaaaaacatttttgtttcttttttccagatacaaaattgtgtcaacaaaaagaatcaaactctgtaaaatatttgaagagatttatttcgagccaaatatgagtgaccatggcccaaggcacagtctcaagaagcccttagaatatgtgcccaaggtggtcaggctgcagcatggttttacacactttagggagacataagacatcaatcaatacatgtaagttatatatcaggttgggagtggggtggcagtttggggaggtttctaggttataggtggattcaaagattttctgatt

SEQ ID NO: 478623 - DNA, 649 bp, Homo sapiens
atgcaatatgattagccacaacaaaataaattcattaaaacaaaaaagcttttttctttttaaaagagtctttgtgattactaattataaatcaaaataatttctttcaacctttatatattttaatttagtattaaaatcagaaaagatagcctgacctgttacacaaactttgcatgcaagcatctccatcttttattttattaagcttatatctgcatgaacaagagatgaattattctaatgataaattctgattaaagaaatcagcaaagtaaatcagcatagctagaggaaatatatatgtcttatcatgagggattcaagtgaaaaaaactatgtaattttttcatgaagtcaattgataagcagcataaattctagtgtggttattgtctgattttgcataggtgaggtggagaataagacacctctctttcaatagscaactagccactggctttttgtgtttctccattgacatataatttacttaccacaaagttgacaccttttaaagtgtacagttcagtggttcttagcatattcatgagttatacaagccgaactactacctgattacaaaacattttcatcactagtaaagaaaccccatacacattagcagtcactttccgtgccctctatt

SEQ ID NO: 478624 - DNA, 533 bp, Homo sapiens
tcattcagttacttagacttttaactccgaatgaaatttgtcagtttgatacatatgtcaataatttctaggtagtgtaatgggtggctcagtttctaaataaaaaatgtaagctcaaaaattctccaatttatataaaatcttcaaactagttaatgcaaggttcataaggttaattaacgactgaaattcatggtcccatgaaattatgttaaattacaggggaattattgatctgagatgtagaattcttttctaagaggactataattaagcattttccaactttgtccctttttarcaaagagttggtaagattatcctcatcattatcagttgtctttagaagatcaaagtagtagaattaagtgcaattcagctacattcaggagccaaatcttaaaatatttattttaataaatgttttcatcaattttagtggtatcaagtcaagacatacatatctctaaaaactggatcaacaatctatagagtactatcttttctattatatatttagaacactatttttt

SEQ ID NO: 478625 - DNA, 533 bp, Homo sapiens
tcattcagttacttagacttttaactccgaatgaaatttgtcagtttgatacatatgtcaataatttctaggtagtgtaatgggtggctcagtttctaaataaaaaatgtaagctcaaaaattctccaatttatataaaatcttcaaactagttaatgcaaggttcataaggttaattaacgactgaaattcatggtcccatgaaattatgttaaattacaggggaattattgatctgagatgtagaattcttttctaagaggactataattaagcattttccaactttgtccctttttagcaaagagttggtaagattatcctcatcattatcagttgtctttagaagatcaaagtagtagaattaagtgcaattcagctacattcaggagccaaatcttaaaatatttattttaataaatgttttcatcaattttagtggtatcaagtcaagacatacatatctctaaaaactggatcarcaatctatagagtactatcttttctattatatatttagaacactatttttt

SEQ ID NO: 478626 - DNA, 455 bp, Homo sapiens
cacaggattaggggaggtggaggaggacagaagcccaaaggagggctagggaaattgtgagaactatagggacaacctcaagtccrtgaccaagggccctaaagggtggtgatgaagtcagccctggctccagcaagcccttagatccctagaactacagcttggaggatgagaagtgacagcagggtgagccagatgggaagtgttgtcaaattcggttgggggacggcatcatgatgtgggtgtttggttcattaagagccagacacaaaccacaagtttgggaggcaaggaacagaatccaggctcagagagtctacacagaaacttgccaaagagtcaaggccaaacccaggggcctggacttcaagccagcattctgtcccttccaaagaactggatggcaaggtagaaaagaacaacagaaaaccagtcataatgattgcatcaattgg

SEQ ID NO: 478627 - DNA, 633 bp, Homo sapiens
taggtggaaggacagctctgaatgagcaaacctaaggtcgggggaggggaaatctcagctttgcaggagaaacttttatggtgagtgctgaggagcactcactgatggtgccctggcaagtggtcatcctcagaaaagtcctagaaggggcatagagtgtctcaaaaagaggaggatatcaagtgttggcaacttggatctggccagtaagtggcatcccaggaacattgttagatcctgtgttccttgccttatacacacagagatgctgcagttaaagggtaggtgaaaaggagcaatatggagccccagtcctagagggtttagaaaacagaacatgtctttaggaacacagaaaakgatggatgagtttctaagaattgaagtgagtattatttggtcacaggaatgagacagtagcccagttactagtgctgagacatgaagccacagccagatgggggcagaggcaacttgaaagtggatcctctgggtatcaatctatgtctttcaattccctttgctagtaatatgtctttagagaaagggtagttgtgggtgtgagtgtgggcagaggtctctctggagtcagaggatagtataggattcctgggtgtcagatgtgggacacta

SEQ ID NO: 478628 - DNA, 485 bp, Homo sapiens
cagaaacgagcttcccttggttcagtaaaaaaataggataataatctctgggtaggattttcaaatttaaaaaggaatttcctgttattttaaccagtagctggaatatacattatcatccttgtttgactggagacgcaactgcagcacaatgtcaaatagtgggttagataggaagctgagtgcaacatccacacagagctcagtggtttgcaaacttatgtgcaaccgacagtcaccccaagcacagccctggagagttgcatccagttagtcaaggatgagatcctaggaattcgcatctgcaatgagcttctcagttgtttctgattatakctgaagagcatttggagacactcagcagtgggggctctttctgctatcctgttgggacctcctcctaggactacatcagttctttgtggtgagcgatgcaaagtaggcctccagagcataccccttccctcagtcaagagtgctcagtc

SEQ ID NO: 478629 - DNA, 632 bp, Homo sapiens
tttaatcattccaaggcattctgatttaaaaaagctttgttacaaggtaaatggttaaatgggagcaacagatgatgactgatcaaagataagcacttgtaagtgattcttaggtgtcttcttacagaatattttgcatattaaaacataacataatcctaccagtattcttaaaaattcatttattgcctaaagatttaataaagaaagagtcttctttatgtaatagggaaaggatattcatggataactgtaggtraattctgagatctaccaaagatcagaatctgtcggtggtacttattctcttggttattcttgtcccctaacctgaaaactaaacaaaacaatcccaggcttctgtgctggctggcctgggccaagatgcctaggagacacattattagggttttgttgtggagagcaaaagatttattaggaggaagcttccttagagcatagcatgggaagaagcactggttggtctgtacaggcactgacctcctcacctccatctgcgcaaagaagtctgagcatgccctgtcagtcagcttctttggtcaagatatagttggatactgacctcaagcatgtactcacagtggactctcgtgccagccatatcccttctc

SEQ ID NO: 478630 - DNA, 590 bp, Homo sapiens
tagcatataaacatggaaactattttttgtatttaggtaccccaaattcttgcatgattcatatttaaatttctagagtttccagatatctcaagtgctgataggaagccttttcaacaataacaaaaaaataaattcacrtgcacattccttctctgtaagaatgcctttgaacattagtgcatctctctttctctaggttatattcttgcctaggaatttgaacatctctagaaaaggtagaacacaaagtcacagtctgctgtttcaaattaccacctttatctatgctttttatatcacccacatctctgtatcatgaatatgtacatctatatctatgtatagatagatctatgtgtagaaactttttataggaaaactttgtgtttctatgtatagatctatatatagaaacttatctatgtatagaaactttgagatataaatcacatacttttattataaggaagtattttaaccctaaaaagcaacatagaggaaatataatgaatatcagcgtagtctaaagttttatcaaatcttaacattttgccatgtttgattcaaacatttttcctagtaaatcg

SEQ ID NO: 478631 - DNA, 590 bp, Homo sapiens
tagcatataaacatggaaactattttttgtatttaggtaccccaaattcttgcatgattcatatttaaatttctagagtttccagatatctcaagtgctgataggaagccttttcaacaataacaaaaaaataaattcacatgcacattccttctctgtaagaatgcctttgaacattagtgcatctctctttctctargttatattcttgcctaggaatttgaacatctctagaaaaggtagaacacaaagtcacagtctgctgtttcaaattaccacctttatctatgctttttatatcacccacatctctgtatcatgaatatgtacatctatatctatgtatagatagatctatgtgtagaaactttttataggaaaactttgtgtttctatgtatagatctatatatagaaacttatctatgtatagaaactttgagatataaatcacatacttttattataaggaagtattttaaccctaaaaagcaacatagaggaaatataatgaatatcagcgtagtctaaagttttatcaaatcttaacattttgccatgtttgattcaaacatttttcctagtaaatcg

SEQ ID NO: 478632 - DNA, 590 bp, Homo sapiens
tagcatataaacatggaaactattttttgtatttaggtaccccaaattcttgcatgattcatatttaaatttctagagtttccagatatctcaagtgctgataggaagccttttcaacaataacaaaaaaataaattcacatgcacattccttctctgtaagaatgcctttgaacattagtgcatctctctttctctaggttatattcttgcctaggaatttgaacatctctagaaaaggtagaacacaaagtcacagtctgctgtttcaaattaccacctttatctatgctttttatatcacccacatctctgtatcatgaatatgtacatctatatctatgtatagatagatctatgtgtagaaactttttatagraaaactttgtgtttctatgtatagatctatatatagaaacttatctatgtatagaaactttgagatataaatcacatacttttattataaggaagtattttaaccctaaaaagcaacatagaggaaatataatgaatatcagcgtagtctaaagttttatcaaatcttaacattttgccatgtttgattcaaacatttttcctagtaaatcg

SEQ ID NO: 478633 - DNA, 626 bp, Homo sapiens
cctgagctcttgtccaagtcaaaggaggarccacttaaagttctagactagggaaagagatttcaattactcgtgaatctttgttgtgcccctaacaagaatgaccataggatacccctactacgaggctttgaacagtgctgtcctaagccttatgcatctgggataggagaaaaagccaatacaggtctttgatctgcatttcacaatcttggttgcaaaagaagaaaatcagaaacattgaaagacttcatggtgcaaccatgagtctgaagcattatgtaagagcccaaattcaattggttgaacaactgattgaaattgaatatgaagacaaaataatgcaagactcaatcagtggggaaaattatgtatttatcttagaatcctatcaagttccaggtctttatatttagataaaaaatattagacctactgttatcccatcaacttcaaaggtcttaggggttagatagaaaatctgtgtatgtcttaagagtcaaagacatgcaaatcaaggtatcagatgggatgggacatgttgaccttttataagtagccagagaattaggtaacttgactttatttattaaagctttgaagtccatgatacaaagattatgaaa

SEQ ID NO: 478634 - DNA, 626 bp, Homo sapiens
cctgagctcttgtccaagtcaaaggaggaaccacttaaagttctagactagggaaagagatttcaattactcgtgaakctttgttgtgcccctaacaagaatgaccataggatacccctactacgaggctttgaacagtgctgtcctaagccttatgcatctgggataggagaaaaagccaatacaggtctttgatctgcatttcacaatcttggttgcaaaagaagaaaatcagaaacattgaaagacttcatggtgcaaccatgagtctgaagcattatgtaagagcccaaattcaattggttgaacaactgattgaaattgaatatgaagacaaaataatgcaagactcaatcagtggggaaaattatgtatttatcttagaatcctatcaagttccaggtctttatatttagataaaaaatattagacctactgttatcccatcaacttcaaaggtcttaggggttagatagaaaatctgtgtatgtcttaagagtcaaagacatgcaaatcaaggtatcagatgggatgggacatgttgaccttttataagtagccagagaattaggtaacttgactttatttattaaagctttgaagtccatgatacaaagattatgaaa

SEQ ID NO: 478635 - DNA, 626 bp, Homo sapiens
cctgagctcttgtccaagtcaaaggaggaaccacttaaagttctagactagggaaagagatttcaattactcgtgaatctttgttgtgcccctaacaagaatgaccataggatacccctactacgaggctttgaacagtgctgtcctaagccttatgcatctgggataggagaaaaagccaatacaggtctttgatctgcatttcacaatcttggttgcaaaagaagaaaatcagaaacattgaaagacttcatggtgcaaccatgagtctgaagcattatgtaagagcccaaattcaattggttgaacaactgattgaaattgaatatgaagacaaaataatgcaagactcamtcagtggggaaaattatgtatttatcttagaatcctatcaagttccaggtctttatatttagataaaaaatattagacctactgttatcccatcaacttcaaaggtcttaggggttagatagaaaatctgtgtatgtcttaagagtcaaagacatgcaaatcaaggtatcagatgggatgggacatgttgaccttttataagtagccagagaattaggtaacttgactttatttattaaagctttgaagtccatgatacaaagattatgaaa

SEQ ID NO: 478636 - DNA, 617 bp, Homo sapiens
  misc_feature (1)...(617): n = A,T,C or G
tgtcttggaaactattgataaaacaagcaccatgacaaaatgagttaagtaactaaaggtacagtattaaactggaacctgatttttacctgggataagccaaatttaacatgatcagtccatagatatttggaagttggcgacatatatacccacrtttgcccgcatatcatttttattagttaagtcctttgagatagtatgggtaagttggggcttgataaaatatganaaataacatcctcatcagcatacagggacgcaagtccgtgatgtggttatgcaggaaaggacatctggaaatgagcagtataatgattacaatattaggaaaatacaacttgtaaagaagcaggtcttagccaaattcccaactcataataactgattatcaggcagtacaggcattgaaaatgatgaactggccatctaccaaagtgtcatcttagggagcacactgtagacaagactgttggccatacaaatagtataaataattatcatcagttagtaaaccaggtatcttccagtatattgtagtttgttaccaggatattatatccacatatagttcacttgtaattgcataaatgcaaggttccttttgcaatggagca

SEQ ID NO: 478637 - DNA, 602 bp, Homo sapiens
aatttattattaaaaatacaaacaaagctattggcatttaaatgtttttgcatttttgttatagagagataagcaaataaaaattaaacatcacctcaaacccaagagataggcactgttaacattcttctgtatttaattacacatatgtgcccatattacacaaatggtataatatgtacataatattttatatccggtttttccactttacagtgaattacgagtcttttttccaagctattgtctttttgttgttttaattccagttaatattttattgtatggctatattatgattatttaaccrgtcttctatttctagaaagttatatgcttgccaatcatctgctaatgtaaaagcacttggatgaacatctttataacccaattttcaacattcagagaactttctccaagacagtagaggatggagtcagcctagctaccatcagacaaaggcccaattgtttcctatgttgccgaaagcacagctcagcctctcagccatgtctcccagacctgcaattaatattccagggtaaaactcacctgtcagttggggttgcttctctggattcccagaaataggccacataatt

SEQ ID NO: 478638 - DNA, 681 bp, Homo sapiens
cacctggctaactattttatagggatggggtttcaccatgttgcccaggctggtcttgaactcctgagctcaagtcatccacccwcctcgacttcccaaagtgctgggattacaggtgtgagccttcactcccagccaaatacctcctatttaatatttaaaaattaagaaattttattatccaactaaaattcataatcaagatctttgaatttttctttaatcttaagattatctacagaaatttggaaacaaaaccagtacagttatgaaaagcatattcttcatttaacttatagccagtagtttttctctgcagccatagtttcaaagccttttgttttctttttttcttcttgagcatcaagccgagtatgctttattggatggccaaagagcagagaagaaaaagcatggctcacaaatcaacttctcacctactgagggcattacaatatagggtttctctaacgaaggggctggacattaaaagtgaagggagaaatatttatgtctttcttggaaataggtggtgaatttctcagaaccagagtgccaccttcctgtttgtcctttatagttttttctggtcattgtcatgacaattatcaactgtcatggtgctggtgagagtgtcatttagcatggaaatgagattataatgaagcctgaggtcttttt

SEQ ID NO: 478639 - DNA, 553 bp, Homo sapiens
agcactgattgttgaatggcactgagacgttatggttgtgcagtaataactgaccaaatggatgagaattatgtggtctacagtctrgggtctgaagatagttgatttccttttaggtctgtttctgagctacttttcctatttttaactcttgagccctaattctcctaggctaaggtgatttgctccagctcccagccgttatcatcattttgcaactaaattttgtttagttttctttgctactgctgcaatatttacaacttaaattaccataacctgtgcgtaccacgttgcttggctttttatgttgaaggagttctcaggaaacgccaccttgaaatatgccagtttggacctcaaactgagggcacttggggaacagcaaatgtggggaagggctttctctgaactacccttatctacctaaagagaaatcctccatatgaaatgcaattttctgaatcctctccccagaaatctcatcaaccagagaagcttatacttgagttgcaggtgagaaaactggataatcccatgcccagacagacag

SEQ ID NO: 478640 - DNA, 527 bp, Homo sapiens
ttactgaaacttcaaagggaaaataattcattaaattaaaggactaagtattgaaaggccttagttgaattgttggctaatatgaccaactaaacttaattagaaatatggtcaaaaatagcatatactttccaactctgttatccacagaaaggaaagggaggtgagatgtagctaacattgtaatgtttgcacgattctaaaaataattgttattggattaaaaaaatacattatatacattttcacagcaggaattggaggttgagtcagacgtgaatgaaagatctcattccagtcctttgcacttactatgataacttttaattgtaggaccaccagcctactatagcctcttagcttggctctggaaaaaagtcatgaacagtgtgtgtgtgtgtgagtgtgtgtgtatgtgtgtgagagagagagaaagagagaaagtgagatcacttggaatcattttgaaatataatttcccygtactatttcctatcataatgacatgtaacattgtataaatggtg

SEQ ID NO: 478641 - DNA, 614 bp, Homo sapiens
ctcacaagtagctgggattccaggcatgagccaccgcacccggctagtttttgtatttttagtagagacagggtttcaccatgttggccaggctggtctcaaactcctgaccccaggtgatccacctgcctyggcctcccaaagtgttgggattaacaggtgttagccactgcaccaggcctggaccaatacttttattcattcttttactcactgagtgcgtgctctgtgctaggtcttggagatacaaagatgacaatgtcttggcacttgtactagcagtttaatacacattaagaagtagttacaacaccatacaataagtttgaacaatgattccattgaggggaaaagcgtataccctctaaaagatttaaagtaatagaagcagagccacaaaggcaattctccacgaatgcacttcttctgtgttatcttgtttgctttcgcctacaatcccttaaaaatgacataagccagtttcactggagattcatttactatctcttaaggatactcggtctctgagagttgtggggtggacactttcaacagaccagggtttggcagaggtttgtcatgcctttttgccaagggctcaccctggcagatgg

SEQ ID NO: 478642 - DNA, 614 bp, Homo sapiens
ctcacaagtagctgggattccaggcatgagccaccgcacccggctagtttttgtatttttagtagagacagggtttcaccatgttggccaggctggtctcaaactcctgaccccaggtgatccacctgccttggcctcccaaagtgttgggattaacaggtgttagccactgcaccwggcctggaccaatacttttattcattcttttactcactgagtgcgtgctctgtgctaggtcttggagatacaaagatgacaatgtcttggcacttgtactagcagtttaatacacattaagaagtagttacaacaccatacaataagtttgaacaatgattccattgaggggaaaagcgtataccctctaaaagatttaaagtaatagaagcagagccacaaaggcaattctccacgaatgcacttcttctgtgttatcttgtttgctttcgcctacaatcccttaaaaatgacataagccagtttcactggagattcatttactatctcttaaggatactcggtctctgagagttgtggggtggacactttcaacagaccagggtttggcagaggtttgtcatgcctttttgccaagggctcaccctggcagatgg

SEQ ID NO: 478643 - DNA, 608 bp, Homo sapiens
gaaaaacctgagtcttcttatatctcttctgctcttatattcgctatgcccaatccatcaacaactcaatcattttaatcttccatatttttctgtaatccttcctcctctcaccattgatgaygttaagaagatgccaaaaggaggccctcatcatttcttacctgattgacggcacagcctcctaatttccattctctatccctaccttcctttagccttctttacaccacagctaagattacagtttttgtttgtttgtttgtttgtttgttttgttttgtgacagagtttcccagtttctctcttgttgcccaggctggagtgcaatggcgcaatcttggctcatggcaacctctgcttcccgggttcaagcgattctcctgcttcagcctcccaagtagctgggattacaggcatgtgccaccatgcccggctaattttgtatttttagtagagacggggtttctccatgttggtcaggctggtcacgaactcccaacctcaggtgatccacccaccttggcctcccaaagtgttgggattacaggcgtgagccatcacgcctggccaaaattacagtttctaaaatatccattcattcatct

SEQ ID NO: 478644 - DNA, 615 bp, Homo sapiens
gagtccagtctaattacatggttttgaaggtggagaactttttccagctatggtcagaaagggatatgactgcagaaaaaggctcagagaaatctgtcattgttggatttgaagacagcggaaggggaccgtgagccaaagaatgtgagaaacctctggaaggtggagaagacccagtacagattctcctctcggggctctggagaggagggcagccccactgacacaccttgattttaactcaacgagaactgtgttactcccaccctccagaactgtgagataatcagtttgtgttattttttaagtcactatgttagtggtgatttcttatggcaacagtagaaaactaatatagaagtttaaaaataatgtgttaacaggagaaaagaaacacaagatgacttcaaaagtcctagaaaaacckacaaagtcctgttcctaatacatagatgtgagagagaactgttgtcctaagagcacgcccagaggtagacaagtgacacgctgcttgcctgagcaccacccgttggcatttggctttaaaagtgtcacaaactgccctgactgtgcaggctggaagtggcagctcagaccaagcatccgtggccacag

SEQ ID NO: 478645 - DNA, 599 bp, Homo sapiens
tagaaatctagcttaatttcaaatcatcacctcctcacaaaatattctgatttgacgttatccacrttcaagtatttaccaaaaagaaaacataattttatctacaaggtaagcccaacctcacttaaatttaggaaaaacccaagaaacaaaaacatgacccacttaactggcataaatgtttacctgttgttttgtagatgatctgtttagaggcactgaagtttctcttcaaggctcagatgattagtcacacttagttctaaccatatattccttctaggctatccctaagaatataactgacacaagagaaaggaacctttacattattattgaggttatttttaatatcaattgaagcagcgttctgattacagttctacttgttttctaactgttttcactctttaaaaacacaattttttttttttcaatttcaaggattacgaaattcttctgtcttagttacaaacaaaatgcagctatgaagcactgggaagtaaatgcaaaatatagaaagaatcttcatgattctcccaaactgtaagcacagctcacaaagtctcattgctttagaatgttttctggatgaacaa

SEQ ID NO: 478646 - DNA, 557 bp, Homo sapiens
aatttcccatcctttacatggtgaagaccttcatatatttggggtatgttattaaatcacacctcagccttcagttctggccgaaaataccaatcaatcagtctttttttgtgaattttactttccaaacttttaataatctccatgactttttctttgtgctcctctccatgtattacagagtcttacttagaaaaatccacaagatgatccaacatttattaatggctaagcctaaactgagttctttaaaaggtagttatacgatgatttctctacaccagtggtttgcaagctcattttgttttgttttccaaacagagaaaccatttattcgaattaaatcatctgtgagacggaaggagcctctctgattaaagtaagagtaagcaaaatagagtcccaactatcatctcccctccctactgtgmagaagctactgatgtaacccaagcagccctaagggtctgaaaaccactgttttacaacatgctctggtttatgtgcacagatgttaaattcactgtttcaggtacaggataacagtactgaataac

SEQ ID NO: 478647 - DNA, 650 bp, Homo sapiens
tgtggttatagccatgattgactctgtattatcgcttattaataaatatgaatttcgtttcaattatcttttaatttagttatgtgattttaaaaaggttgttgtatttttacataagactaggaacacagaaattcctaattgtttgccagtagcatctatttcacattttataagaaaattaatggaaaaagtgtgttaagacatgttcatttgacgtacaaactttgctaagacatatccatcaatcattccatggtaaacatttgtaacatttcactcttctcaagataaaccaaaggctctcccatgttattatattaggaacattactgctaatgtgattttataaacattctccatgtatatcactgtctgaatctgcacactgaagctaaatgttatatttaattttatttgtggcagaataaaaagttgttaaggagcaaacgttccatttccrttggaaatagaaccttatggctggaaatagtggcttatgcttgtaatcttatcactttgtgaggtccaggcaggaagatttcttgagcccaggaattcaagaccagcttgggcaacatagtgagatcttgcctccactaaaaattaaaaattcagcagggcatggtggtgcatgcctgtagtcccag

SEQ ID NO: 478648 - DNA, 632 bp, Homo sapiens
acaaaaatggtagatattaaaaccacctaattaataattcatttgaatgggaatattcaaaatatacaaataatagaataaataaacaagaccaaataatatgttgtctacaaaaaactgactttaaatagaaagcttagacactttgaacaaaagatacaaaaaaagacatatgataataagaccagttaaaagaaagctatgtagctgtattaattccagacaaagcagactttacaaaaagaaggattatcagtaatggagagggacactacatactaataatgataaaggagttaattcaccagagacataaatctaaacacatatgcatccagcaacacagtgccaaaatacatgaggcaaaattgacagaatggaaaggataaattaagaatccaatgctataggtgaagattttcacaatyctctgtaactgatatattaaactttcagaaaatcagaaagtttacaattgacctgaatagcattatgaatcaatttgattcaattgataattatagaatactcaatacaacatcagtgaaatatatattttttctgagctcatatggaacattcaccttcataggtcatattgtgggtcacaaaatacacctcatcaaatttaa

SEQ ID NO: 478649 - DNA, 632 bp, Homo sapiens
acaaaaatggtagatattaaaaccacctaattaataattcatttgaatgggaatattcaaaatatacaaataatagaataaataaacaagaccaaataatatgttgtctacaaaaaactgactttaaatagaaagcttagacactttgaacaaaagatacaaaaaaagacatatgataataagaccagttaaaagaaagctatgtagctgtattaattccagacaaagcagactttacaaaaagaaggattatcagtaatggagagggacactacatactaataatgataaaggagttaattcaccagagacataaatctaaacacatatgcatccagcaacacagtgccaaaatacatgaggcaaaattgacagaatggaaaggataaattaagaatccaatgctataggtgaagattttcacaatcctctgtaactgatatattaaactttcagaaaatcagaaagtttacaattgacctgaatagcattatgaatcaatttgattcaattgataattatagaatactcaatacaacatcagtgaaatatatattttttctgagctcatatggaacattcaccttcataggtcatattgtgggtcayaaaatacacctcatcaaatttaa

SEQ ID NO: 478650 - DNA, 580 bp, Homo sapiens
tttttttctttttttagttttttagtacaagaaaaatctttatttcatcctagaatgttttaaaacaaacaaacaaaacaccaaacagtcagcgaaatgagtaaaaytgctaaccaaaccatcataaaatcatgctagctctacattaaaatatatcaaatttcaagcacttctctccgtctcctgaaaccactggtctgagccatcatctctcacttggatttccatgatagtcacataagagttttctctgctaatatccaaggacttagacctctcaaaacaagctgccaaagtaagccttttagaagataagtcagagctatctctcttctaagaactctgcatggctactctttacattcagtataaaagccaagatacccataatgctgataagtagggtgaccatataagttatgattcaatccagattagtgagtgaaattgtttatagtactaatgacagaacaatatacctaaaaataaattggcatgaacaagtaggatatttcatcaccctactgtcaaggtgccttattattttcccccgttacctttctgaccactgttgccatca

SEQ ID NO: 478651 - DNA, 608 bp, Homo sapiens
gtcacgtaagtgggtagtgacttccagtttgggggaatgatgagtaatctggtatgaccagaacacagggaggcagggcagcaatgtccagagataaattcagaaaaataggttaaattcaaattgaaaaggtcattgtatgtgtggaaaatctcttgcaggcactaaggaatcatcataggttttagaactcagggaatgggggtgacagttaagatctttgytgtaactctggctgctgtgtggaagacagtttggaaagactacatgtagaaagaatgtgcaaataaaagctttgtattaatttttaatgctgaagataaaaaagattaagaagatcatacatcactggattaatggccatgaatgttactccaaaacttgttaaagcatttatcaggggtcaaagctgtaggtcatcagactaaatttcatccatagatgtgtactgtttgttttacaactttcttttaatattttgatttggctgccaatatttatatgtaagaggattttacatgaaaatccagatttctctttagagtgtgcatttcctttgaaaaatcaaaagattggattacactgggcctgcattctgtcctggcaac

SEQ ID NO: 478652 - DNA, 608 bp, Homo sapiens
gtcacgtaagtgggtagtgacttccagtttgggggaatgatgagtaatctggtatgaccagaacacagggaggcagggcagcaatgtccagagataaattcagaaaaataggttaaattcaaattgaaaaggtcattgtatgtgtggaaaatctcttgcaggcactaaggaatcatcataggttttagaactcagggaatgggggtgacagttaagatctttgttgtaactctggctgctgtgtggaagacagtttggaaagactacatgtagraagaatgtgcaaataaaagctttgtattaatttttaatgctgaagataaaaaagattaagaagatcatacatcactggattaatggccatgaatgttactccaaaacttgttaaagcatttatcaggggtcaaagctgtaggtcatcagactaaatttcatccatagatgtgtactgtttgttttacaactttcttttaatattttgatttggctgccaatatttatatgtaagaggattttacatgaaaatccagatttctctttagagtgtgcatttcctttgaaaaatcaaaagattggattacactgggcctgcattctgtcctggcaac

SEQ ID NO: 478653 - DNA, 493 bp, Homo sapiens
ctgttgctgggtagcacccattgcactcctgacagagcagcaacccttgctttccttggttcccactacttcctattatttgacttctagtcagtttcactcatttgtgacaactgactgtccctgaaggcatttgagttttttaccccaattccagacagcaggtctaaaatttcattcagttttataaacatcctctataaatagtatcttcaacaatgcccaytatatttttattctaacaacaatgggactttaaaatgttgctttcttgaaaatattcaacattttcaacctttttgttaacttaggcatacccattcttcttgaatagcttcatctcaaaaatttagaagaaagaaacaataaaatgaagaaccagcaaatctctattagacctgagccttaagcagttctgttgtttcttctgttggagcctgtgcagtcagcatgtcttaggccaacttgttttcccaagatgatttgtcctaca

SEQ ID NO: 478654 - DNA, 612 bp, Homo sapiens
taaccaaaataaaaattcaggcctatcttcctactatataagctggttaaaaaaaaactaaattaatagggtcatcaatatctattaattctactcaagtgctacaaaagattgcatttactaaattaatgcaaaataatcaaatttcatgtaccacatctcaaagttaaactaaaattrtaaaataaatcattttgaactaacatgcaaaaacctacatttttattaagatttaaataccatcatgtttgtttgaaggtgatggggttcaggaaacattatcataaaatatggcaccttggcatttgaataaacagtaaaaggaggaaagtcactctggatttcctcaacccttcttctctgaagaaggccgtcaaaccttggaaggattttgtgcccgatatggtttagctgtgtccccacccaaatctcatcttgaattgtaactcccatgattcccttgtgttgtgggaggggcccagtgggagatgaatgaatcatgggggtgatttcccccatactgttctagtggtagtgaataagtctcacaagatctgatggttttataaggggaaacccctttcacccgactctctcattctctcttgtcag

SEQ ID NO: 478655 - DNA, 612 bp, Homo sapiens
taaccaaaataaaaattcaggcctatcttcctactatataagctggttaaaaaaaaactaaattaatagggtcatcaatatctattaattctactcaagtgctacaaaagattgcatttactaaattaatgcaaaataatcaaatttcatgtaccacatctcaaagttaaactaaaattataaaataaatcattttgaactaacatgcaaaaacctacatttttattaagatttaaataccatcatgtttgtttgaaggtgatggggttcaggaaacattatcataaaatatggcaccttggcatttgaataaacagtaaaaggaggaaagtcactctggatttcctcaacccttcttctctgaagaaggccgtcaaaccttggaaggattttgtgcccgatatggtttagctgtgtccccacccaaatctcatcttgaattgtaactcccatgattcccttgtgttgtgggagggrcccagtgggagatgaatgaatcatgggggtgatttcccccatactgttctagtggtagtgaataagtctcacaagatctgatggttttataaggggaaacccctttcacccgactctctcattctctcttgtcag

SEQ ID NO: 478656 - DNA, 603 bp, Homo sapiens
cttgtgcctgtagggtaaaaggaagagcttaaatgaagcactggttcaggacttcaagaactacagacaatcacacacaaaaaaactttagataacaggagaaagaaatctgcagatggttgcctgtctgagagcttttattgacaaaaatggcctggtctactacaaaagaataattttgattgattctctcccacttatgaacatagtccatttatttcagtagcaaagataatgccaakattgcccataccttttaattctattttgatttcaaaataataggaatttatgaagagtccataaactccctctgcctccaggattagggaacaaaaagagaaatatagcaagtataaattaaagataaaaatatctttgaatgaaatgttaagaaaaacttttccttcatagaaattaaaggcagactgagaagcatcattgtaaaaatctgctagtccaagcttctcactatgtatatgacagagctggacctagaattgggggcggctttgtcttcccaatccactgtaatgatctcttgctttgccagattccaatctcatgtagttctctttactccaccccctacttatcccctcc

SEQ ID NO: 478657 - DNA, 603 bp, Homo sapiens
cttgtgcctgtagggtaaaaggaagagcttaaatgaagcactggttcaggacttcaagaactacagacaatcacacacaaaaaaactttagataacaggagaaagaaatctgcagatggttgcctgtctgagagcttttattgacaaaaatggcctggtctactacaaaagaataattttgattgattctctcccacttatgaacatagtccatttatttcagtagcaaagataatgccaagattgcccataccttttaattctattttgatttcaaaataataggaatttatgaagagtccataaactccctctgcctccaggattagggaacaaaaagagaaatatagcaagtataaattaaagataaaaatatctttgaatgaaatgttaagaaaaacttttccttcatagaaattaaaggcagactgagaagcatcattgtaaaaatstgctagtccaagcttctcactatgtatatgacagagctggacctagaattgggggcggctttgtcttcccaatccactgtaatgatctcttgctttgccagattccaatctcatgtagttctctttactccaccccctacttatcccctcc

SEQ ID NO: 478658 - DNA, 586 bp, Homo sapiens
gggatttcatgtttctccagcacttcttccccaagattgaagcactcatcaccacagcttcaggagtgatggtagctgatagattttagctaagtctttttctggtacttggactgggctaaagagctgtctcactcaaagttataattggcagatgcagggggataaagcttttgtcccatttctccaatttaggatgacttcaaagagcgatatcagccatataagcctcatatcaacctcatgtaatcaactgaggtctttgtttcaacttcatcacagtccagttaacactcttccccgtcctgcttcctttacctccctaaacacattgatctcaagagcactccctaatgaactttctacttgcaaatctctgagtaagaccctgcttcctaagaaacctggaatcagaaatagttaaagaaaggcctgaaaagaggaatttcgagctgtgccaaccaccagctcaccagcaatcagagccctaccactrgtgatagtccataatgaagcataaggaaatattaaaatttttcattatgaatagcccatagcagattgccatgctgcaactttacagctt

SEQ ID NO: 478659 - DNA, 602 bp, Homo sapiens
aaatatgcaatattaaatgtatcaaggaattagatatttattattcccaactgtaatagtgggaaatgcaatagcttggcagtcagataacctaaattttatgcctaaatctaaatttggaattctctggtttcaacttgctgrtctttaaagcaaaaagcttggacaccataatttctctctctctctctctctttttttttttttttgacaaaatctcgctctgtcacccaggctggtgtgcagtggtacaacctctgcctcccgggttaaagagattttcctgtgtcaaccttctgagaagcgcccaccatcatgcccggttaatttttgtatttttattacagacaaaatttcaccgtgttgtccaggctggtctcgaactcctgaactcacatgattcacctgtcttggcctcccaaagtgctggattacaggcgtgagccaccgctcccagccaacaccataatttcttaggtcttttccataagtaatagggaaaaataacctcaaactgtggctgatttattattccatattgattcaaaccttgagaagcattttttgccagagatgctgatttggcaaaggtaaaaaaaaat

SEQ ID NO: 478660 - DNA, 602 bp, Homo sapiens
aaatatgcaatattaaatgtatcaaggaattagatatttattattcccaactgtaatagtgggaaatgcaatagcttggcagtcagataacctaaattttatgcctaaatctaaatttggaattctctggtttcaacttgctgatctttaaagcaaaaagcttggacaccataatttctctctctctctctctctttttttttttttttgacaaaatctcgctctgtcacccaggctggtgtgcagtggtacaacctctgcctcccggsttaaagagattttcctgtgtcaaccttctgagaagcgcccaccatcatgcccggttaatttttgtatttttattacagacaaaatttcaccgtgttgtccaggctggtctcgaactcctgaactcacatgattcacctgtcttggcctcccaaagtgctggattacaggcgtgagccaccgctcccagccaacaccataatttcttaggtcttttccataagtaatagggaaaaataacctcaaactgtggctgatttattattccatattgattcaaaccttgagaagcattttttgccagagatgctgatttggcaaaggtaaaaaaaaat

SEQ ID NO: 478661 - DNA, 602 bp, Homo sapiens
aaatatgcaatattaaatgtatcaaggaattagatatttattattcccaactgtaatagtgggaaatgcaatagcttggcagtcagataacctaaattttatgcctaaatctaaatttggaattctctggtttcaacttgctgatctttaaagcaaaaagcttggacaccataatttctctctctctctctctctttttttttttttttgacaaaatctcgctctgtcacccaggctggtgtgcagtggtacaacctctgcctcccgggttaaagagattttcctgtgtcaaccttctgagaagcgcccaccatcatgcccggttaatttttgtatttttattacagacaaaatttcaccgtgttgtccaggctggtctcgaactcctgaactcacatgatycacctgtcttggcctcccaaagtgctggattacaggcgtgagccaccgctcccagccaacaccataatttcttaggtcttttccataagtaatagggaaaaataacctcaaactgtggctgatttattattccatattgattcaaaccttgagaagcattttttgccagagatgctgatttggcaaaggtaaaaaaaaat

SEQ ID NO: 478662 - DNA, 602 bp, Homo sapiens
aaatatgcaatattaaatgtatcaaggaattagatatttattattcccaactgtaatagtgggaaatgcaatagcttggcagtcagataacctaaattttatgcctaaatctaaatttggaattctctggtttcaacttgctgatctttaaagcaaaaagcttggacaccataatttctctctctctctctctctttttttttttttttgacaaaatctcgctctgtcacccaggctggtgtgcagtggtacaacctctgcctcccgggttaaagagattttcctgtgtcaaccttctgagaagcgcccaccatcatgcccggttaatttttgtatttttattacagacaaaatttcaccgtgttgtccaggctggtctcgaactcctgaactcacatgattcacctgtcttggcctcccaaagtgctggattacaggcgtgagccaccgctcccagccaacaccataatttcttaggtctttkccataagtaatagggaaaaataacctcaaactgtggctgatttattattccatattgattcaaaccttgagaagcattttttgccagagatgctgatttggcaaaggtaaaaaaaaat

SEQ ID NO: 478663 - DNA, 579 bp, Homo sapiens
tagattaaggaaatgcttagaggactactaggaagcttaaggactttgtgcctcagtcagatcaacgggagccagaaatagaggagggattatctcaaaaagatttgtgggtatggctgttgtccaatggagtgaaaccaagtacaattcgtgcaagatcacaggttcttgggaaatccatatcagcaaaaatactgccagtttgtactgcaagagccagagagcggcaacaagcaggctgataaaacttctttgctagaaacatgtactaccttttacaataagaaagaatggttctaagggtagaagaaattgcccagagggtggagctgagagcccagagggccatagaaaattactcccagatcttgaaatataatttttaaaaatcygctgttttctcaacttgatttcaggaatattttgaccagttattcgtttgtgcttcccatttctctttttgaaccagaatgtcttaaaagtgttatcttatgcctgccccactattgaatattgggactttggggagcagataatttgtctcttagtttcacaagtgcaaaattggagggaaatttt

SEQ ID NO: 478664 - DNA, 573 bp, Homo sapiens
gctcttatttacccccagcagagaaacaaaactcagaaaaattttagcccaaaatatatgcaaaagaactctgacttgaagacatgtayatttcacagcaactccaagcccaaataactaaatccaagaggcaacagagagtcatcaggatatttggcagaattatttaggaagaactggatgcagagcaggtacacttactcccccttctccctctctgtctcccatgtggacaaagggcagcagcaaccacctcacaggtaaaacactaagtgaggaaactggaactggatgagccagaaattattccaggtgactgatttctggaaaaactgaagagctctcaaagtcaagcaagctaaagaaatatccacatgcccttttgaacgaattatttgagggtgtattctagtaaattaaacaatgattgtaagaaaggggatatatatgtgggataaaagaagtagtggtgagtaatactagcaaaacttacagttaagtctaattgttgatatataatgtgaaaagacccagtggcttaaaataacaatctggaatttaaattgtaaatta

SEQ ID NO: 478665 - DNA, 573 bp, Homo sapiens
gctcttatttacccccagcagagaaacaaaactcagaaaaattttagcccaaaatatatgcaaaagaactctgacttgaagacatgtatatttcacagcaactccaagcccaaataactaaatccaagaggcaacagagagtcatcaggatatttggcagaattatttaggaagaactggatgcagagcagrtacacttactcccccttctccctctctgtctcccatgtggacaaagggcagcagcaaccacctcacaggtaaaacactaagtgaggaaactggaactggatgagccagaaattattccaggtgactgatttctggaaaaactgaagagctctcaaagtcaagcaagctaaagaaatatccacatgcccttttgaacgaattatttgagggtgtattctagtaaattaaacaatgattgtaagaaaggggatatatatgtgggataaaagaagtagtggtgagtaatactagcaaaacttacagttaagtctaattgttgatatataatgtgaaaagacccagtggcttaaaataacaatctggaatttaaattgtaaatta

SEQ ID NO: 478666 - DNA, 408 bp, Homo sapiens
tgtgattgcaccactatactccagtctaggaataagagaccctaagaaaaagtattcttactttcctctttttaaaagacatctttgaatcattgcaaaaagtacaatttttaagaggcttttacatgaactttccatctttttccattattcactatggccctttcttagaaaagattggcctttcagattcaatgtgcatttggatttacgcattttgaaaatgtgtgcccctagaacagataactacatgcccccctttccaggagtataaattttcctgaaagtttaggaaaatatgttaatatgtaattatccagatatattatttaaggaaattacattaatgttaaagtcagacttyaaatacatgttacattgattaatattactttgagctacagcctc

SEQ ID NO: 478667 - DNA, 626 bp, Homo sapiens
ttatatactttatttttcttttgttgactttttctcttatgaatattggaaacctatacacattaaaaatgaactttttgtaatatgtactgtaaatatttcccagtttattttttatttgcttttatggcacttaatttacagtttaatattatttgtatacaaatgtatatatttttcttgttttccaattacacatatgttccacaatgatccaacataatctgtatttttccacttatctytctgacataagcaagtttcttctgtcaatcttcatttcttaatatgtaaaagggagtgaaaaatgtatttactccactgaataccaatgagaattacttagacaaaaccaagcttaatttaaaaatcaaaaataattattaaatcactataatcctgctagttgggtaaaatattgaaaaatcgatttatttgtttatgttaaacattttaattgtttatgttaattattttaggttgattataataatttttctaatttttaaatatttagtttgaaaaatctaaagaaaatatgcttcagagcataaaattagtgtctaatgaaagcatctttgtgaacacaatgctggattattttattggttaattttaaattatgt

SEQ ID NO: 478668 - DNA, 626 bp, Homo sapiens
ttatatactttatttttcttttgttgactttttctcttatgaatattggaaacctatacacattaaaaatgaactttttgtaatatgtactgtaaatatttcccagtttattttttatttgcttttatggcacttaatttacagtttaatattatttgtatacaaatgtatatatttttcttgttttccaattacacatatgttccacaatgatccaacataatctgtatttttccacttatctctctgacataagcaagtttcttctgtcaatcttcatttcttaatatgtaaaagggagtgaaaaatgtatttactccactgaataccaatgagaattacttagacaaaaccaagcttaatttaaaaatcaaaaataattattaaatcactataatcctgctagttgggtaaaatattgaaaaatcgatttatttgtttatgttaaacattttaattgtttatgttaattattttaggttgattataataatttttctaatttttaaatatttagtttgaaaaatctaaasaaaatatgcttcagagcataaaattagtgtctaatgaaagcatctttgtgaacacaatgctggattattttattggttaattttaaattatgt

SEQ ID NO: 478669 - DNA, 522 bp, Homo sapiens
aaattatttggttaaatattttgtttaccaacttktagctctttgattctcatatataagaattagcttaaattgtttgttttacataatgctttaggtgaatcccattagtttggacagttttattaacttttaaattaactctcaactaattgtattttagttatgtaatttttgttttgtaccctttcaattttctatcaacttttgtttcatttgaacttgaaaattattttttaaatttattgtgtaaatgtttgtgtatatgtgtgtgtgtatatcaagcttatttatatctttaaaattttttttatttttatcaaactatcagtttcatcaatcagttgttccgagatatttttaaattttcacaaatgcacatggatttatcaatttctccaatttcctgcagttttatcttatgtaatttggggttatttttataagcatattaagttgttataccttctcactacattaaactctttatcaatgggtaggtactctccatatccctcaaaa

SEQ ID NO: 478670 - DNA, 593 bp, Homo sapiens
gtctcccctaatcacatttccccaaggctgaaaatattttaaagtttcaacagcttacattttgaattacttatttccatacagcatttgctccatcaatagcrgcatacaaggtaacaggagatgtgttaatttgctcaagtaatgaaagcacatctgcaaaagcaactgcaatttgaacatttacaataatccactgtccccttctccaagatccatttgttttctgagtatgccaaatacatgacttgaataaggctctatggaaatcaccatgcctgcatctttcaagtctgtgatggtggcactaatctttgcaatacctccaaaaatgcattattgctttcagtttattatatgttggggtagaggcaattatattggcttatacttaaacttttctaccataatagctctcaatatacaggtcagggaaccaatgtgtggactgtgccagttgctgagtatgtctattccaattttacattctagaactggaaaaataacatcaaatgggttcgtggatacattggtccactgtgagatagatctaagcaaaaattccacaatcgccataatttctcaactctggt

SEQ ID NO: 478671 - DNA, 467 bp, Homo sapiens
gactcagatttatttgacacacattaaatatttcaaaagattccccaaattagtgtacttccaacagattatattgccaaccatgattgctctttgcaccacaagctgatcaagaatcctggaagtaatcattgtgtaatcttgaaaacttgcctactaaaagttttgaaggaaggtataaaaagaaagactattaatgatcacctttgtawgaaatttccttaatttcattgaaatatacacatttaaagggctctgtcagaaattaaagaactttctaaaacaaatactatacctaaaaacatatatttagccttactgaattttctgtgaaagtccccagaaatgctttgctctgtcccatttctttttattttaacttttattttaggttcggggtacatgtgaagttttgatatgtaggtaaatttgtgtcactggagtttgttgtacagattattttgttg

SEQ ID NO: 478672 - DNA, 467 bp, Homo sapiens
gactcagatttatttgacacacattaaatatttcaaaagattccccaaattagtgtacttccaacagattatattgccaaccatgattgctctttgcaccacaagctgatcaagaatcctggaagtaatcattgtgtaatcttgaaaacttgcctactaaaagttttgaaggaaggtataaaaagaaagactattaatgatcacctttgtatgaaatttccttaatttcattgaaatatacacawttaaagggctctgtcagaaattaaagaactttctaaaacaaatactatacctaaaaacatatatttagccttactgaattttctgtgaaagtccccagaaatgctttgctctgtcccatttctttttattttaacttttattttaggttcggggtacatgtgaagttttgatatgtaggtaaatttgtgtcactggagtttgttgtacagattattttgttg

SEQ ID NO: 478673 - DNA, 568 bp, Homo sapiens
ttaatcaattaaatggcttacaaagctctcaggcccatttgtctctcccacctcctctttttgcatttcatatttcaacagttccaaactatttgtaatttctggtctagtcctgtcttttcatcttgagctctttgcacacagtattcctccagcttggaatattctctctcattttttcccctagccttcacaaacacccagccaccaggctgatttaggttctctagatcttttgtctccagtgaatattgtacttattcctattaaagcaattatctttacatttattatctctgtcattatcatcatcctcatccttatcatyatcatcattctatgtctgatgtcccagttcctgaaggcaggaagcatggcttttcattactgtgtctctagcacccagcagttgcctagtatatgttgacaagcttttaactgtgcacctggaaacattagaaattaatttgtgatacattataattgggatgattagataaccatatactaacttagttgaggaagaacaggaaaagaagagttaaaactccaatattataattaaaag

SEQ ID NO: 478674 - DNA, 556 bp, Homo sapiens
ggcttacaaagctctcaggcccatttgtctctcccacctcctctttttgcatttcatatttcaacagttccaaactatttgtaatttctggtctagtcctgtcttttcatcttgagctctttgcacacagtattcctccagcttggaatattctctctcattttttcccctagccttcacaaacacccagccaccaggctgatttaggttctctagatcttttgtctccagtgaatattgtacttattcctattaaagcaattatctttacatttattatctctgtcattatcatcatcctcatccttatcattatcatcattctatgtctgatgtcccagttcctgaaggcaggaagcatggcttttcattactgtgtctctagcacccagcagttgcctagtatatgttgacaagcttttaactgtgcacctggaaacattagaaattaatttgtgatacattataattgggatgattagataaccatatactaacttagttgaggaagarcaggaaaagaagagttaaaactccaatattataattaaaagca

SEQ ID NO: 478675 - DNA, 504 bp, Homo sapiens
ccctttcttataactcgttagtccctcctgctgcttggagttcaggccctgccagagggccctgagctggaggttctgctggaagcattacagtcagctaggctgacagtggctgggagacttggcagactttctccttcacatttggctggggggaggacggagagctaagaaaccactggagaaaggagggaggctggaggaaggcaagaaggcaggggccaacctggagaggaagtggtatgaagaggaggtagtggggagacaaagagaatgattttttttgaaagmcaaaaaaaaaaaaaaaaaaagaattagaaatatggttaaatcagccaggaagtggcccagtgaccaagatctcctgaacctggcttcagagaaaaacattaaagcttcacatatttggcattcaagtcactaaaggttgctttctgctttttctttctcattaaagcatttggaagaacccaccagaaagcccaaatgtattaaaaattcctg

SEQ ID NO: 478676 - DNA, 569 bp, Homo sapiens
ttaagtaaagcagattacctttcataaagtggtgggtctcattcaatgagttaaatgccttaagataaaagactgaggtttcctgagggcaaagtatttgtgcctcaagactgcaacttagaagcactgtgtaaattcccatcttccatcctcccctgcatagtatgaattcaagactgcaacatcaactcttatctgaattttcagcccaacagactacagatttcagatttgtctggcccctaaggttctgtttttctggagaaccctgaytaatacatctagtcaattatttcactggaatgaagtgctgggtttctgatttctaacagcaacagtggaagcgaggaaatgatggaatggaattttgaaaagacacagtgacacatatcaataccaacttaatatttcatttgtttgtttattattattattagagacaggatcttgctctgttgcccaggctggaattcagtggcacgaccataactcaatgcagctttgaacttctgggcccaagctatcctcccacctcagcctcccaagtagctgagactacaaatgcatgc

SEQ ID NO: 478677 - DNA, 484 bp, Homo sapiens
  misc_feature (1)...(484): n = A,T,C or G
cgtgcgtgtgcatacagatgtaacacacttatgtgttcccctgccatgacttgcacgcttttacngcatgccggcagagtctctttctctccttgttgactttcagatgcattcttcatctcctgatagccagtttttttgttgtttttttgtttgtttgtttgtttgtgtttgagacagagtctcactctgtcacccasgctggagtacaatggcgcaatctcagctcactgcaacatctacctcccaggttcaaacaattctcctgcctcagcctcctgagtagctgggattacaggtgcgcgccaccacgcccggctaattttttttgtattttactggagacagggtttcgctgtgttgcccaggctggtctcaaactcctgatctcaggcagtctgcctgccttcgcctcccaaagtactgggattacaggcgtgagccacagtgcctggcccagcacagctgaatttaactgcactca

SEQ ID NO: 478678 - DNA, 521 bp, Homo sapiens
ggggcagggcttcaaccacggggccacatgcctgcctttctgtgatgggactgtgacagaygggagagatcagaggcgttcaagccaaagggaggcaggtcccagttatgtcacttcctagctgtgtgacctcaggcagagcacttgacctctctgggcctctccctcatctgtcaggggaggatgacagcacaggatggttgtgaggatcaagtgagataaagtatatagacttgcataaacgacgacgaggcaccggacaaaggcaggttgctattactatggcttctggggcccaggtggaaagggcagaggaccagaggccagacttctgggagaagagctagaaagctcagtccctgtagataaccccacacaccacaggctccataaccccaagacccaaaaagcccccagggctgtggcctccctgctggagccacctctgacagtgagcacacaatgagctcccttcttcagagcagccagagtaggctttcatcaaaaggcaaaacagaaac

SEQ ID NO: 478679 - DNA, 467 bp, Homo sapiens
cacaaatgaggctctccctactggaatgcagaaggaaggacaagagatgagcctttactgagatgctgctatctgctgggcactttacacacacacagttatgccatttagtccacactgtaactggggagggagttgttgcttcctgtgcttctcatatgagaaaactgaggctgagagaggctcaagggctcccataactgaagacccgtgccttcgctsctgccactcaacctctgggtgggggatggggtgctcagtccacgtggaaggaagagagaaatagaatgtcacagagctctctttcaataaagggctcagcaaaatgtttgtcttagccgcgtttcctatcgacccggtgtgtggcacatggattaagtatgcagtttggtggtctttaaaggatgaacattttctctaggatcaataagctgagtgagtttgggtctgaattcatcaaaatgtca

SEQ ID NO: 478680 - DNA, 657 bp, Homo sapiens
ccacattggtatgaaatttgaattgtacagtccttctgttagaaaagaggaggaagatagaattaggaggcatatgaaagaatggtataaataagtgcttgctcattccacaaataattgatttccttctctccrtttagtcagaataattggtgtttggcatcagcattgtcaaataactgatctgtaatctgtaactgtgataagaatttgtttccaaaatttctgaaagataagagaaaaatatcacagaaaccaatatttggtcttactggattcctgtttttagaggtggattgacatagggtgagagacacaatttggaggaaagagccccaaattcaaatgtttatttctgccatttattggctctgtgacctcatgcaaattatttagcatttctatgtctcctttatttttaaattgagatggtgcgtataaggtttcagaattaaatgtgataaaacatataaaaacacacagtagagtggttggctaattgaacgtaatcagtaaaatattctagattctatatgtgacacagcatggctaggctcttaaaatataaatacttttatgaactttcaataaaactattgcagtgaaagcagccctatacttgacagccattctcctagagccagaaaaatgtaaaat

SEQ ID NO: 478681 - DNA, 500 bp, Homo sapiens
aaaaataaatctaaaataaacttgtatattcaaatggaacatattctttaataatgtcatttttaagggctctgcatttattccataaatgctgccattattgttcagtttttcttaattacctgcattcactttagaaaacagaaaaaaaaaaaaaaaaaaaaaaacmggaaccggtggcaaaaaaaagcacccaaaaaaaacatacttttaaaatggaaaaaaacctgggtctaaattctaaattgggcattaacttagaaatcggaacgggagcaagttgcacaaataaccaaaaaataattttttttttttgtaaaagggcaaaagtagtatacccaccttttaaaaggatgagtgtaaataaaggaattgtgcaattaattcccaggcaagtcacacacaagcaccaccttatgagggaattcatattagaaatcagtgtcactaaaaatacttttctctaataaagcacacattactatacattttggatcttt

SEQ ID NO: 478682 - DNA, 588 bp, Homo sapiens
gggagaccaggaagaagctgaggttactgcakcatcagtcatgggctaagtagtaggcacctggaagaaaaatgttagaaactagaatgctcctggggttttctgtaacacagaggttacttggacaagatcaaatggtgaacatgctgtgtgtgtgtgcacgaacatgtgattgatgacccccatccttccctctggtagcccgtgcctgccccagtgggtccagggaagagcagagcaaagcccttcctgcctgctcatcagagctgccccaggcttgaacactggggtgagtgaatgcaggacaacaagtgtgcttactgccagggaagagaagctgagccttcggactggacttggatctgaccccccaactccaccttgaactagctgggagaacttgggcgagactctgcccctctctgagccttgggtccttcttctattaaatgaggaaattgaatctacttcatggaattgttgagaaggacccagcccatggtagatctctaaatatgggtagtttcccaccccttccgccccttcattcttccccaccctcacccattctgacgatgctggcagcca

SEQ ID NO: 478683 - DNA, 622 bp, Homo sapiens
gctggttctggaaatggcttcccttggcccacatgaacttgtcaggatctcaccagcctgtgacttcacctacatgctgctccttctgcctggatgctgttgtccactcctactctcctaaggcacctcagatgtcctctcacggaaagattcttacacacacgcacacacacacgcacacacgcgcgcgcacgtaacccttcctccaggctcccaaatcacctgtccacaaaaactgccttcagtagccacttaacctgcatgcttaaggcattcaatcctcacagaactgtgagttagggattatcagttctccttgagggaggaaggttcagagaagttaggtgacacatcttcagtccctctccggggcctccactggctggggcagtgacgccggtaacggggagcactttaatgctggtcattatcgctgagaacgccttcctccccaggaactagggtcctggagggacgggagggcttgctgtctgactgctgtgaaaaagcaggttcggkcaacgcagtctgcagcaaacacctcggcaagtgactttcccctgtctgggcctcagtttccctttctataaaatgggggtgaacaggactgggctcgggactc

SEQ ID NO: 478684 - DNA, 611 bp, Homo sapiens
tgcacaacccctcctatgccccagttcagcaggaagcagttagagcagtcatcggccaacctccccaatagcacttgggttttcctgttgagagtggggactgagaggactagctggatttcctaggccgactaagaatccctaagcctagctgggaaggtaactacatccatctttaaacatggggcttgcaacttagctcacacccaaccaatcagagagctcactaaaatgctaattaggcaaaaacaggaggtaaagaaatagccaatcatctattgcctgagagcacagygggagggacaaggatcaggatataaatccaggcattccagccagcaatggcaaccccctttgggtcgcctccttgtatgggagctctgttttcactctatttcactctattaaatcttgcacctgcaaaaaaaaaaaaaaaaaaaaattctagaactcaaaatgtagtcacagcactcaatgccacatatatgcatatgaaggcataaggcaatcatgcagatatatgaaatacttgtacactgtattgtatgtagaatgattataaatttatttttaattatgtaaatacaagttttagaatgaatcatcttcct

SEQ ID NO: 478685 - DNA, 557 bp, Homo sapiens
tgggcatttaaaattggagtcctctctaaccatcattcccatataatcactctttctaaaacccttaatggggtgtttgactcaaacttccctataatcaccagaaagaagtatgatttgcccaaagttaatcattaacagccatctcattttttaaaattgttatctttacaaaaactattcaacagttaactttttaatgggtctccagcccctaactaggtgcatggcttgtacaaagaactcatttaactccctgggtttgttgtaaaaaaatgatagggcagttttagcctcaaaaagtcattttaatagtaatttaaaatggyatattttcttattaaattctaatgatataatttattaaattcttattaaattataaaattgtataaattcttattaaatttctctattttattctaaatggatggaactgtttttcccagtcctatctttacagggtaaagaaaagattctccctctgagtaataagccatcaattaaatcagagtaggcaccaggtggaatgagggagcagggcccaccagaagtca

SEQ ID NO: 478686 - DNA, 603 bp, Homo sapiens
agagagttagaggcagaaaagaagcaaagatcagggaatagaaaagggcatcaaataagagataatcaaacattttggaagataggggcatatatggtagctaatttcacagaatgaaaaaacaaaaatcttgattacttgcttaggggaagctgacaaggagtaagccagtgtacacttttgaactctggaagttgtcaggaattagaggcaccattcctttagaaggcgagttggaaaatgaaaaatcaaaatgaggcacagtcaatgagaggcattccttgcacagagctcctaatcagatttttagtgtctcattccgaaatgtgaatggacacccagtggacacttgatgaattcttccagaacaagcaaataatggaggaggagctgggaaagaaacctggaaggaactaacacttaaaacaaccttggaagaaacgtaaaatttaaaaaaaattttcatcctcattagtagagagaaaatttcggatttcttgaaacaagatgctataaaagagaaacaacttttcaaaagagcttttggaaattaaaaatataatggcagaagtkttttaatcactagaaggaatgaagttcctc

SEQ ID NO: 478687 - DNA, 467 bp, Homo sapiens
cctctccgcaccaggcatgagacggcaggggctgggcccagcttctgaggtcccacatagaaccctctagacattgtccctacccctgttctcagtcatttgttggggtgggtgggggggtgactgttacctggttggtgtcatggacaaagaggatagattggacagactgtcctcaagcagtcccctcacatgcccacctctccccagccacacacacaaacaaatcaaggactggacacaacgaacagaactgggaaccccaaggcttacagacagccaggagccatgtaggaggaggcactgttcaccttccccctgacaaatgtacatcccactcagggaagctcaacaattgtaaacacttcccttcttcgaacaccttgtgtgctctggggattgtgcttattgtatgaaagccaggcattaacttgcttscctcacataaagtgacttgtaccttagag

SEQ ID NO: 478688 - DNA, 626 bp, Homo sapiens
ctgtgaaatgcaggggagcagttaagaatattaacaggtccccagttgaaatgctttaatggcagtggtacatggcctgttcctaccccacccaacacacgtcacaaccccaacccctacccccaaagcctattctcaatatggcacccagacttagcctgttaagatgagtccaatcctacctactccaccttcagggtgagagcaccccctctgaggcctgtatgaggggcttctcccctccctcgtaggtctgctgcacccactggcctccctggaacccaggccactcctgcctcaaggcctttacaccagcaatcccctgggtctggagcttcctccccctggaagtccccacagttcaccctcacatctttaatgtttttgctcaaatgtccctgggggagcctgctccaaccacscctaatgctgcaacctcccacacctggctctcctgctccctctcacgtgtgtcctttcttcccccaaaatatcccatttatcatgttctaacacgcaacatgatttgtttattgtgtttggtgtctgtctcttgtcactatcatgtaagctccacagggacaaaattttttatctcttttgtttgttggtatatccctaccgtc

SEQ ID NO: 478689 - DNA, 622 bp, Homo sapiens
ggaaagatacacagagatagaatgtgcatagcagatgtagcatatcactgaaggagaaagagacagatattcagggagagatgtttggaagagaaagtccacagagccaaagagaaggacagttgccttcatagagtagcattctatgaaggtgtatgaagatataagtgtataccttcatgtgccttaataggcatagagtgggrcaaggacataaagcacaggaccagggatgcaagagggaaatgagggaggcaggagcagtcccagaaaaagaaaccaagacaaggagaagtaccaagagagtccagcggcaagagacagaggtagaaacagaagaagcagagacatgtgtcaagcatgaaaatgagagtgccaacatggggtgggagaccaggtgggcaaggtttctgacagtctctatcagattactgggttgcacaagagctccttttaccctcacaaactcttaaacatctgtatgcaaacagctaaacgtctattttagactgagaaataaagcacagaaatgcaagcaggatattatcgcaaaggcaaagtagaaaaggaagagtgggcaccagtgtcctggatgtgtcactgggtgatggttgtgcaaggc

SEQ ID NO: 478690 - DNA, 622 bp, Homo sapiens
ggaaagatacacagagatagaatgtgcatagcagatgtagcatatcactgaaggagaaagagacagatattcagggagagatgtttggaagagaaagtccacagagccaaagagaaggacagttgccttcatagagtagcattctatgaaggtgtatgaagatataagtgtataccttcatgtgccttaataggcatagagtggggcaaggacataaagcacaggaccagggatgcaagagggaaatgagggaggcaggagcagtcccagaaaaagaaaccaagacaaggagaagtaccaagagagtccagcggcaagagacagaggtagaaacagaagaagcagagacatgtgtcaagcatgaaaatgagagtgccaacatggggtgggagaccaggtgggcaaggtttctgacagtctctatcagattactgggttgcacaagagctccttttaccctcacaaactcttaaacatctgtatgcaaacagctaaacgtctattttagactgagaaataaagcacagaaatgcaagcaggatattatcgcaaaggcaaagtagaaaaggaagagtgggcmccagtgtcctggatgtgtcactgggtgatggttgtgcaaggc

SEQ ID NO: 478691 - DNA, 548 bp, Homo sapiens
ggtgatagtccccattatttggtcttgctcctcacccccattctgcccagaatcccagtcatcttttgaagcatccctgctggatttttcatttctgctcaaaaagactccctgtacctgcatgggggctcaccacctgccccccacacctgccccattccatttgtcagaaccctcagggccatgggttgggctttgcctagctgtgttccaagacccaaaaccctccatagggcatgcagtggctgtcattgtgtttctgttacaataaaaattttaaagctmttcttttttccccttgaattactgcagatgcaactataataaaggctaagtcccgaaaaccccctccctctggatctgaaatggtttcaggcaactatttattgctgggaccagcagggactggttcctttagtgttctaatatgcttaacacattaatccacatggcacattgtttcatcattgcactcaacgaaccttcattgagcattgaaacatacaatgcataatcctaagcagtgaggttataaggtagtaaaacag

SEQ ID NO: 478692 - DNA, 624 bp, Homo sapiens
atttaaaaacttaaatcataattaccttctccttcacctggtagtagacagagccccttctctggttctccttcattagtgacttggggagtttttagatcaaaggtctctgcagataaacaagaaattgacagaccacagagggtgacttggacacaggcctcagtgtgttcatgccatccaagatgggcaaatgctgagagccacccctgtcttgttccgccttttctccaccttgttgcagctcctctttctccttctctgtaattctcagtgtcctcctcaccgttctgcctccacatarttccctcctagctgagcagcgcttggattgtctgatcttctctccaactggcgtctcttgtctcctgtttctatgtcttttttctttttcagtgataccatatcccttttctattatttctttagctcttattctagatccctctcctattccaaagggcaggctctatttccatgctgtgtttccatgatttcccttccctcccattagcattttttttccttaaagccttacattgatccctggtccactcctccgggaacctgcagaactccttggacttctttctattctgaccctgtgacctggccctgaacccc

SEQ ID NO: 478693 - DNA, 624 bp, Homo sapiens
atttaaaaacttaaatcataattaccttctccttcacctggtagtagacagagccccttctctggttctccttcattagtgacttggggagtttttagatcaaaggtctctgcagataaacaagaaattgacagaccacagagggtgacttggacacaggcctcagtgtgttcatgccatccaagatgggcaaatgctgagagccacccctgtcttgttccgccttttctccaccttgttgcagctcctctttctccttctctgtaattctcagtgtcctcctcaccgttctgcctccacataattccctcctagctgagcagcgcttggattgtctgatcttctctccaactggcktctcttgtctcctgtttctatgtcttttttctttttcagtgataccatatcccttttctattatttctttagctcttattctagatccctctcctattccaaagggcaggctctatttccatgctgtgtttccatgatttcccttccctcccattagcattttttttccttaaagccttacattgatccctggtccactcctccgggaacctgcagaactccttggacttctttctattctgaccctgtgacctggccctgaacccc

SEQ ID NO: 478694 - DNA, 609 bp, Homo sapiens
tgtcagatcagcggcagcgttagattctcataggagtgtgaaccttattgtgaactgcacatgcaagggatccaggttatgcactcccttatgagaatctaatgcctgatgatctgaggtggaaccgtttcatcccaaaaccatctcccctactccccgcagtctgtggataaattgtcttccacaaaactggtccctggtgccaaaaaggtggggaactactgatcttatggactagattggtcatatgtccattccaaaactagttasgaccaacagaggtactattgccttaaaaaaaatcaggccatctgtaggtggatagtgtcagaaatttaaaaaaagaaaaaaatcagggccatctttgaacctggaaatggaattaagttcttaaacatacagcctgtatggagaagggatgatacttgaacaaaattggatttctaataagaaggtgagaaggggacctggaagtggaagttgtataggagtcagcttcctctgaagttacatgtgccatgtagggtgaagggtgttaacagaacaaaatttccattcagttaaggaaagagaattggggaaatagcttctggagtaggcaaccaaaac

SEQ ID NO: 478695 - DNA, 615 bp, Homo sapiens
ttttagtgctctattcaatttggttttctaaagagagaaataaccttgttgtacttttcctgaactagagtgctcttttatgtacaagaagcccaatccctggtgtgagtatacttgtgtgggtctgtagaaagctacactctatctataaattttagcaaatgctgttatttattttgggatttttgtagtcgggactcagcggagacactagaaacaaattataagtttctagaaaccataccttctgcaagatgaacgctgtatagttttcctaaatatgtgattcagtaatcacatttttcatttagattttccacttactgttttaaaacaaagaattgctataccatacagtctacaaaactggtaattttcaatttcctcattaaagattcttcactcttttttagaaaacacgagaaagttttatttcccaactctcccactacccatgtttattttcatagctcttttattcggtcattattcccattctgcagacggggaggcgcacatacgtttttctgcacagtacagaggrgcaagaaagaaggaactctcaacttttcagttccattttgagaaacgatcacattgaactcccgagaagcg

SEQ ID NO: 478696 - DNA, 528 bp, Homo sapiens
cagccagtcctccctcccccacgcctgcctaccytttcaaaacctctgaatcacaagtccacacttggccagtttattaaaggcagggagcttcggcagggtccaaaagggagaagttgggagatgccccctcctcagctccctccttccccaacaactcttctacagcccagcccccagggcccagaggcagggctggcgtcaggcagactgtactgcataaatacgtggaggccacagcccgaatcagcagcgtcagggggcagggaaactgggtttgggatgagaagtgggtggctctgggggcacgtcccccagtgcttgtccagagcccagggacccacagagccagagaggggaccagtgggccagcttggggtctggctacggccagccctgcccagcgaggctggcaggtggctctggttttgggggagaagtggggtggggtgtggccatgccacggcccacggggacagggtggggtcaggtgctgttgccctgctcctgttcaaagagtagcatggc

SEQ ID NO: 478697 - DNA, 555 bp, Homo sapiens
atatatgtagatatagatagatgtagatagagaaagcgtgaagctaggagtgagaagcatcttacagagagagttcagagggagactgtgaattgcttcctctgctggggcttctccagtgtgggggtaaggcaggcactctgctgagagcccctcccctctccaggaggcctagagaccagcagcatggctcgctcaataygaatgtgctggaatgcagcatcacatgctacatcttagatacactgagaaggcatctgcactgtcacagaccccaggggatatggattaacctgaaagggtcagaagcctggtgaaggatctgtacataacaggctcaccaaagacgatcaacgcacaacttgcttctcaatagaactgacctttccccttgttttggtgttaaagagcctactttattcattgggaataaagagatgccacatgtgacaacatcagcaatttttcataccatagtacaactcgatttttattttgtcagtaaatttatttttgctcccttcccctgcaccgaagtcctcaattccgtttata

SEQ ID NO: 478698 - DNA, 555 bp, Homo sapiens
atatatgtagatatagatagatgtagatagagaaagcgtgaagctaggagtgagaagcatcttacagagagagttcagagggagactgtgaattgcttcctctgctggggcttctccagtgtgggggtaaggcaggcactctgctgagagcccctcccctctccaggaggcctagagaccagcagcatggctcgctcaatacgaatgtgctggaatgcagcatcacatgctacatcttagatacmctgagaaggcatctgcactgtcacagaccccaggggatatggattaacctgaaagggtcagaagcctggtgaaggatctgtacataacaggctcaccaaagacgatcaacgcacaacttgcttctcaatagaactgacctttccccttgttttggtgttaaagagcctactttattcattgggaataaagagatgccacatgtgacaacatcagcaatttttcataccatagtacaactcgatttttattttgtcagtaaatttatttttgctcccttcccctgcaccgaagtcctcaattccgtttata

SEQ ID NO: 478699 - DNA, 473 bp, Homo sapiens
ttctcaattcataaaataccagtaagaatggtatctgatctcaaagaaataaatacacaagaaagatgtgaattaccttgtcaaaagagcctgagcaatagcgacatatatagatacagcttagctaaaataaggcttagctaaaagtaccgggaaagagatacaataggaagtgttagtcatgaagtaaacctggcttatggcgcttttatgtgaaattttatgactgtgttagttaggcttttttggcaataagtaacaaactcagctcacacaagttaaagcataactgaaactttattggctcaggtaactgtgagggttgtcggggaagctcacaggaaccaagatagttacagttgccaggtctcaagtgctagaaccaaaattyaacatggccaggactctttctttgatctgcccttattcatgctggactttattttgcagaggaagttagttcctccaataaa

SEQ ID NO: 478700 - DNA, 525 bp, Homo sapiens
atctattcatccagtagacatgatgttgaagttaattccctctcctcacttttttttcaactctaatagttgtaatgatagtttagggccaaataattgaatgttttaaatgctagtttaaagaatgtagacttttttctaaaggtaacacagaagcgttgaaaacaatttagaagagccagaaagggcatgtgatcaagtcatttggaccaagtttttatttaaaatgggacttaagtctgcgtctatgtctaaaacattttctcttcaacatactcatataatttcttctgaacactggctatcttttggattgtatagctatttttggtttctgcttctaattctcacttgcatttctcgagcctcaaaatagatcaactgggggaacaaggctgcaccttgtcagkttaccaacaatctcaggcagaggatgggtaaggagagtgtcaagggatattctgacagaattgccaaattaaaacagctttaaacatatgtatttagccagcacaccttagcaga

SEQ ID NO: 478701 - DNA, 628 bp, Homo sapiens
agaaacatttttacattttccttttgttttaatttccactgctgactctctggtcaaagttctagtcgctttggctccaactctgttttctctccttccagttgatctgcacagcttactacctcctgcctcaaaactattggctttaaacattttatttgatgcttaattgaccacaataattgtacagttttatgggacacccagtgatattttgatgyataaaatatatagtactcagatcaggataattagcatactcgtcatctcaaacatttatcatttatttgtattgggaacattcagtatcttccttctagctatttgaaacaacagattgttgttaactatagtcatcctgcagtgatatagagcaccagaacttaattctcctaactggctgtaattttgtatcctttagcaaatctctccctattcctccccctcaccccttcccagcccctagtttgttaaatgcttttaacacttaaaatgtcaatactgcttcctataatcagttgttcctttgtcagataaagctactagagaaagccacatatcaatagaatctcaaaggctaataggaacatggaactagtactagacagatactacatggttgctggca

SEQ ID NO: 478702 - DNA, 567 bp, Homo sapiens
gtgaaagtattactttacacttaccagacatactaacctcttagtgagatcaacacactgccatccacactatgcttactacacattactttatattactggttaattttcctgaattgctctttaaggccgaaaaaaaaaaaaaaaaaaaacctgtgccatgtatttattagcattccccaatatctagctcaattcatttcacaaatgtgcttattagacactgacttacaccacgcaacacttcagaaaagtagttatcttttctttcttagtaaaaaaaagcagcaagttccaaacaatattattttagaagattaaaagaaactttttaaactgtcatttaagttttaaaaatgtaaaattttaaaagttaaaattttataagttaaaacattataagtttaaaatgaacttataatgagccattttgaacccaaaatgagccactttgtataaaagtagttcttttamagtggaaatattaccattttctttatttccattgtgacactgtttccgctgcatacaaattttgctaaaataattacaaataatgtatttttt

SEQ ID NO: 478703 - DNA, 382 bp, Homo sapiens
atgagaaagacaaattaagcataaagctaaaaaatatcaaatcggtttcagcgctctgamaattggcaaagtataaaacatttaatactgtatactattcataacatgaaagaatatgttttgagtaaggaaggaaattatgtctgtagccttttgcctgggatttctcccttccatctccgctctgtcagcatgaattgcagatctggggttttaatgaggatgtcagcttgcagcttgcagtcgaagggagtggacttgagttgaggtggagagtcaagcaagatccttcagtgtttccagctaaatgtgatgaattctgcaggaaatgaacagagcaagctagttcaaactgagggctctagctggggcaagtggtaca

SEQ ID NO: 478704 - DNA, 580 bp, Homo sapiens
gctggtgcaaccactgtggtcctcagatctgctctggaagagtttccagaataacgggaatgagcctgggctgacagatccakaaaagaggaccttggatttcctctccagcccctgccattatgcccggcagggtctctcacacccctttttctctcttccaaaactacattttcagcatttcacatggatttcagaacctaattcctaatcgttttgtgagcaacatcttttctggatatcccttgtcctcaactttgggactggtttatcaaggagaggtgtcattctgtgttccttataggatctggcctactgatggatgtaataggatctgcttcatcattacccatgaaaagactcaccgtcaagattgactgggactcagcatctaaaatcctataagatgctatgtcaccaaccagccattagatggcagacaaaccccacagtaaacaccagaaataagcctgatcttagaaatactaggaaaatcaacagggatattttagggctaaaatgaggtctcatttatgacctagattacatgggaggagctgccagtgcactgagttgtggg

SEQ ID NO: 478705 - DNA, 580 bp, Homo sapiens
gctggtgcaaccactgtggtcctcagatctgctctggaagagtttccagaataacgggaatgagcctgggctgacagatccataaaagaggaccttggatttcctctccagcccctgccattatgcccggcagggtctctcacacccctttttctctcttccaaaactacattttcagcatttcacatggatttcagaacctaattcctaatcgttttgtgagcaacatcttttctggatatccyttgtcctcaactttgggactggtttatcaaggagaggtgtcattctgtgttccttataggatctggcctactgatggatgtaataggatctgcttcatcattacccatgaaaagactcaccgtcaagattgactgggactcagcatctaaaatcctataagatgctatgtcaccaaccagccattagatggcagacaaaccccacagtaaacaccagaaataagcctgatcttagaaatactaggaaaatcaacagggatattttagggctaaaatgaggtctcatttatgacctagattacatgggaggagctgccagtgcactgagttgtggg

SEQ ID NO: 478706 - DNA, 580 bp, Homo sapiens
gctggtgcaaccactgtggtcctcagatctgctctggaagagtttccagaataacgggaatgagcctgggctgacagatccataaaagaggaccttggatttcctctccagcccctgccattatgcccggcagggtctctcacacccctttttctctcttccaaaactacattttcagcatttcacatggatttcagaacctaattcctaatcgttttgtgagcaacatcttttctggatatcccttgtcctcaactttgggactggtttatcaaggagaggtgtcattctgtgttccttataggatctggcctactgatggatgtaataggatctgyttcatcattacccatgaaaagactcaccgtcaagattgactgggactcagcatctaaaatcctataagatgctatgtcaccaaccagccattagatggcagacaaaccccacagtaaacaccagaaataagcctgatcttagaaatactaggaaaatcaacagggatattttagggctaaaatgaggtctcatttatgacctagattacatgggaggagctgccagtgcactgagttgtggg

SEQ ID NO: 478707 - DNA, 177 bp, Homo sapiens
tgagattgttcctcagatgcagccacactctgatggtgttggtagaaggggacatgaagtcacctctgcaccctaattcttttctctttctcagccccaactacacagacatagcaatgcctctcckaatttaatacagacagagatcatgacacctgaggagtctagtttatggct

SEQ ID NO: 478708 - DNA, 638 bp, Homo sapiens
tgagccctgtctagatcagctaaattattgttaatatgaacatccgtaaacatgaaaataaatactagtattgtaagcctctgcattttgagtggtttgttacaaactattattgttgaaaagctaatacattattaaacatccacatatatagaygcatttaatgaaaattgactgcataaatatgaatacttagaaaatcataaagaaacaaaaacatagaagaaataatacttaaatcagaagaaataaaatacaacttagctcatttatggaaacatctaacaggaatagttagtattgaggatacacatatgtagcaatactcaacagaataatcagaatggaactttacatatacactacagattgttgaaaatcattaggttgacattccaggaataaaacatatgtttatacatatatgtgtgcatatgtgcatttatctttttatatatgatatatacatttgcatatatatttagacattgctttctgcataaacttatataaacagttatgttttaacaaagttgtatgaccacatatgtgtgtatatactcacatacacacaagctacaagcacatatacaaaattatcacagtgccaaggaaatgtattttggcccttctagacc

SEQ ID NO: 478709 - DNA, 638 bp, Homo sapiens
tgagccctgtctagatcagctaaattattgttaatatgaacatccgtaaacatgaaaataaatactagtattgtaagcctctgcattttgagtggtttgttacaaactattattgttgaaaagctaatacattattaaacatccacatatatagacgcatttaatgaaaattgactgcataaatatgaatacttagaaaatcataaagaaacaaaaacatagaagaaataatacttaaatcagaagaaataaaatacaacttagctcatttatggaaacatctaacaggaatagttagtattgaggatacacatatgtagcaatactcaacagaataatcaraatggaactttacatatacactacagattgttgaaaatcattaggttgacattccaggaataaaacatatgtttatacatatatgtgtgcatatgtgcatttatctttttatatatgatatatacatttgcatatatatttagacattgctttctgcataaacttatataaacagttatgttttaacaaagttgtatgaccacatatgtgtgtatatactcacatacacacaagctacaagcacatatacaaaattatcacagtgccaaggaaatgtattttggcccttctagacc

SEQ ID NO: 478710 - DNA, 638 bp, Homo sapiens
tgagccctgtctagatcagctaaattattgttaatatgaacatccgtaaacatgaaaataaatactagtattgtaagcctctgcattttgagtggtttgttacaaactattattgttgaaaagctaatacattattaaacatccacatatatagacgcatttaatgaaaattgactgcataaatatgaatacttagaaaatcataaagaaacaaaaacatagaagaaataatacttaaatcagaagaaataaaatacaacttagctcatttatggaaacatctaacaggaatagttagtattgaggatacacatatgtagcaatactcaacagaataatcagaatggaactttacatatacactacagattgttgaaaatcattaggttgacattccaggaataaaacatatgtttatacatatatgtgtgcatatgtgcatttatctttttatatatgatatatrcatttgcatatatatttagacattgctttctgcataaacttatataaacagttatgttttaacaaagttgtatgaccacatatgtgtgtatatactcacatacacacaagctacaagcacatatacaaaattatcacagtgccaaggaaatgtattttggcccttctagacc

SEQ ID NO: 478711 - DNA, 557 bp, Homo sapiens
ttaggaggctgagacaggagaatcgcttgaacccagggggcagaggttgcaaatgagccaagatcatagcactgaactccagtctgggtgacagagcaagactgtctcaaaaaaaaaaaaaaaaaaaaaagaacaaaattgaaggaataacaccaggcaatatcaaaccctgttacaaataacactaattaataatgtaactacagatccgcacatatgtaatcacccaatttatgataaaagtgttaccacgggccaggcacagtgactcatgcctgtaatcccagcactttgggaggctgaggtgggcagataacgaggtcaggagttcgagaccagtctgaccagcgtggtgaaaccccrtctctactaaaagcacaaaaattagccaggcatggtggcacatgcctgtaatcccagctactcaggaggctgaggcagaagaatcactttaacctgggaggcagagattgcagtgagccaagatcgcaccactgcactctagcctgggtgacagagactccgtctcaaaaaaaaaaaaaaaaaaaaaagaaaaa

SEQ ID NO: 478712 - DNA, 557 bp, Homo sapiens
ttaggaggctgagacaggagaatcgcttgaacccagggggcagaggttgcaaatgagccaagatcatagcactgaactccagtctgggtgacagagcaagactgtctcaaaaaaaaaaaaaaaaaaaaaagaacaaaattgaaggaataacaccaggcaatatcaaaccctgttacaaataacactaattaataatgtaactacagatccgcacatatgtaatcacccaatttatgataaaagtgttaccacgggccaggcacagtgactcatgcctgtaatcccagcactttgggaggctgaggtgggcagataacgaggtcaggagttcgagaccagtctgaccagcgtggtgaaaccccgtctctactaaaagcacaaaaattagccaggcatggtggcacatgcctgtaatcccagctactcaggaggctgaggcagaagaatcacttkaacctgggaggcagagattgcagtgagccaagatcgcaccactgcactctagcctgggtgacagagactccgtctcaaaaaaaaaaaaaaaaaaaaaagaaaaa

SEQ ID NO: 478713 - DNA, 629 bp, Homo sapiens
ccaacttatcacttttagagaggcaatgtgatcattgctgaaccatcaccccacattcctagtgggtggggaaagagacctctcctgcccatctcatgcctgtctaactgcccgtaacaggaagatgctgactgctccagccaggttcctgttagaggttgcatttggagggtttacaaagaaaagctactggcaattagtgcctgattccagggagggtggcaggacattgggtctggattctcaaaatggaggaggccagagtgagaaaggctgtgggtgtgagaagaaagaccttagaactcagacctgtggccacagccttaggaccctgagagtggggaccacttatcaaggaacaaggagcaaagaagaagttgggtaatatttgagggattatcttgcaggtggaagataatggaggtttgcattggggtgragtggtggggtagaagtcgggggagtggtcaggtttgggacacatttggggtctatgattattgtctgcacttcgttcattacaaggcacttggtgcaatgagcagtgcatgcagcgcttataactattctcgattttttcattattatttatttatttttcattatgatttatttttattgagaatttc

SEQ ID NO: 478714 - DNA, 594 bp, Homo sapiens
tatttttatggcataaatcastattttttaaaattaagtttaaataaatgacataagataaattatgaaaattgctcattaggtttgtacataactttgcaattcattatttcaggatccagtggggatattgtgatgactcagcctccactctccctgcccgtcacccctggagagccggcctccatctcctgcaggtctagtcagagcctcctgcatagtaatggatacaactatttggattggtacctgcagaagccagggcagtctccacagctcctgatctatttgggttctaatcgggcctccggggtccctgacaggttcagtggcagtggatcaggcacagattttacactgaaaatcagcagagtggaggctgaggatgttggggtttattactgcatgcaagctctacaaactcctcccacagtggtacaacccctaacagaaacctcctcctggggttgcccagttgctcacatgtgctgcttgtctggagagcagctcagcagggtctctgagtctgcagaagaggaggctgttggagacctcagggcagaggttgctgctgaggactctggctcatgatag

SEQ ID NO: 478715 - DNA, 570 bp, Homo sapiens
atcggttctccaaaatagtcacaaaatagtctttttcatgcggctgtcttcacaaagaactgcagaaacctcagccttctttaaatgattcctttgggttcaaggcaggggaagtttgggagagcggtgatggtatcttgcaaactgatgtctttcttcacattttacatagtgacctgaccattgaagatgccattgatagaacatccacccacgatagcacaatgggtgttcttatttgtctttttcatcttgggggaggggagttcttaatatttcataccaatggcctcattctttttttgtttagtcaacaaacrcttaagttgagtgcttacgatgtgctgagtactgttttatgtaccatgggtatagctattaaaaaaacagatcaagtccctgctcatggtgtttgtaagctagtgagaggaaagagatgttctatgaacaaatcagtacaaattcgatgctgatatgtgctacaacagagagtaaagcaagaaaagggatacagtgcaatggtgggggtgggcgctctttgatatagataaagtgatatttaggtagcgg

SEQ ID NO: 478716 - DNA, 570 bp, Homo sapiens
atcggttctccaaaatagtcacaaaatagtctttttcatgcggctgtcttcacaaagaactgcagaaacctcagccttctttaaatgattcctttgggttcaaggcaggggaagtttgggagagcggtgatggtatcttgcaaactgatgtctttcttcacattttacatagtgacctgaccattgaagatgccattgatagaacatccacccacgatagcacaatgggtgttcttatttgtctttttcatcttgggggaggggagttcttaatatttcataccaatggcctcattctttttttgtttagtcaacaaacacttaagttgagtgcttacgatgtgctgagtactgttttatgtaccatgggtatagctattaaaaaaacagatcaagtscctgctcatggtgtttgtaagctagtgagaggaaagagatgttctatgaacaaatcagtacaaattcgatgctgatatgtgctacaacagagagtaaagcaagaaaagggatacagtgcaatggtgggggtgggcgctctttgatatagataaagtgatatttaggtagcgg

SEQ ID NO: 478717 - DNA, 590 bp, Homo sapiens
accaaatctatgatgaaagagcaaaaagagtatcaaaatcatacagggttttcttctataggaaatccagactgcgagtcattaagccctacacatttaccccaaaaattcagttctgtggcacagaatttggaataattatacaaaattataggtagatttggggcaagaataatctcatcaattttcaatgtcactgccacaacacaaagcaaaagtagagaaaaacttgagaattgcacatactttgtctcgagttttaagttccccatctaatttacataagatgccttaacattctttgtcaagggcaaactcaacaaccaagacagtggaggcacagatggaaacagcaggtcacaggggccatgcatttggccagccagcctgccctgggaatcactgacataggaccaagaagaaaaaaatgcgccttttttcttgtaagtcaacataaaattctgggacatctttcttcatcwactcactgatatgtagagaatgtatctgagaaaagatgggtaatgaagttagagatctgtatggcttcaatcctgaataattcacaggaaatttactttatgggcaag

SEQ ID NO: 478718 - DNA, 614 bp, Homo sapiens
tgcctctggagggagaggagttgtgaaattaatggagtccatgactgataacctctttttaccagagaagtatgagcaaagattatctgctattattaaacatgatgggacaagataatggcatgagtagtaaagagyatttgctgaaaggaacaggagaaaatgcagatcaaagacaatataaatagatgagtatcgctgagggcctcagtgaaactggaaaccctagataagcagtggcccccacctgtatgtctatgtgttctgctccagcatctgtcattgacctgggttgattgtccatctcccatcaccaaaatgtaagctgagagtagaaattttgtccatcttttcaccactacatctgatgattggtgcagagtagataataaatagctgttaaaggaacaaaattcatgggtatacaaatgcaaaaagaaaatcataaagattgcatgagttgtggatgcatagaatggaacaataatttgggtggaaaagaactaagggagcatatgagaaaattatgagaatgacacaagtgaatcagactgcaatgggaatgaagagaagccacaggaaaattgctcaactgagatagagttgtgatatgt

SEQ ID NO: 478719 - DNA, 630 bp, Homo sapiens
gactgtcctcaggtatgtgtaaagtgagaaaatttataattagaattgccagtgtctaactttcttgatttgctgatatacaaggtataagagtttatatttgaaactaatttgacctatacaaaagtagtgcaaaccaaatttttcacctatggctaatacaaatagctttcacaaattagaacagaaaataggccgggcacggtggctcacacctgtcgcctataatcccagcattttgggaggccaaggcaggcagatcaccaggggtcgggagtttgagaccagtctggctaacatggtgaaaccctgtctctaataaatatacaaaattagctgggcgtggtggctcgtgactgtaatctcagctactygggaggccgaggcaggagaatcgcttaaacctgggaggcagaggttgcagtgagccaggatcacgccactgcactccagcctgggggacagagtaagacacagtttccaaaaacaaacaaacaaaaaaaaacaaaaaccacacagaaaaaaaaaaagtttcaagaatcgagtttatttttatttcaattttctccagtaaccctttcctggatgcctttctgaaagttttaaacatgtattagacaaaatgacaaa

SEQ ID NO: 478720 - DNA, 569 bp, Homo sapiens
tgagccaaatatttagtgtcctttgtctttttactttttgccagatgctcttgggtattctttgaacatgtgtagtttgctagttagcaagggatgtgtggagagcccctatacagatctcatttccaggtctcccaagtggaactaacttttggttaacaaaactgggggttttccccaccactttaaaactaatttgacaattttagctgscaaagacacaaatttttattctccacttctgagtattcctctgacatcaaatgtcatagtatccatgaccactcaaaagctggtaaaactaccattcttgtccactaagttccctggcgtaggggtataggaacagctccagacaagaaggccacagactctcactattcatacccaaaactgcaacagtttttcaagaattaatgtttctcaatgtgttgtctgctttgggttgatttccagggcacagaagttgttgtttctgacaaatttatccacttttatacttatttttttgtgaagagaagtcattaactatttccatttaccataactggaagtcctctattcattaa

SEQ ID NO: 478721 - DNA, 569 bp, Homo sapiens
tgagccaaatatttagtgtcctttgtctttttactttttgccagatgctcttgggtattctttgaacatgtgtagtttgctagttagcaagggatgtgtggagagcccctatacagatctcatttccaggtctcccaagtggaactaacttttggttaacaaaactgggggttttccccaccactttaaaactaatttgacaattttagctggcaaagacacaaatttttattctccacttctgagtattcctctgacatcaaatgtcatagtatccatgaccactcaaaagctggtaaaactaccattcttgtccactaagttccctggcgtaggggtataggaacagctccagacaagaaggccacagwctctcactattcatacccaaaactgcaacagtttttcaagaattaatgtttctcaatgtgttgtctgctttgggttgatttccagggcacagaagttgttgtttctgacaaatttatccacttttatacttatttttttgtgaagagaagtcattaactatttccatttaccataactggaagtcctctattcattaa

SEQ ID NO: 478722 - DNA, 493 bp, Homo sapiens
attttggaaataggagtgatggttgcacaacactgtgaatggatccaactgtatacttaaaaatggtcaaaatggcatattttatgttatttatctacttgtttttaccaaacctttttttaaaaagaaaaagaaaacttccatattcattcaacatttgattattcctaagctttttggttccaatttggtaggwagtagtcttgtgtaattaaacttgtaggttctttctgccttttcctttgtttgtttatatttagagagggtttcaaatgggaaaatggccttaaaattagggtagataggtttaaattcaattcaactaacatttgttgagtgattgttaggtgcaagcaattaattagaggttttggagattcaaaaaagattaagtagtaggccctgccttcaaggagctcataaaactctaataaccagtgtcagaattttttaagagtaaaatttggcataaggtccaagacagcagtaactt

SEQ ID NO: 478723 - DNA, 610 bp, Homo sapiens
tttgaaaaacattgctaagtgaaattagaattcacaaattctagggtagaatttacctggtgacagaacaaatgaaagtcattgggaataaattccctgagtgcttatactgtatttgtttccatttacaaagtatcaaaattattttcacaaaaattatttgtgaatacatctttttttttttttttttttttgagacggagtcttgctctgtctcccaggctggactgcagtggcgcaatctcggctcactgcaagctccgcctcccgggttcacgccattctcccgcctcagcctcctgactagctgggactacaggcgcccgccaccaygcccagctattttttttgcatttttagtagagaaggggtttcaccttgttagccaggatgatctccatctcctgacctcgtgatccgcacgcctcggcctcccaaagtgctgggattacaggcgcgagccactgcgcccggcccttgtgaataaatctttaaataaaaattccactgagcttttaattatgtgcataaattatgtcacattttcataaatgtactgttactgaaattgaagtcttacattttgtaggtttataacaaatagcaccat

SEQ ID NO: 478724 - DNA, 575 bp, Homo sapiens
attcacatccacattagggagaacaatctcctttactcagtctactgattcaaatgtacatttcatataaaaacactctcagagacacactcagaatartgactgaccaaatacctgagcaccccatggcccagattaattgatacacaaaattaaccatcacagttagccaattcccttgattattcattttggtaaaatgtcatgtagatttattactgagagacaagaagacaacacaactacatgctttgctgtctgtgcatgaactgaacaacgaccaataaaataaaaaaatcatcaccagatgactttgaaaaagtaatgtgatgggtcactgatcatgccatgcatctgttatttataatgatgtgtggactgaagagctagcagcaaacattttactttatgcaattattcataataaatattctgtggtaaatttaaaggtttctaggggatggatgagatttaactgaagtatgctgactgaaatttttgcatactggaaccatgcaaagtgagaacttactgtaatttgcatacaacaaattgcacatatttaaaatgcataa

SEQ ID NO: 478725 - DNA, 613 bp, Homo sapiens
gctttccctaacatgtctcagcaaaatattatacaacctgattaaacaaaacctcattcccacacagctccaccttccttacttggcaaagcttaaatctggtaacaccctttaaagacggtcacttcggccacatttaaaggaaatagcaattaggactcrcaatgtttttttaaagttaaaatctatttctgattacaaggcaggtaaaacaagaaaaaatattactaaagaaataacacactttaaacttttcttcccactcatcttctatttaaaaaaaaaaaaaaacccaaatcttactaaacaagcaaaaccaaaaaccgaaatagaaacaaagttgaacccgatgggatcattgtgctatttatctccctaatacttcaaagcatagtaataataaattagtaaatactttttgagaaccctctacaggcagaatatgaatatgcttctaggtcatgacagtcaaatgacacatatacaatttaatgtggaaaatagaacataagaaatgctagccaagagaaaatagtcttaatgtgaagtcagggtcaagaaggattattttaccataagcagtagataataattgaatatatttgatgtaaag

SEQ ID NO: 478726 - DNA, 555 bp, Homo sapiens
cacaaatcacccatcctgggtagtctctataagagaggcacttgagccttgagaactgggacattaaaaaaaaaagtataaasaatcctaattaaaacctctgttatttgaaaccctaaactccccctttattaagctagtatataaacccttacccctagctgtttatagagccacctgttatggagtgctccctcatgcatgtgaaaataaacttttctccatttaatctgtcattgtcaattaattttcagcctcccccacacctctcaaccactaccaaccaataaagttggtagaggaaaagtttttttctcccaaaaataggttgggaggctgttggcactaatcctggtgaaaagataatggtggcttggactagagtagcagcaaagggcagtgaagtgtttcaagtactgtagaatcaacaggacttagggttggctatgtttggaaaggaatggggagaaatggaaatgaatcccaggtctcttccaagtgtccttcaaagcctaaatttttgctggctgaatcgccttcaacaggtagaatgtg

SEQ ID NO: 478727 - DNA, 469 bp, Homo sapiens
gtgcaaaaaataacatttaatggatttttttcaaaatttctgggcacaggtcagaactctctctgagaagaggtctgatttcagtgaagtttgggaatagcatcagaaaaaattgatatgttgtttttgttttcaattttccagatgcaataaaaatggtgaagaataggggtgtatgtgaccatcttaatgcagataaagacaagaatcaaggtgccacaaaatacacccctcagcctctctcttatttttccctcatcatagcctccatgtgagttcccaagcaacccacagtgtggcacrttctctgggtctccaagcttacttgtgttttcttcctgtgagtcaagtgtcaaaatattgggaattagccttagaaaccaagcatcagaattaaaaaaggtatattaaagtttccatccctgataatgaacaattagaatatgacactagcagtgagggtacaaga

SEQ ID NO: 478728 - DNA, 564 bp, Homo sapiens
tgtgtgcctactactactgcagagagacgtttaataaggtagctaagctcttttaattgcccaacttratcaggagctgaattttctcactttaaatttctactaaattttaataacgacacattgcatatttctagacacataggaagtacaggaagcatacaacataatatatccacaagtgaaccatccagagtataacttgtgtgaatattttatcatattttcttcagtactcccccacttaaggaataaaatggttcagtacatctaaatgctgaccatgtgttccttacttgcagtatctttcctattacactttctgcagtgcgtgctgatgatcgattctctctttagaacatgcagcttctcctcaacgctgccatgtctcctgtattctctttctgtactttctagctgttacttttcatttgtgtttgtttgttcttccttcctcacttgctccttaacagttgggatcctcacatgttttatcttggctctgatgtcttgttgctttaccataatctagagatgtggtccacctgtcccactttatttctg

SEQ ID NO: 478729 - DNA, 626 bp, Homo sapiens
tgtaatacttaagatgtcatagtagagattagccaagtaaattatgaaacattagacaaaggaatacaagctgccattaaaatccgtgtcatcaaatatcatccagagacagatacaaagaatgatcacaatataatgttgcctaagggggagtctatatcaagagtatcctcccatttatcttaagtatatatgattgtcaggcagacatttctacatcgtcttcaacccagcctgggttgaagccaccttggcttcccgagtagctgggaccacaggctcacaccaccatgcccagctaattttatttatgtatttatttgttgtagagacagggttttgccacgttgcccaggctggtctcaaactcctgggcttaagagatttacccgcctcagcctcccaaagtgttgggattacaggcgtgaaccagcatgcctggccatacgtgtatatattattcttttttcccttytgaatgctgtgagtaaagtattaattaattgtgggcctagatcctgaacagacctaggccgccttctcacaacactgtttccttggaaatgtatcaagttcaatgtggaataatgtatgttgggaactggtcacctactttgtttactgtg

SEQ ID NO: 478730 - DNA, 655 bp, Homo sapiens
gctgtaattttttgtccattagctaacctcccccattctccccacctccctgcctttcccagcctttagtaaccactattctwctctttgcttctatgagctcaactttttattcttccacatataagtgagaacatgtggtatttatctttctgtgcctggcttatttcagttaacacaaaatcctctaggttcattcatgttgctgtaaatgacagaattttattttttatttttatttttcattgtggttatagaccacattttatttatccattaatttgttggtgagcacttaggttgatatcatatcttggccatcatgaatagtgctgcaataaacacaggaatgcagatctctttttttttttttgtagccatgtgttagtcactttaatagaaaatgtggtcaaaacctgactacaagagttcagagaaaaaccagtgagtttcaatttcattacaagtttttaaatctggaactagtctttatgtttttgttttgttttgttttttaacttaaatgctaacttcagctctgggttttttcacaaccaaactaaaaattacttactacgtgggaacatcaatgcaacaaacaaggaaaatttgtaaactcaagccacaaacttacagttaataatcatggtaaggg

SEQ ID NO: 478731 - DNA, 655 bp, Homo sapiens
gctgtaattttttgtccattagctaacctcccccattctccccacctccctgcctttcccagcctttagtaaccactattcttctctttgcttctatgagctcaactttttattcttccacwtataagtgagaacatgtggtatttatctttctgtgcctggcttatttcagttaacacaaaatcctctaggttcattcatgttgctgtaaatgacagaattttattttttatttttatttttcattgtggttatagaccacattttatttatccattaatttgttggtgagcacttaggttgatatcatatcttggccatcatgaatagtgctgcaataaacacaggaatgcagatctctttttttttttttgtagccatgtgttagtcactttaatagaaaatgtggtcaaaacctgactacaagagttcagagaaaaaccagtgagtttcaatttcattacaagtttttaaatctggaactagtctttatgtttttgttttgttttgttttttaacttaaatgctaacttcagctctgggttttttcacaaccaaactaaaaattacttactacgtgggaacatcaatgcaacaaacaaggaaaatttgtaaactcaagccacaaacttacagttaataatcatggtaaggg

SEQ ID NO: 478732 - DNA, 620 bp, Homo sapiens
ttttttgtccattagctaacctcccccattctccccacctccctgcctttcccagcctttagtaaccactattcttctctttgcttctatgagctcaactttttattcttccacatataagtgagaacatgtggtatttatctttctgtgcctggcttatttcagttaacacaaaatcctctaggttcattcatgttgctgtaaatgacagaattttattttttatttttatttttcattgtggttatagaccacattttatttatccattaatttgttggtgagcacttaggttgatatcatatcttggccatcatgaatagtgctgcaataaacacaggaatgcagatctctttttttttttttgtagccatgtgytagtcactttaatagaaaatgtggtcaaaacctgactacaagagttcagagaaaaaccagtgagtttcaatttcattacaagtttttaaatctggaactagtctttatgtttttgttttgttttgttttttaacttaaatgctaacttcagctctgggttttttcacaaccaaactaaaaattacttactacgtgggaacatcaatgcaacaaacaaggaaaatttgtaaactcaagccaca

SEQ ID NO: 478733 - DNA, 655 bp, Homo sapiens
gctgtaattttttgtccattagctaacctcccccattctccccacctccctgcctttcccagcctttagtaaccactattcttctctttgcttctatgagctcaactttttattcttccacatataagtgagaacatgtggtatttatctttctgtgcctggcttatttcagttaacacaaaatcctctaggttcattcatgttgctgtaaatgacagaattttattttttatttttatttttcattgtggttatagaccacattttatttatccattaatttgttggtgagcacttaggttgatatcatatcttggccatcatgaatagtgctgcaataaacacaggaatgcagatctctttttttttttttgtagccatgtgttagtcactttaatagaaaatgtgrtcaaaacctgactacaagagttcagagaaaaaccagtgagtttcaatttcattacaagtttttaaatctggaactagtctttatgtttttgttttgttttgttttttaacttaaatgctaacttcagctctgggttttttcacaaccaaactaaaaattacttactacgtgggaacatcaatgcaacaaacaaggaaaatttgtaaactcaagccacaaacttacagttaataatcatggtaaggg

SEQ ID NO: 478734 - DNA, 628 bp, Homo sapiens
ccattaaataataacatacatagtaaatatttcccacatttcattttccagagagaactacaaagtcccagaaaaataaatttttaaaactgaagattttaaaacataatataaaataaaaagagctgattatgactttgtacacatttggtgcagkctcctgtatcacagttatttagaggggctaaaaaaaaatccttaaaagtaattttagttcactccatatcctaattaataaaagactttttaaacaaaatctgaagtagaagcaagttttcagcattcatattggtggcctgttagagtctactttggagattcttctttcttattttcatcatctgctgaccctaggtgttaggagatgttgccttcagtcctggctttcctcctaactgtttggtcttggatgacttaattgacctttcatcatctcaaatcatgttctataaatgatataaatttctataaaggctctttaaggcctctttctgtcttgaaatttaatcctatgttggtctacacctcccctccatgtcagatcagatgtaatttattacttacactaacgctattcgaattaccccaagatctcatgtcctatcctctccctcattgccactgccag

SEQ ID NO: 478735 - DNA, 426 bp, Homo sapiens
agtacagtggtgtgacagatcactgcaacctccgcctcgtgagttcaagygactctcctgcctcagcctcctgagtagctgggactacaggcgcatgccaccacgtccagctaatttttgtatttttagtagagacgagatttcaccatgttggccaggatggtctcagtatcttgatcttgtgatccgcctgcctcggcctcccaaagtggtgggattataggcatgaaccaccagcgcctggcctatggcacagttttaaaactgcatttgcctagaaagtggactgctgtatatagaccaagtgttgggctatatgactccattgtcttaggctatttggggttggaggaaggaagaggggtgaagtagaaaaggaacaagctaataaatgttttttaaaaagtagaatttaaaacaaaacca

SEQ ID NO: 478736 - DNA, 426 bp, Homo sapiens
agtacagtggtgtgacagatcactgcaacctccgcctcgtgagttcaagtgactctcctgcctcagcctcctgagtagctgggactacaggcrcatgccaccacgtccagctaatttttgtatttttagtagagacgagatttcaccatgttggccaggatggtctcagtatcttgatcttgtgatccgcctgcctcggcctcccaaagtggtgggattataggcatgaaccaccagcgcctggcctatggcacagttttaaaactgcatttgcctagaaagtggactgctgtatatagaccaagtgttgggctatatgactccattgtcttaggctatttggggttggaggaaggaagaggggtgaagtagaaaaggaacaagctaataaatgttttttaaaaagtagaatttaaaacaaaacca

SEQ ID NO: 478737 - DNA, 426 bp, Homo sapiens
agtacagtggtgtgacagatcactgcaacctccgcctcgtgagttcaagtgactctcctgcctcagcctcctgagtagctgggactacaggcgcatgccaccacgtccagctaatttttgtatttttagtagagacgagatttcaccatgttggccaggatrgtctcagtatcttgatcttgtgatccgcctgcctcggcctcccaaagtggtgggattataggcatgaaccaccagcgcctggcctatggcacagttttaaaactgcatttgcctagaaagtggactgctgtatatagaccaagtgttgggctatatgactccattgtcttaggctatttggggttggaggaaggaagaggggtgaagtagaaaaggaacaagctaataaatgttttttaaaaagtagaatttaaaacaaaacca

SEQ ID NO: 478738 - DNA, 426 bp, Homo sapiens
agtacagtggtgtgacagatcactgcaacctccgcctcgtgagttcaagtgactctcctgcctcagcctcctgagtagctgggactacaggcgcatgccaccacgtccagctaatttttgtatttttagtagagacgagatttcaccatgttggccaggatggtctcagtatcttgatcttgtgatccgcctgcctcggcctcccaaagtggtgggattataggcatgaaccaccagygcctggcctatggcacagttttaaaactgcatttgcctagaaagtggactgctgtatatagaccaagtgttgggctatatgactccattgtcttaggctatttggggttggaggaaggaagaggggtgaagtagaaaaggaacaagctaataaatgttttttaaaaagtagaatttaaaacaaaacca

SEQ ID NO: 478739 - DNA, 605 bp, Homo sapiens
ctgttgtaaagcatgtcatctaactgaatacaagccctatgagtcccagttctgaaatttgtcagaattgtgtttatagacagttttattacacatcttcttccyatctattaatattccaagattttatgtcatttcacgtataaggaaagcattaacatttactggtcacgtatcatgttccctcataagaatcttctatcaggcggggtaggtatcattattcaaactttacagacgatgaaacaggctcacagttgacaggtaatttttgcagaaatcacaaagtcaaattggcttctggagtctgctgctctatcatgatgcctccatgtcaccactattaactttgcctgaaggaaccatgacttgctgtttctaccccacgtggtcagtgaccatgaatacaaatgacccttactccaggtgattctgaagtttcaggaagatgacagattccccctaaattttgaacagtaatattaattacaggtaataaaatataccaaaacatcactacaaaaatttagcattacttcatcaagaggaataaactgaaactgtcagtttcttggaagggtgagaggatagtttatcctgctttc

SEQ ID NO: 478740 - DNA, 638 bp, Homo sapiens
aagcattaacatttactggtcacgtatcatgttccctcataagaatcttctatcaggcggggtaggtatcattattcaaactttacagacgatgaaacaggctcacagttgacaggtaatttttkcagaaatcacaaagtcaaattggcttctggagtctgctgctctatcatgatgcctccatgtcaccactattaactttgcctgaaggaaccatgacttgctgtttctaccccacgtggtcagtgaccatgaatacaaatgacccttactccaggtgattctgaagtttcaggaagatgacagattccccctaaattttgaacagtaatattaattacaggtaataaaatataccaaaacatcactacaaaaatttagcattacttcatcaagaggaataaactgaaactgtcagtttcttggaagggtgagaggatagtttatcctgctttctaatacccaccacctatttgtgactataaacttcccaccacttatttatggttcaagcctagggcaagagctagcattttattttaaaaaagatttgtttaataatttttccatttggacagtgtgatggttaatactgggtgtcaacttgattggattaaaggatgcaaagtattaatcct

SEQ ID NO: 478741 - DNA, 638 bp, Homo sapiens
aagcattaacatttactggtcacgtatcatgttccctcataagaatcttctatcaggcggggtaggtatcattattcaaactttacagacgatgaaacaggctcacagttgacaggtaatttttgcagaaatcacaaagtcaaattggcttctggagtctgctgctctatcatgatgcctccatgtcaccactattaactttgcctgaaggaaccatgacttgcwgtttctaccccacgtggtcagtgaccatgaatacaaatgacccttactccaggtgattctgaagtttcaggaagatgacagattccccctaaattttgaacagtaatattaattacaggtaataaaatataccaaaacatcactacaaaaatttagcattacttcatcaagaggaataaactgaaactgtcagtttcttggaagggtgagaggatagtttatcctgctttctaatacccaccacctatttgtgactataaacttcccaccacttatttatggttcaagcctagggcaagagctagcattttattttaaaaaagatttgtttaataatttttccatttggacagtgtgatggttaatactgggtgtcaacttgattggattaaaggatgcaaagtattaatcct

SEQ ID NO: 478742 - DNA, 638 bp, Homo sapiens
aagcattaacatttactggtcacgtatcatgttccctcataagaatcttctatcaggcggggtaggtatcattattcaaactttacagacgatgaaacaggctcacagttgacaggtaatttttgcagaaatcacaaagtcaaattggcttctggagtctgctgctctatcatgatgcctccatgtcaccactattaactttgcctgaaggaaccatgacttgctgtttctaccccaygtggtcagtgaccatgaatacaaatgacccttactccaggtgattctgaagtttcaggaagatgacagattccccctaaattttgaacagtaatattaattacaggtaataaaatataccaaaacatcactacaaaaatttagcattacttcatcaagaggaataaactgaaactgtcagtttcttggaagggtgagaggatagtttatcctgctttctaatacccaccacctatttgtgactataaacttcccaccacttatttatggttcaagcctagggcaagagctagcattttattttaaaaaagatttgtttaataatttttccatttggacagtgtgatggttaatactgggtgtcaacttgattggattaaaggatgcaaagtattaatcct

SEQ ID NO: 478743 - DNA, 605 bp, Homo sapiens
ctgttgtaaagcatgtcatctaactgaatacaagccctatgagtcccagttctgaaatttgtcagaattgtgtttatagacagttttattacacatcttcttcccatctattaatattccaagattttatgtcatttcacgtataaggaaagcattaacatttactggtcacgtatcatgttccctcataagaatcttctatcaggcggggtaggtatcattattcaaactttacagacgatgaaacaggctcacagttgacaggtaatttttgcagaaatcacaaagtcaaattggcttctggagtctgctgctctatcatgatgcctccatgtcaccactattaactttgcctgaaggaaccatgacttgctgtttctaccccacgtggtcagtgaccatgaatacaaatgacccttactccaggtgattctgaagtttcaggragatgacagattccccctaaattttgaacagtaatattaattacaggtaataaaatataccaaaacatcactacaaaaatttagcattacttcatcaagaggaataaactgaaactgtcagtttcttggaagggtgagaggatagtttatcctgctttc

SEQ ID NO: 478744 - DNA, 403 bp, Homo sapiens
taaaattgatcggtgcaacatatataatatgcaagctgtagaatgctggctgttaaaaayggggtccattttcaaatacaacatttttctaaaccatgcacaaaagaacagccctacagggacactcttccatactgtatacatgccgttgccactacatgtgaatactggcagacgttagtggctaaacataaacattagataaaacataggtcttcattgagcagacctgaaatagcagagcaatgaagtacattacaaatcagcatcccagtacattttaaaaaacaaaccaacaagggtgtcatgccaccagtcaaaaggtactttgcttaaactggcattctttaacatgcatgttgtagtggtaagtacttcatttcatacagccacagttattaat

SEQ ID NO: 478745 - DNA, 403 bp, Homo sapiens
taaaattgatcggtgcaacatatataatatgcaagctgtagaatgctggctgttaaaaacggggtccattttcaaatacaacatttttctaaaccatgcacaaaagaacagccctacagggacactcttccatactgtatacatgccgttgccactacatgtgaatactggcagacgttagtggctaaasataaacattagataaaacataggtcttcattgagcagacctgaaatagcagagcaatgaagtacattacaaatcagcatcccagtacattttaaaaaacaaaccaacaagggtgtcatgccaccagtcaaaaggtactttgcttaaactggcattctttaacatgcatgttgtagtggtaagtacttcatttcatacagccacagttattaat

SEQ ID NO: 478746 - DNA, 403 bp, Homo sapiens
taaaattgatcggtgcaacatatataatatgcaagctgtagaatgctggctgttaaaaacggggtccattttcaaatacaacatttttctaaaccatgcacaaaagaacagccctacagggacactcttccatactgtatacatgccgttgccactacatgtgaatactggcagacgttagtggctaaacataaacattagataaaacataggtcttcaytgagcagacctgaaatagcagagcaatgaagtacattacaaatcagcatcccagtacattttaaaaaacaaaccaacaagggtgtcatgccaccagtcaaaaggtactttgcttaaactggcattctttaacatgcatgttgtagtggtaagtacttcatttcatacagccacagttattaat

SEQ ID NO: 478747 - DNA, 403 bp, Homo sapiens
taaaattgatcggtgcaacatatataatatgcaagctgtagaatgctggctgttaaaaacggggtccattttcaaatacaacatttttctaaaccatgcacaaaagaacagccctacagggacactcttccatactgtatacatgccgttgccactacatgtgaatactggcagacgttagtggctaaacataaacattagataaaacataggtcttcattgagcagacctgaaatagcagagcaatgaagtacattacaaatcagcatcccagtacattttaaaaaacaaaccaacaagggtgtcatgccaccagtcaaaaggtactttgcttaaactggcattctttaacatkcatgttgtagtggtaagtacttcatttcatacagccacagttattaat

SEQ ID NO: 478748 - DNA, 631 bp, Homo sapiens
tgggcactgttctaagcactttacattattatctcattttaatatcctcaaaaaccctatgaattaaggtattattattatcctcattttacatatgaggcaactgatgcattgagaggttaagaaacttgcctgtggtcaaaataagcagaagagcaagggtctaaatgcaccccaacactctatcctcaaagctgtcacattcaactaccactgtaatattgagtcttcaatcaattgttatatatatagctgtatcaggcctgaaagtacttaccacatagtgggtcagcaagggcattacagttctatttctgttaaaacagaacgatgaaggatccaccaccaccactcccatttttaaaatattctaaatattcacacttattaacwcaaaaataaggtgactaagaaggataatttctgtatttggagataaatttaaaatatctacattttaagggacataaaagttttaatagtgaactgctctcttgaatttatttgaaggaaccctaaacaatttaaaaaggaaataattataaatgtataaattattcctttgttacctttgtgggagtaacattagctgctggtctgagaagatactgggaattatatgctggtgact

SEQ ID NO: 478749 - DNA, 628 bp, Homo sapiens
tggaatttgaaccacatctgactccaaaaatgttttcttaacacaactctgctgccttgacaagatggcagatagatacaatgccgtctagtgtagctatgtggctacctsatctctgctgaagaaaactaaatgacagcaccatacccaacaccctagaacctacaaaatgtccccttacaaaacagacacttaacaggaaattctttttccaaagaaattgtagtggtatcagaaaacaggtaaattttgaaaagtttcaaacttctctgtatcagcccaggaatccgaccagttctaacaagtgaggtcagggacagatctagcatgtctgctttctttttctacaagtgtttcaaataaaaatttcccagaaagacctaaccatgaggtccaaaactatctcaattttcaagctaaataaaatttcccccactcatccatctacagtgcctagtccagatgctacacatacacatccaagaaataagaaactagtggaatcacctagaaaactttatggtcactgctggtatctgcaccagagctttgaatttgcaatcactgctgtaactgtaatttttaacattcagtgtgatgagaactggcttcgataattctctcattt

SEQ ID NO: 478750 - DNA, 628 bp, Homo sapiens
tggaatttgaaccacatctgactccaaaaatgttttcttaacacaactctgctgccttgacaagatggcagatagatacaatgccgtctagtgtagctatgtggctacctgatctctgctgaagaaaactaaatgacagcaccatacccaacaccctagaacctacaaaatgtccccttacaaaacagacacttaacaggaaattctttttccaaagaaattgtagtggtatcagaaaacaggtaaattttgaaaagtttcaaacttctctgtatcagcccaggaatccgaccagttctaacaagtgaggtcagggacagatctagcatgtctgctttctttttctacaagtgtttcaawtaaaaatttcccagaaagacctaaccatgaggtccaaaactatctcaattttcaagctaaataaaatttcccccactcatccatctacagtgcctagtccagatgctacacatacacatccaagaaataagaaactagtggaatcacctagaaaactttatggtcactgctggtatctgcaccagagctttgaatttgcaatcactgctgtaactgtaatttttaacattcagtgtgatgagaactggcttcgataattctctcattt

SEQ ID NO: 478751 - DNA, 563 bp, Homo sapiens
ctggaatttgaaccacatctgactccaaaaatgttttcttaacacaactctgctgccttgacaagatggcagatagatacaatgccgtctagtgtagctatgtggctacctgatctctgctgaagaaaactaaatgacagcaccatacccaacaccctagaacctacaaaatgtccccttacaaaacagacacttaacaggaaattctttttccaaagaaattgtagtggtatcagaaaacaggtaaattttgaaaagtttcaaacttctctgtatcagcccaggaatccgaccagttctaacaagtgaggtcagggacagatctagcatgtctgctttctttttctacaagtgtttcaaataaaaatttcccagaaagacctaaccatgaggtccaaaactatctcaattttcaagctaaataaaatttcccccactcatccatctacagtgcctagtccagatgctacacatacacatccaagaaataagaaactagtggaatcacctagaaaactttatggtcactgytggtatctgcaccagagctttgaatttgcaat

SEQ ID NO: 478752 - DNA, 575 bp, Homo sapiens
tgcttaggcctctcaaagggctggtattacaggcatgaaccactgcactgagccaactctctggtctttgttattcaattgctgtgtgcctcactaatctgattcttagtactcccaaactctgaccttagtgatataaccatattctaaattcatcatcatggaatgcccatccatcctcatttctgttctgtctagccaaacctgcagttggagtcactacaaaactggtggcacagaattccaacaaaggactkccccatagcatcccaagatggggctgattgagattccaaagaaggaggtactagatgccaggaaaatcaatcccaagcatttattaggggaatttacataaagaagagggtgcggcgtgtcttagcaacagtgagaaaagagatattccacctagatatgtctgcaatgaggggatggagttaatggagttgacttgagtgtttaagaagtttggctcagggccaaagctagtttctatgtatgtaacaacatggctgatcttttagtgttttccaacagcaacctaaatagctttatcaatttctgagaaggttcaa

SEQ ID NO: 478753 - DNA, 553 bp, Homo sapiens
agggggttctcttcagcacactaaggtttggaaaatgcctgaagttttttccacactgattacattcattacttttatagatgctatctacatatggcttctcaaatrtctctccttgttctgtgctgaattttaatgacatgatattcccagttttctcctaaaatggagaaccaggagttattccttgttattcttactactttctgttcattggaatttttttcttcatgaatatcctgctgaacaactgactcatgggttttaagttgaatctcacaatctactgaggccagattcctacagcatttttccagcatcacatctctgtaggggctcctttgagcaggagccaggaaagcctactccttctaagtaaatttcatagccacatcctcaaacaccattacgtccatttcctggcttaagcttctggacgttcctgtgggcataagccatgcagtccaaacgggagagggaaaaaggtgaattgaggccaccttcaatttgaagtcaaatgagaaaagcctgtgccactcaggctggcagagca

SEQ ID NO: 478754 - DNA, 404 bp, Homo sapiens
atgtctccgctacataaacaataactcctggcacagtggatcggtttctcatggtcctgatgggagataaggtccccacagcttagagcagccagttctggaaactttcaccttcaccccacagcccakctaatttccaagtttgggattgcaataagctctctcaacattctaacaccctgctccctcacacacacacacatatcgcaggtctctgtgtactgaagtgttcctgagagatgggtcagaggctccagagttagcagacgggagaaggtctgcctgccttccatcagtgagagaagagagaggtcagacagggcggctcggagtctcaggttctccaagttcctttagtcctgctctaaggaagcccttgctcaccccttctgactctctagggt

SEQ ID NO: 478755 - DNA, 597 bp, Homo sapiens
tttccatgtggatcccttgagtacctactatgtgcttaacacyggctaggtactcagggaaggggtcacaaaagtatattcctatccttactgctgtggtctgaatgcctgtgttcctcagagttcaaatgttgaaatcctaaccttcaatgtgatggtattaggagatgaagtctttgggaagtgattagccatgagggcagagttttcatggatgggattaatgcccttataagtaagaggccccgagagagctcccttcccccttcgactatgtgaggacgcaatgagaatgtgccatctacaaaccagaaagcaggtcccccacctccccagcatcacatcagctgatgccttggtcctggacttcttagcctccagaaatgtgagaaataaatttttgttgtttttaagccactcagtttatggcattttgctgtagcaactccaagtctgtctctccaggatctataaatgtgcctggcacatattagtgctcaatacatttttgttaaataaatggaataattaattaatcagtccgtgtcttggcagatccatgaaactttacctccctgggtagaaaatctgtttaag

SEQ ID NO: 478756 - DNA, 580 bp, Homo sapiens
ctgccatgggggccccacaggcctccctcctgcatcctgttgtctgctcctcaccagattcttggttggctgccacctaatttctttttggcctgggctaatttcttgcagtcctcgggctggcgggaagcatcactaattcccaaagtccttccatatgggcgattcaaacccctccatctgcaaagcgtgcacatttccttggctttatccttgcagaatagtggtaccctaagtctgcaggagcatggagcttgtttcaatgttttgaattccccctccccatttgctggtttactcggttccctttgtccccttcccccagatttgatacccaaggttgaattttccaaggtggagtgttatgaagagtgtggagacaattaagagaaaacgtgaagtctctttgcccgttgacatggacgtcagaaagtctggagccttcgcaggcctggctggaatcagctctgggtgtgatgggtctcagcatgtgaacaaaatcagcatgaacatcaccctttgccaacctggcycttggggaccaggggacagttatgaaatagtggtcaagtgactgaga

SEQ ID NO: 478757 - DNA, 585 bp, Homo sapiens
acaaaacaaaaacaaacaataaaagcacaggaagcagagctggaggcagaactagagggagggcagggcaggcatgcttatgactttgagggcaacgattcccccaccacaggattatattaataaaacgagatgcatggggagggggcaggcaggagcaaagtgamactggtcagatttgtgtttcagaaagatgacccttgggtagtcccatggaaggtaaccagaaggtgaactcaagatgggaggtttcagaccagtgaagctgctggaaaattctaggcaagataagcagtggagtggcagtggggctgaagagaactgagtttgatatcaattaattataattctcctttcccttgtggttctcaaatctacagatgaggctgggcacggtggctcacacctgtaatctcagcactttgggaagccgaagtgggaggatcgcttcagcccaggagttcaagacaagcctaggcaacacagtgaaaccccacctcatttaaaaacaaacaaactgctgattgtcccccaccatcccagaggagagcatcacctttagttcagacctatccggagccaggc

SEQ ID NO: 478758 - DNA, 545 bp, Homo sapiens
tctgaccttggacgagttattcggttggtgcaaacgtaattgmgcttttgccattgaaagtaatggcaaaaatcacaattatgtttgcaccaactgaatagctaacctctcagtgcctcagattcttcatctggaaaataggtcgttcagaggattcaaggaattaatctctctaaatgtgcttagaacagtggcaggtacatagtaaacaattgatgctagccatttttatcatggctgcctagattttatctaacctttataagcaccattctatttcacaggtgaggaagctgaggctcagaggtgaagtgagtgaccttagatcacacagctagtaagtgatggagggagaacctgaatccaggtcagcttaactgcatggcttgtggtcttaacaccctgcctaaactgctttgctcttgacccaagaagtcacacacagacatagggtcatagcaatttgcacgaggagttccaagtctagatagaagagttgctaatgatgactatagtgatttatgcttataggagctctggtgtca

SEQ ID NO: 478759 - DNA, 588 bp, Homo sapiens
ttacagtgagctgagatcgtgtactgtactctagcctgggtgacagagcgagactgcatctcaaaaacaaacaaataaacaaacaaayaaaatatatatatatatatgatttgaaaaggcctatttctacactattacatctattggattgaacatcctctagtttaccataggtcttagaccctctaactttgtcttgactttagagatagtagtggtttttacactttttatctgcctcagtagaaagtcagctctttgaggccaatagtatattcccatagcttcccttaaaataatactcgctgtgcacaaattgtcaccttttattaaatgtgtgtgtttactgtaaaaacagagctggacaatagaatgtaagctgaaaatcagaccatagaatctggcctaggtttggggaatggagagaataaagacttggatttcattcaagttgattttactttggtttagttttggatgaactaagaagcagagcaaagaatataaacaagatagagatgcagaaggataaatgttgcttcccattgcctcccttgtatgtcccagaatacacataaagtttgcatt

SEQ ID NO: 478760 - DNA, 588 bp, Homo sapiens
ttacagtgagctgagatcgtgtactgtactctagcctgggtgacagagcgagactgcatctcaaaaacaaacaaataaacaaacaaataaaatawatatatatatatgatttgaaaaggcctatttctacactattacatctattggattgaacatcctctagtttaccataggtcttagaccctctaactttgtcttgactttagagatagtagtggtttttacactttttatctgcctcagtagaaagtcagctctttgaggccaatagtatattcccatagcttcccttaaaataatactcgctgtgcacaaattgtcaccttttattaaatgtgtgtgtttactgtaaaaacagagctggacaatagaatgtaagctgaaaatcagaccatagaatctggcctaggtttggggaatggagagaataaagacttggatttcattcaagttgattttactttggtttagttttggatgaactaagaagcagagcaaagaatataaacaagatagagatgcagaaggataaatgttgcttcccattgcctcccttgtatgtcccagaatacacataaagtttgcatt

SEQ ID NO: 478761 - DNA, 588 bp, Homo sapiens
ttacagtgagctgagatcgtgtactgtactctagcctgggtgacagagcgagactgcatctcaaaaacaaacaaataaacaaacaaataaaatatatatatatatatgatttgaaaaggcctatttctacactattacatctattggattgaacatcctctagtttaccataggtcttagaccctctaactttgtcttgactttagagatagtagtggtttttacactttttatctgcctcagtagamagtcagctctttgaggccaatagtatattcccatagcttcccttaaaataatactcgctgtgcacaaattgtcaccttttattaaatgtgtgtgtttactgtaaaaacagagctggacaatagaatgtaagctgaaaatcagaccatagaatctggcctaggtttggggaatggagagaataaagacttggatttcattcaagttgattttactttggtttagttttggatgaactaagaagcagagcaaagaatataaacaagatagagatgcagaaggataaatgttgcttcccattgcctcccttgtatgtcccagaatacacataaagtttgcatt

SEQ ID NO: 478762 - DNA, 588 bp, Homo sapiens
ttacagtgagctgagatcgtgtactgtactctagcctgggtgacagagcgagactgcatctcaaaaacaaacaaataaacaaacaaataaaatatatatatatatatgatttgaaaaggcctatttctacactattacatctattggattgaacatcctctagtttaccataggtcttagaccctctaactttgtcttgactttagagatagtagtggtttttacactttttatctgcctcagtagaaagtcagctctttgaggccaatagwatattcccatagcttcccttaaaataatactcgctgtgcacaaattgtcaccttttattaaatgtgtgtgtttactgtaaaaacagagctggacaatagaatgtaagctgaaaatcagaccatagaatctggcctaggtttggggaatggagagaataaagacttggatttcattcaagttgattttactttggtttagttttggatgaactaagaagcagagcaaagaatataaacaagatagagatgcagaaggataaatgttgcttcccattgcctcccttgtatgtcccagaatacacataaagtttgcatt

SEQ ID NO: 478763 - DNA, 596 bp, Homo sapiens
ctaaaagaaaaaaagaaaaaaaatcaaataagggtaattttgtttaaaatatcttactaaaaataacagtatttattcttttaaaattataatggcttaaattatagtattttataatcaaaaaagtcaatacaagaactctgtttagaaattggtatctgcccagcacctagccaagcaagggtagacttgctcaggaattcagtcctttggaaaacagtagatggaaaaacacagatgacctcctaagatatgaagcacttaatttgtgtaagaagcatttaaatacaaaaaattaaccaagtgtggtggtgcgcgcctgtagtcccagctactcaggagtctgaggcaggaggatggcttaagcctggaggtgaaggtggcagtgaactgagatcatgccactgtactccagcctgggcaacagagtgacaccccatctcaaaaacaacaaaaagaagcagcagcatttgatctgtgggccctatacttccacatatataaatgtcatcataagatcatttcaaaaaaagatagtatttawgaaaaagtttagatcacatcctagaataaaacaagatataattcaaatacat

SEQ ID NO: 478764 - DNA, 488 bp, Homo sapiens
tttggtattatttttcccaaagagtccctctttccccaaattgcatttaayaccatgacccacaaattctgatgtgacctcgttcagaatacacactaaagaaacagggctgggcaaacttcaacagtaacagcaatggcaatgaaataagaacatgaagcactctccctagggtagaagactggcgtgcatgtttgatatatatatgcaagtccaacacacacaaacataaacacacatatgacagggtctcattctgtcatccaggctggagtgcagtggcacaatcatagcttgctgtagccttaacttcctgagctcaagtgaccatcccaccctcagcttcctgagtagctgggaccacaggttcagaccacctcacctggctaatttttgtatttttttgtagagacagggtcttgccatgttgcccaagctagtctcgaacacctggcctcaaccaatcctcctgcctcagcctcccaaag

SEQ ID NO: 478765 - DNA, 488 bp, Homo sapiens
tttggtattatttttcccaaagagtccctctttccccaaattgcatttaacacyatgacccacaaattctgatgtgacctcgttcagaatacacactaaagaaacagggctgggcaaacttcaacagtaacagcaatggcaatgaaataagaacatgaagcactctccctagggtagaagactggcgtgcatgtttgatatatatatgcaagtccaacacacacaaacataaacacacatatgacagggtctcattctgtcatccaggctggagtgcagtggcacaatcatagcttgctgtagccttaacttcctgagctcaagtgaccatcccaccctcagcttcctgagtagctgggaccacaggttcagaccacctcacctggctaatttttgtatttttttgtagagacagggtcttgccatgttgcccaagctagtctcgaacacctggcctcaaccaatcctcctgcctcagcctcccaaag

SEQ ID NO: 478766 - DNA, 488 bp, Homo sapiens
tttggtattatttttcccaaagagtccctctttccccaaattgcatttaacaccatgacccacaaattctgatgtgacctcgttcagaatacacactaaagaaacagggctgggcaaacttcaacagtaacagcaatggcaatgaaataagaacatgaagcactctccctagggtagaagactggcgtgcatgtttgatatatatatgcaagtccaacacacacaaacataaacacacatatgacagggtctcattctgtcatccaggctggagygcagtggcacaatcatagcttgctgtagccttaacttcctgagctcaagtgaccatcccaccctcagcttcctgagtagctgggaccacaggttcagaccacctcacctggctaatttttgtatttttttgtagagacagggtcttgccatgttgcccaagctagtctcgaacacctggcctcaaccaatcctcctgcctcagcctcccaaag

SEQ ID NO: 478767 - DNA, 485 bp, Homo sapiens
tacccagctagttgttttgtattttttgtagagatgatggcccggccgcctctgagaccttctaatctcctttagytcaaatgctccacctgacaaacgtcatccttacttcgggggtattgttttctgagccccaacaatacattgtttcataggatgatgtgattccagtcatttgtctttgtgaggtctgtaattccttctcccacttctgatcaatctatgttatatctctgccttcccctccctccagtctctccccacccagaactgaagcctgaactggccgtgggggaaccactcggagtgtggtcagggagggtttgggggaaaattgccatctcccttttctcttgagtctctggctttgaaccttccctgccctgaccccgggtaagaaagagttttcagaatgatgaccccactggacaaagagccattcccaccaggtgcggtggttcatgtacctgggaggccgaggcagg

SEQ ID NO: 478768 - DNA, 567 bp, Homo sapiens
atgattaacctccacccctaacatttatatccaatttcagctcaggctgaattggatataacaaacccaatttgttcaggctgctgtaacaaaataccataaactgggtggcttaaagtatgcaacataaacatatttcttatacttctggatgctggtaggtccaagatcaaggcactggctgattcagtgtctggtgagggccctcttcctggttcatagattgtggtcttctcattgtatcctcacaaggaggattgaaaycatttttgcaaaaattataagtgagaaaattatatcagtgaaagagatcagacctaactgactacatcttgcttctaacttccaacttgtccttgttcattcctcggtgtaggccaaattaactttgggaagaacttacagtttgtaccatagtttaacttttatagtttatcttaactttgaaacaaagacaataacagccctttcccgaaacaagccccgttcctgcctggggactagactgcctttataggactaacagattagccaaaagattagaaattatggtttaggagtcatgca

SEQ ID NO: 478769 - DNA, 532 bp, Homo sapiens
aatgtgagatgaatctaatttaacagataattttaagtggtttatatatgcccatatgaaaattattattttaagagattctctcaaaaagcacaaatttaaatgttcacaaacttaataatgtaagaaaaattccaccaaaatgascatctgaattgtcgagggagacatttgtgttatccttgcttatcttagcctatcaaggttcagaagcagtaattaaaaaaataaattagacatagatataggctgaaccaaatgtgccaacttgctggttaggaatgtgttttacaacctgaaaaataccaaaagcagcattataaattacagaaaacctgttttttttttcttcgaaagatatttggttacaatacttgttatgatgtctgcaatttactccaaaatactttagcatagtaatgtgattttgggtttaagttagtttaggctatgttctaagggcaggggaagtgagttaacatttaatagaaatgaccactccataaatggctactacaagcactgcaactac

SEQ ID NO: 478770 - DNA, 660 bp, Homo sapiens
ctgttcctcctgcttggaatgccctttcctcaggacctcacttggctccctcctcactgtttagacctcaacttaaatgtcacctccacagagtttctctccactctcacttgctcagttatctgagtaaggtttctaccacattactctagtttgtctttttcataggccctcactgtacatgaaattatcttattgatatattactgttttgtgtttctggagtgtcacctctgtggaatgtaagatctttgaaggctgacaatctgtctggttcattgctattctccagaagtaagaaagtgttcttgcagggagtaggagcataataagtacctttgactatttcttacgttgttccctaactaactggttcaatcttttaacctctccagtgatagtttacacatcttggaaatcaaaaccatcttcagaaaagggagatgttacaactgacaccacagaaagagaaagaatcattagagactattccaaacaattatacaccaacaaatttgaaaatctagaaggaatggatacattcctggatacatacaacctacaaagaytgaaccatgaagacatggaaaacctcaacatgccaataacgagtaaccagatggaagcttcccatcgaagaaaaacccaggacctgatgac

SEQ ID NO: 478771 - DNA, 659 bp, Homo sapiens
acacctcactccctccagaaagtgaaggaagtgccctgcttcccacagataggagcagcccatgtagctgccccaagcagcctgtggccctgctcataccctaattttctgttcatctttctatatgtcccaccagggtacaagttctctgtgtggcttgcctggcacacagtaggtactcgtcatatatttgctgtgtgwatttttgatatcgttgtttagcataaattgagtgttgctctggaacttggtagagaagatcaggttggagatttaaatggaaatttgagagctaattgtatgcaggagacagtggaagcattaaatggtcaccttattatatttggatttttaagccaattgaaaggattctcaagtttctctgtcttcaaaatctgtttgtgttttaagtccagagtcattaataactatttaggcagctccagatgatcccatttctgacttgaactgcacaaacttgttttgtgctagaacttaatttaagaaggtccatttcagtcggcttcatgctctgcaaagtcgcctctgcctgttgtcttgactgtctgtcactggcttttggaaggatgggggtaactcctgagctgaatactatctgaattctttgtattacatcagaaaatggttgaattttggtc

SEQ ID NO: 478772 - DNA, 525 bp, Homo sapiens
agtgcttcagtaactgagtgttctttatcacaagcagctgttcttcctaacctgccttaaaaggaaaattgttgctattattgtagttccaaagatgagatggagggaggtgaactgcctggactaaggtcatgtattatgtcaaaagcagagatagaccagaaggaaaagtaaaagtaaacaattattttctcccaacaayagtgatgcttcaattctaagactattacctttcattgccttgactttacattttggcagattctactgcttttgaaagcagcaagctttatacaattccacctacttgaatgaatgagtttttaaaaatcacaaatttccaaatgctggttgttaaacttcaactctcagtgcatttattaaagaaacaacctatcaatctagtcagtctactatgttctaaaataataagtggagagttgaatctgggccctatactcattagctgagcagctagccttgctcaactgggggcttttgacactgaaacacaactttttcaaa

SEQ ID NO: 478773 - DNA, 525 bp, Homo sapiens
agtgcttcagtaactgagtgttctttatcacaagcagctgttcttcctaacctgccttaaaaggaaaattgttgctattattgtagttccaaagatgagatggagggaggtgaactgcctggactaaggtcatgtattatgtcaaaagcagagatagaccagaaggaaaagtaaaagtaaacaattattttctcccaacaatagtgatgcttcaattctaagactattacctttcattgccttgactttacattttggcagattctactgsttttgaaagcagcaagctttatacaattccacctacttgaatgaatgagtttttaaaaatcacaaatttccaaatgctggttgttaaacttcaactctcagtgcatttattaaagaaacaacctatcaatctagtcagtctactatgttctaaaataataagtggagagttgaatctgggccctatactcattagctgagcagctagccttgctcaactgggggcttttgacactgaaacacaactttttcaaa

SEQ ID NO: 478774 - DNA, 525 bp, Homo sapiens
agtgcttcagtaactgagtgttctttatcacaagcagctgttcttcctaacctgccttaaaaggaaaattgttgctattattgtagttccaaagatgagatggagggaggtgaactgcctggactaaggtcatgtattatgtcaaaagcagagatagaccagaaggaaaagtaaaagtaaacaattattttctcccaacaatagtgatgcttcaattctaagactattacctttcattgccttgactttacattttggcagattctactgcttttgaaagcagcaagctttatacaattccacctacttgaatgaatgagtttttaaaaatcacaaatttccaaatgctggttgttaaacttcaactctcagtgcatttattaaagaaacaacctatcaatctagtcagtctactatgttctaaaataataartggagagttgaatctgggccctatactcattagctgagcagctagccttgctcaactgggggcttttgacactgaaacacaactttttcaaa

SEQ ID NO: 478775 - DNA, 464 bp, Homo sapiens
gctggacactattaaaacaattcaggcccatagtaacagtgaattaaacaaaaaggtagcactggagatagatgagaagtactggattgcgttatggatgtagaccatagaatttcctggcatattggataaaaggtatgaggggaacaagagaagtgtcaaggaggattcacgttttctgcctgagawactgaaaagctacagcagcaattaatattacttcagttcccacttgaagaaacactggccttcccatatccattgatcacatgacacaggatttcctctgagaagatatcgaggtttgctgaaattgttgagggacaaataactcatgaaacaatctgaagtacctaaatgaaggcatgtatgaacaggctggtaccaatcacttattgtctactctttggcttagccctttattccttctgtttagagattacttcagaatccaaaaaaagaat

SEQ ID NO: 478776 - DNA, 464 bp, Homo sapiens
gctggacactattaaaacaattcaggcccatagtaacagtgaattaaacaaaaaggtagcactggagatagatgagaagtactggattgcgttatggatgtagaccatagaatttcctggcatattggataaaaggtatgaggggaacaagagaagtgtcaaggaggattcacgttttctgcctgagatactgaaaagctacagcagcaattaatattacttcagttcccacttgaagaaacactggccttcccatatccattgatcacatgacacaggatttcctctgagaagatatcgaggtttgctgaaattgttgagggacaaataactcatgaaacaatctgaagtacctaaatgaaggcatstatgaacaggctggtaccaatcacttattgtctactctttggcttagccctttattccttctgtttagagattacttcagaatccaaaaaaagaat

SEQ ID NO: 478777 - DNA, 529 bp, Homo sapiens
agtgaatcctatttaacaatgcaagataacacaatgtatccatttccatagctccatgattatgactttcatggaaggtcttagcctctgtctatatttgtgcaaagagaggaagaaattttcaaggagtttttctcttaggcacgtaccttcaaggacatctggtatagacttcttctattgcattgtttagcaaaaagaaagaagaatcagaaagggcaagttagattggcaacatgctcatcccttccagcattcaygtacacatgagttctgacccctcagcctgttcagcaaatgcaagatgcagagacgccgccgaccaagctgtctttcaaacctctgccaccccaggtgcttgcggatgtgactgtaatctttctccagattcaatattttaatatggacataattttgtacataggaaagtaaactcttttcatgggatgcccaggttctaccctgtagccttaactaagcacctacaaatactgcatagaaaattgtagcttcacctactagaagattg

SEQ ID NO: 478778 - DNA, 556 bp, Homo sapiens
cactcacacacaacacacacaccacacacacctccaaaactaagcaataacacatagacatcataggaatcaaccttcagagatgaaggctgtcactgagtgaaatagtctatgttctcccgcagagcaattcaactcttcaaatcacggttcctctagaaaagggttttctatcacatttgtataaccaacttttttccccaaactaagagatacatagccccaaagtaacactaagtatttatcaatcttcttcaaacagaaaattgcgccgtttgggagaattgtaattaccagatttgttttcctgggtactaaagcttaatgtttatagtcagtgactctgaagtcwgtcagtaatgggttcaaatcccagccctgtctcttcctaacagtatccttgaatagctacttaattttttggtgtttcagccttctcatccataaaatgggaatagttaaaagaacacacctcagagagttgttgctaaaattacgtaaggaaattcatgtaaaaaaacttcatacattttttgcctactgaaaaaataaatgt

SEQ ID NO: 478779 - DNA, 459 bp, Homo sapiens
acgaatatttgttccttccttctacccagtttataagactcatctgtcttctggtcattgactccagctgctgctatgagccattgctggacagagtggcagaggttttagaacccacagaggacatgaagaccattcatttttttcttctagttctttcacatagccatgtccaattttactctggcagaacgtggtgttgctgggatgggccatgtggtgtttctctgacaggggtccaccaactgtcagctctggctggtgctcatctctcagaaaggccaaaagagtcatttcgsgcaaaggcactggggatgtctattcttcatggacattgcgtgtccaagtttctccttagcctaagcaacagaaatttcgtcctctgttttccccaaataagctaagctccaaagtatctcagactcaagagagattactgtggctggatgtgaccaatgg

SEQ ID NO: 478780 - DNA, 530 bp, Homo sapiens
atgatttaattttgagatccttagcttaatctgcaaaaactttttttttcccaaaagaagattacatctacaagttccagggattaagatgcagacatatcttttgggggaccacattcaacctgctatccacagtagggaagtagagtggtgggggccggcgtaaggtgagcagttttatataaggcggtcaggtgaagaytccgtgagcacaaggaacagccatggggatatgggaggagattttcagacagagggaggagcaagcgctgagggcctggtcttcttccactctcctgctctcccactgcatcttaaattcaacatctgtttctgcctcatggctttttgcactttccttttgctgtttcctctgcgtggaactcttttgcatgcgtcttacaaaagtggtcccttcttagcacccagatcactgtttaaaggtggtgcaggcctataatcccagctccttgggaggctaaggcaggagcatcacttgaggtcaggagttcaaggctagcctgagcaac

SEQ ID NO: 478781 - DNA, 627 bp, Homo sapiens
gctggttgagaagctgacagttaactttggatcagacaaacatttgctatcagagacacaatttttctctctctcgtccctttctctcaacagtgagagcttcttaatttcttcttgttattgactcattccctattactgcttgcttcaaatgcatcctcaggtagagtcctatcactcagaaatggtcacctcattgttttgtatcrttttggagacagtcacactctatcgcccaggctgaagtgcaatggtgcgatctcggctcactgcaacctccgcatcccgggttcaagcaattctcctgcctcagcttcctgagtagctgggattacaggcgcccgccaccacgccaagctaatttttgtatttttagtagagatggggtttcatcatgttggccaggctagtctcaaactaccgacctcaggctatttgcccgccttggcctcccaaagtgctgggattacaggcatgagccaccgtgcccggcctacttcatagtttgatttctgtgcctccttcagtctctctgcatatgtaacatttccctctttactgtgtggcttcctttcttcctgctgcgggatgcctgcatctatgcccttttcagtgcctatctgctag

SEQ ID NO: 478782 - DNA, 566 bp, Homo sapiens
ctggagacactgaagttgtccctggccaagtggacacagggactatggcccccatgatcatgtcttcctcctcttccctccctgcagtaataactgagccagcaggcccagatttggggaccccattcaccagccgcctacccccagaacttcaggtcctaaaggacgaacaggcccatcggttggcccccargggtaatcagtctcgcatcttgactcaggcctataaacgcatggctgaggaggccatgcagaaggtgtgtggggcagaggaaaatatgtgaaatgaccaggctagtgactggggagttagaggaggagggtgactttctagggttggagaagggccgtgaatagcattcatattgtcctatagcaatcaaatagctctgattcagtgttgccccctacctcccacagaaacatcagaacacaggacctgcccttgagcaagaggacaagaccagcaaggtggctcctggcacagcccctctgcccagactcggggccactcctcaggaatcaagcctcctggccgggatcttagcctcagaattgaagagcag

SEQ ID NO: 478783 - DNA, 568 bp, Homo sapiens
agtatcctcatgtccatcctgaagcatctgctttgccccagcttcctgaatcaactgcgccaggcgtgagtttgagctagaagagagccacagagtcagcaacggggagggagaaagaagaaggcaggaaagaagttactgacagattgagctataaagcaagaaagatgagatcaggtttaggctggaaacctaagtagtggctgagactgtagaaggggagttgggcaaaggaattggaggagggagggaggaatgataaaggttaagtgaacaagaccaagtctcttcgacattcctctccttaggcctcatgggtctgagtttctccctgtcgtggtgctctctgtctgccagctcctttgcttcccctttgcgctggacatggatgctgacctccttatagrtgtcttggccgacctcagggactcagaagttgcagcccatctgctgcaggtacttgggcagctagcatgaaggtgggagaggaagatagccaaccttgtatcctctaatttacttcccagcagctccagggctcttctaggcccctgtaagcatggaacag

SEQ ID NO: 478784 - DNA, 575 bp, Homo sapiens
ctgtttgaccttatgcaagtcacttaactttgctgtgattgttttttcatctgtaaagtagggataatatctgtttactgcagacaatgagaacaacaatcaactgagataacatatatgagaatattttatgaaatataacacctacttctaaatttagttttcatttttyttattctgaagtcactgttacctctaaaaactcttatatattaaatgctttttccagctatagaggtcttgtaagcaattaagtcttagctaactcaatttttaatatagtaatgttttatgtactgaatctttctttattcacccacaagttatctagtatttgattttgtgccaagcaatgtgctaggcccagagaagaaaatagtgaaaaaagagttcaccatttcatcatgaaaatagaaaagaaacaggaaagtaaaaactctgcaaaaatcatcatatagatgttctctaaatatcaaaacataatttcttttagctactatgatagaatttttgaaaattatattgcacactctgagtcttcaactcagttttgtaaatattttccagaaaactta

SEQ ID NO: 478785 - DNA, 508 bp, Homo sapiens
tgcaatatactcatgtaacaaacatgcacatgtacatcctgaatttaaaataaaatttaaaaatacaaaaaagaatacctatagccacygagtgctctctagttctgctgccaccaaacctcctcattttatgcttggacaattgtgatagcttttaagttgttcttccctttccctacaacacctccctccagtttttctcgggtgcttccatcacataaattgcgttcaaacaattttttaacttgccattctccagcataaatgttttcagtggttcctcattacctttggaatgaaattcccaactctttgacatggcatgtaactctcatgtctcctctctctgaacttttactccacgacagtggttcttaactggggacaattttgcttctcaggggacatttggttgtcatacctccaagaggaggtaaagtaactggcatctagttggtaggggcaaaagatgctgctaaacatcctacaatgccccccccccacctca

SEQ ID NO: 478786 - DNA, 594 bp, Homo sapiens
aatgccaccggccttttatttagatgtttgagtacttactcctaaaaatcatcagtctttagaattggcactttaattaaaacctagagggaagtggttggtatgaatttgtgcacgggtttaagtgtatatgtgtgaatatgtgcacttatatgcttttggagtttctgtttgtgcatgtatgttaatatatttttcatatgtatacacttactagtctctttatactttatgcacttagggtttatttaaagccgtatttgtggttttgagaaacctatttataatcacactgagatacagatacatcaaaaattgtaataagtgaatgtattctttgaaggagacctattgtaaatmccgtaaaaaacaaatatttattctaaaaacaaatatttatttctaagctatattctaaaatatatccactgcaaaaaccacaaatttttattctaaaggtaggttattctggataatctaactttttgtaattcttatgcttttttttggtaatattttaagttttaaacaagaaacctgtgtatgacagtactgactatggtcaggcaaaacacagttagatctgaggatgct

SEQ ID NO: 478787 - DNA, 482 bp, Homo sapiens
taacaactaagaaggcgggataaaatatagaaaacatatatttgaaagaaatagagaattgaaaagagtaataacttgagaggccaagataagccaactttccctttgttgcatttgcatatttattattagtgcaagcagagagactaagaagcagtgcataaagtagttgttaagagtcagagaatctcaasaaaaattttagcagtcccacttttaggggaaaagagaaaccacagataaacatctatttactaaggtatagttaaagaaactgtgtgccactaaccaaagaaccaatcaataggtaataaaataaaatagaaaacctaggatcaagcctacatctaaagaggacactggtgtgtaatacaggtgtcacatattagtggggtaaagaatggatttctgaagaaatgatattggaaaaataggttcactgtactgaaaatcataaaaacaaaattatacctttatttccc

SEQ ID NO: 478788 - DNA, 572 bp, Homo sapiens
ctggaagtgtcttttgctgtggtctcgatttggggtactttctgaagtatttaaggaaggacagaaacagaacaagccttgagatggtgaacaccatcaagaactttgtgaatactttcaatcaattttaaaagcctgtttttgtatcagtcagtggcccatccttyggaataggtgcatccacactgcctctttgtgatttcttctgagctaatgaaaagccttggtttcaaaccccttatatgacatctggacagagtccagatggctgttgtgttactttagttcctacttgaactttgcatcatccagcctccttaattattgtggccatgagacattacttcatcccttgattgatcccaggccaaggtctcaggccaagctgtcacttcagctccttcttggtccagggccaagttccaaggctgagccttgtagcttctacaaatcatcacttcagctccagatgaatccaaggccaagtttcagggccaagccaaataacgcctactccaagaacactaagcacatttctttacttctctgcccttagaaaccgtaaagcacag

SEQ ID NO: 478789 - DNA, 572 bp, Homo sapiens
ctggaagtgtcttttgctgtggtctcgatttggggtactttctgaagtatttaaggaaggacagaaacagaacaagccttgagatggtgaacaccatcaagaactttgtgaatactttcaatcaattttaaaagcctgtttttgtatcagtcagtggcccatcctttggaataggtgcatccacactgcctctttgtgatttcttctgagctaatgaaaagccttggtttcaaaccccttatatgacatctggacagagtccagatggctgttgtgttactttagttcctacttgaactttgcatcatccagcctccttaattattgtggccatgagacattacttcatcccttgattgatcccaggccaaggtctcaggccaagctgtcacttcagctccttcttggtccagggccaagttccaaggctgagccttgtagcttctacaaatcatcacttcagctccagatgaatccaaggccaagtttcagggccaagccaaatracgcctactccaagaacactaagcacatttctttacttctctgcccttagaaaccgtaaagcacag

SEQ ID NO: 478790 - DNA, 586 bp, Homo sapiens
ctggaagtgtcttttgctgtggtctcgatttggggtactttctgaagtatttaaggaaggacagaaacagaacaagccttgagatggtgaacaccatcaagaactttgtgaatactttcaatcaattttaaaagcctgtttttgtatcagtcagtggcccatcctttggaataggtgcatccacactgcctctttgtgatttcttctgagctaatgaaaagccttggtttcaaaccccttatatgacatctggacagagtccagatggctgttgtgttactttagttcctacttgaactttgcatcatccagcctccttaattattgtggccatgagacattacttcatcccttgattgatcccaggccaaggtctcaggccaagctgtcacttcagctccttcttggtccagggccaagttccaaggctgagccttgtagcttctacaaatcatcacttcagctccagatgaatccaaggccaagtttcagggccaagccaaataacrcctactccaagaacactaagcacatttctttacttctctgcccttagaaaccgtaaagcacagcctcatagtaggta

SEQ ID NO: 478791 - DNA, 572 bp, Homo sapiens
ctggaagtgtcttttgctgtggtctcgatttggggtactttctgaagtatttaaggaaggacagaaacagaacaagccttgagatggtgaacaccatcaagaactttgtgaatactttcaatcaattttaaaagcctgtttttgtatcagtcagtggcccatcctttggaataggtgcatccacactgcctctttgtgatttcttctgagctaatgaaaagccttggtttcaaaccccttatatgacatctggacagagtccagatggctgttgtgttactttagttcctacttgaactttgcatcatccagcctccttaattattgtggccatgagacattacttcatcccttgattgatcccaggccaaggtctcaggccaagctgtcacttcagctccttcttggtccagggccaagttccaaggctgagccttgtagcttctacaaatcatcacttcagctccagatgaatccaaggccaagtttcagggccaagccaaataacgcctactccaagaacactaascacatttctttacttctctgcccttagaaaccgtaaagcacag

SEQ ID NO: 478792 - DNA, 563 bp, Homo sapiens
acaaagggcacagaggggatgccatatgtggcatcagaggcctctgcttcctttgggaaggcattgggaggcttcaagtgggggaatagttaatcagatttatactgtaagtcaaactctgtgccttccacaggaggataggctgacggagataaaatgagacaagcaaggaagctgttgccattgtctggmgaaaaagatggaagaaggcacagaattgagctagcatgagaaaaatctgtccttggacagtgatgggctgtagggtcaataatgaagtaagactttcatccatgtctctggatccagaaacttcatgtttactgggataggaagcacaaaaaaacaaggcaagattcattatgagtacaagaaatcccaagaacattcttaaaagagaaagggaagaggagaagaagaaagaagcctaactcctgagcacgttaacaagcaccatctcattgaattctcccaatgagcccatgtggttggcattatatcccttttttttacagatgtaaaaagtaaacttcaggaaagttaagtaatttgtccaagggcac

SEQ ID NO: 478793 - DNA, 563 bp, Homo sapiens
acaaagggcacagaggggatgccatatgtggcatcagaggcctctgcttcctttgggaaggcattgggaggcttcaagtgggggaatagttaatcagatttatactgtaagtcaaactctgtgccttccacaggaggataggctgacggagataaaatgagacaagcaaggaagctgttgccattgtctggcgaaaaagatggaagaaggcacagaattgagctagcatgagaaaaatctgtccttggacagtgatgggctgtagggtcaataatgaagtaagactttcatccatgtctctggatccagaaacttcatgtttactgggataggaagcacaaaaaaacaaggcaagattcattatgagtacaagaaatcccaagaacattsttaaaagagaaagggaagaggagaagaagaaagaagcctaactcctgagcacgttaacaagcaccatctcattgaattctcccaatgagcccatgtggttggcattatatcccttttttttacagatgtaaaaagtaaacttcaggaaagttaagtaatttgtccaagggcac

SEQ ID NO: 478794 - DNA, 618 bp, Homo sapiens
ttgcacagcttttcacaaacctgttagccatttgaatgtcttctcttgagaaatgtctgtacagtcctttgcccactttttaattagtttatttgatttttgttacacagggtaggaattccttatatattttggattgttaactctttatcatataaatggcttgcaaacatgttctcccgttctatagattgcctttgcattttgtggcttgtttcctttgctgtgcagaagcttcttagtttgatgtaggttcacttgtctatttttgcttttgttgcctatacttttggttaggaggctgcattttatgtgaatcttctcagtgaattctcagagcaaccttatgtgttaactccgtgattaggcaagcacttattccccagagtcagacagcataggagtcctttcctggtatcgcatctctgaaccttgattttctttgaaatggcatagcattactgagctgaaagacttgttctgagaattaaatgagttaaaggcacataataaacatccaacaaatatagcctatgattattatgtaccacatttcttctcaatttgcrgaaaaggccactgaggctcagaaaggttaagtaactaactcatagtcac

SEQ ID NO: 478795 - DNA, 577 bp, Homo sapiens
ttgccttttatgacttctcctggaggtcacaaagagtcacttttactctttctgctcatcgaagaagtcagaaaattctgctcagtttcaaggagactggaaatagactccattgcttgatggactggcaacattatggaactggcaatattgctgtgactgcttttggaaagatccagtgtgccacagttaatatacatgcaactctttgtagctggcacacaggaagtagatatgattgctttgttgttcaagttcttcctgcaaccagacattgcagggcgtcggyaggtagagacggtctaattctctgtcactctgcaccgtggaagacccccagggattgttcagcaagtgcttgttgaatgatgaatgggtgattttaaatattttaacttagaacctcttaaaactggctgctgatcaaaagttctgagaaggttggtttaaaatattccaaaatttaacctccaacctactgaattccccaggctgaggcctggggatgagcatttctaatgtcctcctccagtggctcagatgcaggcagtatggggaccagcatttacaaaccatt

SEQ ID NO: 478796 - DNA, 577 bp, Homo sapiens
ttgccttttatgacttctcctggaggtcacaaagagtcacttttactctttctgctcatcgaagaagtcagaaaattctgctcagtttcaaggagactggaaatagactccattgcttgatggactggcaacattatggaactggcaatattgctgtgactgcttttggaaagatccagtgtgccacagttaatatacatgcaactctttgtagctggcacacaggaagtagatatgattgctttgttgttcaagttcttcctgcaaccagacattgcagggcgtcggtaggtagagacggtctaattctctgtyactctgcaccgtggaagacccccagggattgttcagcaagtgcttgttgaatgatgaatgggtgattttaaatattttaacttagaacctcttaaaactggctgctgatcaaaagttctgagaaggttggtttaaaatattccaaaatttaacctccaacctactgaattccccaggctgaggcctggggatgagcatttctaatgtcctcctccagtggctcagatgcaggcagtatggggaccagcatttacaaaccatt

SEQ ID NO: 478797 - DNA, 577 bp, Homo sapiens
ttgccttttatgacttctcctggaggtcacaaagagtcacttttactctttctgctcatcgaagaagtcagaaaattctgctcagtttcaaggagactggaaatagactccattgcttgatggactggcaacattatggaactggcaatattgctgtgactgcttttggaaagatccagtgtgccacagttaatatacatgcaactctttgtagctggcacacaggaagtagatatgattgctttgttgttcaagttcttcctgcaaccagacattgcagggcgtcggtaggtagagacggtctaattctctgtcactctgcaccgtggaagacccccagggattgttcagcaagtgcttgttgaatgatgaatgggtgattttaaatattttaacttagaasctcttaaaactggctgctgatcaaaagttctgagaaggttggtttaaaatattccaaaatttaacctccaacctactgaattccccaggctgaggcctggggatgagcatttctaatgtcctcctccagtggctcagatgcaggcagtatggggaccagcatttacaaaccatt

SEQ ID NO: 478798 - DNA, 594 bp, Homo sapiens
gtgggggctggtttgaatgagattccaccgaggagtctcccagctcaagtatttctgggggtgttagtaactatcaacatacagttgatccttgaacaatgcagggggttggggtcctccctcaacccacccctcttgcacagttaaaaatttgcatataacttttgccacctcccccaaaacttaactgctaacagcctactattgactggaagcctttctaatggcatagtcaatgaactcgtctttttaaaatattatatatatatacatgatatactgtattatatattatatgctatattatatatgtatcrtatactatattcttacaataatataaaattatattatttattcttaccgtaaagaaaggtagagaaaggaaaatgttattaagaaaactataaggaagagaaaatatatttatgattcattaaatggaagtggatcatcgtataggtcttcatcctcatggtctttgagtcggctgaggaggaggaggaggaggaaggattgatcttgctgtctcaggggtggcagaggcagaagaaaatacgagcagcctcatgcagttcaactccatgttgttca

SEQ ID NO: 478799 - DNA, 594 bp, Homo sapiens
gtgggggctggtttgaatgagattccaccgaggagtctcccagctcaagtatttctgggggtgttagtaactatcaacatacagttgatccttgaacaatgcagggggttggggtcctccctcaacccacccctcttgcacagttaaaaatttgcatataacttttgccacctcccccaaaacttaactgctaacagcctactattgactggaagcctttctaatggcatagtcaatgaactcgtctttttaaaatattatatatatatacatgatatactgtattatatattatatgctatattatatatgtatcgtatactatattcttacaataatataaaattatattatttattcttaccgtaaagaaagrtagagaaaggaaaatgttattaagaaaactataaggaagagaaaatatatttatgattcattaaatggaagtggatcatcgtataggtcttcatcctcatggtctttgagtcggctgaggaggaggaggaggaggaaggattgatcttgctgtctcaggggtggcagaggcagaagaaaatacgagcagcctcatgcagttcaactccatgttgttca

SEQ ID NO: 478800 - DNA, 549 bp, Homo sapiens
ctcagttcagcatgactcaactgaaaacaaatcttctcttccaggcctccctgcttcacgcagagtgttagtattcttttgagtccaattcttggatcacttcacccaaggacacacaggccatatgcagttgagccaatgctccaactcaagtatgtgcaatgcccagacccctgccttctcacatgggcacctggacataattcaggacagaaaaagagaggtctgcatctccaatccmcacagccactgcccctgcagaaataagtacaaagtgggtactcacctatttcattctccccagccatttggaggggtgtcattttgcaagatccccaaactctgaagaatatagcattcctacaagcaaatgactaaggtgactttcaaactgaacactcaatactgggccctcttttcacctggcacaggtgtgtcttttgcaaaggagttaagctagctgtgctacctccccagatgtcttgaattctagctcagggctcaagctgacaaccctcacccttagcaggttctatgaacacgtgccag

SEQ ID NO: 478801 - DNA, 549 bp, Homo sapiens
ctcagttcagcatgactcaactgaaaacaaatcttctcttccaggcctccctgcttcacgcagagtgttagtattcttttgagtccaattcttggatcacttcacccaaggacacacaggccatatgcagttgagccaatgctccaactcaagtatgtgcaatgcccagacccctgccttctcacatgggcacctggacataattcaggacagaaaaagagaggtctgcatctccaatccccacagccactgccyctgcagaaataagtacaaagtgggtactcacctatttcattctccccagccatttggaggggtgtcattttgcaagatccccaaactctgaagaatatagcattcctacaagcaaatgactaaggtgactttcaaactgaacactcaatactgggccctcttttcacctggcacaggtgtgtcttttgcaaaggagttaagctagctgtgctacctccccagatgtcttgaattctagctcagggctcaagctgacaaccctcacccttagcaggttctatgaacacgtgccag

SEQ ID NO: 478802 - DNA, 667 bp, Homo sapiens
tatcaagccaggtggtgaccattctgactgcttatgcatgggttgtgctgagtgttaaataatccagtatgatccctgccaagcactatgctaagtgtctttgcctgtcttttcttcctgaatctttacagcagctctctgaggtggctactgctgttatcatcccattttacagatgaagaaactgagacccagggcagcaagattatatttgcctgaagtcacccacttagtccatggtggatggagctaatttctagctaactataattagcctgaaaaacagttcttttattcattcattgatttatgcatcagtttccttattcattcaagaaatttacactgagcatagtattcatgatctgtggccccatgacaagttacctcaaaacttagtggcttaaaacaaaaccaagcatttataaactcatttttgtgggtcaccaattcmggagtggcttagctgggtggttgtgtttcagggctgctcataaggctgcagttacaaacgtcacctaggtctatggtctcatctgaaagtttgactggggctggaggatctactgccaagacagctcactcccatggctgttggctggagacctcagttgttcacttcatggacttctccatggggctgctagagaatcctcaccacatggca

SEQ ID NO: 478803 - DNA, 604 bp, Homo sapiens
aaaagcaagaaaggagcttattcagagtattgaaggaagcatggccctcctgacaccttcattccagacttcagcccccagaattctgagataataaatttcggttgttttaagccacctagtttgtgtggtattttgtgtcagcagcccaggaaactaatacaatactcwaatgttgaaacgaaactttaggttcatttccagctcagcatttccattgtacggatgagcaaagagatgagaccctgttagaggaaagtagttgcccaaggttaccaagcaaatgtgtgcccaaactaggcccaatcccccagtctagggcttagaagataccttttttgtttgtttgtttcttgtcatcatcaggctccggtcatcctcaatgctgttatcatttatttttgctgcaagaaagaaggaggctgcggagtctgtgttttccagctccgccaggcagtctgtttttgctggctttgcatgaaaacagccaggctgttggctctgcggggtaacaggctgactcggggtgtgatgtgagttgtaagtacaatgacagacggctccgggaacagccctgggcaccgtctagcagagtgaaccagaa

SEQ ID NO: 478804 - DNA, 684 bp, Homo sapiens
ctggggctgatggaaatgcctaagcactcggactaaataaaagcaacctcctccttcctgcattagaaaaagtagaagagaaaatgaaaggaaggagaaaaaaaagaaaagagaaaaggaaacrtcacacaaaaggctgcatcctcaggcaggttcataaaaggagcccttcaaaccctgaggcccattcgtctcagttatttttctgaggttctgtgggctgtgtttccgttggctcaatctgcccatgcatttacctaatgtttattatctatacctgaaagaccaggcacagccgtcccagaacagaacttaggcctttgttactcaatgcacctgcagcaaactcttggcccggaagaggccaggctgcctgtttatccaactcctcccttcccaggccccagcccttgcttccccctccacacagccagtcaaccattaaaaaattatgcacccggccaggagtggtggctcctgcctgtaatcccagcactttgggagaccaaggtgggatcatcgcttgagcccgggaatttgcctagaccagtctaggcaacatggtgacaaccctgtctctacaaaaaagaaaaaagaaattagccaggcatggtggcatatgcttgtagccctagccacttgggaggctgaggcaggaagatcctttgagcccaggagttcaag

SEQ ID NO: 478805 - DNA, 684 bp, Homo sapiens
ctggggctgatggaaatgcctaagcactcggactaaataaaagcaacctcctccttcctgcattagaaaaagtagaagagaaaatgaaaggaaggagaaaaaaaagaaaagagaaaaggaaacatcacacaaaaggctgcatcctcaggcaggttcataaaaggagcccttcaaaccctgaggcccattcgtctcagttatttttctgaggttctgtgggctgtgtttccgttggctcaatctgcccatgcatttacctaatgtttattatctatacctgaaagaccaggcacagccgtcccagaacagaacttaggcctttgttactcaatgcacctgcagcaaactctkggcccggaagaggccaggctgcctgtttatccaactcctcccttcccaggccccagcccttgcttccccctccacacagccagtcaaccattaaaaaattatgcacccggccaggagtggtggctcctgcctgtaatcccagcactttgggagaccaaggtgggatcatcgcttgagcccgggaatttgcctagaccagtctaggcaacatggtgacaaccctgtctctacaaaaaagaaaaaagaaattagccaggcatggtggcatatgcttgtagccctagccacttgggaggctgaggcaggaagatcctttgagcccaggagttcaag

SEQ ID NO: 478806 - DNA, 684 bp, Homo sapiens
ctggggctgatggaaatgcctaagcactcggactaaataaaagcaacctcctccttcctgcattagaaaaagtagaagagaaaatgaaaggaaggagaaaaaaaagaaaagagaaaaggaaacatcacacaaaaggctgcatcctcaggcaggttcataaaaggagcccttcaaaccctgaggcccattcgtctcagttatttttctgaggttctgtgggctgtgtttccgttggctcaatctgcccatgcatttacctaatgtttattatctatacctgaaagaccaggcacagccgtcccagaacagaacttaggcctttgttactcaatgcacctgcagcaaactcttggcccggaagaggccaggctgcctgtttatccaactcctcccttcccaggccccagcccttgcttccccctccacacagccagtcaaccattaaaaaattatgcacccggccaggagtggtggctcctgcctgtaatcccagcactttgggagaccaaggtgggatcatcgcttgagcccgggaatttgcctagaccagtctaggcaacatggtgacamccctgtctctacaaaaaagaaaaaagaaattagccaggcatggtggcatatgcttgtagccctagccacttgggaggctgaggcaggaagatcctttgagcccaggagttcaag

SEQ ID NO: 478807 - DNA, 677 bp, Homo sapiens
attatttgaattttgtagacactagccagaccaaatgtcaactgtactagaggctaaagcttttctcttgggtaagctcaagatacactacatgaagccctagtttcttggagctacagcttagctaaagaaatataatgcatacagctaggcatggtagctcacacctgtaatctcagcaccttgggagactgaggcaggtggatcacttgaggtcaggaattcaagaccaccctagccaacatgttgaaactccatmtctgttaaagacacaaaaattagccaggtgtggtagtgcatgcctgtaatcccagctactcaggaggctgagacaggaggatcatctgaggctgggaggtggaggttgcagtgagctgagatagtgccactgccctccagcctgggcaagattctgtctcaaaaaaaaagaaaagtttaaaaagaagtgtagaaatataatgcatacataaatctgtattattaggacacaaaattgtcttcttttgtcaggcttaaacaagatagacatttatttttgtcacatatatcatacaaggcagtttccatcccataaggccgtgcagagacacaggctccttcagccttgttgctctgccaattctagaatgttgctcttaatgacatagtctaagattgcacataaccaccttcattcc

SEQ ID NO: 478808 - DNA, 677 bp, Homo sapiens
attatttgaattttgtagacactagccagaccaaatgtcaactgtactagaggctaaagcttttctcttgggtaagctcaagatacactacatgaagccctagtttcttggagctacagcttagctaaagaaatataatgcatacagctaggcatggtagctcacacctgtaatctcagcaccttgggagactgaggcaggtggatcacttgaggtcaggaattcaagaccaccctagccaacatgttgaaactccatctctgttaaagacacaaaaattagccaggtgtggtagtgcatgcctgtaatcccagctactcaggaggctgagacaggaggatcatctgaggctgggaggtggaggttgcagtgagctgagatagtgccactgccctccagcctgggcaagattctgtctcaaaaaaaaagaaaagtttaaaaagaagtgtagaaatataatgcatacataaatctgtattattaggacacaaaattgtcttcttttgtcaggcttaaacaagatagayatttatttttgtcacatatatcatacaaggcagtttccatcccataaggccgtgcagagacacaggctccttcagccttgttgctctgccaattctagaatgttgctcttaatgacatagtctaagattgcacataaccaccttcattcc

SEQ ID NO: 478809 - DNA, 677 bp, Homo sapiens
attatttgaattttgtagacactagccagaccaaatgtcaactgtactagaggctaaagcttttctcttgggtaagctcaagatacactacatgaagccctagtttcttggagctacagcttagctaaagaaatataatgcatacagctaggcatggtagctcacacctgtaatctcagcaccttgggagactgaggcaggtggatcacttgaggtcaggaattcaagaccaccctagccaacatgttgaaactccatctctgttaaagacacaaaaattagccaggtgtggtagtgcatgcctgtaatcccagctactcaggaggctgagacaggaggatcatctgaggctgggaggtggaggttgcagtgagctgagatagtgccactgccctccagcctgggcaagattctgtctcaaaaaaaaagaaaagtttaaaaagaagtgtagaaatataatgcatacataaatctgtattattaggacacaaaattgtcttcttttgtcaggcttaaacaagatagacatttatttttgtcacatatatcatacaaggcwgtttccatcccataaggccgtgcagagacacaggctccttcagccttgttgctctgccaattctagaatgttgctcttaatgacatagtctaagattgcacataaccaccttcattcc

SEQ ID NO: 478810 - DNA, 534 bp, Homo sapiens
ctgctggccctgagccaattgttgccatgtgtaaatgtaggtccagtgttgactaatgttttgaaagaaatcaaaaacyttgagtttcatgagaaattgatctgcgttttaaaatattcccaactattttaaaactgcaaagttttaaaagcaacctgtgagctgtctcctccctctccctaatacagccactaaatatggccgttaactatctgtgtggtcccacatttaaaatccttggagtacacagatgacatctgattttacctctttattctgtaggtataaaaaatagacctcagctttcatcttaagtcacatggtcgatggcagagctgggaccagaaccagttctgagttctgcccttcttttcttcccaatatagattctagaacagtgtgtttcagattggacaggaagtgtattctgagtaaggacaagtgaagtctcttgttctccatggagaacagtgaatcctgccctagtccttgatggtgatgtcagcaatgatgctgataaatatcaggtagaat

SEQ ID NO: 478811 - DNA, 618 bp, Homo sapiens
ccttttgacatagagagagcagaccttggactcagagacttgatagtaacatcaatataggtatattaacttcaatataattaaaagcatctagctmtcatttaattgctttgttttcccttcattatatatcaggcaggatacatgccagattatgctgacctaaaaaagtccccatagcttcaaataacagttttattttacattcacactgcttgtccatcatgggtctcaggggatttccacttactggaatcacttagggatgcccgctgatgcagggaccaccatctcaaacattgttggttcccatcgagaagataaggtaattttgatagttttcacatacctgttaaatagtgtggcctgagtaatacacagggagcttctgctcacagcctattgattagaactagtcatatggccctgcccaggcacaagcacccaggaataagagcctctcatgtgactgggaggggagaactggggatatttgataatgagcacaagcacccaccacacattgtgtatatttgctctggtcctccatcattgttttctactagattctgaaggtaggcaccttccttagggatgtgttaacctagagtacagcca

SEQ ID NO: 478812 - DNA, 618 bp, Homo sapiens
ccttttgacatagagagagcagaccttggactcagagacttgatagtaacatcaatataggtatattaacttcaatataattaaaagcatctagctctcatttaattgctttgttttcccttcattatatatcaggcaggatacatgccagattatgctgacctaaaaaagtccccatagcttcaaataacagttttattttacattcacactgcttgtccatcatgggtctcaggggatttccacttactggaatcacttagggatgcccgctgatgcagggaccaccatctcaaacattgttgkttcccatcgagaagataaggtaattttgatagttttcacatacctgttaaatagtgtggcctgagtaatacacagggagcttctgctcacagcctattgattagaactagtcatatggccctgcccaggcacaagcacccaggaataagagcctctcatgtgactgggaggggagaactggggatatttgataatgagcacaagcacccaccacacattgtgtatatttgctctggtcctccatcattgttttctactagattctgaaggtaggcaccttccttagggatgtgttaacctagagtacagcca

SEQ ID NO: 478813 - DNA, 489 bp, Homo sapiens
tgattagatgatgcctactcggagtgtgggtctgcccctcccagtctactgactcaaatgttaatctcctttgcaacaccttcacagacacacccaggaacaattctttgcatccttcagtccaatcaagttgacactcaatattaaccatcacattaatgaagtgcaggctatgtaggtatcaagcagtgggaagggaatcaagtctagggctttatgggaaaaaggtctccctgcaggagcagggcctgaaggaagagggtggttccccaggggaagaaggtgacaatctacatcgtagwcagagggaattgcaactgtgcaggattgtggtgggctttaatggacttccattaaaggaattccggatagagagctgatttgaataaatggttgctgcttttcctttggtgccttgtaagtgatatcaagttcgtagctcttgcagacatctcaattctcagtaagagctggccttccagagcagcc

SEQ ID NO: 478814 - DNA, 562 bp, Homo sapiens
tgcctactcggagtgtgggtctgcccctcccagtctactgactcaaatgttaatctcctttgcaacaccttcacagacacacccaggaacaattctttgcatccttcagtccaatcaagttgacactcaatattaaccatcacattaatgaagtgcaggctatgtaggtatcaagcagtgggaagggaatcaagtctagggctttatgggaaaaaggtctccctgcaggagcagggcctgaaggaagagggtggttccccaggggaagaaggtgacaatctacatcgtagtcagagggaattgcaactgtgcaggattgtggtgggctttaatggacttccattaaaggaattccggatagagagctgatttgaataaatggttgctgcttttcctttggtgccttgtaagtgatatcargttcgtagctcttgcagacatctcaattctcagtaagagctggccttccagagcagcctttgccttgccccttggatgtgaacttcctatggcctaagaccaattcattaagagctcagaactgctctcggtgggtggccca

SEQ ID NO: 478815 - DNA, 599 bp, Homo sapiens
aactatctggaacattttcataygtttggatgacagttttcagttgccctgggatatttttgtattcctctctctctctctctcgaaatttattgtctatttttacttcaatctttacttaacttttgcagcctgtcatcccagcaggcaggaatgcttctttgtcaggttcaaaatcacctgcctcttggggccattgtgaacttgctaaagaaaaagagaaaaagcactccaaattaactggggaggggaacccgaatactcattcaggcttcatttgctatgcagtctctgagaaactggtcaaaattattttataagtttcgagaagatcaggaaaaaaaaacatacagatggattacttcttatgtgggggttaactaaatgtacagtgatagcataaggcaatctgaacataaaataaaaagatccccaagtctcccttagactattcctgtactagagaccaatatctcatccttctataagtctaccagatgcagttttgtttccatcgttgaagatctctttctgtatttgagaaccagaaaaagtagctgactgtattgaaggggcatgttgcatgttgtatgtaaaca

SEQ ID NO: 478816 - DNA, 537 bp, Homo sapiens
aaatttttaaaaataaaaaataataataatctggcatgtgccacatataaagcaccttagcctagtgctgggcacagagtaagggctccaaccatgactgtgtcattttgcagatgtggaaactgaggttcagaggcctgaagtaactgtcctgaggttgctttccatagtggtggagttccgatgtaaacctagattgatcctgctccttacaacctcctcagagggagaaaaggggagcaaaatygtggctattaggacaaagtgttaacatcgacccccgagcctccctttccttggttagctgagaatccgggagcttgaacaaaagcagcttcggagcctcaagccctgcagatacaaggcatgtagaaacaaagccgtgtctctaagtcctggctggtgacccatcccccgaagctatccatcatcttgaacagggattttatgcaccctgtacgccaatcacctcttcaattacctctcaggaggagggagaagcccagtggtatctgatgtcccatttgatttagggta

SEQ ID NO: 478817 - DNA, 599 bp, Homo sapiens
aactatctggaacattttcatacgtttggatgacagttttcagttgccctgggatatttttgtattcctctctctctctctctcgaaatttattgtctatttttacttcaatctttacttaacttttgcagcctgtcatcccagcaggcaggaatgcttctttgtcaggttcaaaatcacctgcctcttggggccattgtgaacttgctaaagaaaaagagaaaaagcactccaaattaactggggaggggaacccgaatrctcattcaggcttcatttgctatgcagtctctgagaaactggtcaaaattattttataagtttcgagaagatcaggaaaaaaaaacatacagatggattacttcttatgtgggggttaactaaatgtacagtgatagcataaggcaatctgaacataaaataaaaagatccccaagtctcccttagactattcctgtactagagaccaatatctcatccttctataagtctaccagatgcagttttgtttccatcgttgaagatctctttctgtatttgagaaccagaaaaagtagctgactgtattgaaggggcatgttgcatgttgtatgtaaaca

SEQ ID NO: 478818 - DNA, 599 bp, Homo sapiens
aactatctggaacattttcatacgtttggatgacagttttcagttgccctgggatatttttgtattcctctctctctctctctcgaaatttattgtctatttttacttcaatctttacttaacttttgcagcctgtcatcccagcaggcaggaatgcttctttgtcaggttcaaaatcacctgcctcttggggccattgtgaacttgctaaagaaaaagagaaaaagcactccaaattaactggggaggggaacccgaatactcattcaggcttcatttgctatgcagtctctgagaaactggtcaaaattattttataagtttcgagaagatcaggaaaaaaaamcatacagatggattacttcttatgtgggggttaactaaatgtacagtgatagcataaggcaatctgaacataaaataaaaagatccccaagtctcccttagactattcctgtactagagaccaatatctcatccttctataagtctaccagatgcagttttgtttccatcgttgaagatctctttctgtatttgagaaccagaaaaagtagctgactgtattgaaggggcatgttgcatgttgtatgtaaaca

SEQ ID NO: 478819 - DNA, 599 bp, Homo sapiens
aactatctggaacattttcatacgtttggatgacagttttcagttgccctgggatatttttgtattcctctctctctctctctcgaaatttattgtctatttttacttcaatctttacttaacttttgcagcctgtcatcccagcaggcaggaatgcttctttgtcaggttcaaaatcacctgcctcttggggccattgtgaacttgctaaagaaaaagagaaaaagcactccaaattaactggggaggggaacccgaatactcattcaggcttcatttgctatgcagtctctgagaaactggtcaaaattattttataagtttcgagaagatcaggaaaaaaaaacatacagatggattacttcttatgtgggggttaactaaatgtacagtgatagcataaggcaatctgaacataaaataaaaagatccccaagtctcccttagactattcctgtactagagaccaatatctcatccttctataagtctaccagatgcagttttgtttccatcrttgaagatctctttctgtatttgagaaccagaaaaagtagctgactgtattgaaggggcatgttgcatgttgtatgtaaaca

SEQ ID NO: 478820 - DNA, 561 bp, Homo sapiens
tcatcgttctgtggaattcttttccccctttaatgtgcacagttttgggatgaattttgctcctctgtcagtttcctctggatgttttattgtagggaggacttatggactctgcaaccaaacataaatggccaagtcctaattctgtagttccttggttctagcagcatgtgcctcgaaaggtgcctggcatgcagtaggtgccccacaaacatttgctggatgaattgccgcctggggaccccagggtagtcataatattctggaagatctgtcttttcactcctcttgtttgcagaagaaaaaagtgtcaatctgtctttctgcattggcaggtctgtcagggtagaaatacatcagggttctagataattcatgtttgaggaacatctgctagatatgtcattccagtggcattttacaggtcagktccttgaaatatttaaaaaaaccaggagacaagcacatcacacccatttttcgctcccacaagaacaggctatgaaatgattctactttgacccctaattcatttccgtggggattctgcttattagttgc

SEQ ID NO: 478821 - DNA, 600 bp, Homo sapiens
gtttttaaacaaggttcctgtgatgagtgtcttctgatttcttctgctgtctccccgcgccacaggtcagagacctgtgccctgttgaacctagaggctcctacaatagytcctggtatttagctgaagtagggtgttcctctctgtctggggcagatggttgtatttctagtccagaacctgctataatttactctgtcctcccacactaatagcgattcttctatctgccagcttggcttctatagccttctgcaatctggacccgctccacccagttcatctctttcttctctacatgtagaacacaccctcatggccaacaggtgtcctgggctcaccccatttccgccacagaaatatcctccctgctctcctcatatgcaaatcattcttcaaggcactgctcaaggtctttctgcccccaaagcctgcccatgtacaggccaatggattgctttccaaatctctttacatttatgttcccaatttacctaagttagccctcaacaggtttctgtatatatctccaagtgtagtgcaggctccttgagggcaggcacacaagtgttcattcattcactggaggcttttagcaac

SEQ ID NO: 478822 - DNA, 645 bp, Homo sapiens
atagtttttaaacaaggttcctgtgatgagtgtcttctgatttcttctgctgtctccccgcgccacaggtcagagacctgtgccctgttgaacctagaggctcctacaatagttcctggtatttagctgaagtagggtgttcctctctgtctggggcagatggttgtatttctagtccagaacctgctataatttactctgtcctcccacactaatagcgattcttctatctgccagcttggcttctatagccttctgcaatctggacccgctccacccagttcatctctttcttctctacatgtagaacacaccctcatggccaacaggtgtcctgggctcaccccatttccgccacagaaatatcctccctgctctcctcatatgcaaatcattcttcaaggcactgctcaaggtctttctgcccccaaagcctgcccatgtacaggccaatggwttgctttccaaatctctttacatttatgttcccaatttacctaagttagccctcaacaggtttctgtatatatctccaagtgtagtgcaggctccttgagggcaggcacacaagtgttcattcattcactggaggcttttagcaacaccttataaagcgagaaagaaggagaaatataaactatggtt

SEQ ID NO: 478823 - DNA, 620 bp, Homo sapiens
caaagagatctctttcctccccgtcattctgctgatggtcattttgtccttggctacaacgtcccactgggcccgagacactgcaaggattttatgagatttcttygcttcaagcgtaagtacgagtacaagcctcctaaattccaccggaaaattggtggctaatccaaacatttcataaaattagaactcattgtggggctgaatggaattcagactgtgccgccaccagagaaatgcaaaatattcgttataattttttccttcatgagctgttttaagaagcaagtgctttttctgcttgaagcaaaggggttgggggaaaggaagagtttttgtttttgttttgttttctctgcggtttgcaaaaagcatcaccagatgaaaaagtaaggaatcctgcctgattccctaatccctcaactagcaggaataataataaaccatcccaatctcaactgttcttgcctttataaagacagtatttttcctggaaaatgggattttttcctggaaaatttgatttttgctccttaattttttcttaggcttcagccctagaatttttatatcctgggatctcattagcagaggagatattgcagtcattcatgcatgca

SEQ ID NO: 478824 - DNA, 614 bp, Homo sapiens
tactgaagtccaggtggagaagagctgcggaagggagtggaaggggaaacccagtatccacttgcccccatgggacttgtctttgggtcccacatatcccctttggtgccttttgctgcagtttcctacccctctttcttccctcycttcccttttctctcctttctgggtctggctaagtaagtatctccttcttgcctgccaggatgtgataaattcttagtaccccggtgagaatcactccctcccattttcaaaggaatgaactggaagagaaagtcccccgaaagacctcctagaggatcacccctgggtctctgactgagaacctgaatctaacctggggcaagcagaccccagacccacctccataacctggtgaatggcacttttttttttttaactaggaagtgttacccaactatttgctagttcttcatgaaaatgaattgttgggaactcactacagcgtggcaaagtggctgtggccagactgcctctctaggttcctcctctctgggaaaggcatctctgaaagaaaggcagcagccccagtcaggggcttatagataaaactcccatctccctgggacagagcacctgggggaatgggc

SEQ ID NO: 478825 - DNA, 619 bp, Homo sapiens
acaggacaatgtattatacacactgcagtatatgcttgagggacaggtacagcctcctaactggcctccctgtctctagcctggctcccattcagggaatcaatcctccatgggtgaccatcgttctctttckcaaaagtaaatctgcctgtgtcccctccctgcgaaatccctaggctctccccttggcctcaggagcagcctggctctgggtcgtggccaagaaggagctttccgattgctctgtcttcctgccctccagcctcctcttctgtgaactctgtttgtagccgccctgattagcataactacccctcatgtggcccctggttctgtcactcttggtgcctttgcacgttccctggatccttcaacccaaaccacaggctgaatttgggagctcctcccacgagagcccacactccaggcttcttgtcttcaaagtgctcctctgtctgtatcatgaccgcttgcttctggtgtgttccacatgagaataaggctctgtctttcatctctgcatccacagagatcattgtgcttggcccacatcaataataacagaaataactaaaatttattgagcatttactatgtgccagacactgctctaaaggtt

SEQ ID NO: 478826 - DNA, 511 bp, Homo sapiens
tttgagaacatactgacttctgaactggacactgcatttgtcctgatggtcagtaactcagagagaaaaagagagggtgaggtgtagtggacgttttcttcgtcrtacccctctgactgggttcacagagggaggacctaaaacctcagaggcagagggttgaattgcccttccccgtcttcaggatgtgtttggtcaagggattgattccacctactgtcatttattataaactgggtgctgagctgcatttgctcagcggagatgagatgaaagatgaagtcttcctctttgagaggctcccagccaaacaggggacacagacatgtaaatggcaccataatcacatgcagggtgacctgtgcagcggtcaagggaccacatgaggactgctgggtcctggacatgtgttgttgcctgcccagcatccagtcctccttcatttggtgaccacttctctgttttctgttagggaatcaccccttccccactctcagtccatttggctttg

SEQ ID NO: 478827 - DNA, 625 bp, Homo sapiens
tcacagttgattatctcaaggttacattggaggttcatgttctttcaaacccaggaagcctagctccaaattctctcttttctttttytttttttttttttttgacacagagactcgttctgttgcctaggctggagtgcaattgtgcaatcttctctcactgcaacctccgcctcccgggttcaagcgattctcctgcctcagcctactgagtagttgggattactggtgtgcgccactgtgcccagccaattttgtatttttagtagagacagggttttgccatgttgttcaggctggtcttgaactcctaacctcaaataatccacccacctcggcctctcaaagtgctgggatttacaggaatgagccaccactcccgcttccctttttgatgtatagattggacggtccacttcccttccatgatcctgtagaagactgggacatgagtgacctctggcagttggggtgaaccactcgtgagctgagcccagttcatagtgaaatggcagcagccagcaaggcttcgtttgaacctgctgcaatcaagcacctttgtggcccgtgagcctgacacagacaaaagtgaatggggtcccgctggagataactaagagaagca

SEQ ID NO: 478828 - DNA, 577 bp, Homo sapiens
  misc_feature (1)...(577): n = A,T,C or G
cttgggttttacttctccagggtaccatttgcctgggcctctgttcattaggagggggctgcagaaggaaagaaaaagcaagaggctagggagcagctcctcactgtcctgaatccagcagtctttccactgagcctgggggactcagccatggagggtgagctaggaagagggagacccccgcatcttaagtgtcccagaaaagagaagaccttgagctgaagtgagctacacacaacactgatctctcaggatttgtcagcatttaaggggtgtgtgtgtgtgtgtgtgtgtgtgtgtgtgtgygcgcgcgcccccgtngantactctttctcccagccataaattctaaacaataatatgtatacccccaacactaatagtttctttctcaacctcccctcctctaccctcccctcccctcctctcctgtcctcttctttctctccattcttctttttccatctccactggcttccaccaacccaccctcccttctccttgcacaagtctctcccccttttattatcactatatcttgggctgcgttttcacagcacatggtcttgaaaagtgc

SEQ ID NO: 478829 - DNA, 577 bp, Homo sapiens
  misc_feature (1)...(577): n = A,T,C or G
cttgggttttacttctccagggtaccatttgcctgggcctctgttcattaggagggggctgcagaaggaaagaaaaagcaagaggctagggagcagctcctcactgtcctgaatccagcagtctttccactgagcctgggggactcagccatggagggtgagctaggaagagggagacccccgcatcttaagtgtcccagaaaagagaagaccttgagctgaagtgagctacacacaacactgatctctcaggatttgtcagcatttaaggggtgtgtgtgtgtgtgtgtgtgtgtgtgtgtgtgcgcgcgcgcccccgtngantactctttctcccagccataaattctaaacaataatatgtatacccccaacactaatagtttctttctcaacctcccctcctctaccctcccctcccctcctctcctgtcctctyctttctctccattcttctttttccatctccactggcttccaccaacccaccctcccttctccttgcacaagtctctcccccttttattatcactatatcttgggctgcgttttcacagcacatggtcttgaaaagtgc

SEQ ID NO: 478830 - DNA, 568 bp, Homo sapiens
gacttggacctggtgggccccagcatcttcttttgaaacccatctcagatgtttggcccacatttacacctttgccagtgttacctgacaacagcgctggagttgtgttgaaagaccttggaaaacaatagatgattctcaagccagagacaatctagcactttaaagaaaccatgaacactatatgtactttatcacaaagtggccttttagaaaacrtcacgtatttatttgtagttaatgctttctctgaatttaataaaaatattcctaatgcttttagaaattgcaggtgtcaagaggaagtgtttgctatatcatctgatttattccttctgatttgacttaatttaagctaggaatatttgatttatcttttaccttaatttacaaagatacagacagacaaaaatactagtagctatatgttagctttctatttccttctgtgatttccaagcacatttaagctagagattgtggtttgtcaagagagtttttttttttttaatgaagaataaaaaaatactagtagtgccttctctgcatagtgtggaaagttgatctg

SEQ ID NO: 478831 - DNA, 568 bp, Homo sapiens
gacttggacctggtgggccccagcatcttcttttgaaacccatctcagatgtttggcccacatttacacctttgccagtgttacctgacaacagcgctggagttgtgttgaaagaccttggaaaacaatagatgattctcaagccagagacaatctagcactttaaagaaaccatgaacactatatgtactttatcacaaagtggccttttagaaaacatcacgtatttatttgtagttaatgctttctctgaatttaataaaaatattcctaatgcttttagaaattgcaggtgtcaagaggaagtgtttgctatatcatctgatttattccttctgatttgacttaatttaagctaggaayatttgatttatcttttaccttaatttacaaagatacagacagacaaaaatactagtagctatatgttagctttctatttccttctgtgatttccaagcacatttaagctagagattgtggtttgtcaagagagtttttttttttttaatgaagaataaaaaaatactagtagtgccttctctgcatagtgtggaaagttgatctg

SEQ ID NO: 478832 - DNA, 415 bp, Homo sapiens
ctgcttggcaactccagtctcagctaaatggcctggcattttcagtctttctttgaatctgatattgyctgtgttagcgtctcttgtgttaccagaggctttttcgtgctccgggttatgtgtagactgtgaagtaacccatccacacccacattccctggcatcacttcatccacaggccctccttgggctgggactagggagatacccattggaagcaaactttccatttaccaggggtaaattaattcaagtcactgagccccctcaaggaagcctgtgtttaattcctctgtgtataaatggaaggttcattaattttcatcagtcatctagtatgtaatataactgcttcctgtttaagctacagaacaataggtgtcgtcagggccacatttaccctgctttaaggtga

SEQ ID NO: 478833 - DNA, 415 bp, Homo sapiens
ctgcttggcaactccagtctcagctaaatggcctggcattttcagtctttctttgaatctgatattgtctgtgttagcgtctcttgtgttaccagaggctttttcrtgctccgggttatgtgtagactgtgaagtaacccatccacacccacattccctggcatcacttcatccacaggccctccttgggctgggactagggagatacccattggaagcaaactttccatttaccaggggtaaattaattcaagtcactgagccccctcaaggaagcctgtgtttaattcctctgtgtataaatggaaggttcattaattttcatcagtcatctagtatgtaatataactgcttcctgtttaagctacagaacaataggtgtcgtcagggccacatttaccctgctttaaggtga

SEQ ID NO: 478834 - DNA, 547 bp, Homo sapiens
atttttacaaatcagcagatacatttttaccctacttttactgtaaccgtataagtaacttaagggctacagaaagctttagatggttgaatakttagccttattagtagtaagagcctggactttggagcagacaagctggttccaaattctggttctgtcgcttagtacctacataactcagataaatacctcaaactttctttgcccaagttatctcatctgtaaaacaggagtgataaacacacatccttcatagagttattgtgagaataaaattagtaaatatatgtgaaacacaacaatagtctctggtacctaaaacatgctccaaaaagttatacttatcatcagcattttctgccaattgtgtcacttggttgaaaggaggttttatttgcaaaagtttcaaaatatgaaaagtaaaaatattaattgaattcctactatgtgtcaaacacaatgctgtaggctttcacattttcatataaatgtcaacaatgttaaatcaattgcactgcacaatttcacatacttttttatcaga

SEQ ID NO: 478835 - DNA, 547 bp, Homo sapiens
atttttacaaatcagcagatacatttttaccctacttttactgtaaccgtataagtaacttaagggctacagaaagctttagatggttgaatatttagccttattagtagtaagagcctggactttggagcagacaagctggttccaaattctggttctgtcgcttagtacctacataactcagataaatayctcaaactttctttgcccaagttatctcatctgtaaaacaggagtgataaacacacatccttcatagagttattgtgagaataaaattagtaaatatatgtgaaacacaacaatagtctctggtacctaaaacatgctccaaaaagttatacttatcatcagcattttctgccaattgtgtcacttggttgaaaggaggttttatttgcaaaagtttcaaaatatgaaaagtaaaaatattaattgaattcctactatgtgtcaaacacaatgctgtaggctttcacattttcatataaatgtcaacaatgttaaatcaattgcactgcacaatttcacatacttttttatcaga

SEQ ID NO: 478836 - DNA, 547 bp, Homo sapiens
atttttacaaatcagcagatacatttttaccctacttttactgtaaccgtataagtaacttaagggctacagaaagctttagatggttgaatatttagccttattagtagtaagagcctggactttggagcagacaagctggttccaaattctggttctgtcgcttagtacctacataactcagataaatacctcaaactttctttgcccaagttatctcatctgtaaaacaggagtgataaacacacatccttcatagagttattgtgagaataaaattagtaaatatatgtgaaacacaacaatagyctctggtacctaaaacatgctccaaaaagttatacttatcatcagcattttctgccaattgtgtcacttggttgaaaggaggttttatttgcaaaagtttcaaaatatgaaaagtaaaaatattaattgaattcctactatgtgtcaaacacaatgctgtaggctttcacattttcatataaatgtcaacaatgttaaatcaattgcactgcacaatttcacatacttttttatcaga

SEQ ID NO: 478837 - DNA, 565 bp, Homo sapiens
aggaaaaatacagagcaaatcaaagcaggtaaatttatgaaaaagtttttaatctacatcaaaagagtgcaagtggtcaatgaccatttgatgacagtttgttgcattctgactaacaaagaactctttcatgtagaacaaattgtaagaggacaatcaaataaccatagctgtaagaatacaaaagaactgaccagttgtaaaaacatcatacattgaaataaatttgatagatgatgcttaaagaaatgtccctttactcagaaagccccaacctctgagtcattgccaaggtcccagagctctgtctgttgatkcaggggcagagaggagggctaacaacacactttcaatgttttgctttctaggtctgttgaaaacttgcctcgtaaatgatttgcatatacaagaactcggaaaaagcatcctgttttgttgagaggtgcaccaagtgactttttcatcattggtttcataacgaggtctggttagcagtcatttccaatttttcttttcggttggaccattgtcaatggagtctataaaatgagatatgttagaactt

SEQ ID NO: 478838 - DNA, 644 bp, Homo sapiens
tacttaaatatttgattttaagtcattatgtcttctccggatagaggtaagaatttgttctcattatataatcaattgtggttaataagttctttagattcagaatcagaaatgtttacagttctgtctgggtatacttaatgtttcatttttaagtatttgtttgcataatgggataagcagttgtcagattatattctggcatttcctgtactatgtggtgaacacatacatatcctgcaatagtcctttttttttttttttttttttgagatgaagtctcactctgtcgcccgggctggagtgcagtggcrtgatctcggctcactgcaacctctgcctcccaggttcaagagcttctcctgcctctcagcctcccgagtagctgggactacaagtgtgcaccagcatgcccagctaatttttgtattttttttttagtagagacggggtttcaccatattggccaggctggtcttgaactcccaacctcgtgatccacccgcctcagcctcccgaagtgctggaatgacaggcatgagccaccgtgcccggccaatagtcccatttttatgcaagccccaagcccagttatactaaaagtaggtacgataagttgatataacactcaacaggctaatgca

SEQ ID NO: 478839 - DNA, 426 bp, Homo sapiens
tgccaggagggtcaggctcagaggggtggcattcctaggcagccagcacagagccttctcccaaggcacaagaactgaacaccatcggggtgggcatggtggttgtgctgctggccgagttcccaaactgggtycccctcccccttcctgccccaggtccccgaagcgtggccccagctccaccgtccaggggcccctgcactccatgtgaaagcactgcaccttccagggaccagctccacctcggtacccctctctgcctgcctctctgtgcctgatcacgcttctccctcaacggtgggcaacttgggccagccacatcacagcagcccccagggccctgggctctggggtcttccaggggcgggctttggggcctgcctgcctcctccctaggccctcacggcagtggtgggaggccagagc

SEQ ID NO: 478840 - DNA, 677 bp, Homo sapiens
tacaaccttggaggatgaggagatgaggatccccaataatggtgatggtttaaatggctgcctactttctaggaaggggtatggaaacaaagtaaattttacttagtgaaataaargatgtgacattccttacaccccatattacatagtaaaattcaaattggatacatatttttagaggcaagaatgaagaaactgaagttggagaaagttgagtagcttacccaaggtcattaggttgttaaagccaggactataacccagctccggattcctgacacagtattctccatcatttataactatatttgttcttaattttaacatgagatttttcaaaccatttttaacatgtaagtgcttgatattgaggctcagagagtagggcttgctagtgagtggtaaatcattcaatacttactggattaaaggtttacttgatagaaaattgtattgtggcaaagaaggcagatatattcaaaaagacctaaatagattttaatttctaaaacaagtatttatgaacaggaatttttcgtacgttattttatattagggactggttggaacaaaaagataaatcagtgtgtatcctcaaaatgtgtttaaaatatgtgcctgtgacagaacaaaacagagagtgaatagtgcacgaagactatcagttatggatcttt

SEQ ID NO: 478841 - DNA, 677 bp, Homo sapiens
tacaaccttggaggatgaggagatgaggatccccaataatggtgatggtttaaatggctgcctactttctaggaaggggtatggaaacaaagtaaattttacttagtgaaataaaggatgtgacattccttacaccccatattacatagtaaaattcaaattggatacatatttttagaggcaagaatgaagaaactgaagttggagaaagttgagtagcttacccaaggtcattaggttgttaaagccaggactatarcccagctccggattcctgacacagtattctccatcatttataactatatttgttcttaattttaacatgagatttttcaaaccatttttaacatgtaagtgcttgatattgaggctcagagagtagggcttgctagtgagtggtaaatcattcaatacttactggattaaaggtttacttgatagaaaattgtattgtggcaaagaaggcagatatattcaaaaagacctaaatagattttaatttctaaaacaagtatttatgaacaggaatttttcgtacgttattttatattagggactggttggaacaaaaagataaatcagtgtgtatcctcaaaatgtgtttaaaatatgtgcctgtgacagaacaaaacagagagtgaatagtgcacgaagactatcagttatggatcttt

SEQ ID NO: 478842 - DNA, 677 bp, Homo sapiens
tacaaccttggaggatgaggagatgaggatccccaataatggtgatggtttaaatggctgcctactttctaggaaggggtatggaaacaaagtaaattttacttagtgaaataaaggatgtgacattccttacaccccatattacatagtaaaattcaaattggatacatatttttagaggcaagaatgaagaaactgaagttggagaaagttgagtagcttacccaaggtcattaggttgttaaagccaggactataacccagctccggattcctgacacagtattctccatcatttataactatatttgttcttaattttaacatgagatttttcaaaccatttttaacatgtaagtgcttgatattgaggctcagagagtagggcttgctagtgagtggtaaatcattcaatacttactggattaaaggtttacttgatagaaaattgtattgtggcaaagaaggcagatatattcaaaaagacctaaatagattttaatttctaaaacaagtatttatgaacaggaatttttcstacgttattttatattagggactggttggaacaaaaagataaatcagtgtgtatcctcaaaatgtgtttaaaatatgtgcctgtgacagaacaaaacagagagtgaatagtgcacgaagactatcagttatggatcttt

SEQ ID NO: 478843 - DNA, 677 bp, Homo sapiens
tacaaccttggaggatgaggagatgaggatccccaataatggtgatggtttaaatggctgcctactttctaggaaggggtatggaaacaaagtaaattttacttagtgaaataaaggatgtgacattccttacaccccatattacatagtaaaattcaaattggatacatatttttagaggcaagaatgaagaaactgaagttggagaaagttgagtagcttacccaaggtcattaggttgttaaagccaggactataacccagctccggattcctgacacagtattctccatcatttataactatatttgttcttaattttaacatgagatttttcaaaccatttttaacatgtaagtgcttgatattgaggctcagagagtagggcttgctagtgagtggtaaatcattcaatacttactggattaaaggtttacttgatagaaaattgtattgtggcaaagaaggcagatatattcaaaaagacctaaatagattttaatttctaaaacaagtatttatgaacaggaatttttcgtamgttattttatattagggactggttggaacaaaaagataaatcagtgtgtatcctcaaaatgtgtttaaaatatgtgcctgtgacagaacaaaacagagagtgaatagtgcacgaagactatcagttatggatcttt

SEQ ID NO: 478844 - DNA, 675 bp, Homo sapiens
tcctcacctttatagttgagcataaaatctcacatcccaaccactgtatctctcattacttcattgctctgtaggaaaagaaagagaacattgcagaacatctaagggtattcttaattcctgtgattgtactgctaaacgtcaggacagttgagccactaccaacactaccatcatcacaatgagtgtaacagcatgtcctcagaaaacttctctggtttctcagatctctaaaacaattaatacatactatatagaaattcatgatcaggtaaattgaagcatacaagaagccactgaataaaaagaacaattgttacatactatatgaccacataaaggaaactgatgctatacttgctatactatgcaagatgtagatcctaacattggcatgggggaaagatccagcagcaatggggatctccaatgcaacatactacggtaaaaccaatgtatctggcagtttcttattatgtcttcacttccttcccaagggaggcacaagaagtaatgaggaaacctaatgctgtctcagaaaaaggaatttgttttaaaattgaatgagaaaaagtgatcatrgtatcctggcagcatggtagcatggcacagaagtgggaaaaatgaacatagagagttgattgcacaaactctgaagaaaaaagaagcatgaac

SEQ ID NO: 478845 - DNA, 568 bp, Homo sapiens
ctggcatgtgccaggtgctgtttaaagaaaaggtatcattagaaatgagtagggcttacaatttcatcattgagaattcagctttgcaattgagtaacaaaacccactaatatttgaagggtatactttctctttagggggtcattctaaacaaaakttggctcagttaatgaaaacagtgcagatcaaaatacaaaaactcagccaagtgcagtggtgcatgcctgtaatcctagctacttgggaggctgaggcagaaggatcgcttgaacccaggaacttgaggctgctgggtgctctgatggcaccactgcactccagtctgggtgacagactgagacctcatctataaaaagaaaaaatagaaaacaaaacaatatataaaatctcaaaatacggccaggcgcggtggctcacacctgtaatcccagcactttgggaggctgaggaagacggatcacctgaggtcaggagttcgagaccagcctggccaacatggtgatacctagtctctactaaaattacaaaaaaaattagctgggcacggtggtggggacctgtaatccca

SEQ ID NO: 478846 - DNA, 655 bp, Homo sapiens
ctgtgaagggactctgagctgcagactgaacctgtggtgaggacggttccattcatacctgctgtcctccagcggccagcgggacggcccgtcacactcatacccacagcctgcggtcaacgccgactgtgtgctgcatggggaattcaaagttttgctcctggcatccactcaggactgtagaggctcccaggagagacttcagaaattcccttacagcagccagagggccccgcggtccacatgtcaggacaagcactttgtttcctgtctcagggctgttccctaagccaggagggatgaggacgtcccatttccgaagtccctctgcattgactgcaggaccccaggcataatgcttcttgcttgtttccttccytttgtgagggttggtcaagacgatgaatttgcaaaatattttcatgtcagactgggggttcaaatcccactctatcactggccctgctgtgtgatccagggccagttacttaacctctctgaacccttgcactttttcatttgtaaaaacgggcatgatgatgaagaggaggaggaggatggtggtggtagtaccagctccctctaggaagctgtgaggattacgcaggtggaagatgtggatgtgcttgacgtgtggctcacagaaacagtcgtg

SEQ ID NO: 478847 - DNA, 529 bp, Homo sapiens
ctgtgaagggactctgagctgcagactgaacctgtggtgaggacggttccattcatacctgctgtcctccagcggccagcgggacggcccgtcacactcatacccacagcctgcggtcaacgccgactgtgtgctgcatggggaattcaaagttttgctcctggcatccactcaggactgtagaggctcccaggagagacttcagaaattcccttacagcagccagagggccccgcggtccacatgtcaggacaagcactttgtttcctgtctcagggctgttccctaagccaggagggatgaggacgtcccatttccgaagtccctctgcattgactgcaggaccccaggcataatgcttcttgcttgtttccttccttttgtgagggttggtcaagacgatgaatttgcaaaatattttcatgtcagactgggggttcaaatcccactctatcactggccctgctgtgtgatscagggccagttacttaacctctctgaacccttgcactttttcatttgtaaaaac

SEQ ID NO: 478848 - DNA, 605 bp, Homo sapiens
tgcatgggtgcggccaggaccccatcagagttcygcttcccctgccaggacatggactgccaggctgggcagggtgtggaggggacaggattaatctcacagtcacctccagggagcctgatgcaaacacttccatattcctttgagtcagggttgagaaacacacattgcttgtgaggagaagccaattaatggtaaggaataaataagatcgccctgcaaagcattcagcacagtgtggacttatcatccactctggaatccggatcactgacatttccagtagcaattttttatttttctgctgttcttttcaagatgatttccaagtgtagacatcaccagtctcagaagaagctgaaggcagacctctgaaatgtagttgaagatttaacttcttacagaaaatgagcccttgtggagaatcaaaagccatgggttttggaggcaaaggaccctctaagctatcatgtcatgcagggagggtgagctggttgcaccatgcagaccaactttaacccactgctggtgattagcagagcactgtgttgaaagcaatgctgaagccaggctgggattagcgggaaagtggtaggaatggctgg

SEQ ID NO: 478849 - DNA, 526 bp, Homo sapiens
tatacccatatttaaggacttttaaagtaatttggatttttaactcaaaagacratgtgtaccccttggggcatgcgtgtgttcttaggaacaccagcgtgtggtatttcctgtgtcctctcatgcatgctcagcatgtcactgttgtactcattccctggcacggaagaattgttgcacatctttaatagaagccaaagcccatgatttgatggtttcaagagcctaaaatctgtatttggagagaggaagtctactcttaactgtgagagttaagagtatcaccatcaaggcgcaaggcttcagtcttatcccggacaatcctcagggattgggtttgatgtcgggggagcattggatgccatcacgttgacactcaattgattgggtgacccaagatggtcagtttcctaaggaccagaccatagtgactgctcatgcatcggctgaaataccaaacaccctgcaccaaaagactcagcttgacattgctttgcactcaactcatgtattaccaaatctttgc

SEQ ID NO: 478850 - DNA, 526 bp, Homo sapiens
tatacccatatttaaggacttttaaagtaatttggatttttaactcaaaagacgatgtgtaccccttggggcatgcgtgtgttcttaggaacaccagcgtgtggtatttcctgtgtcctctcatgcatgctcagcatgtcactgttgtactcattccctggcacggaagaattgttgcacatctttaatagaagccaaagcccatgatttgatggtttcaagagcctaaaatctgtatttggagagaggaagtctactcttaactgtgagagttaagagtatcaccatcaaggcgcaaggcttcagtcttatcccggacaatcctcagggattgggtttgatgtcgggggagcattggatgccatcacgttgacactcaattgattgggtgacccamgatggtcagtttcctaaggaccagaccatagtgactgctcatgcatcggctgaaataccaaacaccctgcaccaaaagactcagcttgacattgctttgcactcaactcatgtattaccaaatctttgc

SEQ ID NO: 478851 - DNA, 641 bp, Homo sapiens
ctggatttggcctgcaagctaagacatagtcagctcctgctataagccagtgttggccaatagaactttccgtgatgatggaaatgtcctattgtgtgctatcgaatgccacagtgctggccacgtgtggctattgagtactttaaaggtggtcagtgaaacttaaaaactgggtttcttctattatagaatgttcattttaattaaacttttaatagmcacttgtggctaaaggctacatattggaccacacagctctcaactaagcccatggtaggaaaatctgagcctcacagcagtagatatggaggcagtgctataaagcatttaaaactataaaccacctttgcagttcagaagggggagttgcaggggtgaaagagacgatggtgcaagtgacccttctgggcccttgagacatgtcctggacccacaatttaaacccgagcaatcccacatttgcttggaagattgtggatttgtccagtccctgccatgctgacccagaagccaggtcctggcccttggtgccgagatggcccggtcttatttccagtagtcagctctggaacttgcagggctactgcacacagcctactgcatccatgccattctcaaccctccctgcagccttgtcacca

SEQ ID NO: 478852 - DNA, 697 bp, Homo sapiens
ctgcagacagtggagttctgaagccagctcacaccagctcaaaagggcccattatgggcatctctctccatctctgcttcagtgacagcatgttggttgcttaaaatccaccacaatgagtttttgcattatagaaatcagcaaactccatagatcagggcttctcccaccccagcctgtggttaaacatttaacgacacaccactcactgatttcataggaccctgggcaacttactyaacatccctgaggctaggttttcttatttacctttcagagccgtggtgatgactacataaggtaatgtgtacgtttagctttgcttcccagagaaggaaacagggcagaatgctagcaatatcatcaacccttggccccctcatgtagcctacagattttagtgttggctacatgtctcattaaatacctgttatatgacagcagaggacgctgttcatctgtgtgtctctcctgctgccaaggaagtgtcccctacaaatagctcctggcaggagataggagctatttgtgctatagtttgaatgtgtcccccaaagttcatgtgttggaaacctgacccccaatgcaacagtattgggaggtgggtcccaatgggaggtgtttgactcatggaggcactgccttcataagtggattagtgccattatcatgggaatgggttccttattaaaggatg

SEQ ID NO: 478853 - DNA, 697 bp, Homo sapiens
ctgcagacagtggagttctgaagccagctcacaccagctcaaaagggcccattatgggcatctctctccatctctgcttcagtgacagcatgttggttgcttaaaatccaccacaatgagtttttgcattatagaaatcagcaaactccatagatcagggcttctcccaccccagcctgtggttaaacatttaacgacacaccactcactgatttcataggaccctgggcaacttactcaacatccctgaggctaggttttcttatttacctttcagagccgtggtgatgactacataaggtaatgtgtacgtttagctttgcttcccagagaaggaaacagggcagaatgctagcaatatcatcawcccttggccccctcatgtagcctacagattttagtgttggctacatgtctcattaaatacctgttatatgacagcagaggacgctgttcatctgtgtgtctctcctgctgccaaggaagtgtcccctacaaatagctcctggcaggagataggagctatttgtgctatagtttgaatgtgtcccccaaagttcatgtgttggaaacctgacccccaatgcaacagtattgggaggtgggtcccaatgggaggtgtttgactcatggaggcactgccttcataagtggattagtgccattatcatgggaatgggttccttattaaaggatg

SEQ ID NO: 478854 - DNA, 495 bp, Homo sapiens
tgtgagcctttccgtgtggctgctccaggcccacagagcactcacaaaggccgcacttgcaatcccaagaagcacaaagaacagggagcacagcttctcactgagaagtgatggggtcatttcagagtactgttgcttttgtctaaaagcgtgcaagttaaagagctttattttaataaatgaagtggaaaaattgtttagtctttaagaaaggaggataaattggcytttaaaaaaagtcaagcaactgtgggacaggcctttggatttaattgcaagcgtatatttggcaaatctggtacctttgcaatcacctcccacacatttgcctgcccagtgagccaggcagggagactggggagacaggtgtgcttgtttccttcttcctgatgggaaaatgaggcctggggatggccaggaacttgcctgaggttttttccaattatcaagcagcagaaattttgagagactggcatttagtaaaggacagacgat

SEQ ID NO: 478855 - DNA, 389 bp, Homo sapiens
gttccaggaagcaggagggagggaacagagaaagggacatggtaggggagaagctaggatgaagttcactgtgaatggcagcgggagcctatggaatgcctcttgctatggtcttgctatggccatgtgcaggatgggaggttttgtcccctgctcccctcccattggccaaggcttatccccagggtgctcactccctgcactttcaagctacacttgtgtgaaggctggtgggctcctgggtgcycacagagggcccagtgagaaaagccagcaatgcagagcccttggacagaactgaggagactggcgctggtcaccattggcatctgtaacaccaagtgaggtatctttgcaaggtgagccggggcaaatgacccatgcatggg

SEQ ID NO: 478856 - DNA, 389 bp, Homo sapiens
gttccaggaagcaggagggagggaacagagaaagggacatggtaggggagaagctaggatgaagttcactgtgaatggcagcgggagcctatggaatgcctcttgctatggtcttgctatggccatgtgcaggatgggaggttttgtcccctgctcccctcccattggccaaggcttatccccagggtgctcactccctgcactttcaagctacacttgtgtgaaggctggtgggctcctgggtgcccacagagggcccagtgagaaaagccagcaatgcagagcccttggacagaactgaggagactggygctggtcaccattggcatctgtaacaccaagtgaggtatctttgcaaggtgagccggggcaaatgacccatgcatggg

SEQ ID NO: 478857 - DNA, 483 bp, Homo sapiens
cacaaccacatgccaggcttcaggttccaggcatttgctcaggcacttcttttcccatggaatgccaggccctggtcccactccacttgcagagctccagatttccccaagggttgtgctctctgtgtccatggcacttttacaaaacttcccttggggcattggtgacattctggtttgtgttcaktttatatcaatatttcatctctttctaaagatagtggtggaaaggaccactgcagtctgcaacctctcattggagtgtgtactcaggcatattcatggattaaagacagtagcacagtggaaataacaatggatttgaatcctgacttttcatcaattcattttattctatctattggtgcttacttggagtgaccttaaacaaatatggacctctttgagtctcagctccttcacttgtcaagatggaatcatgatatttatgccgcagggttgctgcaggataggcgatgacgt

SEQ ID NO: 478858 - DNA, 430 bp, Homo sapiens
cttttggaagtagaggatactttctaattggtcttcaggtactttgaccacccttggcgaacttcaagaggggtagctccctactgcctggcagaggaagttccactcctatcaaatggcctaaaagcctaccatgccctggcctctgctcccctgtcccttcctctgctctcctggggcaccagcatcctttctgtcctccaagtgccatgtgccctccttcctccatctgtgagmtgcttatacgtcagtgggagagaacgacagtatcaagtaattccagaaaggagtatgaaattacaaactgaattaaactatgaaagaaagcatataagaaagaaattggctagattgaagggttaagactagcttttttacttggtatgaggtctgaataatttaaaggcagacagaggaggagagaagagga

SEQ ID NO: 478859 - DNA, 616 bp, Homo sapiens
ctattatgaacaatggttaaatttgtgtaatccttcataccctgtccccttcctctactcctccttccaattttagctgattcattaccattcttagtgtttacctttgcattgttaaatgttcctgtacctccactacttatttattagctttgatatctttcaacttcccttccctttcttctgctgttagtagcacagtatagtgaccaggatgcctgggtttggagcctcattctacctgtgagtgaactgggaagtgctcttaaccttccgtgctcagaagcataatcttgcaggggagatgaaaatcctgccaggtggtgtcttcctgycattgaagggggagtaagcttagcagtgaagaagtttgccactttctgtgtgactgagagcaagttacttgatttcatgtgcttcagtttccttatctgtaaagcaggaataataatgatacctcatagtgttgattaaatgaaataaaacaagtatagtagtttagaattgtgtctggcccatcgtcaccatccagtagatgtttgtactgattgctggaactacatgatgctgtgcaatggaaagtgattatgacaggagatgttcacatcagagccag

SEQ ID NO: 478860 - DNA, 585 bp, Homo sapiens
taaagcagccaaaggcaaggcttaacctccattggtatttgcagaggatagcacatttaagaaagagacaaaactgtttttttctttcatgttttctccaaaagcagagaagtatgctagataataactaccttttaggtggatatttggggagattcttcatagaggagaaatcatctaattgtatttcttaacaagcacatggagcttcaaaacccaaacaatctcccctgaattgcacatgtttgttactacctttattatctttctcactgtcggttatattactaagaagttatccttagccctcactgattgcttaatgtatcttattttttattttagtacatycccttgggtttactacatgtggtgtttctttggaaagaaaaatgaaattagatgagaaatatttccccagatttcttaggtcttgttttacaaagagtatgttgtagaagaaataattctcccatacctcttattatctttcctggtcatcatagttgagctccttactctgattctttgatcttaaacacccttcaagagttctacctttgttgatatataagttagtgttag

SEQ ID NO: 478861 - DNA, 529 bp, Homo sapiens
ctgtgaagggactctgagctgcagactgaacctgtggtgaggacggttccattcatacctgctgtcctccagcggccagcgggacggcccgtcacactcatayccacagcctgcggtcaacgccgactgtgtgctgcatggggaattcaaagttttgctcctggcatccactcaggactgtagaggctcccaggagagacttcagaaattcccttacagcagccagagggccccgcggtccacatgtcaggacaagcactttgtttcctgtctcagggctgttccctaagccaggagggatgaggacgtcccatttccgaagtccctctgcattgactgcaggaccccaggcataatgcttcttgcttgtttccttccttttgtgagggttggtcaagacgatgaatttgcaaaatattttcatgtcagactgggggttcaaatcccactctatcactggccctgctgtgtgatccagggccagttacttaacctctctgaacccttgcactttttcatttgtaaaaac

SEQ ID NO: 478862 - DNA, 520 bp, Homo sapiens
tcccacagcgaggtgtgagaacaagggcacttaaamgtttctggaaggatatataagagacttagcagtgatcacctgtgggcagagagattaggagttgagagagggggtagaaaatacattttatttcagaactttctagaccatttggattttatgaccatgtgtatgtaattcttttatgttctagaagaagtactttatttaacaaaaatattttttagaataataaggatctgagctgaggcatgaacaacggaaaagaaaacgaagggcatatgcttgaaatatgctgacttctaaaatgagtgaaaacttacaagatcactgctttcggcccttccttctgctaccaggctaggttttgtggcatctctgcatccttcgatgtgggcaacagccaatcccgttgctgcccttcctgtgctcatcattcacaacatgaggccccgcattaggcaggctgcatcctgaccaactgcaataacatgggactgtgcggtcagattgtcagggtccc

SEQ ID NO: 478863 - DNA, 275 bp, Homo sapiens
acgcaccagccccagatgcgctggctctgctcgagagatcgcatcagccaaggtccaggtcagatcttgggcaaactgtcatgtcctttggaggctgagagaggagaaaagggagcagcgaaataggggcagggaggrtgaggtgcccacatgaaagggcagattccagttaagtcatccgtgaccactctaattacccaaatgttttctggagccggtaaggtttagaccacctgattgaccaaaatacagagaatattcccagatcatgatgt

SEQ ID NO: 478864 - DNA, 659 bp, Homo sapiens
acgggcaggttatgtttctaacatttgttttctcactcagtaattatttactgcatgtctactatacaacaagcctattctggaagctccgcagsaagaggagacaagataaagaccctgcacttgtggagcgtccattatggtgggggtgacagacgatagatacaaaatctacaaaaaatacagtgttcttgcttaagcattaggaagaaggacatggcaaggtacgggcacacacagcagtggcagaggagggctggtcccttggcaggaggtggcggatgatggcccgcgggccaagccagccgcagcttgtttttgtaaacaaagctttattagaacacggccatgcccattccttattgtctggcgctgcttttgtgtgttacaagggcagagttcagtcattgcaacagaaaccctgtggcctgcaagccctacaatatttgcagtcttgcctttgcaaaaagtgtttcaatccctgttgtataagacaatcagagagacttctccaaagaacaggcatttgagctgagaagtgaaggacaaagcgaagtttaaaagatgttgggaacttagtttgaaggctcttagagcaggtctctcaaggctggttaagtcaaaatgcggctgaattgagtgactaatagaaatacttt

SEQ ID NO: 478865 - DNA, 609 bp, Homo sapiens
tggggactcttgcccatggtttggtgtttgcagggttattcycggcatgctgtggggctagggtaagttatccggctcctgagccctgctggggttctcatctcaagggaattctgtggtgtgttactgtgccccacatgcaaatatcagctactctcaaatgtgttggatggatgaatagtagaaggtattttaagaagccacaggcctctttgtaaattaaacaggcatcatacatgggtgttgataatgatgaatctcacaaaatcttcagatgtttagtctctgggaacattccaggaatcctcatttaggtaacttatatgtgatgagacctatttgttcacttgaaagaaaacctgttttgaagtcagaggaatgcgaatagaggctctcacatggttggaaaaagcaatctgcaggccagttacgccccgtaaacaggaacccaggactgccctcctggccagggctgagttgcaggatggggaccccccactacctccaaccgcccgccaggatgaggagtgcttgctctcagacgtgcccctcactttaaatatacagaggccttcctaggcagcctttgattgtgtccttgtggtgacc

SEQ ID NO: 478866 - DNA, 564 bp, Homo sapiens
tgcagtctgaaaataggtgagcatagtacaataagatattttaattgagagaccatattcatataacttttattataactgtccttttttaattagtttattattattaatacttttttttttttttttgagacagagtctcgccctgtcacccaggctgaagtgcagtggcgccatctcggctcactgcaacctccacctcccgggttcaagagattttcctgtctcagccccccaagtacctgggattacaggtgcctgccaccacgcccggctaatttttgtatttttagcagagacggggtttcaccatgttggccaggctggtctcaaactcctgaccttgactgatccacccgcctcagcctcccaaartgctgggattacaggcatgagccgccgtgcctggcctattattaatactttactgtgcctaatttagaaattaaactttctcatagtgtgtaagcgtaggaaaaaacatccaaacaggaggcgtcacaatgcccatcagtgcccactgctccccagcagcggtccagggggaggcaaggacagtgccag

SEQ ID NO: 478867 - DNA, 461 bp, Homo sapiens
cccgctcggctctccaccgcgctctcctccagccgccgcccgcgccgccgccgccgcccccgccttctcgcggtgggtcacgcccccactgaaacccgagccgtttcctggacggcggcgccctctctgccaatcagcgccgcgcgcccgggccgccccgagttccgcgcggctccggacgccttcgagcagccggagacaccggcccgggaggcgagggctcggccgcgatgcggccgtagggatgcagcgacagcctccgaataaggcctggtcccgcgccccgcgccacctcctccctcctccccgggcgagcgaggctggccaacggctcgctgagygactgcgttacgttgttttatgtcaagttagaaaacaaatgaccgaaggctctaaccctgccctcccgctaaagagactttaaaatgcgcctgcttgatactgcggggagggttgccagg

SEQ ID NO: 478868 - DNA, 461 bp, Homo sapiens
cccgctcggctctccaccgcgctctcctccagccgccgcccgcgccgccgccgccgcccccgccttctcgcggtgggtcacgcccccactgaaacccgagccgtttcctggacggcggcgccctctctgccaatcagcgccgcgcgcccgggccgccccgagttccgcgcggctccggacgccttcgagcagccggagacaccggcccgggaggcgagggctcggccgcgatgcggccgtagggatgcagcgacagcctccgaataaggcctggtcccgcgccccgcgccacctcctccctcctccccgggcgagcgaggctggccaacggctcgctgagcgactgcgttacgttgttttatgtcaagttagaaaacaartgaccgaaggctctaaccctgccctcccgctaaagagactttaaaatgcgcctgcttgatactgcggggagggttgccagg

SEQ ID NO: 478869 - DNA, 517 bp, Homo sapiens
taaaaatattaataactcaccagaccacaaatgtattgatcctaaaggtcagcacctgtccctagttcatgctagcccarctgggctctctatgaagggaaagtatatcatatgagtcagtcacttcctaagaccaaaattatatctgcattcagtaaacatgggtctccttgaaaaccctcactggaaatcctaagagggttaggatatacaggaaactctaattggtactcaggattttattttgggggtgcagataaagactgagaaaaagaacgaatttgaaatagccattgcatggaagagtttacctaacacatgaaggagagggttgtgtaactataatgccccacaattctcccttcatgcagaagcataaccatttctttgcccaaaatttgaaatgaacccaaacaaaaaaatttgagattccgaaagtatcacttcactctttcgatattattcttcagttctgtatgtcaccctgtttccctgttccggccaacccctgccaaaa

SEQ ID NO: 478870 - DNA, 517 bp, Homo sapiens
taaaaatattaataactcaccagaccacaaatgtattgatcctaaaggtcagcacctgtccctagttcatgctagcccagctgggctctctatgaagggaaagtatatcatatgagtcagtcacttcctaagaccaaaattatatctgcattcagtaaacatgggtctccttgaaaaccctcactggaaatcctaagagggttaggatatacaggaaactctaattggtactcaggattttattttgggggtgcagataaagactgagaaaaagaacgaatttgaaatagccattgcatggaagagtttacctaacacatgaaggagagggttgtgtaactataatgccccacaattctcccttcatgcagaagcatarccatttctttgcccaaaatttgaaatgaacccaaacaaaaaaatttgagattccgaaagtatcacttcactctttcgatattattcttcagttctgtatgtcaccctgtttccctgttccggccaacccctgccaaaa

SEQ ID NO: 478871 - DNA, 502 bp, Homo sapiens
ctatgaatatgacattacttggaaatcagtctttacagctctaattaaggatctctagataagatcatcctagatttaggtgagtcctaaatccagacactagtgtccctataagtaaaaggagagggagattgtcccacacagacacaggggagaaggccacgtaaagaatgacatgatggtggacgcagaggttggagttaagttgccacaagccaaaaaacaccagaatcccacgagggaggccaggaatggattctctctcagatcctccagaaagaaccaaccctgccaacgccytaatttcagacttctggtcttttccaaaaccgtgagacataaaattatattgtgttaagccaccaagtttgtggaaatttgttgcagccacgtcaggaagcaaatactcaactatctcagggcgcaggaactttgaaagtttcatcacgaaatcctgcagacaaccactgaaagcagcatccagctcaacaatttaggtccc

SEQ ID NO: 478872 - DNA, 512 bp, Homo sapiens
cataggcagtggccatctctctgcattcttcttcagccccactggagtctctggtacagccacacagtgtttctctctggtcctctctctgatctcaaacttagcccccttccstcagcagagcctttttgcccagccaggaggacatgctcctccccctttccctctcccagccccaaaagggcataagcattttacttcctgttgttcatataattaaaataatctattctggggggaggttttcaaatatcaaatgatataatattgaatacactgttttgaacacccacggtatccattctattctattgtgcaccacggcagcctcacaagtcacagcccacctcatctctcccgctccaacagaatcccatcattctgtgtcctcactctaatacagcctctggagtaaagtggaaactgcccaagatggcagaaaggcctttggaaagtcacacggtgtcatcttctgcatgcacccatactttctgtgtccacttcccagagcc

SEQ ID NO: 478873 - DNA, 618 bp, Homo sapiens
ccctcccccaagacttgaggaataagaagcttcaggaggcactgagcatttccagttctagaaagtatcttccacccatgtgattccaaggtactcactggttttgcaaaccttaggagtttgtttctaagactggttcttcctagccttgccaaacaggcccaagcttctaacatagcccttgaacccattcaaccaacaagacattcactcagtgatcaacaaatgtcatctttcacacctactgtgtcccatgcaccgatctctctaaaaatacaaaaataagccatataaatcygtaagttggccgcattctataatgaaagtgtgtggggatgcagaaaataagaaagagaagaaagggagatggataaggaagaattagagaggtaagttctttttcaatacgtgggggaaataaaataaggtgagtcagtcaggaatctctttggaaatacccaggaagttctgcccacaagaataataagtgtgtttcccttcccacgccacctctaccccacttattcctggggaggttaaacaaacaatttgttttgtcttttgaaaaggggtgtagaaatctatcaccagggaaaaaaatgttaagtagcagttagc

SEQ ID NO: 478874 - DNA, 489 bp, Homo sapiens
ttgctaatgcttgtgatggaagttaaaaacatgggtgtgtgcatggatgttgaatgttgaataaaggccaggcacagcggctcatgcttgaaatcccagagctttgggaggccaagatgggaggttctcttgagcccaggagtttgcgaccagcctggataacacagtaagaccttgtctctactaaaaatcaaaaagttagcacggtgtggtggtgtgtgcccacagtctcagccactggaggggatgtgggaagtggtaatggcagaggtgggaaggcatcagattggaggcaggaggatcgcttgagcccaggagtttgaggctgtagtcagctataatcacgccactgtgmtccagcctgggcaacagaacaagaacctgtctctatcaaaaaaaaaaaaaaaaaaaaaaaggaattttgaataaagagatggtttttaagcagaaaacagactttttaagtctgttctaagggaacagagtgaa

SEQ ID NO: 478875 - DNA, 652 bp, Homo sapiens
tctacaagccaagaagagagagaggagccttcaccagaaaccaaatcttgctggacctgatcttggacttttcagcccacagaactgtgaaaaaatacatttctgttgtccaagccacccagtatgtagtattttgttacggcagcccaagctaagatacgttcacrttgcaaaagggcaaactgagacccacacagccaagtttaaaaagcagatagagggttggaattggcatcctcattaccagtttagttctctttccactgttatttagcagttaatccatggcctgctatgttgcatgggtccgttgcatattttcaaatggattgtaaaccgtcactaaggactgtatctcatgcttcctattgctcataggttcctgcacacacatacacacacatactgtacaagcacatacatacacacacacagtgctaagatcatggtggatgctggcctgtaaaccaagctgaccatctattactcactctggttaacacaaaaaaacaatcctgttgtaggcaagcccctaactcatgcattcaagtttgctctcttatattctcattgtctagtctcctgcctgaaatatctggtggcggctcctttggtttggggatctacaggttcctgctttgtccccctcgct

SEQ ID NO: 478876 - DNA, 547 bp, Homo sapiens
tgtctcctgctctcatgaggcccctaactctctctaaactgaggcaagaccaatgagattccacgtgggsggcgggtgaggggttgtttagtgccccagtgtggcctcattgtctctacattgaataacagcccaaggtaaaagggatattgtatgggcctttaagacatggcatggttccaaagccacttactggaggccacctgcagttaaggacccagaataggtttgaaaatggaggtagatgaagatgttaagcatggtccccttgcgagggctctgcttccaaaaatggagggcttattcttgaaagtggagaatgaagaaccaggcaaagggtccggccctggctttcccacacccatcccctcacaatggggagccatgggcttgtgagagacctgcttgcctgaaggaaggggcaaaagagaactgttgattacatcgttactgatgtactgggttcatctgtgctcagcgctgggccgattgagatgaacacacagtgcctggcctccagcagctttcagttgtgtgtgtacatgtg

SEQ ID NO: 478877 - DNA, 504 bp, Homo sapiens
ctcagggagaaaggaggtaccgacccagaggccacaaggccaccaggaaggagaagggaggatgggagctgcagagagtatttccccattaaatgagaagaaggtgtggggtagaagggcatttagacttggatttttcagtgtcttcaagatttgagctttggggttaaaatgctaatagcgccttatgctccactgccttgtgggactttggatcttagtatctccatgtgctctgagttcctcccatacaggtcttgcacaattattagttgaaagatcaataaacgattggagtccgtcccatggttatgcrtgtaagatctgtggacagagagcttggattcaaatcatggccctacctcctgctacttgtgtgaccttgggaaaattattaaattaattaaacttctctgtgccttgtagctttcatttgtaaggtgaggatataaatacacactaagtcataggttgctgtggggttcaaattaggtgatacgtgca

SEQ ID NO: 478878 - DNA, 632 bp, Homo sapiens
tgcataatagcctaacttctcctggctaatacaggcacccaaggagaattctttttatgccagactcacatatcttttttttctgggaagaggcagcatgataaaatggccaaagcctaggcttttgtacaataggcctggatttgaatcctgtctggccactttacaggccactttacagctcagcattcattatgggttttttttgtttgtttttgtttttgttttgtggagacagcatctcactttgccacccaggctagagtgcagtggtgtgatctcagctcactgcaacctccacctcctgggtttaagcaattctcatgcctcagcctcccaaatagctgggattacaggtgtgtaccaccatgcccactaatttttgtatttttagtagagacggggtttctccatgttggccaggctggtttcagactcctgacctcaagtgatcctcccatcttggccttccaaagtgctgggattacaggtgtcagccaccacacgtggccttatcattacctgttgaccaaaggtccctgctcctctccagttggccctaccacatgaggctcctctgagggcagtaactgcgcyctccttcacttcatcaggcctgggggtggcaaagg

SEQ ID NO: 478879 - DNA, 645 bp, Homo sapiens
ccttttatataggtccaagtgtggagtgcctgacagcttaaagaaatgacaatttccacatcatatttctcattgaacatactgtggagtctaagatggccctctctactgcatagtcagtgaggcaactcttggtggcaagccctgtcatacatctgtgttcaacttcaattatyttcttgctactattcatttgtatccaaactccattcttcgaaaatttaaccatttatttgttaggataaacattgggatttctagaattctgaaatgaggatgtatattgtgtgcattataagaatgaagatatttcaaagaaaatatttaaagtgttataataaacttccatcttaaaatctctagtaacttattttaacaatggctttcatatctttttcagttgttattttgtttagttgaaaaaaactataatatttttcttctaataaaatcaggaagtttctactactgctgaaaataaaaatattttactcgagcctaatttcccttttcaatacacaccatagacacaaaaaaagccacaaagatcattattttcttgatggcatcaatcctatttcaaaaaggaaaggagataaagggtgaaactacttctcagcattcccaaaccagtttgctttcaga

SEQ ID NO: 478880 - DNA, 662 bp, Homo sapiens
tgaggaaactcctttaaaaagcccttctgaccctcttctcccaaccccagtcctagcagtccaggcatcacataggtacgattcctttgtgcatgtcctcagctcttagattagcttccctaaacttttggctgacgacaaaagttctgaagtgtagatctgtccttcttgatttactgatggaaaaattacctttaggttctgcttttgtatcctatctgctcatttatgcactgacatggataacgccttcctggctggaccttcttctccgcttccgccatcatacacacacacacacacacacacacacacacacacacacacacacacacacacacacgttttttttgagcaggtgccgttccaccccctaatcctgggaggctctagatagtacaggaacatcctgtgctctgtcaacccattaagcactttcattggcttgcctctggacaatacaataatttattgaaacccattataacttggaacatttgattccttaaattaaatagtatcagacagcagtgactctgccacttcctagcctggaaactctggacaagttacctaacttctttagttttcggtttcctcttttacagagtagggctaatatgatagtrcctaccttaatgtgtggttgtgacaatttaaag

SEQ ID NO: 478881 - DNA, 532 bp, Homo sapiens
catctgtaaaatgctaataatgatgctaactgaacagggtcatcatggagattaaataggagaatgaatatgaaagtggttagcagatggtagcgaatatatatattaataaataggtattttataattctgtttaaatattaaggttcttattggattttttttcttactgaattacatatagcaacttattcatggtgactcattagacttccagacaatttagtagttatttaacaaagggtgtattatcgaggaatgagattttgtaaatatgtctggggagtgtcaaccatacccaacaaagaacaattacgtattgcatcaatgacaatgtcgaaataaaaatattaggaaatatawtgcaggaagtttgaggcttccttgtgtgtgagagagaagggagtgggtgaggcagaatgcctgtgaatgttatgagctgtgtgatacatagttgatagaaatctcgaaggtagaaatttgggccttagagttttagaaaaagactttatctatatataggtatgtatgt

SEQ ID NO: 478882 - DNA, 570 bp, Homo sapiens
tactaaataaatgaattagtgttttggattttgcagtggtgccttgtgagtttgattgtgtggtagcacaatctgagaactagactttggtctgtggtaggcgtactaagatgccaccctgtggcccttctggggaggctggccagcccctttcattccaatctctgtcttctgagctttgtccttgctgactatggaagacctccaaactgaaactgacagaagacagccaaacaattgcagattaatttgcagaatgtagcagagaagaggatacagtaacctcatctgtattcagagcttcaaatactgtctcatactgataacttttaaggtgtcggatttctgctcattgttattctctgtcatttcaggtgtcttctatcacatacagacttggcattatcctgattttcctcctttccttccttcaacattttacttaaagccctcttgatcagtttggcatgtttctgggaaaatgtgttttcccatagtcctttagggattcactctgcccctagccaagatyatccaaagatgtgattcaggaaaccaaactctatgcag

SEQ ID NO: 478883 - DNA, 411 bp, Homo sapiens
ggcctcgatgacggcgaagccttgcgggggcggcagcggaggaaggacaccgatgacaccagccgaagctgcactactagagaccggtagaaatgaatgaggtgccggccgctttccggcagccgcttttrtagtctggaccgcctcctacgccgcagggaacgctgggagccgctctatgacctaatcgccccgcccctcgcgcataggccgcaacgcccgctggcgttccaggatcgccgcgctttcacccctccccgcgccactctctcaggtcagggcccacccaccattggaatgcctcattctgcactctcttgacctcaccttcttctggtctttccacacctcaagcaagccaccccgccctttcccaagcccagccccgcccaccctcgccactcggagatg

SEQ ID NO: 478884 - DNA, 495 bp, Homo sapiens
tattaagttaaacttaagggcctagtttgttttgcagcatgaatgaaatgaattgcctaaaattccttcattaaatgacaagatatttacttaaaagcagggctaatatgattgttgaggtaaattactrtatctgttgaaagaggagaattctgaatcttttgcagagcacccttctgtaacctagttttcaattaaccgttttgtgaacctgtgtcaccaataattgctttaactggactaagattttttttttttttttttttttttttttttagacaaggtctcattctgttgcccaggctagagtgcagtggtgtgaacatggcttactgcaggctcaggtgattcttccaccttagcctcctgagtagctgggactacaggcacacaccaccatgccgggctatttttttttctttttttgtatatttttgtagagatggggttttgccctgttgcccagactggtctcgaactcctaggctcaaacca

SEQ ID NO: 478885 - DNA, 495 bp, Homo sapiens
tattaagttaaacttaagggcctagtttgttttgcagcatgaatgaaatgaattgcctaaaattccttcattaaatgacaagatatttacttaaaagcagggctaatatgattgttgaggtaaattactatatctgttgaaagaggagaattctgaatcttttgcagarcacccttctgtaacctagttttcaattaaccgttttgtgaacctgtgtcaccaataattgctttaactggactaagattttttttttttttttttttttttttttttagacaaggtctcattctgttgcccaggctagagtgcagtggtgtgaacatggcttactgcaggctcaggtgattcttccaccttagcctcctgagtagctgggactacaggcacacaccaccatgccgggctatttttttttctttttttgtatatttttgtagagatggggttttgccctgttgcccagactggtctcgaactcctaggctcaaacca

SEQ ID NO: 478886 - DNA, 462 bp, Homo sapiens
agaacagacgatgacacaagctgcgatgtgaatccagaagcgcygcgagagcgcggaggtcccggggaggaaggagacagagacggtcatggtggccccctggaaggagttggcgttttaccctcatagcaaggccaggactgagtgtgatgtgatccgtcttgcgtcttaagaagtagaacagtctggttgtagggtgggcatcggattggcgggggcaggaaaggatgctgagtaaccctttgctgttgttggtggtttaaactccggtgacagcagcagacatggagaaaattggatggacaggtcgagatttagagacattccagttagaaatagcagagtgaagacagttatctccttgaaactgctaaaagcaagaaaaaaaggtgaagaaaaacttacttttcataatcctaaatcgtgtgataaaaatatttgccaaatacaatacagtttgag

SEQ ID NO: 478887 - DNA, 578 bp, Homo sapiens
agaaacgtgctctgtggcccccctccagagccatttctcaggctaccttgcagcttgcggttgttaggtccstctcccagacccaggcttccctccggttttgtgagatggggagaacacactcacggtgggcttggtgggagtactgaggggctaccctccttgaagaccgggcccagggccaacacgtggatgctcctggaggctcagctcccacctctcccttcttcatccagccaaacctgccccacgttagtgttgctctgtacatccactcagcccagcacgaatattgtaggcaaacccatgcctcagtaccagcactgggaaaataaaaacacacatccactgaaagtctgaaaagaccttggcatccagacatgctgtagcgaaacagttttaagtttttatgacagcagagcctttcctcaaatgctgaacccaaagcatacaagaaccaaatcgccatggtgagagagaggcattagactgcagctattaagatcatgactccagcctgtcatctaagctacttgggaggctgatgcaggaggattgcttgagcccaggaggtggag

SEQ ID NO: 478888 - DNA, 557 bp, Homo sapiens
tatcagctggattccagaactagatcccggatttttgttgtttatgtaaaatagcattactgaggtaaatgacctggggtcttgtcttccagaaatcttgaattaaaaatactttcatctgggcgcagtggctcatgcctgttatcccagcattttgggaggccgaggtgggtggatcacctgaggtcaggagttcaagaccagcagatccaatatggtaaaaccctgtatctactaaaaatacaaaaaattagccggatgaggtggtgcgcaccaaaattgcgccactgcactccagccygggcgacagagtgagactctttgtcaaaaaaagaaaaaatatatattttctgtgttttagttcaaagcaattcttgcagtgttcaaatgctctgtgttaataccaagtggtaattcttcacattttgagtaattttatcatttctgaaataaatacagttatcactctattttgatgtaaccagggcactcaggtgccgttagagtatacactgcattttggatgaatggtccgtcatgtgcctaatctccacctt

SEQ ID NO: 478889 - DNA, 510 bp, Homo sapiens
ttcataggtacttgatactgctaaataaactaatttcccctaaactagtttataaataacttagtttataataagtttataaactaaacgcagagattcctctttcgagcaactagacatcaagggtagagaagacaaacccagaagagttaagcattcactgatktatcaaatgaatctctaaatgtcaggagctgttagaggagctggagattccaagattaataagacaccttttggctactcatcttaaagaaagagttgtgaaaatacttactattaataattattaaaagaacaggtcaggctcagtggctcacacctgtaatcccaacactttggcagggagaggcgggatcacttgagcccaggagcttgagactagcctaggcaacacagtgagacctcatctctacaaaaactagaaaaattagccaggcctggtggtgcacgcctgtagtcgtagctgctggggaggctgagcccgggaggtcaaggctggctgccgtg

SEQ ID NO: 478890 - DNA, 599 bp, Homo sapiens
accacttccttacctccctaatccatgtgactgaactcttggttagcccttatttgtatgggagggaagaagtcatcggaaaggttttggactatcaagaggatttcagcaggaagctgcaacatctccataatatgaaaaacatcttaaagtcaagtgctgggaggatccaaccttcaagaacacagtattttcctttattttccccctaaatcaccagaccattaggagaaaaaaattacttctctaccttttcataaccatcttatcaaaacatacattttaaagatgacaaatttttaagattttaactgagttcaccactcagcagttatcttaacaccactgctgctaagattttaacagcagcgtggaaaaagcaactttacagcaayatatacacaacaaaactatgtatcacacatacatgtgtatgtacatatatatatgtacacgtgtacatatcttcaccaagcttgataatgcctaaaattcaaaacgccattatcaaattaaaaaagtttttcattctacaatggaattcatgtcgaggaacatcatcaggtacaaaatggagtagctatggtaaaagcagtggc

SEQ ID NO: 478891 - DNA, 370 bp, Homo sapiens
catctataatcccagcctcccaaagtgctgggattayaggcgtgagccaccacgcctggcctaatgtagtttaggtctttgactgacctgtcccactcccctgtgaaaaaatgaaatgaatggaagacagaacagacaaatggaagaaaggaagggcaggaggcaggcaggcggatttactggcagatattcatattcacgtacaactatctactgtgaagcttcttgaagaagatgctagagcagaggttagcacacatttcctgttaagatccagacagtaaatactggctgtgggccatatggttgctgctgtaactactttattcagatgatgtcgtgtgaaagcagagatgggcaataccaaaac

SEQ ID NO: 478892 - DNA, 370 bp, Homo sapiens
catctataatcccagcctcccaaagtgctgggattacaggcgtgagccaccacgcctggcctaatgtagtttaggtctttgactgacctgtcccactcccctgtgaaaaaatgaaatgaatggaagacagaacagacaaatggaagaaaggaagggcaggaggcaggcaggcggatttactggcagatattcatattcacgtacaactatctactgtgaagcttcttgaagaagatgctagagcagaggttagcacacatttcctgttaagatccagacagtaaatrctggctgtgggccatatggttgctgctgtaactactttattcagatgatgtcgtgtgaaagcagagatgggcaataccaaaac

SEQ ID NO: 478893 - DNA, 509 bp, Homo sapiens
actctatgaagactgaagcttctgtgccatgaagtacttgaattgctgatttgttttggaaggatttgagaacagaaaatatctrtaaaagtgcttggcatatatcaggcacaaaatatcatagccaaaaattaggaggctaatgaacacattaaaaaattacgagtatgtttcaaacagaagactaaaggaagactttataagactatatggaaggaaaaatggaaggggatttgagaataaatatgaataatgggagattttataaatgtatatacagtctaataataaaaaaaatcactgaggagacagaagttagaatatgttgaaagtcattccgtccttgatctgtgcgtgctggaagttatgtggacattgaccagactgtcaaatgcgcgtttaacgtaatacccttattattgagtcctttatattttacaaataatttatattttaaaaatagagtactatagaaattaacattttattacattttaataacaaactac

SEQ ID NO: 478894 - DNA, 600 bp, Homo sapiens
acaaatgcgctcccttgtcctaactatgaccaattaggcacacagggacctatattgtcttttacatcatagtggtcaagtttttactgcgcttctcttctttaagctgaatctccttggtttcttccataggtcctcaacaasttttcccttctcaccgtacagcctgtatttctggtgacactgtgtccccagaaccctaccctgcctcctgagaagcttgactggtgaggagcagggctgacttctgcttaggcccaggaacatccagacccagcactgcctacttctggattattgggtaagacacatgaacctgtagagccagctttctgttacttacagctgaatactttcctaacggatacaggtatgtgctttgtacctagctctgtgaagactgtttactaatgccatcttaatcctggggaaaatggattaaccatccccctctcaggctgtcatctgtaaaacgaaggatctgggcctgattacctctgtggtcctttcacgtctctgatgtaagccccattggcatcaccacaatagtgctgagcgcctacactggactctataaacagtagtggcatttttcttcag

SEQ ID NO: 478895 - DNA, 600 bp, Homo sapiens
acaaatgcgctcccttgtcctaactatgaccaattaggcacacagggacctatattgtcttttacatcatagtggtcaagtttttactgcgcttctcttctttaagctgaatctccttggtttcttccataggtcctcaacaacttttcccttctcaccgtacagcctgtatttctggtgacactgtgtccccagaaccctaccctgcctcctgagaagcttgactggtgaggagcagggctgacttctgcttaggcccaggaacatccagacccagcactgcctacttctggattattgggtaagacacatgaacctgtagagccagctttctgttacttacagctgaayactttcctaacggatacaggtatgtgctttgtacctagctctgtgaagactgtttactaatgccatcttaatcctggggaaaatggattaaccatccccctctcaggctgtcatctgtaaaacgaaggatctgggcctgattacctctgtggtcctttcacgtctctgatgtaagccccattggcatcaccacaatagtgctgagcgcctacactggactctataaacagtagtggcatttttcttcag

SEQ ID NO: 478896 - DNA, 578 bp, Homo sapiens
gagatgttgcagacagaagaagggtaatttgttttattttttgtagatactaggtctcactatgttgcccaggttggtctcaaactcctaggctcaagcagtccttaatccttggcctcccaaagtgctgagattataggcatgaatgaccctgccagggcttgttttgttttaaaggattcatttctgttcattttaaaaaattaactcgcaaatttaatttgaagattcctcccatgactccagcattggcaagatccaactatccagtcccagtctttttccttcgggaaggcggcatgatttgctctttatggagctttcccttttctctcctctagttgctggttccttcagcatcttgaaaggcataaatatatccctacttatgcaacctgagggaggtcacagtcacctcatccatagttgctgatctggagtgctgtgcttagggatgggctgtggctccaacatgccctattgaagtgggttcaagcctttaaagctcccstgattcacttctaagtttggacatatccactgccagcccccacctgggatattcatatggctttcat

SEQ ID NO: 478897 - DNA, 625 bp, Homo sapiens
tgggatattcatatggctttcatctgatgactgcacctctttgtttctcctcctgtggtgtttccagcaaacctgtatctccaaatcacgtctccttaaagggtctgttattgtactgagtggggaaacatttaagacctttcctataagatttaaaataatactagaatgcttactttcaccagttttattcaacataatactggaagtcctggccagagaaattaggcaagagaaagtaataaaggggcatccaaactataaaagaaaaagtcaaattagccttwttgacagacagcatgatcttatacttagaaagacataaagacttcacaaaaaaactgttgtaactaataaattcagtaaagttgcagtatacaaaattaacatacaaaaatcagtagcatttatacataccaacagtgaacaatctaaaaaagaaatcaagtaagcaatcccatttgtaatagctacaatttacaaagaatataaaataccagaagtcctagccagagcaatctgtcaagagaaagaaataacaggcatccaaataggaagggaggaagtcaaactattccttttcacagaaaatatgattctatatctagaaaaccccacagtctct

SEQ ID NO: 478898 - DNA, 530 bp, Homo sapiens
ttgacagcttcttttgatttcagggaggcctcatatctctgctaattgaactcttaattttccaacctcttacccacatcccaaacttgactcttttttttgttactccccattcagtagatgtgaccgttatggattcggttgccagactggaaaatctggtcatccttgaactcttcctctccctcatactccatagccaatctgttactgagtctccccaattttatttcccaaaacagattatctcttgactcccttagcttctccaccagaaaacttccctccccaggtttcagccaatcatcaggtctcckccgctctactgcatcctgaatgtaaatcatctaaccgtctacccacacccactttctgccagtctgttcagtagccacaatgcagtgattcctcaagtgtctcccatcaaagtcttatccctgaagtcctgtaagggacctcattacctgtaaggtccagtaaggtcctacaaggacctgtaagggacctaccctgtaagggaccccacttcc

SEQ ID NO: 478899 - DNA, 630 bp, Homo sapiens
ctgccaggaactgaattctgccgacagccacgtgagcttagaagagggccctgagcctcagatgagaccagccctggatgacatcttaattgcagacttgagagacccagctaagctgtgcccagagccccaacccacagaaactgtgggttaataaatgatgttattttaggccgttaagtttgtcatagcttgttgtctatcaatagaaaactagtacgctggccatcagcagcagaaggaagctctgtgaggctgggagcctctgagactacccccattctgatatggctgtcaggcactttgcatatgagacatcagggagaccagaactaccaccctcctccaccatggccaggaacattcgcaacttggcccactttagaaagtgaaaatggaaccaccagaagtccacaacaagccctagaaatctaatcttctaacttaaaggcaaccacaaacttgccccttaaactgccttccagaagtctacaaaatctaaaaaacaaagcccaggaataaatgggttgagataaatktgacaaggaaagctgatctctgttttaagtttccttactaattttaacaacaaaaacagctttttgtgaagcatgattttaatgttaacaa

SEQ ID NO: 478900 - DNA, 609 bp, Homo sapiens
cagccacacctagataaatgaaactgaagccattctctgatctttgggacatccctaggtccaccaagcacacatgagaagtgtggtgcttgatcttctcagccttttccacctaactgtagaataggaggacatggcgggagccagtgagttgggcccagtactggaaacctgagaaaactttggaggctgggactcagaaaacccgaagtcagagcttagtttggcgtacattttgttcagcaaaaaacattattctgaggttgaaatttcctctttaaaatccagaggtgcaatgtagaaatggaccctttgctcataaaaagcaacatgaaattcaatgttacaagaatcagggctccacctgtcttggagccaaycaaatagtgaagacagagagaccttgtctgctgtcttctacttttttaatcacaaaaatctaatatcgctgaacaaggagctcccagcatcttagattctgtctggtgtcttatctccataaaatcctcatgttcttcattgttcaaattaactggctggagaatagatatctattatctaaacaagtgttaggcacatgtttgaggatgagggagataacattgcatg

SEQ ID NO: 478901 - DNA, 609 bp, Homo sapiens
cagccacacctagataaatgaaactgaagccattctctgatctttgggacatccctaggtccaccaagcacacatgagaagtgtggtgcttgatcttctcagccttttccacctaactgtagaataggaggacatggcgggagccagtgagttgggcccagtactggaaacctgagaaaactttggaggctgggactcagaaaacccgaagtcagagcttagtttggcgtacattttgttcagcaaaaaacattattctgaggttgaaatttcctctttaaaatccagaggtgcaatgtagaaatggaccctttgctcataaaaagcaacatgaaattcaatgttacaagaatcagggctccacctgtcttggagccaatyaaatagtgaagacagagagaccttgtctgctgtcttctacttttttaatcacaaaaatctaatatcgctgaacaaggagctcccagcatcttagattctgtctggtgtcttatctccataaaatcctcatgttcttcattgttcaaattaactggctggagaatagatatctattatctaaacaagtgttaggcacatgtttgaggatgagggagataacattgcatg

SEQ ID NO: 478902 - DNA, 645 bp, Homo sapiens
cgggtaatagtcagtggaccagaaatgaagcaggaactcctgcttccctctgctcctctccttgaacacttctggcctcagcacttagcactgtctgcacagtaagattgtgatgtattgtcccaaggggtagggacaataattcagataacttttaatcttcctgcactaaaactgcagttgtctcacaatcccattgaaaacaaaaatgaaaaaaaaaaaaagaaaaaaaattttgaagcctgaataccggtggactttgggcatggtgaatacccttaatttttccagcctcctggcaatttgaagagataatgtggataaagttcattaaataagcaaatctgctacgattgtttttattggatgcaagtgagtgtgtgtgtgtacacagttgtagaaaatgagcaggaccagcrttttggtgttgtgatctgtgcagtcacagggccctcatcttggtttactgctttaccgctgctgtgttgatattcttgataactttgaacaagaggccatccccacattttctttttgcaccaggtcctgcaaattatatagccagtcctgaaaatgagagtctccccttggttcttgggggccttctaaaccaacaagtagaagacccaggccttattattcctg

SEQ ID NO: 478903 - DNA, 568 bp, Homo sapiens
gaaccacagctgcttcccaaccccctgggcctgagctaccaggttgtcccttagagcaacaaaccttagcttactggaagaactgcatccactcatgccttggagagtgattctgtgcctcaagtcccaggtgctacaagtttcagaagacaatgtgtgcaagagtctgacctcacgaccactctgagcatctgtgytgtggatcccagtgccactgtagctgcctgtgaaccacgtcagatccaacttcaagagagatcctctcagctaagaatccccactctaaggaagacaaaaacaggagaatccctaaaatccttgctctaataacctacacagtcactgtcactaccacaaattccttcagcctagaccactgaggctctgcaggtatcactaacattgatcacaactgaaaaaacttcacagagactacaacactgcactaacaaagaagcagagccaccacactctgccatgccaggaccctcaggcccatctgcagctaaatgttttcccttataaaagccactctgtgaagtttggaaggagtgaccgtaccaccaga

SEQ ID NO: 478904 - DNA, 568 bp, Homo sapiens
gaaccacagctgcttcccaaccccctgggcctgagctaccaggttgtcccttagagcaacaaaccttagcttactggaagaactgcatccactcatgccttggagagtgattctgtgcctcaagtcccaggtgctacaagtttcagaagacaatgtgtgcaagagtctgacctcacgaccactctgagcatctgtgttrtggatcccagtgccactgtagctgcctgtgaaccacgtcagatccaacttcaagagagatcctctcagctaagaatccccactctaaggaagacaaaaacaggagaatccctaaaatccttgctctaataacctacacagtcactgtcactaccacaaattccttcagcctagaccactgaggctctgcaggtatcactaacattgatcacaactgaaaaaacttcacagagactacaacactgcactaacaaagaagcagagccaccacactctgccatgccaggaccctcaggcccatctgcagctaaatgttttcccttataaaagccactctgtgaagtttggaaggagtgaccgtaccaccaga

SEQ ID NO: 478905 - DNA, 531 bp, Homo sapiens
ctgcttcccaaccccctgggcctgagctaccaggttgtcccttagagcaacaaaccttagcttactggaagaactgcatccactcatgccttggagagtgattctgtgcctcaagtcccaggtgctacaagtttcagaagacaatgtgtgcaagagtctgacctcacgaccactctgagcatctgtgttgtggatcccagtgccactgtagctgcctgtgaaccacgtcagatccaacttcaagagagatcctctcagctaagaatccccactctaaggaagacaaaaacaggagaatccctaaaatccttgctctaataacctacacagtcactgtcactaccacaaattccttcagcctagaccactgaggctctgcagktatcactaacattgatcacaactgaaaaaacttcacagagactacaacactgcactaacaaagaagcagagccaccacactctgccatgccaggaccctcaggcccatctgcagctaaatgttttcccttataaaagccactctgtgaa

SEQ ID NO: 478906 - DNA, 695 bp, Homo sapiens
attttcctcccacttcttactgaatggtcaacaaaccatctatttcactctttttgaagaccttcttctcaaaggacacttactttcctgctctaatttagagtgaatacttcctgggcctgctccatgattgtcattccagggttactttcactgaatccccaggttaattttactgtttcttaatatctttatctttctatttcttggttacaatcttatttaacttatatatccttaggtaatttcctcaaaaagaagttaccttaaaaagataaattttcaaagactttaaacctctgaaaatgtctctctgtatgtatgtatagaatgttaaaatacattgctgtatatccacacagtggaataacaaagaataataaaaatgagcaaactgcaagaacctgacacaacacccataaatattagagcccctttcttggcttttgtggttctatgctatctagaatttcccccatctcactagctattccatctcagctcagctccttctatcataagattcctaaatattrtaactccttgcaactcagttctgtccttgatatcctccctatagtttctctcttggtattacccattcccatggttccaaatgacacttctccatgctgaccactcttaaattttacctcaacagagacttttcctttgagctccatagtaaatatcca

SEQ ID NO: 478907 - DNA, 572 bp, Homo sapiens
ctacttgtgtaccagttgtttgcttgatttgcttttctttgtagcatttgaaaaaaatgctagaattcaagagtcagaggaaacatagaaaatgatgtactttacaaaacagaaataaattttgaacagcatctgctaygtgcactcaataaaactcaataaaccatgatccctatgaataagatatgaagagaagactagttaataggcaaagagcaaagagatggggaaaaaatcctgctcatgtggcaggatttcagaatggtgaatttattactcttttccttctcttcactctttacatcccactgaaattaccaaagaaataaaaaatagattcaaaagtctgtagcagtcatggaaaacaagtcagggcattctcaatgcagcagacgggtataggaatttcaggaagatataaagcagatggggccagattgacaatcaatggctgaaggcttgactctcatgtcaaaggttgatccttgtcaggggaggagtggatggctgtccctagtagagcagcagaaggccgccagggtcagagtgtcaggccaaggggaccctggatc

SEQ ID NO: 478908 - DNA, 599 bp, Homo sapiens
catggcctgcagagccagtctctttattaccaacgccccattgggcctgttcgcggaggcgggctgagcagccacagggagatgtgggccctgtctatgtcagggctggcccagggtggggatctcgggtctgtctgcaagacactcagggctggcccatggtgggaatctggggtcttgatgcgctggctctgtgtggccccaggggctcagccaagcgaacagacccacaaggacatgctttcaaacaggcactcaatgaaatgtgccacccaccacggaagtgagggtcagtggcgatatgtgagcaggagccaggcagcccctggagaggctggggaggggattcaagcagaagatggaagtcccggactccatcctttcagccctaccactgagagctcagtgacagggttaatgtcctatgggmccagttaggttcccagtgagcaccagggtgtcccctcccctcccctcctctttcctttagacgagccacacacatctccagggctgtagcacgtgccctcacccttgccaaagctcaggagccttcaggacaaggcacacaggcacacattgcctcagagctcctggcc

SEQ ID NO: 478909 - DNA, 578 bp, Homo sapiens
tggagccaagagcaacagcccaggacatcccagtgaagatgtccaactggcaagattggccctcaggagatagttaaaggctgaaaatagtaactgggacttgatttcccctgcagtcttccacagtcgcgttatgccactcccagtatgcttgctgtccctgtcaaccaagcccacaactaggttatgcaaatgagcataatttagggcgagctctttcggagatgctaagccaaggatgccagccatcttggscagcactccaccagggccacgtgtgcacctcggcccttgcattgggagggcacttgacctgcatctcttctgtagctggccttatgatgtactttcggtacctggagagaaaaacatttaccctaggcttctggggctcaggctatctattaggtcctgccagcccctaagggttgactgcataggacatcttgaacagaggaacacaggaggccagttttccatctgctccgccaggctgggagggctgccttgtgactcagtagctgaactaccgcaagggcccctttccttgcctcccccacaaccctccagggaagagc

SEQ ID NO: 478910 - DNA, 527 bp, Homo sapiens
actgtgcaggtgacacaaatctggaaagaacagcaaatttgggataacaatgttcaaaaacatcttggcgggctccagtgatgggctgtggcaaaatctgggcagctccacgggggtgagacctagtggattatgagtcttctggttacctgtctgtcttcctaggatgctgtgagctttgtgagaacaagaacagtgtctgcaggacacaaggagtgtcatctgaaaaggaccccaacaacttgctctgggtctcagctctgggggtttccccaataaaacctgatccctaacccatactgtatgatgtgcagaaatttatcccaagccctggtaactcaacaggtggtcatcacaatagtgacrtcttcttcttcgtatccatttatcaaaccaactgtcatgccagcccatggacaacagaaggcacagaccccttggatgatgggcaccttcactaaacagagtcagctcagatttccaaatacaagtattaagcaggggccccattactgcactctgtttac

SEQ ID NO: 478911 - DNA, 335 bp, Homo sapiens
tgcggcaaagggggagacatttctaaatgtttctaacaatgttgagcgggttagtctaaactatagcagtgccatgaactgagctgctcgaagagttggagaaacaactcatggatcaaccctttttatggctggccgccgatggcaagaggaaaatactagtgcctgggctccttgttataaagtgtggaagaattctttccagaattctttcctcccttgacctctcctcccaaggcctcgattttcagtgtggaggtgggcaggggaatggagtggaagagaaggagaggagtrcagatagaaagtaaaaagggaggaaaaaacaatagcat

SEQ ID NO: 478912 - DNA, 385 bp, Homo sapiens
actactctgacaaatggtaacaaaaataatgctaacctttaawgagccagtgtgcgccaggcatgatggtaagcattttacatgaagaggatattccacattttgaaatccctacagccagtgcttagagctgatatgaaggagagaccagattacatggtaatttctaaagcctgaattttaattccagctgcagcattaataactgtgtgacatcaggcaagtaacttaacctctcttggcctcagtttccgcatctgtaaaatgggtttatactatatctgcctctctcggttattttaaagattaaataattcatgtgtagaatttccacaaatcaagcattacaaaaaatacttgttattggtaatattggttataatag

SEQ ID NO: 478913 - DNA, 435 bp, Homo sapiens
cagctggcaagtcctctgccacaggaggaagactcggcctgacctacctccgctcttggcaagcctgcttgctccgtccactgccaccaaatttaaccatgtccttgcaggctttacatttcccacactcaggctgctgacacacctaaaaaatggcattaaaaaggcaaatcagggctgggcacagtggttcatgcctgtaatcccagtatttcagaaggccgaggcaggcagatcacttaaggtcaggaattgcagaccagcctggccaaygtggtgaaaccccatctctactaaaaatacaaagattagccaggcatggtagggtgtgcctgtaatcccagctacttgggaggctgaggcaggagaattgcctgaacctgggaggtggagattacagttagccaagatcacaccaccatattccagcctgga

SEQ ID NO: 478914 - DNA, 345 bp, Homo sapiens
tgcttggtatttgcatagcacttgcattaccatcccttctattcaattttagaaaggttctgtccttctctgattaaaagaattattgatcaaaagtcttatttcataagctattatgacagaggctcctggaaggtccttttggctaaacacatgtattagctcattctcacactgctatgawgaaatacccaaaactgggtaatttgtaaaggtaagaggtatgattgactcacaatttcacattgctgtggaggcctcaggaaacttacaattatggcagaagccaaagcaagcaccatctttgcagggtgacagaaaggagtgagtgctgagcaaaatgta

SEQ ID NO: 478915 - DNA, 345 bp, Homo sapiens
tgcttggtatttgcatagcacttgcattaccatcccttctattcaattttagaaaggttctgtccttctctgattaaaagaattattgatcaaaagtcttatttcataagctattatgacagaggctcctggaaggtccttttggctaaacacatgtattagctcattctcacactgctatgaagaaatacccaaaactgggtaatttgtaaaggtaagaggtatrattgactcacaatttcacattgctgtggaggcctcaggaaacttacaattatggcagaagccaaagcaagcaccatctttgcagggtgacagaaaggagtgagtgctgagcaaaatgta

SEQ ID NO: 478916 - DNA, 495 bp, Homo sapiens
gagatctcatggttttaaaaaggggagtttccctacagaagctctcttctcttgtctgccaccaggtaagacatgcctttcaccttccaccatgattgtgaggtctccccagctatgtggaactgtaagtccaataaacctctttcttttgtaaattgcccagccttaggtatgtctttaccaacagcatgaaaacagattaatacaggggcatacagtcttatatttctgttcagacctttgaaagaattcaacagctcagaaraaattactccatcagatgcctaagaagactgtgaatatagacaactaccctttgatgtcctcagaggagaaagaaaggggttttattagaaaccatctgactggcctctgaccctgcaagttccaaaccttcccaacagaaccacacttcttggttttggaggctcatcttggggtgtttcccctaattttgagccaaaatttccctgaaagcatcaagggcaggtggca

SEQ ID NO: 478917 - DNA, 495 bp, Homo sapiens
gagatctcatggttttaaaaaggggagtttccctacagaagctctcttctcttgtctgccaccaggtaagacatgcctttcaccttccaccatgattgtgaggtctccccagctatgtggaactgtaagtccaataaacctctttcttttgtaaattgcccagccttaggtatgtctttaccaacagcatgaaaacagattaatacaggggcatacagtcttatatttctgttcagacctttgaaagaattcaacagctcagaaaaaattactccatcagatgcctaagaagactgtgaatatagacaactaccctttgatgtcctcagaggagaaagaaaggggttttrttagaaaccatctgactggcctctgaccctgcaagttccaaaccttcccaacagaaccacacttcttggttttggaggctcatcttggggtgtttcccctaattttgagccaaaatttccctgaaagcatcaagggcaggtggca

SEQ ID NO: 478918 - DNA, 495 bp, Homo sapiens
gagatctcatggttttaaaaaggggagtttccctacagaagctctcttctcttgtctgccaccaggtaagacatgcctttcaccttccaccatgattgtgaggtctccccagctatgtggaactgtaagtccaataaacctctttcttttgtaaattgcccagccttaggtatgtctttaccaacagcatgaaaacagattaatacaggggcatacagtcttatatttctgttcagacctttgaaagaattcaacagctcagaaaaaattactccatcagatgcctaagaagactgtgaatatagacaactaccctttgatgtcctcagaggagaaagaaaggggttttattagaaaccwtctgactggcctctgaccctgcaagttccaaaccttcccaacagaaccacacttcttggttttggaggctcatcttggggtgtttcccctaattttgagccaaaatttccctgaaagcatcaagggcaggtggca

SEQ ID NO: 478919 - DNA, 622 bp, Homo sapiens
taaaccctgcactgaacccttacccattctagtcctcacagctccccagattagagagataagataaatgagccctggtccttaccccaggcagtaagtccagaagacaagtctcttagccgatggtccctgaagctgcaaagtctgagcagtgttcaggcctgagcatctgttcacaccctttccatgaaccaaagagcatctgtttcttcaggttcagtcgatattcattgttgttaatttgagagatctccctttctctctccaccattctctccctatattgatattggaatgtgtggacatatactctatatcatatatgccctatgtcacataagggcatatcccctgtatcctggctgtgtgaactgatgaccacggctgttccttccaaracccttgactacaagcacatccaggtccagcagttctcagggtgtgctgtgcccaacctgagctgtacatggcagattttaggggtagacggtatctatttttatgattgtcttatttatatggcaagtgagattttccatttatggcggtaatgtagagttaacttttaaaactacctattaaaatagtgaatcagttaagtaaaaatgattaaataaataaa

SEQ ID NO: 478920 - DNA, 673 bp, Homo sapiens
tttcaaatgtttgtggctgggtttttgctggttttaaaggttttagtggcttcccaatgtagcagctaagctagagctgaaggaagatgtggccgcacaccgccgggcagggcccgctctgtggccggaactcggtggagggcgggccgagagagagcgtctgctagcaccagggccgtggcagcgggttccgcctayggttagggcgtccgaagcttcccgaactctccacagcaggggtcgtcagggtgaggtccccgtcccagcagcgggggcaccacctgggaacttgtcagaaatgcaaattcacaggcaccccagaccactgacccaggagctctggggcgggccggtgcgccttgtttaagccctccacgtggctctgcgggctcagtctgggagacgctgggcggacgatgggagaatagtgcctgggcttggagctggaagctggaagcctctccttcaaataagtgcacatatacccgtaagagccccggaggaagcacttcggacaggtggagaggaaaggacaggtaattctagttccctaaattgcatggactgagagtttctgtgacagggaagtaaagaaagtcactttttaaaattgcaaagtgggaaccgcccatgtctcatttctcattaaagtcacttagcaccatctagtggt

SEQ ID NO: 478921 - DNA, 673 bp, Homo sapiens
tttcaaatgtttgtggctgggtttttgctggttttaaaggttttagtggcttcccaatgtagcagctaagctagagctgaaggaagatgtggccgcacaccgccgggcagggcccgctctgtggccggaactcggtggagggcgggccgagagagagcgtctgctagcaccagggccgtggcagcgggttccgcctatggttagggcgtccgaagcttcccgaactctccacagcaggggtcgtcagggtgaggtccccgtcccagcagcgggggcaccacctgggaacttgtcagaaatgcaaattcacaggcaccccagaccactgacccaggagctctggggcgggccggtgcgccttgtttaagccctccacgtggctctgcgggctcagtctgggagacgctgggcggacgatgggagaatagtgcctgggcttggagctggaagctggaagcctctccttcaaataartgcacatatacccgtaagagccccggaggaagcacttcggacaggtggagaggaaaggacaggtaattctagttccctaaattgcatggactgagagtttctgtgacagggaagtaaagaaagtcactttttaaaattgcaaagtgggaaccgcccatgtctcatttctcattaaagtcacttagcaccatctagtggt

SEQ ID NO: 478922 - DNA, 607 bp, Homo sapiens
atgcctcagagtgcagttgccgtacaaatctgtggttgcctggaagggaagataatgagtaatgagtggataaatcacgctattttgaacccccgcacaatgtggagcaggggattatctactccttttatttattyatttatttattgagacagcctcactctgttgcccaggctggagtgcagtggcatgatcttggctcatggcaacctccgcctcccaggttcaagcgattctcctgcctcagcctcctgaattagctgggattacaggcacgtgccaccatgcccggctaatttttgtaattttagtagagacagggtttcgccatgttgaccaagctggtctcaaactcctgacctcaggtgatccacctgcctcagccttccaaaggattacaggcatgagtcactgcccccagcctactccttttatttaacctatgctttgttcccaagaagattaagatgaaactaaggataaacttagcatccatatgcctctcttttgccctagattttatctgagcttcctagtagcccacgtaaaaggggatatatagtcagttatagttacagtgtccacaagataaatgagttgttcaaag

SEQ ID NO: 478923 - DNA, 363 bp, Homo sapiens
cacacagtgaataaaaccttaaacacacagtagtaagcacagtagttattgccacatgctaattagtttaaatggcaaactttgcataagtccctacagttagcatggctcttctcctcaaaccatgttcttagaggttcttaaaaatccttttccttgtcttctgagtattttcctctctacctaaacaacccaggattggaccattagtttcttgcttcccactttcttaccccaaggcaatggggcytggggctgcttagtgttcacctgtgggctgggagggtggataggagtgcagccatgcagtgccggaggcaaggggcaggtgcaacctccagccactccacagcctggcccagg

SEQ ID NO: 478924 - DNA, 617 bp, Homo sapiens
ggcagtggtgaaatcatgcaaataatgaattttatgataataagatattttaggatattttcataaaactgaactataaattaatcaatgattaactattaactaatcaactattttattttagtatatcttataaacacatactaaaatattcttaccttaaatatgtgccatatatgaagaataatgccatcattagtccatttaaaataaaaattacagcaacataaaagcaagcaggatctcccaatcctttaaaaataaacaaaacatatgttctaatcacattaacccaaattaccttaygtgtctagcaatttatattaaattgtgttcattttgaaaatggttgccagatatattaaatagctgccttggttcccacatgaaaacacaacactactgcagaacatagatgagaccagggtaattagcaatgatgattttaaaacagggctgcaaattcactgatacgcctcctctggaggtatggggtctatagcccccatttttgagtttcattgggcttgtgactctttcaacagagtatggcagaagcaacactatgtgacttctgaggctaggtcataagaggtcatacagtgtccagcttggag

SEQ ID NO: 478925 - DNA, 617 bp, Homo sapiens
ggcagtggtgaaatcatgcaaataatgaattttatgataataagatattttaggatattttcataaaactgaactataaattaatcaatgattaactattaactaatcaactattttattttagtatatcttataaacacatactaaaatattcttaccttaaatatgtgccatatatgaagaataatgccatcattagtccatttaaaataaaaattacagcaacataaaagcaagcaggatctcccaatcctttaaaaataaacaaaacatatgttctaatcacattaacccaaattaccttatgtgtctagcaatttatattaaattgtgttcattttgaaaatggttgccagatatattaaatagctgccttggttcccacatgaaaacacaacactactgcagaacatagatgagaccagggtaattagcaatgatgrttttaaaacagggctgcaaattcactgatacgcctcctctggaggtatggggtctatagcccccatttttgagtttcattgggcttgtgactctttcaacagagtatggcagaagcaacactatgtgacttctgaggctaggtcataagaggtcatacagtgtccagcttggag

SEQ ID NO: 478926 - DNA, 518 bp, Homo sapiens
gagctcagcctcacagtcctccatgcccaggagccaaaatgtgagcaatgtagcctctcagttaattccagcctttccagacatttgagtcttagtagcagaggtccctgaaatcatggacataaaccagccccgctaaagcctgcccaaattctggacttgcagaatctatatatgcataataaaatgggtgttgtttataccactaagtttacagtgtaagtttattatgctagataagtttattatgttacaacagataactggacaatattacagaaagaaacttaccttcacagctttcaataggactgagtccttctcctctggtaaccgtccaacatatcttggtttgaataccaatcaagtccattattttggtataaatccggtaccaactggccaaaattacctattttaaaaaatacagaggcatcttaagaaaatatactaaacaattttcattactagaatacttttgagatactttgacaatwaccatattttccctttccata

SEQ ID NO: 478927 - DNA, 421 bp, Homo sapiens
acatgataatgactggcgtgtcctgtgaaccagaaacatggaggtctttaaccatctttgttagagcagttctgtgcagtattagatgaagatgccagacttctgttaacttgagtgtgactggaaaatcattctgtggaaagcacaaggactcctagaagcctctgaggaagcagagatagcaagtataaggkactctgccaaggatgtctatgcatgaaggaaggagagagatctagtggttgccttggggagatgctggtttagtggagagttctaatgaagataacagccatgtcatttgggcatgcttaagactgtagaaaggcagccagaagagtggagagatgaccaagcagctagttagtagagggagcaccatcccctggaagagaggttggctgtgtccagaagaggggct

SEQ ID NO: 478928 - DNA, 513 bp, Homo sapiens
tcagctggtctcatatttgtcctgtcatgctctaaacattgtattacaggtgtgccatacctcatccttcctgttaaatcagcagcctcccagcccctaggatttcttcccgtccacattcttgctgtcatctcagccatccacaccacccacgtcacaaatttactccctcataacatatctacttgcacaatgttcctcaaatcctgtttaaaatccattagtgttttgctcaagaaccttcactagttttttatttctaaataaaacatttacccttcaaggccctaaatctcgagtcatttaacgtaattaaacttgttttctgtgatttaattaattcatttaatcacataatcaatcattaaccaacaaagatttaataggcacctatggtatatgtggtggccctgagccaccaaaggtattggtagcagatgctgtrgtggccacccagattcctccttcaggtctgaagccctcctcccctcagcatgacaggggtgttggtgg

SEQ ID NO: 478929 - DNA, 358 bp, Homo sapiens
tgaaagaaaatacatccaactttaaataaaagtttcttttaaaacatcaaaggcaaatatgaacaatttgggagattatcaactagtgccaatraaatctctttaaggtagtatacacatacaaatcattattttaaaaaaaaagatatttataaagactagaaaagaaagtctccaaatcattatctaaaaagttttttcaggccaggcgtggtgactcacgcctgtactcccagcactttgggaggccaaggcaggagtagcacttgaggccaggagtttgagaccagcctggtcaacacagcaaaaccccatctccactaaaaatacaaaaattaagcggagcttgcagtgagcc

SEQ ID NO: 478930 - DNA, 358 bp, Homo sapiens
tgaaagaaaatacatccaactttaaataaaagtttcttttaaaacatcaaaggcaaatatgaacaatttgggagattatcaactagtgccaataaaatctctttaaggtagtatacacatacaaatcattattttwaaaaaaaagatatttataaagactagaaaagaaagtctccaaatcattatctaaaaagttttttcaggccaggcgtggtgactcacgcctgtactcccagcactttgggaggccaaggcaggagtagcacttgaggccaggagtttgagaccagcctggtcaacacagcaaaaccccatctccactaaaaatacaaaaattaagcggagcttgcagtgagcc

SEQ ID NO: 478931 - DNA, 512 bp, Homo sapiens
aaagttgggtctggcacaggtaggagaacacagaaaagttaagtggaggaaaagatatggggtccattctgaagcaacctttagagatctcattttggtactgacttgtaatttaggagatttttaggagggtaagatgattttatcctctaaacctgygagccaacgcaaagcccccacacatgtccatcttcacagaagtggagtgtgcatgttgatatactgaggtgatgaggtgtatgcagctcagatacagtaaagacatcctgcctagataaacctacctggagcatacagcaccattatgacatgcctttcttcacttccccaagtatcccttctccaaaggacatccctctctgctattttaatccaacaaaagtacttttaaactccagataaccttttaatgagttatgaaatcaacttatggaataaaattcagcatttaaaaatgcagatcagcagagtaaaacagaatatatatgactatatcctacttacgaggggtt

SEQ ID NO: 478932 - DNA, 568 bp, Homo sapiens
agcaaaatcctgggacctcagaatccttcggaaatgaattattacagaacagtaatattctggaacatcagaacagaaaagagaacggaaagtctagatccttcttagtgtcatgtatctttaaaacattttaagtaaaactttttatgaaatataaataccacttactttggcaatgaaataaacacttttttcttcattatgcaggatctttaaacaaaaattaactaaagctgcagacaatttaattgctgtggaaagaacacttaaaatgtattctcagagacagyagagcacacgttttggagccactgttggtactcaaatccctactctgccagtgactagctctgtgacctcggaaaagttatttaatatccttgtgtctcagtttcctcatctataaagtggtttacctatctcatgggaaaaccatatggattaaatgagtttctgatagtaaagagtttagagcctcgcacataagcgtcatacatgaactgaacttctgcaatcaaaaacagtcttcagtgaagattggaatctgcagaaggaaagcttcagaatg

SEQ ID NO: 478933 - DNA, 577 bp, Homo sapiens
gtcagatgctgccacagggcgagaacctccaagatgtgctccccagggacatctactgccgcctcaagcgccacctggagtatgtcaagctcatgatgcccttgtggatgaccccagaccagcrcggcaaggggctctacgcagactacctcttcaatgctattgccggaaactgggagcgcaagaggcctgtctgggtgatgctcatggtcaactccctgactgaagtggacattaagtcccgtggagtgcctgtcttagacctgttccttgcccaggaggctgagcggctgaggaaacagactggggcagtggaaaaggtggaagagcagtgccatccattgaatgggttgaacttttcacaggtaagactctctttgcataaaagacttagtggcatttggttgtatgggtgaatctgttgagtttcagggcaggtgatggatcacgggcacagcttgtctagaaattgtctttgcttaaaaatgcttttccgggggttaaaaaaaaagccaagtggtcagttatatcacttatttgagtattgccaagaaaaaaaacttgtttttttcttatc

SEQ ID NO: 478934 - DNA, 637 bp, Homo sapiens
caaactgagcacatcataaccacttacacacgatgccactgtctgtatagatttcacttttaatgarcagggattagtcatattcatgtattcttttaaagccactttcaaattttaaatttggcttgtggcatttcctaggaacatggataagataataatgtcatgaattttttcttcatattttaagaaaactattcaaactggtaaccccctgaaagtcaatattctcaaagtctttggacttttttcttttagcaacaaggctcatttttttttttaacaacaaaatcttattctaataaaaccaacaaaaacaaagcatcttggtagaatcttagattccatggaagatagcttgaaaaccatgttctaaacaataaattattcttcgtctgcaggacattctcattatttgtttctctctcactctggcttcactagtatagggaaggacaaggaaatttcccttttacagatgttcgagggacaaagagcttatgtttcaggggctgtactggaaggagatacaataatggcattgttctataggaacatggaatgtatttctcatggaaatctgtggtccaaaaattggtttatgtctacagtcatattagttgtttagctatgtaca

SEQ ID NO: 478935 - DNA, 455 bp, Homo sapiens
tccagatctgaatgacctattaaaattatgaacctttaaagtttctgggaaaggatttggttataacccaaactcaattctcaaagtcacttcttataataaagttcaaaattatgtttcctgtcctttttcttttttaagagacagggtctggctctgttgcccaggctggagtacagtggctttatcatagctcactgcagccttgaactcctgggctcaagagatcctcctgccagagcctcccaagtagctaggatttacargtatgtgccaccatacccggataattttttaaaatttttttgtagaggaaagtgtctctttatgttgcccaggctggtcctggaactcctagcctcaagcaatcctcctgccttggcctctcaaaatgctgggattacaggtgtgggtcaccatgtctggcctatttcatttctcatagcctccagcac

SEQ ID NO: 478936 - DNA, 597 bp, Homo sapiens
ttgctcattagcataagacactcccaccagtgccatcacagtttgcaagtgccatggcaacaattcagaacttaccaccactttccatagcaattacctagaaggttccaaacctttcctggaaaattctaaatgacccggtcctcaatttgcattgaccaccccttaatttgcatgtaatcgtaagtgggtttccatgarcacaattacagttgtcaagagcccatatattgctgactctgggcacactgcctgtgagttagccctgctccataatgagcagtactgttcaagaaagattgctatctaataccactgcctcaccttgaattatttcctgggcaaagccaagaaccctctcaagctaagccccaggtttgttgcttgcctgtcctgcatcatctggctaccatgaagtgatgaagatgacaagaaagaggcagtgaccaatatggcagtgagacaacagacagagcagcgatcagtggagagacagtgagccagtagtgatcagaaaagaggcaaaaagatagcagagaggtggcaattggagatagatggagagatggtggtcagtaggacagcaagacagcaaga

SEQ ID NO: 478937 - DNA, 597 bp, Homo sapiens
ttgctcattagcataagacactcccaccagtgccatcacagtttgcaagtgccatggcaacaattcagaacttaccaccactttccatagcaattacctagaaggttccaaacctttcctggaaaattctaaatgacccggtcctcaatttgcattgaccaccccttaatttgcatgtaatcgtaagtgggtttccatgagcacaattacagttgtcaagagcccatatattgctgactctgggcacactgcctgtgagttagccctgctccataatgagcagtactgttcaagaaagattgctatctaataccactgcctcaccttgaattatttcctgggcaaagccaagaaccctctcaagctaagccccaggtttgytgcttgcctgtcctgcatcatctggctaccatgaagtgatgaagatgacaagaaagaggcagtgaccaatatggcagtgagacaacagacagagcagcgatcagtggagagacagtgagccagtagtgatcagaaaagaggcaaaaagatagcagagaggtggcaattggagatagatggagagatggtggtcagtaggacagcaagacagcaaga

SEQ ID NO: 478938 - DNA, 508 bp, Homo sapiens
ttctttttttgacttttagtagggatgagatcttgttatgttgcccaggcaggttttcaactcctgaactcaagtgatctttccactttggcctcccartgtgctggcattataggcatgagccactgcacctggcctagacataaatcttatgcagacttggagggttgctatttgaagtagacttggtccaagagagggcgatctttactaaaatggggacttgattctttcctatttatttatttagttatttttgagacagaatctcactctgttgcccaggctggagtgcagtggcatgatcttggctcattgcaagctctgactcccgggctcaagtgattcttgtgcctcagccttctcctgagtagctgggattacaggtgcctgccaccacacccggctaatttttgtatttttcctagagacggggttttaccacattggtcaggctggtctcgaactcctgacctcaagtaatccacccaccttggcctcccaaagt

SEQ ID NO: 478939 - DNA, 560 bp, Homo sapiens
aggatggatagaagtgaaaggctttctatataaaggcctttaattttagtacctgctaaggaaatgtttatgctagtaaactttttgattcaatagaaatactaygaaaaggtaatttacagttctgttcaattcattccttcacatagttatataaatgacatttactattctattcattgcacgtattcttctcatctatgcaaaacttaggaagcatgagagaagtagcaattcccacaagcaattttcattatctttggcattatcattactgaaataccatcttacatttgaggaacactctgaaatctgcaaaaggcttttgacaacattttattttcttgtcacagtaaggtaggaggtgcaagtattagattggtcccactgcaacacagatgttaaaaggtcttggtgacaaaagggctagaattcaagtctataacctccataactaagactgctgggcttaaaaacatgcagcctctcacctagatgaggaaagaaggaagaacttagcatctggaccatagttgatgctcaccatgattgaacaaacg

SEQ ID NO: 478940 - DNA, 346 bp, Homo sapiens
agtaaatgcaggatcaagtcatctttttatttattgaaagcctggctctgtgaggggacaagcttcaggtgagccagagagaaatcaggaaaagcatgccccctgccctcctggagtttgtagttcagccccccaaccctccctgaccagcaaatgcaatgggcatttggcaagcttgtcaacatgtcatcacctgctgatgtggtgcagtagcctttgacaagtgcacgtgttactgtccagtcacagccagtcattaaagtgaaaagtcaacacaaactactgctttcaaagaaagcagyctcactctgccgtctgggaccagggcagatgcagggcccctatg

SEQ ID NO: 478941 - DNA, 558 bp, Homo sapiens
tgccctcactaaggtggaaggtgctagaagtccttgcccaagtcactctgagagacaggctgtttccaggaagcacaagtgcttgcattctgggcatgcaggcaggtttacctgtgctggacatcaaatttatttctgctgtttgcttcycatgtttcagatcttccaagtccatttttaagttgcaggtagttgtgtgagaaaagtgtcaggctgagccccaaagccagagtttacaaccactaactcaggtcctctgggccaagtccaccctgtctccgagccacttcctcatgtgtacatgaccaaaaattttagaaaactaacttttgtgagtgctaaggaatgggccatgcaccctacttagcacatcatgagatcacctcaaccctcacatcccatcagggggatactattattatcctcattttcgagttcagaaaactgaaggacagagagaaacatgccaaggattaaacaggtagttagataagaaaatagggtcaccacccaggacccctggactccagaacctgagcttgcctctaagctgtcaga

SEQ ID NO: 478942 - DNA, 483 bp, Homo sapiens
attttctggagggcaaagaaaagcaaaactcttagtgattttccttcaaatgcttgagttgaagagaagacccagttattctttaggggccttcatcaactcccgagtgggaggcagggagagtgttatcagatagcagagaggatttgatctttgctgatttggaggcagaagtcattgcataaccagccaagagcctaagtgaagacaactgtctggrgtattagggaccagttacaggaaagcaaaacctatagtgggagaaaaatggattcagatttatgggcttgatggaaagaaaggggatccagataggaaatcgtgccctcccaccttggctgctctttaactaggggttttttcttggggtggaattcctgacaagccaagttgttcagtttccttcctcaagcatgaccctggaaggtgtctgctggttttaaagacatcccccaattacccacaggagggaattgagcaagc

SEQ ID NO: 478943 - DNA, 668 bp, Homo sapiens
gctgtaataaaaatcttaaatttgaaaaaaaaataagtgttttgtacaaagttctaggagtgagacgtgcaaggggataaaaatatgaataagaaagtcctagtactaagattacatcttagttgataaatgcattggaagaaagagaaaactattaagccaatacaaagcaccaaagaaatacgtgaaataagggagataaactcatgttcctatgaaatctccaagaagggagagattctattcrgtcagggagatgacaaaggagcgtggattggtgggcccctgggaggctttggacgagaagggttggaagcgttgtcactgcagagcgaagagcctgagaaatgacagggaatcaggaaaacacagagaaagcaacgagcattcctccacttcttctcccagcagaggaacactgagaagtggaattggaaagatggaccggacccaaattcttaagggtgttgaatatcaggctaaatactttcagcttaatttggttaagtcatgagaaaccactgaaggttttgttttgttttgttttcaagcaagttagtggcctacattaatttattatttatcattattcaaccttttacattgaaattgctccccaatccttatcaattcccccttggactcttactacagcactttttccctag

SEQ ID NO: 478944 - DNA, 507 bp, Homo sapiens
gaagtccagagggtcacttttattgcctgctttgccatttactagctgtatggcttgaagtgagcttcctaagcttcagtctccccatttacaaaagaggagataaaaatattacctaccactgtagggtcatggtgaggattaaatgagatgatgtcggtgaggctcatagcaactgcctaacatgggaagctctcagtaaatgatagktactattgttgttgttaacaaagtcaagagaagatagtatgtaataatagttttcatttctgtaaagttttccatgatgcagatcctgacctcagcattttacctgtattaacccatttaatctaacaatcattctataggtaggtgctatgactacatttttataaatgaggaaactgaggtcaacaagagcaattgagagctccttcataacagagccagagaatgaaacctaggcagtcttattacactgatgggccagaaatatccacaatgccagaaccacgtaatgttgca

SEQ ID NO: 478945 - DNA, 595 bp, Homo sapiens
cacatccaaatgcacaaactataaaagaaggaagaggcagtaccggcaccaagctctttggtttctgcatctggccggtgtccactgggagaaatgtaagtcagartttaccacatggattacaaatgtgctgaattgcaagaatgattattaaatgaacatatccatagcacctgcaacttgtcccggaaaattcccccagggtgttgtgggtgcttttctaaaaaaattttttaaggaaaaaaaggaagacagagtgagatgcaaatggcaactccagctgtttatagtagcaactccattaatgttcctgaagggtttgcagagtcaattcagtcaatctgagctgcttccattctcagcatgagtgtgaggagtgggggctaggggaatatcattagcctctttcctttgaggtttggatgatcaagacaatgaaaataatagtaatgtaaatggaaattgctttgaaaaacaaagcatgtcagtgcagggggaagcatgaggctagctccatttctctgacccagcagtagtatttattctgttataaggtcagggcttcttctagaaacagaaactgagaggctatgtg

SEQ ID NO: 478946 - DNA, 597 bp, Homo sapiens
gtgccagggagcaggacatagacgttttggggaggagggcactattctgcctactgcaatggtactgaagcaaaagcaattttaaagattcttaatattttcatcagttcgataaatcagaagtgaactcttgaggagtcttaaacatttggaggaggctctgttggagagctggcccttgcatgtctccaccactatgttgcttagccatgacttatcccatttcttgaggaaagagtaatgtgttttggatctgagacacagatgactacattccccttgtcaccttcactttgccaattctccatttatttcattctatagagacctgacayattgcccttagaaactggctactccctagaatactgccaatttggggttagatgagaacgattataagatggctactcaaaatagtgcagcttgattgaaggtgtattacaacatcctcagcaaataataaaaaatagtggattaaaaaaaaattgcattggggttttgtttaaaaggaggttacccctccctacattgctgtagcatggtgattctctttattttggtcactgttatatttcgttctgtttgcaacactat

SEQ ID NO: 478947 - DNA, 579 bp, Homo sapiens
ttaaattttatttttatttttatttttgcatgtagatgttccagttgttctagcaacatttgttgaaaaaacaaacaaaacaaaacaaaaaagcaccacattttctccattgaattgcctttgytactttgccaaaaatcaggtgaccaatcatgcaggtccgtttctggactctctattctgtttcatttgtctctttgtctgtttttttcaccagatgccacactgccttgattactgtagctttacagtaagacaatagatttttaagaatacagtactcacctggctggttctcttaaagacagtccagacagcacggtgcagcaacaaaacaggggagacgatggggccaaagagggctttcacatttgtctaactctcctgcacacacacagaagggaagtttgccttacttctggatatatcaagggagtgatataaagggccccagtggatctgaaggagcttttggttgggatgagggatacacagagtacatggacatgctaatctgataccaaagaggaaacaaagacactgggctaaaggtgtgatgtccaaagagcagatggtgca

SEQ ID NO: 478948 - DNA, 579 bp, Homo sapiens
ttaaattttatttttatttttatttttgcatgtagatgttccagttgttctagcaacatttgttgaaaaaacaaacaaaacaaaacaaaaaagcaccacattttctccattgaattgcctttgttactttgccaaaaatcaggtgaccaatcatgcaggtccgtttctggactctctattctgtttcatttgtctctttgtctgtttttttcaccagatgccacactgccttgattactgtagctttacagtaagacaatagatttttaagaatacagtactcacctggctggttctcttaaagacagtccagacagcacggtgcarcaacaaaacaggggagacgatggggccaaagagggctttcacatttgtctaactctcctgcacacacacagaagggaagtttgccttacttctggatatatcaagggagtgatataaagggccccagtggatctgaaggagcttttggttgggatgagggatacacagagtacatggacatgctaatctgataccaaagaggaaacaaagacactgggctaaaggtgtgatgtccaaagagcagatggtgca

SEQ ID NO: 478949 - DNA, 590 bp, Homo sapiens
tgctcaagaggctgaggcaggagaatggcatgaacctggggggcggagcttgcagtgagcagagatcacgccattgcactccagcctgggtaacagagctggactccatctcaaaaaaaaaaaraaagaaagaaagaaaggataaatgcttcagggatggacacctcattctccatgatgtgcttatttcacagtgcatgtctgtatcaaaacatctcatgtacctcacatatatatgcacctaatgtgtacccagaaaaaaatgaaaaagagcataaaagaaaaaaaaaaaaaaaacaaaagcagaaaagagggcaaatgagagtcggggactgtgatctcattttgcccaggatgaagctgggtgacccgggtacagagcaagccccttggcttcttgagctcccatgtgcagagtgaggggcggatgcaggggcagggtgtgactttgatgaacattccctccaggtggctctgccctcggccccctctcaggattgtttgtagctctttgcctcttcttggccatttggagttttcaggggccctactaggtcctcttgacttctcactttgctctccttggtggt

SEQ ID NO: 478950 - DNA, 447 bp, Homo sapiens
tcaagaggctgaggcaggagaatggcatgaacctggggggcggagcttgcagtgagcagagatcacgccattgcactccagcctgggtaacagagctggactccatctcaaaaaaaaaaagaaagaaagaaagaaaggataaatgcttcagggatggacacctcattctccatgatgtgcttatttcacagtgcatgtctgtatcaaaacatctcatgtacctcacatatatatgcacctaatgtgtacccagaaaaaaatkaaaaagagcataaaagaaaaaaaaaaaaaaaacaaaagcagaaaagagggcaaatgagagtcggggactgtgatctcattttgcccaggatgaagctgggtgacccgggtacagagcaagccccttggcttcttgagctcccatgtgcagagtgaggggcggatgcaggggcagggtgtgacttt

SEQ ID NO: 478951 - DNA, 619 bp, Homo sapiens
gaaaacttcctgattgcattagcgaggttgcaacaccaggacataatcaaatctccctggaggacgtggcttcaggaagggctgctacaagccagtggcagaacaagggcaaccagggtcagacacggtggaaggagggaagtcccagagccgagcatgggtggacatcagaggggtgtgggctgcaccatctgggtgcaggggccagcaggcagtgcgggtccacccagcccagggccagcctttcccagcagtcgcgtgcagaaacctggcacacgtcatggggcagcggtcccatatcataggccctcctggtgttagcagtcaggagggtgcctagaaaagcctcccacagccacagggacagcaggatctgagccyaccctccacaccagaagcctgcccagcaccgtagcgaggcccgggtgccctgctcaggaatgagctctgcttccagcttggccatcctagttccaccctgtctgtaacttagccgaccaggaagatggctgtgatgaccacagaaaatcctgacacagagctggcatgaaggagctgtgcctgtgggagcttcagagtcctcaggccaggctggcccctgctctgccacctcttggct

SEQ ID NO: 478952 - DNA, 619 bp, Homo sapiens
gaaaacttcctgattgcattagcgaggttgcaacaccaggacataatcaaatctccctggaggacgtggcttcaggaagggctgctacaagccagtggcagaacaagggcaaccagggtcagacacggtggaaggagggaagtcccagagccgagcatgggtggacatcagaggggtgtgggctgcaccatctgggtgcaggggccagcaggcagtgcgggtccacccagcccagggccagcctttcccagcagtcgcgtgcagaaacctggcacacgtcatggggcagcggtcccatatcataggccctcctggtgttagcagtcaggagggtgcctagaaaagcctcccacagccacagggacagcaggatctgagcccacyctccacaccagaagcctgcccagcaccgtagcgaggcccgggtgccctgctcaggaatgagctctgcttccagcttggccatcctagttccaccctgtctgtaacttagccgaccaggaagatggctgtgatgaccacagaaaatcctgacacagagctggcatgaaggagctgtgcctgtgggagcttcagagtcctcaggccaggctggcccctgctctgccacctcttggct

SEQ ID NO: 478953 - DNA, 582 bp, Homo sapiens
ccatggagccaggcttcccagcacacaggcgcggtggagcctcggggtgggcatacaccccgcgagctcgcgggggctgggcactgcgggtcctcgggtggggactctggagttcagtcttgaaggacacagtcactgagggtcagggaaccaggagggtagggagrgtagggaggggtgcctaggcctagtgggagaagcatgtgaaagttccctaagagggctgggggtgaacaagcgctcggcccggcctctcccggtagactgctctggtgccctgaagcctcccttctccaaggccccatggacgcccccagaggggtgacgccctcgcccacgctgagctctgagtgctgcacgagaactcccagagccatgtgcacacgcgctccccgtgttataactggcattaagtgcactcacattgtcgcatatcccctaccaccgtccatctccagaacgtcttcatcttcccaaaaggaaaccatacccattgaacaccaactccctccttttgttaaccattgctctttctgtatttgaatttgcccattctgggcccctcatgtaagtgaaatcgca

SEQ ID NO: 478954 - DNA, 473 bp, Homo sapiens
gtgaaagggtaagaaccgagggtggctgagactcggggttgttcagggcggggtgggctctggacccagcaggcccggcacccaggtcagggctccaggggaggccaggtggcgaaggccaagaaggggcyggggctggtcaggaagggctcctggtgaccagagcactttgcgtgagccagcgtgggaggaaggtgggctggatgagccagggaggcgccgggaggggccttggcagaggcgaccccctccgtcacccccaggccactgaaccctgggtagcgagaaccgacaggggaggctgcagacagaggagtggaggctccccggctttgggggctctgagtagaagcatctagggggtccctcaagaggcccccaaacgcttccccatggtgagaaaagaaggtgcagagaggggcacggcgctggtgcagagaggggcacggcgctggtgcagaggggcacacagc

SEQ ID NO: 478955 - DNA, 473 bp, Homo sapiens
gtgaaagggtaagaaccgagggtggctgagactcggggttgttcagggcggggtgggctctggacccagcaggcccggcacccaggtcagggctccaggggaggccaggtggcgaaggccaagaaggggctggggctggtcaggaagggctcctggtgaccagagcactttgcgtgagccagcgtgggaggaaggtgggctggatgagccagggaggygccgggaggggccttggcagaggcgaccccctccgtcacccccaggccactgaaccctgggtagcgagaaccgacaggggaggctgcagacagaggagtggaggctccccggctttgggggctctgagtagaagcatctagggggtccctcaagaggcccccaaacgcttccccatggtgagaaaagaaggtgcagagaggggcacggcgctggtgcagagaggggcacggcgctggtgcagaggggcacacagc

SEQ ID NO: 478956 - DNA, 473 bp, Homo sapiens
gtgaaagggtaagaaccgagggtggctgagactcggggttgttcagggcggggtgggctctggacccagcaggcccggcacccaggtcagggctccaggggaggccaggtggcgaaggccaagaaggggctggggctggtcaggaagggctcctggtgaccagagcactttgcgtgagccagcgtgggaggaaggtgggctggatgagccagggaggcgccgggaggggccttggcagaggcgaccccctccgtcacccccaggccactgaaccctgggtagcgagaacckacaggggaggctgcagacagaggagtggaggctccccggctttgggggctctgagtagaagcatctagggggtccctcaagaggcccccaaacgcttccccatggtgagaaaagaaggtgcagagaggggcacggcgctggtgcagagaggggcacggcgctggtgcagaggggcacacagc

SEQ ID NO: 478957 - DNA, 491 bp, Homo sapiens
catcctgccaagccagccggccagcgaatagccaatccactcggccagccaagctcgaagccacccggccagccagccggccaagccagccaagccagccagscagccaagccagccaagccacccagccagccaagccagccaagctacccagccaagccgcccagccagccaagccagccaagccgcccaactagccaggccagccacccagccagtgagccaagccagccagccagccagccaagccaggcatgccagccaagccatccagtcagcgaacgcagccggctacccaagccagccaagccacacggctagccaagccagccagccaagacagccaagccagccaaccagccaagccagtcagctagccaagccagccaaccagccagccagccaagccggccggcctgccagccaaccaagccggccagacagccaaggcagccaagccggccaggcagccaagccagccaagccaccga

SEQ ID NO: 478958 - DNA, 296 bp, Homo sapiens
ccttctgctttctggatggtgcaggcgtgagctccaagcccaaatttcactggagctccaagaatcgagcctggcccaggcactcactgcacgggggccaagcgtgaagccagtgatcwctccagcaaggtaacaggacagcttggtgatccttcttgccggccacaaaaggttatagccagaattccaccgaatgtggtctttctgtgtccctccccagacagtgaagctgcacaaacctgggggtggggggtggggggtgctgacctcagtggggtgtcctgaagaggcaggaa

SEQ ID NO: 478959 - DNA, 296 bp, Homo sapiens
ccttctgctttctggatggtgcaggcgtgagctccaagcccaaatttcactggagctccaagaatcgagcctggcccaggcactcactgcacgggggccaagcgtgaagccagtgatcactccagcaaggtaacaggacagcttggtgatccttcttgccggccacaaaaggttatagccagaattccaccgaatgtggtctttctgtgtcyctccccagacagtgaagctgcacaaacctgggggtggggggtggggggtgctgacctcagtggggtgtcctgaagaggcaggaa

SEQ ID NO: 478960 - DNA, 580 bp, Homo sapiens
cggtcaggtaggatcatatgtccctgaagttcagaacccaggagcatggggatggtcctgggggttcctgctgcacggagggaagaccctctttccacaggggccccggagagcgagaggaaggaggagggcaggtcagtgagtgtgatggggtcacagtggagagggaagcagaaagaagtgttcccacagcaagacacacacastgtccacgctgaagctacagagaggacctctccacctgtgtctgccgcaaagcagtggggcgtcttctggcagcccagagtcacctccagatcccacctgcaccatgcttcctgcggagactgcctgtcttcctaatacactgtcttctgaccagtcttccagacaaatcaccggttgctatatatatatattttttaatagctaatatcttacactgatatatttatattatatataaataattctgtgctttatgtttatgctatatatacagatgtagttatttatgttatatataatataaacatgatgtatattcttatatttctctggggactcactgtcttcttaatacactgtcttctgaccaaat

SEQ ID NO: 478961 - DNA, 580 bp, Homo sapiens
cggtcaggtaggatcatatgtccctgaagttcagaacccaggagcatggggatggtcctgggggttcctgctgcacggagggaagaccctctttccacaggggccccggagagcgagaggaaggaggagggcaggtcagtgagtgtgatggggtcacagtggagagggaagcagaaagaagtgttcccacagcaagacacacacagtgtccaygctgaagctacagagaggacctctccacctgtgtctgccgcaaagcagtggggcgtcttctggcagcccagagtcacctccagatcccacctgcaccatgcttcctgcggagactgcctgtcttcctaatacactgtcttctgaccagtcttccagacaaatcaccggttgctatatatatatattttttaatagctaatatcttacactgatatatttatattatatataaataattctgtgctttatgtttatgctatatatacagatgtagttatttatgttatatataatataaacatgatgtatattcttatatttctctggggactcactgtcttcttaatacactgtcttctgaccaaat

SEQ ID NO: 478962 - DNA, 326 bp, Homo sapiens
tggggcatcaccctttcccaaatgacggtgattttcagagtggttcactttttggagagacatttctgccctggagatccatacatattgaacccaaatgaatattttttaatwaaaaaaaattaaactttagaaagttcaatattgaggcagctacgagtatgaattcctcatttttcctaaatgcatgttgtcaaaatttgtattgcatttagtaactacttatgtttctaatgtatataaggttacacaatgttttcttctttttctgctcctcagggtcagaatttgaaataaaagttttggaaagaaaaaacactcttgtc

SEQ ID NO: 478963 - DNA, 326 bp, Homo sapiens
tggggcatcaccctttcccaaatgacggtgattttcagagtggttcactttttggagagacatttctgccctggagatccatacatattgaacccaaatgaatattttttaataaaaaaaaattaaactttagaaagttcaatattgaggcagctacgagtwtgaattcctcatttttcctaaatgcatgttgtcaaaatttgtattgcatttagtaactacttatgtttctaatgtatataaggttacacaatgttttcttctttttctgctcctcagggtcagaatttgaaataaaagttttggaaagaaaaaacactcttgtc

SEQ ID NO: 478964 - DNA, 326 bp, Homo sapiens
tggggcatcaccctttcccaaatgacggtgattttcagagtggttcactttttggagagacatttctgccctggagatccatacatattgaacccaaatgaatattttttaataaaaaaaaattaaactttagaaagttcaatattgaggcagctacgagtatgaattcctcatttttcctaaatgcatgttgtcaaaatytgtattgcatttagtaactacttatgtttctaatgtatataaggttacacaatgttttcttctttttctgctcctcagggtcagaatttgaaataaaagttttggaaagaaaaaacactcttgtc

SEQ ID NO: 478965 - DNA, 577 bp, Homo sapiens
tcatgggtgaagcaaaactccttggtagactttttttttgagacagagtctcgctctgtcgctctgttgcccaggctggagtgcagtggtgcgatstcgactcactgcaacctccgcctcccccgggttcacaccattctcctgcctcagcctccccagtagctcggactacaggcacccacccaccatgtccacctaatttttttgtatttttagtagagacagggtttcaccgttttagccaggatggtctcgtatcctgacctcgtgatccgcccgcctcggcctcccaaagttctgggattacacgtgtgagccaccgcaccaggccaatgtgatgattatctatggatataccctgatcatcagcaggaggaaatgaagaggtattggttaaaaatacaaagttgcagttacgcaggatgaataagtactaatttgtaacaattcagtatgaaacagtgtgaccgtggttaacaaggctctgctctatgcctgacatctgagaacagaggaattgaagtctgaactttgtccagaagaggatggctttgtaggctttgctgagcatgctgaa

SEQ ID NO: 478966 - DNA, 569 bp, Homo sapiens
ttcctttcatgggtgaagcaaaactccttggtagactttttttttgagacagagtctcgctctgtcgctctgttgcccaggctggagtgcagtggtgcgatgtcgactcactgcaacctccgcctcccccgggttcacaccattctcctgcctcagcctccccagtagctcggactacaggcacccacccaccatgtccacctaatttttttgtatttttagtagagacaggrtttcaccgttttagccaggatggtctcgtatcctgacctcgtgatccgcccgcctcggcctcccaaagttctgggattacacgtgtgagccaccgcaccaggccaatgtgatgattatctatggatataccctgatcatcagcaggaggaaatgaagaggtattggttaaaaatacaaagttgcagttacgcaggatgaataagtactaatttgtaacaattcagtatgaaacagtgtgaccgtggttaacaaggctctgctctatgcctgacatctgagaacagaggaattgaagtctgaactttgtccagaagaggatggctttgtaggctttg

SEQ ID NO: 478967 - DNA, 642 bp, Homo sapiens
accctgatcatcagcaggaggaaatgaagaggtattggttaaaaatacaaagttgcagttacgcaggatgaataagtactaatttgtaacaattcagtatgaaacagtgtgaccgtggttaacaaggctctgctctatgcctgacatctgagaacagaggaattgaagtctgaactttgtccagaagaggatggctttgyaggctttgctgagcatgctgaattcacggtttccgggtcagcccctgggctgcccagggacagggtggaaaccctgccccagaaagtccaggagccaggaacctgcttagagacacatttcaacaaggaaaaccacactcaggccggcctccttaaaaacacataggcccggcgcggtggctcaagcctgtaattccagcactttgggaggctgaggcaggtggattgcctgagttgaggagttcgaggctgcggtgagctatgattgcactccagcctgggcaacagagtgagaccctgtctcaaagaaataaacaaataaatgaataagcaagcaagcaatttttaagttgaacatcagttctctacttgactctagagttaaataggcatccagttgctttttgtgtttatttttatattcactgcttttgcctgcaac

SEQ ID NO: 478968 - DNA, 642 bp, Homo sapiens
accctgatcatcagcaggaggaaatgaagaggtattggttaaaaatacaaagttgcagttacgcaggatgaataagtactaatttgtaacaattcagtatgaaacagtgtgaccgtggttaacaaggctctgctctatgcctgacatctgagaacagaggaattgaagtctgaactttgtccagaagaggatggctttgtaggctttgctgagcatgctgaattcacggtttccgggtcagcccctgggctgcccagggacagggtggaaaccctgccccagaaagtccaggagccaggaacctgcttagagacacatttcaacaaggaaaaccacactcaggccggcctccttaaaaacacataggcccggcgyggtggctcaagcctgtaattccagcactttgggaggctgaggcaggtggattgcctgagttgaggagttcgaggctgcggtgagctatgattgcactccagcctgggcaacagagtgagaccctgtctcaaagaaataaacaaataaatgaataagcaagcaagcaatttttaagttgaacatcagttctctacttgactctagagttaaataggcatccagttgctttttgtgtttatttttatattcactgcttttgcctgcaac

SEQ ID NO: 478969 - DNA, 642 bp, Homo sapiens
accctgatcatcagcaggaggaaatgaagaggtattggttaaaaatacaaagttgcagttacgcaggatgaataagtactaatttgtaacaattcagtatgaaacagtgtgaccgtggttaacaaggctctgctctatgcctgacatctgagaacagaggaattgaagtctgaactttgtccagaagaggatggctttgtaggctttgctgagcatgctgaattcacggtttccgggtcagcccctgggctgcccagggacagggtggaaaccctgccccagaaagtccaggagccaggaacctgcttagagacacatttcaacaaggaaaaccacactcaggccggcctccttaaaaacacataggcccggcgcggtggctcaagcctgtaattccagcactttgggaggctgaggcaggtggattgcctgagttsaggagttcgaggctgcggtgagctatgattgcactccagcctgggcaacagagtgagaccctgtctcaaagaaataaacaaataaatgaataagcaagcaagcaatttttaagttgaacatcagttctctacttgactctagagttaaataggcatccagttgctttttgtgtttatttttatattcactgcttttgcctgcaac

SEQ ID NO: 478970 - DNA, 642 bp, Homo sapiens
accctgatcatcagcaggaggaaatgaagaggtattggttaaaaatacaaagttgcagttacgcaggatgaataagtactaatttgtaacaattcagtatgaaacagtgtgaccgtggttaacaaggctctgctctatgcctgacatctgagaacagaggaattgaagtctgaactttgtccagaagaggatggctttgtaggctttgctgagcatgctgaattcacggtttccgggtcagcccctgggctgcccagggacagggtggaaaccctgccccagaaagtccaggagccaggaacctgcttagagacacatttcaacaaggaaaaccacactcaggccggcctccttaaaaacacataggcccggcgcggtggctcaagcctgtaattccagcactttgggaggctgaggcaggtggattgcctgagttgaggagttcgaggctgcggtgagctatgattgcactccagcctsggcaacagagtgagaccctgtctcaaagaaataaacaaataaatgaataagcaagcaagcaatttttaagttgaacatcagttctctacttgactctagagttaaataggcatccagttgctttttgtgtttatttttatattcactgcttttgcctgcaac

SEQ ID NO: 478971 - DNA, 412 bp, Homo sapiens
aaaggacaaatattacttgatttgattcacatgaaacatcaggaattggcaaatcaattgggatataaatcagattagtggtcattagggctcagggaagcagaatagggtgtaaccactttatgcataatgggtttttgtaagggacatgatgaaattgccctggaacatggtgaatatactaaaagcaagtgcattgtatgctttaaaatggttgttattacttttgtattatgtgatttttaccttaaaaaacaaaaaagagaaaatagccttastctatacataataaactcaagatatgttacaaatttacatgtgaaatccaaaatactataatatttaaggaatagctaagtagaataacactgaaatttaacataatgaaacatttccttaaaaaaggaaaaag

SEQ ID NO: 478972 - DNA, 656 bp, Homo sapiens
attatgaatataaaacaaactaaaagctggatgtttgctttcaaaaagttggaaaaactagatcaattgtttctactatcctctgtcagatttgcagtgttactgatatttaracactagagccatcaacatcaatgcaatcattaggatttttaaaagtactttggatagcatagttaatatgctgtacttattagataaacagaactgttattctataaagttgtcatagatctcatttgtcatttgattaaaaggcaacaatttgtagtaaatgttagtatgtgtttctgaggctgccttcccctacccaccctctactgttttaagaaaaccgacactatcttgttatgtcagaaaacttagagggtctctatggttttatacaaccaaatacagttgatatagaatatcaatacttcttactctacattcctctctaccccttgtgtgattactatcacattaaaaattgaggcttatggaggaagctgctgtaaatcagtaggaatattatttctctgtgcctcttaaaatagacaattatgattcagatcctcaacagcccatgtataaagataagttctgcatatctatactggcatttaaacaaataaaagtttatgactatagaatctattaagaaagtttagtta

SEQ ID NO: 478973 - DNA, 656 bp, Homo sapiens
attatgaatataaaacaaactaaaagctggatgtttgctttcaaaaagttggaaaaactagatcaattgtttctactatcctctgtcagatttgcagtgttactgatatttaaacactagagccatcaacatcaatgcaatcattaggatttttaaaagtactttggatagcatagttaatatgctgtacttattagataaacagaactgttattctataaagttgtcatagatctcatttgtcatttgattaaaaggcaacaatttgtagtaaatgttagtatgtgtttctgaggctgccttcccctacccaccctctactgttttaagaaaaccgacactatcttgttatgtcagaaaacttagagggtctctatggttttatacaaccaaatacagttgatatagaatatcaatacttcttactctacattcctctctaccccttgtgtsattactatcacattaaaaattgaggcttatggaggaagctgctgtaaatcagtaggaatattatttctctgtgcctcttaaaatagacaattatgattcagatcctcaacagcccatgtataaagataagttctgcatatctatactggcatttaaacaaataaaagtttatgactatagaatctattaagaaagtttagtta

SEQ ID NO: 478974 - DNA, 656 bp, Homo sapiens
attatgaatataaaacaaactaaaagctggatgtttgctttcaaaaagttggaaaaactagatcaattgtttctactatcctctgtcagatttgcagtgttactgatatttaaacactagagccatcaacatcaatgcaatcattaggatttttaaaagtactttggatagcatagttaatatgctgtacttattagataaacagaactgttattctataaagttgtcatagatctcatttgtcatttgattaaaaggcaacaatttgtagtaaatgttagtatgtgtttctgaggctgccttcccctacccaccctctactgttttaagaaaaccgacactatcttgttatgtcagaaaacttagagggtctctatggttttatacaaccaaatacagttgatatagaatatcaatacttcttactctacattcctctctaccccttgtgtgattactatcacattaaaaattgaggcttatggaggmagctgctgtaaatcagtaggaatattatttctctgtgcctcttaaaatagacaattatgattcagatcctcaacagcccatgtataaagataagttctgcatatctatactggcatttaaacaaataaaagtttatgactatagaatctattaagaaagtttagtta

SEQ ID NO: 478975 - DNA, 622 bp, Homo sapiens
tagaccttccataagttctcattttgcagtcatggtggacatacttgacagtttggagatgtttccattagctctcattttgtagttttaatgaaacagagtagaggcatctcagacttctccatcagtcttggcttctacagtcactcccatgaatttttctcctatttttcagctacagccttccrgaaaattcatatcaaccctttcacatttatttaagctctaatttttaattaattccctgattctgctaaaatctgtcgtggttctgtattgctcaacaaaaccaaattgacaaaggctttgaactctgctctttgaggagttaaaagcaaaatagcactacttgaaagaaattaaaggagtcatgaaatcatatttaatttaaaaatagtgactagtgtagtggattaaatactgccccctcccaaaattcatatccatctggaaccacagcatatgatcttatttggatatagtgtctttgcatatgttaacagttaaggatctcaagataaaatcgacctaggtttatggtgactggtgttcttaaaagaaaaggagagggcacagaggctcacaaagaaaagatgatttgaagatgattgaagtaatgcag

SEQ ID NO: 478976 - DNA, 561 bp, Homo sapiens
ttgctttctatcccctgctgcttggtgtcctatagggaggcattgtaagcctgtaatcttacagctctttcatttatcatccttgagatcccagcctagaactgaacattgagaaacatgcttttagtttttacaggtctgatgaattaagaggtctataaaccaaaaaatataatttttctccatgtcttattttgtaagcatcagattttttcatgtggtctgtatattcttatttaagccagtattatcaagtttaaaaattccaatatagaacagttgaaagtttacaactaagctgagaaaagttaaaaactcctgccagggaaaaacaaataaggtttatttactgaagcaatggctgagttcttaattccaggataatattatttaggaaaactataatatgtctcatataaatagctttcgtttttttgttgttgtttgtttttttgtctgtttgtttggggacagagtctcactctgttgcccaggctggagtgcagtggcatgatctcagctcaccacaacttccacctcscgggttcaagtgattcccct

SEQ ID NO: 478977 - DNA, 573 bp, Homo sapiens
ggcagtaactggaaacagggtcaggagtagttgctttgtattaaatgggaaagttttgggctctcatgtactatacatgaacttctgacagtacattatgagtaaccttcaatttcactrcatcacccaccgtttcatttctttcccatacaattttggtcttgttcataaagcttctctaaatccaagagaatgcataatctgattgtgttattcagatctctctcacctttgcaactggtgaaacctctggagccctatatttctttccttctaccccttgtaattatctcatttgttggtttgaacaaatgatatttctgaacacatgtcgagtcccaacagctgagaatggtttttccctttcagttgaatcgtttgcctcctcttctctcctcttttcctgtcatttctcatcttagaatcattttcctatcattcaaatatctgtatgttttctttctggttgtatgtgtgtgtgtgtgcatacgtgtgtgagcgcacaagtgtgtgcatgggcttgcatgcacacatgaatgctctaccatatttccatcagcctagttccccttc

SEQ ID NO: 478978 - DNA, 596 bp, Homo sapiens
acagagaaggggcataccttgcacacaccagccacaccaaccttctagtcacycccttcatatctcatcttatttgatcactgccactcgctcttccttggaactcatctctaggaactttgtaaattcttctactctctaagtagcctgttccttaactcttcgttactatagttatgatctattagcacatcagcacagtgcttgttaaacttggtcaactttgagtctatcttctctccaccagattcaattattcgagaagagaatttttaattctagttaagtggcttttaaaacagatacatgcataaaacttacctcccttataaaaatattcatagacatgaaaaggtctcatttcagacactttaaaattggtaatgtttgttcctttttaaaatgataaaatgatggttcatcaagattaagtgatttgtctaaaagcattgttcatagtgaagatgttcatagtgaagacttatgactcctggtttagtaagctgttaacatcccacaagtacagaaatagtaagttgattggtagcaggtgccaacagtaagacactactaatcctagaggacattagttcatt

SEQ ID NO: 478979 - DNA, 544 bp, Homo sapiens
aacacaggactttttttatatgttgcacacaatgaaaggaatgtcacattctgttttttcaattgaagcatgtcacagcccagagggtctgttactatcagaaattcaacttgagaaaagaccttcagatcactgagaagaatgctacctaccagggaatgaatcaaatctaccaaaaaattactaccatttgatcagaaatatcacyttggtgggctgcatgtcatctccaattacagtcattataataaagatacagtaaaagagggatgagaaatatgcattaaatgtaaatcagaaacactggttacttaaaatcttagttaaaggttacttttaggctatgcccatttcatgtgtattaggctacacatacacactaacaaactaatcaaaataaaaaaagaaactgggattattaggctggaaacaagaagggtgaggtgatttcatactatgtatgaagagttgtaaagtagaagcaagccagacatgccccctcttccaaaatgaaaggtatgtgggattcagtttttagtagatg

SEQ ID NO: 478980 - DNA, 544 bp, Homo sapiens
aacacaggactttttttatatgttgcacacaatgaaaggaatgtcacattctgttttttcaattgaagcatgtcacagcccagagggtctgttactatcagaaattcaacttgagaaaagaccttcagatcactgagaagaatgctacctaccagggaatgaatcaaatctaccaaaaaattactaccatttgatcagaaatatcaccttggtgggctgcatgtcatctccaattacagtcattataataaagatacagtaaaagagggmtgagaaatatgcattaaatgtaaatcagaaacactggttacttaaaatcttagttaaaggttacttttaggctatgcccatttcatgtgtattaggctacacatacacactaacaaactaatcaaaataaaaaaagaaactgggattattaggctggaaacaagaagggtgaggtgatttcatactatgtatgaagagttgtaaagtagaagcaagccagacatgccccctcttccaaaatgaaaggtatgtgggattcagtttttagtagatg

SEQ ID NO: 478981 - DNA, 596 bp, Homo sapiens
acagagaaggggcataccttgcacacaccagccacaccaaccttctagtcactcccttcatatctcatcttatttgatcactgccactcgctcttccttggaactcatctctaggaactttgtaaattcttctactctctaagtagcctgttccttaactcttcgttactatagttatgatctattagcacatcagcacagtgcttgttaaacttggtcaactttgagtctatcttctctccaccagattcaattattcgagaagagaatttttaattctagttaagtggcttttaaaacagatacatgcataaaacttacctcccttataaaaatattcatagacatgaaaaggyctcatttcagacactttaaaattggtaatgtttgttcctttttaaaatgataaaatgatggttcatcaagattaagtgatttgtctaaaagcattgttcatagtgaagatgttcatagtgaagacttatgactcctggtttagtaagctgttaacatcccacaagtacagaaatagtaagttgattggtagcaggtgccaacagtaagacactactaatcctagaggacattagttcatt

SEQ ID NO: 478982 - DNA, 594 bp, Homo sapiens
acaatttccagttgggatatacttagagcaaagacaacagacaagagcactcacctcaccaaatcacaagagtgacccaggcacccaccagcaacccccactcacatcgaacaactcattttcccttttttgtattcattatgctaatttcaaaaactaatgctttgcatagttggcaggacagttctgttctaatgataagccattaatacaaagaaatatggtgtggatttcctaaatatgtctgtcttttctgaattttccaatggttcctcaggaagccaacacttttataagtgaatgtatctagttctttaygattttgagatgatataatcttcatgcacaaggtctgtgcaaaatcaaaatgcagcctttttccatatttccaaatgatgcttctacctccaggtagaagtaattcagcaatattcttcctgtcagtcatctccattgactatagaggccttggcagtaggtaagtgtgtgtgttcttgcattttggataaattccagcagcggtaaagactgaacctgctgagtaaaacctcgggctttggatagtctggtttatcagaagcagaataggccttg

SEQ ID NO: 478983 - DNA, 596 bp, Homo sapiens
acagagaaggggcataccttgcacacaccagccacaccaaccttctagtcactcccttcatatctcatcttatttgatcactgccactcgctcttccttggaactcatctctaggaactttgtaaattcttctactctctaagtagcctgttccttaactcttcgttactatagttatgatctattagcacatcagcacagtgcttgttaaacttggtcaactttgagtctatcttctctccaccagattcaattattcgagaagagaatttttaattctagttaagtggcttttaaaacagatacatgcataaaacttacctcccttataaaaatattcatagacatgaaaaggtctcatttcagacactttaaaattggtaatgtttgttcctttttaaaatgataaaatgatggttcatcaagattaagtgatttgtctaaaagcattgttcatagtgaagatgttcatagtgaagacttatgactcctggtttagtaagctgttaacatcycacaagtacagaaatagtaagttgattggtagcaggtgccaacagtaagacactactaatcctagaggacattagttcatt

SEQ ID NO: 478984 - DNA, 537 bp, Homo sapiens
  misc_feature (1)...(537): n = A,T,C or G
ttgctgggaggattaaatgattaaatatccatgaagtgcttacaactatatgcatgtgagcacctggaaatcaataaatgttagcaaatattatcaacatttcactctgtactagccttttcattaaagaatactaacttactgtctgcaaacatactttgatcaatcaaaagagaataaatattacatattcttggattaatacaatgtagtttatttacttatccagactaagaacagaaaaacagctcattaaaaatacattttggcattttgtattgatttgatttagttaattactatccagtatctgacacctaattaattccacttgaacctcatataacagtaggggkgtgtgggggaggaagatanagcatgcctatgtatgcaattcctaacaaaaaaacaactcatctaatcttcatcaaatctaagttctgagatttggataatagtcttgcagtccccaaaccttcttctaagattgggcattagtaatttctatgacgtgtcagggtataatgttttgttatg

SEQ ID NO: 478985 - DNA, 582 bp, Homo sapiens
gggactcaacctattgcttacgctttctctccaatctcagcactttagttcacaatattcccttgtttgatattctgtgtgtttccccatgctccaaccttgcctaaaatcacctcatctttcaaagtcttcttgaagtcattctaatagtgcctagaatacccgtggtctgtcatgggaaattggcacttacacaggttactttgttaattaaatctttactcattgtatgcccagccattggcgattagttggtaagcatcctgaaaggtgattctgtgtgtatgtcccccttgttttcaccggaacccagcactccacctggtctctcattctcatttgtcactatttgatgttggcaagttttgagatgaaatacagtgctggaggaggagcagaaccwtgagattctgttcactgtgatactgagatgtaatatcatgaagttaggtgtgtcagcttttcacagcacccaaggggccatccagatccttttgcagtagagtctacagccataccacccggaacacgcctgatctcattaggtccttttgcaccagaaattaatctactactgaatga

SEQ ID NO: 478986 - DNA, 582 bp, Homo sapiens
gggactcaacctattgcttacgctttctctccaatctcagcactttagttcacaatattcccttgtttgatattctgtgtgtttccccatgctccaaccttgcctaaaatcacctcatctttcaaagtcttcttgaagtcattctaatagtgcctagaatacccgtggtctgtcatgggaaattggcacttacacaggttactttgttaattaaatctttactcattgtatgcccagccattggcgattagttggtaagcatcctgaaaggtgattctgtgtgtatgtcccccttgttttcaccggaacccagcactccacctggtctctcattctcatttgtcactatttgatgttggcaagttttgagatgaaatacagtgctggaggaggagcagaaccatgagattctgttcactgtgatactgagatgtaatatcatgaagttaggtgtgtcagcttttcacagcrcccaaggggccatccagatccttttgcagtagagtctacagccataccacccggaacacgcctgatctcattaggtccttttgcaccagaaattaatctactactgaatga

SEQ ID NO: 478987 - DNA, 617 bp, Homo sapiens
tgttgtaacagtttcccacgggtggctgccgatgtgaaccaaaaaaaaaaaaaaaaaattcagacatttaaaattatgcatatgagttaaacaatttttataatctatcaaatcattcattacaatgtaagtttaatgagtttacctaggaaaaattaccttctgaaacactgatgattatgggaaactgatctacatttttaacaggcttcagtatttttccacaatacaggctatgtaaaaaaactcatatctataaagatcaaagcagtctacaccatctttcctacttatccttatccactttcacatgtaaattgtttctaggaagaaccartgattcatgaaaatgtatttaaaaattatgttctactgaaacaaatagccaaaagtatcattatgccatttattattttttctgaccccaattctatcagtttatacggaagtaacaaaagtaaaagagtttatgggcactataaattcttacagggatcacaaaaagatccaaagcattgatttaattattgaactttcccttcattttaatgtaatacataacaatggctcctccagtcaatctttatctactgtttttctcaaaagagtgattctga

SEQ ID NO: 478988 - DNA, 548 bp, Homo sapiens
cacaagccttcacacctctgctctcaggaagggcacagaactgggagctggggtgcttctgagaaaaaaagcagtgatgccacacagtggctcccaccacatggcaggtattatcctgtttctaggaacttccaagtgagattggtagtgttagctcgagttccctgatttattagggttttgtttttttttgttttgttgttgttttgtttgtttttttttttgagacagggtctggctctttcacccagactggagtgtggtggtgtgatcayggctcactgtagcctccaactccttgggctcaagtgatgctcctgcctcagcctcccgagtagctaagcctaaacgcatgcaccgccatgcccagctaatttttaaatgttttgtagagatgagggcgggggagacatactgtgttgcccgggctggtcttgaactactggcctcaatcctcccacctcggcctcccaaagtgctgggattacaggcatgagccaccgtgccaggcctgatttatcattttcagaaagtatttcttttttgca

SEQ ID NO: 478989 - DNA, 601 bp, Homo sapiens
agtgtgcccatttcttaagctgtctatttttatttgttgagctggggtttggctggctccactccagatgtctctctcacaagatttggtgctgatgatctatttatagaactgtggttctgttgccatggtaacatgctggaggccagggcggctggggagctatttctggactggtgctgtaatgtaagattgattgggcaagttagtatatcctctaagccagactaactctgaactagtaaaaaggaagaggggaacagaaaacttaggcagtttctttaaataaacttttctctctttatgattttcttttctcgttagcccgctttaaaacaattccaatctctacatgcccctccctccaaaaaataactggttttaacatyaattttccatattaattaccccaatctttcaaaagtaaattttcctgtgtgtctagtcaagcaacacaaacaagatgctttttttaatgaaaagcgtaatatctggagtgttctatttcatggaccaaacagaacggaagagaactttgtgtttgtttcctgttcaggatggctagggcgagaagggcccctttgtgccaacctcttttgtt

SEQ ID NO: 478990 - DNA, 501 bp, Homo sapiens
tgagcacctaccatgtgcaagctctctgctcagtgcttggcatacctcattacattcaatccttagagatggccctcagttaatacagacctaactccctcccaagatctggccctccctgccttgcccacctcatctagatttctccttggcctgccaggtgccgctctcagtggcctttctgttccaagtacgcatgcctggcctttgccctggcagttctgctctctggaaatgctcttgcctgggtcttagctagcttgcccctttcatgacatgactcagttcaaatgtaagctgctcagcagccatctctgatctccccaagaagattctattatcacagaatactagcactgatcaccttctgtctttatcttatttgttccccccaccccctccccccattcagctccttcagtagaatgtaggctctaccmggacaaggatcaggtccaacttgttcaccgagctccagggagcagcgcagtgctgggcact

SEQ ID NO: 478991 - DNA, 459 bp, Homo sapiens
gcagtgtctccttctccctgctgacctcttcatggaggtctccgctcagacgtcgctctgcagagaggcctctcctggccttctttgggcactgtcctgtctgccacacctcccgctacaaatgccatgagagcagggccagggccaggcggtcaccagcatctggccctgcagacacctgagaagtgcctgctgaatgaagggctgaatggacagagactcagccacccatggcaagtgggccacaccccaaagccagccaggagagaccgtccctgccctcgtggacggggggccaaggtgtcagctctgtgaacgagtatagcccagggagccgcatgagccccagtgaggggccagatgcggtcctgagggctggggaaggccagcagggacccagccctgaaggcactgggggatgcagagggctcycagcggctggctgaccatgccctcact

SEQ ID NO: 478992 - DNA, 664 bp, Homo sapiens
ttggtatacaagattcagaagtatacacggaggcacattcattacaaatctgttatacaggcttcaaagccagtatatattgcaagcagaactgcgaaggatctctactcagatccagaatttccttccttcaaatgcaaggagggttcctgctaagcagaaggagcctttaggcccagtggagaaataaaatctctctgacaggacatgcaagggcttagctatgctcactmaaaaaaaattgacatcccttgaggcgtctagtgcctatgaatccttctcgtgtattttggaacttctggtctaaagatcgtcttctctggtcatggggacataggcaatgctaaaggatgtaaagcagagaatcattaagggcagcaaattttttgaaattttaagtaccctaataatctttaacccaccaaagctatgcccaccctcatgctatttctctttaagcatctgtctcacattttctataacacaatggtggctcattgtttccactctcttccttctcaactgccaaaatcacgcccttccttttatttaacgtataaggtaatcttaaatttcatatcctatgatcatgacaggagtaaatcaattttctcaactactttgtctatggcaacccaacaattcacctgttagctattaaata

SEQ ID NO: 478993 - DNA, 665 bp, Homo sapiens
gcacaagctgtttcctctgcctcactcttccttctgtgttttgcctgatgacttctatttagttttccatgttcatgctttgatggcacaccttcagagacctgacaagtctgccaatttggatatcataccaacttcattttcatggtgaacttcacagcagtgattttatactgtatttatatgtctattcttcacttaaagaaaaacatattagactttagcctgcaggacagcaatatgtacatctcttttattcattaatgtatctggcatgcctagratatctggcatattgcagataataaatcattgttgaataaatgaatgaagagatacaataatatcttctttaatctttctccattaccattaccaagaatttgcttgattatgtcaattgagagctcacaagtgtcacaggatcctttgggtgtcacttttccagcatgaaacctctgtggctggtggtatcagcctttgcccaagttttgcttgggcccactgggctcattccacccactcagcctggcaggctgtgcttggctcatgctagcagccaagatcccacacctgccaagggcaagccaggagcagagtggtgcagggtgcttgcatgagcaagcgtggggtccggccactgtgcacagctaggcagaccagca

SEQ ID NO: 478994 - DNA, 582 bp, Homo sapiens
tgatatgacaattgtacactctttattctgtgattggttacttttgaaaatttatatggcttttatacaaaatctaaagttaaggccttgacagcttcagcccaaaatacacatatccagtatattggggaatttttaaccccacaaatcagacttttaaaaaaatgatatatgttttaaatttatgtcaattttatgggaggtctaatttatgcatgtcatatttcyccctttagatgtacacatcagtgggttgtatcaaatatatacagtcatgtaaatatcaccacaaacaagatatagaacagttccatcacctgagaaagttctttcatatccctttatagtaaatcctctatcttcaggcctttgtgaaaactgatctgttttcttcccccagtgatttgtctttttcaaatgttatacaaatggaataatggagtacacagcttttcaatccttgctctttcccgtagtatggattaatccatattgtggtaatgttcagtagtctgggtttttttttattgctgagtaatattccattgtctgtatgtacaacaatttgggtatcctttcggc

SEQ ID NO: 478995 - DNA, 601 bp, Homo sapiens
agctggaactcaggatcattgtatgccccayacctgatccttgtgcagtcttgagcacagtggctcttcgctggtgttgtaatggggaaaagattcactaaaatagatcagagtgaaagagaaggacttaaaaatgatactaaactgtttttgtcttttaatttcttcatttgaccctgctcattttaaaactttgaactataaagagtcttcaataacgatcacacaggtgcttatgttagcatattgaagcctaaaacaaggcaagagtcatcatctctttaactatctacatggataatcagcacaattgaagtgtgtgtctttcaaaggcaaaaatcatttctggcttcacctataactcagatttctcaggtaggtgagtatcaaagcccgctcaacatatgaatttgtgataaaatgtaagaagttgccacatggcaatactgaaaaaaggtgactcttctagtatgtctggtaatctttgctagacaaaaaaattctctaaacattgtttctatgtgtctctctcacttatatgttattatacctagtacaactctgaaaaatgtgtgaaaacactagatcattaaattcatga

SEQ ID NO: 478996 - DNA, 400 bp, Homo sapiens
accagtgactcaaacagctgaactcacgagaaaaagggaaggagtcaggaaaaaaatgtacccttgctttttaagtttccagtcgaaaccaaaatgcttctgggatctgtagtaagtgtgtgtgtgtgtgtgtgtgtgtgtgtgcacgcgcacacgtgtgtgattgattgaagaaaatctacacacaacagtatgctcatcttagatggatatgaaaaaatgaaacccacaactagtgactcctttaagaattgcttagtagcttcttttttccccacatratttcattttgaagaaaactatatacaactacagttattctgggaaaggatgttattaatgatgcttgcaatagagtctcagtctggaagaataatttcattagaaatgaaacagaagc

SEQ ID NO: 478997 - DNA, 499 bp, Homo sapiens
ctgctggaggggagaggggcttaatttcctacataaattgctattgactttataacttaagtaaaagcattgggagatatgtaattgtttaatgcatttttattggttgttaaatgcccaaagttgagagagaagaaaataaaagattcttgctcttgttatcccttcatttttataccaaagaaaagcactcgtgactcattccgggtaaagagttaatggagtgtgcactgattgagaacaaatcttgcacccaccaggagctttgctcctgacactcctagaagctttgcaccttgtttccaaagctctttacaaatcatcataaaagagaaatgatctcagaagcacttaaagccttttctacacccacttttccaataaatctcaaacrtaactttcattttgatcacagaaatgcaaattttctgacaggcaaactacagcatgactaagtccaaatcgggtacagtacatttactcaagtggaaagaataat

SEQ ID NO: 478998 - DNA, 625 bp, Homo sapiens
acagaaaaccaaataccgcgttttcacttttaagtggaagctaagtgatgacaacacatgaacacatagaagggcacaacacatactggggctcatcagagagtggaggctggcaggagggagaggatcagaaaaaataactaatgggtactaggcttactacctgggtgataaaataatctgtacaacaaacacccatgacacaaatttacctgtataacaayctgcacgtgtacacccgaacttaaaataaaagttaaaaaagccaaaattccatttaatatataatactatgattggaaaagaacatttgatgataatttaattttgaatagacttataaaaatccaaaaattataaaatcattttttgttaaagtatttttcattgatacttaatatttgtagttatgtgtggggcccatgtgatattttgttccatgcatagaacgtgcaaagattaaatgagagtatttaggatatgtgtatacacacacaaatacacacacacacacacacacaattttaataggtgagcttttctcagtccctgaagttcaaaatgatgatcacgtaggcacagcaggcacagaccctctcatcattgtcccttgtgtccccagggg

SEQ ID NO: 478999 - DNA, 625 bp, Homo sapiens
acagaaaaccaaataccgcgttttcacttttaagtggaagctaagtgatgacaacacatgaacacatagaagggcacaacacatactggggctcatcagagagtggaggctggcaggagggagaggatcagaaaaaataactaatgggtactaggcttactacctgggtgataaaataatctgtacaacaaacacccatgacacaaatttacctgtataacaacctgcacgtgtacacccgaacttaaaataaaagttaaaaaagscaaaattccatttaatatataatactatgattggaaaagaacatttgatgataatttaattttgaatagacttataaaaatccaaaaattataaaatcattttttgttaaagtatttttcattgatacttaatatttgtagttatgtgtggggcccatgtgatattttgttccatgcatagaacgtgcaaagattaaatgagagtatttaggatatgtgtatacacacacaaatacacacacacacacacacacaattttaataggtgagcttttctcagtccctgaagttcaaaatgatgatcacgtaggcacagcaggcacagaccctctcatcattgtcccttgtgtccccagggg

SEQ ID NO: 479000 - DNA, 625 bp, Homo sapiens
acagaaaaccaaataccgcgttttcacttttaagtggaagctaagtgatgacaacacatgaacacatagaagggcacaacacatactggggctcatcagagagtggaggctggcaggagggagaggatcagaaaaaataactaatgggtactaggcttactacctgggtgataaaataatctgtacaacaaacacccatgacacaaatttacctgtataacaacctgcacgtgtacacccgaacttaaaataaaagttaaaaaagccaaaattccatttaatatataatactatgattggaaaagaacatttgatgataatttaattttgaatagacttataaaaatccaaaaattataaaatcattttttgttaaagtatttttcattgatacttaatatttgtagttatgtgtggggcccatgtgatattttgttccatgcatagaacgtgcaaagattaaatgagagtatttaggatatgtgtatacacacacaaatacacacacacacacacacacaattttaataggtgagcttttctcagtccctgaagttcaaratgatgatcacgtaggcacagcaggcacagaccctctcatcattgtcccttgtgtccccagggg

SEQ ID NO: 479001 - DNA, 543 bp, Homo sapiens
ctgcagattcaggacatctcagcctccataattcatgtatattactagtatattactagttctgtttttctggtgaaatctgactaatgcagatcagtttgtcaatttctgcaaaaaaagcccgttgagattttgatagacagtacgttaaatccatattcatcatcataatgatcatcttctttggttatagaattttgggttgagagtatttgtttttctttttagtgtttcttcctcccagcaattcaaatatattatttcctaattttatggctttcactgtttttgttgagagggcagttgccaatcttatacttagtcatttgaaattagcttctcttttttaaaaattcccacttactatgtctagaaatattgtttctgccccaggctttctcttgcctctttttcagggacctcaattrcatgtgcactggacttcttcactgtgttctctgtgtttttcatgtgattttctacattttcatcttctttacctctccattttttattctggatattttctgtctttgcctatgt

SEQ ID NO: 479002 - DNA, 517 bp, Homo sapiens
ttacaaattagaaacctaaagcctaaggaggtcagaataattggttaaagtccataaaaccagtgattgkgattcaaactcaagtttctctgatcctctgaacagtagtactttcaactctttcattatatagatatacagtttatttgcccagtagacacttattaagtatgttataatttaacattaaaaatcaatgtcaaaataacattatagaagctctgtgctcaatttggcaaaatgaatttaacaatgaaaattactcatttgatttgcattttggtttctagcttggggattataaatgcaatttttcagaatttttttgttttctttccaatttttttgtattaccatgattttctattgactcaatatgtctgaaatatgttgcttttgttcccttatatttaattattgatacagaagtttatgtgtgacctatcgaaagcaaaattcagagtagtatattagagccgtattcctccacgttcacttttatactgggcaagtgttt

SEQ ID NO: 479003 - DNA, 458 bp, Homo sapiens
cagtttgctgcttgtgattgactgaagctcagtgtcttgtgattggctgaaacttcgctctttgttacaaaatatacatctaaattgggtttcrgttggtttatatactaaaagaggttgtagtttgtggtttgtttggtaggaattcaaagtacggaaacagcctcaatccaataggctcctgcttatttaatttaacaaaattaacctttcattgggtcctgactactcgatttaaacctccctgtttgactcttcttatgttagaaattcattccctaaaagtcttttcttaatttggttgcaaaaaaaaaaaaaaaaaaaagccacccacatgccatggctgcctgtgttttttcaccctggaattctgccattactgaacagtatgtgctcagctatgctaaagcttttacaacccccaccgtcatattatagaagcaaaaaaaaaaaaaaat

SEQ ID NO: 479004 - DNA, 458 bp, Homo sapiens
cagtttgctgcttgtgattgactgaagctcagtgtcttgtgattggctgaaacttcgctctttgttacaaaatatacatctaaattgggtttcggttggtttatatactaaaagaggttgtagtttgtggtttgtttggtaggaattcaaagtacggaaacagcctcaatccaataggctcctgcttatttaatttaacaaaattaacctttcattgggtcctgactactcgatttaaacctccctgtttgactcttcttatgttagaaattcattccctaaaagtcttttcttaatttggttgcaaaaaaaaaaaaaaaaaaaagccacccasatgccatggctgcctgtgttttttcaccctggaattctgccattactgaacagtatgtgctcagctatgctaaagcttttacaacccccaccgtcatattatagaagcaaaaaaaaaaaaaaat

SEQ ID NO: 479005 - DNA, 458 bp, Homo sapiens
cagtttgctgcttgtgattgactgaagctcagtgtcttgtgattggctgaaacttcgctctttgttacaaaatatacatctaaattgggtttcggttggtttatatactaaaagaggttgtagtttgtggtttgtttggtaggaattcaaagtacggaaacagcctcaatccaataggctcctgcttatttaatttaacaaaattaacctttcattgggtcctgactactcgatttaaacctccctgtttgactcttcttatgttagaaattcattccctaaaagtcttttcttaatttggttgcaaaaaaaaaaaaaaaaaaaagccacccacatgccatggctgcctgtgttttttcaccctggaattctgccattactgaacagtatgtgctcagctatgctaaagcttttacaacccccaccstcatattatagaagcaaaaaaaaaaaaaaat

SEQ ID NO: 479006 - DNA, 617 bp, Homo sapiens
aaaattctgcctaagggaatccatgtataccagttggttaaccttgtgacattccactaaaaagcaccaggctcttttgtaatacataattcatgaaccactctgattgtttagcattgatcagcacttgaataaattgagttgctatcatattaacataagtagcaatgctttagtgagattttctttcttcctttcttttatgatttatagttcttraaacaggaagtcagtttagaagactgcagagttatgtatccaactattacttttgaaccaacctaatacaatgataacagaaggctgtgaagtacattctaacaactgtttgcatattccatttaaattcccagatttgactgccagtatggatttgttgtcagacttcctgtcttctctgtggtcagacatgcctatctttgcatttttcaactctatatgtaattattcttgtctaccaaaagagtcaaactctctaaaatatttgaagagatttattctgagccaaatatcagtggccatggcccgtgacacagctctcaggaggtcctgagaacatgtgcccaaggtggtcggggcacagcttggttttatatattttaggaagacatgggaca

SEQ ID NO: 479007 - DNA, 617 bp, Homo sapiens
aaaattctgcctaagggaatccatgtataccagttggttaaccttgtgacattccactaaaaagcaccaggctcttttgtaatacataattcatgaaccactctgattgtttagcattgatcagcacttgaataaattgagttgctatcatattaacataagtagcaatgctttagtgagattttctttcttcctttcttttatgatttatagttcttaaaacaggaagtcagtttagaagactgcagagttatgtatccaactattacttttgaaccaacctaatacaatgataacagaaggctgtgaagtacattctaacaactgtttgcatattccatttaaattcccagatttgactgccagtatggatttgttgtcagacttcctgtcttctctgtggtcagacatgcctatctttgcatttttcaactctatatgtaattattcttgtctaccaaawgagtcaaactctctaaaatatttgaagagatttattctgagccaaatatcagtggccatggcccgtgacacagctctcaggaggtcctgagaacatgtgcccaaggtggtcggggcacagcttggttttatatattttaggaagacatgggaca

SEQ ID NO: 479008 - DNA, 496 bp, Homo sapiens
ctccattgtcaactgttgctcacccttcccagactccccagcccctccctagctccttcctaatctcggtgccaccttttcctttttctctgctcagcccgtgttagggtgaagcctggaggaaccccgggcgctgtaccagaggagaaaagacaaggatgaccctcagcccaccagcccaatcactgggttcaccacctccatagcaatgagactgatgctgctcacctgttctggccacatatggcccgtggctgacttggccttcagtggcatcatgccttaggggcttttttttccctcaagacagaatcttgctctgtcgcccaggctggagtgcagtggtgcaatcttggctcactgcaaactccgcctcccaggttcaagtgattctcctgcctcagcctcccgagtagctgggattacaggcgcrcgctatcactcctggctaatttttgtatttttagtagagacggggtttcaccatgttggccca

SEQ ID NO: 479009 - DNA, 639 bp, Homo sapiens
ttgtgatttttatttccctgagtgttcacaggaacactgtcctcactccttgcccccacccctctgagcttcctgattaataagaattcaatcccacattcattaagccccttcagctttaaccttttcattcttctctagcagagacctcttcttgaagaatcccaaagcctcctcattctgaacatcttagatcacaatttaaaatcaacacatcagtttcaagaaagagttatattgtgatttactcataatcaccctcccttcaattactcaggcatktattcacttcccttgggctgcaaatccaaagagcgattgattttcaggctcatggtggatgccaactcagggataaggctgttctggaggggaaggagccacccatgagcagaagctaccttgaattcattttccacagttggaattaaatgcttttggcacccaccgtcaatgtgatttttaacatatcatgaaaggaagttaaactaaaaaagacacatgcaggcagaacaaacagaggattatggggttttattcataggcattatgatagaaaaggtaaggtggtgccaatggttttacagttcatgtcaagtgagacaattcgtgctggaacctcagagctggttctcgaga

SEQ ID NO: 479010 - DNA, 663 bp, Homo sapiens
aacaggatgtgtgtagaaaaaaagagatttatttaaggaattgtctcacgtgattgtagagctgtggcaggttcaaaatctgcagggtaggttggcaggtggggtacccctgcctgttgtagctcgagtccagagccgtgtgctggcagaattccttcttgcttggggaggttggttttctttattaaggccttcaactgattggatgaggcccacctaaattatggagggtcatgtgctttattcatagtttactgatttaaatgtgaatctcatctaaaaaataaaaccaaccgactttctcagaaacatccagaatagtgtttcacygaatatctaggtaccgtggcctagacaagttgattcattaaattaaccactgcatacctccagcccaggtcctggagatgaactggcagggcagggtgagtggccggtgagcaggcaggtggccaggcctgtgcctctgtgccggccatggaaggagctgaagccggaccgggcatgcgagtggttatcgccggggtcaggtgcacactgaggctatgtgctcattttccgacccaagtccaggaggaaaaggccatttagatcccaacaatgttggcttcctgtgttcccgagaggcaggaagcaaccccaggacagagtaccggcagccca

SEQ ID NO: 479011 - DNA, 619 bp, Homo sapiens
gactttgttcttttaattcctttagagcataaaacattggccaaaagattctgttgttttacagatgaggaaactgaggcgccccacgttgagtgacttccccaaggtgtcccggtgtaattcttcacctgctctctgtccctgggcctttgtgcttccttctccttgtctctcactgcctactggcatgcatttctccatccttgcctgccattcttccttttgctttccatctcttgacagcagcaggatatatttaggaaggataaggggataaacttccgggcagtgaagggtctgattgggggagatgggtggcccagagaggcccagaaagatatgacagatggccccttgtcatgcagtagccttgtgcatgggaacaggcaaatggcaaagatgactttttgggggcatagcctacctgaggagtctctcacgtgtgctgggggctcagaatrcaccaggctgccgcagtgctgctctgccctgcccaaggaggccaactaagtgggggagagggtagactggcagggcagcaaccaggcagacagatgggctttgtataggagtttcctctatagggaatgggacccactggtggtgagcgctccaccca

SEQ ID NO: 479012 - DNA, 206 bp, Homo sapiens
tgtgagggaatgaagcaggggsaggtgtggggtgacctcaggaggtgctggctgtctctagagacaagatatgctcacctgcccgttctctgttccttccacaggtggctgccccctgcgttcctccatccaaccatgagctggtggtgagtgacagcccttccttgccctgcaagccctgcctcctctccctcggagctcccagc

SEQ ID NO: 479013 - DNA, 582 bp, Homo sapiens
cctcagcctcctgagtagctgggactacaggcgcayggcaccacaccttgctgatttttgcatttttagtagagatggggtttcattaggttggctaggttggcttgaactcctgacctcaaatgatcctcccgcctcggcctctcaaagtgctgggattacaggcgtgagctactgcgcgcccggccgaacctcaaatttttattgaagtgtcagcatttccctttccccagcacccagtctcccttccatgcttccactgcccctcagcatgcatcgccccgatacactatgcattttacttatttatcttgtttaaggggttttgcccatgccagcatgtaaactccattaggacaaggaatttttatctattttgttcggtgctgtgtccccgctgccttgcacacggtaggtgctctatatatgtttcttgaatggctggaaggaaggcattcagcccgatgtctggcagattaggtactcaataaacaggactgctatgactccatgttccctagctggtgaatgggtggggctgttgagtcctaaaggtggggggccatgggggaaggtggcagc

SEQ ID NO: 479014 - DNA, 653 bp, Homo sapiens
ctgtcagatgatagggcctcgtgccatcaacatctacccctgtgccaaccaccaaaaccactccctgttcctctgcagcccagggcgggtgaagacggaggggccagcacagggagtacggtcagagaggggcagggaagaaaagacaaagccccactgtgctgggagtctgcycctggggtgtggagacaagaccaaccccgaacggggctcaaagcacgtcctggaagagaccccgagcccttctgtgggatccttccatttcaggcatccgccccttcccctctccccaaaatgggaggcaggaggagcccatggggacccgtggacccatctcccagcctcctcctgaaccaatagcatctaagccacacagtggagcttgctattttctaagactcttgtctccagggaagcactaccacttccccaaggactaagaccccccgccaagagtcagggctccttctctgcctcagccctcggtttcccttgctgtggttttgcgcatttccccttgatccccatggccactcatcacacaccctctctcctcccacccgccctgagcaccgaggcctggcgcagtcgctgatgaatgagctctggatctcgcttagatggaggcagcaccaaaggctgagcccagcctg

SEQ ID NO: 479015 - DNA, 653 bp, Homo sapiens
ctgtcagatgatagggcctcgtgccatcaacatctacccctgtgccaaccaccaaaaccactccctgttcctctgcagcccagggcgggtgaagacggaggggccagcacagggagtacggtcagagaggggcagggaagaaaagacaaagccccactgtgctgggagtctgcccctggggtgtggagacaagaccaaccccgaacggggctcaaagcacgtcctggaagagaccccgagcccttctgtgggatccttccatttcaggcatccgccccttcccctctccccaaaatgggaggcaggaggagcccatggggacccgtggacccatctcccagcctcctcctgaaccaatagcatctaagccacacagtggagcttgctattttctaagactcttgtctccagggaagcactaccacttccccaaggactaagaccccccgccaagagtcagggctccttctctgcctcagccctcggtttcccttgctgtggttttgcgcatttccccttgatccccatggccrctcatcacacaccctctctcctcccacccgccctgagcaccgaggcctggcgcagtcgctgatgaatgagctctggatctcgcttagatggaggcagcaccaaaggctgagcccagcctg

SEQ ID NO: 479016 - DNA, 501 bp, Homo sapiens
gatggtttgatttctccccatagcaagaagagaaacttcttatgccaggttcacctcctgatcagaatctgagaggattctgatccaccrtttccaactcagtgaagtggttatggggccctcaaattgggcagaaaggcctgagcacaactggaatggttgtgaagcaaaccttgacgaggacaagtgtgacccaggtttaagaccatgtgtctcggcacaagaggcgcctgctccaaccccatccctgagagctgagggatgagctgctcatgtccaaaggcaggggaatggacagaatgatcctctaaaaggttccggcgtcagggaggaggagtgggcacagataggcatggaggaagagactgggctgagcggaggtaacagtgctctctctggaaatggcccagactcatctacccctactgcctggaagacaggcggctgaggccaaaactactctccaggggatgaaacttcctgagcagttcagggccaagg

SEQ ID NO: 479017 - DNA, 569 bp, Homo sapiens
taaagaacaaatcaattatggagtaatcaagttgggatggaaacttcagataaaaaatgatattttcccattttacctgccacctttatccccgtttgtttcagagctgcagtagcgacctgtatctgctagggtccaggcagaagacagaaaccacatcaactatttaaacagagagaattttacataaagagttgttggctgggagtggtggctcatgcctgtaatcccagcactttgggaggccgaggcaggcggctcacgaggttaggaaatcgagaccatcctggccaacctggtgaaatcccstctctactaaaaatacaaaaattagctggatgtggtggtgtgcacctgtaatctcagctacttgggaggctgagacacgagaatcgcttgaacccaggaggcagaggttgcagtgagccgagatcgtgccactgcactccagcctggcgacagagcaagactccgtcaaaaaaaaaaaaaaaaaaaaagctgttaaccaggcataatgcagttaactaggtaattgagaaacaaaaggagaatgctaatgtatctcagag

SEQ ID NO: 479018 - DNA, 659 bp, Homo sapiens
tgaatgggtaaactatgagacatccatccaatggaatactactcatcrgcaaaaaggaagaaactactgatgcgcataacttggatgaatctcagaagcattatgctgagtgaaagaagcccatatgaaaaggccgcatagcatatgataccatttatttggcattctccaaaagacaaaactatagtgatggggaaagacatggggacagtggctagggctgggagcaagtgtgactaaaaaagaatagtatgagagaggtttcgggaatgatggaattgttcagtattctgatagtgattgttatactaatccatacatgtgttaaatttcatggaactgtaaacccatttttaaaagtcaattttgctgtgtgttaatttaaaaattaaagctaaaacctaacaacaatcaagaaatatattggtgtgtctgaagataaaaaggaactgtttaaactgatagtaaagaaaagccttaaatttttggttgtgatttctgcatgtagtaagttgaatttttccaaactgaggttatcgcattgaatatgaattcagaaagtactaattactctgtcaccaagaaattctaatccattagtagaatataatcagattcacataaattaaaaaataaaatatagtcaaacttctttgagc

SEQ ID NO: 479019 - DNA, 667 bp, Homo sapiens
ggtaaactatgagacatccatccaatggaatactactcatcagcaaaaaggaagaaactactgatgcgcataacttggatgaatctcagaagcattatgctgagtgaaagaagcccatatgaaaaggccgcatagyatatgataccatttatttggcattctccaaaagacaaaactatagtgatggggaaagacatggggacagtggctagggctgggagcaagtgtgactaaaaaagaatagtatgagagaggtttcgggaatgatggaattgttcagtattctgatagtgattgttatactaatccatacatgtgttaaatttcatggaactgtaaacccatttttaaaagtcaattttgctgtgtgttaatttaaaaattaaagctaaaacctaacaacaatcaagaaatatattggtgtgtctgaagataaaaaggaactgtttaaactgatagtaaagaaaagccttaaatttttggttgtgatttctgcatgtagtaagttgaatttttccaaactgaggttatcgcattgaatatgaattcagaaagtactaattactctgtcaccaagaaattctaatccattagtagaatataatcagattcacataaattaaaaaataaaatatagtcaaacttctttgagcagtccaattgactg

SEQ ID NO: 479020 - DNA, 667 bp, Homo sapiens
ggtaaactatgagacatccatccaatggaatactactcatcagcaaaaaggaagaaactactgatgcgcataacttggatgaatctcagaagcattatgctgagtgaaagaagcccatatgaaaaggccgcatagcatatgataccatttatttggcattctccaaaagacaaaactatagtgatggggaaagacatggggacagtggctagggctgggagcaagtgtgactaaaaaagaatagtatgagagaggtttcgggaatgatggaattgttcagtattctgatagtgattgttatactaatccatacatgtgttaaatttcatggaactgtaaacccatttttaaaagtcaattttgctgtgtgttaatttaaaaattaaagctaaaacctaacaacaatcaagaaatatattggtgtgtctgaagataaaaaggaactgtttaaaytgatagtaaagaaaagccttaaatttttggttgtgatttctgcatgtagtaagttgaatttttccaaactgaggttatcgcattgaatatgaattcagaaagtactaattactctgtcaccaagaaattctaatccattagtagaatataatcagattcacataaattaaaaaataaaatatagtcaaacttctttgagcagtccaattgactg

SEQ ID NO: 479021 - DNA, 585 bp, Homo sapiens
atcgggtcagggcttccagagggtggagggttgcaaataatgaaaaggagtggaaatatgcctatagtattctgtagcttgaccaaatggtgattctcacagtgtggtcttcccaccctcttgtggatgaatcacttaggatcttctaaaaaatacagtttcccatgatcccctttagtcaaatgaattcagatttccagggatggagctcaggagtctgaatttttaacaagttcttcaggaaaccaaaacgctcatgaaagcgtgagattaactattagagctcacggaaaaggagggacaaataaatgaamtataaaaaggaggaaatgcctccaaccagtgggctcagacagaaaaggaatcagtcatgtaaattatggtacctccatgtcataaaacacagcaatcaaatacggtagatggaaatatactgacatggagataattcgacatggaactatgtctgtcatatactgtcaagtgcaaaatagtgtgtatgggataactccattttatatgtatatatgcatagaaaaaacatcttaaattcattcatccaaagaatatccactgagttatcag

SEQ ID NO: 479022 - DNA, 640 bp, Homo sapiens
tgctaaaaatattcctaaacctctgccttttgataattcagaaggggaggtattacattgagaaatagctgaataataaccacctccctactggaagttcaggataaacctagagaaggcattggactccatcagagaagcagccatattggatcctgtctgttgctgtgaggtctctctcctccctgctaagacacacttcaaataaaatcttctacatctcttcttgtgtgaaagygagatagtttcacatttcagattgttagtagccactgcttaaaagtactaagtcactacccacctacaaatcctgttttgtctctttctcttaaaaaatatttttaatggggcttaagatttgggatataaagcaagaacacaggaaagagatatgatttcactactcaattacaaatggaagaattatgatattggagcttacttcagtgtcaatcctcatgtcttacgggaattccttcctttctgatgtttcaaattctacctatatttagtaaactgaatagataactttactggttattatatacattaaacacaaagcaaaaaagagtaaagacgtgagatcaatttttactatgcactcctagtagaatatcaagggctctgcagacattaaatg

SEQ ID NO: 479023 - DNA, 653 bp, Homo sapiens
ggacaatgtgtttattcatgtagctgtagctattctgytactaggagtgtgtgtttgaaacagacataatgtctggaaggaaagaaaacacccaaaagaaaaaaactaaacacatatcatttttttctcaatgatctttgccacctacacatatattaaacacatcatactcttcaaaacatctttatagaagaagacatctatagagattttatagaagaagacttcaaagagaagactatctcaaggttgaatgtaagtggatgagcttcaactctacattgctcaaacactgataggcctccatgagatgcctcttcccttatggaagacagagaaatgcctctgtccatcttacaacgctaaaaatggctaaataaaccctgccacttaaatggagcttcttggttataatttttagtacagcatctgatttaaggcatcattttgtagtgcggatagcctgtgattttgaatggcagcatagaatgcaattgagaagaatcttttgtaaaatatttcaacagggatgaagagaagggtccttgggcctacctgataagggttcaacatgggaaaactgaatggccgctcttgggaaaggggactctttgagtcccaacaagctctagtgttgaatgttttcatactaa

SEQ ID NO: 479024 - DNA, 649 bp, Homo sapiens
aaaattgaaaacacattttcacacaaatgcttgtrtatattaacatattatcatggcagcatatttcctaatagccaaaaaatggaaacaacccaaatgaccatcaactaatgaacggataaacaaaatatagtatatcctccatacaatggaatattatacagcaataaaaaggagtgaagtactgattcatgctatagcatggatgaaccttgaaaacaccaagctaaatgaaataaagcagggcaaaatgactcattatgcataattattgcataaatccatttatgagaaatgtccagaaaaggcaaactcgtagagacagaaagattagtggttgccaaaagctggagaagggaaatggggagtgactactaatgggaatgggatttcttttgggggtaatacaaatattctgaaattagtagtgatagttgcatgacttgtgattatactgaaaatccacattaaaaggttgtggcacattatattttaattaaaaatcaatttataatatttagttttcattgaatgtaaaaatatttgtactacctaaacttgaaccttgtggatctgatattgaaagtttcaaataaaaggcagtcttgatactgcacaaactgtgtctatctcaaacaagaaaaaaatg

SEQ ID NO: 479025 - DNA, 649 bp, Homo sapiens
aaaattgaaaacacattttcacacaaatgcttgtatatattaacatattatcatggcagcatatttcctaatagccaaaaaatggaaacaacccaaatgaccatcaactaatgaacggataaacaaaatatagtatatcctccatacaatggaatattatacagcaataaaaaggagtgaagtactgattcatgctatagcatggatgaaccttgaaaacaccaagctaaatgaaataaagcagggcaaaatgactcattatgcataattattgcataaatccatttatgagaaatgtccagaaaaggcaaactcgtagagacagaaagattastggttgccaaaagctggagaagggaaatggggagtgactactaatgggaatgggatttcttttgggggtaatacaaatattctgaaattagtagtgatagttgcatgacttgtgattatactgaaaatccacattaaaaggttgtggcacattatattttaattaaaaatcaatttataatatttagttttcattgaatgtaaaaatatttgtactacctaaacttgaaccttgtggatctgatattgaaagtttcaaataaaaggcagtcttgatactgcacaaactgtgtctatctcaaacaagaaaaaaatg

SEQ ID NO: 479026 - DNA, 649 bp, Homo sapiens
aaaattgaaaacacattttcacacaaatgcttgtatatattaacatattatcatggcagcatatttcctaatagccaaaaaatggaaacaacccaaatgaccatcaactaatgaacggataaacaaaatatagtatatcctccatacaatggaatattatacagcaataaaaaggagtgaagtactgattcatgctatagcatggatgaaccttgaaaacaccaagctaaatgaaataaagcagggcaaaatgactcattatgcataattattgcataaatccatttatgagaaatgtccagaaaaggcaaactcgtagagacagaaagattagtggttgccaaaagctggagaagggaaatggggagtgactactaatgggaatgggatttcttttgggggtaatacaaatattctgaaattagtagygatagttgcatgacttgtgattatactgaaaatccacattaaaaggttgtggcacattatattttaattaaaaatcaatttataatatttagttttcattgaatgtaaaaatatttgtactacctaaacttgaaccttgtggatctgatattgaaagtttcaaataaaaggcagtcttgatactgcacaaactgtgtctatctcaaacaagaaaaaaatg

SEQ ID NO: 479027 - DNA, 383 bp, Homo sapiens
tctctgaatcaggaagcaggccctaaccagacattaaatttgatagtgccttgatcttggacctctcagtctccaaaactgtgagcaataaatttctgttgtttctaagccaccaagtctataatattttgtaatagttgcccaaatggaatgagacaatatcatatagctaaaagcttccataaagagttcacagcaaaacgaaaaagtaaccgtccctatgtgattgatttaaaaacaaaaaacaaatttttgtataaattatgaaagctaaattgttctatattaaataattctataagatgctattctataaaacttgtatttagtctaatgatgtcyttaaggaaattagtcattatattacttgtagcctgattcat

SEQ ID NO: 479028 - DNA, 582 bp, Homo sapiens
gctgcaatatatcaaatctgtcagtgcactgattatatctcccatggaagattttttttatcttttgattcaatgaaagtttcttgtatgaaaccaaatttcatacagttctaaaaaatcctttagaaattcatcattttagttttgtttwctaggctaaagcaatttactgtctaccatcatatgtctatttttttaaaaaaaatgccttttcctacagaaagaagttataaaattaaatagaggtgtaacaagtaggattttaagattacacatggttgttttgtgctagttaaaaagaaaagaagatataatgcttttaacaaatgagaacactatgtatgtttatacatataatacatatttaacattgagttgttaactgggaaaaaggttgtggtattaagcatgaaaaagaagagagttgggaggcatttcaggcattgtgaaagcatctttattcacactgtagccttgttacacacagaacagtgaggatatgctttcatataactggctatatctccctaattggctatataaatttcattaatgtcattgttaacttatagagtagtaaca

SEQ ID NO: 479029 - DNA, 582 bp, Homo sapiens
gctgcaatatatcaaatctgtcagtgcactgattatatctcccatggaagattttttttatcttttgattcaatgaaagtttcttgtatgaaaccaaatttcatacagttctaaaaaatcctttagaaattcatcattttagttttgttttctaggctaaagcaatttactgtctaccatcatatgtctatttttttaaaaaaaatgccttttcctacagaaaraagttataaaattaaatagaggtgtaacaagtaggattttaagattacacatggttgttttgtgctagttaaaaagaaaagaagatataatgcttttaacaaatgagaacactatgtatgtttatacatataatacatatttaacattgagttgttaactgggaaaaaggttgtggtattaagcatgaaaaagaagagagttgggaggcatttcaggcattgtgaaagcatctttattcacactgtagccttgttacacacagaacagtgaggatatgctttcatataactggctatatctccctaattggctatataaatttcattaatgtcattgttaacttatagagtagtaaca

SEQ ID NO: 479030 - DNA, 582 bp, Homo sapiens
gctgcaatatatcaaatctgtcagtgcactgattatatctcccatggaagattttttttatcttttgattcaatgaaagtttcttgtatgaaaccaaatttcatacagttctaaaaaatcctttagaaattcatcattttagttttgttttctaggctaaagcaatttactgtctaccatcatatgtctatttttttaaaaaaaatgccttttcctacagaaagaagttataaaattaaatagaggtgtaacaagtaggattttaagattacacatggttgttttgtgctagttaaaaagaaaagaagatataatgcttttaacaaatgagaacactatgtatgtwtatacatataatacatatttaacattgagttgttaactgggaaaaaggttgtggtattaagcatgaaaaagaagagagttgggaggcatttcaggcattgtgaaagcatctttattcacactgtagccttgttacacacagaacagtgaggatatgctttcatataactggctatatctccctaattggctatataaatttcattaatgtcattgttaacttatagagtagtaaca

SEQ ID NO: 479031 - DNA, 582 bp, Homo sapiens
gctgcaatatatcaaatctgtcagtgcactgattatatctcccatggaagattttttttatcttttgattcaatgaaagtttcttgtatgaaaccaaatttcatacagttctaaaaaatcctttagaaattcatcattttagttttgttttctaggctaaagcaatttactgtctaccatcatatgtctatttttttaaaaaaaatgccttttcctacagaaagaagttataaaattaaatagaggtgtaacaagtaggattttaagattacacatggttgttttgtgctagttaaaaagaaaagaagatataatgcttttaacaaatgagaacactatgtatgtttatacatataatrcatatttaacattgagttgttaactgggaaaaaggttgtggtattaagcatgaaaaagaagagagttgggaggcatttcaggcattgtgaaagcatctttattcacactgtagccttgttacacacagaacagtgaggatatgctttcatataactggctatatctccctaattggctatataaatttcattaatgtcattgttaacttatagagtagtaaca

SEQ ID NO: 479032 - DNA, 544 bp, Homo sapiens
agttttgtctattaaaaatagaattagtttgaacatttatgtgtaagtatttgtgtagaaaaacatttttstttcttttcggtgaaaatctaggagtgaaatagataatatagtaagtgtattactaacttcatatgaaactactgtatgaaattgttttccaaagtagttgtaccattttacaatactgccagctatatatgagagtttacttgttcaacatccttgcctacaatttaactttagctcatctagtggctatgtagtgctggctttactttgcatttctctgatagctaatgaagttgaacatcttttcatatgtattcttttgcgaagtatctgttcaagcctttttaaaatttgattaacagtatctgaattaatgattagagaagttattgaaaactgtgttttagagtccctaatagtcacactatgactttaatacataacatgcaaattccaatgaaatgagtccaaactataagtttatggaaatataaaagcatgcgagaatttccaaatctacacagtaaatgaa

SEQ ID NO: 479033 - DNA, 544 bp, Homo sapiens
agttttgtctattaaaaatagaattagtttgaacatttatgtgtaagtatttgtgtagaaaaacatttttgtttcttttcggtgaaaatctaggagtgaaatagataatatagtaagtgtattactaacttcatatgaaactactgtatgaaattgttttccaaagtagttgtaccattttacaatactgccagctatatatgagagtytacttgttcaacatccttgcctacaatttaactttagctcatctagtggctatgtagtgctggctttactttgcatttctctgatagctaatgaagttgaacatcttttcatatgtattcttttgcgaagtatctgttcaagcctttttaaaatttgattaacagtatctgaattaatgattagagaagttattgaaaactgtgttttagagtccctaatagtcacactatgactttaatacataacatgcaaattccaatgaaatgagtccaaactataagtttatggaaatataaaagcatgcgagaatttccaaatctacacagtaaatgaa

SEQ ID NO: 479034 - DNA, 544 bp, Homo sapiens
agttttgtctattaaaaatagaattagtttgaacatttatgtgtaagtatttgtgtagaaaaacatttttgtttcttttcggtgaaaatctaggagtgaaatagataatatagtaagtgtattactaacttcatatgaaactactgtatgaaattgttttccaaagtagttgtaccattttacaatactgccagctatatatgagagtttacttgttcaacatccttgcctacaatttaactttagctcatctagtggctatgtagtgctggctttactttgcatttctctgatagctaatgaagttgaacatcttttcatatrtattcttttgcgaagtatctgttcaagcctttttaaaatttgattaacagtatctgaattaatgattagagaagttattgaaaactgtgttttagagtccctaatagtcacactatgactttaatacataacatgcaaattccaatgaaatgagtccaaactataagtttatggaaatataaaagcatgcgagaatttccaaatctacacagtaaatgaa

SEQ ID NO: 479035 - DNA, 611 bp, Homo sapiens
tgtgtctttttaaattaattaactcttaagatcagtggagtgtgtagatgtttacttatrtttctatcttcacttagctgttcccaggatgaaaaaaaaaaagactagtggctctgttaaaccctgaaaattagcttaatgatcttacctcttcatcctttctaccaatctggccccttttaaacccccgaatgtaatcattggtactcattggtactatcttcctcttgatttcagagaacacctccttgcaaaattgttaatttttctcttttactgtattaaatcacttactgagtaaaataattctttccttgaaatgcgatttggtttcttctttgctctccatttctatgccatttccacttaaacttgtccctgcattgttgcaaaaacctaactggtttctttgatggacaaaattagagagattacctttttgatagtaaggtcaaagctcacctactaatctggacatctaaagctgtccttcaatcaaatgctctcattcctctgcttcctatcttcttcactcattccataataacattccttgttacttctaagcatacctcttctctttcagttgaccatgatcctttccatctcat

SEQ ID NO: 479036 - DNA, 611 bp, Homo sapiens
tgtgtctttttaaattaattaactcttaagatcagtggagtgtgtagatgtttacttatgtttctatcttcacttagctgttcccaggatgaaaaaaaaaaagactagtggctctgttaaaccctgaaaattagcttaatgatcttacctcttcatcctttctaccaatctggccccttttaaacccccgaatgtaatcattggtactcattggtactatcttcctcttgatttcagagaacacctccttgcaaawttgttaatttttctcttttactgtattaaatcacttactgagtaaaataattctttccttgaaatgcgatttggtttcttctttgctctccatttctatgccatttccacttaaacttgtccctgcattgttgcaaaaacctaactggtttctttgatggacaaaattagagagattacctttttgatagtaaggtcaaagctcacctactaatctggacatctaaagctgtccttcaatcaaatgctctcattcctctgcttcctatcttcttcactcattccataataacattccttgttacttctaagcatacctcttctctttcagttgaccatgatcctttccatctcat

SEQ ID NO: 479037 - DNA, 611 bp, Homo sapiens
tgtgtctttttaaattaattaactcttaagatcagtggagtgtgtagatgtttacttatgtttctatcttcacttagctgttcccaggatgaaaaaaaaaaagactagtggctctgttaaaccctgaaaattagcttaatgatcttacctcttcatcctttctaccaatctggccccttttaaacccccgaatgtaatcattggtactcattggtactatcttcctcttgatttcagagaacacctccttgcaaaattgttaatttttctcttttactgtattaaatcacttactgagtaaartaattctttccttgaaatgcgatttggtttcttctttgctctccatttctatgccatttccacttaaacttgtccctgcattgttgcaaaaacctaactggtttctttgatggacaaaattagagagattacctttttgatagtaaggtcaaagctcacctactaatctggacatctaaagctgtccttcaatcaaatgctctcattcctctgcttcctatcttcttcactcattccataataacattccttgttacttctaagcatacctcttctctttcagttgaccatgatcctttccatctcat

SEQ ID NO: 479038 - DNA, 512 bp, Homo sapiens
tgacattggctgaagcctagaggagcttgctattgcaggtaaagagtaartgaggaaatgttagtagtccacatcaccaccattaatagttgcaatccaaacaacagggagagctccgctacccacagaaatgctgactaccattgtcagtaatctggagaccctgtaagagcattacaccagacaggggatgtgttctttgtcgctcacaccccagacacctaagtggttggatcagggcacgattgtgagagcatagccataatgggactgtatcctgccctggggagccccagcctccatatctccacattctgggagctccaacatatatcccccggtgtaaactcagagagctacagtggtacagtgctggctgaacccaaaggtgtcacaggattctcaagactctagccaatagggagtaccactccctgagaataggacagtgcagcacaccaaaagatgaccaaagcacatgctttccagagcccaagagctctggtgctgtg

SEQ ID NO: 479039 - DNA, 512 bp, Homo sapiens
tgacattggctgaagcctagaggagcttgctattgcaggtaaagagtaaatgaggaaatgttagtagtccacatcaccaccattaatagttgcaatccaaacaacagggagagctccgctacccacagaaatgctgactaccattgtcagtaatctggagaccctgtaagagcattacaccagacaggggatgtgttcttkgtcgctcacaccccagacacctaagtggttggatcagggcacgattgtgagagcatagccataatgggactgtatcctgccctggggagccccagcctccatatctccacattctgggagctccaacatatatcccccggtgtaaactcagagagctacagtggtacagtgctggctgaacccaaaggtgtcacaggattctcaagactctagccaatagggagtaccactccctgagaataggacagtgcagcacaccaaaagatgaccaaagcacatgctttccagagcccaagagctctggtgctgtg

SEQ ID NO: 479040 - DNA, 512 bp, Homo sapiens
tgacattggctgaagcctagaggagcttgctattgcaggtaaagagtaaatgaggaaatgttagtagtccacatcaccaccattaatagttgcaatccaaacaacagggagagctccgctacccacagaaatgctgactaccattgtcagtaatctggagaccctgtaagagcattacaccagacaggggatgtgttctttgtcgctcacaccccagacacctaagtggttggatcagggcacsattgtgagagcatagccataatgggactgtatcctgccctggggagccccagcctccatatctccacattctgggagctccaacatatatcccccggtgtaaactcagagagctacagtggtacagtgctggctgaacccaaaggtgtcacaggattctcaagactctagccaatagggagtaccactccctgagaataggacagtgcagcacaccaaaagatgaccaaagcacatgctttccagagcccaagagctctggtgctgtg

SEQ ID NO: 479041 - DNA, 512 bp, Homo sapiens
tgacattggctgaagcctagaggagcttgctattgcaggtaaagagtaaatgaggaaatgttagtagtccacatcaccaccattaatagttgcaatccaaacaacagggagagctccgctacccacagaaatgctgactaccattgtcagtaatctggagaccctgtaagagcattacaccagacaggggatgtgttctttgtcgctcacaccccagacacctaagtggttggatcagggcacgattgtgagagcatagccataatgggactgtatcctgccctggggagccmcagcctccatatctccacattctgggagctccaacatatatcccccggtgtaaactcagagagctacagtggtacagtgctggctgaacccaaaggtgtcacaggattctcaagactctagccaatagggagtaccactccctgagaataggacagtgcagcacaccaaaagatgaccaaagcacatgctttccagagcccaagagctctggtgctgtg

SEQ ID NO: 479042 - DNA, 565 bp, Homo sapiens
ccccaccaatgaccctctgtattctgtattcttcacatttaacatctttcagttctctaaccgtggcattttctctattgtctctaaaactccacaggctgattcttctctctggaataccatcccctctctggttcatgtagacaactyctgcttactcttaaaaccactcctctgctcatttattttagtataactcacctgcatgcccccaagtcttagttgagaaccccatttctatggtctcaaacacctgctattccctgcatcttagcagttagcatataatatccacctggatgtttacatttcttccttatttgctaaatttccaagagcagagaccatgtctattttgtttttggctacattcccaaaccaaggcacagtgacttacacctagcaggtgctcagtaagtatttgttcaatacgtggatgaatgagtgaatgaaattatatcatgtctagagatctttctagtccattttaaagctgacatttccaagatagttggtgtggtagatgtcataacacatgacctcacctcctctcataaataaagga

SEQ ID NO: 479043 - DNA, 565 bp, Homo sapiens
ccccaccaatgaccctctgtattctgtattcttcacatttaacatctttcagttctctaaccgtggcattttctctattgtctctaaaactccacaggctgattcttctctctggaataccatcccctctctggttcatgtagacaactcctgcttactcttaaaaccactcctctgctcatttattttagtataactcacctgcatgcccccaagtcttagttgagaaccccatttctatggtctcaaacacctgctattccctgcatcttagcagttagcatataatatccacctggatgtttacatttcttccttatttgctaaatttccaagagcagagaccatgtctattttgtttttggctacattcccaaaccaaggcacagtgacttacacctagcaggtgctcagtaagtatttgttcaataygtggatgaatgagtgaatgaaattatatcatgtctagagatctttctagtccattttaaagctgacatttccaagatagttggtgtggtagatgtcataacacatgacctcacctcctctcataaataaagga

SEQ ID NO: 479044 - DNA, 515 bp, Homo sapiens
tgtgtggacatcgacagggctgagaagagaatgtcaaaccccaaagcatccccagggctgtgccttcccatcctgggtgaggggagttctgcaggggcactggggtgcttgtctcctggggttcataaatcatgtctttggggaggcctctctcaccctgcatggctggagcaggcctctctctctctctctctggcactcctgggctcctatgtagcattgaccacagggtactgcagttgggcatgtcttcatcttcgtgccttctgggctggaagcatccagggggcagcgagtggggcctccttgtttctgaatcctcagaactggcacacacagtaggtgatcaacaaatgtggatggaaaaagaaaagtgagcaaaagaggaaggaagtggacggaggaggtcatcgagaaggaggagcgyggtgcttggagttgagagcaggatgcactgggatttcattgggtctgacgcacttttgcccttgtgaaccccatcctttaagaaaaga

SEQ ID NO: 479045 - DNA, 515 bp, Homo sapiens
tgtgtggacatcgacagggctgagaagagaatgtcaaaccccaaagcatccccagggctgtgccttcccatcctgggtgaggggagttctgcaggggcactggggtgcttgtctcctggggttcataaatcatgtctttggggaggcctctctcaccctgcatggctggagcaggcctctctctctctctctctggcactcctgggctcctatgtagcattgaccacagggtactgcagttgggcatgtcttcatcttcgtgccttctgggctggaagcatccagggggcagcgagtggggcctccttgtttctgaatcctcagaactggcacacacagtaggtgatcaacaaatgtggatggaaaaagaaaagtgagcaaaagaggaaggaagtggacggaggaggtcatcgagaaggaggagcgcggtgcttggagttgagagcaggatgcactgggatttcattgggtctgacscacttttgcccttgtgaaccccatcctttaagaaaaga

SEQ ID NO: 479046 - DNA, 571 bp, Homo sapiens
gtacctacagcttaaagcgtaaagaagcatttggctcccacccaggcattccctgtgcacaagctttcccattctctggcccacaccagcyctttccattcagccttctcctccctgcccctctgccatgctaagcccccagaaaaccttctgcttcatcacatgcactgaccccaaagtcaccaggctttcccctctcaaggaacttgcactctatgccttgtctctcatgacagaagcagaggccttgtgcccagcagaagatgccgggaatctttatgaggatgatggatgcattggtaagaagccctgctcagccccaatacttggtccacctcgctgagatgagaagagccctgggtccaggccctacctggcctctcaggctctccccacacctctctgaccctttgtttcttcatttataaattaagggcgtcgcttaaaggatttctaagtccctttccagttcacagaccctggctctattcacttgttgctaccagcatgaagttaggagaactcactggaatggactgttagtataggacgcttttgagaatgtggtttg

SEQ ID NO: 479047 - DNA, 571 bp, Homo sapiens
gtacctacagcttaaagcgtaaagaagcatttggctcccacccaggcattccctgtgcacaagctttcccattctctggcccacaccagctctttccattcagccttctcctccctgcccctctgccatgctaagcccccagaaaaccttctgcttcatcacatgcactgaccccaaagtcaccaggctttcccctctcaaggaacttgcactctatgccttgtctctcatgacagaagcagaggccttgtgcccagcagaagatgccgggaatctttatgaggatgatggatgcattggtaagaagccctgctcagccccaatacttggtccacctcgctgagatgagaagagccctgggtccaggccctacctggcctctcaggctctccccacacctctctgaccctttgtttcttcatttataaattaagggcrtcgcttaaaggatttctaagtccctttccagttcacagaccctggctctattcacttgttgctaccagcatgaagttaggagaactcactggaatggactgttagtataggacgcttttgagaatgtggtttg

SEQ ID NO: 479048 - DNA, 571 bp, Homo sapiens
gtacctacagcttaaagcgtaaagaagcatttggctcccacccaggcattccctgtgcacaagctttcccattctctggcccacaccagctctttccattcagccttctcctccctgcccctctgccatgctaagcccccagaaaaccttctgcttcatcacatgcactgaccccaaagtcaccaggctttcccctctcaaggaacttgcactctatgccttgtctctcatgacagaagcagaggccttgtgcccagcagaagatgccgggaatctttatgaggatgatggatgcattggtaagaagccctgctcagccccaatacttggtccacctcgctgagatgagaagagccctgggtccaggccctacctggcctctcaggctctccccacacctctctgaccctttgtttcttcatttataaattaagggcgtsgcttaaaggatttctaagtccctttccagttcacagaccctggctctattcacttgttgctaccagcatgaagttaggagaactcactggaatggactgttagtataggacgcttttgagaatgtggtttg

SEQ ID NO: 479049 - DNA, 522 bp, Homo sapiens
ttttcatcttacaagtattttaggtatttcatactaatgctcaggcctcatcagaaacgcaatgccatctttaattttttggttgttgaacctggtgccaggagcaagtcaagagggtggctacaaatcatgctttatttatgcagaggaataaaaatacactcrtgtgagtgaagggtgagatgcagcacaaggcagtgcatttttacaaggcaaacggaagccttgatttacttcccattccctaaaactttatggcttcctcatcaaaagagacaggttgctttctatctcttagatggtaaatatggttaatgtgctgagcagtgttgcacccactctcgggcgctttattaggaacaagagttatttagtgactcttcctttgtcgcagagatgagtccctgagatatcattgagagccctagaaataatgctcagcccaatacaccattgcctgggggtcctcctggataacaacagttgaaggaagaggcatgcagggtgttcctcatttccaga

SEQ ID NO: 479050 - DNA, 438 bp, Homo sapiens
cttttttttttggatgttacatatctctcttgatgatgacagtgtaaataaatataaaataatacaaattaactgaattcgatacacaaggtatgatcaaagagaagataaaagtgatggagagtcatgtgtgtttatactagaatgatttataatcctctgggtatatacccagtaatgggatggctgggccaaatggtatttctggttctagatctttgaggartcaccacactgtcttccacaatggttgaactaatttatactcccaccaacagtgtaaaagggttcccatttctccacagcctcaccaggatgtattgtttcctgactttttaataatcatcattctgactagcgtgagatggtatctcattgtggttttgtttgcatttctctgatgatcagtgatgatgagcttttttttttaatatgttt

SEQ ID NO: 479051 - DNA, 365 bp, Homo sapiens
cccccatttttcttacaaaaacatgctgagctctaataacattttatactttgatttttttttgcttaacaatgcattatagaatatatattactccatatttattcatagagatcttgattctgctatatggttacatggttccctatggtgtatcataggctacttaacagccctctatggagagacatttgggtttccagacttttgctttgacaaatgccacagccttaagtaaccttttaygtaggtagttatttttaggctctttgtcattgtatttttgttcatgtggtctctgtcctgtggagaagcccatggtcagatgttctcattcaagttctacttgctttatagtataagta

SEQ ID NO: 479052 - DNA, 317 bp, Homo sapiens
agcctgggcaacagagtgagactctatctgtctcgcaaataaacaaaataaataaatgaaagaaaaactctattagtgtgtttaaataataatttcttttagaaaaaccaacttctccctgaccactaccaccccggctgaggaatggctgtggtctggagccagccttgtggtgtggaaaaagcacaggctttgcagtcaggcctgggtrgaatctgaatctgacttcgaagagccatataacccagtgactgtcatttgcctccttgagcctcagtttcctcatctgtaaaatgggggcagcaaggactgcctca

SEQ ID NO: 479053 - DNA, 500 bp, Homo sapiens
caccctgcactgctaggctactgggcagcagatctaggcctccaggggcctggggaaggaggccctgctgcctggctgggagaggaaggaaagatttccagtcacttccagcctgtggtccttcctcatcgctgtgggcagaagcagagtggtactgtggggggcctggtcagagctcctccctgtctcctgtccccccagcagcgggccactctcctttgagttcttctggaagttgtcctctttaaaatatggaccctgcttcccctctcccagggctggtgtggggatgtcagatcctaggtaaggggtctagggatgaagggggtggcctgggcctgaggctgcagactggctttgctcacaggtctttgctacaagctgagcacatcctgcctccttccacccaagtcactcattcatttggccagtaccagatgatgagggccgggccctggtgacmctcacctggctttcaggccatgggacagaggctgcct

SEQ ID NO: 479054 - DNA, 658 bp, Homo sapiens
ttgggagcagaaagtctaggagagggctaaggagcagatcagggcttggtggaggaagatgggaaggctgcagaggaggctcagcaaacagggtgagggccagcagtgtggatccagagagactgtttgggaaggagatgaggttagctggccagatgctgctgagggggtgagagagagaagagcccacgagtgtccttcgggtaggggactctggagacaaatttccggggaggggtgctgagggcagaagcagggtgcactgggaagcaggtggtgtggacatgagggaggagaggtagtggatggagacaggattagagagaggagaggagggagcctgcagagaggagggcgygggtggatttgggagatggggatgtctttaaattgggaaggagcagatccaggagatagtgtgaaaaattggggaggagcatttggacgcatggtcagagggggagccacagaggcaggcaaccctgggaggtggcaggaaatggcagggaagaagcatgtcctgggacccctggggacagcacggtggacagagatggccttgggatgcatgctgtggcctcatgctgaggaagctgcctggacacacctctaaccactgtctctgcctgtctcttccttctgcctccgctgggcccga

SEQ ID NO: 479055 - DNA, 453 bp, Homo sapiens
tgggcctgtgctgtttgtgggagcacacggccactctggctagagctgctggccagaccagcagcactggtgggagctgggatggggctcctggaggtgtacccacctggggaggggctgggcctcccctggcctgggacaggggaggaggaggaaatgacactgatttgctctgatkggggaggcttggaccttgccctcatggagctccctgtctgatgaaagagacaaaactctgttctcaaaagcctcaaacccagcagggagaccagttctgttctgcagggagccctggccctctggggaagccccttttctggtatctgactttgttccatgtttttctctgagatctattgctctgatttggctgatccaggaaatctttcactcactcgcctctcctccctgtccctggcactctgaaggacaggcgctccaaggccaacccag

SEQ ID NO: 479056 - DNA, 530 bp, Homo sapiens
agacacacatgcacatgtgtatagcagggttagtccctgctgagactcgaggccattmagggtatgggggagtttgaccaagggcagagcatagggccctgggtagacacagaccgctatgagtgagctgccaaggaggaagagctgggccaggccctggcaggagaggaaggccggcatctgggtcctgtgggggtgcacgctggcttgtgatggggtcctgggaggatcagaaggacttttcagaggacccagggagcatggtagagcttggatgctcctgaaggtgtcagccccagaatagcagaggctggtgttttcctggcagagcagcatgtgggctggggcctgcctgcccggggctggggtgcagcttgcagtggaggctgggagcgcagcaggcccagaggactaggacccttgcgtgaactcctatgacccactgaactccctgggagtgggtgggtatgagggggcctcactagggtcctgtgaaggggaaagtgattggtgactggatgcagggccag

SEQ ID NO: 479057 - DNA, 532 bp, Homo sapiens
ttagaaatagtagtgatggttgtacagcattgtggctgtaattaaagccactgaattgtacacttaacatggttaaaataacaaatttcatgttatatgtattttaccatgataaaaayaattaaaaaaaaattgatgtatggctgtttatagacggtgtatgaatggatttgtacatagatgagtaattgaagaggtgggtggctttgttaagggtgagtaaataggagtggatgaacatgcatatgaacgcatgagtagatgaatgggaagctgtatagatggaatgggagacaatgggtagggaggtggagagttcgtgagattttacctgtggctcggccatggatagaagctggtgacagaggtgactgagtttttcctgaacctgccctgcctaagggtggctacaggctggcagtgatcgagaaacccttggccaaaaactacctctctgttgcaggctccctgcagctcgatctcaaccgcatgcccaagccagccaagacagccaagaagtgctccttggacc

SEQ ID NO: 479058 - DNA, 532 bp, Homo sapiens
ttagaaatagtagtgatggttgtacagcattgtggctgtaattaaagccactgaattgtacacttaacatggttaaaataacaaatttcatgttatatgtattttaccatgataaaaataattaaaaaaaaattgatgtatggctgtttatagacggtgtatgaatggatttgtacatagatgagtaattgaagaggtgggtggctttgttaagggtgagtaaataggagtggatgaacatgcatatgaacgcatgagtagatgaatgggaagctgtatagatggaatgggagacaatgggtagggaggtggagagttcgtgagattttacctgtggctcggccatggatagaagctggtgacagaggtgactgagtttttcctgaacctgccctgcctaagggtggctacaggctggcagtgatcgagaaacccttggccaaaaacyacctctctgttgcaggctccctgcagctcgatctcaaccgcatgcccaagccagccaagacagccaagaagtgctccttggacc

SEQ ID NO: 479059 - DNA, 331 bp, Homo sapiens
ccaccccctatcctccctactcccactgctcccaccccttaccggtgccccagcagctagaggtgctgagatgcaggcatcacgcactgttgcacctgcgggctggccaagccctatttccagcgtcctaaccagctttccttagtgtccctgcctcccaagtctaagaggcctgctgggcctccaggtttgctttgcgtttggtgttgcacaccctgcagccaggggsgtgttctgtggtcattcagggctgggcttggtgctccctccagtgggttgccagcgctgcagggccaggccaaacgcctctcctggcaggggcccagggctt

SEQ ID NO: 479060 - DNA, 444 bp, Homo sapiens
ctaggagagggaggaagggttctagragagggaggaaggtttctcctaggagagggaggaagggttctcctaggagagggaggaagggttgtccttggagagcggggaagggttctcctagagtctttggagagacacagtactgccaacatcttgctttcaggctccagcctccagactgtgagaatgtgtttctgctttaaggcacgcagtccttggcactgtgttacagcagccctagggaaccagtatgccctgcaacattcattggctgctgggtgtgtgtcaggcaccattctaaaagctttcaatgtgttaattcatttgtgtatcacaagtgccctatgagacagataaggattatgacctctatttcacaaatgaggaaaccgagatgcagagaagccaagcctcttgtccaaggttttccagccaccaaacagc

SEQ ID NO: 479061 - DNA, 659 bp, Homo sapiens
ttaaagctgtgggaagtgctggtcaggatctgtggggtactcaaacccagagcagcaaagtccctaaaccagcctcctcgcataaagatttattcatcagagatcatgaaaagtgtaaagtgagatcagaatttcatagaatcctgaatgatttcttgaaattgttgttttgacttcacttctgtaaaatgtccastttttctcctctctaccagatcttctccacccaagtggatgttagaaggacaagtcgtatgtttactaggatacagaatagataaagttggtttgaactgatcagcaatacatcagtaggatgtggacagggagacctttcttttctggtacctgagaaatagtaaaatagtaagaggtcaccaaaaagaagtttcaacgcttctaatttcaccagttaggccaggagcgcaggcagatattgagcagctatgcaaaggcttaaattaagagaacatgagtgctgtatatctggcatatctaaatagcccaaggatggaggcaagccacagggaccaactgcaatgtgatctggggtctgggctacatggaaggtgtatgaccacaggcttctgtttacagagtgtggtgagaaagtttccattaggtggacgtgtctctccgtggaataaagcccaaggcgc

SEQ ID NO: 479062 - DNA, 659 bp, Homo sapiens
ttaaagctgtgggaagtgctggtcaggatctgtggggtactcaaacccagagcagcaaagtccctaaaccagcctcctcgcataaagatttattcatcagagatcatgaaaagtgtaaagtgagatcagaatttcatagaatcctgaatgatttcttgaaattgttgttttgacttcacttctgtaaaatgtccactttttctcctctctaccaratcttctccacccaagtggatgttagaaggacaagtcgtatgtttactaggatacagaatagataaagttggtttgaactgatcagcaatacatcagtaggatgtggacagggagacctttcttttctggtacctgagaaatagtaaaatagtaagaggtcaccaaaaagaagtttcaacgcttctaatttcaccagttaggccaggagcgcaggcagatattgagcagctatgcaaaggcttaaattaagagaacatgagtgctgtatatctggcatatctaaatagcccaaggatggaggcaagccacagggaccaactgcaatgtgatctggggtctgggctacatggaaggtgtatgaccacaggcttctgtttacagagtgtggtgagaaagtttccattaggtggacgtgtctctccgtggaataaagcccaaggcgc

SEQ ID NO: 479063 - DNA, 659 bp, Homo sapiens
ttaaagctgtgggaagtgctggtcaggatctgtggggtactcaaacccagagcagcaaagtccctaaaccagcctcctcgcataaagatttattcatcagagatcatgaaaagtgtaaagtgagatcagaatttcatagaatcctgaatgatttcttgaaattgttgttttgacttcacttctgtaaaatgtccactttttctcctctctaccagatcttctccacccaagtggatgttagaaggacaagtcgtatgtttactaggatacagaatagataaagttggtttgaactgatcagcaatacatcagtaggatgtggacagggagacctttcttttctggtacctgagaaatagtaaaatagtaagaggtcaccaaaaagaagtttcaacgcttctaatttcaccagttagrccaggagcgcaggcagatattgagcagctatgcaaaggcttaaattaagagaacatgagtgctgtatatctggcatatctaaatagcccaaggatggaggcaagccacagggaccaactgcaatgtgatctggggtctgggctacatggaaggtgtatgaccacaggcttctgtttacagagtgtggtgagaaagtttccattaggtggacgtgtctctccgtggaataaagcccaaggcgc

SEQ ID NO: 479064 - DNA, 659 bp, Homo sapiens
ttaaagctgtgggaagtgctggtcaggatctgtggggtactcaaacccagagcagcaaagtccctaaaccagcctcctcgcataaagatttattcatcagagatcatgaaaagtgtaaagtgagatcagaatttcatagaatcctgaatgatttcttgaaattgttgttttgacttcacttctgtaaaatgtccactttttctcctctctaccagatcttctccacccaagtggatgttagaaggacaagtcgtatgtttactaggatacagaatagataaagttggtttgaactgatcagcaatacatcagtaggatgtggacagggagacctttcttttctggtacctgagaaatagtaaaatagtaagaggtcaccaaaaagaagtttcaacgcttctaatttcaccagttaggccaggagcgcargcagatattgagcagctatgcaaaggcttaaattaagagaacatgagtgctgtatatctggcatatctaaatagcccaaggatggaggcaagccacagggaccaactgcaatgtgatctggggtctgggctacatggaaggtgtatgaccacaggcttctgtttacagagtgtggtgagaaagtttccattaggtggacgtgtctctccgtggaataaagcccaaggcgc

SEQ ID NO: 479065 - DNA, 625 bp, Homo sapiens
gggacttcactgtcccagcagggctgtctgtcctattacctcccctctgacttcctctgtggttagtaatccctgtcctaaagacacagtagaaagttcttgcagctttgacgtgggagcagtcccaccaattgtggaaaccgttttctcatgttgcacagtcctgggggaggtctgtgcatctcctggtcaccgtggttcttggtggtacaccctgtctctgaccagggcctcttctgttctctgtcttcttctccctgggtggtccctgcctgagtcccccagccttctacccgcggtgctctctaactggccaatgtcagcaccgcacactcagcaggtccagctcgccctccatccgtctcggcctcaggctatggtgtctatttggtgaaatgcattcgtttctctctggtgtccccagagagtgggagtggtgacaactctaatccatattcaccctgtctgttagcttcctggggctgccaagacaaatgaccacaaaccaagggacatcaaacaacagayacctgtcctgtcaccattcaggaggccacaggtctcagtcaggggtcccagggtggcctccgtctggaagcagtgggggagaaggggttgcaggcct

SEQ ID NO: 479066 - DNA, 659 bp, Homo sapiens
cagctgttaaaattatgtttgacagagcaggagcattgccatcttgtacaagcaccaccattttaaagttccccttgatcaaaaactgcctaaatccaaagggcatcagcctaatagctgaggtcagcatgaccataaaccacaaattacatctccaaccagaaacattccaaccctaagataacctccccccaaccagagaggacaccctcctgtttgggtgaggctcataatgaggccccctcaccattacaggaggaaatctcttcactgctggcactgacaatggaagactgagggtgcccgggatccttcacccccacatccagtgagtccacggaacccagggtaactgggatggtatctggtaagattatttccttctttttggatactggggcgagtctatcagtattaactgaaaatcaaggcccattaggacattcatctgtttctgttgttggcatgaaggacatacaagtaaccccatacaaaacaccaccactatactgctcatttgaggtagtcaccttcactcactcttggtcattccccattgtcccactcctttactaggaaggaacatcctacacaaactagggggaatmatttatttattagccctacatcaaagccacccttacttattattatgtcaa

SEQ ID NO: 479067 - DNA, 317 bp, Homo sapiens
gctggcctaatcacatttacatgaattaaccctttgtacgtttttacttctttgactctactgaaccccccacactctctyctccctcattctcccttgaaaatgttcagttatctttgtataaatgtgaatggagcactgctttatcacatactgtcagttacctaaaatttgtcttcactgcttcaactaatggtaggctgtgggttattttttgacactagctaggaattgagcaatatgcaggttagaaaattgaattttttccttttgagtgtaagttagaaattgggaataattgggtgataattgttaaa

SEQ ID NO: 479068 - DNA, 317 bp, Homo sapiens
gctggcctaatcacatttacatgaattaaccctttgtacgtttttacttctttgactctactgaaccccccacactctcttctccctcattctcccttgaaaatgttcagttatctttgtataaatgtgaatggagcactgctytatcacatactgtcagttacctaaaatttgtcttcactgcttcaactaatggtaggctgtgggttattttttgacactagctaggaattgagcaatatgcaggttagaaaattgaattttttccttttgagtgtaagttagaaattgggaataattgggtgataattgttaaa

SEQ ID NO: 479069 - DNA, 317 bp, Homo sapiens
gctggcctaatcacatttacatgaattaaccctttgtacgtttttacttctttgactctactgaaccccccacactctcttctccctcattctcccttgaaaatgttcagttatctttgtataaatgtgaatggagcactgctttatcacatactgtcagttacctaaaatttgtcttcactgcttcaactaatggtaggctgtgggttatttkttgacactagctaggaattgagcaatatgcaggttagaaaattgaattttttccttttgagtgtaagttagaaattgggaataattgggtgataattgttaaa

SEQ ID NO: 479070 - DNA, 317 bp, Homo sapiens
gctggcctaatcacatttacatgaattaaccctttgtacgtttttacttctttgactctactgaaccccccacactctcttctccctcattctcccttgaaaatgttcagttatctttgtataaatgtgaatggagcactgctttatcacatactgtcagttacctaaaatttgtcttcactgcttcaactaatggtaggctgtgggttattttttgacactagctaggaattgagcaatatgcaggttagaaaaytgaattttttccttttgagtgtaagttagaaattgggaataattgggtgataattgttaaa

SEQ ID NO: 479071 - DNA, 552 bp, Homo sapiens
atttgagcatataatactatcttatatacagtagattatcatttatttcaaatatttgctaggattacttttccaaatatcatccacatatagataaaatgtacttttcaccagtaataaataaggcacacctatttgttctgtcacattaaggaattaatatgttctcattaataatgtaataacaaaattcgtgatatttgcatatggtagactgatagcaaaaatttcccatacattcctctatccatgtcttttgaaatttgactttgcagttttccctgtcaagggatrtagtctatctccccgagccttgcatatcaactggccttgtgacttatttgcagaacagaatgcaatagaaggaacttgggtaaattctaaacctaggactcaacagtcgttccctgtttcctctatcttgaaactctgccaccctgaggacaagcccaggctagcctgctggagggtgattgattatataaaggaaactcagtatagcagagccgacatcctgaagacttctgtgggagcagatgcctagctgaaaca

SEQ ID NO: 479072 - DNA, 551 bp, Homo sapiens
caggcacaaacacacacacacacacagacaacacaaacacgctgtgccacacacacacgcagacatccaacatttgcaacactcccacagaaacacacagtgaggcagctctagaggctgtgtcattctgtaggaagccccacctaagagagagcaaccccagggaacacaggtgggctgcacctagaaatcacagcggggaaagtttcaaaaacactcacccctacaatgtgtaggcaggcctgaataatccttctgatatttttggacgctyagggattttgtggtttattcctggggctgtgcttgacatttcttcaggctggctcccacttgccctctcccaggattatggaactatcccatggatccacagaaaagacaggcaagagtcccctgtggatgcacttccacagaggcctcctgcattgccaagatgcaggaactttttgctagacaatggtgacattaattgtgatgctagccagagctcacaatcaggaatggtgccctgaaaccagcttatatgcattcatgaatcaggctcgggc

SEQ ID NO: 479073 - DNA, 551 bp, Homo sapiens
caggcacaaacacacacacacacacagacaacacaaacacgctgtgccacacacacacgcagacatccaacatttgcaacactcccacagaaacacacagtgaggcagctctagaggctgtgtcattctgtaggaagccccacctaagagagagcaaccccagggaacacaggtgggctgcacctagaaatcacagcggggaaagtttcaaaaacactcacccctacaatgtgtaggcaggcctgaataatccttctgatatttttggacgcttagggattttgtggtttattcctggggctgtgcttgacatttcttcaggctggctcccacttgccctctcccaggattatggaactatcccatggatccacagaaaagacaggcaagagtcccctgtggatgcacttccacagaggcctcctgcattgccaagatgcaggaactttttgctagacaatggtgacattaattgtgaygctagccagagctcacaatcaggaatggtgccctgaaaccagcttatatgcattcatgaatcaggctcgggc

SEQ ID NO: 479074 - DNA, 592 bp, Homo sapiens
attttaaactatcattcaggagtaagggtaaaacaagattttcagagagggaaccatagggaagctggcgagacgggcagaaacaggaaattgtgtactccgtttgttggaatctgaatcagcctactatgtggagaacactttgttaatcctacttagatatctgcatactttgtggtagagacatttgtaagtatctgctctaggtagagacatttgtaagtaactgctctagagaaacctgttcctatgttcgcaagggcataagtaccaagacattcactgtggcactgttggccattctaaagaagtggaaaaaaaccgactctgccctggaaggggaacaggagagtgagatgcggcattgtctatcatcgaatactccaaagcagcaaagccagacagtatgaaactccgtctgccaacgcatctaaacatcaaaaacatgatgcaagataaaagcaagctgcaacacgatatacacagtattatcataatttatgtaaagtgaaagacactgaagctrtaatatacatcattaatggaaatatacacatatatcaaagtgtagaaaagtcagttagaccttaca

SEQ ID NO: 479075 - DNA, 660 bp, Homo sapiens
agctggtccccacaggctcgtggttcttcttaatcaagtagtaaatcctttataaggtggtgagtgtctcaccacaatcatatgatctagatgttattattcccagtttacagatgaggaaacaggcacagaaacttgcccaaggccatgcaggtagcaggaggtggagctgggattacaaacccagacagttttggctcaacagtccagggtcataaccacagtccagcttcagtgagtcctgctgccttcacaggggacagcggccggcaaggttggctccttggactgggcacacacggccacagggacaggcaggcagataatgggactgycatcgccacatacatgtgacaatctcctttgctgctgcctttatgttcccatccttaaatacctctccccaggatcaaggctggctgcaacatttatccaggcccaaacccaacatagacggagtccagccccaccaggcatggtagcattttttgtgatctggagtaagaccctctactggcaacttcactggaaattccctggtaagcggtttctcccagtgatttaagtattggaacagatttgctctaatctcatgagtgtcaaagtttaatggccccaaactgccttctggaacgacctctcccgcttcctgaagcggca

SEQ ID NO: 479076 - DNA, 434 bp, Homo sapiens
tatttcattacatgaaatttctacagtttatctrtgcagtagaccatccatggaaatatggaatgttctcagaatttttttttaattattattattattttttgagacagagtcttactctgttgcccaggctggggtgcagttgtatgatctccccttactgccacctccgcatcccaggttcaagcgattcttatgcctcagccttccgagtagctgggactacaggcgtgcaccaccatgcctggctaatttttgcgtttttagtagagatggggttttatcatattggccaggctggtctcaaactcctgacctcaagtgatccgcccacctcggcctcccaaagtgctgggattacaggtgtgagccactgtgcctggccctccgaagatttttaatttcaaagaattctgttatgatctattttgtaa

SEQ ID NO: 479077 - DNA, 510 bp, Homo sapiens
tctgtggctcccattgataccccactgtgtactcagcgacttgtccctcctctgcagacctctgggcagcccttccatgtgctgggaagttaggaagcctgggtccccagcctaggctggggttgcacctctgcttttctccatgtctgccaatcttgtgctctgtaaactagtgcctggacaagcccagctctcaggaccattgrgctagtcatgaggtaaagattgggttctctgcccagccaccgacaggaccagcacccatgacctccccctgtccccgtagctggactttggcaagtctgcactttccacggcttcagccctgtggccctgtccctcatatagactcccacgtcttgcccctgctgccccacgaagtggcagccctctcctgctaatggcagtgggctggggcagagaccacgcatctctctgccattgctggcctgtgacagcccctttctctggggtgctgccctctctgacaggcactgggcccaggaagac

SEQ ID NO: 479078 - DNA, 654 bp, Homo sapiens
tgctgctcagagctccgctggccccctcagactcctcctggactcacgtgaggtcccagttgggaggtggcatcctcagggtgcatcccagcacccacaggagactggcctggtcatgtgctccccttgccttgtgtttcctttgacttgtcggtgaygtcttctggaggttgtgggctgtggggagggagggacttggtcgcttttgttccctgtggtatcctcagctctaagggcagtttgtagtgcacactcaataaacacattttcctttccctcctggggcacgttcctggcctcagatgtgtaggcctgacctcagggctctcagagatcatccaatgggatggtcattgcagtggtggtcacttaacttggccaaggtcaggaggaggctgtggacagcaccttaggtgttttttcattgtcagtgtcccctgtagcatctcagcatcatgctagtgggatgagagggagccagtctgcctgcccaccccagggagtggccctcttggggtctcagctatacaggtcagcagatgccagagttcttgtgtccagagctgagggggccatgcaaaaccaaggccagactgggggaaggtctagaagtgttatggactgaatgtttgttttccctaatatgatgtcaaa

SEQ ID NO: 479079 - DNA, 630 bp, Homo sapiens
acctaaccacctccctctcctgctgaaacccttcaatggctccccattgcactaagaatcaaatccagaccccttgccagggctgcaagtccccaaggaccccgacaaaagctgaacttacctgtgtcttagccgccacttctcttgacctcactgctctggccacattggccttttccccatctctccaacaasccaagcatgcatctaccctggggcctttgcacatgctgttcctactatctggaaggctctttgcatgctgggccccttcttggcctttggctatgcctctgatcttacctcctcagagaagctccccttggctccaagtagggcccctattactctaccaaaatgttcttttccttctttgtaggcgtcctcgtcggcaatgatgttattaatttatttgtgagggccatcaggtttgtgagggcagagaagtgtctgtcttgtttactgccaagtccccagagccaagcctggtatgtggctggttggaggtgttcagtaaaagtccttggatgggcaacaggatggagggactcatgggaactctgctctctgcaacctctgcatgctgctgctccttgtccggtgttctttctcaggaccacttggggtcgc

SEQ ID NO: 479080 - DNA, 497 bp, Homo sapiens
gattatgtgcagtgttaggtataccaactgtatcgcaacaaaggtggatcagtacctcggacagcgccaggaagacacagttatcctaagctctggtaaggcagaactgtctggctctctggaacttttagctgttagggkaccttaggactctttaatgtcaacatggtcctcagggactttggatctctgtttctggaggacacctttgttttctagcctgggtgctggacctccttcttccccctctctctttttcccttcctcctttcttcactgctccgactgctggcctctggaagccagatcatggcaatcacaggagggagagattggagggaactgagcccagtataggaggccttcatcttgaagtccctttggtttctgagcccaggttaccacaggtttctacttggaaatttctagatagtttcccctgtctgtccctgggatttggaagtctccttgaatcagataagggagtgccaaatgtg

SEQ ID NO: 479081 - DNA, 469 bp, Homo sapiens
atccaaagttattgtctccttttttgtgtatgtgttttccttcaaaattaaaatctgcatacttaatttaccaaagtttacagttaatgaatacttttgccatattccccagacaatccctgtattgtcttatattttagttcttatttttttgtatgccataggcatcactgttctagacagtgttcatttatattcacccatgcatttaaatgctcaytgcttttcactctttcctgtgcataggtccttccatctgggatcactttccttctgcctgaaatagctccttgagcatttcctttagtgaacgtctgcttctaattgaactctcagagtttttgtttgcctgaaaaatctttatttcatcctaattcttgaaagacatttttttccttagtgtggagttctagggtagaaacattctttcagctcattgaagctaccactccactatcttccgccttgt

SEQ ID NO: 479082 - DNA, 469 bp, Homo sapiens
atccaaagttattgtctccttttttgtgtatgtgttttccttcaaaattaaaatctgcatacttaatttaccaaagtttacagttaatgaatacttttgccatattccccagacaatccctgtattgtcttatattttagttcttatttttttgtatgccataggcatcactgttctagacagtgttcatttatattcacccatgcatttaaatgctcattgcttttcactctttcctgtgcataggtccttccatctgggatcactttccttctgcctgaaatagctccttgagcatttcctttagtgaacgtctgcttctaattgaactctcagagtttttgtttgcctgaaaaatctttatttcatcctaattcttgaaagacatttttttccttagtgtggagttctagggtagaaacrttctttcagctcattgaagctaccactccactatcttccgccttgt

SEQ ID NO: 479083 - DNA, 599 bp, Homo sapiens
acagtttgatatttctctttgattctttttttctttcagtttgtaatttgcatatcttgcacagaattttaaacgttaaatcttataaatgaatgaagatgaaaactgtatctaacatttacattaatttttgcatttaacaatcttttttttttttttttgagatggagtctcgctatgtcacccaggctggagtgcrgtggcacgatctcggctgactgcaagctccgcctcccgggttcaggccattctcttgcctcagcctcccgagtagctgggactacaggcgcccaccaccacgcccggctaatttttcgtattgttagtagaggcggggtttcaccatgttagctaggatggtctcgatctcctgacctcgtgatccacccgcctcggcctcccaaagtgctgggattacaggcgtgagccactgcacccggccaacaatcttttaagaaaaaacaaggtatattttctgaaatttgtccagcgtgtggcaatcttcagaaaacatttgtatttttaggatatttaaatatgcagatcacttcacttcaccatcattatctcatttttatccttatcagtgttgtcaggca

SEQ ID NO: 479084 - DNA, 622 bp, Homo sapiens
cttctgctagtccctcccttcctctgcgtcttcatacaaggcattccaaggccctagttactggccctgggccttaagaaagagtaaggccaggccggatgcggtggctcacgcctgtaatcccagaactttgggaggcygaggcaggtggatcacaaggtcagtagatcgagaccatcctggccaacagggtgaaacaccgtctctactaaaatacaaaagaaattagccaggcatggtggcatgcgccttgtagtcccagctacttgggaggctgagccaggggaatagcttgaacccacgaggtggaggttgcagtgagccaagatcacgccactgcgctccagcctggcgacagagcaagactccatctaaaaaaaaaaaattaaacaaaagagtaaggccaggagtaggccaatgaggagctggctacagctaaggtgagtattgtggacaggggtttaggtggttctctacttgggggaccaaagtggagagagtgacagggtgagtcccagtgagtatacacaaggagctgcccaaagcagatgctaggaggactccaggtaacatccaagcccaaaggcaccatccaagattggacctacgtgcagctccacga

SEQ ID NO: 479085 - DNA, 539 bp, Homo sapiens
atcccctgggcacccgcagcaaggctgatgccttcccctgcctggagaagctgagagagtagtggtaaaggtagcgactgcaggcaaggtgcccatgggcagtggtttgcccctggagccaggctggggctggattccagcatctctgggcttgttgggttactgaacagggcccttcccaccctgaacccagcttcttccctgcagaaggtggtggtggggattcaaggtggaagcctgtgatgggcttgacacgttgtgcacaatcaatgatttttaaaaaatcagagacatttagacaattgtgcgatgagtaaatggctcttggtttgacaatcctgtttgtgacaacccagagccttgtccccaggaarccatcctttccagaatgatgacagagaaggactcttgttttctgccctggatgtgagggggtggttgtggttccactaagccctgaggaaccatcctttggggacaggcaccaaaggtgcccaaggaccccatgccctagtcttcctcaggagacgtggcatcat

SEQ ID NO: 479086 - DNA, 539 bp, Homo sapiens
atcccctgggcacccgcagcaaggctgatgccttcccctgcctggagaagctgagagagtagtggtaaaggtagcgactgcaggcaaggtgcccatgggcagtggtttgcccctggagccaggctggggctggattccagcatctctgggcttgttgggttactgaacagggcccttcccaccctgaacccagcttcttccctgcagaaggtggtggtggggattcaaggtggaagcctgtgatgggcttgacacgttgtgcacaatcaatgatttttaaaaaatcagagacatttagacaattgtgcgatgagtaaatggctcttggtttgacaatcctgtttgtgacaacccagagccttgtccccaggaaaccatcctttccagaatgatgacagagaaggactcttgttttctgccctggatgtgagggggtggttgtggttccactaagccctgaggaaccatcctttggggacaggcaccaaaggtgcccaaggaccccmtgccctagtcttcctcaggagacgtggcatcat

SEQ ID NO: 479087 - DNA, 582 bp, Homo sapiens
tttaatcagggttggttaatgggagcgctagcagctcccctcactcctgacgtgccttggaaaccaagagtgaatccatagaccgtgttcacaggagctcagcattttgtgctggagtaagaccctctgcattgcaggatgccttctgctcatggcttcttgccccacgggtctttggggagctgaataactggagagagggggacgtggggacgtgggcctggatgggatgtcagggacctagggtgtttgcctggaaagggcctcactgccccatgctcccacagttctccttaccccacagcccacaccaccacttcctccctcctcccctgcttcaccttctctcttcagatagactctagtccagtggtttgcagactttgactcatgtcagaatcacctgaagcayttgtcaaaaccaattgctgggccccacttccagggtctctgagtcagtggaggaggggcagggcctgagaatctgaattcctagaagttcccaggtgctactgctgcttctggtccaaagagcaacctttgagagtcatcttttcttatggttttcaatcccgggtggac

SEQ ID NO: 479088 - DNA, 670 bp, Homo sapiens
gttggttaatgggagcgctagcagctcccctcactcctgacgtgccttggaaaccaagagtgaatccatagaccgtgttcacaggagctcagcattttgtgctggagtaagaccctctgcattgcaggatgccttctgctcatggcttcttgccccacgggtctttggggagctgaataactggagagagggggacgtggggacgtgggcctggatgggatgtcagggacctagggtgtttgcctggaaagggcctcactgccccatgctcccacagttctccttaccccacagcccacaccaccacttcctccctcctcccctgcttcaccttctctcttcagatagactctagtccagtggtttgcagactttgactcatgtcagaatcacctgaagcacttgtcaaaaccaattgctgggccccacttccagggtctctgagtcagtggaggaggggcagggcctgagaatctgaattcctagaagttcccaggtgctactgctgcttctggtccaaagagcaaccyttgagagtcatcttttcttatggttttcaatcccgggtggacattcgaatcccttgaggagtttttaaactgatcatttcccagccctctgaccaggctgggttctgttggtctgagcagggtcagggtagatatttttt

SEQ ID NO: 479089 - DNA, 654 bp, Homo sapiens
cacacccactgcttggaacacagcatgtttgccctgctggttcccttccaagatgacaaccataaactctgcagtctgaaggagaccctctgtttctggagggttaccagaaggttgtgctgcccatccatctcccagaagagcctgtgcctttccttcatttgaagtcagaccatcccctaccttgccgtgtgttctgttccaggtagcattgccttgccacctagctccacttaggtgtggtaccctgggcttgtattgaaggcaggatgttgggagaagcagcccctaagaagctagttattgtgcctattgcaggaggaagagtgttaaggaaattgctgggagacatttttctcacctttagaacmaggaaaaggagggccgattatggagagttcctttttatctgtggaaaccaggctgaatgagactgcgtcttcctctccgctttgtctgctaggaagcacagagcccaatgcatagcccatttctaggaggtgcccaggaccacagcattaacaccatggtgtgtaacctcacccttgtctagtgattgactggagcctgctggtccccaggactgctctttgtgctgtcctttggggtccagctctgcatctgacttggttccccccagccccatcaagtcag

SEQ ID NO: 479090 - DNA, 592 bp, Homo sapiens
tggctccagatcactgggtcagtaagtggaatggaagcgatctggacccagatctgttggccctgaaagcctacgtgttaagagtcttctaggaccgccatgtccctctggcccttgtgcaaaagtatcacctgtgcacctgcttttgcactagacaccattcattcattcatttggattatacatttctctctctcagttstcttttaaaatgcaaacactcctgggagaggtaacctattaagtggctgagaaatattaaaagctgttcagccgcataatccaggacctgagttgaagtcttagctcagccatttcctggctccatgaccttgaggcagcatttaattccacagagttcgtttcctctggaaaaatgtgggaataatgaaacaaccctatgaggtagacagacggggcaggaatttgaagagatcaaagataggaaagcactttgaaaaccacataccatcatacacctgcagaggaatacggtcttcatcgttgttgaaacacctgattcatttcccatcactttcatggtgatatgagggaataagaaccaggggtggggagaggtgaagcgggcagg

SEQ ID NO: 479091 - DNA, 586 bp, Homo sapiens
cacgcttacattttttgccccatcgccagcccatgttacttgagtgcactctgaaatcacattattttttaaaataatgtagctatcttggaaagagcataatttttattgcattgtattgataaggctaaaagcattaatttgtgaaatgtaaacatttaaaatcatccacgatgtaactttgttttgacctttttttaaatataaaggattgattatgagaagttggctcagcgattgttgacattttaaaaaaccattactaatgaaaacaaaatatgatagtggragcttctctggtccctaagaagtcgtgctaagtgcccacaccacacggagtgaatttccctgctcgctgtgtgtcctgctttctagtccacatacatcacacagtagttaagagtgcacactctggaattagactgcctgggttcatgtctagctaggggactgagtgactctgggccagttcctgacctctctgtgcctccccttccccatctgtaaaatgggggctaatactgacacctgcctcatcagaggctgagctcactaatgatacatcgtatgtcaagtgcctggtgtg

SEQ ID NO: 479092 - DNA, 586 bp, Homo sapiens
cacgcttacattttttgccccatcgccagcccatgttacttgagtgcactctgaaatcacattattttttaaaataatgtagctatcttggaaagagcataatttttattgcattgtattgataaggctaaaagcattaatttgtgaaatgtaaacatttaaaatcatccacgatgtaactttgttttgacctttttttaaatataaaggattgattatgagaagttggctcagcgattgttgacattttaaaaaaccattactaatgaaaacaaaatatgatagtggaagcytctctggtccctaagaagtcgtgctaagtgcccacaccacacggagtgaatttccctgctcgctgtgtgtcctgctttctagtccacatacatcacacagtagttaagagtgcacactctggaattagactgcctgggttcatgtctagctaggggactgagtgactctgggccagttcctgacctctctgtgcctccccttccccatctgtaaaatgggggctaatactgacacctgcctcatcagaggctgagctcactaatgatacatcgtatgtcaagtgcctggtgtg

SEQ ID NO: 479093 - DNA, 695 bp, Homo sapiens
caagacaaggagagagacagagccagccacacaaaccctcttattcccaggaagagcagccaaggagatgagaaaacagtttgctgaatgaagcccggcagacctcgagagagwcagtcccctaatggtcaatcagcgcatgactcagaaattggggctggtgagtctgtggcggcagagagggtgctggggtgaaggccaagccttccctctgcacctggacgaggtgcccagagcccaacccaagggtgggtagtacagaccttgcacccacctgctcctggccattttactgagcctcagcagtggcgatgatcattgtcaggaaggtcccagccctgatccccatctgccagctccagcttggcttgcagggagcagacagcctgctctgttgtgccggctcctggctgcacagcctgctgtcgctctggcctccccacaactctgcccctcagaagcttctgaggggaaggaggagagggagcgctgcatgtttaggagatatggcatagacaaaccagatacaccagaatggtcacgttactctgcaagcataaattgagctcaggcaacaggcactaggtaagtgtttgcatgaaggtgcaacctgtttaaaaggaaccttaactggtctgggccagttgtaatgagagagcaccttgtaaatgggagagcatagccaggtgagcttg

SEQ ID NO: 479094 - DNA, 618 bp, Homo sapiens
ccctcacagcctagcagggttggggcagagcacgcgcccactcrgggggtggccatggtgtaggtaggcttcacaaggtttctttcctctaacattatcttgggctctgcatgggacagagatttcacctaggtctgtgaatcctgcaacaaactagtgctgtaacccttgtgactggcaggtttctgtcctgtttcatgtggcctgtccctaagaaccccttgttggggattgtttgggctgtgggtgggtggggtattccttgcagccgtctgtaggaagctacttgccactactcagtagttcctaggcaggaggctgtagtgcccactagggagccatgaaggtgaaaagtccccatttctcaaagccaacttttgccttcctccccaaatcaagcacaacttgcaactgtgatgaccttttaatcgattctatattgaagggtctggaggaaggaggggaagggaaagggcagaatcgggccttgtgccttgcttgggcatcttgcccccttgacctgcagaggggtgacagggctgtgcctgggtcctgtggccgcatggaggctccctgcatctttggagggtctcctgagttactccaccctgcagagta

SEQ ID NO: 479095 - DNA, 618 bp, Homo sapiens
ccctcacagcctagcagggttggggcagagcacgcgcccactcggggggtggccatggtgtaggtaggcttcacaaggtttctttcctctaacattrtcttgggctctgcatgggacagagatttcacctaggtctgtgaatcctgcaacaaactagtgctgtaacccttgtgactggcaggtttctgtcctgtttcatgtggcctgtccctaagaaccccttgttggggattgtttgggctgtgggtgggtggggtattccttgcagccgtctgtaggaagctacttgccactactcagtagttcctaggcaggaggctgtagtgcccactagggagccatgaaggtgaaaagtccccatttctcaaagccaacttttgccttcctccccaaatcaagcacaacttgcaactgtgatgaccttttaatcgattctatattgaagggtctggaggaaggaggggaagggaaagggcagaatcgggccttgtgccttgcttgggcatcttgcccccttgacctgcagaggggtgacagggctgtgcctgggtcctgtggccgcatggaggctccctgcatctttggagggtctcctgagttactccaccctgcagagta

SEQ ID NO: 479096 - DNA, 431 bp, Homo sapiens
aaaacttaccacatactggtcccttcttacaagtttcaacatccttccaaaatctgcctgcttttggtcattytggtcttttgatcattttgattatttcagagccctccagcaattgttttctgtattatatccagaatttatagatattatttgtggaagggtatacctgttaggagatcactccactccactggaagaggaacttccagagtgtcctttttaaaacttctcagactgtgccattcctcccctcaactctccccactctcgatggctcccattttactcaaaagcccaaatgctcacaatggcctatgaagctgagaataatctagcttcagactgtgtctgacctgtgcccttttacctcacctttgctcattggtggcctctttgttgttcctcaaacatacctgcctgatacactc

SEQ ID NO: 479097 - DNA, 588 bp, Homo sapiens
atgctatgccctgaggtggtcttggaggtctttgctgccaggagttcacagctagttagggaggtaaggcacaaaccaggtcgagacaggtagaggagcaggatggggcagcaggagggtgcagggtcagggtggggaggtcacagaggctgactcctgaatgcaattgcagagactcgagatttagagcaaatttttaaagcttcttcagactatgagcttcttcacaaggtgagggaagaagagaattccaggcagagaaaacagcaagtggaaaggtgaaaaggcagtgtgtgtgtgcatgtgtgcctgtgcattgtgtgtgtgagagcatgtgtgcatgtgggcctgtgtgcacatgagcatgtgtgtgtgtgcgtgtccatgagtgaactgatgaagtttctggacagtgatgtgagggaggtgggaaggaggagggaggaggtgagaggagaaggagmtggtgagggaggtgaggtccaggctgtgaaggccttgaatttccctggacatggcagcaggcccctgaagggtttaggtaagtgctagtgtgatcatttctattttagaaaaacaatactagca

SEQ ID NO: 479098 - DNA, 631 bp, Homo sapiens
gtaggctgcatttccccctcccttaggagtggcctgagctgaagattaggtcaccaggagacccayacttccccagagatccactggttcactgagcttgtcagtcagaggaggttgtggggaatgtctgtgggtggtctggtgatgcagtgcgtcaagggcagaggacccttaggcaggcattggtgtcatggatgcgcatctggtataatgaccgtgacccaggtttttttttgcccagcgaatggctgtagcggctgcccaggtcacgctcccctgactgggtttccctttgatttctgccccaggagtagccctgaggagctagatttgtcccaagccttctgaacctagattgccctactattccaggagttccaggctttgggactccctgaggcaaaagctgtggtatgtcaacaggctacaggcttcctggactggtcttgcagagggagggacacctagctcctgcactggcactggaaccagcaccttactcttctctgttctgagagtggaggctcctttcctgcttgaactcaggccacagatctcagctcaatgcccctggatggtgtgcttgaaccttaggggcattgagacctgcggctttgtcctctggcctcct

SEQ ID NO: 479099 - DNA, 624 bp, Homo sapiens
attctctgggacttcttcaacctggaaaatcaaggaagagacaaaatgacatctgtgtcagaaaagagttaagcttggttatatttaatggacaaaacatgtaaaaccatatttctgtcatttgaaattaaccatagtgaaataattttacacctggaggagccctttgtgaagtttttctccaaccyttgtcttacgggcttaagcagcagcaaagtcttggctcagtgtcccagtggttaggttaaactcatgctccctgttcagcccaatgctttttgtatgggatttctccatttttctttgctttcaaagtattgatttttcaaataaacatttacatatatacgtaccaattacagacaacttagagcattcaaggccctaagagaattattagcattcttctcttcattttgctgacaagaaaactaacattaagatgtcaaataacttgcctaacaccatgcagatagtaaggctcacagcaagagtttcaacacattggtgtcaacctgactgtagagagcaaagcttcaacattatgtaaatgtgcaaaatgtaacagaatccaacaagaagaggagtggtgtgaaagaatgcatggtggtttttgtttttata

SEQ ID NO: 479100 - DNA, 635 bp, Homo sapiens
ttatgatcagaatgtgggaacagcaataaggattctagaggcctaaaatagataagtggagtgtgtgggttttgggggtggaggggtgaataaactgcagtcatttaaagagaggaagaaaggagatggcattgagtgctatggggcactctatcagcaagggcagggctgaggacatagaaaagcagctaggtatttcaaaaaggaagggtttactataggaactttgtcacaatgttttggaaaggctaggaataaatgagaggaaaagataaagactggaggagcaaaaggaagaaggggtgatactctaagatgaagaaacaaccaacagccctaggctggagcccacagggctgcccctgctgctgcactgctggaaatgcagaaactgcagaagttgttgctgcagcctaggctacagaagtctgcagttgtcctgccccgttgctgtgatggtaacttctaacagcttccattgttgtcaatcagmaactgaaagctcttctctcatcttctgttctcctgccaatgcctcacattaactggacttaggaagccaaacaacaagaagtctgtggaatgcagcttcagtcttccatcctcagttctacagagcagggtatggaagggga

SEQ ID NO: 479101 - DNA, 635 bp, Homo sapiens
ttatgatcagaatgtgggaacagcaataaggattctagaggcctaaaatagataagtggagtgtgtgggttttgggggtggaggggtgaataaactgcagtcatttaaagagaggaagaaaggagatggcattgagtgctatggggcactctatcagcaagggcagggctgaggacatagaaaagcagctaggtatttcaaaaaggaagggtttactataggaactttgtcacaatgttttggaaaggctaggaataaatgagaggaaaagataaagactggaggagcaaaaggaagaaggggtgatactctaagatgaagaaacaaccaacagccctaggctggagcccacagggctgcccctgctgctgcactgctggaaatgcagaaactgcagaagttgttgctgcagcctaggctacagaagtctgcagttgtcctgccccgttgctgtgatggtaacttctaacagcttccattgttgtcaatcagaaactgaaagctcttctctcatcttctgttctcctgccaatgcctcacattarctggacttaggaagccaaacaacaagaagtctgtggaatgcagcttcagtcttccatcctcagttctacagagcagggtatggaagggga

SEQ ID NO: 479102 - DNA, 635 bp, Homo sapiens
ttatgatcagaatgtgggaacagcaataaggattctagaggcctaaaatagataagtggagtgtgtgggttttgggggtggaggggtgaataaactgcagtcatttaaagagaggaagaaaggagatggcattgagtgctatggggcactctatcagcaagggcagggctgaggacatagaaaagcagctaggtatttcaaaaaggaagggtttactataggaactttgtcacaatgttttggaaaggctaggaataaatgagaggaaaagataaagactggaggagcaaaaggaagaaggggtgatactctaagatgaagaaacaaccaacagccctaggctggagcccacagggctgcccctgctgctgcactgctggaaatgcagaaactgcagaagttgttgctgcagcctaggctacagaagtctgcagttgtcctgccccgttgctgtgatggtaacttctaacagcttccattgttgtcaatcagaaactgaaagctcttctctcatcttctgttctcctgccaatgcctcacattaactggacttaggaagccaaacaacaagaagtctgtggaatgcagcttcagtcttccatccycagttctacagagcagggtatggaagggga

SEQ ID NO: 479103 - DNA, 670 bp, Homo sapiens
catcacttccgtttcctttctctgtatcccctgtatcaacttcaaagatttagggagattagcacttcaattctagactgttattatgatttctcttgccgagtacctctattatttcaagcatctttatttagcatttacattacgaattcccagtcactatatcattatctactcagacttaattatatatacaacagatgaatcattgctcactatttgttctcttcatcttctctgattttgaagtctgtgttctgatttatttttckattgaatagtccttttaaaagagttttccttagatgagttatgtgggtaatagaagccgtgggagtgcacggcaacttattaaagcttatgtacatgacatgtgaggttggggcatggaaaaataccgaggcactgtgtgtatgttctttgtgcatgagaatgaaactccttgaccttgaaaacaggacagggagtggagtccgtggtgtgataaggaatactgaaaacaccctgctgagcatgcagtttgagcgcttttacaaggccacaggtgtctcacgaccccacctcaaaaaagccatctagtggatgtttgtggtttaacaagccctttcaataaatccttggcggacggacgctggggcggactctctcagaagagctgccccacggcccc

SEQ ID NO: 479104 - DNA, 521 bp, Homo sapiens
tacacatgtcagtcatgtaagcctacatgatgggcacatcagcctccatcccaaagcagatcctgagggggmccaatcaactccagctcctcagtctgggaactgtcccatttgtgcaggaaatgactgtgggatgtgcacccacctgacctactggggtgaactcactggccttgatctcacagtgaattctgaggggaactagtctcaacttcagcatctcctgagaactgctgggaggcttgcatatctgggccaccagcccccatcccacagcaggtacagaggcggcccaggctcagctccatcttctcctgctgcagttggggaactggcctggaagcctcgcctgtctgggcctatgggacaggcttccagacttgggtccctggccaatattctcactcaacttgggtacatgccttggatcttcaccaggtccatctctgccagagtgcatgccaactatggaacttttgtgaaactgacaacaaatatgggcttagggcaccctctagtgt

SEQ ID NO: 479105 - DNA, 521 bp, Homo sapiens
tacacatgtcagtcatgtaagcctacatgatgggcacatcagcctccatcccaaagcagatcctgagggggcccaatcaactccagctcctcagtctgggaactgtcccatttgtgcaggaaatgactgtgggatgtgcacccacctgacctactggggtgaactcactggccttgatctcacagtgaattctgaggggaactagtctcaacttcagcatctcctgagaactgctgggaggcttgcatatctgggccaccagcccccatcccacagcaggtacagaggcggcccaggctcagctccatcttctcctgctgcagttggggaactggcctggaagcctcgcctgtctgggcctatgggacaggcttccagacttgrgtccctggccaatattctcactcaacttgggtacatgccttggatcttcaccaggtccatctctgccagagtgcatgccaactatggaacttttgtgaaactgacaacaaatatgggcttagggcaccctctagtgt

SEQ ID NO: 479106 - DNA, 547 bp, Homo sapiens
tcccggcaaagaccctggggcgcacggcgcgccaccttggacatgtcgcctgggatcggctaccgggagctccttttcccgccttctcggccagcaccgggctcatcctcccggaccgggaggctccccgatcggggacactctcacgtgccgagggcaaggttgactccaggagggcaaggcccacgcgcccgacgcggcgcgcgcaggaaccgracagtccgggggtcccggagccacccgcgcattttgactacgccgtccccgccctctctccgcaccctccgcaccctccgcaccctgcgtccctcggccgcatctccgccgggcgtccgctggctggctagctcaccactccacgccatccgcctccaaagcccggcactcacctgccccgcgcggcaggcgcgccgcacccagcagcagaacccctagcagtgcgatagagaccccgcagttcaggccggccatgactccgggacgcctcggcctcggtggggaaaacgacggtggggagcggcggccccaggcgcccaagcccggcgca

SEQ ID NO: 479107 - DNA, 547 bp, Homo sapiens
tcccggcaaagaccctggggcgcacggcgcgccaccttggacatgtcgcctgggatcggctaccgggagctccttttcccgccttctcggccagcaccgggctcatcctcccggaccgggaggctccccgatcggggacactctcacgtgccgagggcaaggttgactccaggagggcaaggcccacgcgcccgacgcggcgcgcgcaggaaccgaacagtccgggggtcccggagccacccgcgcattttgactacgccgtccccgccctctctccgcaccctccgcaccctccgcaccctgcgtccctcggccgcatctccgccgggcgtccgctggctggctagctcaccactccacgcyatccgcctccaaagcccggcactcacctgccccgcgcggcaggcgcgccgcacccagcagcagaacccctagcagtgcgatagagaccccgcagttcaggccggccatgactccgggacgcctcggcctcggtggggaaaacgacggtggggagcggcggccccaggcgcccaagcccggcgca

SEQ ID NO: 479108 - DNA, 468 bp, Homo sapiens
tgctgggattacaggcatgagccactgtgcctgacctggagtcagaactttaacagcagaaaaacaggagtggtactcctttaaatcacggacggtcattctgtgttttttggggagactgatgctaggtcccagtggtctcctgcaggggctggaaccaccccagagaaaggagagcaggcttctgtcccttcttkctgcacttgcaaataacacaggtcagcccagggccagaaccttggggcagctccaccgaaggagctgtcctgttgcccctgatccttccgtcccaagtcccaagcccaatcctcacaccaaggcaaggtggggaggaggcagaggttgtgggggtgtgggtgggtgggggtccttatgtcccacagtacgggagctggaccaggaagatggaatttgctaccctgagtgaccatagagagggtttctagaacctcaactttgcaggcaggt

SEQ ID NO: 479109 - DNA, 403 bp, Homo sapiens
atctagaaacacaggagggaagatagggcrtaatgttaaattctatggtaagaaaatcagcatctatcttgcaagaacaaataatacatggaattaacttgagccagggaattcctgaggatcataaatattctgaaataagattccaaggtactacaatagcaagaccacagttctagatccttacacagtgtggatcatgatttaagtccagagtggctaccatagaaggcagccctataggtaggctggaaatcacaaatgttacccccgggatagaaaagtgcattggtaacagtggtggctcagaggggcctggagtgccatcgcaaggggactctgggggctctgtcaggttctaaacaagtttctccaacctgcagccacttgacctctagattgg

SEQ ID NO: 479110 - DNA, 550 bp, Homo sapiens
gtagtgagctttgtttgccccattgcaatccagcctgggccacagattgagacagtgtctctaaaaaacaaacaaataaaaaagtagaatacrgaaaggctggctgggcgtggtggctcacgcctgtaatcccagcactttgggaggctgtggcagggggatcataaggtcaggagatcgagaccatcttggctaacaaggtgaaactccatctgtactgaaaatacaaaaacaaaattagcaaggcgtggtggcgggcacctgtagtcccagctacttgggaggctgaggcaggagaatggcgtgaacccgggaggcggagcttgcagtgaactgagatcacgccactgcgctccagcctgggcaacagagcgaaactccaactcaaaaaaaaaaaaaaaaaaaggaatatggaaaggctagacattaaagaattaagtttatattgaatattgacaatgaataggaaaaaatatacataaaaaagaactaatactcatttaagaggtaagaaaaagaacagtaaaataaataaaaagttaggctgggc

SEQ ID NO: 479111 - DNA, 550 bp, Homo sapiens
gtagtgagctttgtttgccccattgcaatccagcctgggccacagattgagacagtgtctctaaaaaacaaacaaataaaaaagtagaatacggaaaggctggctgggcgtggtggctcacgcctgtaatcccagcactttgggaggcygtggcagggggatcataaggtcaggagatcgagaccatcttggctaacaaggtgaaactccatctgtactgaaaatacaaaaacaaaattagcaaggcgtggtggcgggcacctgtagtcccagctacttgggaggctgaggcaggagaatggcgtgaacccgggaggcggagcttgcagtgaactgagatcacgccactgcgctccagcctgggcaacagagcgaaactccaactcaaaaaaaaaaaaaaaaaaaggaatatggaaaggctagacattaaagaattaagtttatattgaatattgacaatgaataggaaaaaatatacataaaaaagaactaatactcatttaagaggtaagaaaaagaacagtaaaataaataaaaagttaggctgggc

SEQ ID NO: 479112 - DNA, 672 bp, Homo sapiens
ctgtttctgcaggcaatacatgttttaaagcagatttttttttcttttttttttttttttgagacagagtctcactctgtcaccaaggctggagtgcagtggcacaatctcggctcactgcaacctccacctcctgggttcaagtgattatcgtgcctcagcctcccgagtagctgggattacaggtgcccgccaccacacccaggtaatttttaaattatttgtagatacgggatctcgctgtgtggcccagactggtcttgacatcctgacagcaagagatcctcccaccttggtctcccaaagcactgggattataggcacgagccaccatgcctggcctaaagtttttcttttaatgagatagtattacaagtctcaatttccaggttctaaaccaccaaatgtaccctttccttaaagggawctgcctgagaatggtttgcaatgagctgatttttcttttccagcctccccttcccaagtcctcttagccttcacagcaaaaagattgaggctgtagtgaaccatgattgcaccactgcactccagcctgggcgatagagcaagactctgtctcaaaataaataaatagataaaataataaaaatcaaaaacaaaaagctatcccttagccatcctgaactatgctatgtgcgatgttcccaagca

SEQ ID NO: 479113 - DNA, 645 bp, Homo sapiens
gcaaacacatccttcatgaaaaagggcaaatgatttcatgagtggatccttgagcccagacaatagagaaatgaattaaagaggattattcccaggtgttaaaactatgctgttttcctagccagatatcagcacttcttgggactaaagactctttttgccctaggatggattatgtccaggacctcawtaacacctaatttagatgactgagatgatgagatttggaacttttgagctaatgagactgtgagcttttaatcttatgttaatgttatgatggatagagtgaatgcactttgcatgagggatgaatatgaatctctggggccaatgggaagattgtggtaaatagaataatggcccctgaagatactcaatttccaaaacttctgcatatgttactttatatggcaaaagggcctttgcagaaatgattaaattaaggatcttgaggtgtgaagtttattctggattatccaagtgggcccaatgtaatcacaagggtctttctaggaggaagacaggaagatgagagagatttgaagatggtatgtggctgaatttgaagatagagaaaggaaccgcaagcaaagaatgcaagaggtctctagaagctggaaaaggcaaggaaagagtctcccc

SEQ ID NO: 479114 - DNA, 609 bp, Homo sapiens
aattaaataaggtaacattatggtttagaaatkgtttctccaccaaaactcatgttaaaacttaatccccaatgtggtagtattgagaggtggagcctttaagaggtgattggctcatgagggttctgctctcatgaatggatgaatctattcctagattaaagggctatcatgacagttggactggtggcttcataagaagaggaggagatgctagcccagtctctacaaagtaaaacaaagaaaagaaaagaagagaaggagagacccaagtgagcccattcaatcctctagtcatatgatgccctgcatcaccgtgggactcctcagagtccacaccagcaagaagactctcaactagatgcggcccctagacttttgacttatcagccttcatagctataagaaataaatttcttttctttataaattacctagtttcaggtattctgttataagcaacagaaaatggactaagacaggtaatctatgtgcacgttctgaactcatagttgaaactcagaatagattttctttcttaccaagtgttgccctggttcctgccatatcgttccccaaaggtgctgtaggagccatcttggtgtttgt

SEQ ID NO: 479115 - DNA, 351 bp, Homo sapiens
actgacctatcaccccatgtgaggcagagacagaaatgatcagaatatggaacgacaygaacacatagaattggggccaagtgtgagatgctgcagtaaattgggatttgtaagaaaaatgtatgtcacatagattcatccatgctttaagaagcatggcaatggcaatgatacaaatcaagattggttgtgtattaggaggatttggcatttgccttagggtagcttgtggacgtgcaggcttggcagtggcagaggaaagggaaaagcagtgattgtatattgccctagggaatactatctgctgctatgtagattttcatagtttcttccttcctttcttctcctatt

SEQ ID NO: 479116 - DNA, 608 bp, Homo sapiens
agaattttaccttgaggaagctataaatatctgcttcattacttgataagggaacatagatggctccattatgaatgaagaaaggacggggacagtgtccttgttcttcctcctgctggtccacattgtcaggaaaattggtgagatccttcacagttagcagattatatacctgtagcagtggggggatcaaaggcagaactgttacttacttttcttttgaaatagaatgaactgagagaaataaaataattatcaccaatcttttcttgagtacgttcatgtagttggtaccttagagatagttgaagattttccttatatttaacagtgttgttttgttataaagaaatgaaacctacttgggaaaatgcttccaaagattaacaaaatcttaarttatgaaggattaattaaaacttcattgtagagtctagaggtaaaaatagaccaaatatagaaagaagacgtaacttgcatctgtgtttaattaatacataatgccctgaggaatttagctacatattattattgccacctgttaaacatctatgtctactcaggcttattctcagacagaaaatcgtatagatggcccattagaagca

SEQ ID NO: 479117 - DNA, 616 bp, Homo sapiens
tgagtgaataggagtgggaattcaaacccgtttctgattcttatttctaaatattgtctggtataatctaatgctctttaactcttttttgcatccataaaactgaatattttagacttagatgttttcttctcttctttttccccatgaaacaaatatctatgtctgtgtatgcatataaacagctctccttatggctttattacaaagagcatttttttgcttgtttcttgtcattttaaattgaaggtttgcatatcggaggttgttctttacaatcttagtaaactctgttttgtttatgttttaccagaagatatggcttttcctgaatatctatgcttaactcgttcctgtggtcctttcctcttttttctcagtttcttytagtcgtctcaaatgtctgcatctaaaacccacattcagatgcccacggttgtctacagtccacctgtttccagcttcccccttcttcaatgttagtcacagataaatattatttgctattttatctcagagtatttgggaaactgtgggactcttgaacacagttgtcagtgagggttgtgtacgcaacagaaagaaataaaccagaaataaatatttagagattaaa

SEQ ID NO: 479118 - DNA, 578 bp, Homo sapiens
ggctaagttaggattaaagagaagggaaactccctggaagcatcagacagaaggggtcctagatgttcttataatgtgttcttggtcctcacattccacattcacaaacactgagaaagaacaccacaatcagaaattgcaagctgattattttattggtatattaaagttagagctatgatgamcttgttccaatgtcacggcatttgtagcaattgaattatttgaattcactgatatcttcttattcacttcctgaaataaacaaacaagcaagttcatagattcactcttttgatgcccttgcacacaatgtgctccaaattgtggcttagaagatgaagagaaaagaccatccttaggttgctgtgactcattgctgttgaatttgttcagggatatatttacacagatggtaactggaacatattctataatactgagaagctaaaaccaccctcagtgtccagtgacagggattggttaacgaaatcatggcacagctacacaatagagtagtataaaaatgtaaaagcaaacagaaaaccactgaagatatgtagtgaccttcataaact

SEQ ID NO: 479119 - DNA, 635 bp, Homo sapiens
tggctaagttaggattaaagagaagggaaactccctggaagcatcagacagaaggggtcctagatgttcttataatgtgttcttggtcctcacattccacattcacaaacactgagaaagaacaccacaatcagaaattgcaagctgattattttattggtatattaaagttagagctatgatgaccttgttccaatgtcacggcatttgtagcaattgaattatttgaattcactgatatcttcttattcacttcctgaaataaacaaacaagcaagttcatagattcactcttttgatgcccttgcacacaatgtgctccaaattgtggcttagaagatgaagagaaaagaycatccttaggttgctgtgactcattgctgttgaatttgttcagggatatatttacacagatggtaactggaacatattctataatactgagaagctaaaaccaccctcagtgtccagtgacagggattggttaacgaaatcatggcacagctacacaatagagtagtataaaaatgtaaaagcaaacagaaaaccactgaagatatgtagtgaccttcataaactgatgtggaaattttaaaaaaatgtattttttaaatgactaacatatatacctgcat

SEQ ID NO: 479120 - DNA, 578 bp, Homo sapiens
ggctaagttaggattaaagagaagggaaactccctggaagcatcagacagaaggggtcctagatgttcttataatgtgttcttggtcctcacattccacattcacaaacactgagaaagaacaccacaatcagaaattgcaagctgattattttattggtatattaaagttagagctatgatgaccttgttccaatgtcacggcatttgtagcaattgaattatttgaattcactgatatcttcttattcacttcctgaaataaacaaacaagcaagttcatagattcactcttttgatgcccttgcacacaatgtgctccaaattgtggcttagaagatgaagagaaaagaccatccttaggttgctgtgactcattsctgttgaatttgttcagggatatatttacacagatggtaactggaacatattctataatactgagaagctaaaaccaccctcagtgtccagtgacagggattggttaacgaaatcatggcacagctacacaatagagtagtataaaaatgtaaaagcaaacagaaaaccactgaagatatgtagtgaccttcataaact

SEQ ID NO: 479121 - DNA, 572 bp, Homo sapiens
cttccctttgtccagaatattctataatattcaccctctgcttcatttcttttaataattgtattgaattcctaccacttataattaagtggctacaattctacattcaaataggataatcagataccctcgttaaagcctaaattgcattmtattggtattcttggtttagtcagtatttgtgttacctgttttctcagattgttcttccacaaagagtatttttctataatattctgatatgcattcctccccaccttctttctggttcttctttgttcatattttattttctgagtcaagcccattatgtgtatttttctttatgtatctggcttttttccccatgaatttggtgagatttcctttatttaatcttctaagtattaggatatagtacttaccatctttgtttcattcttgtctgtgtaatttcataatacgtgttgtgtttccaaaaagccctatcagagacctgcattgttagcacttctttcagctactgattcttcgttatatctgataaatacctgcttatcagttcatggaatatacaggttactcagtatcaa

SEQ ID NO: 479122 - DNA, 538 bp, Homo sapiens
taaattaggattaaggaggagagaagtttcctggagcatcaaggaggagggttcctacatgttcttatacagtcttcttggtcctcagatcccacattcacaaatattgagaaacagacaccacaatcagaaattgcaagctrattattttattggtatattgaagttagagctatgatgacctttttccaatgtcatggaatttgaatcatttgaatcactctcatcttcttattcacttcctgaaacaaacaaagaaggaagttcatagaccagacttgacatggcaggaaatgtcgaattcctcactggtcttactgcactacagtacatgagagcccatcctctctcccccatcccttctacctcctgtgtttcctccctaattttttgtgtgttcactctttggatgcccttgcacaaaatgtgctccaaattgttccttacgtgatgaagacagaagatcattcttagcttattattacttgctgctgaatttgttcacagatatatttacacagatgggaactggaacata

SEQ ID NO: 479123 - DNA, 538 bp, Homo sapiens
taaattaggattaaggaggagagaagtttcctggagcatcaaggaggagggttcctacatgttcttatacagtcttcttggtcctcagatcccacattcacaaatattgagaaacagacaccacaatcagaaattgcaagctgattattttattggtataytgaagttagagctatgatgacctttttccaatgtcatggaatttgaatcatttgaatcactctcatcttcttattcacttcctgaaacaaacaaagaaggaagttcatagaccagacttgacatggcaggaaatgtcgaattcctcactggtcttactgcactacagtacatgagagcccatcctctctcccccatcccttctacctcctgtgtttcctccctaattttttgtgtgttcactctttggatgcccttgcacaaaatgtgctccaaattgttccttacgtgatgaagacagaagatcattcttagcttattattacttgctgctgaatttgttcacagatatatttacacagatgggaactggaacata

SEQ ID NO: 479124 - DNA, 538 bp, Homo sapiens
taaattaggattaaggaggagagaagtttcctggagcatcaaggaggagggttcctacatgttcttatacagtcttcttggtcctcagatcccacattcacaaatattgagaaacagacaccacaatcagaaattgcaagctgattattttattggtatatwgaagttagagctatgatgacctttttccaatgtcatggaatttgaatcatttgaatcactctcatcttcttattcacttcctgaaacaaacaaagaaggaagttcatagaccagacttgacatggcaggaaatgtcgaattcctcactggtcttactgcactacagtacatgagagcccatcctctctcccccatcccttctacctcctgtgtttcctccctaattttttgtgtgttcactctttggatgcccttgcacaaaatgtgctccaaattgttccttacgtgatgaagacagaagatcattcttagcttattattacttgctgctgaatttgttcacagatatatttacacagatgggaactggaacata

SEQ ID NO: 479125 - DNA, 538 bp, Homo sapiens
taaattaggattaaggaggagagaagtttcctggagcatcaaggaggagggttcctacatgttcttatacagtcttcttggtcctcagatcccacattcacaaatattgagaaacagacaccacaatcagaaattgcaagctgattattttattggtatattgaagttagagctatgatgacctttttccaatgtcatggaatttgaatcatttgaatcactctcatcttcttattcacttcctgaaacaaacaaagaaggaagttcatagaccagacttgacatggcaggaaatgtcgaattcctcactggtcttactgcactacagtacatgagagcccatcctctctcccccatcccttctacctcctgtgtttcctccctaattttttgtgtgttcactctttggatgcccttgcacaaaatgtgctccaaattgttccttacgtgatgaagacagaagatcattcttagcttrttattacttgctgctgaatttgttcacagatatatttacacagatgggaactggaacata

SEQ ID NO: 479126 - DNA, 604 bp, Homo sapiens
tggacttcccagcttctagaactataagaaataaatttctgttgttcataagcacccattttatggtattttttatagcagcctgaacaaaytagacttaataggatttgctcagcaggattaccaccaggtcaagtcatgagatcttttcaaaatataagtaaacctccccttacccctactctccacaaatacaaatttcagcagtgctcttgggacaactaaaaggcccaaggaccttcccaaaagcctactacaaatgaagaaactatggaagtcttagtagcttaattgcaggacatccctgccagtttctatcctgattagggatctgcaatgaacattacaaaatcttcaccatctccatggctttcaacaccaagcatatggacttagccactgtaaaatagtggcatgcatcaatgaacaataaagagaaatggagatcattcatattattagtgagggaagttgggtacaacttttcatcagccaaaaagagggagaaaaaaatcacaccaccaaataatgaaatactgtaactaagatcattggcagagaattagagattatgttcagcagattaaaaaaaaaaagaaaacag

SEQ ID NO: 479127 - DNA, 604 bp, Homo sapiens
tggacttcccagcttctagaactataagaaataaatttctgttgttcataagcacccattttatggtattttttatagcagcctgaacaaactagacttaataggatttgctcagcaggattaccaccaggtcaagtcatgagatcttttcaaaatataagtaaacctccccttacccctactctccacaaatacaaatttcagcartgctcttgggacaactaaaaggcccaaggaccttcccaaaagcctactacaaatgaagaaactatggaagtcttagtagcttaattgcaggacatccctgccagtttctatcctgattagggatctgcaatgaacattacaaaatcttcaccatctccatggctttcaacaccaagcatatggacttagccactgtaaaatagtggcatgcatcaatgaacaataaagagaaatggagatcattcatattattagtgagggaagttgggtacaacttttcatcagccaaaaagagggagaaaaaaatcacaccaccaaataatgaaatactgtaactaagatcattggcagagaattagagattatgttcagcagattaaaaaaaaaaagaaaacag

SEQ ID NO: 479128 - DNA, 634 bp, Homo sapiens
ctggtggattggatgcccaggaaggtactttgtgaagagctccaggtgctgcctctgatgctgggctgactcttctgaattatccacctgtctcctgactttcaagcatcatactcactgctggcactttggagctggtctgagtaagacttagggtctcattttattagagaaagctggactttgcaagtaactatycaactgttaagcagcagaattagaatgagaattcacagtgtcttattaccaagaccgcacaacactccaaggaagtaactactcaaacgcgcaaatgcagaacaacctcaaattcaacatgtaccatttttgttttgtcacttaagctattccatatacatgctataaggtataagtacatgtaatattatctaatgttccagaaattcatacacaccctttacaaaagtctagaataaacaacattaccatatcatggataactgcctccatgtacccctgaaacaatgttgagaggagtaacattacctgtcctgtctgtaagaggaagacatgggtctgtgaatgaagaccatgtcctaatgaaataaaattaatgtcacattctaataaaattgacatagggataaaaattactcctactgaataagatgat

SEQ ID NO: 479129 - DNA, 502 bp, Homo sapiens
cagtgtctgcactacttgaatttaaaagtacatgtgtcttgcttacttgcatgaagacacttagtccatatctcctttattacttcttttcctctactcagatctcaattcygttaaggattcaggctgggcctgagatctcactgacccaagggggaccaaaggtcctatacactcatcccaaaatgttgcaagacatcaagtagggtagggactaaaattgcttatagctgctcaaatcaccacattacttgtttctatgagagtgggagaaggtatgcttcgacacataggatgaagccacagtggcatgtgagggaaaggaaaggaaagggagagacctcaagcctgtggcctccctggacactgggagatgcactttaaagaaagtagaatctgggcaaaaagcgaaggagaaaaggcctttttggttgttctagtcattctttttttttttcctttttagagacagggacctgctcttttgcttaggctagagttc

SEQ ID NO: 479130 - DNA, 502 bp, Homo sapiens
cagtgtctgcactacttgaatttaaaagtacatgtgtcttgcttacttgcatgaagacacttagtccatatctcctttattacttcttttcctctactcagatctcaattctrttaaggattcaggctgggcctgagatctcactgacccaagggggaccaaaggtcctatacactcatcccaaaatgttgcaagacatcaagtagggtagggactaaaattgcttatagctgctcaaatcaccacattacttgtttctatgagagtgggagaaggtatgcttcgacacataggatgaagccacagtggcatgtgagggaaaggaaaggaaagggagagacctcaagcctgtggcctccctggacactgggagatgcactttaaagaaagtagaatctgggcaaaaagcgaaggagaaaaggcctttttggttgttctagtcattctttttttttttcctttttagagacagggacctgctcttttgcttaggctagagttc

SEQ ID NO: 479131 - DNA, 502 bp, Homo sapiens
cagtgtctgcactacttgaatttaaaagtacatgtgtcttgcttacttgcatgaagacacttagtccatatctcctttattacttcttttcctctactcagatctcaattctgttaaggattcaggctgggcctgagatctcactgacccaagggggaccaaaggtcctatacactcatcccaaaatgttgcaagacatcaagtagggtagggactaaaattgcttatagctgctcaaatcaccacattacttgtttctatgagagtgggagaaggtatgcttcgacacataggatgaagccacagtggcatgtgagggaaaggaaaggaaaggragagacctcaagcctgtggcctccctggacactgggagatgcactttaaagaaagtagaatctgggcaaaaagcgaaggagaaaaggcctttttggttgttctagtcattctttttttttttcctttttagagacagggacctgctcttttgcttaggctagagttc

SEQ ID NO: 479132 - DNA, 604 bp, Homo sapiens
tggacttcccagcttctagaactataagaaataaatttctgttgttcataagcacccattttatggtattttttatagcagcctgaacaaactagacttaataggatttgctcagcaggattaccaccaggtcaagtcatgagatcttttcaaaatataagtaaacctccccttacccctactctccacaaatacaaatttcagcagtgctcttgggacaactaaaaggcccaaggaccttcccaaaagcctactacaaatgaagaaactatggaagtcttagtagcttaattgcaggacatccctgccagtttctatcctgattagggatctgcaatgaacattacaaaatcttcaccatctccatggctttcaacaccaagcatatggacttagccactgtaaaatagtggcatgcatcaatgaacaataaagagaaatggagatcattcatattattagtgagggaagttgggtacaacttttcatcarccaaaaagagggagaaaaaaatcacaccaccaaataatgaaatactgtaactaagatcattggcagagaattagagattatgttcagcagattaaaaaaaaaaagaaaacag

SEQ ID NO: 479133 - DNA, 530 bp, Homo sapiens
ccatttaccacttagaccttctgtgtgtcttgtgtaattgttcacattttgtgcatggctggtattaatttgaggacagcttggctggaggtatgatggaggtagagagggtatgtgacagtaaatcctaaagacagacctcttgaccattgtggatgagtggatcctggactgtgcagatgagggtctggtctggcccttctgaagagttgggggtaatagtacaggaagacttcctaatacaraaggctttgctacagataactttgcccttgcaagggaaccaggaagattgatattttccctggcaaaaatatagacatacttgaaaggggaatatattattaattggaaattatttctggctctatggaaagtggactggttctagctagtcttcatgagttttatcttaggcagagagtacttgcttgtgccagcaggtcccattatattattgagatttctatctctggtctcctccataggaactggagatgaccaatcctgcctaggtgtcttaagttaga

SEQ ID NO: 479134 - DNA, 659 bp, Homo sapiens
cataaatgagatgatgtctacggaatgcttagcggaccattccaggtgtcagtgtgcaatcaataaatgtgttccatgatgctaatcaggagtggggaggtaccacatgggtggtcccaggtgttcaggtggccttgcattgtagtggactgcaaatgctctctaacccttccaaccacagtgattgacattcttccccacaactacacaggcagctcctggtaagtggaaattttccaactgttggagagtcccttccccagaactccaagaaaataaggtctggcctggccacacgtggcatgtctgcccccggggctgggctgagaggtcagcctgacctcatgtgattgctccctgccacttcctccccgcctgccagccccccacccactaaccctttacagatctctggaataagtgaggctctgttaggccaagacctccaggtgccgccaccccaactgctgagtctgccagccctccaggcaggtgggcctgagtgctggtaagcrccagcacttcctccagccttgatggggtcagggatggcagctaattggaggatgctgagctgatgcctgtctccggcttcctgccaccttgcctggggaggtcattcactgtgggcaatatccctccaccacctacccccagca

SEQ ID NO: 479135 - DNA, 613 bp, Homo sapiens
aagtccttaggcttgggacttgggaattctgggagatacaattcaagttgagatttgggtggggacacagccaaagcttatcactatcataacttacaaatatagtccctcaattttctaagtttttttccaccttaactgatggtttgttgttgttgttgttgccgcttggctttgctttatgatgatcggatgggttttgatttcttcatatagtcgtattcattaatattccacattatggtctttgccactgactttatgcttgatctttcccattaataggaactttgttcatatttagattattcatatgaactgtttagtccacctgtaatttagctgtctgaccttaccgaagccacttaacctctctatggttcagttttctatctctaacctggtaataayaatgctacttcatacagtgagtgagatgattaatttagttaagtcatataaagtttagtgcctgacacaagcttagtctaatcaagtgttagcttcttagttaagcctattattaatttttcctaatagtgtaacctaatagtaatgaagcgtcctaataacttttatcaaaccatctggcttttaaatttgtttattgatg

SEQ ID NO: 479136 - DNA, 646 bp, Homo sapiens
ttctttcttttgtgttcagactctggtgaccctcaggacactagctagaactgagcttccatttaagtctggatcctacgaaaatttcttagaaattcccaagcctcagctctctggacacaacccatcaaccagcaaaatggatccccacccagttacctgtatcaactcaccaaaaggcaggatgggctgtagaccagttacaggtttctttcattctgtgggtagatgtgtgtgtctctagcagcctttttggaaagaatgcttgtattctacagatgtctctgccttggcaattctgttcaactcaaaagtggtaatctatcatcctctgctgagaatttacccagcaagtgcctgaagaaaaaaagccatttagtttttgcttccacacatgaaatggctaactctttttaagtgaggcttggggatttaagagttggatatcagatacctggatttcatggaccagcaaaatgtaaaaaaaaaaccaccaccaccaccaccamcaacaacaaaaaagccccaaagttgtgtagtaacacaaagctgcaggttttaattttgctttgtcaatatgttaagaaaaccaaaacagaacaactggtatttattatctcatcatctcatagaaaaatgggcatct

SEQ ID NO: 479137 - DNA, 605 bp, Homo sapiens
tgttattaaatgacacacaaatatacwtataactttatagaaaatactatacacactgattttcctcattttgccttggactggtgaaggtatgctgtcctagatgggctgctctgctattgacatttggtggcctcaggaacagttaacaggaagattcagtccacccactgctcaaatcctgtgacaagacagttggtggatgctttgcattcaacatactcaaaataccaaaacttgaattctcaagtagctcttttgaaaaagtgcctgaggtattgctagctgtatttgggttccttccctgtaagagggtccacatgcttaccccctcctctgttttcattcccttttcttcttttgtgtcttctgatacctttgttatattctttttattctgagaaataatagaaaaatataaggagaaaaataaggttttccagtgaatgcatctcatagggaatgcatagttaaaatcccaatgtagtaatttctagccttttttctataaacgcttttcacaaagtgaggatcattctacataactttttatcttgagccttcttccctatcatgtcattaccactttgtcatgtcataaaata

SEQ ID NO: 479138 - DNA, 472 bp, Homo sapiens
gcctgcgtgagctctcaccccagtgactgaaaatgccttttcctgtcatgctgttgactgaccatgagaaatgagtgttcctattttcctgagatagctttaggatttatcacccttgaagaaacacagcaatgactcaaactcactcaaaacttttggaccaaatgtgacttcagccagggaaggagaaagaaagagaaagaggaaaggagggaaaaagagaagagagraatgtcagcacccaagagacccctggaatgaaacagcagtgagaaataggagcatcttggagcattcacagaagtgaaaaggtctactacctacactccccaccctttttaatcaggtgtgatgaggagagttaataccatcggtacatgcagcccaagtccatgtctcctaggacaattccctatacagttgccagagagcccttctgaaaacagtcagttcactcctctccattcaaaag

SEQ ID NO: 479139 - DNA, 603 bp, Homo sapiens
ctgtaagccctcacttccctctcttcctcacttccttcctcttcctcttcccaaggggagcagaggaaggggaaggaaaccaaccctgggacagccaactagtagaatgaacagaactggtgtgaatcccaactcctgggacagaccatgggggcaytggcattctttctttaaatctcttccttttaatatagtccttgtgcaaatgtgtacagcaccaggaataagttaatatgatgcatgatccttttcgaaagataaaacaaacatccctttaacagtatgtgtgctgaattcatttatttaaaacagaaaatgccacgtaactccaatatgcgattctggaataggcactgattttttttttcactcttctctctccacatcctgccaaaatctgaatataattttcaaggtggtatcacatattaaagatggcaattcttatccaagtttgaaaagattcttctctgcactccaccccctttctgagaccaagtcagcaaagagactggatagtcctgggccccaggcctcatcattccatgtttctcattttatggaaactactcatttgagcacaaaagcaggcacactaaatta

SEQ ID NO: 479140 - DNA, 589 bp, Homo sapiens
ctgtaagccctcacttccctctcttcctcacttccttcctcttcctcttcccaaggggagcagaggaaggggaaggaaaccaaccctgggacagccaactagtagaatgaacagaactggtgtgaatcccaactcctgggacagaccatgggggcactggcattctttctttaaatctcttccttttaatatagtccttgtgcaaatgtgtacagcaccaggaataagttaatatgatgcatgatccttttcgaaagataaaacaaacatccctttaacagtatgtgtgctgaattcatttatttaaaacagaaaatgccacrtaactccaatatgcgattctggaataggcactgattttttttttcactcttctctctccacatcctgccaaaatctgaatataattttcaaggtggtatcacatattaaagatggcaattcttatccaagtttgaaaagattcttctctgcactccaccccctttctgagaccaagtcagcaaagagactggatagtcctgggccccaggcctcatcattccatgtttctcattttatggaaactactcatttgagcacaaaagca

SEQ ID NO: 479141 - DNA, 589 bp, Homo sapiens
ctgtaagccctcacttccctctcttcctcacttccttcctcttcctcttcccaaggggagcagaggaaggggaaggaaaccaaccctgggacagccaactagtagaatgaacagaactggtgtgaatcccaactcctgggacagaccatgggggcactggcattctttctttaaatctcttccttttaatatagtccttgtgcaaatgtgtacagcaccaggaataagttaatatgatgcatgatccttttcgaaagataaaacaaacatccctttaacagtatgtgtgctgaattcatttatttaaaacagaaaatgccacgtaactccaatatgcgattctggaataggcactgattttttttttcactcttctctctccrcatcctgccaaaatctgaatataattttcaaggtggtatcacatattaaagatggcaattcttatccaagtttgaaaagattcttctctgcactccaccccctttctgagaccaagtcagcaaagagactggatagtcctgggccccaggcctcatcattccatgtttctcattttatggaaactactcatttgagcacaaaagca

SEQ ID NO: 479142 - DNA, 641 bp, Homo sapiens
tttggacaaaagtattcctgaaagcatcttgctcagcgctggccacatagtgaaggttcaataamcgttgactatcctcctaccaggttttgattggaatgacctaaaatccccctacaattatcccatctttgtaaggtctcattttcttttcaatatttaggaagaaggtgccacatgaaaagctatcaagtttaaaccttgttcataccttcacactgatgttgtatcatgagtgtcacccaagcgccaagttgcaaaatgtcggcaagctcacagtagagcacaaaggaaagtgatggttagataatgaaacaagggctttgggatgtaagcagagatactaacagagagccgcatttgtttgtagcacttttaactactcaaggaatcttgaggtgacttaatttgtagttcagacccctacctctacccctagttaatcacaggggtgatgaaaaatactacatgctgtctttcttttcctaagctctctttaatcttgatctttgaaaagcaagtggtttttcttgtgcaaacagcttcatagaaatgtcaaatctggcacccacagtctatgctgaagggggagacttggtacaaaaggctcagtgctcagggcccaggctttgaaatgactc

SEQ ID NO: 479143 - DNA, 402 bp, Homo sapiens
tttcctcatatgttatcactgagcttcaggagaaaaagaaatcatgggaactgagcatagagaaagtaaaatctcaactgattgataacagatcagtctggaaaaatagaaaagtattgaaaatagagtcgcaatgaaggaatgagctctatgctgataaattcaagtatgtcccatgctgacttcccttaatttcccaaatttgtgaaarggatagaaaaggtgggtaactaatattcgttgagaatctactccatgccaggtactgaattgggcacgggtgcctccttctgctctcacatctgtgtttcagcttggaagtagaaataaacataagtaaactaataaaccattaatataacttaagaatatactgagtatcatgaagaaaacaaaatgggt

SEQ ID NO: 479144 - DNA, 613 bp, Homo sapiens
aaggtaattttattcatgatggaaaatattcacagtagctctgccattttatttaaaaataagaratgattttgcctttggacgccatattcacctactcaacactgatcaagtctgacattttgctgaccttgaacccactgcgaagcatgttttcaaagaatggtctgcatggtcctgaatctatttcctatgtcagcaactgccagagacaaaggcacttctgagcagagctgtgaaggatgagtaagagtgtgacacagagataaggggtcatctcaggcagagggtatatgacattgcacaaagaatggaggcctaccacaatctggaaaactgcaagcagcttgaccatgtgtggaccccttgctgccccagctctcccagggattgatgcacacagagaggatatggagtgctcagtcgctgcctcagtaggccctgaacttcttcctattccctcaaccgctctagcatctatctaaggtgagataagaaaaggatgcttttgagtagacttgggaagagacagagcctctttgaatatataatacccaagaaaatgcctagagcaggctagtctttgcagccctaaagagctaattattttgca

SEQ ID NO: 479145 - DNA, 635 bp, Homo sapiens
ctgcagtgtctgcatacttggcctccataayttttctcagcttttgaaataggctgattgaacctgagatcagaccttcctgagcaaggtcaagagggtacaaacggggaggtaaggcatattaaatgggtagtcagagtagacaagccttgagggaaatggagcaggttcttcatcctagaagtcatattaaatggatgcttaattgtctaattcaggatggttctccggaatgaggtactaacaaggggaagaaccctacatcttggctccaggtccttatctcagacttaaggtcacagttcctgaagcatgttggagtgaatgctggtcccaaaaatgtttaaggaggtaaagggttccatagtcaaattggtctgagaaacacttgcctattgccttagatgatttgcagtaaacatcctgaaaattcctagaataaacaaaacctgttcaacccattattttcaagaacagaacttttcagggagccttaaaaaatcgcatcaattgaagaatattctatgtgctccatgcagtgcacattaggaaaatcaggctcaagggcttcttgaactgaagcagtcagtggggagttatttcttgtgtcttcccagccctgttccttctttcag

SEQ ID NO: 479146 - DNA, 534 bp, Homo sapiens
ggaaagtggttatgtgaaaattaaattgtgccaagggcttttgcttgtcagcctcaataaatgtctcatatagatgcagaatcctgtaccattcatagcctgccagagtacattgcagaaggctttggggatcccccagaggcctaaacgttatcttacctaaaaatcatctacttttcactggcaaatactttcaaagaattaaacccacttacctacttttttgtaaaaactatttggttaatttaaatgtggggatgattwaaaaaaaagttgtctttttttcttcttgctgatattgagccatagagccaagaagattgctaatttcgaagtgtgcttggtcgggctttctactgatgatgttgctattgattcaaacagtcacaagtctttaggatcatttttagagcaatggcaagagtagggctgaaatgaaaatcagtctgagataatgaacactcctgctcagagatcattatgggctgagctgtgctgggaaggcactgagccttggggggctaacacttgcct

SEQ ID NO: 479147 - DNA, 655 bp, Homo sapiens
tggatttagttggatctaagctgacattctagttctgatactgtctgtataactacttgtgacaagttagtcaacctctaaggaatgttttatccttaaaatggcaaaaacaataaggcttttataaaataattatagagacttgtgtttagaatagtaatagctaacacagattatcatatttcctttgtgccaggcactgttctgagcacttcakgattatgaagtcattcaatcctcataagaaccctgtgaggtagatactactataacgtcccattcacagacaggtaaagtgagacacagaaaggctaaacaacttgccaaagttacctagctaatcagtgttaggggacttttaaccaccaagccgtgaacttcttgcacaggctcagcatgctgaaaagcctatcgaatggtagctatcattactatatatgtcagaggttttcaaactactattctaaattagcagtactttattcaaaagatagcttttggaaatcttactgtatctaatacagtaaaggtggagcttctttgtttgaagtaggaataaagattcctctctcacccccatctcacttatagcagccccaaaacacttctgggaatgctagcattctgaggaatctagtttgaaaagcactgattc

SEQ ID NO: 479148 - DNA, 606 bp, Homo sapiens
ttgtcttcccacggtccctccagtgcagcttttatcctcagcatttctatcatctccttctataatcggagttctggtagatcctaccyatatccccagcctttagcacacagtaggccttcactaaagggttaactaattcactccaaaaaaaaatatttcccaccaggtaatatgcattcaatttcagtgtctctcacaatgccaataactaaaagcaatgaatctagccagcattagattagttgctgctaatctaatgctgattagatgctgtctttctgccactgtcttttcaacacaaaagtgttagacacactcagcatctagtaagtattttccgcatggtcttagtcaaagtgaagttgatggaagcagccagacctaccccagacttgttaaatcgggatctgcattttaccaagatcccccctactgactgatgtgcatgtttgagtttgagaagcgcttctccaaaagctgccacccttccttcctaatgaaggacctgtttgtgggatggtggaagacacagtgcagacaatttgacacacttggagaattattcaaaacccgaagaacagagaagaaatggttcaattatgt

SEQ ID NO: 479149 - DNA, 606 bp, Homo sapiens
ttgtcttcccacggtccctccagtgcagcttttatcctcagcatttctatcatctccttctataatcggagttctggtagatcctacccrtatccccagcctttagcacacagtaggccttcactaaagggttaactaattcactccaaaaaaaaatatttcccaccaggtaatatgcattcaatttcagtgtctctcacaatgccaataactaaaagcaatgaatctagccagcattagattagttgctgctaatctaatgctgattagatgctgtctttctgccactgtcttttcaacacaaaagtgttagacacactcagcatctagtaagtattttccgcatggtcttagtcaaagtgaagttgatggaagcagccagacctaccccagacttgttaaatcgggatctgcattttaccaagatcccccctactgactgatgtgcatgtttgagtttgagaagcgcttctccaaaagctgccacccttccttcctaatgaaggacctgtttgtgggatggtggaagacacagtgcagacaatttgacacacttggagaattattcaaaacccgaagaacagagaagaaatggttcaattatgt

SEQ ID NO: 479150 - DNA, 606 bp, Homo sapiens
ttgtcttcccacggtccctccagtgcagcttttatcctcagcatttctatcatctccttctataatcggagttctggtagatcctacccatatccccagcctttagcacacagtaggccttcactaaagggttaactaattcactccaaaaaaaaatatttcccaccaggtaatatgcattcaatttcagtgtctctcacaatgccaataactaaaagcaaygaatctagccagcattagattagttgctgctaatctaatgctgattagatgctgtctttctgccactgtcttttcaacacaaaagtgttagacacactcagcatctagtaagtattttccgcatggtcttagtcaaagtgaagttgatggaagcagccagacctaccccagacttgttaaatcgggatctgcattttaccaagatcccccctactgactgatgtgcatgtttgagtttgagaagcgcttctccaaaagctgccacccttccttcctaatgaaggacctgtttgtgggatggtggaagacacagtgcagacaatttgacacacttggagaattattcaaaacccgaagaacagagaagaaatggttcaattatgt

SEQ ID NO: 479151 - DNA, 606 bp, Homo sapiens
ttgtcttcccacggtccctccagtgcagcttttatcctcagcatttctatcatctccttctataatcggagttctggtagatcctacccatatccccagcctttagcacacagtaggccttcactaaagggttaactaattcactccaaaaaaaaatatttcccaccaggtaatatgcattcaatttcagtgtctctcacaatgccaataactaaaagcaatgaatctagccagcattagattagttgctgctaatctaatgctgattagatgctgtctttctgccactgtcttttcaacacaaaagtgttagacacactcagcatctagtaagtattttccgcatggtcttagtcaaagtgaagttgatggaagcagccagacctaccccagacttgttaaatcgggatctgcattttaccaagatcccccctactgactgatgtgcatgtttgagtttgagaagcgcttctccaaaagctgccacccttccttcctaatgaaggacctgtttgtgggatggtggaagacacagtgcagacaatttgacrcacttggagaattattcaaaacccgaagaacagagaagaaatggttcaattatgt

SEQ ID NO: 479152 - DNA, 598 bp, Homo sapiens
taactttgaaaacctcatctattaaagttttaagtgtggcagataagaatctcaatacacaaatttaaaaattgtctttctcacatccagccttgtttcagttcaagtccccagtccacctgagtgggggagatttaagtgctgctaatttacaattattcattttctgtagggtgcttggctgattgcagggagatttgyaaagtgctagagttttcagcggagcctccaggaacttttccatgcattgtggaaattgtgctcaccagttctgattctcggtcactaatggtctgtcagaactggcagctgtcgggattgccttacttagggggcacacaaatatttctgctgcttctcatgttttctctgtaggaacatccgtggtccatctgcctagatgtaccaggccagcattccttgtcggcatcacccctgccagggctcagcccaggaagcaggcttcagatgtctctgctctgcacctcggatgtcttcgccccttccctgccacagtcacacacccacctccatgtctagggtgttctttatgactctgggaggaggccagattctcttattctgtttttcccccaaa

SEQ ID NO: 479153 - DNA, 598 bp, Homo sapiens
taactttgaaaacctcatctattaaagttttaagtgtggcagataagaatctcaatacacaaatttaaaaattgtctttctcacatccagccttgtttcagttcaagtccccagtccacctgagtgggggagatttaagtgctgctaatttacaattattcattttctgtagggtgcttggctgattgcagggagatttgtaaagtgctagagttttcagcggagcctccaggaacttttccatgcattgtggaaattgtgctcaccagttctgattctcggtcactaatggtctgtcagaactggcagctgtcgggattrccttacttagggggcacacaaatatttctgctgcttctcatgttttctctgtaggaacatccgtggtccatctgcctagatgtaccaggccagcattccttgtcggcatcacccctgccagggctcagcccaggaagcaggcttcagatgtctctgctctgcacctcggatgtcttcgccccttccctgccacagtcacacacccacctccatgtctagggtgttctttatgactctgggaggaggccagattctcttattctgtttttcccccaaa

SEQ ID NO: 479154 - DNA, 647 bp, Homo sapiens
ttctctcaaatccatgtaagctcctgaagaccatrgttcacatcttaaattaactgaatctaacagaaggctagtcatacagaaaatgctttaaaaatgggtgcagatctagcatcaggaatccaaaatcatgtttgcaaacatttaaggaagattctttatggaaaaaatcaggttaagatgattcataagcatgtttatgtctaattgttaaccaacagaggagtcacgtggcctatgcagcccatgcagacaccctagatattcaaaggaaagatttttcaatatatctattatttttttttaaatcctgcatcataaccacctgagtgcaaatatatttcaaattttatactggcctcctgttgaaaaatgctcattgaatcaatttcctggagccttgtcactgataaatagagtgcatcacacatctgatattcttgagtcaaaaatatagaacatgagtgtattttgctgagagaagatggcttataggaaactgtcttagcattcaagacagtcacaaagcttggcctttgaggctaaagctgctgagtgagcagttgaagagggttagaagttagatcctaatgggctttctgtcagtctcattctaggcctggttgcctggcaccaccaggaaacct

SEQ ID NO: 479155 - DNA, 563 bp, Homo sapiens
gtttgtctttttaaggatctccaaatgattaaaatgtgtagccaaggctaagaaccaccatattttaggctactgaggacataaacacccacatgcaaaccattagctaataatgccaggtggtgaagggtatgttaaaatgaacgttctaaggctcagggtggggagggggcagggtggrgtagggctccaggcagggagagggtatgcaggggaggggtcccaggagagggagacacatggtgggcagagggggatcatggagggcttccatgagcatcaggaaacaggaggcttaaggggccttgaagaactctgagatttgcctaatctaagctatttaggggtggtgtctcagtataaagaggaatgggtttaagcaaaggcatatgggcagacatggaaggtatatggatctagattcaaacaggagaaagaaaactataatttcaacagaaaaacctttctaaaaattataaatatggggattggagtaacatgggattagtgggtaagaactctaaagagaactctaaagaacataggaatagattatataagga

SEQ ID NO: 479156 - DNA, 563 bp, Homo sapiens
gtttgtctttttaaggatctccaaatgattaaaatgtgtagccaaggctaagaaccaccatattttaggctactgaggacataaacacccacatgcaaaccattagctaataatgccaggtggtgaagggtatgttaaaatgaacgttctaaggctcagggtggggagggggcagggtggggtagggctccaggcagrgagagggtatgcaggggaggggtcccaggagagggagacacatggtgggcagagggggatcatggagggcttccatgagcatcaggaaacaggaggcttaaggggccttgaagaactctgagatttgcctaatctaagctatttaggggtggtgtctcagtataaagaggaatgggtttaagcaaaggcatatgggcagacatggaaggtatatggatctagattcaaacaggagaaagaaaactataatttcaacagaaaaacctttctaaaaattataaatatggggattggagtaacatgggattagtgggtaagaactctaaagagaactctaaagaacataggaatagattatataagga

SEQ ID NO: 479157 - DNA, 411 bp, Homo sapiens
ttcttctcatgaaggaccaaggagttgaactgaagcctgagcgtctgtataagcttttccccaygctgctcttttttgcaaacaccaacacaatttgggctccatttataaggcatctgctgcaccaaccctctttcttggtgcttactggacctgctcagggttaatttctaactcaaagaacctaacttggagtaactccgtaccaccagcaaagcgactggctttggggaatgacatttacaatgtatccactgttatttggtcacccagcaaactgtcatttttcagaaaccagggctgtctcacaaactggctttcaataaggtgggttgcttagcaactgccaaggaattaagaagacagaataaggtatccgccagagatattttatgaccaaaatgagctgca

SEQ ID NO: 479158 - DNA, 637 bp, Homo sapiens
aagaaaccgagtcacagttgattatctcaaggttacattggaggttcatgttctttcaaacccaggaagcctagctccaaattctctcttttctttttctttttttttttttttgacacacacagagactcgttctgttgcctaggctggagtgcaattgtgcaatcttctctcactgcaacctccgcctcccgggttcaagcgattctcctgcctcagcctactgagtagttgggattactggtgtgcgccactgtgcccagccaattttgtatttttagtagagacagggttttgccatgttgttcaggctggtcttgaactcctaacctcaaataatccacccacctcggcctctcaaagtgctgggatttacaggaatgagccaccacycccgcttccctttttgatgtatagattggacggtccacttcccttccatgatcctgtagaagactgggacatgagtgacctctggcagttggggtgaaccactcgtgagctgagcccagttcatagtgaaatggcagcagccagcaaggcttcgtttgaacctgctgcaatcaagcacctttgtggcccgtgagcctgacacagacaaaagtgaatggggtcccgctggagataactaagagaa

SEQ ID NO: 479159 - DNA, 557 bp, Homo sapiens
aagatacgagtagtagcaccccaaattaaattgtaggctgtttttttggggttttttggtttgtttgtttgttttgtttttttgccacctgccccactaggtattctattctgtatataaaargatataagagaaggcctttctatggaggttgacaggtgacatcaggaaacagaagtataaatagaatcagtggatatttacaagggtcaacagaaatagctcagatggagttttagttttaatttatctcatgcatttgatggttgagagggcccattgagcctgttgggaagagtgtcagtctggggagccacctcagtgggtaaccgatggagcagatgactgatgacaccctccaacactgacattcttgattccttttggagatgtcaggcttccgttccttgcacattccttcttgccttcctcctgcacatatgaatgggatggagcacgtggacagctggcagcagtcccatttgccttgttttctctgttctaaaccctgtactgaaaaataagatagcttcttcctggggaataaaacagcaggg

SEQ ID NO: 479160 - DNA, 463 bp, Homo sapiens
gtggtaccagccactcatagcagacagagagcaggtgatgagtggactctggccatagggaccaatctctgtactgacagagtgaatgagaggccaggtggggtggctcactcctgtaatcccagcactttgagaggccgaggctggtggatcacttgaggtcaggagtttgagaccagcctggccaatttggtgaaaccccgtttctaccaaaaatataaaaaattagccggatgtggtggcttgtgcctgtaatcccagctacttgggaggctgagtcatgagaatcacttgaacccaggaggtggaagctgcagtgagctgagatttcgccattgcactccaggctagcctgggagacasagcgggactccctctcaaaaaaataataaaaataaaaataattttaaaaaatagagtggatgagtagtccctagggcagttctagaagagaagcaaagac

SEQ ID NO: 479161 - DNA, 577 bp, Homo sapiens
atcaaacctggccctcccgcattcaatgaggcttaaagggggtgcagggtagagacaaataattttaaaaaagtaaatgaataagaaaatcaaatagtagtaaattcagggaaacaaaaaataacagcgctatatgacagagagtggaaagcaattgggtattcagggagggtctcctgaggaggtgactggcctgaatggcaagaggttaccagccatgcaagaaccaggacagagcaggtaagaaatgcaaaggccctaagctaggaagtaatttggagtgttggcaaaacagaaagaccactgtggcaggggcatagcaagttgaaggagagaggcaggagatgtgcttacaaggcaggatcagggaatcatggagggctttgctggccacagagcactggactttgtcctactatcttcaattcacatgatacctccatgtgtgtccttctctatcctccagagggtgttgaggaatggaggggccacttctcctagcatcctttacatgcaccayctttatggttgagacccttaacacaaaggtcccaaaaattgatttgcttcaggcatc

SEQ ID NO: 479162 - DNA, 586 bp, Homo sapiens
aagtcagctgggcacttttcaagaccatgtgctgtgaaaacgcagcccaagatatagtgataataaaagggggagagacttgtgcaaggagaagggagggtgggttggtrgaagccagtggagatggaaaaagaagaatggagagaaaggagaggacaggagaggaggggaggggaggggagaggaggggaggttgagaaagaaactattagtgttgggggtatacatattattgtttagaatttatggctgggagaaagatacacgcgcgcgcaggcgcgcgcgcgcacacacacacacacacacacacacaccccttaaatgctgacaaatcctgagagatcagtgttgtgtgtagctcacttcagctcaaggtcttctcttttctgggacacttaagatgcgggggtctccctcttcctagctcaccctccatggctgagtccccaggctcagtggaaagactgctggattcaggacagtgaggagctgctccctagcctcttgctttttctttccttctgcagccccctcctaatgagacagaggcccagggcaaattggtaccctggagaagtaaaaccca

SEQ ID NO: 479163 - DNA, 649 bp, Homo sapiens
caggatgtgaagttgctttgaggcatcctagtttaggctgcataaaaaaggttatacatatcctcaaagcttttcctaatccaggaaagcatggatgttctaagcatgagtatatctcacttgttctcaacaagctgactcatggtctacaatcatgatgcttcatgtctgagatggctccctcacagtgccctgtcccacccctgagctcatttcagttctgtcagtcatctttcatggtccttatacttgagacaagaacccattttcctctcaagttcttaacacctaaaagaacactacacttaactgttgagccttgtagctaccgttaagaacatttgtgttgtacatagccaactaggataatgagaacatacacgggcatcacattagcatggttgtgacttgaccatcaccccccagcccacatgtggtctgygtcattccctccaagtcatcctgttctgggttcacgcaccctctggatccctcttcctgctttggcttccgagtctgtctttggaatcagtttagcttctgtccttaaggcagaaagacttgccccacacacccccaaacagtgcagaagtcacttgctgctgcagttgagactcatctacccctaagaacatacacaaggctcaaa

SEQ ID NO: 479164 - DNA, 616 bp, Homo sapiens
taggattcaggatgtgaagttgctttgaggcatcctagtttaggctgcataaaaaaggttatacatatcctcaaagcttttcctaatccaggaaagcatggatgttctaagcatgagtatatctcacttgttctcaacaagctgactcatggtctacaatcatgatgcttcatgtctgagatggctccctcacagtgccctgtcccacccctgagctcatttcagttctgtcagtcatctttcatggtccttatacttgagacaagaacccattttcctctcaagttcttaacacctaaaagaacactacacttaactgttgagccttgtagctaccgttaagaacatttgtgttgtacatagccaactaggataatgagaacatacacgggcatcacattagcatggttgtgacttgaccatcaccccccagcccacatgtggtctgcgtcattccctccaagtcatcctgttctgggttcacrcaccctctggatccctcttcctgctttggcttccgagtctgtctttggaatcagtttagcttctgtccttaaggcagaaagacttgccccacacacccccaaacagtgcagaagtcacttgctgctgcagt

SEQ ID NO: 479165 - DNA, 525 bp, Homo sapiens
caagcaaccccttccatctcctagccttcattagggataagtgcctctgatttacagcttttatgaactttacatccttttctcagcaaccctgcatctgtaactctttggggctgagcaactgtgaaaggtgatgcctcccttacagcaaggtgggatctgcaggtagggaggatctttcgtctctcatagattctatgtgtctccagcaaggattcctaagtattttttgtgctgagcatagagttgactgacctgygttttggggagggtcatcctgaagacagtcatcacgttagcagcgtggaaaaaggcttagggtcagatctgtgtttgaagatcagtgtcaggcttctgagcccaagctaagccattatatccactgtgacctgcacatatacatccagatggcctgaagcaactgaagatccacaaaagaagtgaaaataccttaacggatgacattccaccattgtgatttgcttctgccccaccctaactgatgaatgtactttgtaatctccc

SEQ ID NO: 479166 - DNA, 605 bp, Homo sapiens
ctaaaagcagtttggctgccacttcatagcccaagctgcaccaggcagttcacttgaagacatagaagcagcacattaagccaaagttgggcttgctggcactgaaaacaagttgtaagttctgtttggggacttagacaaaatatttaagctaacattgttttataccaggcttcataatgaggtcttatgttgtagacaagaatttgctgtcaagtgcagtgtgtatagggatgcagattccaacagaggattttgcagctgggcggggctctgactgctcctcyggccagcactaggaaccagtgtcagcaggttggacacccgtggtacacatccagcaggaatgtgtctgggttagttttctgcatacagattcagaaatctggatgaggctgcagctattgtagaagggagtctataaaaatcttagttcttgctcccaagaagctagggcagcccagctacatggggtctgcactctggcctctgctggagtacacaagggctgttctacgaacaggacatgttgcttctggccaaaccctgcccggtatcccttacttatgggatttggtcctagaagggcttatgcttgagatccc

SEQ ID NO: 479167 - DNA, 516 bp, Homo sapiens
tctaaaagctccccagatctggtcctcttggacctttcatggagacatgagatggctgtgactgacaaccatgtagaaatgtgattggataaagattatctgaacagggaaactcagcaaggcctaactcttccaattcttcccaacatctctgtagcattccttccctccaaagtgtggggcaggaccccttttctcagatggggtcttgtggcctagaaatcagacaataaggtctgataattccttttatcgctagctccaagacaggaaggcaggggaagattcctgccgtggggagagaaaggcaatgaaaaggcagtaggagaatgagattgttttgaggcctgcttctaaggtctaaaatgcttctgaggtctaaaaagtcctatcaatgtccttgcctgaaggcaaagttcagagtataagctggttgatctctatcctaaaaaaatcttattggttggtttttcgtttaggtttttattaartataaaaacaggtcatccacacata

SEQ ID NO: 479168 - DNA, 483 bp, Homo sapiens
atggtgagcttggtttcccaggaggtttttcagagaaatgagagaagtaggagtgactgtgaaatcactgaaggattttagtagggctctggagattgggtcccaaggttcttccctccattttctcakgccagacttgtgcagcctggccagatttctgtgtggcctaggtgtttcctcactgctcaggaaagaacgtcctattagttgtttgaaactgaaattggccagtgagttctacttctaccatgcctgctgatgctcctttcctttctgaagaggctcttccccgttagggtgacccatcgtcctcatttgcctgggactgtctcagttttagcactgaatgttttgcaacttgggagagtcttcagtgcgaggcacaccaaggcagttggtcatctggagtggcgaatcggcacacttcatagatgacttgcatttgaccgcagcatgctgatgctgggaacatccgggaggagc

SEQ ID NO: 479169 - DNA, 540 bp, Homo sapiens
agggaaaggcatcagttgggctgttctccccagggtttccgtcttagtattgttttttttttttttttttgcattcttttctgatcctgtggagagagatatcagatccctttggggccgtatttagagggtctcccaaatgcagtccctactcccaactctgggctggggcttggcaagctgtaggcgtcagggaacaagatggcgccctacggtgaagggcgctgagtgagggggggccaaaagtgggccttcacttactcggaggcgctggctcctctgaarcccagacgctgtcaactccctgggcccaggagtcacaaccgctttcgtgctctgggttcttcacttcttgtgatcagctccacatatttttctgatgatgtcacccattctgacttcctacattttgaaagttgatctacaagtaaaatctttcgtgaggcttaaaaaaaagaagaaaagaaataaaaggtgtgctatagggagatggagaggaagagaaaggccgttgcctctttattttgagatttgctgcag

SEQ ID NO: 479170 - DNA, 536 bp, Homo sapiens
tgatgaaaccccgtcttgactaaaaatacaaaaaattagctgggcttggtggcaggcgcctgtaatcccagctacttgggaggctgagacaggagaatcacttgaacttgggaggtggaggttgcagtgagctgaggttgcrccactgcactccagcttgggcaacaagagtgaaactccgtctcaaaaaaaaaatgtttttaaaaaaataaattaaaaatatttaattatattttaaagtataatgggtgaattttatggtaggtaaattatacctcaacaaagcttttatttaaaagtaggttataagtagtaacttttttccattaaaagttccatttacatttacataaaagagttaatttcttacttagtggttagaagttcatgatgttttcttttttaattaatttttaaaatgtttgattcatagggtacatgtgcatgtttgtaacatgggcatattgcataatggtggggtttgggcctctagtgtactagtcaccctaaattgaacattgtctccaataggtaac

SEQ ID NO: 479171 - DNA, 570 bp, Homo sapiens
gagtaacattggtgtcatcaatgaccttggggagttcatggatgtcgctctccacagactggcacatggccagctctgtctcatacttaactcgaaagtcatcagcagcaagacagacattgttgatctgaagaaccatgggagcattgtccacaatatttgcgaagatctgagccgtcaggtccttgatggtcttaaagtaatggccccagtctctgatctggggtcccttcttctccaggtgctcccggattttgctctccagcttctggttctctgtcttcaggtaggaggccaggcagttgttcaggctttgcacggtctccttttcattttagatgcctcccattcttactagacccccrgccatccccgcagccaggcccctgggccccaagccaccccggaagctgatggagtgggacacagagatccagaaaccaaagcccccccatggctgcatagacactggccatgctgctgaccagccaggtgctgtagctgggtgcctggacagaccccagggaccagtagttggtggagaaggtggaccgagtggtgaagctcatg

SEQ ID NO: 479172 - DNA, 643 bp, Homo sapiens
aaatttcacaggcagaacaaaacctacatgtgatttatacttacgtttttatagactaagatctaaaactcacatacatacaggaacaggaaagtaatatgaacatcaaatgtgggcttggtataagaaggtaagcaagtggttagattgtggcaaactggaggtttgaaactttttcacacagataggggcctgatgagagcgtctgcaggccgaatggagcctatggactgcttcttgcatgccagttgcacgccatttgactcagtccgctgatccgaattccctcagtggcaacctgcccagtcttctcctgcagagcgttgggcttgaagctgtctaaggcccagcccagggaaaagtaaagaccattgaaccttctccatgtcaccacaaataagtcagccacttcagatataactatgtccatttcatacaggcaaagtaattatgtcagtggggtcagtagcagagcatagtatttgtgtccagggacatctggaaggcatcagacagagcagccctgactaagttgcccagtgctcrgtgtactgatcccagggtgagacaggaagaacatcagaggaagcccctctgtgtccaggcatgtccgtcttaaggcagccagatggaaccaagcctg

SEQ ID NO: 479173 - DNA, 560 bp, Homo sapiens
gtctttctgcccaaaccaagctggggaaatcacacgcccatcttcagggacactggcatgcagctacaaggttatcggctttatgaccccaagacttgcgattttgacttcacaggcgctgtggagggcctttcaaaaataccagagcaaaatgttgttcttctgcatgcctgcacccacaatcccacgggagtggacccaggtctggaacagtggaaggatacagcaacaatggtgaagaagaagagtctctttgccttctttgacatagcctaccaaggctttaccagtggtgatggtgataaggatgcccgggctgtgcaccacttctttgaacagggcattaatgtttgtctctgccaatcatatgccaagaacatgggcttatattgtgagcgtgtaggagccttcactgtagtatgcaaagatgcgatgaaaccaaaagggtagagtcacagttgaagatcttgatccatyccacgtatgccaaccgtccccacaatggggcccagattgcttctaccattctgaacaccccagattcatgaaaacaatggttg

SEQ ID NO: 479174 - DNA, 560 bp, Homo sapiens
gtctttctgcccaaaccaagctggggaaatcacacgcccatcttcagggacactggcatgcagctacaaggttatcggctttatgaccccaagacttgcgattttgacttcacaggcgctgtggagggcctttcaaaaataccagagcaaaatgttgttcttctgcatgcctgcacccacaatcccacgggagtggacccaggtctggaacagtggaaggatacagcaacaatggtgaagaagaagagtctctttgccttctttgacatagcctaccaaggctttaccagtggtgatggtgataaggatgcccgggctgtgcaccacttctttgaacagggcattaatgtttgtctctgccaatcatatgccaagaacatgggcttatattgtgagcgtgtaggagccttcactgtagtatgcaaagatgcgatgaaaccaaaagggtagagtcacagttgaagatcttgatccattccaygtatgccaaccgtccccacaatggggcccagattgcttctaccattctgaacaccccagattcatgaaaacaatggttg

SEQ ID NO: 479175 - DNA, 436 bp, Homo sapiens
ggaaaccaccggactgacgattgttgtgcttaggataaggcactttgtgatgagttaggaaaacaacaatcagatatgtacacttcaaaaytgacctcaggaaggtaagcagaaaaatagataaaatgggtgagaaaatttctttattatgtttcattgtgattgtctcacttttagcaagaaaggaaaagccagtggtagagtcatctaaatacgctgcttgcccaaaaagctgaattagatttaggagtaaatgtttttatttttctgaaggcataagaaattagacattgagtcaaacgttctgtgtctcattagaagccagccttgctcagtttgcaactatggaggaactggtaagagatatttttggatcatgttttctgttaaatacttagccccctgaggcaggtcggctacatagggttaaagctga

SEQ ID NO: 479176 - DNA, 436 bp, Homo sapiens
ggaaaccaccggactgacgattgttgtgcttaggataaggcactttgtgatgagttaggaaaacaacaatcagatatgtacacttcaaaattgacctcaggaaggtaagcagaaaaatagataaaatgggtgagaaaatttctttattatgtttcattgtgattgtctcactwttagcaagaaaggaaaagccagtggtagagtcatctaaatacgctgcttgcccaaaaagctgaattagatttaggagtaaatgtttttatttttctgaaggcataagaaattagacattgagtcaaacgttctgtgtctcattagaagccagccttgctcagtttgcaactatggaggaactggtaagagatatttttggatcatgttttctgttaaatacttagccccctgaggcaggtcggctacatagggttaaagctga

SEQ ID NO: 479177 - DNA, 626 bp, Homo sapiens
acagtcctgatggagtcccccaaccctcttgcctcgatcctgactagggatgctccagggacattcaggtgacttccccttcttaaaaatctgaccagctagggacattagataccagaattgggaacaaactagatccataagatactatggtcagtaatgagatcttattggtcagtgactttttttttttttttaaatggagtctcactctgtcacccagagtggagtgcagtggcatgatctcakctcgctacaacctcccatctcccgagttcaagtgattctcatgcctcagcccctcaattagctggggttacaggcatgtgccaccacacctggctaatttttgtatttttagtagagattgggttttgccgtgtgggccagactggcctctggcctcgaactcctgacctcaggtgatccacctgcctcggcctcccaaagtgttgagattacaggcatgagccactgcacctggcctgctcagtgacttctaacattgctgctgtacctgggtaaatacttccagtcatatttaagcgggcttggagttggcaaaatctctgagagagacatcttcggaaagcctccatgctggacttagtggataaagtttccaa

SEQ ID NO: 479178 - DNA, 602 bp, Homo sapiens
caaaagaacaaagctgtggatgaataagtggtttttactatcacttttgcccaccttttcttcatatcaggttaaaaaatgaacaaataaaatttacagacacaactaatggcatttttccctttactttttaccagaggtaacatctaatctgaagttagtgcagagtatttgcaggcatgttctgtckgcttttattataaatatttattgctagatgagacctatttcatgtaatttttttcttttcatggcattcaaaatccaagctccttgaccacttgttttagaatgttatttgcttcagagaaactctcttacttttaccaccatccggaacaccacaaccatctttgcaaaatcagcaagaatttaccacttcctttttttctgaagacacagcttgtatcttacctttgtcgttgctaggtttctattatgcgtttgtattttatatttaacattttggtataaccctcccaacaaataatgtggagcgtaacatagtagatgttttctgaacagtaactgaatgactgaattagagtctcacatgactctcataataaggagatcatgttactttatactctgagaatttg

SEQ ID NO: 479179 - DNA, 653 bp, Homo sapiens
tggctggattacttaactgcattgacatcatacaccttgatatttcctctttacaaaaacagttcagatgggaaagaaactggctattgagaatctgtataccgcagaactaaccaaaataacattccacctctccaggaaggctatggatgcattcactcacatgcgctgctcttgcacaattgcacaggcctcggtttccctctctataaactgaaaaggtgggtttggacagtccgagagttcctttgggtgcagagaatgtatctgaagttgccttggagaggccatttccttcctttttacagatttggagactgaatcctagaatggggaacttacttgattcaaytgataactaattatagagcacctaccatggttaggtagtggggtaagactagatagacacaaaggtggaaataagaccatgctggtacatggctccctgtgtgccaagcactgtgctgagccctttctggctagcgtcaattttacacctcataacagttccaggagtctgtatatttctctcagctttatagataaagagactgaagcttagagttgatgatgagttcaccaaagctcacaaaatctgctgtatccaggaattccaacctacatgtgactgactccagaaccttcatcct

SEQ ID NO: 479180 - DNA, 447 bp, Homo sapiens
cctcttcctcttcctcctcactacccccgacagtaaaatgaaggggctgggccaggctggtccctcctgccttcgctctctgctggtcgcggtggcctgtagctcctccctcggtaggacccccctccaccttggcgcttamgagatgaatgaggagcccagacctctggaacttggaggggtgagagggggacaagccagagccagggctccacaccctcttcccctcacccacccatgccctgcattccttctgtgccccgtctccccagatcgggccaccccatgtgctctggtacggcaactcttgcagagaggtttcctcctgccctgccacgttgcgcctgagcagaaggggacagcaaggagaagcctcgctggtggaggtcggtctgagccctgcttggttgaattccctccagagcctgggggcttttgggggtggga

SEQ ID NO: 479181 - DNA, 533 bp, Homo sapiens
tgaagtgagacccaccctcctgcccccactaaagaaggtaaagctcaggattccaactattggtcctttatttttttgaatttattatttatttatttattcattttattttgtattaatttttttttaactttttctttttcttttctttgagacacagtctcactctgttgcccaggctggagtgcagtgatgtgatgtcggyttactgcaacgtctgcctcctgggttcaagtgattctcatgttcttgtgcctcaggccttccaagtagctgagactacagacaccaccatgcctggctaatttttgtatttttaatggagacagggtttcaccatgttggttggccaggctggtctcgaactcctggcctcaagtgatctgcctgccttggcctcccaaagtgctgtgaattacaggtgtgagacacgacgcccggcttcaactaaaggttctttatactaggaactcccagaacttggaggaaaagaaagaaattagtaagaatctgctcattaacactactagaga

SEQ ID NO: 479182 - DNA, 543 bp, Homo sapiens
ggtaccctctggaagtctcagtgtttaccaggctgaatctatagctgcctttggccatgtatgtttggattttagaggtttaataacaacactgtactagttatggtctctgcaagaaacagaatccatctgagatgatccaaacgaagrgattctgatgaaggagctactgcagaggtgtggacagggctaaggaaacgaataagttttgctggagctttgagggagaagcaggaaaccactgcaactagggaccaaagagcccagggacaggacatagagttacctgaacccagtgagagcaggaagcgtggaagaggtgacctccttcaggagccgtagggatggtaccaaagcagagagggagcagggatgaaatccttgaccttgttgtcctcctacccaccaaaatcctgctagtgactggacgttggccaacaccaatcagaagctggcaagggagcttgagaacatccttcacggtctaccttctggggcacagagccagatggagaaggtcagagaggatctggagaaattgga

SEQ ID NO: 479183 - DNA, 642 bp, Homo sapiens
accagtagaggagaatccaggagactgaaaggcagagattcagtgttcggctatattgctgctaagctaattggaggacatggccttaagtctgtaaccaaagctaatacttcatccctagcacaggtcaataactgcaatgtcccctcaggggcaggtgcctccctgcatgsagagaattgatcagaagctgggagcccgtggacaggctggctctgaaagaagtaaaaaagggggctgctctgagcaggctcagttttctctcctaaactcctcccaccagcccccacccccagcgctgacttcactccttctcccacggtggagtcggtgtggggagggggtgggtagagaggccaggatcatggctcagtggggtttccttcacagggagggaagcatgaaaccagccacaggaccatcgccactgctccctctcatagggacacctgcactgacctcctgtctctccctccagggcacttgtgtgagctgttctctggtgtactggagcagatgtcctgctaactctgagcccacagtgagtgtgacagcttcatgaaagcacagatcacccaagcagccccactggtgtggtttctcaacctatctaccttccttctttagaagatattaattgca

SEQ ID NO: 479184 - DNA, 488 bp, Homo sapiens
atatgtatatttttgacatatatttctaagctaacagctcgttgtggagtcagaccatcctgaagtccccacactccagcctaccaaccgtctgatctcagaaaacggctatttcttcacstataaaatgaagataatagtggtacctacattatagtttgctgacaggattaaattagaccataatttcgggcttttggcacagagcttgcactgagcaagtcatcaataagcaaagccgctcctcttactgtcgctactaactccacacatttcctatgaaacacacaacccttccgctctcctaccttatttgatcttcacaaataactctcaggatggatgggaaagcagagcacatcagggtcgaggctactgaaccctttccaatgttctttttgccaaattagattttcatattagaggaagaaaaaaatcagggtttatcccaaggcctgacaatgttggcatttgtctgaggccagccg

SEQ ID NO: 479185 - DNA, 488 bp, Homo sapiens
atatgtatatttttgacatatatttctaagctaacagctcgttgtggagtcagaccatcctgaagtccccacactccagcctaccaaccgtctgatctcagaaaacggctatttcttcacctataaaatgaagataatagtggtacctacattatagtttgctgacaggattaaattagaccataatttcrggcttttggcacagagcttgcactgagcaagtcatcaataagcaaagccgctcctcttactgtcgctactaactccacacatttcctatgaaacacacaacccttccgctctcctaccttatttgatcttcacaaataactctcaggatggatgggaaagcagagcacatcagggtcgaggctactgaaccctttccaatgttctttttgccaaattagattttcatattagaggaagaaaaaaatcagggtttatcccaaggcctgacaatgttggcatttgtctgaggccagccg

SEQ ID NO: 479186 - DNA, 538 bp, Homo sapiens
gcctgtttctttagaaattagatagtactcaatgagtttgcttttaattccggatggaaggatttttttttttattttgcatgaaatgaaatcttaacactattatatcacactattttaaattcacatttgcttaatgtgaccacactatattctaaaatcaaaatcatcattttaaataaaagtttcccagcattaactaacctagaattagcaagcagtgggtatcatcagatgggataacttttacctgttcctccttttggagrttagattctaatacgatgattgaagttcgtatgatacgtgattaatgtctctgcataatcaggacttgtaacaccttgattgcttctgattctttctgaaaaaagaaaagaaaaaaaaattagcaagcatatgcagcagttaacactcaattgccaaagctgaaaacttttttgtactggctacttttttgttcattgccaaggtggacacttggttatgttccaatacacaaacacacaagcacacacacacatacacacacacacag

SEQ ID NO: 479187 - DNA, 538 bp, Homo sapiens
gcctgtttctttagaaattagatagtactcaatgagtttgcttttaattccggatggaaggatttttttttttattttgcatgaaatgaaatcttaacactattatatcacactattttaaattcacatttgcttaatgtgaccacactatattctaaaatcaaaatcatcattttaaataaaagtttcccagcattaactaacctagaattagcaagcagtgggtatcatcagatgggataacttttacctgttcctccttttggaggttagattctaatacgatgattgaagttcgtatgatacgtgattaatgtctctgcataatcaggacttgtaacaccttgattgcttctgattctttctgaaaaaagaaaagaaaaaaaaattagcaagcatatgcagcagttaacactcaattgccaaagctgaaaacttttwtgtactggctacttttttgttcattgccaaggtggacacttggttatgttccaatacacaaacacacaagcacacacacacatacacacacacacag

SEQ ID NO: 479188 - DNA, 538 bp, Homo sapiens
gcctgtttctttagaaattagatagtactcaatgagtttgcttttaattccggatggaaggatttttttttttattttgcatgaaatgaaatcttaacactattatatcacactattttaaattcacatttgcttaatgtgaccacactatattctaaaatcaaaatcatcattttaaataaaagtttcccagcattaactaacctagaattagcaagcagtgggtatcatcagatgggataacttttacctgttcctccttttggaggttagattctaatacgatgattgaagttcgtatgatacgtgattaatgtctctgcataatcaggacttgtaacaccttgattgcttctgattctttctgaaaaaagaaaagaaaaaaaaattagcaagcatatgcagcagttaacactcaattgccaaagctgaaaacttttttgtactggctacttttttgttcattgccaaggtggacacttggttatrttccaatacacaaacacacaagcacacacacacatacacacacacacag

SEQ ID NO: 479189 - DNA, 681 bp, Homo sapiens
  misc_feature (1)...(681): n = A,T,C or G
agctggcactagaaactcttctaaggaactcatcattttatctcctacaaggatattgtgggaaatgttccttgctgcattatactgcctttgccacaggcatttctacatctgcaatatctccaataaatatgctaagcctgagcaatgggtttgctttaaatccacacatactgtgcattttgtaactcatgatctctcccttcctgcattgactgctaggatactcagtgataagttttaggtatacttctagcatgtgcctargccttaatatttatttcatctactacttcacttctgatatcactttagatatttccnccgtatgttcattgttctctgattttttcatccagttcttacaattaaaaataatcataattaagttttatgctacctagaaagccaaatgtgttccatctagatatttttaactgtagataaatattaagacctaaattgaaagctaaggcaattctaccacctagagtaactgcattgctcttatcgtgggttaatgtcctctctttaccctccaaggtacacctttgaggtcagaacatactctctgtctctccccggatgccgccatatttgtaggaaggactatctccaacctcggtgttgtcctggccgctggggcccagactgtataggtaagtggcacaatgcttggac

SEQ ID NO: 479190 - DNA, 502 bp, Homo sapiens
aaagtcaggatgcaagagaccaccagagtagtggtgacccaaggaaatgtgataatgacctagaatagtcttatcagcttcttgagcatcacaatgcattggaaacctgcccttayagcaaattatataatatgtctttcaagcatcattgctaagaatgtcaattttaccatagttttctctaatgggggcctgagatgatagaagatgatatgaaaagcaggaaataaattacactttttcgttaaaaattttgtttaaaaaccatatgagctgttttcataaattgttaaaacaatctatccaggccataaaatgaggattcctcatacccccacattcctgctaccttttctcccaagttccttccagcgttggccagctcataaaaaatcaagcatttattaagcacctactatatgctgcgtacaatcagatatatgatagaccccattcccaatcacatgtatgataagtccctatccccaaggagctcacagac

SEQ ID NO: 479191 - DNA, 467 bp, Homo sapiens
tttgtgtaatcaccacatttgtaagggttgacagtccatgagaaagattgctccttgaggagaaaacactgaatagttatgtgtgataaaaaagaaayttcagcagaattaaatttaaaggagtttaatcgggcaatgaacaattcatgaatcaggcagtttctggaatcacagcagattcacagagactcagtgaagccatgtgatgaaagaagatttatagacaaaaaaaagggaaatgacatacagcaatcggaagtgaggtacagaatggctggattggttacagcttggcatttgccttatttgaacacagtttgaacactcagcagtatatgaatgatccaagtatggctgctgggattggccaaaactcagctattgttacaggtgcatactcctaagttaggttttcaatctcatctacctattaagctaggttgcaattcatccacaaggactcaaat

SEQ ID NO: 479192 - DNA, 570 bp, Homo sapiens
accatgtgcagagggatttctttggatcctcactatgactctccaaaggaggtgggggttctccttttacggatgaagaagcagagagggttgctcaaggccatgcagctattatgggggcagaggcaggatttgaccccacatatgtgactccagagcctgggcccctaagcactgccccagtctgcctctggtgagtgtccatcatacattacacaccagacaggtgaagtggatcctaagagtgatgagattaggtgcccagtcccaaggagctggaaatgtgggtgacaactgtgatgatgcagagtgcacagcccagaccagatcctatgggagcacaggagagggagcagcttactctgctatggggcatgtcacaggagcataccatccctctgaccagcacggccatggctttcaccactttaaagtcacgccacccaagttttatrtgtctctagagatttgctgagactggttagcaagtaccaagggctctttcaatgatgatctgggaaaccctctgccacttacgtctccttcccaagggcatgttcctggcagcag

SEQ ID NO: 479193 - DNA, 441 bp, Homo sapiens
  misc_feature (1)...(441): n = A,T,C or G
aacttatcctcgggactttagtctcctgtaaaatgaaagggttgggtgagattgaaagtcagcaaatgcaaactcattttattggaagcggttgagatgcygtgagcggtggtagtaacaggatgaataaactcagcctctgccttcttcctgtagctgggacagccatgaaagcctccagtccaaatgcaaaggcaagtgggtaggacaggccttctgtggtcctcagtcagcctccttccttggccactcctgccattgtgcagtggactcctgggcagaggccttctcagtaaggcaggagacccagtccagacgccaggctaagggtaaaaccctaatagctatgcttccnggtgngncactactattatttctgtccagccccctgacctgagactaggacaaatctttttacacttcacatggcagatgcctttt

SEQ ID NO: 479194 - DNA, 602 bp, Homo sapiens
ggctcttgggaagtctagctatacttcctgcctctagattcccagagctaccctgggggtcctcccagcaaatttatcttctgcatggactctgttacctggaactccaaacactgtgattaaggcatcagacttcattgattcctatgtttggtgcttagcgttcttttgaaagcataaccacccccagccctaatacctgtgcctgatctttcaaagttgagaagcaaggcaccatttacccttgaatgggcattttcaccgatarcttgtaaaactctgttgtgacattcgaaatggaagtccggttacctcttaaactatcctttaaactgttggtttagaggtgccaggtttagcaaataaaaatattgaatgacttgttaaatttcaattttaggtgaaaaatgagtaattataagtttatcccacaccatatttgggacttacttgtgcttaaagattgtttgttacttacttcaaaattaaatttaaccagaacttctgtattttacctggaagtcatatgttggttcttccaagctttggaatgaagtagaagttgcaataactactcgcattctgcttagagattccctttt

SEQ ID NO: 479195 - DNA, 515 bp, Homo sapiens
tgcaataaaatagcatctaaaccattccaaatctgagctctgttctccagaggcagtccagcaaaatacacatcagtgatcatttgtggggaaattggaacaatttccgyctgaagacatgctgctcccgtgactgtctcctcaccttgtcttgaaacttctggttttcttacagccactcaggacctgggacacggcctgagctgctgcctgcaggagcccacgggctcaactcatcggggagctgctttcctttgtgtaattagatcaattatcccgctgccgacaattaccatcattgtccgtgccatttttagtttatttggcagttattcttctcatctaaatcaaactacaagtttgattgcactgaaaatgtaaatgattgttaaacaacactaaaaaatcttcacatttttcctgagtctctaagagctgggggtgggtgggaaggatggaacgtggcatggagcggcgactgcattagggacagtcacacaagccacctcctttgt

SEQ ID NO: 479196 - DNA, 515 bp, Homo sapiens
tgcaataaaatagcatctaaaccattccaaatctgagctctgttctccagaggcagtccagcaaaatacacatcagtgatcatttgtggggaaattggaacaatttccgtctgaagacatgctgctcccgtgactgtctcctcaccttgtcttgaaacttctgrttttcttacagccactcaggacctgggacacggcctgagctgctgcctgcaggagcccacgggctcaactcatcggggagctgctttcctttgtgtaattagatcaattatcccgctgccgacaattaccatcattgtccgtgccatttttagtttatttggcagttattcttctcatctaaatcaaactacaagtttgattgcactgaaaatgtaaatgattgttaaacaacactaaaaaatcttcacatttttcctgagtctctaagagctgggggtgggtgggaaggatggaacgtggcatggagcggcgactgcattagggacagtcacacaagccacctcctttgt

SEQ ID NO: 479197 - DNA, 627 bp, Homo sapiens
catgctaaagattttcttctcttccttcttctttttaaaattattgctccactgtggaagaaggcattgaaagcttcatacagaaaccacattggttcgcctactcccccttaggttggtctagactgcttttagacaraagcacttggagtttagagtaaaacagacctgagtttaatcctagctctactacagattttgtgacctcaggcagatactgagcctttccaaactcatttttccttgcctgaaagagactcataataacatgtgcctaacagattggctgtaaagattagaaattgtatgtgttaaatgccctgtaatgtaatacaatgccctgtacatggaaaagacttaacacaggatagctaatattgctgttaagattattattaataataaaattaccccagatctacaatagggcaggagtcagtaacctctgttccgatacactgttctgtgtcttaatgatgttccaagaatattgactgaatgtgttggctttcccattccctcattttcccacccctagccccatccattccccacccttctctactctgcttccctcatccctgaggctgattcccatcctacatcagccgggctccatgctggcag

SEQ ID NO: 479198 - DNA, 627 bp, Homo sapiens
catgctaaagattttcttctcttccttcttctttttaaaattattgctccactgtggaagaaggcattgaaagcttcatacagaaaccacattggttcgcctactcccccttaggttggtctagactgcttttagacaaaagcacttggagtttagagtaaaacagacctgagtttaatcctagctctactacagattttgtgacctcaggcagatactgagcctttccaaactcatttttccttgcctgaaagagactcataataacatgtgcctaacagattggctgtaaagattagaaattgtatgtgttaaatgccctgtaatgtaatacaatgccctgtacatggaaaagacttaacacaggatagctaatattgctgttaagattattattaataataaaattaccccagatctacaatagggcaggagtcagtaacctctgttccgatacactgttctgtgtcttaatgatgttccaagaatattgactgaatgtgttggctttcccattccctcattttcccacccctagccccatccattccccacccttctctactctgcttcccycatccctgaggctgattcccatcctacatcagccgggctccatgctggcag

SEQ ID NO: 479199 - DNA, 541 bp, Homo sapiens
ctcacacacctactagtgggagggggaggcttgcgaaatgttaaaaatgagtcgattttctcatatacaacaagaacaacaacgaagacagtgaggaaaagaggaataaacaaggtgtgggtggagaaaaacaggtacctgagcctggctcttgtgaaacagaaccctttaggagtagaggtggggtggggagggcagtcactggtttaatasagatcctcccaaataggctggatcacagccgagcttacagatgctcactttggactcctctgacaccaccagagagatcaaaccccaggatatgttggttttgtaggttgtcagacacgtcaagaccactaactgtttctatcagaatgtagaaatgttgcagaccgtggagggggctgttcagatggcccagcactctgaccgcatgcaaaggaagttcctttcgcaacccgtcctcttcctccaactgtaaagtaagattatgaagcagaatcaagagcctacactgaacctcaaaagggaaagcccagggttggggactcccagt

SEQ ID NO: 479200 - DNA, 520 bp, Homo sapiens
  misc_feature (1)...(520): n = A,T,C or G
ctcatcctggagcatttgttctgtctcttactccctgccccgctgcctgaagactcctcaaatactggtgatagagcgtcttagtgctgggggcctcctgagccatgggttaatactcaggtagacaatttacaaaagtcctagaggccaggcacagtggtttatgcctgtaatcccagcactttgggaggccgaggcaggtggatcacttgaggtcaggagttcgagaccagcctggccaacatggtgaaaccccgcctctactaaaaatacagaaattagcccagcatggtggcacgtacctgtagtcccagctactcgggaggctgargcaggagaatcgcttgaacctgggaggtggaggttacagtgagccaagatcatgccactgcactccagcctgagcaacagaatgagacactgtctccaaaaaaaaaaaaaaaaaaaaaaaaatcctagaaaacatggaggctgcccaggtggtcccaagagtcccttccaggatannnnnnnnnnnnnn

SEQ ID NO: 479201 - DNA, 597 bp, Homo sapiens
aaaagaaaaaaggtagggtgggtgggagccaaacagaaggcttggaaaccatttctgtgctctttgcacagcaaagggagcatgcagatggcgagttaacatacctaggaggctcccctggggtttaatgttgcattgtgtaccctcagaacgactgctcagcaaaggcaaaataaacacatttcctgtgctyccctttctcagctccgcagccctgccaaagtgggggtgggagggtcacatcatttatttacacaaggtcctctttatatggacacctccaataacgttattcatcgggttggctcctccagggctgccccactgttcccagcaggccaggagtgtgacttcacggtgaagcgtcatgtccaagttactctgtacgtggcaatgccagctacccacaagaaaggagggctgtgaagggggagctggggccgcttctgggtaatggatttcccccgcccccatttctggcaaagagctctgtggtcacagaattaaaaaaatctatcaattgtaagctaaggcacatgctgggtggaagtgagagtgagggaacctattcttatcactagctctgaggtaagatag

SEQ ID NO: 479202 - DNA, 539 bp, Homo sapiens
cagatggcgagttaacatacctaggaggctcccctggggtttaatgttgcattgtgtaccctcagaacgactgctcagcaaaggcaaaataaacacatttcctgtgctcccctttctcagctccgcagccctgccaaagtgggggtgggagggtcacatcatttatttacacaaggtcctctttatatggacacctccaataacgttattcatcgggttggctcctccagggctgccccactgttcccagcaggccaggagtgtgacttcacggtgaagcgtcaygtccaagttactctgtacgtggcaatgccagctacccacaagaaaggagggctgtgaagggggagctggggccgcttctgggtaatggatttcccccgcccccatttctggcaaagagctctgtggtcacagaattaaaaaaatctatcaattgtaagctaaggcacatgctgggtggaagtgagagtgagggaacctattcttatcactagctctgaggtaagatagaaatgtctggaagctccccgcttgca

SEQ ID NO: 479203 - DNA, 592 bp, Homo sapiens
ctgggataaggcccaggtatctcagtgtcccaggcacttggtgcccaatacttgcagaattcagaaaagggtgattagctttgtggcaacacatgaacatctttgcagagtactaagaagattttgtttatcacttcactgcctttttcctctttcaagaaggacggcccattctcaatcatagtgaaagtggaacaggaagaccatcgtggagtgctagagggacaagcacgtctaaatccatccatctgctgttcactgaggaagycagacatctctgcggcttcttaggccatggccgaggacatgaagatacagatatccaggaacagagtcacacacaatggcagggacacagacccggggcccagaggtgaataagacaccctcaattgcatgacatcagaggtattaatattcttctgcctgtagagctttcaaataattttgcatctcagagtccttagaacccagaacttcagagttacaaaatacctttgtgattatctgataccaccctctgattttcagatggcaaaactgaggcccagagatgagagctcatccacccactcccagaaagcagcagagc

SEQ ID NO: 479204 - DNA, 651 bp, Homo sapiens
ctggccacgaggatacagaccactgagtcaaggcccaccccrcccaccagggtgggaggcttgggccagcactttatctctccccaagaggaaagaaggagccagacgactcaggaggggcccagtgatctgtggaaggatgagaaggagagtcaagaaaagataaagttccccaaatcctccgtgtcatgttccaaaaactagagtttctcaacgtgtgccctactcactttccccatgatattgcttgttaaaaaagcagatttctgggcacattcttgggcttcatcccagagttgttgaatcagaaggagggggagatggaagttaaggcccaggaatctgcattttaataagacttccccaccatggggaagagagacacaaattatactctttatgctttctgattcttgagcatccaattacagaataaacaatttccacacaacctggctccatctacctcagaagacactgtagcatctacaataagagctgtagaacatctcctactgctgatgctgtgcgaaggttcggaccctccctagaagctgagctccactgtaccctctcaggtttagaccactgggggcttttggtttccaggggccacaaatgacttctgggctagtcatatgtaaatggtaa

SEQ ID NO: 479205 - DNA, 630 bp, Homo sapiens
ctcccaaagtgctgggattacaggcatgagccactatgcccggccttcagctttcttttggttctaatcatatatgtggtaaagtgattgayttagacagttatgttaatgtgaacagtgctgttaatgttattgaatttgattaaaataaagctccataatttattttattttatttagcattagggcctttgggacaaaatatgaataacgaaagcaagataatttgcaaataagaattagtccaagagctatagtatgttttgggtttgtttttgggtttgattttgatctgtttttaaataagtatgttatagtatctaatattaacttaaaatcttggttcagtttgccctacataatctattctaaaaatatatgtattggtctgttctcgcaatgctagaaagaactacctgagactgggtaatttataaagaaaagaggtttaattgactcacagttctgcaagttgtataggaagcatggctaaggaggcctcaggaaacttaacaatcatggtggaagatgaaggggaagcaaacctgtcttatatggtgggatcaggagaaagcaagtgaaggaagaagtgctacacacttttaaacaaccaggtcttgtgagaactac

SEQ ID NO: 479206 - DNA, 627 bp, Homo sapiens
cactgaagtttcctccacgaccaaagttgtcattcccaccaaaaccacctccacgaccaccaccaaagtttccagaaccacttcgacctctttggctggatgaagcacgagccatctcttgctttgacagggctttcctagcttcacagttgtggccattcacagtatggtatttctgaatgacagtcttatccatggagtcatggttgtcaaaggttacaaaggcaaagccccttttcttgccactgccttggtcagtcatratttcaatcacttcaattttcccatactgttcaaaataatctcttaggtgaagttcttcagtgtcttctttaaggacacaaatatttttttcacagtcaagtgggcacctggtctttgagaatcttctcttgagacagctctctttggttccacagttcttccaaccaccttgcatggccttgcattcatggctgcatccacctcctccacagtggcacatgtcacaaacccaaagcccctggagcgcttggtgtttggatctctcattaccatgcagtttgtgagcattccctattgctcaaaatggctcctcaggctctcatcagttgtttcaaagctctaccctccaatgaagagcttcct

SEQ ID NO: 479207 - DNA, 627 bp, Homo sapiens
cactgaagtttcctccacgaccaaagttgtcattcccaccaaaaccacctccacgaccaccaccaaagtttccagaaccacttcgacctctttggctggatgaagcacgagccatctcttgctttgacagggctttcctagcttcacagttgtggccattcacagtatggtatttctgaatgacagtcttatccatggagtcatggttgtcaaaggttacaaaggcaaagccccttttcttgccactgccttggtcagtcatgatttcaatcacttcaattttcccatactgttcaaaataatctcttaggtgaagttcttcagtgtcttctttaaggacacaratatttttttcacagtcaagtgggcacctggtctttgagaatcttctcttgagacagctctctttggttccacagttcttccaaccaccttgcatggccttgcattcatggctgcatccacctcctccacagtggcacatgtcacaaacccaaagcccctggagcgcttggtgtttggatctctcattaccatgcagtttgtgagcattccctattgctcaaaatggctcctcaggctctcatcagttgtttcaaagctctaccctccaatgaagagcttcct

SEQ ID NO: 479208 - DNA, 484 bp, Homo sapiens
tcagttaattttaaacattttggtcttttttctgtataatttgggattggtgtaccagaaatgactaaaaacctgtggttttctgagagtgatcctgggactataattttctgaaattaaacttcaggcaaaaaaaataaaaaaaaagagaagaaaagaaaaagaaaaacagaaactctcatcgtggccagatggagccagagatttgtgagaagacgaggcttaaagagtaaaagsctatcagtgtgcgagatgggttgaaaaacaaaaaataaaaggtgaaatccgagactgccacgctcacctaggagaagttgcaaaacctccttagtgatgttgggaaaattcttttcagtgaaaagtctcttatggacctgttaaaaatatcccaagagcaaaacagcagaccccccacctttaaaggaggtgtaccttttgtcacttaatgcctgcctgtgtcaaatccaaccttcattgctttgtg

SEQ ID NO: 479209 - DNA, 537 bp, Homo sapiens
tggtacagcacacggggctgggagaatacaagccaagcacagagttagggccagcggcaactacaaacagctcggggttctaacgcgtcttggagggatattacctctgttgtgccgttatcattgatgccatatttatctctggttttcttgatcttctcagagacccccttaatgaatttttttatttcctgaaagattacacagcaaacatcatttgtaagtttcacagtcatgcagatgacataattcatttcataaacctcagttgtatatgacaagtccatcatattttagtgttagctccatatatagtataaaggacccaatctggatactgcttctactacaaagtggttttccaaggaacacaccacactgtccataccccagacacacaytccattggttaatgtgtctctaagaccttctcctccaactgctctcatggcactatctacagagcccacaaagtgcgtgggagcctttgttcttgctctcccacgtgccacgagggctataagaacacagctcaag

SEQ ID NO: 479210 - DNA, 553 bp, Homo sapiens
gaaatagtcacatgtgattctggggctagtagtcattattttatagatgtgtgtcttctctggtcctgtttcccctatggagttcgccaagaatgaagcctggttttgtgatcattattctttgaattgctctagagactagaaatgagtgaagagaactgggctttgggccacagttggggtttctgggagagccttggaaagatttgtggagagccatcctggtggtttggcggctgcaggtctgggactggttaagttttgggcaactctttgctgagcccctgggaggttctgggctaggaggtggggaaggtggtctctgctttcagagtgttatgttactcctgggaggagaaggacatggatgaatgacccagggggcattcttggtgggtttggagccagggagcaaggctgcgggactggagacatctgaatgtcatgagtccactcttggggacccccacagactggggcttaaatcttrgctctttactcctaagctgtgtgacttcaagtcgcttaacctcctgggcctgctttctcttcc

SEQ ID NO: 479211 - DNA, 332 bp, Homo sapiens
gttcttcaggaaagagactcaatgattgcctctagctgcatgtcccttaccctcaccattgcaccagtacacatttcagtccataatatcttgttgctgggatccctgagttccaggaagcaacttgctcatgagtagggtgtgaaccccaggcagctcctgtgatactggcattcacacagccccctaggagactcagtccacggtgctgcaatccacattgccccagaacactcctgstcacagctttgtccttcctcctcttctccccatgctccataaaatcagtccatctgctgggtccaaatgtcagaattttacaagagataacc

SEQ ID NO: 479212 - DNA, 447 bp, Homo sapiens
tgtatttctctggggtttggaaggttcaaaatgttcagggcagaaagaagggtgacaaggctgcattggcaaaaatgaaaataaaaacaagtaatgtgatttttaaggcaaattggatgctatttctaggcaacagaaatatatttacagtgttattctttttaaaaataaaatggcattattagagaggcatcaatgtaatatatatgtatgtaaacatacagcacacaatatatgtgtgtgtatatatatgtatataatgcatacacacatatttgcttagtttrctggctgcctcagcaaagaaaagcctcaacttccatccccttcatgtggctgagctgtcccttagattctgacattataagcgattttgaaatatatccatgattagtaaattaatttgtgcattcccttgtcttcatgtacaggtagaataagcatgtt

SEQ ID NO: 479213 - DNA, 496 bp, Homo sapiens
ctcagcaggaactacagcaattcttagagctaagagtgacaaatttgtgttgggagaaccatcttcttarcgacattctttagattcactggtgccatgtgctggcaaactgtaactgtttcaacatcaaacacacgtagtgccccctgcagcccgcaggtgggtgctcggcaccccctggtggtcagtggtaggcctcacgaacgagtccacattgctacaaatcaatcaatgggcaacagagacagtgtgatgaggaatgggatctttacaatagccccaaagtgcgtcctcataacatagtcactgattaaaaccagaaaaagaatgtatttatggtagtgaagcgtgacacccaccaccttaattcaatgatcaacaagaacatcatcaatcttggggcaaactaaagtcacatgccgcccggtagaatgggagaagagcgcagcaggatgtctatcgcatttctgctgaagttacagaacctgaatctaat

SEQ ID NO: 479214 - DNA, 496 bp, Homo sapiens
ctcagcaggaactacagcaattcttagagctaagagtgacaaatttgtgttgggagaaccatcttcttaacgacattctttagattcactggtgccatgtgctggcaaactgtaactgtttcaacatcaaacacacgtagtgccccctgcagcccgcaggtgggtgctcggcaccccctggtggtcagtggtaggcctcacgaacgagtccacattgctacaaatcaatcaatgggcaacagagacagtgtgatgaggaatgggatctttacaatagccccaaagtgygtcctcataacatagtcactgattaaaaccagaaaaagaatgtatttatggtagtgaagcgtgacacccaccaccttaattcaatgatcaacaagaacatcatcaatcttggggcaaactaaagtcacatgccgcccggtagaatgggagaagagcgcagcaggatgtctatcgcatttctgctgaagttacagaacctgaatctaat

SEQ ID NO: 479215 - DNA, 629 bp, Homo sapiens
gaccccacaggactctccctctgctctgctccatcctcgaatcctaatgtcccggctcttgccgtccaacactgtgtctgcccttgctatcccagccgcagtcccttaactcttcccttcctccaagatgcagtgagagatgcccagttggaaggaaacttttatggtcatgtccttctccaactttcctctttctatcatttttgtctcttttaaacctctcctgttggcgctgaattggcataggatgccacagtcaaggcttgtacctgtckctagcgtgcacatgccacttctattcttcactttggcaaagaccacactttagtttgctgatggccaagtagatacaggaagttcccagttgcttgggccagaaagaaagagaggccccaggtggacctgatgacccccctaaacccctacctggacctcaccaggatccagtcaagaggccagtctcttggcccaggcccccacctctttcctccagaaatgacttactagggcttcttcagagcctggagttagtgacagggaagctggctctccagcctaggcctctggcaggtgcctcagcgatgtccaatccaatcagtgtgatgaccagggacagcactggattggcc

SEQ ID NO: 479216 - DNA, 500 bp, Homo sapiens
cacagtcctagcctcaggactcctgcatctgggcatcatccctgatgccttctgccataaatcccacccctggccagctgaaacctggaggaggggtcccccgagaccctcctggacctcgtggccctgagttgagtcaggaagccccgttgatgccatgggctctgcaggggccgggtgagggagggtgagcccrgaactctgggagcagttttctcctgggactgggggatgggacacagtgagggcctggacagcccacccgaggcactccctcctatccctgccctcggccgctgcctggtcctgcggggagggggcctggaccctctcagcacagcctgggcctccttcaccgccaggttcctggagtttgaggctgaggaggagatgcagattcagaaatcgcaatggatgaaggggccccagtgcctgcctcctccagccacaccgaggcttgaacctcgaggacccccggcccctgaggtggtcaagcagcc

SEQ ID NO: 479217 - DNA, 500 bp, Homo sapiens
cacagtcctagcctcaggactcctgcatctgggcatcatccctgatgccttctgccataaatcccacccctggccagctgaaacctggaggaggggtcccccgagaccctcctggacctcgtggccctgagttgagtcaggaagccccgttgatgccatgggctctgcaggggccgggtgagggagggtgagcccggaactctgggagcagytttctcctgggactgggggatgggacacagtgagggcctggacagcccacccgaggcactccctcctatccctgccctcggccgctgcctggtcctgcggggagggggcctggaccctctcagcacagcctgggcctccttcaccgccaggttcctggagtttgaggctgaggaggagatgcagattcagaaatcgcaatggatgaaggggccccagtgcctgcctcctccagccacaccgaggcttgaacctcgaggacccccggcccctgaggtggtcaagcagcc

SEQ ID NO: 479218 - DNA, 500 bp, Homo sapiens
cacagtcctagcctcaggactcctgcatctgggcatcatccctgatgccttctgccataaatcccacccctggccagctgaaacctggaggaggggtcccccgagaccctcctggacctcgtggccctgagttgagtcaggaagccccgttgatgccatgggctctgcaggggccgggtgagggagggtgagcccggaactctgggagcagttttctcctgggactgggggatgggacacagtgagggcctggacagcccacccgaggcactccctccyatccctgccctcggccgctgcctggtcctgcggggagggggcctggaccctctcagcacagcctgggcctccttcaccgccaggttcctggagtttgaggctgaggaggagatgcagattcagaaatcgcaatggatgaaggggccccagtgcctgcctcctccagccacaccgaggcttgaacctcgaggacccccggcccctgaggtggtcaagcagcc

SEQ ID NO: 479219 - DNA, 500 bp, Homo sapiens
cacagtcctagcctcaggactcctgcatctgggcatcatccctgatgccttctgccataaatcccacccctggccagctgaaacctggaggaggggtcccccgagaccctcctggacctcgtggccctgagttgagtcaggaagccccgttgatgccatgggctctgcaggggccgggtgagggagggtgagcccggaactctgggagcagttttctcctgggactgggggatgggacacagtgagggcctggacagcccacccgaggcactccctcctatccctgccctcggccgctgcctggtcctgsggggagggggcctggaccctctcagcacagcctgggcctccttcaccgccaggttcctggagtttgaggctgaggaggagatgcagattcagaaatcgcaatggatgaaggggccccagtgcctgcctcctccagccacaccgaggcttgaacctcgaggacccccggcccctgaggtggtcaagcagcc

SEQ ID NO: 479220 - DNA, 608 bp, Homo sapiens
ggctgtctgggaagtgacctgggagttgggggctaggtgttcgccaaagggagacttccagagtctaygagtgagatgaggactgcatcaggagagggaccgaggctggggaggatgctctgctctttcccaggttgtcctgtcctcccaatctctgctgaactgccctcaccccatgggccaacttctgccccccttacccctaacccacctcttagaatctcagatcccagcatggacaggacccggcacccaccctggttccctcctggccaacaccttcttctccacggtctgagttctgattcctcccccagggcgcttattggctcaggacccctgtgactgccagggcactggtcccagcactgcctgcgtgcagagctgtggtcacggcgctgggggctggcccagcagcagaggctggtggggcaaagctgtctggtacacggtggcctggcccctcggccaagtgacaaagggagccatgtttgggtcctctctggccccatctgcccacagaacacagcagtcagcctgacagatgcccctctgccccgtcccttctgctcgatgtgggcagtgtcggaggcctgctgtcttctgtg

SEQ ID NO: 479221 - DNA, 608 bp, Homo sapiens
ggctgtctgggaagtgacctgggagttgggggctaggtgttcgccaaagggagacttccagagtctacgagtgagatgaggactgcatcaggagagggaccgaggctggggaggatgctctgctctttcccaggttgtcctgtcctcccaatctctgctgaactgccctcaccccatgggccaacttctgccccccttacccctaacccacctcttagaatctcagatcccagcrtggacaggacccggcacccaccctggttccctcctggccaacaccttcttctccacggtctgagttctgattcctcccccagggcgcttattggctcaggacccctgtgactgccagggcactggtcccagcactgcctgcgtgcagagctgtggtcacggcgctgggggctggcccagcagcagaggctggtggggcaaagctgtctggtacacggtggcctggcccctcggccaagtgacaaagggagccatgtttgggtcctctctggccccatctgcccacagaacacagcagtcagcctgacagatgcccctctgccccgtcccttctgctcgatgtgggcagtgtcggaggcctgctgtcttctgtg

SEQ ID NO: 479222 - DNA, 608 bp, Homo sapiens
ggctgtctgggaagtgacctgggagttgggggctaggtgttcgccaaagggagacttccagagtctacgagtgagatgaggactgcatcaggagagggaccgaggctggggaggatgctctgctctttcccaggttgtcctgtcctcccaatctctgctgaactgccctcaccccatgggccaacttctgccccccttacccctaacccacctcttagaatctcagatcccagcatggacaggacccggcacccaccctggttccctcctggccaacaccttcttctccacggtctgagttctgattcctcccccagggcgcttattggctcaggacccctgtgactgccagggcactggtcccagcactgcctgcgtgcagagctgtggtcacggcsctgggggctggcccagcagcagaggctggtggggcaaagctgtctggtacacggtggcctggcccctcggccaagtgacaaagggagccatgtttgggtcctctctggccccatctgcccacagaacacagcagtcagcctgacagatgcccctctgccccgtcccttctgctcgatgtgggcagtgtcggaggcctgctgtcttctgtg

SEQ ID NO: 479223 - DNA, 412 bp, Homo sapiens
atctcaaggggctattaagggaaatcatcacctcaggattgatcatctctttttttcgctatagtcacaatttaaggaattgcgtgaaacagtcaagtgggggcagacattagatttcaagaaggctcgactattccaaaatatggcctgagcctgtgccacccaacttcctcgaccatgtagacttcattccttccttcattcatttgttccmactttcgccagtatttcccaagtagctaccttgtgccagcctagaggcgggaagcacacagtgaggaggggacagcagactctgacatggacaaggacaccgggcagcagtgcagggggcaagggtaggctctggagaagacagagggactccagcatgggcaggccactgggcatgtccctaagcctcttggagcct

SEQ ID NO: 479224 - DNA, 499 bp, Homo sapiens
aaaattggacattatgtcttttttcctgaygagtcttgctggaagtcttgttttgtttctgctaggattttatcatgtagttgtgttgtattgtccatgagtttttggttttgtcatctagttactccgttggtatgtgatgatgaggggagatttaaaagtgacgtcatcgtcattgctgccattttctagaaacctacgcttttatttttgaagtatatttcagtgggtagaattttatgttggcagatttttttcatttcaacatgaaaaatgtcattccgtgggtttctggcttctgtagtttctgatgaaaagtccttctcctacttattgttgtttctttgaaagtaatatgtctttttttcctctggcttcttttgaatgtctccttttatcttttttttagcaatttaatcacgactttttttctattcacctgcttaggatttgcagacattcctgtctgtgaattaatgtcttttatttgttttgagat

SEQ ID NO: 479225 - DNA, 499 bp, Homo sapiens
aaaattggacattatgtcttttttcctgatgagtcttgctggaagtcttgttttgtttctgctaggattttatcatgtagttgtgttgtattgtccatgagtttttggttttgtcatctagttactccgttggtrtgtgatgatgaggggagatttaaaagtgacgtcatcgtcattgctgccattttctagaaacctacgcttttatttttgaagtatatttcagtgggtagaattttatgttggcagatttttttcatttcaacatgaaaaatgtcattccgtgggtttctggcttctgtagtttctgatgaaaagtccttctcctacttattgttgtttctttgaaagtaatatgtctttttttcctctggcttcttttgaatgtctccttttatcttttttttagcaatttaatcacgactttttttctattcacctgcttaggatttgcagacattcctgtctgtgaattaatgtcttttatttgttttgagat

SEQ ID NO: 479226 - DNA, 534 bp, Homo sapiens
ctgcagagcctgggaaggggcatccagactcctgcagacagcccagactcccctgggtatcccaccttgaaaaagcatctgctaaaacctgccccagcacaggtacayatagggagacggtcttgggcctcactgcaggcttgggcaccaggataaggaagaggcagggacagacatcagagcacagtagatgacaaggaaggagcacagactttggagacaacagatctccatccaacccttcccctgccacttcccggctgtgtgacctgaaatgagtcactaacacttcctgcccctcggtttcctcacctgtcaataaagcaagttcaacaaccacaactgaggttgctgagaggattgaatgaaaccatcttatgggaaaatgccacccagcacaggccctggtgtaggacgagcgctcatgaattagttcccctcccacctcctccaaatctagggtgcgctgaagaaaagagtgagagccaagaacacattatgggcagagagaaagctcacacttcttcgtgtggt

SEQ ID NO: 479227 - DNA, 534 bp, Homo sapiens
ctgcagagcctgggaaggggcatccagactcctgcagacagcccagactcccctgggtatcccaccttgaaaaagcatctgctaaaacctgccccagcacaggtacacatagggagacggtcttgggcctcactgcaggcttgggcaccaggataaggaagaggcagggacagacatcagagcacagtagatgacaaggaaggagcacagactttggagacaacagatctccatccaacccttcccctgccacttcccggctgtgtgacctgaaatgagtcactaacacttcctgcccctcggtttcctcacctgtcaataaagcaagttcaacaaccacaactgaggttgctgagaggattgaatgaaaccatcttatgggaaaatgccacccagcacaggccctggtgtaggacgagcgctcatgaattagttcccctcccacctcctccaaatctagrgtgcgctgaagaaaagagtgagagccaagaacacattatgggcagagagaaagctcacacttcttcgtgtggt

SEQ ID NO: 479228 - DNA, 532 bp, Homo sapiens
ttcataagaaaatactcaactcattactcttctttctgaaaacttttctttgtcattcattttcatttctcattccagatacactttttaatacctttattgttttgacaggctggtagacaaatatgaataagtgggttgtcattgttcttttgttcttactgaatttgctctattttactctgaactaagttgctgtgatgttctctgtcagccaggggtcctaagaagcagaccattttcatgcattcttgtgacaatggacataaacccaacccctaaagggcctatttcctcccgggcaccccagaggtgcacactggactgtttccgctgaagaaaagccggggcccatctgctaaagggcctgacgagggaatrgccctacgtggcttgaatgtctgtacctgggcacctatgggagtctcctcaggccccaggtaaagctgagagggccgggggcactgggccaggaagcagaattgagcaccttcccacgaggcagcaggagaagcaggagaaggggacctcc

SEQ ID NO: 479229 - DNA, 623 bp, Homo sapiens
cccctctggggtgaggggcttcagagtggccatccacaccattttttgttcagccatggtttcttgggctcctggagacctgctggcaatgggaatgaggaggaaggaaggatgggagtgctaaggtcccaagagactcccagttaataatacggattttgaccctaactgcttttttggggtgactgccaaagtcatgatgggattaagataattgtctggggaggcctcacagtgcaaaggcagaaagcaatcggcaggtctccagtgagaagtatccgggaaaaatgctgtgagttccaagcttgccaatgtctgaaacatggagaagaatgacaggatgttcacagtagagcaataaaaatgattgagcctccagagagacagatttatgacaaaagctctatgagctaagtacattttattgtggcccagcagagcaagtgaagacagaggggargggtctctgcagaagaccgagtatgagagagtggttgggatagaggtggactttgaaggcagggagagaaaccaggaagtaaggagagagaatctgaagaaagggagaaaaaaggtagggaagaaaaataattttggggaaaaacgatgaggacccttgtgca

SEQ ID NO: 479230 - DNA, 442 bp, Homo sapiens
tgaactagcggcgggccagcccacatgggctcattccttccactcctcagtgaagacaaagactgggtctcttcagtcttgtgctaccaggagcacagtcttagtgacagctccctgtgcattttaccatcatgtaaaatgctagccatagccattgttatgattgttgtctgcgttaagggctttctgactaccaggggctggcagggaacttggtttgcaaacattattgcatttaaccctcactgctccatggataagcatcactacaacaagaaaggtcagggtcagaagggtgaagcagcctgcccaggttcctcagacagtaaatggcacagttgagactgcctgggtgcagcgtctgcgtcaccccgcaagggtggscttgccaacagtgtgttcagttgaaggggtcttggtctcagcaggaaaccaagccctc

SEQ ID NO: 479231 - DNA, 641 bp, Homo sapiens
agcatacatagtttattaaaagcaggttatgtaatattttgtattaggatgaactgagccatacattcttttacttcagtggcagcatgcttgaggaataatagacaaaaaatacatttggctggacaaataaaattttttttcattgaatatggcattcaagttgtggaaataaagctaaattgtgttgcatagtatttgtgtaaaggaaagaatgataagaaagcccaggactgagtgctggtgaaatacattgatgagggagaaaattagaaggcaaaaagaaatatcaaaatacttgtagtgtccagtgacttttctctatgcatgaaatgtacagtgaaacacacattattcaacaaagttttcagagttgaatggagttgaaggggaacagggaaaagaagcaattaagaaccgcatagtatttcttgttctagatccttgaggaattaccacactgycttccacaacagggcagggaacatcacacacccgggccgattgggggctgggggacagggggagggacaacattagagaaatactgaatgtaaatgactagctgatgggtgcagcaaaccaacatggcacatatatacctatgcaacaaacctgcatgctgtgcacatgtaccctag

SEQ ID NO: 479232 - DNA, 558 bp, Homo sapiens
ctgctgtgacaagactttactaattctgtgtggtaacaaatgtttttgtatttgccaatctgttaagttcacacacatgcatacacacacacacacatasacacacacacaaacacacatacacaaacacaattttttaaaaaattttcacttatttaaagatgagaaaggctgagtattttttacttgtatattggtcatttatttaggattttttggtgaatctattaatactcctttacgatatttcagttgagtttttttttcattttctttgttctttgtagcagcttatcctcatttaaagtattgagtctcttgtcatatgtgttgcaagtatttctcaagattcagttacaacacagacatactactcaaaaaatgatataacaaatacacaggtttataaaaccatatttttcgcattattgccacatgctgggaactataattcacacaaatatggtgaacagagtactgattgggtaaatataatacatctatttaagagaatatgaggttattaaaaagaatgaagcagatctatttgtgatatac

SEQ ID NO: 479233 - DNA, 558 bp, Homo sapiens
ctgctgtgacaagactttactaattctgtgtggtaacaaatgtttttgtatttgccaatctgttaagttcacacacatgcatacacacacacacacatagacacacacacaaacacacatacacaaacacaattttttwaaaaattttcacttatttaaagatgagaaaggctgagtattttttacttgtatattggtcatttatttaggattttttggtgaatctattaatactcctttacgatatttcagttgagtttttttttcattttctttgttctttgtagcagcttatcctcatttaaagtattgagtctcttgtcatatgtgttgcaagtatttctcaagattcagttacaacacagacatactactcaaaaaatgatataacaaatacacaggtttataaaaccatatttttcgcattattgccacatgctgggaactataattcacacaaatatggtgaacagagtactgattgggtaaatataatacatctatttaagagaatatgaggttattaaaaagaatgaagcagatctatttgtgatatac

SEQ ID NO: 479234 - DNA, 647 bp, Homo sapiens
ctagtgtcaggtgagagtcacaatttccaggtggccatggagtttctcactgctacaagggtrtgcccagcaaccatcaatgttttgagatgcgagcagccaaatacaatgtcaatagaacaaacaagacatagcttgggaaatgaattttcatcaccttctgattgtttattttttctttcaggagaaaaaatttctgtattatgcaacccttctacaccttaggcttttctacatttattagaatgttgcttttaccccaaactatattcatctcagaataatcttatcacctttatgtttgttcttctctgatccctagtaataaaatttattggctatttaaaaatagatttaattaaatctatcttctagggatgcaagattttgtttttcctccatattactcagctaaatttattggttttgacattgtgaaatctgtcttttattctacgggcatagataaattaatatagatcatttaaagagaatgatggcccttccatcactaacttctatgggtttcaagtatatagtttagaaatcaagaaacctatgtctcaatgctagactcaaattatcctgaaacacaatatctagtcagaaagagcctgttccaagggcttttaatgggaaacagaatt

SEQ ID NO: 479235 - DNA, 647 bp, Homo sapiens
ctagtgtcaggtgagagtcacaatttccaggtggccatggagtttctcactgctacaagggtatgcccagcaaccatcaatgttttgagatgcgagcagccaaatacaatgtcaatagaacaaacaagacatagcttgggaaatgaattttcatcaccttctgattgtttattttttctttcaggagaaaaaatttctgtattatgcaacccttctacaccttaggcttttctacatttattagaaygttgcttttaccccaaactatattcatctcagaataatcttatcacctttatgtttgttcttctctgatccctagtaataaaatttattggctatttaaaaatagatttaattaaatctatcttctagggatgcaagattttgtttttcctccatattactcagctaaatttattggttttgacattgtgaaatctgtcttttattctacgggcatagataaattaatatagatcatttaaagagaatgatggcccttccatcactaacttctatgggtttcaagtatatagtttagaaatcaagaaacctatgtctcaatgctagactcaaattatcctgaaacacaatatctagtcagaaagagcctgttccaagggcttttaatgggaaacagaatt

SEQ ID NO: 479236 - DNA, 603 bp, Homo sapiens
cctagtgtcaggtgagagtcacaatttccaggtggccatggagtttctcactgctacaagggtatgcccagcaaccatcaatgttttgagatgcgagcagccaaatacaatgtcaatagaacaaacaagacatagcttgggaaatgaattttcatcaccttctgattgtttattttttctttcaggagaaaaaatttctgtattatgcaacccttctacaccttaggcttttctacatttattagaatgttgcttttaccccaaactatattcatctcagaataatcttatcacctttatgtttgttcttctctgatccctagtaataaaatttattggctattyaaaaatagatttaattaaatctatcttctagggatgcaagattttgtttttcctccatattactcagctaaatttattggttttgacattgtgaaatctgtcttttattctacgggcatagataaattaatatagatcatttaaagagaatgatggcccttccatcactaacttctatgggtttcaagtatatagtttagaaatcaagaaacctatgtctcaatgctagactcaaattatcctgaaacacaatatcta

SEQ ID NO: 479237 - DNA, 603 bp, Homo sapiens
cctagtgtcaggtgagagtcacaatttccaggtggccatggagtttctcactgctacaagggtatgcccagcaaccatcaatgttttgagatgcgagcagccaaatacaatgtcaatagaacaaacaagacatagcttgggaaatgaattttcatcaccttctgattgtttattttttctttcaggagaaaaaatttctgtattatgcaacccttctacaccttaggcttttctacatttattagaatgttgcttttaccccaaactatattcatctcagaataatcttatcacctttatgtttgttcttctctgatccctagtaataaaatttattggctatttaaaaatagatttaattaaatctatcttctagggatgcaagattttgtttttcctccatattactcagctaaatttattggttttgacattgtgaaatctgtcttttattctacgggcatagataaattaatayagatcatttaaagagaatgatggcccttccatcactaacttctatgggtttcaagtatatagtttagaaatcaagaaacctatgtctcaatgctagactcaaattatcctgaaacacaatatcta

SEQ ID NO: 479238 - DNA, 640 bp, Homo sapiens
gtgttggttaatgtcagttccattcctaagcttttcagctagttgcaccactaaattccacctttctttgttttagccactttgcaggaatactcagcaatagatccacaaaagtacttgggtatcaatttctcttctgtaaaataacttggacaaaagtcacttcygcttctaaaatcatatgagatcaaagtaccttcatggataaactatcagtgtctgtctcattcagtacatcgtttttgcattttggatattgacccatggaatatctggatccatgtattgactagccaggtgttactaggcgtctgctctattcctaaggaatgttattaattccatttttcacgtttccccagacggtaagaaaatacaagtgttccaactgaatgtgtgaggattcaagtcttttttttcttgattttatagcatcttattttgttatttatcgttcaagtacatgccctcaattagataaaaagttatctaacaggtactgtgccatatagttgggagtatatcatttagaattaattggttagctgagacagatacctaaaataacagtgatagcagtttatttcctcctaatataaaaagcaattaggaggcaggcagtcaatagctggtacaggca

SEQ ID NO: 479239 - DNA, 654 bp, Homo sapiens
tatccttgaatacggtgttggttaatgtcagttccattcctaagcttttcagctagttgcaccactaaattccacctttctttgttttagccactttgcaggaatactcagcaatagatccacaaaagtacttgggtatcaatttctcttctgtaaaataacttggacaaaagtcacttccgcttctaaaatcatatgagatcaaagtaccttcatggataaactatcagtgtctgtctcattcagtacatcgtttttgcattttggatattgacccatggaatatctggatccatgtattgactagccaggtgttactaggcgtctgctctattcctaaggaatgttattaattccatttttcacgtttccccagacggtaagaaaatacaagtgttccaactgaatgtgtgaggattcaagtcttttttttcttgattttatagcatcttattttgttatttatcgttcaagtayatgccctcaattagataaaaagttatctaacaggtactgtgccatatagttgggagtatatcatttagaattaattggttagctgagacagatacctaaaataacagtgatagcagtttatttcctcctaatataaaaagcaattaggaggcaggcagtcaatagctggtacaggca

SEQ ID NO: 479240 - DNA, 540 bp, Homo sapiens
gctgccgaggagcctgtgccagtcccacggctgccgtgcagcaagcgggcggcccgactgacttcagccacgtcccctgcgtcagacaagtgggcgtcccctgcgtcgagacaagtgggggatccgcgaggcctgcaggggcgcagggaccagagtgctaagacgtggcatgacctttcagggagaactgcgcagagggtggccaagggtcacctccctcgaggggcgaagccctgagatgtgaggatgattcttaagacagcgcccttcccgccccttccaaccccccagaccaccacccgggtctgggaacagrgtgagcgcatggcgagaggttgtctggttttgtagctatcaagttgtacccccgctgtgcccataggaagtgactcatctgcttgtcaggtagtggccttgctgtgagccaggaccatattaagaaaagaaagaaaaaaaggagcagcaaaacactgtgcccctgcacaatgtgctctcctttcttctgccctccctctcctaggctgtcctcttcttcctcca

SEQ ID NO: 479241 - DNA, 604 bp, Homo sapiens
attctggagcaccttattcccaaagggtaagtaagaatagttgtcatagttgaatagtggtacagttgttgatgttaagctggtgattgaagtatatcgcagagtcataatttgttttctgaaagtgcactcttagttttaaaactacttgtaagtcctatggagaagagttgagttggaagtttttgcaattacccaagaaagataaatgataattgcttgttatgtggaacttagaaggtgttaaggacattattaatcatgttgtttgcattaactcatttgctcttccacctcacaggagaaatgggttcagaggttaaataacttacctaacgtcacttatcaaggaaatggtaaactaagattagaatgtgactttcttactccagagcccatgattttaactttactacattgccttcagcttaacttgcctaaatagcaaatgtagcaaagccctttttcgttaagttttttgttgttgtttrtacttacttgaagaacccagcatattttctttactacatatggtaaaagactcataagaggatgttagaaattccactttaacaaaacttgggaacttacggatttgaatcta

SEQ ID NO: 479242 - DNA, 594 bp, Homo sapiens
ctcagccaccttgtggttcccttggttccctttggggaaggttggggaacatggggaagggagggctttgtaccacagaaaggaatggctggtaggaatgggagattttgagtgaagcataaaaagttatttggagccatgggttggagagagcctctaagcatggggacctcctgctcctgcttttaatcagaccaagagggtaagtaatagatccggagttatatccacattgtctcatgtggcctcctcattgtcattgctgcttaaacaaaatgggcatagggagagggaaatgttcawcctccttgtgcctcgggagggtgccggggtagagtgatcttggcagcctgtggcttcgtcactgcctcccatgggaggactgggcctgcccagagcacagaatagtaatgggttgatactatgccttttttatttttcgtctccaaacacaggtgaatcactttgatttaagtttcttataaaatgctgtatcagctactactagttaaatgagttactatttgtcaagagcttagaacagcacctggcactgtcacatattaatttagtagcaattgtcaccatgattgc

SEQ ID NO: 479243 - DNA, 594 bp, Homo sapiens
ctcagccaccttgtggttcccttggttccctttggggaaggttggggaacatggggaagggagggctttgtaccacagaaaggaatggctggtaggaatgggagattttgagtgaagcataaaaagttatttggagccatgggttggagagagcctctaagcatggggacctcctgctcctgcttttaatcagaccaagagggtaagtaatagatccggagttatatccacattgtctcatgtggcctcctcattgtcattgctgcttaaacaaaatgggcatagggagagggaaatgttcatyctccttgtgcctcgggagggtgccggggtagagtgatcttggcagcctgtggcttcgtcactgcctcccatgggaggactgggcctgcccagagcacagaatagtaatgggttgatactatgccttttttatttttcgtctccaaacacaggtgaatcactttgatttaagtttcttataaaatgctgtatcagctactactagttaaatgagttactatttgtcaagagcttagaacagcacctggcactgtcacatattaatttagtagcaattgtcaccatgattgc

SEQ ID NO: 479244 - DNA, 479 bp, Homo sapiens
gctgcaggggaagaaagcttaacagcaaaagcctttgagatggttctccaagggtggtggttgaggggaatcagaggaggtcaagttgagccactcttggggatgtctagtggacagcctccctgcctgtggggtctcctgaagggctcatgygtggattccaagatcagtttaggagctaccacatagagattcttaccagagacagcaaagacagggccacatgagagccattagccacccatatcagttagataggctagactatgctaagtaacaaagtccccaaatttttgtgccttatgacaatacagaaatctttcttgttcattcttcatgtctgtctctactcatcctagtggaatacatgctcacatggcatttactattatcaagtcccatggctccacctaacttcaaggggacagaaaactataaccctactatgtgcctggaagggcaaaagagcaggctgtggc

SEQ ID NO: 479245 - DNA, 496 bp, Homo sapiens
agcacttcatgtatattcaatgactgaacagagcaaatgacataccttggctcacggaaatttaaacagatattttccacatgccaaaatgtcacgcaaactgtatttctggattgcattctgtggctgagtatgaccacagtgagctttgccatgagaaagtagttaaatccaactagattgggaaaagattaccttttcatctgcgtatgtctctgctgaatgaagtttgctcctgggtgaacctcagggccgttttgaaccagtttcctcaagaaattgatgtttgctttgtttacctgcagtacaaaaaaaccacaataagttactcccaggtaactagaaactaacaaatgatactgaaatgcgtcttaatctttactttccttgttcagattctaggagaaagagaggcatcctgggcarcctgctgcctatggtcttgagtataatgtgaacaacagactgggcaacaagcttccagcttccagtgtca

SEQ ID NO: 479246 - DNA, 656 bp, Homo sapiens
attgtaagctgagtggagatcaggaactgtgactcctgattcctgatctggtccctttttccgagttattaatacttggggccaggcgcggtgcctcacgacggtaatcccagcactttgggaggcggggtgggcagatcacctgaggtcaggagttcaagaccagcctgaccaacatggaaaaactccgtctctactacaaaatacaaaattagccaggyatggtggcacatgcctgtaatcccagctactcgggaagctgaggcagagaattgcttgaacccaggaggcggaggttgcagtgagctgaggtcgtgccattgcactccagccggggcaacaagagtgaaactccatctcaaaaaaatacgataaatacttggatgccatctcatcgacccataaccttctacataaattccctctccaatatgcatgatgagcagccagagcgttgccaaagtatttcctgtgtggaggaactcggcatgtgaaaagaacacacaatccactgcagaacatctaattctccaacgttttattttctttaaccaaaacactgaacaagtgaaatccttagcttggcatacaagatcctccctgatttattctccgctgacctctccagcttcgtttcttaccaggacctcacctgt

SEQ ID NO: 479247 - DNA, 462 bp, Homo sapiens
gttgtggtgctaggaaaagctaaaaagcagcaccccaaatattcactgcaggtaccttcccagaaccacctctagctgagtttctcatcactcttcaaagatccctgctctctctaagccacagcttcccatcagtgacaagctgaaggaagggatgtgctccctcaatattgattcagcttagtaaagtcaagtttgcattttatggaggctcttccaaagcctgctgacagcacagggtagcctggttactgtgagggcctacaatgtgctgaatctgtccacagtttgagttcccacaagtccctgcttccygacaaacaattgcttagcactagtttccaaactgttttcacagttgttacatcctcagcctcaaaatagccttgtgagccagggtagctagcagatacccttgggagcccaatttaaaagacaaattaaccctaacaaggtaccagg

SEQ ID NO: 479248 - DNA, 462 bp, Homo sapiens
gttgtggtgctaggaaaagctaaaaagcagcaccccaaatattcactgcaggtaccttcccagaaccacctctagctgagtttctcatcactcttcaaagatccctgctctctctaagccacagcttcccatcagtgacaagctgaaggaagggatgtgctccctcaatattgattcagcttagtaaagtcaagtttgcattttatggaggctcttccaaagcctgctgacagcacagggtagcctggttactgtgagggcctacaatgtgctgaatctgtccacagtttgagttcccacaagtccctgcttcctgacaaacaattgcttagcactagtttccaaactgttttcacagtkgttacatcctcagcctcaaaatagccttgtgagccagggtagctagcagatacccttgggagcccaatttaaaagacaaattaaccctaacaaggtaccagg

SEQ ID NO: 479249 - DNA, 538 bp, Homo sapiens
cctcagcctcccaaagtgctaggattacagccatgagccaccacatccgactggatatatcttaagatcaatttatcatrgtttttttttttttttttttgatgtctcagtctgtcactcaggctggagcgcaatggcacaatcatggctcactgcagtctccacctcctctgctcaggtgatcctcccaccttaggctccaaagtagatgggattaaaggcacacaccccaccacgtttggctaatttttgtattttttgtagagacaaggtctcaccatgttgcccagtctgttctcaatctcctgggctcaagcagtccgcccatctcagcctcccaaagtgctgagattacaagagtgagtcacctcgcccaccctgtcatagtttaatagggagcttttttcttggcacataaaactatatgacattaaaatggaggcatcttagatttgatgaaataatatattaaagattgaatcctgatctgaagagggagaaacttggtgagagaactttgctttcacagatcatgttt

SEQ ID NO: 479250 - DNA, 637 bp, Homo sapiens
ctgcagtgcagggcaaggtgagacggggaggagaggtgcaggcagtgggcagacctggaggtggaacaatggcaggcccaggacaggcagagggacctggaagagtccgaagagccacagtgacgctacatgggaccatgtgccttttccaagmctcagtttcccctcctgtggaatgggatggcctcttttcacaagacagttgggaggacccttgagtctgtgtgagtggaaaagtctggaaagctggaaagagtccggagctcttctatcaacattcagaggaatggaggctggcgatggagtggtcggattaggacagaaagaccaacgatggattcaggagagagcaagcagcatgaggctggaagcccccagtacctctatttcccttctgctgcctcatatttgcattgtttcttcctctccagcccctctgacccttcctccaacaatgcagagcctcagagaaaacagtgtgcaattggagggagactgcttgtcttccaggccggctccagcaatgccatgctgtacatctctgagccagtccctcgacttctctgagactcagtttcctcatctgtgaaaggaagagaagggcgatgatagtaacaacgcatttgaggtctctcca

SEQ ID NO: 479251 - DNA, 600 bp, Homo sapiens
gctggatattgctgaagtggtgactcatagagacttccgcctactgtcatacaacataaacgtttctctaagaaagtataatattagctatggtgaagggctcactttatatagatagttagctgttgaaaaaaagtttgatgttcagcatgtcttctttgttacacacacagagaatttagaaaagcactgtgatcccagtaacattacatatactgttctacaggttgcttttgttcacttaacaaaatagacatattttcatatcagtgcatatagctctgtgttattctttgaagtggttaaatgagtctactgtatgaatgtcccattagttatttgagcagttccctgttaatggatagttagatattgttcttatattttttatgttagtgtttatatatgtccccatacattcttttaatctatcatgtgtaaaggcaaactgatcttaagttcgttaaaaaaattgtatgccacaaaatttttgacaaactaaaaattatgtctaatataaaattaagttattcagkttgggtctctgccaaacatttcaaaaggaaaatttcaaataaaaaaagattctcaacaaagtct

SEQ ID NO: 479252 - DNA, 596 bp, Homo sapiens
caataatccattcacatagttcattttctgccatggcccatgatgttctcttccatgccaagacaatggggcttcaaacagtcttaacagaccatcccctttctggatttgytaaggtccattcagtgcttacaaacaaacttctaactgtgtctctttgtgacacaagccgtatcatttgcgtttcttatactagtaaggaaaataccgtactacgagcggcactgattactgaaatagtgtctgtcattcctaacgctgtagatcctattgacttcactccagacccatttagaaggcatgatagtataactattgttgtcagcagacttgtttacagaaagggaacaaatttggttagtggtattatacccaaactcttgtcagaaatattaagatttaaatttcataattggaggagagggaccaaagagaatcattttgcaagaagttccggaaagataccagttgcatgacagggtgcatcttttgggagctttagaacacaagaatgttagaaatgtcttagttcaaggacatatttttcttaatacctcccttactgaagcattctgcatggcgatcatggaagcagc

SEQ ID NO: 479253 - DNA, 596 bp, Homo sapiens
caataatccattcacatagttcattttctgccatggcccatgatgttctcttccatgccaagacaatggggcttcaaacagtcttaacagaccatcccctttctggatttgctaaggtccattcagtgcttacaaacaaacttctaactgtgtctctttgtgacacaagccgtatcatttgcgtttcttatactagtaaggaaaataccgtactacgagcggcactgattactgaaatagtgtctgtcattcctaacgctgtagatcctaytgacttcactccagacccatttagaaggcatgatagtataactattgttgtcagcagacttgtttacagaaagggaacaaatttggttagtggtattatacccaaactcttgtcagaaatattaagatttaaatttcataattggaggagagggaccaaagagaatcattttgcaagaagttccggaaagataccagttgcatgacagggtgcatcttttgggagctttagaacacaagaatgttagaaatgtcttagttcaaggacatatttttcttaatacctcccttactgaagcattctgcatggcgatcatggaagcagc

SEQ ID NO: 479254 - DNA, 569 bp, Homo sapiens
tccccttgcactcccttcaggggagcccaaacggcttgcagtttggcaatgtctgattcgtgagtcactgttgctcaaataaactttaaaaaaatttaatgtgcctctgcttaatagatacatcaagcaaatgagaagttatcttttttaaaaaagtctgtaaaacctttaacatctactataacaacttgtataagtccaagagaaatatttatgtgcaagaaaataatcctatctgtagcagctaggaagacagatatagagaaatcctattatattctatttggttgagccatactcactaagaaggaagtgatagtatcagatgatgtggctgaagattaatatggctcctttggtgtttttcccctatcacagatatcctgaggactcactcctgctcagccactcacatcaaatttagtttcttgaaatgggctgctgaggcattctgctcaggaattaatcatagctgagaagctgcttcaggggtggaggaaaaaaatctgcaacttattgttrtcctatattcacacaatatacgctgtgtgcctactacaaactggaaa

SEQ ID NO: 479255 - DNA, 570 bp, Homo sapiens
atgcctgatcttctaaagcaccaaaaccagggaagaggccacacagcgttctaagtggtgccataagctacacacttagtggagaaggggagggggtgcgaaattccacatgmcagccagatgccactgaaatgtcatcactactcattctgtcacaatccaatccatggcaaaccgtacctatagcactgcagatggatggctagattgctttgaaaatatcctaacaatcgcctccagttccctcacacagaagatgctaatattacctcgtggagttgttaggaggattgaataaaataatgcatgtaaaatgcttacgctagtgttggacacacacggtttgaataatcctgtactcacttattagctgaaggagttagaacacatccagaatacatatacaaacacatatacatatatatattaaatgttaacatatgttttatatatatgttaaacttgggatatctaatttttgtgatactggctactctgccttcattcttttgtatcttttttttttaaaaaaacttattataaaatgaaacatagattattcaggaaccc

SEQ ID NO: 479256 - DNA, 601 bp, Homo sapiens
gccacacctcctctaccacatattgtaagtgcaccaatttcaagaacataaataatttgtttttaggccaggtgcagtggctcacgcctgtaatcccagcactttgggaggccaaggtaggcggatcacctgaggtcgggagttctagaacagcctgaccaacatggagaaaccccatctctactaaaaatacaaaattagccgggcgtggtggcaggtgcctgtaatcccagctactcaggaggctgaggcaggataatgactcgaacccrggaggcggaggttgcggtgagccgagattgcgccattgcactccagcctgggtgacaagagtgagactctgtccccctgccaaaaaaaaaaaagaaagaatttgtttttaatatcctttatactaaattttaaaggtcatcaagtggattcacattaaaaaaatgccagctaattattcctgcctaaagcatagagtactacagctggttacactgaattacttaaattactagagcattgggatagctgagttcatggaggttcctggagtatggtgcacctggaaagggcatggaaactgaagccccttcccacatgccttgcccta

SEQ ID NO: 479257 - DNA, 620 bp, Homo sapiens
ctcatcatggggcaagctgcacggagcttccacgtgagaagcagtttgattgcaaacctggatctgcaattcccaggggctgccctcatggaattttaattgggggctatttgaaattccctttggctttctcacagcctatcactgcctrtaagtcatgttacctactgtcagttccttaggcttcttgtgtttctcggttgctactgttgtggtacaacttcttggtatcttttaaaagcactcatcagaagaccttagggacagttttgtgcaacccatatacattttacattaagccatactatttcaggtgtatccttcaaatacagttaaattcagttttgaagttttagctgcactgaaagccactgtcactttgagggcctacctgggacccctaaatgcatttacattttaagtcagaacttccaaaactctccttatttgctgaaaatctgtttaactgttttcacatgatgtgttaataaatgtcattgtattcacagagattattccaagaagattaaaggtcatgctagcccatttgcatcttataaatctcaagtgccctcaaactcaggaaaattcctgcaaaagtggaatgtttctcaaatggc

SEQ ID NO: 479258 - DNA, 578 bp, Homo sapiens
taatattctaacatgggaatgcaaaaccatcatgcctggaagatcactgcatcaaggtaagaggctttgggataagagaagttaaatactggacagtgagaacattttcaaagtaaaaaactataaacattagcaatatttcatactaaccagaaatggttactcccaatacatttttcttatggctctaaatattttcttacaaatggcttaagctgtgygagtgtgtgtgtgtgtgcacgtgtgcacacaaatgcataggctctgagcttatctctacaagatcttgtttagggcattgccaccttgagtttgctttgctagtatagagaaatctcccctgctctgctagttctgcaacttgctgtatccagaattgttttgtgtattttacccccaagtgcaactcatgcaacctgtgtcatgcccacctgtgtcaaaacattgagttgttccataatatgctctaaagcatcagtcacagcgagaggtatgctcctttgactttcacaggggaggtcactcatgtcttctgttttctttttcgtggttgttggcaaacattctggtgacattaa

SEQ ID NO: 479259 - DNA, 642 bp, Homo sapiens
ttttctttcaccagtcagcagaggaaacatgtgggatgaattaactaagccaaccagggaaagcaacgaaagcaacggcagttggacttcaatcggttcccagacaatggagcgtggggtgagcccacctctatccagcagggcaaggggcctcccaggtacattcaaggaccccccaccccatcccctagagagttgtcccaccctcaggcctaggatgtgggatttgaacccaggcagtctgattcacagctaaggatttgatctctctmtatatatttttttaggagacagagataatagtgacttgacagagacaacggggggagcttgaggaagagcagcctcagaccttagcttcatgtttgcaggtcaagaatactggggaggaaagtcagaaggaaaaaaagaagccctacattttatacttatagtccaggtgaaggttaggctggggagagagttcacagtcaaggaaaagaagaactggagctgtaagggcctgactaccctgagaagcatttctttcccatctacaggtaagtctgtcctcacaagttaatcagtagcttctttccagccacccattccccaggggtcagagagctaaatcctgaatttgctactactccttcctcctcc

SEQ ID NO: 479260 - DNA, 576 bp, Homo sapiens
tgaggctgtggcttattcctggttctaaacattcatgtgatttctcaggtcctatgtagactctgtcttattctcctctgcttctccctctgcccttttcctcccactctcagaatcagggtcctggtccttatctcagtctctgtgcttggggccatgctccctgctgaacaggcagtccttctctggatctacctccacaccttcccatcaaagctttttccattgccaattccacyacctttgcccacagcagccaacacccagatggtgagctatgttaagtgctgttacatcaagagcaagcaacttggccttgccccttctgtttagaaggagaaaggggtgtccacaagatcttgacagggaagaggaagtggttctctttccctcataagtactaaaaatggaaagaaacaccagcatttccgatttgaactattaatctgaaccacatgaaatcgccagtatgctacctactaaaatcagaaagttcatattaccctaacacatctcctagactgcctctcccgcccaggcacacaaagctattgtaggctgttttggactaatttg

SEQ ID NO: 479261 - DNA, 605 bp, Homo sapiens
ctttgggaggccaaagtgggaggatcacttgagcccaagagttcaagaccaacctgggcaacaaagtgagaccccatctctataaaaattttaaaactggccagatgtggtagcaaatgtctgtagtcccagctacttgggaggctgaggcaggattgcttgagcccaagaggtagagattgcagtgagctgtgttckcaccactgtactccagcctgggtgacaggctgttttttgtttcaaaaaaacaaaatagcaaaataaaaatgttaaaaccattcttggcttgtagattgtacagaaataggcagaggctggaaatgactccaggctgtagttcactgacttgcgttctaggaaggcctcaggagcttcccactcactcactcactgtgtgtgattaggcactagggatatgactggacaagatagtccctgtccttgtggagctgtcagtatccagggaacagatattaataaaatataacaaacaccaaccagtgctaggaagtttgaaaggaaagagaggcagtacatgtatagttcaggatcttgatgtggtttaggggttggggagggctaggaaagactttcctgaagaagcg

SEQ ID NO: 479262 - DNA, 638 bp, Homo sapiens
ctgctgccatagcccagtaagacgttcccatgcaaaagttgcttggcagtgggatgccaacgatggaaatggttccagaagcatctgagagaaacactcaacatcacttggtgacttacaagctattcaggaggaggaagaggagaatgaaaggggaggtggacctttctggtgaagatagaagtgatggaattaaccacactcagagcttcagtggcagaagcaagtgtcttttggaaggagacccagagctcagtttcggatgtgttgcattaggggtgtacgtcgcatgtcagaggagagggctgttagacattggacttcaagacttgaactgttgaaccactttgccctcgcaggttcccccaggaggcctttgccatggcctgtggccctggagccacctagggctcagctcagctctgccctacagattctcactaggccacgggtatctcaggacaggtactgccctattcacctttttacccttagtgattacttggcacttagggggctgcttaaggaatgagccatatgaggcaatatcttgggatatatagggaaacattttcagcagtatgattattcayaggagtcactctaggcacagaaatgtgtctttgcacattgttgta

SEQ ID NO: 479263 - DNA, 591 bp, Homo sapiens
gtgatgagcttggaggatttgtgtggtgtcatcaggctctgtgaacctcaagattataatttccagcgggggcaatttccaccagaggacacaataaaagcaaacataaatctatgcctgccatctgggcactttgrgaagaccataaggcaaagaaaatagtcaccatcctggcacagggcattggcccttcttatcatgatgagactgggctgcagctacaccatgagaacagagagagatattattggttctcaggtgcttcaccggggcattactttgtacccccatgactaactgtcactgaaaatgggcagttagcaaccactgcctgataagagcattgtaaccaggggctcagaccctccaggatgagggtgtgtatcactccatctgaccagccttttagtccagcagaagtgctaactgatggagagggtgatctagaatgagtcgtggaggagggagatggtgagtattagtgatagcctcgagaccacctgcagccgtggaagctctagtttatcccactaatcttcttgtcaaaatttcttccaaatggtgaccagtcagagtcctagagagaagcta

SEQ ID NO: 479264 - DNA, 513 bp, Homo sapiens
atcaggtactttttctattacctctgatcttaacaactctgtgaagtagacatcatttgctgcattttaagagagaaaaactggatctcagagaggccaagtagctttcccaaggtcacacagcaaagaaatggcagagctttgatttgaactccatcccacctgtctttcctatagatttattattctccaagtgtggtccccaaaccagtggcatcaacattgtttgggaatttgctagaaatatacattttcaggtcctccttattcttgggtttggttttggacaaacccaagatttctaacattatcttatggaattataatccccattttgcagataagaaarctaagcagaagtcagcttgtccaaggtcctgcagggagtaagtggcagggctgagggcaaaccctgatctcttgctccctctcatccaattctgctcatgattcttgtgtgcctgattctttcatcttatttctcagacagggagggtgataaaaaggaccctg

SEQ ID NO: 479265 - DNA, 596 bp, Homo sapiens
ttccccaagtcttttccagtcaccgtaggtcccagcatgtgagccagtgctccttgtcatggtgacctacttgtcaggaatgcacaaggctgtcggcccctggctttgagtcagtacccagaagctctgagtgttctcctggccaaacctgatccccaccctggtcttgcccttctgaaggcctgctggtgaagggataagcctgctgcctgctccttcagggctgtattggtagggccaccaggacacatgagtgaattttgtcccattcatctgtttgccattgactgcagatgctgggtgtttgctcagaatagaaattctcctgtaggaagactgagtccatgtttaggggacccatgtgtgcctgcctgagggggtgtgtgttgggcgtgggtgtgcattcaagcctccaaaaatgtgtatgtgtgtgcaagtgtgtgtataagtgcgcatgcccatattgtttacctggaggcttatgatgggtgtttgtggcaggtgtgcatgtggacaagcccatgagtgtatttcatgcctgtgtgttyggtgtgaaagtgtatgtatgcatgtggtgtgcatgagcaggcgtggaa

SEQ ID NO: 479266 - DNA, 586 bp, Homo sapiens
cccagagctggggagtgggggatgagtctggagggcacctctgtacccatccttcctggcacccagtcatgcgccccccacacacaacgaggggtagatgtgcaagactccagagctacccgaggcaaagcaagcaratgggattcaattcgtatgggattcagttcgccctggagttttatctgcgggcatttcctatgataatcactctctgggccgactcccacagagaaggcaggggagcggcaggaaggaatgcggagccttcctgacagattccaggcgctccatagtgtgcccggactgggagcaaggaacatctccaaggcctctcatcgcgaatttgtcccggccaagcccctcagattcacgtcctttcagacatcaaacgcctgggcctttacaaaaacctgcttccgcgcccccggccgcgaacctctgctgcactcgcccgctgcgctctctgaaggccgcctttctaagccagcgcgcgtctccagccttggcctgggctcctgctcgcctaaggaaccaaagacagtctccaagctaggaggttctggcaccccagccagggctcccgccc

SEQ ID NO: 479267 - DNA, 279 bp, Homo sapiens
gcctccatccctgtcccccgccacccccacccccgccgacctgcaacccgaaacactgtggctgttgtctccggagtcggccctctcccctctcccccagccccaagagacccgcgcgtttctagagccccgcaaagcccagcgcgctgsgctccctgggcagagcggcccttgccaggcactgcggctgcctcgaaagggcgcactgcgccccgaggacgctcgatcctcgaggctccgactcccggaaaaggccgggttgcgccgagactccagctt

SEQ ID NO: 479268 - DNA, 530 bp, Homo sapiens
cctactgaatgattccacttatataaacgtttaaacaaggtaaactaatctataagaacagaaagcagatcagcgatttcccrgagatggggttggggagaggggtggaagggaaggactgaaatgctgaaattaacaaattgttacatgtagtttattatatgtccataacagtaaataagacttgttgggtttttttgttgttgttgtttgtttgtttgtttgttttgagacggagtttcactcttgttgcccaggctggagtgcaatggcatgatctcagctcactgcaacctccgcctcctgggttcaagtgattctcctgcctcagcctcccgagtagctgggattacaggcatgtggcaccacacccggctaatctctacagacggggtttcgccatgttggccaggctgatctcaaactcctgacctcaagtgatctgcccgcctgggcctcccaaagtgctgtgattacaggcgtgagccaccacgcccggccaagactgttttgttttgttttgttttgtt

SEQ ID NO: 479269 - DNA, 530 bp, Homo sapiens
acgccgggctgcgccacgccagactccgccagtgtgcagggcatagcgggccaggccgagggactgggcttcggggcggacccaagccggcggkgacgcgcctggtggttcgcaggccgttgcgcaaaccggccgcaagccatgaggccgcgaagccagaatcaccaaggcagcctgggccgcctccagaccaggacacggcagccccttgcccctccaacttgcgcaccggcggttacagggttgccgcaagcacgcccctgagccttcccgccgttacctcgggccggcgctgcgcacgcgcgccaccgctaagcttacgtccagcctctgtagtcggcgcgtttgttccgcccactgcccccacacttttaataattgaaacaatgccttctccagacttcccctgcacgcgagcaaatgaactcacccacatccgggaatccgaggaaagcgagtgcagacacgtgatgcgggggagggggggggggcgtggcaggagcaagcgtctgccgcggtggccgggtgcc

SEQ ID NO: 479270 - DNA, 530 bp, Homo sapiens
acgccgggctgcgccacgccagactccgccagtgtgcagggcatagcgggccaggccgagggactgggcttcggggcggacccaagccggcggggacrcgcctggtggttcgcaggccgttgcgcaaaccggccgcaagccatgaggccgcgaagccagaatcaccaaggcagcctgggccgcctccagaccaggacacggcagccccttgcccctccaacttgcgcaccggcggttacagggttgccgcaagcacgcccctgagccttcccgccgttacctcgggccggcgctgcgcacgcgcgccaccgctaagcttacgtccagcctctgtagtcggcgcgtttgttccgcccactgcccccacacttttaataattgaaacaatgccttctccagacttcccctgcacgcgagcaaatgaactcacccacatccgggaatccgaggaaagcgagtgcagacacgtgatgcgggggagggggggggggcgtggcaggagcaagcgtctgccgcggtggccgggtgcc

SEQ ID NO: 479271 - DNA, 587 bp, Homo sapiens
gaggggacagatgtgtaaaggcccagagttttgaaaggctttgggacatggtragtcattcactgtggatgaagaatacatttgtcacataagtaggctgaaaagttgggcttggatcagattgagagtggtatttgatatcacacttagacctcatcctcaggagatccaggaatgaatggtcttaaaagcaagactgctatgctcagatttggcttttggaaaatcagtttagccagcattgttagagatggtgtgacatggagataggggcaagtgagaccaattggcaagctgttgtggtctaggcaagggaggagggcctaaacaaagtcaagaaaataaaggagacgtccatttctggagaagtttatggctcagattggagaacatttgggtggcaggggtggaaggaggtttccctgctgacttccaggcgaagttggcttggccctgctgctaatccacacctttcgcttgtcttgcgattctaaggcaatgtgtatgccagttaggttttgctgcataacaagtcaccccaaagcttagtgacttaaaagagcaactgtttatttcatgattttgta

SEQ ID NO: 479272 - DNA, 482 bp, Homo sapiens
caccatccccagtcagagccagctgctcctcgagggctccctgggaaacaggatggaggagaaaatggaaaacaaaacaaaaacaaacagaacaaacaataaaaatcaataaaaaaccagagtttgaatgctgccctgctagagcacactcattgacaggaaacacctgggcagaattacaggaacccaaacttctctctcctgctggcaaaatgmgtcccttttacctgcttagcaggatggtctcccatagcctgagatgcatttttgagggaaggagaatgtcatggtagccaatgactacactctctgccttgtcctaatacactacacacaagcaaacctccctacccacctttcccccatgtgctctccacgtccttaaggcatagcactttttccccaatgttgttttaaaagggtatacatttttctattttttctttcctgtgccttttggtacaagtttataaaactgtttt

SEQ ID NO: 479273 - DNA, 461 bp, Homo sapiens
cacttctccctgagggctgacagttcaaatcctgwcacttcacttcaaggtaaataatacaaccagttgggatgccctttgacatgttgctcaaggtgccttggccttctgcaaggcaaggacagataaagagccttcacccctggtgccactggtgccattgttaggttactaagccagccctggggccacctatctccagggagctaatttgaggtcatatagttgaaagcctcagccaggttttctcttagctgcagcccatagcattcctaacccacatacctctggcctcctgcccttaggagggttaggaacgatgggcaatatatatctatgtgtgcttgcacatgcgtggtctcctagccctccctgcttttctagtcccacccaaaacctaaagtaactcaaaatctaacatcagttaggccaggctgagccaagcccctacttaacatagc

SEQ ID NO: 479274 - DNA, 562 bp, Homo sapiens
tctagacggagacccagcacaatagggaaggcgggctgagaccagctcggacattccatcactcaaccttgtgtgagctcgcgccctcatcagatgctgggcaggaataggacaccggtgagcgcctcgtggtaagacagaaacacaaacagagatgataagatgatgtactgggacaggtctgaactgttggggtcagagttcggtacttagtagtcaccgacttcactaatagaagtgcgcaggagaaggytgctactctcccctgtgctttggtctcacaggcaaagccttctccagactgtcccctgggctgggaatcgcgcccagagtcacgggcggccagacccaccccatgtgttccccggcgcgctctccagtggagcttccctaggaaaggagaccgtcccgagaggctgtggcgcgcctgggactccccgacccttgccacgacatccctgccaccccttttggcgtgaacccaccggggatcccgcccgacgccggctgcgctgggccaaatccgcggcgcgcctctgccgggcacctcccacctccagct

SEQ ID NO: 479275 - DNA, 571 bp, Homo sapiens
aattgcctccttcgtacagctgttgtaaaggttaagtgtgattgaaagggcaaagtgagtagaaaaggacctggcaagtggcaaacaaaactattctccccctcattttcctcctcctcctcctcattattattttgttattattaactatttctgcattttatatcccaccatcctgtttccctttgttctactaactccagccacaatagctttcttgttatttttccaatatgttttagccttagggccaaaattcttttgcccytagtatttgtcttacttcctgagagcttttgctcaaatgacacttcctcagaaggattttcctgtccgcctcaccctgctttttcttcattgcacttagaaccatctgatatcttatgtgtatatgtgtatatatacatacgtttatataaacacatctgtgtgtatatctgtgtattatatatatatacacacacaagggcaggactttgcctaacttgtttactgctatattcccagttccttgaagggtacctggcacataatagacattgaggcattatttgttgaatactgttaaatg

SEQ ID NO: 479276 - DNA, 490 bp, Homo sapiens
cttaacagatgagctgctgggatctgagagagttaagtgacttgttaaggkcacaaacctgtttctgggtgggtccggactctttcccaccatatgccgtcacttacaggctgtgagtttatgcccagcccccctcaaggagctgcctcctgctttctattgcataatcaatatcgacacctggtgtaggggcgctctgcacggtggggaaggcctggcctggagtgagggatcctgcatctcagcatcaggccctgagtaggcctctgcccttgtggtagggtaacccaccctccttcatagctcagaggtctgagggggtttgagggaaagactagaaagcctaggaggcttcttctatctctcacccctcctcactcccagtcctgtgccacaggatttcactcacagctccttccacccccacccttcccctgaaaatctcactgccctgtgacttctccatgtgccacttcctgtgcgtcagatc

SEQ ID NO: 479277 - DNA, 490 bp, Homo sapiens
cttaacagatgagctgctgggatctgagagagttaagtgacttgttaagggcacaaacctgtttctgggtgggtccggactctttcccaccatatgccgtcacttacaggctgtgagtttatgcccagcccccctcaaggagctgcctcctgctttctattgcataatcaatatcgacacctggtgtaggggcgctctgcasggtggggaaggcctggcctggagtgagggatcctgcatctcagcatcaggccctgagtaggcctctgcccttgtggtagggtaacccaccctccttcatagctcagaggtctgagggggtttgagggaaagactagaaagcctaggaggcttcttctatctctcacccctcctcactcccagtcctgtgccacaggatttcactcacagctccttccacccccacccttcccctgaaaatctcactgccctgtgacttctccatgtgccacttcctgtgcgtcagatc

SEQ ID NO: 479278 - DNA, 541 bp, Homo sapiens
accccagcgccagggcctcgcctagctccagcctgcgggctccggccatggccggacactgctcctctgctgtcccgaaggcccaatgggcagaggggcgggtctcacctcggaccaatccgagcctgggcggtgctgcaaggcccaatccctgcagggataaggggaggaacctaggcgcctgggggcggggcgccgcgaccggtgcgggaggcagctaatcagggcggggcttgcagaccgggttgaagtccagggcccaggaaccctagggtaaccgaaagcagcctctgggttgggcctgcggtggsgcggggctagaggtgtggccgcgccctaaacctggcgcaaggccggtacctaaaggctcctgggagccaaaagagcaagtcagggaactagctttggttgggttcggtggtacacaaagcacaaggcctgggttggggttaggaggaaatgagacttgcggcgggtcggggctgaagatgtggcagcgccctgaacctggagaaaggctggtacgtaaacgcctgcgtcg

SEQ ID NO: 479279 - DNA, 605 bp, Homo sapiens
aactcatctctttgttttcatcacatcacatcaccctgtcctttggtgtccctaaaaccttcctgattcaatgttcccccaaatcgagtctgttttcttctgtcttgactgtggagaggaatattgtggctgtgccagtggagagaaaggcacctggggtctatttctccttacgcacactgtcaaccaatcttcccattttaatcttcacctataccatgccttcagcggtagttgaggcctccaaatctygagcatttatgagattctgtaggttcagttgccttgcttctcctagcctacaccttaccttcccttctttcctatatacatcttaggcacttagctttcagctttctctgttttctaaatcagttatcactcatctatctgctttatatctttctcaagttcactaaagctctcatctgcttccatctcctcttatgttctcttttttttctgtaggtttatattagcttttttccttttttgtcatgttagtgggacttcaagcagagataaatgtgtatttttactccatgattctaatgctcatttctttaaggaaaaaaaaaacacccagcctagaaaggaatttggat

SEQ ID NO: 479280 - DNA, 605 bp, Homo sapiens
aactcatctctttgttttcatcacatcacatcaccctgtcctttggtgtccctaaaaccttcctgattcaatgttcccccaaatcgagtctgttttcttctgtcttgactgtggagaggaatattgtggctgtgccagtggagagaaaggcacctggggtctatttctccttacgcacactgtcaaccaatcttcccattttaatcttcacctataccatgccttcagcggtagttgaggcctccaaatcttgagcatttatgagattctgtaggttcagttgccttgcttctcctagcctacaccttaccttcccttctttcctatatacatcttaggcacttagctttcagctttctctgttttctaaatcagttatcactcatctatctgctttatatctttctcaagttcaytaaagctctcatctgcttccatctcctcttatgttctcttttttttctgtaggtttatattagcttttttccttttttgtcatgttagtgggacttcaagcagagataaatgtgtatttttactccatgattctaatgctcatttctttaaggaaaaaaaaaacacccagcctagaaaggaatttggat

SEQ ID NO: 479281 - DNA, 610 bp, Homo sapiens
tgtcctgggttcaaccaacaatggaaagcctcgggctccgtttcctaattacagaggcaggattgcacacatgctctaaaccacatcttcttaaggaaggggtactatgagagatactcagaaaggttttctccagtttggttctccaggagacacggggacagtgcgcagcacgtgtgggatgcggtggtggagggcgggaggctagccatcacccaggtggagactgaagcatcagcccagattccgttcttgctggttcctacatcgtcattttgtcccttggatcatacacacagagccacccacatgtgcagcctcagacaaacatacttattagcacctcaaaactcagtagaaggtagccactatgctgttatcctgagcctcatccatataatggggaaatacacatgaacaaattctcgaagaggattggtgagagtacacagcctctagaagtttcttaaacaggaaaggtttaagaattatgtgtcaggctgagcccatctaaggagctgacgtgcccctgggtcttgtaagcccagaaagtttaagcttcacgttcacaaaatgtcaakgcagtgagaggtaaaaatgagccactctt

SEQ ID NO: 479282 - DNA, 607 bp, Homo sapiens
agtgtgtgtgagtgcatgcacacacacttgcatgtgagagcttctaatatctaaattaatgttgaatcattattcagaaacaaagagagctaactgttatcctgactttattctttatgaagaaaaatacagtgattccaagttaccaagttagtgctgctttatttataaatgaagtaacattttacaagttgtgcataagttaaaattcagaaataaaacttcatcctaaaactctgtgtgttgctttaaataatcagagcatctgcctacttaattttttttgtgtgggtgcacaatagatgtttaatgagatcctgtcatctgtctgcttttttattgtaaaacaggaggggttttaatcctggaggaacaactgatgtacctctgaaaaagagagggattagttattaattgaattgagggttgtcttgtcttagtagcttttattctctaggtactatttgattatgattgtgaaaatagaatttatccctcattaaatgtaaaatcaacaggagaatagcaaaaacttatgagatagatgaacattgtgtgagtggmatggtttaatttgtttggaagaagcacttgccccagaagatac

SEQ ID NO: 479283 - DNA, 558 bp, Homo sapiens
tctctagtagaaattaggagaaacgtaagaatcctatacatctgcgtatatttgaggagtctttagagttcactgaagttcatggatcggacgttatagccattttaatgtattttcattgtgacaggattgactttagaaggcttaagaattttgacgaagaaaaaaggggaaaaagaaggcataatagagagaaaggaaggaaagaagaaaagacaaaagtgtagccacaaaattgtcaacaataagaattgtataagaatacatattcttcaagaaatgaaaataattagaacacacattatgcctaaatacgttttaagaaatcaaataaacatgtagtttctaatggaagttcttccatgtattagtaaattcttcccacaaagcagtttatctatttattgtgaaagcgattgagttttgcagtaccaagggatcttttgcttttaaaccagttaattagtttttattagatgcaatgcagtgttttgaccagacttttctctgtgcttttgggtgkgtttccctattagcaggtaaaacatttatctcttg

SEQ ID NO: 479284 - DNA, 570 bp, Homo sapiens
gaatgtttaatattaagacatgtaaagtttgagatacctggaagtaattttagggkgaatgttaagtaagcatttgtttgttgggtctagagttctaaagggaggaatgtgttgaagagattaagctacagagtctttgacatacaattagtagttaaatccttggtaatggttgacatcaccaaggttaatactccactggtatgcaccagtacagccaaaatggtccttgacctttctatacccagttagtaaatagatcagactctaagtatgggtttgatagcagattagatacatttgaagaaagtgttagtgaaatagaaaataagtcagaagaaaatatccagaataaaaaaaaaagcagaaagacaaaaagataggaaatataaaagataggataggagatttagaggatatagtgagtaggtctaacataggcttaattggagccctaaacagagaagagagaattgggatagtattatctgaaaggataatgattgaggaatttctgcgactgatgcaaggcatcaatccacaggttgaaaaagagctccaaaccccaac

SEQ ID NO: 479285 - DNA, 580 bp, Homo sapiens
gtgaaacttcatctcaaaaaaaaaaaaaaaaccctatggtaaattttaaaatttaaaatagtactttagactgggcgcggtggctcactcctgtaatcccagcacttcaggaggctgaggcgggtggatcacctgaggtcaggagttcgagaccagtctggccaacatggcgaaaccctgtctctactaaaaatacaaaaattagccgggcatggtggcgggtgcctataatcccagctactcaggaggctgaggcaggagaatcgcttgaacccaagagatggaggttgcagtgaaccragataatgctgctgcactccagcctgggcaacagagcgagaccccatctcaaaaattaaaataaaataaaataaaataaaataaaataaaataaaataaaatagtactttagaacgctagttcaccatcttcttggtttgctggccctctgattaaaactgctttccgccccacaaatcctcgcttttcctgttctggtcccattacaataccatttccttgggggcattttggaaacgaggggcagtgtttttcgttgttgttgttgttattttgagac

SEQ ID NO: 479286 - DNA, 594 bp, Homo sapiens
ctcactatgttgcccaggctggtcttggactgctgggctcaagagatccttctgctttggctccctgagtagctgggattacaggcctggctccaattactcttgaaaaacagccctggccctcgttcccacctgtcccctttggattggagcctggtgctagaagcctgaccagacacaggcccaccagggagtgacaccgagcagtgatgccccytgcctggcctcagaagcatcagagtttgtcaccccgagggggctgctcctgggttagtaaaatttgggctccttggaaaagcagcatcaagtcacagaagtgtccagtcttcctgttctcttcagtccatgaacggtaaaggcaggattcctttagtggagctctagtgctctttgaaagcattaaaagggaccttgcttggatcctgatgtgaacataatcgtgggacaaaggcatcttgaagcaatcagggaaacttgaatgcgaatcgggtgttaggttatgttaaggaattgtgttccttctgtcattctgttagctgcagcaatgggagggtgccatgtgctcgtcagttagaaataaacacaaacactgaa

SEQ ID NO: 479287 - DNA, 352 bp, Homo sapiens
gtcagctccccgttcctcataaagcattgcctattagagatccacctccccctctccctctacttcatcaacaaagtggaggaaagcactgatctaggggtcactgaattcaggtgcagtcactgccagaaaaatagctggataatttkgaaaaggcctttcacccttctgagccttggtttcctcatctgtgtggtggagggtgggtcgggcatgatgctggaaattttaaatgatctcaacttatttaattctcatcccaatcctgtaagagtaggtattcttaccccatgttcaggtgaggaaaatgcggcacagagaggggaagtaacttgtcctggatcacttagcc

SEQ ID NO: 479288 - DNA, 466 bp, Homo sapiens
gaaacttatagtgtcactagaaaccacggacaactgcaaatcaataaaaattgatttcaaaagaatcaagctgccaggttggtgtgcctctaatttcagcactttgggaagttgaggcaggaggattgttggagcccaggagttcaacaccagcctgggcaacatagtgagacctcatctctattaaaaaagaaaaaaaagtaataattgaaaataaaagaatcaaactgttgtttatttttttttgagacagrgtcttgctctgtcatccaggctggagtgcagtggtgtgatctcggctcactgcaacctctgcctcccaggttcaagcgattcttgtgcctcagcctcctgagtagctgggactacaggcacccgccgccatgcctggctaatttttgtatttttagtacagacggggtttcgccatgttggccaggctggttttgaactcctgacctcaggt

SEQ ID NO: 479289 - DNA, 288 bp, Homo sapiens
gactttgcattcatacattttaggactgccactctcccagttaggaactgttaagaagacagttgagaagcttttgtttttaaatcctgaggaaagcagcaatgatcacaatgaaaacwtggagtgcctctgtgagccaggctttctcacacataccatctcacatagtttaagtgagagaatgcaaggtcttgaagagaaaatgggatttggttctaagggatgaggttgcgggtgggctaggaaacaactggaaatctcggaattagtgggggatggttctggttc

SEQ ID NO: 479290 - DNA, 288 bp, Homo sapiens
gactttgcattcatacattttaggactgccactctcccagttaggaactgttaagaagacagttgagaagcttttgtttttaaatcctgaggaaagcagcaatgatcacaatgaaaacttggagtgcctctrtgagccaggctttctcacacataccatctcacatagtttaagtgagagaatgcaaggtcttgaagagaaaatgggatttggttctaagggatgaggttgcgggtgggctaggaaacaactggaaatctcggaattagtgggggatggttctggttc

SEQ ID NO: 479291 - DNA, 288 bp, Homo sapiens
gactttgcattcatacattttaggactgccactctcccagttaggaactgttaagaagacagttgagaagcttttgtttttaaatcctgaggaaagcagcaatgatcacaatgaaaacttggagtgcctctgtgagccaggctttctcacacataccatctcacrtagtttaagtgagagaatgcaaggtcttgaagagaaaatgggatttggttctaagggatgaggttgcgggtgggctaggaaacaactggaaatctcggaattagtgggggatggttctggttc

SEQ ID NO: 479292 - DNA, 441 bp, Homo sapiens
agggttttttttctagcttgttttctagttcatgagttccttctgctgctgatctaatctaatgataaatccatccattcaattcttaatttcaactattatatttttcaattttagatttttttcttacctgccatgcctttttttaaagtttgcagttatctgacaaaattctcaatctttcctcctcttgtgcaatcacagttattaataaaagtttgaaatccacatagatttatttctattgtcagctgcgtttgctggctttcttgtcttcttccagagaggatttaatttttgcttgtgccgggttcctggcagcastaacaatctgtgatcactttaatctgatttcagagatggcagttattaaaaagaatgcttccattcctgggaggatcagtctgtttttagatcactcgtacacctaggtgtagcctt

SEQ ID NO: 479293 - DNA, 388 bp, Homo sapiens
catactgggtgaccttcctctgttcacgcactcatttgccagcctggccaagcagctctgtgaaagggatcgtccaggaggcattctgctcaccttgatggttgcccggccaagggactgggttgtaatttatggggagctccattcattgggaatacagccacattcacagttctttcattacgcaccttcccaaattataaaggcagtgttctaagttargcttttaatgcggttcactgtttccccatatctcaggttgatcatcttccagacataagtaagtcctcatggtggactgaagataagtagctgaatatacattttattatttatttatttatttatttatttatttatttatttatttatttttgagatagagtct

SEQ ID NO: 479294 - DNA, 638 bp, Homo sapiens
tgaatgcagccagcaaatggccctggagacacagggtgagctgagccaccccgccagcccagaaaatcacagaaatacaaaatcactattactcaaagccactaaatgtggggattgtttgtcaggaagcaataggcaactgaaacacattcccagcatcgcctgtaacagcccatgatttagcctctgcagctcactctatttgcaccaacattatgacaacctgttgcagatgccaacagcctccttctgatctaattcctttggaaaggaatgccggaagccaggatatcctatactgtagccaccttctggacaggcaagcatgaaaaaccaaccccatcattcatcactgtttgtgccagtttaagttcagtggcccctgttgtcacttcttgttttctgtgccctccatcatcgggtgcagatctgtggctgagctgctcagcctgcaagctgtgatgtcacgacctggtaggtcygtggtggccagcccaaagtcaacaacccacacaagtggccctttgacctgcagagctgtggaagccactccctggtggcattcatctatttaaagatgccagcatcgtgatcctgttttctgggacccttttctgctgacaaggctcgcactgggg

SEQ ID NO: 479295 - DNA, 636 bp, Homo sapiens
tagtcatccatgtcctgccaacatatccaaacttgacttcttccatgtcatgctcagatcactgtcctttccagcaatatcctattaaacacagagttccagttccagtaatgggagacaaggaattatcatcaacgttcttgatgaaaatatagctagataaaagtttaagggaacatccattcgaaggtatcactgagcttaagttgggaacaggccccccagaatctggccataaactggcyccaaaactggccataaacaaattctctgcagcactgtgacatgctcatgatggtcatgatgcccaggctggaaggttgtgggtttaccagaatgagggcaaggaacagctggcccgcccagggcagaaaaccacttaaaggtgttcttaaaccacgaacaatagcatgagtgatctgtgccttaagtacgtgctcctactgcagataactagccaaatccatccctttatttcatcccatccctttgtttcccatcaggaatacttttagttaatctataatctgtagaaacaatgcttatcaccagcttgctgctaataaatatgtgggtaaatctctgtttgaggctgtcagctctgaaggttgtgagatccctgatttcccacttcac

SEQ ID NO: 479296 - DNA, 636 bp, Homo sapiens
tagtcatccatgtcctgccaacatatccaaacttgacttcttccatgtcatgctcagatcactgtcctttccagcaatatcctattaaacacagagttccagttccagtaatgggagacaaggaattatcatcaacgttcttgatgaaaatatagctagataaaagtttaagggaacatccattcgaaggtatcactgagcttaagttgggaacaggccccccagaatctggccataaactggccccaaaactggccataaacaaawtctctgcagcactgtgacatgctcatgatggtcatgatgcccaggctggaaggttgtgggtttaccagaatgagggcaaggaacagctggcccgcccagggcagaaaaccacttaaaggtgttcttaaaccacgaacaatagcatgagtgatctgtgccttaagtacgtgctcctactgcagataactagccaaatccatccctttatttcatcccatccctttgtttcccatcaggaatacttttagttaatctataatctgtagaaacaatgcttatcaccagcttgctgctaataaatatgtgggtaaatctctgtttgaggctgtcagctctgaaggttgtgagatccctgatttcccacttcac

SEQ ID NO: 479297 - DNA, 655 bp, Homo sapiens
ctgtgggctgtggagctggaaggttgcatagactcaggtctgaggctattatctggtccttgatggatgaatggagaaagctttctgctaagagaatcaggaaagtggggacagatataagagaaaaccagagaggagaaagtttatggcccgtaagaaatgatgagaggtcctgggaagatgaattttccagttcctgagaccaggctgtgctgagcactctgcacttacactcttgagatgcccacattcttacatgatgacgctccaattcccaaccccttcccgaccggcttaggcaactctctcttctgtgcaggcaaagaagctgtgatgaaaacactgaacttcagcaggaagtgatctayatccttggtctacaaatgtttttgctcacatagttgcagaatttttaggaactatgtacccctacacattttcaagtcgatatctaaaatttttatcttaagtttaaatgtcatagcccatagaatctaatagtccattgattgcaagatatatttctttcacagtattatgaacagataagaaaaaataaatgcttaccatttttataagatacaccccaatttaacagatgttaaaatgaaaaatatgtcccttggaatcactgaaatgtgaacattaaggatat

SEQ ID NO: 479298 - DNA, 511 bp, Homo sapiens
ttggaaggcagaagtggagttcagctgacttcataggccttagctcagaatgatgggctggtaggagaacagcaaatgaggttctaggaggtgcacagctctgtgctgggtgctatgaaaaggcccaaagaaatgcaggttgtctgtgtttgcccccaaggagcctacaacrtgggcactttaaacattaagaggattaggtagagaggcagacccctactttcatctcccaatcccatcactgacatgtatgacattggggatggtacttaacttctttgaacttcagcgccttcatacatagaatggggttagcacatcttaaccgaaagtttctgcagggctcaatgagataaggtgagcaaaagagcttagtagagtttcctggcacagtccacatacgttgtgttggctcatgtctttgtggctgtgacaactcggcatcatacaaaagactgaattagaaatagttcccacatgatggccttattgtccaggcaggcagatataa

SEQ ID NO: 479299 - DNA, 511 bp, Homo sapiens
ttggaaggcagaagtggagttcagctgacttcataggccttagctcagaatgatgggctggtaggagaacagcaaatgaggttctaggaggtgcacagctctgtgctgggtgctatgaaaaggcccaaagaaatgcaggttgtctgtgtttgcccccaaggagcctacaacatgggcactttaaacattaagaggattaggtagagaggcagacccctactttcatctcccaatcccatcactgacatgtatgacattggggatggtacttaacttctttgaacttcagcgccttcatacatagaatggggttagcacatcttaacygaaagtttctgcagggctcaatgagataaggtgagcaaaagagcttagtagagtttcctggcacagtccacatacgttgtgttggctcatgtctttgtggctgtgacaactcggcatcatacaaaagactgaattagaaatagttcccacatgatggccttattgtccaggcaggcagatataa

SEQ ID NO: 479300 - DNA, 511 bp, Homo sapiens
ttggaaggcagaagtggagttcagctgacttcataggccttagctcagaatgatgggctggtaggagaacagcaaatgaggttctaggaggtgcacagctctgtgctgggtgctatgaaaaggcccaaagaaatgcaggttgtctgtgtttgcccccaaggagcctacaacatgggcactttaaacattaagaggattaggtagagaggcagacccctactttcatctcccaatcccatcactgacatgtatgacattggggatggtacttaacttctttgaacttcagcgccttcatacatagaatggggttagcacatcttaaccgaaagkttctgcagggctcaatgagataaggtgagcaaaagagcttagtagagtttcctggcacagtccacatacgttgtgttggctcatgtctttgtggctgtgacaactcggcatcatacaaaagactgaattagaaatagttcccacatgatggccttattgtccaggcaggcagatataa

SEQ ID NO: 479301 - DNA, 511 bp, Homo sapiens
ttggaaggcagaagtggagttcagctgacttcataggccttagctcagaatgatgggctggtaggagaacagcaaatgaggttctaggaggtgcacagctctgtgctgggtgctatgaaaaggcccaaagaaatgcaggttgtctgtgtttgcccccaaggagcctacaacatgggcactttaaacattaagaggattaggtagagaggcagacccctactttcatctcccaatcccatcactgacatgtatgacattggggatggtacttaacttctttgaacttcagcgccttcatacatagaatggggttagcacatcttaaccgaaagtttctgcagggctcaatgagataaggtgagcaaaagagcttagtagagtttcctggcacagtccacatacgttgtgttggctcaygtctttgtggctgtgacaactcggcatcatacaaaagactgaattagaaatagttcccacatgatggccttattgtccaggcaggcagatataa

SEQ ID NO: 479302 - DNA, 630 bp, Homo sapiens
ctggtcagtggtgaagccttagatggaaaaacgtgaagcagctatactctggaaccctctgtcttatgagctattctgtarcattttcccatcttactactggcaactcacctttcaactcatgtgctgtaaaattacagtcaacaaatgctgacataaacgacacaaaaggggagaaaaactgtgggttcttatttgtttgcttagttgaggggggcatggtaattgtagacagagggaaacaattcaggggatatacatactagaggagcacccactaggtttcaggcactgtgcagtgtttctcactcaccattgtctcactggatcctcagaaatactgtggaagcctattattttattaccttctttctgcagatgaagacgttgatgctcaaaagtcgctaatgagaagctgagccaagagtcagatccaaagtccttccagctctgaagcctgcattgtttccaacgcatgatgttgtctgaatggtgagcaatggaagacagaagatactaacatggtagaaattatcctgagtggggagatagaaggccctggggtgctgcgagtgtcctgggcaggcagcagggagcccctttagccctgactagcttggttgcatttct

SEQ ID NO: 479303 - DNA, 630 bp, Homo sapiens
ctggtcagtggtgaagccttagatggaaaaacgtgaagcagctatactctggaaccctctgtcttatgagctattctgtagcattttcccatcttactactggcaactcacctttcaactcatgtgctgtaaaattacagtcaacaaatgctgacataaaygacacaaaaggggagaaaaactgtgggttcttatttgtttgcttagttgaggggggcatggtaattgtagacagagggaaacaattcaggggatatacatactagaggagcacccactaggtttcaggcactgtgcagtgtttctcactcaccattgtctcactggatcctcagaaatactgtggaagcctattattttattaccttctttctgcagatgaagacgttgatgctcaaaagtcgctaatgagaagctgagccaagagtcagatccaaagtccttccagctctgaagcctgcattgtttccaacgcatgatgttgtctgaatggtgagcaatggaagacagaagatactaacatggtagaaattatcctgagtggggagatagaaggccctggggtgctgcgagtgtcctgggcaggcagcagggagcccctttagccctgactagcttggttgcatttct

SEQ ID NO: 479304 - DNA, 630 bp, Homo sapiens
ctggtcagtggtgaagccttagatggaaaaacgtgaagcagctatactctggaaccctctgtcttatgagctattctgtagcattttcccatcttactactggcaactcacctttcaactcatgtgctgtaaaattacagtcaacaaatgctgacataaacgacacaaaaggggagaaaaactgtgggttcttatttgtttgcttagttgaggggggcatggtaattgtagacagagggaaacaattcagggkatatacatactagaggagcacccactaggtttcaggcactgtgcagtgtttctcactcaccattgtctcactggatcctcagaaatactgtggaagcctattattttattaccttctttctgcagatgaagacgttgatgctcaaaagtcgctaatgagaagctgagccaagagtcagatccaaagtccttccagctctgaagcctgcattgtttccaacgcatgatgttgtctgaatggtgagcaatggaagacagaagatactaacatggtagaaattatcctgagtggggagatagaaggccctggggtgctgcgagtgtcctgggcaggcagcagggagcccctttagccctgactagcttggttgcatttct

SEQ ID NO: 479305 - DNA, 387 bp, Homo sapiens
cttcttcacccaggtgagaagctgaccctagtgtgaatagcgatgaccttgattgtggttacagggctctggaggggatcctcacatatgcagttgcctgacttcctatatatagtgcagtgttaagatcatgaactctgggatcaaattgacctgggttcaaattctgggtaagctgctagccgtgttatcttgggcaatatactctcaaagctgtacttcttcttttataaaatggaataaaatgaacacatatcttacaggaatattatggctggctactcaatttgtaggctccagggcaaaccgaaaatatggagtttttaattcaaaaagagaagaagrcagggtctggtggctcatgcctataatcccagcactttggga

SEQ ID NO: 479306 - DNA, 362 bp, Homo sapiens
ttacttttgccaataggagattcttttctgattaatcgttcacatgayagggaatttaatttgttcagttctttatcctcctccttttttttttgtttgcttgtttttaaatgtgtgtgtcacgagtcattgaaagttttcaattggttcattgtgagttaggtctacaatccctgatccaatgagctgtgtgggtggggtgtggatggaaaggaatgggtcaaaattagaccacctaaacagcaagggctttacatgggccagatttcctttgcctaaagtgtgatccaagcaggcaccacacacccgtcaatatagacagcatatatgggcattagagagtatttttagaaccataagct

SEQ ID NO: 479307 - DNA, 362 bp, Homo sapiens
ttacttttgccaataggagattcttttctgattaatcgttcacatgatagggaatttaatttgttcagttctttatcctcctccttttttttttgtttgcttgwttttaaatgtgtgtgtcacgagtcattgaaagttttcaattggttcattgtgagttaggtctacaatccctgatccaatgagctgtgtgggtggggtgtggatggaaaggaatgggtcaaaattagaccacctaaacagcaagggctttacatgggccagatttcctttgcctaaagtgtgatccaagcaggcaccacacacccgtcaatatagacagcatatatgggcattagagagtatttttagaaccataagct

SEQ ID NO: 479308 - DNA, 309 bp, Homo sapiens
cttcactgtatgccatggttggctgacagtaaggttaaartggaggtggctgaggacttctcccattaaaagttcaagttcttcctgatgttaaccacaagatgatgccgacatcaacgattactctttcaacgtaaataaaaacaaagcatagaatggaagattgtgtgtttattttatgtcacaaaaggaaggcaagcctggaaatgccaacctcccatcatattaattttaatgccagatgctccagcgttccctgatgtacaaagctgctggttgaagtgtgtttttatgttgttatatgaccac

SEQ ID NO: 479309 - DNA, 629 bp, Homo sapiens
atctggcgggagggggagggggaggggtcagggagaactggcaacttttaccaggagctcaagaatagtattataaagaagcatattgcctcagagaatttgcagcatataatgaaagaaaggaaactcaaaaggctaattctcattcctttagaaatgtttagagatgtatgtatgcttttaaggcttaatttttcttgacatgacaaacgagtctccatccttcaacaactgcattcatctttgtacaaatgtcctataagctaacaagacaatgtcctgctactttattatatcccccaattttaattttttccatcttaagattgcatgtgtcaaatgcaaaattctcaaccccagaagctggcaggaagagcaatgcatgcagaagaaatctrttatgcaagtcagtggctattctggctatccctgcagccagcatcatttaagtatctccaggtttacagcagggctctctgccaggaaaaatagctgttttatatgtctttctatcattatatcatcaggtagttaacatgtacatcatacgggtgaaagtgctctggaagtattggttaatcttggtcagtccacatgaacactttaaaattttcttcagttgaagtttt

SEQ ID NO: 479310 - DNA, 578 bp, Homo sapiens
gcaactgccccatctgaccactgactcaaatacgaactgcttgagacagacttcttttatgtagttctttgcagtgtccattgagacactataaccagccttgtaacaatatgttttctccttttggtgctaaaaaatraaaatattagaaagtagtctacacattaaagattgaaattcttaaactactgatgaagaaagggcaacgtgacagatgttagcagactgacccttcttacagaaaacctacagatttatttgttcattatacaaatatactacaaatataccctaaagggaatctccataagttcttttactagttttagctttgacagttgcttccacaactacctacaaagactggaagagttaaggtcatctgagtagaccagtggcataatgttacaaatgaggaaactgaggcccagtgcagtaaggccttgcaattaaatctgtagtgcccagtatcaccaagcagctctaaaaacaggaactgaagactgaatgagaaaaggcttatatgactactttaaatccaaacaacattgagtcatgaaaagttctatggagaaata

SEQ ID NO: 479311 - DNA, 578 bp, Homo sapiens
gcaactgccccatctgaccactgactcaaatacgaactgcttgagacagacttcttttatgtagttctttgcagtgtccattgagacactataaccagccttgtaacaatatgttttctccttttggtgctaaaaaatgaaaatattagaaagtagtctacacattaaagattgaaattcttaaactactgatgaagaaagggcaacgtgacwgatgttagcagactgacccttcttacagaaaacctacagatttatttgttcattatacaaatatactacaaatataccctaaagggaatctccataagttcttttactagttttagctttgacagttgcttccacaactacctacaaagactggaagagttaaggtcatctgagtagaccagtggcataatgttacaaatgaggaaactgaggcccagtgcagtaaggccttgcaattaaatctgtagtgcccagtatcaccaagcagctctaaaaacaggaactgaagactgaatgagaaaaggcttatatgactactttaaatccaaacaacattgagtcatgaaaagttctatggagaaata

SEQ ID NO: 479312 - DNA, 476 bp, Homo sapiens
tttccagggctttggctcccatttcctctgccaatttgaaacaagacattctccttttagtcatcaaaatatcaccttcattagttgaagcctgtataccataaatgtgaaacaggttttatacaattttgttggaatacagcagtttgacttttctttccttccttccttctttccttccttccttcctccctccctccctccctccctccctacattcttttcttttctttgacagggtcttgctctgtcacccaggctggagtgcagtggcrtgatcatggcccaaagcagcctcaacctacctgggctcaggtgatcctcccacctcatcctccctacgagcctgggactaaaggcatgtgccaccacacctgactaatttttgttattttttatagagacggagtttcaccatgttgcctgagaatcatgtgatcctcccagcaatttgaatggacacaaaactatgtttg

SEQ ID NO: 479313 - DNA, 520 bp, Homo sapiens
cacagtaggatctcagtaaacattgaaattaaatgactaattaatcatcaggagacttgcagggggcttgctttttggaatctaaattctgaatataattctcctcagacgagcataaacttggatgtacacataataaatgaggctatttgcattgagccaagaaaacagggtarcattctttagtggcattcccaaggaatgggaaactgattagaccaatcaccttcaattttctttggctcagactttgatgaccaaagttcattgtgacagtaaaatccttgggcaaaaattttgactgcagaactatccattcttataagggcagatgaaagaaaaacaatatgcactgtaaatttctcagtagagctaagattgtcttacaccagctaggtaggcaaatcttagcaagtaggcttcatttgttctcactttcataatttaaacttctgctgttgagcttataacataatactctaatccatgggcagaggcaatttcgtcttgtcatctggca

SEQ ID NO: 479314 - DNA, 564 bp, Homo sapiens
ccaccattactgtgggatattttggagtctgaggcataagagaatggacaaaaaggagaggaaaagacccagaggattcctgcattctctctaagctttgggagttcctcttcctgcagtttcagccacaactagaaggtacacctttctctttctgcaccacagtgctcctttccagatttgaggttgcattggattcaggctggggaagctgctgaagaaaaaagaaatgctgacttgctggtaatttgaattctggtattcttccccattcctcctttttcagagtccttaaagagttacgtcatctattttgttcaaggtttatagttgtgttcaattggagagaaagagtgacgtgtatttatcctatctcactcagaactggacttttattaagttttcagggttctttatatattctggagagaagtcctttttcacctacctaatttgcaaatattttccctagtctattgcttattttttattctcttaacagtgtyttttaaagaacagaagtgttaattttgatgtagtacaatttatcaattttttctttta

SEQ ID NO: 479315 - DNA, 603 bp, Homo sapiens
gaaatcagcaatggtactcttaaatactactgatggaagtgtgcactgtcatctcctttttggaaagcaaattagcgccaggcgcagtggctcacgcctataatcccaacactttgggaggttgaggcaggtggatcacttgaggtcaggagttcgagaccaccctggctagtatggcaaaaccccatctctatttaaaatacaaaaaaaatcagccaaacatggtggcgggcgcctgtagtcccagctacttgggaggctgagacaggaaaatcgcttsagcctgggaggcagaggctgcagtgagccaagattgtgccattgcactccagcctgggagacaaagcaagactccatctcaaaaaaaaaaaaaagaaagaaagaaagcaaattagcaatatgtgtcaaaagcttgaaaataatttgtagtcattaagaataatgttctaaaagaaaaaaacaacaggagaaacaatcatagtatattttaggtaaaaaagtttacaaaatgtcatgtgtggtatgatcccaaatttgtaatgacagtgtatacgtacatagatccatgcaaacatatacatacacacatataatgtttgtaca

SEQ ID NO: 479316 - DNA, 678 bp, Homo sapiens
  misc_feature (1)...(678): n = A,T,C or G
tggctctttgcattcacctgtctctctagatttcagggtggtgatttgtcctgcaacwtcatttctctaatgggtctgagaaaagtccctggttttccattttttcaggtttttttctttttgtaagaatgggagtgatgacttccaatctaaagaattttcagagctgaaattgaaagtccaaaacttatctttttaattagaaaaatttgaaaacaagattggacatagctgggtgataaactcataggggttctttataaaatttctacttttaggtatatttgaaattttctataataaaaaattatggttaagaatctgaaacagggtagctttaaacaatagggacagcagagaaaaaaaattcgtcagcaatatttgagtatctaatattgaccaggtactgtgccaagataatttggatataagaatgaacactactatctgctgccttcctggagctatcagcttttggggagagaatgacattaaataaataattatgacttacttacttaggctaaggcctacagcggaggcaaaaatggtgctgtgggagcagataacagaaactagagaatctaacctcgttgggagagttgggggaagacaactcaaagaccaccaggnggactgagcgtacagacaccggcatgctgtgcctattccagggac

SEQ ID NO: 479317 - DNA, 520 bp, Homo sapiens
taaatagggtatatttacctaatacaaataaccttcttttgttcttttgctagtaatcatttttatacataaataatctgcacatataaagaatatccactcaacattcataaattagaggtcgagtcatttctatggttttgtagtggctggtggaggaagggagggagtgtcttcacaatgtctccactgtactgtccagcaacaaggaagargcactgccggaagacagcaagggagcgaaagggagaaacagagagagagaagacagtgcttccttgatttcctgattatacattttgcccagggttccttgagttttaataataaaatcccttttgcttgtttccagaaagtttctatttcttacaatcaaaggatcccctatttcaaacacttagcaccctacccagtatttagtgagttctcttcatgtgcttgttgttttcttattgtgctaagggatttattgagattcatcgaaagtccttggagaatagaaaggaaagtaggaagaagg

SEQ ID NO: 479318 - DNA, 637 bp, Homo sapiens
tcaagcttttttttttcttataaaatatagattttaatatgagttttaaaataaaattaattagaaaaaggcaaattactcaatatataaaatgtattgcatttgtaataggtaggtatttcattttctagttatggtgggatattattcagactataattcccaatgaaaaaactttaaaaaatgctagtgattgcacatttaaaacaccttttaaaaagcattgagagcttataaaattttaataagtgatcaaaccaaatttgaagagaaaagaagaacccagagaggtaaggatataaccttaccagttgcaatttgccgatctctacaaatattaatatttattttgacagtttcagggtgaatgagaaagaaaccaaaaccgaagaytagcatatgttaagtcttcttaaggagccctcccttaaaagattgagatgaccaaatcttataccctcagcataaggtgaaccagacagacctaaagcagtggtagcttggatccactacttgggtttgtgtgactgcgtgactcaggtaatctcaaaaattgaacatttttttaaggtggtcctactcgtatgcccaggtgttagggagaagcaaatctgaatgctttataaaaataccctga

SEQ ID NO: 479319 - DNA, 667 bp, Homo sapiens
ctgatattttccctgtgacaatgttttgtgaattgtaactcagccacttaagtggctcctcataataaagccacatggtatccatgtacacatatttaacaaatcaaagaagtggttctcaacctaatctctagaggaggtccttcttgttcactttcaataactatgttgaagaatagattctaaaaagctatcaccaaattttcgaatatgttttgaaatttgtgtccacaaaatctataaatcaataaatgtatagaatagagcataataatccaattaacaaatttaagatgtcatctaagcaggaatgaatgcaataaataggccttcttacttcaaaatcaactgcagaggtaatgcattgccactagacttgtgtgctgtgttggtaataaattaacaaaaactttggggataagaaaaatctgcaaataaaatggtgtgtcatttgtgaaatataatcacaaaaatgttcagattgttataattaacagaaaaactattgyttttattatatccagtgtttaacagacactattcatgtatacatacaacattcttataataactcttgtgtccatgtaaatagcagtcttgccaaaaagaatagattatcatgtagtagtttgtaagtattttcatgcataggctgcaaccctttaga

SEQ ID NO: 479320 - DNA, 533 bp, Homo sapiens
gttcttcttcacgggattttctatgtgtcagagacacttgtcccccattctgttttcctgtgtaatctcaaaattgacaagggtcttcactgtatgtgaaaaggatgtctgtgttgcttgattttatgtgtgactactgtttgcgattgtccttttcccaatatgacatgtaattttacagcacagatagtttttcaaaagaattacattcccaggcttagcagagggagcggcctacttattgaaatgtgaaatcgaatctctgaaacagaaacaccaaattattayactaatctgtaaagtagctataaaacgttatttttcagagtgaagtatctgtcaagatggctagttttggtgtataatagaaacggtattttattccttttatttctgtaaacagattaagtctgtgtgtgtgtgtgtgtgtgtgtgtgtgtgtgtgtgtgtgtgtgtacatgggatataatacaaatctacctcgacttataatgagttacatcctgataaccacaggccaagatgtgttatga

SEQ ID NO: 479321 - DNA, 533 bp, Homo sapiens
gttcttcttcacgggattttctatgtgtcagagacacttgtcccccattctgttttcctgtgtaatctcaaaattgacaagggtcttcactgtatgtgaaaaggatgtctgtgttgcttgattttatgtgtgactactgtttgcgattgtccttttcccaatatgacatgtaattttacagcacagatagtttttcaaaagaattacattcccaggcttagcagagggagcggcctacttattgaaatgtgaaatcgaatctctgaaacagaaacaccaaattattatactaatctgtaaagtagctataaaacgttatttttcagagtgaagtatctgtcaagatggctagttttggtgtataawagaaacggtattttattccttttatttctgtaaacagattaagtctgtgtgtgtgtgtgtgtgtgtgtgtgtgtgtgtgtgtgtgtgtgtacatgggatataatacaaatctacctcgacttataatgagttacatcctgataaccacaggccaagatgtgttatga

SEQ ID NO: 479322 - DNA, 361 bp, Homo sapiens
ctcaattcacaaacttttgtgcgtttcttaattatttcctttctttttcttgtagagagcagtcatgatggcctgcactccacacaatgcaacagagtgaaagagcaggttctgcttctttggtgtagtcctgaagcttcctaagaaacttcacatcaggtgatggataggagcaaccctgtaaaaccagccttagactatttttcaaacagtaagtaataaaggtgacgttttgatctttatctgcttaattacttctgctatgattctattgattctamcattgaaggagcagtaaatttatatgtattatccaactataaaacaataaataaacgatatgtcaaatacattatcacat

SEQ ID NO: 479323 - DNA, 621 bp, Homo sapiens
ctagatgaagtcaagttttatctgatcttaattgaaataaatatagctggccttgaacaaatctactcatggtatgtggataggaattaaattgtaggggcattcacttgatggcattcattcttagaacatttacctatgtctagcttttggagtaaagtcacataacctctaaccaggtaagtttcctgtggctttatttaggattttaaatactcattttcagtgtaattttgttatgtgtggattaagatgactcttggtactaacatacattttctgattaaacctatctgaacatgagttgtttttatttcttaccctttccagagygatgattctgacatttgggatgatacagcactgataaaagcatatgataaagctgtggcttcatttaaggtatgaaatgcttgcttagtcgttttcttattttctcgttattcatttggaaaggaattgataacatacgataaagtgttaaagtacatgttattcagttttcattttgaagattagatggtagtatgagttagttaaatcaggtgatatcctcctttagaagttgatagcctatatatgtcatcctttgtggaggcaatttaaataaaatttaaaaca

SEQ ID NO: 479324 - DNA, 592 bp, Homo sapiens
cattcatcagcctctttctgtggcctcagctctcccagattgaggaggcccttaggtgaccttagttcctcctgggtggccctggtttctgggctctggaagcacctcttcctgctgctgttcctccagagggctctggtgttgctcatctctgtttgcctcactgctccctgcttgtctttgtagctcttgcaactttgtaactagttcacttcgttgatttatggggcatggactctggacttgttttcctgccgagatcctgctatcattcttgcctggcccttcctccctcatcctgccctgctctgccttgcccargatggaggcccgctgacctctaggccaggtccccattctgtggcttcgtggaagcctgtatgttagtggaaagaaagggtgaggccagagttcagtcttgtgaagggaaacacttgcccagggttatgcaccaggcaccagaggtctcagctttgataggcctccaggccccaggtgtggctgcagaagggtttgggtttagcaacatgcctgtgaaggggtccctgagatccttcctcagaactccagggcttccaggaacaaagctggg

SEQ ID NO: 479325 - DNA, 517 bp, Homo sapiens
tccacactggcaggggaaataaaactcaaactgaagagagtggatgtaatgttctcaagcgtaagtttttcttccataaatttttaattaaacctttggcacccattatgccttcatccctggaaagctctggcagatgccagaattgtagaaccattttcaacatgtgtgaatccagtgagacgattcacagctctgyggggcacagctgtggtcggaacttgaacagtttgtggtggcttaccaattgcattttcggatagtaagattgtgcctggtctgtgtgctggaatttggcacgtcagtgctttgctgcactgctcagagggacctggtgacaagtgtccaggccctggaataggtgaagacatcagtggcttggagccctgtttttcaattctcaaaagtctgtgttttcattttgataaaaatctgttaaaattcatacaatctcatcaagattatctgagtactcacctcgtaacttggatttacggcaccactgaagagacccttt

SEQ ID NO: 479326 - DNA, 611 bp, Homo sapiens
taacacacataaagcatttagcattatgatcagctycataattgctagtttttatttcataattaatattattaggtcagatgtggtggctcacacctgtaataccagcactttgggaggccgaggtgggaggatcacctgaggtcaggagttcaagaccagcctggccaacatagcaaaaccccatctctattaaaaatagaaaaattagccaggcgtggtggtgcacgcctgtaatctcagctactctagaggctgggcacgagaatcgctggtacccgggaggcagaggttgcagtgagccgagatcatgccagtgtactctagcctgggtgacagagcagactttgtctcaaaaaataaataaatagataatgtttattgctattatttgacatctcttgcatgccaggcaaaaaaaaaggtgaatactggtgcaaattggtgagcgtgttatgtgacagctggaaatcctagagctggtctagcctcacccctcatgctgcagatggggatactgaggcctagaaagaaatgaagagattgatgggagtctcatagggagggcatggctaggccaagcctggaactcagggctccttctgccgtgg

SEQ ID NO: 479327 - DNA, 549 bp, Homo sapiens
ctctggctattggtggacaggccggcctgaggctggcatgtggaagggaagattgctcttggcctaagctggtgccttgagtgttaagacattcttgggacctggtgtttggccaggactcgcactcaggcccatggggctgatgtcatcgagtgtgagtcctgacactaggcatggggtgatgagcgggaaggaaggtcttgagaagccaggcagccattgttgcctggcttatctggattaggcccttcgtgtggagggaagaaaggaatctgccttgtcacaactgggcaccaggctagaaacacagttggtgttcctggcaatccccggcactctccaaagcttatttgttgcttttccgagmcacgtccaggtgctctctgttatgataaccagtggtgacacagagttagcttgaaatgggataaacaaacagactaaaaataactggatttggggtggcttggcaccaaatctagcgtgcaggctgtcactgctcagccaaagggtgaatataggcatcaaaggcctcccacccctggagcc

SEQ ID NO: 479328 - DNA, 391 bp, Homo sapiens
gccaagagtgcctcaaggaggtggcatggcaagggcagtgaggagtccctggagtgtctggagcttatgggaagggtggaggatattgaacatctactacatgttgggcactgtgctgagcttttttcacaacagttatattatttaacttcatctgtgatgagtgaaatgctctattctgtgctgtacaatatggtagccaacagcatatatgtggctattgagcccttgcagtgggagtggtgtgactgaagaactaaatggtcaatcttatttagtttcaattagtattcatttaaatttaaatggctaaggtgactagatgctaccatatgagacrgcacagctcttacaggttacattgcccagggtcttaacttagcatgtgaca

SEQ ID NO: 479329 - DNA, 501 bp, Homo sapiens
cagggtatgtgcctcatcttcccaccctggcagcttgcctaggacccaccatcggtcctcataacatatcagtccaatgccggacagaaggtggaggctccatggcgttcttgggtttctagcttgggtgctaggatggatgactttgcagtgacagagttcctgctattcagtgaagaacaatgggcagagacatttggtgatatttaaactccaggcttcagcytaggctgaaagtgaaaaggaagctttctttagcttctcagttctctgtttagctgggacgactgattgatggcagtggttttaataactcagtaaaccagggctactccatgcaggatgaatttggttgagatgtaaatattttatatcagagtattaactgcttattaaaagtgtattgagatttatatgttatatggatataattatagacaccacagaggggtcatttgcttgttggaaacatctctaacagagctgttaatccggaaatgt

SEQ ID NO: 479330 - DNA, 548 bp, Homo sapiens
tgtcctgcaagtgcaggtgggtgagaagggcctcagaggtagagggcctggctggggccaggggaggaggattaggggaaccctggagtgcaggccccatggccgtccttccayggggtgctggactctgcagagatggtgatgtgggtcaccacggtaccatgtgtcttcccagtgaactcgaggaggaaggcacaatcaggaagcggggccgtttgctaaaggagctgagagctgggatcatcagggaagagtgtggggtttgcagtcaggcttcaccctgatctctgtaaccttgagcaggtcatgcctactcccctggtttccttttctttaggaggagataataatagcatctttgctgtatgattagagcactggttcactcacagggacatgtaaaatgtctagtacacagtaggtgctcagtaagtgtcaatagtgggagtcattgaggaaatgattaccacctgctgttttcggttgaaatgtggccttatggcccccatcctgctggcacccacagctctgggcagcctgctgtgcca

SEQ ID NO: 479331 - DNA, 245 bp, Homo sapiens
ccaaaagacccagcagaagtycgagggaaggtggagctcgaggcccacctagtcccctccatcttttagcaaagagtgacagcaggaactggggtcaggtgtggctctggatgactgtcctggcaagggggcccttcctgggggagcggggccttcttcccgaggtgagcttctgcgcgaccccagggagggagcatggctgagcaggtgggcctggtccagtgccctctctgcagcttatttac

SEQ ID NO: 479332 - DNA, 601 bp, Homo sapiens
tgcgtacaatgggccaccgctcgcggagtgcattgacagttctccattattcgagctggaggggctgtggggcaggcacgggaaaaccttttattctgctctttaaaatcatcgctcgtcactaagcggtcgccgactcccgacttgtaggctggagagaccaggaagcgcaaaacgtcccccaaacacgcagtgcttcccaaacccctccctggtgagacttaaagtgagaacgagtattaaaaaacaaaccctacctctgtcaatacagcgtggccatttacttccacctttacctgagggcgtgttggcgctaggaatgctcgagctgagacaaacttttacgccctcgcgagtcgaggggcgggcgggcgagcgyggctcccacccccggcggcggcagcggcggctttgtcactccgcgcggctccgcgcccgcctgagcctgcctaggggagcgatctcaaaacgaggggggtgcgagtatgcgattggagaatatgtaactaatagaagtatcattttcccccagtacgatctttcaaggaaaaaaaaatccattgaaagaattttcaaagtgctgtcttcgtttggagaaaag

SEQ ID NO: 479333 - DNA, 171 bp, Homo sapiens
ctttctgaacaatgcagtcctagaggcatcaggtgggctgagcaaggtaggcatccatgctggtggtaggggggcctctgctatgstttgagtgttatgtattctcccccaaattcatgtgttgtaacctaagatccagtgtgatagtactaagagttgaggcctttggaa

SEQ ID NO: 479334 - DNA, 637 bp, Homo sapiens
aaagtcaaaatgtgacctcagaactacctaagcccacacacattctttatcaggtaatgttttaataccttacagtagataacattaaatttaaaaataaaaatgaccagaagcattaatttgtaggtatcttggagaaacccttagagttgggaagagtgagaactctggatcccatcccattccacagatgagaaaactgaggcccagagagagaaagtgactcatacaagtttctatagctcttaaatgtcggatcagggtattaacaaaactctccaagaggcaggacccttggcactgaggaataggaaattcggtttcagatatatctggtttaaggtctgtctctgccaatttatttattaaggaatatttattgagcgattcctacgtgctggtcctagtgtgggtgctggaaactgaacaaaactgtaaagacccggcttcaatggaggtgacattctatttggggagaatgaatgagagatagagagagacattaaagtatataatttcaagtagtcatagaaatggtaaaaawaaataaataaataaataaagcaaagtcatacgacagagtgaagggtgaggcaactttgaaaaagcatgatccaggagggcctctgggaggggg

SEQ ID NO: 479335 - DNA, 656 bp, Homo sapiens
tttatattaagttcaaaaaagagtcaaaataaaactataggtacaatctaaggatccaacttctgaaatggggtcatgaggagttttacagatctggtcccctggtgaaaagtggctttctttttgtatgacaaaaccagttatataaaaaaagaaaacgacttaaagtctctgaaaattgtcctaagagcatgcagcaaataaatacatatttattcaagaaaatatatgaaatctgagtaaagactgtaagtttatgacacagcaaccattgcttgctccttcctccttccttcagctcatcacaacagaagctccacttcaggtaggggttacaaaggatatgggctcycttttcctccagcttcctgccagcattgctcatcagtgctacaactccatgtgacagaagacaaattccacatgggcattgttgagaggtcagatgctctcttcatccacctagcctccacttataggaaggaagccatacacctgatatgatagggtcagaatactggttgcctgtgccctagcttgattgtacagtgaaggtcaagagaggcaagcttagaagactgaaggctactgatcacactcaatgcccatccttttggtaatgcatgagtgccaatctgagagaagcagataactgt

SEQ ID NO: 479336 - DNA, 448 bp, Homo sapiens
ccatgtcaatgtgcactatggtattgctcaaatttcggctttgttctaattccattgcaaatctgtcaaccttaattttttaaaaaagttaacatacttttagacaacataatattgaaacaccattaaccacaacattaatcttaatttattaagtgtctatcagtctctgtccacacacccattcatccatccatccatccattcatccatccacccatccacttacttatgggtgtgtattttgttgktcatgggtgtttatgggtttatattttattattgtttataagtgtttatctatgtatattgtattgttttttaaattaaaattggtaatgcttttattttcatagagacagcctatcctcaaatataattccctactaaccctttcatctctccatacccttaggcacataacaggaacttaatatttaatgaatga

SEQ ID NO: 479337 - DNA, 662 bp, Homo sapiens
tggaggctctcaggagaatccacttccttgtctcttacaggtcttagaagcctcctatgttctttggctcacacccccttgctccattgtcaaaaccagcaacagttagctgaggccttctcacattgcatcactgacatcttcgtctgcctccctcttcctctttaaaggatccttatgattacattgggcccacctggtaatccaggagaatctcattttaagatcagccaattagcaaccttaattccatctgcaatttaaattctcctttgccatgtaacataacatattcacaggttccgggaattgsgatgtgaacatctctggggtggggaacctgaccctgcctaccacatcacccccttctttctctgaaatcacaatactactgggaggatacgtgagccagtaaatgtgtatggtaaccgtaactattattttatccattccacaaaaaatatattgagcacttattttgtgccaggcactattttagatagtggagggatatgttggtaaacaacactgacgagatctcagacattacatttcagtggtggtggacaatcaattgatccatagattggtagacttgtagatcagcagatcagtggacttaaattaaatctgctttttagattctagatgttgttagaaga

SEQ ID NO: 479338 - DNA, 625 bp, Homo sapiens
tgaggactctgtaaatggtatcaggtggattggggaaaaaatcagaactcaaagtaaggacaatcctgcagtgactttcctgatttttcttttccttccataccttccaacttggactcaaggcagtgcaaatcatggaactgtgccctgggcacagtcagaaagatttccaagagaagctctctcattctggtctaaagaggagaagggagctcctatagaacagagaaggtaggggaaattctctgcttcatttttctctactggccctgccccctcccccaagccaagccccactcccaaagctacaacttgacagtggtaggggtagcagcagtggctgggcaagcaccctaaactctgacataggggaatctttctctctgaccagaggaactgyggtcataaagcagcgtggagggagaatccaaatgttctcttgttaccctcccctacttggtcctggaggcagacctatttgtgggaagtacacagcagagcggggagaccacagccttggctttccagacagaggaccaggaaaagagggtgaggagctagaaaatgtaggggagctgatcatggagacgatggagcctgagaaagtgatggcataaagttgtgt

SEQ ID NO: 479339 - DNA, 625 bp, Homo sapiens
tgaggactctgtaaatggtatcaggtggattggggaaaaaatcagaactcaaagtaaggacaatcctgcagtgactttcctgatttttcttttccttccataccttccaacttggactcaaggcagtgcaaatcatggaactgtgccctgggcacagtcagaaagatttccaagagaagctctctcattctggtctaaagaggagaagggagctcctatagaacagagaaggtaggggaaattctctgcttcatttttctctactggccctgccccctcccccaagccaagccccactcccaaagctacaacttgacagtggtaggggtagcagcagtggctgggcaagcaccctaaactctgacataggggaatctttctctctgaccagaggaactgcggtcataaagcagcgtggagggagaatccaaatgttctcttgttaccctccccyacttggtcctggaggcagacctatttgtgggaagtacacagcagagcggggagaccacagccttggctttccagacagaggaccaggaaaagagggtgaggagctagaaaatgtaggggagctgatcatggagacgatggagcctgagaaagtgatggcataaagttgtgt

SEQ ID NO: 479340 - DNA, 598 bp, Homo sapiens
gctgcgggtggggctgccagccttgtgaaaggaaactgggtggagcaccacattgtctatgacactccacctaatgcggagttcaaatccgcttattccttttattaacttcacactgcccatgattccatgctcacaagccttaggaaaacataaaaggaggattggtggggaattttatgcaccactgtcacagatggccctgaggccatcactgaaaatgtttccctcctctatgacgggtgctaaattccttgtactcttaactagtgttttggctggtctgggtggattgcctggtggttgacccaactctcaaccttgatggatctgaaaccctggtgaccaaaccctgagcaggctctgatttcttatctatctattattgttaaaacagggcattggacactaagagatgcccaggtgrattacctgagggcggcgtcacttagcaggagtgctgcatggacctcatggcgatcagggtgacacggacttcataaattagctactgctgtgcctgctgattttctagcacaaggagccccaagtgatctgcaacagccattgcttcacattgagaaggattctttttatt

SEQ ID NO: 479341 - DNA, 598 bp, Homo sapiens
gctgcgggtggggctgccagccttgtgaaaggaaactgggtggagcaccacattgtctatgacactccacctaatgcggagttcaaatccgcttattccttttattaacttcacactgcccatgattccatgctcacaagccttaggaaaacataaaaggaggattggtggggaattttatgcaccactgtcacagatggccctgaggccatcactgaaaatgtttccctcctctatgacgggtgctaaattccttgtactcttaactagtgttttggctggtctgggtggattgcctggtggttgacccaactctcaaccttgatggatctgaaaccctggtgaccaaaccctgagcaggctctgatttcttatctatctattattgttaaaacagggcattggacactaagagatgcccaggtggattacctgagggcggcgtcacttagcaggagtgctgcatggacctcatggcgatcagggtgacacggacttcatraattagctactgctgtgcctgctgattttctagcacaaggagccccaagtgatctgcaacagccattgcttcacattgagaaggattctttttatt

SEQ ID NO: 479342 - DNA, 598 bp, Homo sapiens
gctgcgggtggggctgccagccttgtgaaaggaaactgggtggagcaccacattgtctatgacactccacctaatgcggagttcaaatccgcttattccttttattaacttcacactgcccatgattccatgctcacaagccttaggaaaacataaaaggaggattggtggggaattttatgcaccactgtcacagatggccctgaggccatcactgaaaatgtttccctcctctatgacgggtgctaaattccttgtactcttaactagtgttttggctggtctgggtggattgcctggtggttgacccaactctcaaccttgatggatctgaaaccctggtgaccaaaccctgagcaggctctgatttcttatctatctattattgttaaaacagggcattggacactaagagatgcccaggtggattacctgagggcggcgtcacttagcaggagtgctgcatggacctcatggcgatcagggtgacacggacttcataaattagctactgctgtgcctgctgattttctagcacraggagccccaagtgatctgcaacagccattgcttcacattgagaaggattctttttatt

SEQ ID NO: 479343 - DNA, 617 bp, Homo sapiens
ctgtaggcatcagtgtaaactggattgtgcactaggcacaaatggacacaagttatttctggatgtggatgatgaaataccatggtcctgctccctgctcagaacgttcagatgaaaccaacgcacactggaccaccgtgcctgcagcccaagttctggtgaggaatgttctgggggagtgaagagaaccatagaggagactggtgaaggttttgagatcattggtgggctctcatgggcaactttgttggggcgaggmtgctggcatgaggaggctggccgggcagggagaggacctgctgtgagtgcctcctccaggaggctactggccggggagtcccaggctccacctccaagactcacacatcttggagaccatgagcaaggctacagtggagcaggtgaccacatccaggcagcacactagccttttctgtctccaatcacctgctgggcttcctctgcctcttggcaaatcaaagacgccaacttaaatttacctcttcaaggagaagagcgggcagcctaactctctcccttctccttcgaggacataagggactctgagagtttccagtccagcgaggtcaggtgtgaggcaccagtgtagaagaaag

SEQ ID NO: 479344 - DNA, 325 bp, Homo sapiens
attcaacaaaaggaaacagcatggcacacyggtgaaggccaggtccctcccagtgtctgtcattatgtcagtgcattcactgagttcctattctgttctgtttctggagttcagttatttttaatgggatgaatatttactgcagggaaacttcattatcttaaattattttgtggaaagcccaggctgtattagcgaaatacagtctaaatataagactattataaaaaagattaagacaatgtctcagacttctctattccttccagtttccagagggtcactgcatacatatgtaattttcctatatccttcaaagaacacg

SEQ ID NO: 479345 - DNA, 586 bp, Homo sapiens
ctgctatggaaaacagtgtggcgattccttaaataactaaaagtagaactaccatttgatccagcaatccygcttcccagaggaaaacaagtcattattcaaaaaagacacttgcacacacatgtttatagcagcacaattcagcaaaaatcatggaaccatgattatatatattatgtatatatataccatgattatatatatattttatatatataccatgattacatattttatatatatatatgagatcaagctgccctttctatttttctatgcgcccacttatgtcttgaaggtctcattcttcaggagatcttgcagagccagtagacattgctgagcatctaacttgtcccaaggggctttcttgattctagagagaatagaacactatgatacgttctgaataacagtgggaagggcttgaaaaagggatttttaattttcagggaggaaagattatgttgtgtaaatataatatgtattttcttttggataatgcatttgctcatacacacacacacacacacacacacacacacacacacacacacaccatggaatactatgcagccttaaaaag

SEQ ID NO: 479346 - DNA, 545 bp, Homo sapiens
gaaatgcagtggtccatggaacccactttgaggagctggttgagaagctaataaaaacaaacaaacaaatgaagatctgctgactctctgtagcaggtgatctgttccttccatcatgtcaggctgtgagagtgcctgtaccccatctagtgcccagggctctctgccagctttcagacacccccatccctttgaccttgggcctcaatgttccaggcactctgggcaaaggaaaatgagctctggtaacaatatttaaggtgaggggcaccgcccttcaatacacrgggaaatgtacatcctcaacatgttcactaagaagttaaaggcatttttaatgggaaaatatttggctagataagagaatgaaaaatcactgtctttaaaaaaaaaaaacccaccttttaacttatccaaattccataaaaataaacactctatctacttgcaaataaaagataaggcatttaaaacaagacctgctatgccagataaagaagtatattataaatcaacaggaatttatattgtatggccttgggcca

SEQ ID NO: 479347 - DNA, 640 bp, Homo sapiens
cagcacagtgtaacagtaagcggagcagaagctaaggggcttgccttctagaaatacttgacttctagaaatgtgcaaggcgtgatgcaaagacggagactcttaggacacaacctcttactgtgtggccgtggccacataacctttgaaragggtctttattcacacgtcataaaatgagggcaacaagactttcccctgtgttgaggtcattgcatatataatgtatctggctgacaaattggttcccagtaagtaacagaagttaaaatatgaagacatagtcaaaatctcagtacttgttaatttctgtctcccccattgctgcagactgaactttcattgaaagtaggtccacgtggttaacaaaatggcctccttgttttttcaaattttttcttttaaaaaggctcacattgtgcccacttttaaaattaaccccagcacacagtaactggcatgctctttcttccagtgtggaaatgcactcctacgtggctagtgggtgtgcagatcagaattctgtgggctaatcgcttgcagcacacgcggttgtcccttaaggaattcttctccatttccttttgaacacacccgtggaagtcattctgggtgtggcctttggaagtcttgtgaagaa

SEQ ID NO: 479348 - DNA, 638 bp, Homo sapiens
gacagctgccttctctgtaggtcacccagagtctccgctcccaactcgccactgctctctcaatgtcttggggtgacttctgggttttctatgaagtgggggcctcccagaggcaacagcctcacactgcgacacgattttctttcctctgattcacccaggcatttttggtgggctgagtgttgagaatcaaaacatctacacccacattagtttactgtctacactaacgtccatttattcttccactgtcttaaccaacctgacattgctactgcagctaactcttgcccaggaagattaaacttatcaaacaacatttttgctaatttcagtgacttctccaaaattaacttaaatcaacattcagctagtcagtatacaataaagacattggatcttctctgttataccttaggagakgtacacacccctcccaaatgagtgtatcatgaacactaaccgatcctaaccaccctccccttttgaaaacctgccgtaaactagacaatgaaaacctcataaatgtccctcctttgtcccaccctttccaagatgaacctaagacaatccagatggtgttcccctgactttggtaaacaacaagctcatttttgctttatcaccagcctgctctg

SEQ ID NO: 479349 - DNA, 638 bp, Homo sapiens
gacagctgccttctctgtaggtcacccagagtctccgctcccaactcgccactgctctctcaatgtcttggggtgacttctgggttttctatgaagtgggggcctcccagaggcaacagcctcacactgcgacacgattttctttcctctgattcacccaggcatttttggtgggctgagtgttgagaatcaaaacatctacacccacattagtttactgtctacactaacgtccatttattcttccactgtcttaaccaacctgacattgctactgcagctaactcttgcccaggaagattaaacttatcaaacaacatttttgctaatttcagtgacttctccaaaattaacttaaatcaacattcagctagtcagtatacaataaagacattggatcttctctgttataccttaggagaggtacacacccctcccaaatgagtgtatcatgaacactaaccgatcctaaccaccctccccttttgaaaacctgcygtaaactagacaatgaaaacctcataaatgtccctcctttgtcccaccctttccaagatgaacctaagacaatccagatggtgttcccctgactttggtaaacaacaagctcatttttgctttatcaccagcctgctctg

SEQ ID NO: 479350 - DNA, 500 bp, Homo sapiens
atgtggacagtggctatttgtaagattatgctgggtcagtctcagtggtttagctggaattttctgttcttactgtcctcttctgtgtgataccttgttcctcagttgtgtccaaaacatgttaatagttataaataatgtctgaccatgcacacaaacatgggcttttcttgcagtattttttttctgtcaatattttctactttatttcaggaaagttctcttccagctcttttttagtgaggcatttcatgaaagtctcattttgatcctatatctcttttctcaatttttggaaaattctgataagattttctgaagatccaaactatgccaggctacagtgctttgcccttgtttcttaggatgtttaattaaggaaagatagtccccaaggcaggtttccagaattctgccttcacrtggtgttgtaaggaaatctatttctcctttgcacaataagagaagcttcccatgactgactataatccctataggaa

SEQ ID NO: 479351 - DNA, 520 bp, Homo sapiens
cagcataagcttcaggagaaaggagaggacatctccatggacaaagactgagcatagttggtgactcaagtctttggctctggaaaacagacacagttaggtagtctgggaccaggatttatcaattacttcacctgcataagaatagaaagaggtatctctgcatttttctctttaaatccmaaatatagttgcattttccaaagtttttcatatgacattaagtgttcttaacatgcagaaaaggactctgtaggcaaacaagtttgccaaactaaatgaaatagtcatttttatttaactgcaggatgccccagagactttaattgtggatctccaagatagtgatccagggagcaccacattctaaatgtttttgactaccatatttttattttttaacaggacattttgtgaggctccagaagttgagactagagttgctttttcaaaaaaaaaaaaaaaaaaccctcagatatatggtaacttttcaaacgttttatctacctgggagacaaag

SEQ ID NO: 479352 - DNA, 588 bp, Homo sapiens
ggggacgtgaccttttttagttcctcctcacccggtgttggcctccccagttacaatcacccccmaccctgtgcttgcatcccgtctttgcttgtgagacacacctgctgtttaaaggttaacccaacttttcaagcttctctaatatttgatggcttttgttgttttgcagcttgtgtgaacttttttggtatacttctttagtggctgtcaaactgcgccattcttccaactgaaaaacatctattttggagggcagcttcaacaatttaacaaagctatgccactttcactttattttgttataattatgtttcattccccccagaagttttcctactgattattggagttctgctaccctcctaaaccacttaaggatgaaattcagatcctcagtgcatttttatccctagttacttggagagaaggattaagtaaactacctaatacctctctgttttgacacagagaataggaggaagagaaaagacccattgtgtttgaacacattccttcacaaaaattcaagctcttagaggcggctcatttgtttcaccatttaacaaaattaaggaagtctgtgtt

SEQ ID NO: 479353 - DNA, 588 bp, Homo sapiens
ggggacgtgaccttttttagttcctcctcacccggtgttggcctccccagttacaatcaccccccaccctgtgcttgcatcccgtctttgcttgtgagacacacctgctgtttaaaggttaacccaacttttcaagcttctctaatatttgatggcttttgttgttttgcagcttgtgtgaacttttttggtatacttctttagtggctgtcaaactgcgccattcttccaactgaaaaacatctattttggagggcagcttcaacaatttaacaaagctatgccactttcactttattttgttataattatgtttcattccccccagaagttttcctactgattattggagttctgctaccctcctaaaccacttaaggatgaaattcagatccycagtgcatttttatccctagttacttggagagaaggattaagtaaactacctaatacctctctgttttgacacagagaataggaggaagagaaaagacccattgtgtttgaacacattccttcacaaaaattcaagctcttagaggcggctcatttgtttcaccatttaacaaaattaaggaagtctgtgtt

SEQ ID NO: 479354 - DNA, 644 bp, Homo sapiens
aaaatgtggtttcaatttcctacaaattgcacacaatttggttttaacaagaaaatagaaagaaagggtatgttctttaaagtgaattatgaactagagtttgttttcgctcgctcaacaccgcaaaaataataaagcacaaaatttagaaaagatgccttacaaaatggaaatcatgaactatagtaagaaagcagaaagtaatttttttttatctaaacatgatttaagcaatctaacaggataatataattgagctagtctttctccctctggtgaagcaagctagaaggaaaggawaccggagtagaagccgacaatcttaatacatgtataacaggaaatctgttaataagaaaaggctttgtgtatctccatcttactctctccacaactgtcagcaacaacaaaagaactattaaaagcaatcaattttgaaaccatttaaacatatacctagaaacacacaaaacacaagaatttataaaggaacttttagtggaacagaaattctagccctctgatgggttctggctataatcttagagttagaccacatgctttcttgattcaagtagtgtctgctacactagcataactaaaggcaggaaccccatgaagtgtctcgaccacaccaaaccacc

SEQ ID NO: 479355 - DNA, 601 bp, Homo sapiens
accaagtgcccctgaagctaagtgaggccccaaatgctcccatttaagactccctgttactgacccacagaatagtaagtgccctctgaacactgcctccctcccagcatccytccggtcaacatctccatcttgtcctagaaagaagcttcagttagaactgaacaagcattccctaaaggaccccccagtactaatctcaatgggaattatatccccgtttaatttaaatgccaccagaaattctggcttcccagagcattatggagcctcatatccatagacagatctgtaaattctctcgtcttacattacccaaacttctccctgacctccagccgtgtaatttgcagagcctagtgcaaaataaaaatgtacgtctcctaataaaaaaaaaattaagaatttcatgatggtatcagcaaaacattaaaaccagcatggggcccttctgagcacagggctctgtgtgactacgtaggttatacactctgaaagccagccatgctctctactcccaacccctttctttattgccttatggcctcaatttcttctctaaatgtttgaaagcattcttcttaatctaactaaaactcag

SEQ ID NO: 479356 - DNA, 601 bp, Homo sapiens
accaagtgcccctgaagctaagtgaggccccaaatgctcccatttaagactccctgttactgacccacagaatagtaagtgccctctgaacactgcctccctcccagcatccctccggtcaacatctccatcttgtcctagaaasaagcttcagttagaactgaacaagcattccctaaaggaccccccagtactaatctcaatgggaattatatccccgtttaatttaaatgccaccagaaattctggcttcccagagcattatggagcctcatatccatagacagatctgtaaattctctcgtcttacattacccaaacttctccctgacctccagccgtgtaatttgcagagcctagtgcaaaataaaaatgtacgtctcctaataaaaaaaaaattaagaatttcatgatggtatcagcaaaacattaaaaccagcatggggcccttctgagcacagggctctgtgtgactacgtaggttatacactctgaaagccagccatgctctctactcccaacccctttctttattgccttatggcctcaatttcttctctaaatgtttgaaagcattcttcttaatctaactaaaactcag

SEQ ID NO: 479357 - DNA, 650 bp, Homo sapiens
aaaacatctgaggcatacttggaggttgatgaatccaaaatatttacccatccctatttataacattgtgggggagcccttgatttatggtgacaactaaactgctcacatctgttgagtgggcaaccagcaaccagtgtgagcttcaaagataaccgtgttccttcttctgttctgactccaggcattcaagtcagmcccagatcaaagacactgaagcctttacttgagctggtctggtttgctcttgcttgagcttttctcacctaaaacaattgccagttatttcaagttatgtgatatccaatcatgcttgtgtcactgtgggatgatgccagcctccagcaataatccagatctgaccccttgtgggagcagccccaccacaaggaattctggattattttcccttcataaaaccacagctgttgtgcctgcacaagcccctgactttttcattgaaggaatgaatcacattttcatggagcaggagaaatgcttctccttgttggtatctctgcctatcctcaagactcttcactgatgcaaagcccaaatcttactttgcaagctaccaataatcctttggagtttatttaaacttggcagagactacattctgtgagaaaaaaaaattgcaatggcagcag

SEQ ID NO: 479358 - DNA, 505 bp, Homo sapiens
ttgcttgatattaggacacatactccaggttagatacataaggattttgcaatttttttccttgtcaagtatgctttttaaatgattaaaaatcattcatcccaatctttctcattgtacaagaatttttggacccattttaatgaaagttttttgtccaatatgttttcttgtaattgtgtaacagttgaagagcactttccatcaaaaaaaaaaaaataggtttagggccgggcgcggtggctcacgcctgtaaacccaccactttgggagaccaaggcaggtggatcgcttgagcacaggagtttgagaccagcctgggcaacatggtgaagccctatttctataaaaaatacaaaattagctgggtgtgatggggtgcagctgtagtctcagctacttgggaggctgaggcaggagaatagcttgaacccgggaagcagaggttgcggtgggatgatgaratcatatgagacaagatccagcctgggtgatagagtgaaac

SEQ ID NO: 479359 - DNA, 567 bp, Homo sapiens
atgctcccaactcaactgagtgggccatcactattgctaacattctgtaatccacaattgagtgtgtcaaacagacatgcgtagacatgctggagactctcccagtaaccccggaagrgcatgactattccttaccagcccaagctattattgagttctctggtcatctttgcaggtggtaaggacaagtacatcacaagcagcaacagtgcgaactttccccacaccaccctgtccatgtgcttctgtgcttatctggagggatcacctctagagttgaccaagctgcaccagtaggcaatgcaacaggcttattttcccatgactcatggcaacactggatacagtgcaggtttgaatgcatctgctccaactacttctcatgaactcaccattccaattgatttgattggctgaataatttcagacatcaaggcaccaaaatcaaggagatccctcagaagtctggggtgcagatcaaaatttgaacccagtggaaggatctactgataggcaggttacaatcgctggatctgctgccagcattagtctggttcaatatctaat

SEQ ID NO: 479360 - DNA, 567 bp, Homo sapiens
atgctcccaactcaactgagtgggccatcactattgctaacattctgtaatccacaattgagtgtgtcaaacagacatgcgtagacatgctggagactctcccagtaaccccggaagggcatgactattccttaccagcccaagctattattgagttctctggtcatctttgcaggtggtaaggacaagtacatcacaagcagcaacagtgcgaactttccccacaccaccctgtccatgtgcttctgtgcttatctggagggatcacctctagagttgaccaagctgcaccagtaggcaatgcaacaggcttattttcccatgactcatggcaacactggatacagtgcaggtttgaatgcatctgctccaactacttctcatgaactcaccattccaattgatttgattggctgaataatttcagacatyaaggcaccaaaatcaaggagatccctcagaagtctggggtgcagatcaaaatttgaacccagtggaaggatctactgataggcaggttacaatcgctggatctgctgccagcattagtctggttcaatatctaat

SEQ ID NO: 479361 - DNA, 620 bp, Homo sapiens
tcttacattcttccacatttttttccctcagtgtcacactgctgttgcttgataattgggacaagtataatggtgaagccagggattttcttagttcttctgctcatacctcagttttaggcaaatcctgtatgctaaaactccttttgtttctacctctgcctcaggaaaagttgatgttttcctgcatcctgggmgtcagagggtctcctgactcctctgcagtggcttagacttaagacatctcctttaaatgacaaacgcttccaggaagtacttgaagttggtgcttgagcaccaccaaatagtcctttctcaagtcttttgctttgctcccattttttcattgacacccaatggaatactatgaaaaagacctggagaaatgtatgtgggctacccatatgcctgaggtgcccagggattctacactgttatgttagcctacactcagttcttaagaatctgttaaaatttttgttgttttcttcttactcacttctatggtggcttctcctttcacccattctctgccaaatatgaaacagtttgtgtgaaccttctctgttggaaagtcttgtcaccctttggaaatcagctcatttggttgctttctaatc

SEQ ID NO: 479362 - DNA, 620 bp, Homo sapiens
tcttacattcttccacatttttttccctcagtgtcacactgctgttgcttgataattgggacaagtataatggtgaagccagggattttcttagttcttctgctcatacctcagttttaggcaaatcctgtatgctaaaactccttttgtttctacctctgcctcaggaaaagttgatgttttcctgcatcctgggcgtcagagggtctcctgactcctctgcagtggcttagacttaagacatctcctttaaatgacaaacgcttccaggaagtacttgaagttggtgcttgagcaccaccaaatagtcctttctcaagtcttttgctttgctcccaytttttcattgacacccaatggaatactatgaaaaagacctggagaaatgtatgtgggctacccatatgcctgaggtgcccagggattctacactgttatgttagcctacactcagttcttaagaatctgttaaaatttttgttgttttcttcttactcacttctatggtggcttctcctttcacccattctctgccaaatatgaaacagtttgtgtgaaccttctctgttggaaagtcttgtcaccctttggaaatcagctcatttggttgctttctaatc

SEQ ID NO: 479363 - DNA, 620 bp, Homo sapiens
tcttacattcttccacatttttttccctcagtgtcacactgctgttgcttgataattgggacaagtataatggtgaagccagggattttcttagttcttctgctcatacctcagttttaggcaaatcctgtatgctaaaactccttttgtttctacctctgcctcaggaaaagttgatgttttcctgcatcctgggcgtcagagggtctcctgactcctctgcagtggcttagacttaagacatctcctttaaatgacaaacgcttccaggaagtacttgaagttggtgcttgagcaccaccaaatagtcctttctcaagtcttttgctttgctcccattttttcattgacacccaatggaatactatgaaaaagacctggagaaatgtatgtggrctacccatatgcctgaggtgcccagggattctacactgttatgttagcctacactcagttcttaagaatctgttaaaatttttgttgttttcttcttactcacttctatggtggcttctcctttcacccattctctgccaaatatgaaacagtttgtgtgaaccttctctgttggaaagtcttgtcaccctttggaaatcagctcatttggttgctttctaatc

SEQ ID NO: 479364 - DNA, 500 bp, Homo sapiens
aacaactgaagttattctaactgatatagtccttttacacaaaacttaagacaaaaaaacatagtagagtaaattgtatccaggtgtagagtatccaggtgtaggcagagaagtatttacataagagktgaagctaaggaaggcaggttagaattagactacaagagtcctaattccaattttagacatttgacttgtattgtatagacagaagggacaggtattgaggatttggagcaagaagtctgaaatgatgaaatcagtgtcttgccaacattgatcttgattttgtggcaatatatacaatttgttggtgggggggaagcagtctaaaaatagggacacgaactgggagaacaagtgtgaagcaatgaagattagaatgacaattgcaatgaaaaggaaaggattaggcaaaagaagttgaaaatcaattgatagacttaatgactggttaaatacagggaatgaaaagaagaggatgagataatgattgctct

SEQ ID NO: 479365 - DNA, 534 bp, Homo sapiens
tgtcaacaatgatgatctgcctgtcttatgatcaatttttatttcagaagttacagaatgcatacatgtcattatcataaaatctagtaaaatatcaaattcccacatatctctcttcctcaaaactgtacctttccccaggatggttcaccattctactgacttttcctaattctgctgaagcttgtcaagagtmctcttattaactactgctcacttcccagctttgggtacaccatcgggtcccttctgggccctttcagatactctgtcttcatctttcctctttctctttgaaatgtgtatatacttgttctttttttaattgggtgatatatttagctactgttccattaaagggccatatatgcaaagctgccccccaaacacaaaaggattcaagaaaccagagaaggaggcaaacaagtccagcttgtcattatagggcgattttactgggaaacttatggacaccgttgcttccagactcaggaattatatactgtagggaaagggagtacctgcttaatttaa

SEQ ID NO: 479366 - DNA, 641 bp, Homo sapiens
aacaatgatgatctgcctgtcttatgatcaatttttatttcagaagttacagaatgcatacatgtcattatcataaaatctagtaaaatatcaaattcccacatatctctcttcctcaaaactgtacctttccccaggatggttcaccattctactgacttttcctaattctgctgaagcttgtcaagagtactcttattaactwctgctcacttcccagctttgggtacaccatcgggtcccttctgggccctttcagatactctgtcttcatctttcctctttctctttgaaatgtgtatatacttgttctttttttaattgggtgatatatttagctactgttccattaaagggccatatatgcaaagctgccccccaaacacaaaaggattcaagaaaccagagaaggaggcaaacaagtccagcttgtcattatagggcgattttactgggaaacttatggacaccgttgcttccagactcaggaattatatactgtagggaaagggagtacctgcttaatttaacctaagggcagaaacataagttaagtatgagtttatcaaggttgatttgatctaaaggcaggatttacagggaacaatagcgaaactggaaatcttagagattcccagaac

SEQ ID NO: 479367 - DNA, 636 bp, Homo sapiens
actatattcctggacaagggcccacgctggccttagtttctgtccgtggagacagatgggatgattctcttcttccagacatggaggaaataggagagccttgctgagaactgagactcagcccaaagtggccacggaagcaatgacgaatttgtggtatcatggggttgtgggtttagatttccacagatgcccagacatgagggccacctgatgatgtgtgtgagcttggtagccagtgcctagcatttccttaggagggaacattctcgaacacacagctctttctctccatcacaaatcaaaaggggacagaaataaacaacaatagcaacagcaggcccagcccaaacaatggactttggcgagtaaaatgccctgtaagactctcagtcccttggtccataaaataaagaccacacctgccctgccagctttgtagagctgcaggtaagtaggctgcacatgagatccacgtgggatgggaaagcagtgccaatactacatggtaccgtgcacatggaaatrttgggatattaaaaagaattttagtcacaattcacaataaagcctgtaagatacacttgcatttcacaaatgagagaaaggaactaacaattatgtggcaggcattca

SEQ ID NO: 479368 - DNA, 594 bp, Homo sapiens
tgaacatttgggttagctgcatgattttaaacacacactgctcatgctttacaagtatcacacctaatatttatttcaactttacaagcatcatatyttatgttattgcagacaagtgaatttagctttctggaaaatatgcacacatactgtgctatggcttactttagaataatcattaatcattctatctgtgtttgttgccatctttttctcaaaggaggagggaaaaatatttgcatgtatggagagtgttagagggacctgtgaaactataaaggagaactcaccaagggtctagggaaatagaacaccccaaaatgtttcaggatcctatgcagggactagagttcccatgtgagcacacgacactggagctagcggagtccagggtaagaatgaatgcagtgtccccccacaggctgtaattcagatgacaaaaaaggaagctctaatgtgctttgggaggaaaaaggagggaagggagagcaaggactgccatgctgaggagacagcttcaataaagcacagaaggcagccaggagaacacagagggcaagcattttagggagaaggatgagcacgtacagcagc

SEQ ID NO: 479369 - DNA, 464 bp, Homo sapiens
gattcttcctataggaggtcctagtgtaggcaagttcatgtagacagaaagcagaatggtgrttgccagggcctggagagtgaagaaaaaggggagttagtgtttaatgggtaccgagtttcagttggggaagatgaagaaattctggagctggatggtggtgatggctgcagaacaacgtaaagatacttaatgaccccaagctataaacttaaaaaggttaagatggtaagttctacgttatgtctgtgttatttatgttttactataatagaaagagagacagtagagtggttgaggagagcagggaattggaattgcttgcactggggtggagttcatgcttggctgctcattgcaatcacatgggaagtttgaaaactcttaatgcccaggcggcaccccagaccaattccatcagcatctgtgattcataagcttctgggtgattccagtggacagct

SEQ ID NO: 479370 - DNA, 464 bp, Homo sapiens
gattcttcctataggaggtcctagtgtaggcaagttcatgtagacagaaagcagaatggtggttgccagggyctggagagtgaagaaaaaggggagttagtgtttaatgggtaccgagtttcagttggggaagatgaagaaattctggagctggatggtggtgatggctgcagaacaacgtaaagatacttaatgaccccaagctataaacttaaaaaggttaagatggtaagttctacgttatgtctgtgttatttatgttttactataatagaaagagagacagtagagtggttgaggagagcagggaattggaattgcttgcactggggtggagttcatgcttggctgctcattgcaatcacatgggaagtttgaaaactcttaatgcccaggcggcaccccagaccaattccatcagcatctgtgattcataagcttctgggtgattccagtggacagct

SEQ ID NO: 479371 - DNA, 464 bp, Homo sapiens
gattcttcctataggaggtcctagtgtaggcaagttcatgtagacagaaagcagaatggtggttgccagggcctggagagtgaagaaaaaggggagttagtgtttaatgggtaccgagtttcagttggggaagatgaaraaattctggagctggatggtggtgatggctgcagaacaacgtaaagatacttaatgaccccaagctataaacttaaaaaggttaagatggtaagttctacgttatgtctgtgttatttatgttttactataatagaaagagagacagtagagtggttgaggagagcagggaattggaattgcttgcactggggtggagttcatgcttggctgctcattgcaatcacatgggaagtttgaaaactcttaatgcccaggcggcaccccagaccaattccatcagcatctgtgattcataagcttctgggtgattccagtggacagct

SEQ ID NO: 479372 - DNA, 464 bp, Homo sapiens
gattcttcctataggaggtcctagtgtaggcaagttcatgtagacagaaagcagaatggtggttgccagggcctggagagtgaagaaaaaggggagttagtgtttaatgggtaccgagtttcagttggggaagatgaagaaattctggagctggatggtggtgatggctgcagaacaacgtaaagatacttaatgaccccaagctataaacttaaaaaggttaagatggtaagttctacgttatgtctgtgttatttatgttttactataatagaaagagagacagtagagtggttgrggagagcagggaattggaattgcttgcactggggtggagttcatgcttggctgctcattgcaatcacatgggaagtttgaaaactcttaatgcccaggcggcaccccagaccaattccatcagcatctgtgattcataagcttctgggtgattccagtggacagct

SEQ ID NO: 479373 - DNA, 541 bp, Homo sapiens
ctatgcaagaacatattgtgtcaccctctcaggaaacagacggggggctgagagagagggcaggagaatgcttcagaatcagagggcaggggacagcaaatgggggtgggcaggttccaggaagggtgcagagctctgggaggccccgccaggaggctgagcttgtgcaggtttctccccagctctgggccttagcgtcctcatctgtggaatgggcgtggcagcgtttcgactttgtggggctttttgagggtgaaatgaggaaatgcgcacraaggacatcttccagctgggtgtaagcttcggtgcagagcagcggcacactcttccctctgtgtgtgaggaggcccgggggcggggacaggaggctggggttcgcagcacccatgggaacagccagccggggttgagatcccaactctgctgattgccatgttgcctcagcggagggttccttgggtgtacagaggactcgaagcacaggcgccccagaccaggagaaacacgggagggcgggcccccctcaaaagggggccatgcc

SEQ ID NO: 479374 - DNA, 549 bp, Homo sapiens
tggcgacgaatgccggcaaggtaagagacgatactttacatgccagagctcacacaaaagggtcttctgccctgtcccaggtcattcatctgaagggattgccagggtgctggggcagtgttgtcctctgatcctctgaggataaagccttgattgacattgactagtgggtttgagtccagttgctcaggatgtagattggagacctgtggattgtttttcgttgttgtttttttggctgagcacaggggactttattgatggtacatgacaaggtggggcgccctaggcccctccctcttcagggtgtctgcatggaaactgtgaggaggggtgattcttagttagtgtggtgggggactgagtgtggcagggactccccagcagtgagggtctctctcttcctctggtgctctcgctggggctggtggtcagggkgtcttactccttggcggccatgtgggccctgaggttcaccaccctgttgctgtagccaaatgcattgtcataccaggaaacgagcttgacaaagtggccatcgagggcagt

SEQ ID NO: 479375 - DNA, 628 bp, Homo sapiens
ctgcgtgaagtactgtgctgttactatcaccctcgttttacggatgaggactctgaagcttagatggatcttcgggggaatgagcggtggagcaagggttccaaccctgggatcaccccagactccaagcttttaaccacaactagcacaggtcccagcggcaggaagtgcagtcaggtttgtccctagggagcctgttcttctccctgttaactctcaccccgccatcttcttgcaggcagcatggagatttttcacccttggaaggtggaatgacacgacccacagctaaggtttgaaaggccacgcagagcactgtgtrgattcagggtcatccactgattctaggtccacttgagccagttctcattcatttctagattttaatctagaatattagagtggaaataaaacccatcctttgtcatccctcaagctccttccattgtcctcctgaggagatgcaaccctagggatgagtgaggaattgctgggtgtccagggagggctggagagaaagtgctttgaacacactgtggcagatgtcatggttccatctccatgctaccagccgggctgacagtggccagcttcttgcagaagtgccagctttactatttctcactgc

SEQ ID NO: 479376 - DNA, 628 bp, Homo sapiens
ctgcgtgaagtactgtgctgttactatcaccctcgttttacggatgaggactctgaagcttagatggatcttcgggggaatgagcggtggagcaagggttccaaccctgggatcaccccagactccaagcttttaaccacaactagcacaggtcccagcggcaggaagtgcagtcaggtttgtccctagggagcctgttcttctccctgttaactctcaccccgccatcttcttgcaggcagcatggagatttttcacccttggaaggtggaatgacacgacccacagctaaggtttgaaaggccacgcagagcactgtgtagattcagggtcatccactgattctaggtccacttgagccagttctcattcatttctagattttaatctagaatattagagtggaaataaaacccatcctttgtcatccctcaagctccttccattgtcctcctgaggagatgcaaccctagggatgagtgagraattgctgggtgtccagggagggctggagagaaagtgctttgaacacactgtggcagatgtcatggttccatctccatgctaccagccgggctgacagtggccagcttcttgcagaagtgccagctttactatttctcactgc

SEQ ID NO: 479377 - DNA, 649 bp, Homo sapiens
tgtcatatgcaggcaatatagtattccatgaagtacagaggtgttttgttccatgtatttccttttcttcttgtttttaattaaggaaagtatttcctgaaaattctccagcagactaccgtcagatctcattgaccgcatttggttccatatccatgactaagtcaatccctattatggacaatgagaccactataattggcatggatttgtcatgattcattccttctgggagtggtccagggccccttttctgagtacacgtctgtatggcaagtgattacccaaacaaaattgggactttgtcatcaaggaagaagaggaggatagaattagaatctatttcagtgaccttaaaccagtatatctcctccttggactctagtttcccattggtaagctaaggatattggacatgatgtcttctatcacagggattattttcacagagtccatggatcttgtcccctgaagggatgaagtccaaatttccttacagggtcttgggtggggaaagccattgtctatgctgtagggtgccactggcttaggttatcaaaaatcctatttcagcagcttcctgacaagccgacccattatgggtttcagttaccataaaacttcrcatcttggattttatatgcccaga

SEQ ID NO: 479378 - DNA, 566 bp, Homo sapiens
ctcaaagagaatctcctttccagcccttccaagagctgacaggttgataaaacgtttaagggcataatgttcaaacagagaaaaaaattaaaaatgtaataataaagttaaatgtaactgttttaaagcataattattccgagagacgagttttatgttggaccagcatttgaggtagcagtagtcattattaacgggaacctccgagagagaagatttaaatcaccaaagtaataaaagctgaacaaggactagcaccttgaaaggcacttggagagaagattgcatacaaatgcaattaaaacgatgcttataaaatactaagatgttaattgggttcagtcccagaagccccagcagtacagtatgtcagaagttagctggtttgaagtttaaaaagagtagtttaatttgtacaccttgtcctaattacagagctttctgcagcccgcktatctgtatggtttattgtagcttggagctttgtaaaacaaacacacacaccagttaattgggttattgcgatggaaaattgggctacagaacagcaacctctcttgctggtg

SEQ ID NO: 479379 - DNA, 552 bp, Homo sapiens
ttcattcattcattttaccaacaaatatttactgggcaactactatattccaggtgacagggtaaacaagacagttctctttgaactcagaatctagtgtgtatgagaaaatgggcagagaaatggataataaatgcataaacaaatgaattagtaccgtcattggttgatgatgagtgctgtgaaggcaagaagacaaagtcatggaatagaaaagcttgtcagagaacacagtcacattgggtgctcaaagagcctccctgtagatctgacaagtgaggataagccagtgtattgaaagataggaggaaaggcatgtccgtcrtggaaaaaatgtaattgaagctgcacatcacattctctctcagatgagggcagcttctaaaaataggaagaaagcaaagtccagaaaaaaatatattgcagagagaaggaagggtataatcacagggaaggcacaaatagggaaagactttgaaaaagataggtagggaacagaggtaagaggccagacctgattggaattataccttggaatagttagaatccttt

SEQ ID NO: 479380 - DNA, 505 bp, Homo sapiens
aattacttggtaagttgaaatgaatgactgccttactcaatagccaaggctagcggagcagtttagctagtgaggcagagagaattaatcaaagggattgggtcagttgattacrtatctccctggaacctatccttaacgtgccaaatattgagctgacaggacacctggtcttattgtcaacgtcactgtttaggtgtggacttcaatttctccatttatggtgtgataaagcagcatgatggagtggttaagagcacagtttctggagtgagactggcttgcattacttggaagttatttagtcttcccatatctcagttttatcttctgtaaaacagagaaaagaatagtaccttcctcacggggttgctgtgaggattatgtgtgtgtgtgtgtgtgtgtgcacgcgtgcacacatgcacttgtaagttgttataaatcggtgtgaacttttttcctttaagttaagctattggagcaaatagaaaatataataagactc

SEQ ID NO: 479381 - DNA, 567 bp, Homo sapiens
gctggtgtactgtggaatggtggcattctgtgttcagtgtggaactttatgtgtcagtttgtggtaaaascccaaggcatccatcaaaaaatgtttaacaatccactgcttctggagaccagatagttttccagaggattaatacctcaaacatcttaaattggtgacttccattatttagagatgcagatcttattttttagttgttgactttcaaaggcatattctttctctctttggataaattcttcaataacaaaaaagacttacatgtatggaaggcttatggaaggcttacacataatctttaaagagttgggcatttagaaacatgatcatttgcatttttcttctttgaaagtttaacccctaaattattgccctttagagagaaaagctttggaatttatcatttttttctcttttccttgaaaactggaacactcttctttttagcatatagcatctaaggtaatgaggaacacaccagtacattaaagcaaatgtgtgtcaaatccccagggaaaacatatgtcatgcatgcaatatttcctgcagacatctgaa

SEQ ID NO: 479382 - DNA, 627 bp, Homo sapiens
gctgggtgggtttgtcagcagagaacagggccaccagggcaggcacayagaactaactgcactcactgcactgttgttaactattctttgaatccctccacatgacgccattcctacagatggaaggtcagctacactggagaagttccagaaattcataaatagattatgatcccaaatcccagagaggaggacttttccagatggcaactgggaatttaccttaatgatttccccatcccagaagggaaagctgttctggtatattacaaacattacagcacatctgaataacccagacagcttgtttaaatgcacatttttgggcctctaccaggctggttaaacaaagcttcaacagagtggggataggaaccaaccattttaaataacccccttggtaattctggttcaaccatagcaatcaaattatagtccaacctaggtaggggcttgctacctaggagtcaatatgtaatactggaaagagtaagagtttggaaactaaacagaaatagggtccaatcctgggtcgtccacataatagctgtgggaccttgggcaagttacttcatttttttggatctcaacttcctcttctataaagggggggctatacctgtcagg

SEQ ID NO: 479383 - DNA, 614 bp, Homo sapiens
aactcagcaacctacctcatacttacgactttatcatctgyaaccacctccaaacactttgctctcttaccacaatctcctcttcctcctgtttaccactcgccatttactttcaaacagcttcaatggggcatcctggttaaaggtgctggctctagagccagacaacatgaatgtgaatcccatcttctccactgatgagttatgtgatttaaataagttacttttctactcagtgactcatttttaatagaatctcctttaaagtctcctctaaaggataaaacgaattaatacatttaaaatgcatacactaggacctgggccattgttagcactcaaccaagataagctgttattgcttattcaactatttccattcttccttttctttgaccccaataagactatctattgacctggctactctccaccagctcttcacttctcttcactgtcttctgtactcagcttagatttcctaatccatcatttcaataacatgcatgctgatactcaacatgttcctcaactctgtttttcattccatctttttggcaaaatcccaggcatgggtgaatccaactatgcaagttttctggatcagtcctaaa

SEQ ID NO: 479384 - DNA, 593 bp, Homo sapiens
aaaggcagccttgaaagaaaggtttgcatagaaataggaacagaaatagcagggatagtcccacttcattttcttggtgaaaaggagataattaaatctgattgtaggtcatctctgtcaggcagtcagaataatcctctaatcccctgatctaggtgttttctgagtgcagtagttatcaacacatcctaaataaattaaaaggtctgtttcaaataaaaattcctctgtcaagagaataaattctaaatatacttctctttaatttatgaattccaggtggaattaaagagtcataccttataagggaaatttttcctatgtttactaaagtgggcactcattttgyttctttagaacacttttttattacacatctcttgatgaataaaataatgcaataacaggggcttcattttcagtaaagctgagaagtcaaactatatttcataaagcctgaaaacataatttatgttttccatttaatacccaagtctgcaaatgttgaccactagaaacacaggaaacacaggattccttattatagtttttgtaattctaataccaaaggtacaaccaaataaaggtctcaa

SEQ ID NO: 479385 - DNA, 304 bp, Homo sapiens
ataaaaaggtgaatataattggagtagatatactctactccagttggaaatgagtaagaagccaaggtcctggaggttgacatgaaataaagrtaagttcaggggaagcggagtcatggcacaggcagaaaaataaaaggccaggagaatttcatatgttaaaacttgtttaaagttattttgggatgaaaataacttgtaaggtgtagccaagtatgtggattgctaacatggagaggaggcaatgaccattaaaatagagaaggtcacaaaaagtgagacgattgggtatcaagtgtaccag

SEQ ID NO: 479386 - DNA, 517 bp, Homo sapiens
gtttacattctgacaatgtagaaatgatagaactaatggaaatttggggaggaagaaggatgaaggttgaaggtatagtaaatttgctgattacctcatacgtaatctctagagtcaaaggatatcatttcatgctggcagatcattaatagatgtttgagcatatttaacgatacaaaggtaaatatgaagaaagatagtactattgactaaagtcagttgggggagagagaggcggaagtatattacttttatgcttggttatactagagaacaaatagaaactgactaaagaaacattagatcagtggttctcagagtattgatatctgggagtcccagcaacagtctgaggaggttcatgagttcaaaatattttgataataacactaagatggtatttactcttctaactgggtagatatttgcactgktactgccaaataatgtcttacattttcgcagaaataaaagcagtgacatctaactgaatagtactcattacattcttcactgt

SEQ ID NO: 479387 - DNA, 536 bp, Homo sapiens
tatcagagctagaaaatcttgaactttttaattgatttgtctccaccagtgaacttggaaccatgcatctgtctttcaggagtcagtttccatccattgctctgaaacaccaccctagtgggtattcccagaaaagcacctttgtgaraaagaccaggtgtggaggtcacaatatttacatcaatgcacaacagccagactccatttcagatgctattttattcaccacaagatcattcttactcaattacttttcccaaactctcaactgctgccaaggttaatgcaggctctgactctgcctgttgattcatattaattaagccaatccatgatcttgtatcacacagtgtctgtttttaatataacctatttgatgaggctgtattaatttaggagaaatgtgcactggcattctggcctgcactcttcctaattatcttacagcccccattcagcagcattgaaattagactgtggttatcatagttaatggaagcccttagctcctagctaagtgatctccatcagtcacc

SEQ ID NO: 479388 - DNA, 536 bp, Homo sapiens
tatcagagctagaaaatcttgaactttttaattgatttgtctccaccagtgaacttggaaccatgcatctgtctttcaggagtcagtttccatccattgctctgaaacaccaccctagtgggtattcccagaaaagcacctttgtgaaaaagaccaggtgtggaggtcacaatatttacatcaatgcacaacagccagactccatttcagatgctattttattcaccacaagatcattcttactcaattacttttcccaaactctcaactgctgccaaggttaatgcaggctctgactctgcctgttgattcatattaattaagccaatccatgatcttgtatcacacagtgtctgtttttaatataacctatttgatgaggctgtattaatttaggagaaatgtgcactggcattctggcctgcactcttcctaattatcttacagyccccattcagcagcattgaaattagactgtggttatcatagttaatggaagcccttagctcctagctaagtgatctccatcagtcacc

SEQ ID NO: 479389 - DNA, 641 bp, Homo sapiens
gatgccatatcttgggtaaggcttccccagcctggtccttgaccttcagtgtagatgagaatgatccttcatgggtatacagccgaacctggaacaagggctagggaatcactgtgtccatttaacaagtaacccatggtattggagcatattcaaggagatacttgccactttccacacccccgccatgtatgttttcctcatttaattcacgtaaacatttatgtaacacccttgtctgggccaggcattttgctagtcactacggacatagcagagaacaagatagatacattcttgccttcatggatcttacaataaataataatacattgcatcttttttttattattcatttttttwatttttaaattattatttttttctgagacagagtctttctctgtcgcccaggctgaagtgcagcggcatgatcttggctcactgcaacctccgtctcccgggttcaagcaattctcctgcttcagcctcccaagtagctgggattacaggcacgtgccaccacgcctggctaatttttgtgtttttagtagagacggggtttcaccattttggccaggatggtctcgaactcctgatctcgtgacccacccaccgcggcctcccaaagtgctgggatt

SEQ ID NO: 479390 - DNA, 526 bp, Homo sapiens
gatgctgaattcacccagcatcacccaccagttctagctgcaggtgggcactgggccaacctgggtttgatttcccagctttgcagcttaggggcagtgtgtgtgaccttgggaaaatggcttaacctctctaagctcccgtttcctcttaggaagtggtgagacagtagtacgtatcttgtggagttgttgtgaggttcagtgagttcatgcaaccaggaaaacattatcatggtcgcattctcaagtggggcaatctgaatccgaagsagcaaatctgaagcaatctgaagcagatctgaagcagcaagatcccagtctccccatggcagtccagcctgtgagcagcaaaggcttttctgcccctcctctttccttacccccaactccttacagtgcccctgtgttcagtaccctttgtgctgtgggcaagcaggaccgtgtgggaactgaccccacaggttccagccagagctgaccaatagagatagaatccaaagctatatcccccagccatacatagcca

SEQ ID NO: 479391 - DNA, 575 bp, Homo sapiens
ctgaaaggaaaagctagaccagagaagcccctgtgcacaggttgagaaggcccctcatccccttgcccatctaagtttatgcaatgatattgtgcatcttcctaaacatcaaccccatttttcaagttgcactgggcaaaaactatccaatgcaatgaaagggagagagatttcattattgctccctttctctcacaccccacatccaattctgggaaatctagtactgctccacctttgaaaagtttttagaattcagctacctcttaccagctccaygctactgcctcagaacaagtctctatcctcatcctcttccatgccttattgccatgacctccgtattgcttcctcttttattgccctgcacatagcacccagagtgatccttctgaatagcgctcctgtactctgaacccttccgtcacgtaacagcccacaaggtgccatgcatccatgcattaaggccccgtactgtctttcttatcttctctccttccagcctctccttcaacctgtctcctccagtcagtcccgctggttttcttcctgcctccggaacgtgccacatctgt

SEQ ID NO: 479392 - DNA, 575 bp, Homo sapiens
ctgaaaggaaaagctagaccagagaagcccctgtgcacaggttgagaaggcccctcatccccttgcccatctaagtttatgcaatgatattgtgcatcttcctaaacatcaaccccatttttcaagttgcactgggcaaaaactatccaatgcaatgaaagggagagagatttcattattgctccctttctctcacaccccacatccaattctgggaaatctagtactgctccacctttgaaaagtttttagaattcagctacctcttaccagctccatgctactgcctcagaacaagtctctatcctcatcctcttccatgccttattgccatgacctccgtattgcttcctcttttattgccctgcacatagcacccagagtgatccttctgaatagcgctcctgtactctgaaccsttccgtcacgtaacagcccacaaggtgccatgcatccatgcattaaggccccgtactgtctttcttatcttctctccttccagcctctccttcaacctgtctcctccagtcagtcccgctggttttcttcctgcctccggaacgtgccacatctgt

SEQ ID NO: 479393 - DNA, 611 bp, Homo sapiens
  misc_feature (1)...(611): n = A,T,C or G
ttgaagctttctattattttattaccatatttaaactaaaggcaaccagccatttaatcatatatataaagctagggagtgatcagcatatgatttttttttaagttttatcccagagaggcttatttttgctacaaactgctaagattttacataatgccnagtacatcccttatttggtatttccatttgttatcaattaaatatgaagaaaaaatagaaattcacctatttttaggtagacatttttcaataaattattttaatttagtttttatatatttagtttctatatatttctgtgaaattatagaagatacaaaattagcactgattytgctactaatttaaaatgctgatttacttgattttaaacacatgctgttcttcctaaaaaaaaaaaaagttaaactcttaagtagtgaaaaatacattcaactaatgacaaatgatggatgttattattttaaaaggaatcaaagtcagtaaaaatgatccatgcctggaatcactggggatggaggatcaacaggagagcaagtgcaactaggagtttctgattcactgctgcggctcatggcacttgagagttggtaggggattactgagaa

SEQ ID NO: 479394 - DNA, 561 bp, Homo sapiens
gagcgagtttctgtgtgatcgcaaagagccttgatagaaacagaagtcctctggcggtaaagtctgcacagacttagtgcctgtctttcccaacgtctgcacaataaagccaggagccactaggctgctggaagtcctcagatccaygtggaagtcgtgcctggggcctttcagccgaaggtgaagagactcaacctcggacacggccactgctcttctccgccgctgatggtgcatgatttcatgggacacgtaatcgcccctgtggtcaacctcgtaggcagagaccaggtcatattctgaaatcaaaagagtgaggagaggctgagtcatttcggaattccgagaagaatcaggaagtcttaagatataatattattttaccacatgacctttccacccagtcaaaaatgatgaagaaaaatgcaacacctacccatactgaattcaaagtgtgcaatatggaacatcacagtttaaagaaaaaaattgtaacaagggccccataatgtgctattaccaagccaggaaattctccaacagtgatgcggtgatgttaac

SEQ ID NO: 479395 - DNA, 561 bp, Homo sapiens
gagcgagtttctgtgtgatcgcaaagagccttgatagaaacagaagtcctctggcggtaaagtctgcacagacttagtgcctgtctttcccaacgtctgcacaataaagccaggagccactaggctgctggaagtcctcagatccatgtggaagtcgtgcctggrgcctttcagccgaaggtgaagagactcaacctcggacacggccactgctcttctccgccgctgatggtgcatgatttcatgggacacgtaatcgcccctgtggtcaacctcgtaggcagagaccaggtcatattctgaaatcaaaagagtgaggagaggctgagtcatttcggaattccgagaagaatcaggaagtcttaagatataatattattttaccacatgacctttccacccagtcaaaaatgatgaagaaaaatgcaacacctacccatactgaattcaaagtgtgcaatatggaacatcacagtttaaagaaaaaaattgtaacaagggccccataatgtgctattaccaagccaggaaattctccaacagtgatgcggtgatgttaac

SEQ ID NO: 479396 - DNA, 561 bp, Homo sapiens
gagcgagtttctgtgtgatcgcaaagagccttgatagaaacagaagtcctctggcggtaaagtctgcacagacttagtgcctgtctttcccaacgtctgcacaataaagccaggagccactaggctgctggaagtcctcagatccatgtggaagtcgtgcctggggcctttcagccgaaggtgaagagactcaacctcggacacggccactgctcttctccgccgctgatggtgcatgatttcatgggacacgtaatcgcccctgtggtcaacctcgtaggcagagaccaggtcatattctgaaatcaaaagagtgaggagaggctgagtcatttcggaatwccgagaagaatcaggaagtcttaagatataatattattttaccacatgacctttccacccagtcaaaaatgatgaagaaaaatgcaacacctacccatactgaattcaaagtgtgcaatatggaacatcacagtttaaagaaaaaaattgtaacaagggccccataatgtgctattaccaagccaggaaattctccaacagtgatgcggtgatgttaac

SEQ ID NO: 479397 - DNA, 641 bp, Homo sapiens
tgtcatctgccctcccagccactcaggggcatgctcctcacctcccaccagctcctaccactgtagctgagtcaggggaaggatgacagaaagcaggatggcttgttccaaacagtggaaggttagcacattttattgtgtataaaaaggtgattactctttaagaaatcaaattattctcagatgaaataagtcatattcttatgacctttattttgaagagagaaaatattcgtcctttattgggggcacatataatatttatcatgcaaaataactactggtaagccatgtttacataaacacaatgctgtggtaataaacattcaacaacccgctgtctggagaagaacgacctggattttggcatttgccaatttccctggtgtaaatcttcccctcatggctgatttcaatgactgctgtgccatcactgaatattcagtgcacagagatacgcagcagcccccagtgtgtgatatttctaccatacagatgcaaaagaggccagtggcctcaagagcctagattattatcaaatatagtgaaataattatgaaatgatgagcttygagtattgcaatgtttttaatataattaatttcactgtaaatgtatgtattttaattattctcacagtg

SEQ ID NO: 479398 - DNA, 614 bp, Homo sapiens
cagataattaactttctcttgtaaattcactgtgacaatttttttaacattttatatcatttgcacctagcgccccctggtggttctcaaaaaggtactatggtgagcgtcaatctgataccggtcaccttatatactatttgtrtactcatttggcagggaataatttcaaaagttaatgcatatattaagtgcttgcctttatgttattttatcaaattgaaataactatactgagaaattctgaattgttaactttaattttctagatcttctggaaatacattgagagaatgaaacctagttcttcctataaaagtcaattaatattaacatttgatacggcaatttattgttggtaacaatgcaaaataatatttattaactgtcattggatgggttcaggttaaaaaaccacctagcaaccagtgcgacacacctgcgttctcatttacctgatgcagtatgaagacacggagatccctttccataagacagcaaatttccaaatgtcacttgtaagtggcagaagtaaaagcatgcattgaaaaagaataagacttgtcctcatgtcaaattgtggcccaggatatgaacgttgctgatggtgtcac

SEQ ID NO: 479399 - DNA, 592 bp, Homo sapiens
agatcctggggtgccagtagattggctcggtccaagtccaaaggcctcaaaactagggaggctgatgtgattctcagtatgaggccaaaggcctgagaactttggagggccactggtgtaattattggagtccaaaggtcagagactctggagttctgatgttcgacagcaggagaaaaggaacatgccagctctagaagagagaaagaggaaatcaccttacttatccctggtttttttttttctctatccaggcccccaattgattggatggtgcccacgtgcattgagggtggacctccttcactcctcccgacgactcacaggccagtttcctccacgagcaccctcacagacacaccagaagtaaagccttaccagctttttacatatttcttaatccattcaagtygacacagttaaaaactgactgggaaaaaaaatgtaacttcaataccctaaaagcttggagagtgactgaaaccttgcctatgtccaggtgagcttttattaggaaacaaatatttttcacgaataatgtaattcctggctcagcacctgcttcagtagatgctatgtctgcctagttcgg

SEQ ID NO: 479400 - DNA, 592 bp, Homo sapiens
agatcctggggtgccagtagattggctcggtccaagtccaaaggcctcaaaactagggaggctgatgtgattctcagtatgaggccaaaggcctgagaactttggagggccactggtgtaattattggagtccaaaggtcagagactctggagttctgatgttcgacagcaggagaaaaggaacatgccagctctagaagagagaaagaggaaatcaccttacttatccctggtttttttttttctctatccaggcccccaattgattggatggtgcccacgtgcattgagggtggacctccttcactcctcccgacgactcacaggccagtttcctccacgagcaccctcacagacacaccagaagtaaagccttaccagctttttacatatttcttaatccattcaagttgacacagttaaaaactgactgggaaaaaaaatgtaacytcaataccctaaaagcttggagagtgactgaaaccttgcctatgtccaggtgagcttttattaggaaacaaatatttttcacgaataatgtaattcctggctcagcacctgcttcagtagatgctatgtctgcctagttcgg

SEQ ID NO: 479401 - DNA, 584 bp, Homo sapiens
tttaataagtatttttatttggaaataagtcagaggttgaagattagtgatttggaatacattgggccaagtgaattgtagatactgactttraaagatgacagcgtatataattttgagaaaaaactgatgttttgacaaggtaaacaaaagtctagtgaagtcattaccacaccaaaaagtctctgtctcagagacagacacaataagataaactggttctgggcaatattcttggcatgctgtttccctatttgagttttatgtcccattaccaatgccccagatgctcactgagagtccagttagagcatgacgaagcaggaacattgaaattaaaaaatgcagttatgtcataaaagtgagaggagagaaaaaagaaactgtcaaaagggaagaagaagctgtcaaaagggagataaaaggcattacctggctgtgtgaaaaccttatttcctacagagagatgggcccattgtaagagataaggaaatgagatctctttaaatcaaaaagatttatccgtcctcttttgatgcaaagtaatgtttctggaatgaagcaagaggtgggggaaattttcc

SEQ ID NO: 479402 - DNA, 563 bp, Homo sapiens
tgaatctggtatattgaaacagaatcatcgactggccattctctacagatgtttccatggaattcattatacattttttaccaaatgaaaatgtacaagaaagagttcaaaawttcatactttccttaaacaaatatgaagttttctgattctattattatcctaaccaactactatttattagaagatcctaaatagggagaggtaaaatcaagtgcattcaacataatccataaaaacatggttatggttttaagatcagagggaaaagaaaggaaaaatacatatggttaggaatgtcccacgtcacacagagagaagagcatacaatgtccttctgttccactgctttctaaataaagtaaactggtggctgacttgggccatatcactagtgtgagatttccttcatatttctctctggtcactattagagcaacgtgcttgctatccttctgtgcagaaggtagtcatgtttttcctaagacagtatttcattcagtcattagctttaccagcatccataatttaactatttcatccttagttcatactgggaagaa

SEQ ID NO: 479403 - DNA, 543 bp, Homo sapiens
atcattaagaataccaaaatacaataaaatagtgaacacatcaattaacaattagacaaaattgaggactgtacagctgaggtacaatgaaagagatcttaatggaatcatccagcctaaccctcatgtattcaaaatgattacactaaggatctcagtggatgattcaactttaccatggtcaataatttaggggaagcgagaactagaaaagatgtttttggactccgtaggatatgcagattgaaaaacttcttcatttgaaaccccattgtctacatgcaatgtgtttgatctgctaacaccttcacttggtttatgataacatttttttccaccccttccctctgccaatcagggtaagggtaacatcagtcacttaagttcctttagccaccaacacttccccagcttgtctcctgcatccctgtctgcccgccctcctcagtgaaagtgtagctgctctatgttgctgaggcctctgtccgagctgcgaagtggcccaggctctcacccamccctgcttcactgactctccacact

SEQ ID NO: 479404 - DNA, 616 bp, Homo sapiens
agaaagggctcattcccactggcatcctgaaagctcacgatggctaagatatattttgtgctgtgtattcctagtgtgtgtcccacctatatgctgaaggcagcttttacatgccattttcttacaggccaattaaaggataatttcttaccacttttgcacaaaaaaccccacaaaaaatccaaaaaacatttaaaaggattgaaaagacactcatttgcagtagacacaaaatattaaatacattttgccctcgagagagaagaacccatagaacaattatattaaagaaaaaagcattattttgcatttatttttctaggaataaaaagagtagatagtttcaaagataaactacctgttcatcttctagaagaatcagacctacaattgcaatgttgatgtttcctcctattgttccatctttgaataaagcagatacctgaaaaagacaggaaatccatgtcagccccataaatggcattttcccccctacttactagygggcctagaatccaacgcccttgttcttcagtgacagagcactgttaactttcttgtattgctaggcagacagatgtattaatcatatcacggtaaaaagccgaagcttcag

SEQ ID NO: 479405 - DNA, 561 bp, Homo sapiens
cttacctctgcatcttccccaaagaatctatacttatatccacattccacacacaaaactgcatctttgtgctgctgcttcatttctatgtattgtaattctagcggcgtatagatgcttttggaccgtttgttagctgatttggaagcagttttctgtaaattttcatgacttgtatttgatgatccaaactgactgagatcaaaaagtgttgtgtcctggcaaccaaaagatgtataaagttttaaaaatattaaccacaataataagttcccagagacggaaaatgcaaatctggcaaaaagctaacacttagtgaatctagatgaaaagtttatagaagcacattgtagcattcmggcaaactatccataggttacaaatattttcaaagtagaaggttaaaaaaaattatgaaccaagtaagctatcatagaatttttatgcaaattttgaaagtctaaatatcttaatgttttacatacttgtttttaaatttgatttcattaaatctattattattaacacttattttctttttattatttattctaaggtgtg

SEQ ID NO: 479406 - DNA, 544 bp, Homo sapiens
ctcccctttgtcctgcaggtttggaagtgcctcaccctcttctggcctttgatttgtgtgccacaagcaaaaaagttaaaatcaggctgggcatggtggctcacgcctataatcccagcactttgggaggctgaggcaggaggatcacttgagcccaggagctcaagaccaacctgcacaagatgatgaaaccctgtctctacatttaaaaaaaaaaaaaaaaaggctgggcggggtggctcacacctgtaatcccagaactttgggaggccgaggtgggcggatcacctgaggtcaggagttcaagagcagcctgaccaacatggtgaaaccccatgtctaccaaaaatacaaaaattagctgggcgtggtggckcatgcctgtaatcccagctacttgggaggctgaggcaggagaatcgattgaacctaggaggcagaggttgtagtgagctgagatcgtgccattgcactccagactgggcaacaagaacaaaaactcagtctcaaaaaaaaaaaaaaaaaaaaaagttaaaatcagtgt

SEQ ID NO: 479407 - DNA, 609 bp, Homo sapiens
agctgtaaacctgaaaaattaaagctgcggtgtaattcatcttatccataaatagtttactatacattatacagtttgaagtaaacaatagaccagacttaaaaatgatatttttccatggaaaactatgtgataaatactagagatgccatgaatataactgaaattatatcacttaaatatagacagaagattctctactttcttcttttaccttctttctctcatactcaaaagatatgaaaatgtcaaataatatgcatattttaaagttgtttgcactgcaaatagataaacgaaatcgatctgcaaatttccaagctaagaratgattatatctaaagtaattcacctgattatttaggattgcctgcaaaatctacaatgattttattcctcacaatattgttttccaatttggggtaggagctaaaagttattgtatgacatcaagtgatttgagggatgagaatgtgtttccttagcgggaaaacttgctgaaaagaagagagattttttaaaaagttcttgctttgacctgtctggatcagatggtttaaggctacaacacgaggccaatatctgtatgtgaaggagacagaaacatca

SEQ ID NO: 479408 - DNA, 454 bp, Homo sapiens
ggctttagtgagttcacctatagatataacatttgcaaactaataggtgagagattgggctttgagtcagatattggtttgagtccatgctctgttctttttaacttcattagttttcttatcttctctatttctcagggtcctcatcggtataatctgatcactgacagtaactagcacattaggtcgctctaagcatgaaaataggtaatgcatgtgaagtgttcacactgtaacaaccttgcattaatccctcagaacagttttttattattattaaaattagtattgttttattttcctgtttatctcaaattataaactttataaataataygagtcattttctttaatattggcctatgaatcataaacaaataattcataggccaatattaaagagaatgaactcatgttatttaaaattatttatttacacttttgacaataaaaa

SEQ ID NO: 479409 - DNA, 454 bp, Homo sapiens
ggctttagtgagttcacctatagatataacatttgcaaactaataggtgagagattgggctttgagtcagatattggtttgagtccatgctctgttctttttaacttcattagttttcttatcttctctatttctcagggtcctcatcggtataatctgatcactgacagtaactagcacattaggtcgctctaagcatgaaaataggtaatgcatgtgaagtgttcacactgtaacaaccttgcattaatccctcagaacagttttttattattattaaaattagtattgttttattttcctgtttatctcaaattataaactttataaataatatgagtcatttyctttaatattggcctatgaatcataaacaaataattcataggccaatattaaagagaatgaactcatgttatttaaaattatttatttacacttttgacaataaaaa

SEQ ID NO: 479410 - DNA, 651 bp, Homo sapiens
cagggttcttccagttctgaccccacctcttcctttgttgtgaaattagccaaagttgcttaatgtctctaacacattsacagggctgcattgctctggatatactgtgaagttctgtggaaaattgttggctctcatcttcacagcaggaagggccggtctcctcccatgctgggggcttttagtaatcctaccggtccgtcctgtacccacactcattgtcagcctctccagtccagccaatctgtggcttactgctccctgaaatgcttcctttctcttcaccggtgcgcttcatctcttgcctctctattctgtatctttaaagctagcatttctgtacaaccttcaagaaccaattcaaaagccacaccctccaaattacccattcttagcagagaagtttgcatatatatatatagagagagagagagagggagagagagagaaagagagagcactttctatgagacaggcactgttctcagcacttaacaaatagtcatttaactctatgaggtggattctatgacaaataaggaaattgaggcacagagagactaaatgattttcccaaggccctgttctcagtagatgacagactgggatttgtagccaggtatctggttctagaatccacactgtttatac

SEQ ID NO: 479411 - DNA, 624 bp, Homo sapiens
agtcaagggagcactgttattttggaaagctttacctgatttatgggcatgatcatatatttgagtatccacaaaaatcgacagtgaaggctaagaattggtggcaagatagaggccttgagaatatttatctgtgtcctccaaagccacggggaccttcagttgtgttcattcattcatccattcaacagaaatacatgagatcctactctgtgccagcctagtggtcatgagagagtgaacatgaacataatggcttataatacagcccaggacagttatagactaaaatcagttctaccttcagtattctttgttctatgtaagctgacagccactggaacaggaaattagtatayagctggactgatgttatctcagaatactctgacgggattggaaattatcatattaaatgtataagatagaaaagcaagaggggaaacattcattgaaacaaaacaggaccccacatgttatgctttcaggattttgctgcatttcttacttgtcaacaaatccagatcctgtttagtcttctaaaaatcttaaattaatataagacttatgaaagaacttggctaattcaagctgatggcttgaagaccatcacaaattacccag

SEQ ID NO: 479412 - DNA, 624 bp, Homo sapiens
agtcaagggagcactgttattttggaaagctttacctgatttatgggcatgatcatatatttgagtatccacaaaaatcgacagtgaaggctaagaattggtggcaagatagaggccttgagaatatttatctgtgtcctccaaagccacggggaccttcagttgtgttcattcattcatccattcaacagaaatacatgagatcctactctgtgccagcctagtggtcatgagagagtgaacatgaacataatggcttataatacagcccaggacagttatagactaaaatcagttctaccttcagtattctttgttctatgtaagctgacagccactggaacaggaaattagtatacagctggactgatgttatctcagaatactctgacgggattggaaattatcatattaaatgtataagatagaaaagcaagaggggaaacattcattgaaacaaaacaggaccccacatgttatgctttcaggattttgctgcatttcttacttgtcaacaaatccagatcctgtttagtyttctaaaaatcttaaattaatataagacttatgaaagaacttggctaattcaagctgatggcttgaagaccatcacaaattacccag

SEQ ID NO: 479413 - DNA, 502 bp, Homo sapiens
attagcttctgcacatttttaactatcagctttttaaagttctaaaaatactagaaaattattctgaaaagattataaagtatttttgttccttttctgaattaaaggcactgttaaatttattagttaattaagcaaacttttgaaatgtaaaatgtgggttacagggcaaataaagaacaatatatgcactgttataaagctctgttgtaatatgtgctttactaataaacagatttgcagatccatgattgcaaaaatgttggractgtattaaaacatgactttccattatatggatatgctgttggtcaagccttatctggatttgaacaatgatggaaaaagtgagtcttcataagtagttccaagaccaccaaaaagtatcattaactcttcaccaaattacacagcctaagactaacaaaatcctatacttaaactccactctaggtaccagccataccttatatattaaataaatgcattccccaaaatttca

SEQ ID NO: 479414 - DNA, 623 bp, Homo sapiens
agaagccaagacaagtgactctgacgaggtttaaaatacttctccaactagatccattcttggaaagtgtatgacgacagacttaggggtaattcccagagctgccatgaatacgacagtgtcttggcaccctgtaactatgactatgccttggcatcccataactctgccctagcccagatgctttctgttatgctaacacgactccagaagtaacacaagcataaagaaaatgtacagagacgcacaagtgtggactcataattattttctgccttcttccaccaaatctatctgagttcattagtagcaataagatataaacactggttaaaaaaaaaagtcagtgaaccccaaacacaataccacaaagtcacatacacataacattacgtgagatggaaaaacatggatttcctcaatgtaccttgtgtaccaggaaaccttcattagtgaatacatattgaactttccctgccatcacagctctgtatcacattctcatgtatttcaatttaatatttagaagcctttaaagggagggaaagactaaggagaaagaaaaaaataagaagcaaaggaaaarcatagacataagaagactcacagaaaggccttctcaa

SEQ ID NO: 479415 - DNA, 621 bp, Homo sapiens
atgctatggaaagatatggataataatacctcaaaaaaggtgaagagagagttattgagtgggctatatagatacataggtttgcacaggaccaatcaatacatcatggattttccatgtataaacagatatttattttcttggaaatgatgtgcaagagacaaactggacttaataagaaagaaagtgaggccctaaaagaaggaaaggattggatcagaagacagtctggttgcctcgactgggaagatcattactaattctgttttcatatttgcatagtgagtatactgcttttcaccctgcttgctcaaataggctgactttttaaatcaggaaaatacattagtgtctgtgaaaaaaatttaaaaccrtatgtgaatttttgctctcagcaatggtgggtcagacaagcctccaggtaagaaaaataaaaacaaactcaataaaataaaaaaaatctatttgaacaaatcagagagttatcaggtgtgatggtaatattgagtgtcaacttgattggattgaaggatgtaaagtattgttcctgggtgtgtctgtgagggcgttgccaaaggagattaacgatgaactgggagatgcagacccaccctcaatcag

SEQ ID NO: 479416 - DNA, 511 bp, Homo sapiens
aacacagtgagagtgaggaaaaagggaaatgcagaaaggtcggagacacaatgcattcagcaccaaacwtcctaatgagctataaagacatacagcaggtcatatgggcagctgcatccaatgggcacatggtacttctccagagacattgtaccaggctactactccttgaagaagtccataggaagaaggaagaagggggaattcacctacccagtaatttcctttgtttcccattgctgaaatttggcccatgggttaacttttccatttttctgggaggtatatggggtctcattggcagtcatttgtgatggtatattcctccacaggagatgtcctatctcatttaaacccaaaagtagctataacagccagaaattttaggcatatgcttgcttggcctaacctgcatgaaatagctaaagggcattcacttcccttggcttaggtagcaagtaggcagaaaaaaatataaggtggcccatcagagttttgtccaatcacagtg

SEQ ID NO: 479417 - DNA, 511 bp, Homo sapiens
aacacagtgagagtgaggaaaaagggaaatgcagaaaggtcggagacacaatgcattcagcaccaaacatcctaatgagctataaagacatacagcaggtcatatgggcagctgcatccaatgggcacatggtacttctccagagacattgtaccaggctactactccttgaagaagtccataggaagaaggaagaagggggaattcacctacccagtaatttcctttgtttcccattgctgaaatttggcccatgggttaacttttccatttttctgggaggtatatggggtctcattggcagtcatttgtgatggtatattcctccacaggagatgtcctatctcattyaaacccaaaagtagctataacagccagaaattttaggcatatgcttgcttggcctaacctgcatgaaatagctaaagggcattcacttcccttggcttaggtagcaagtaggcagaaaaaaatataaggtggcccatcagagttttgtccaatcacagtg

SEQ ID NO: 479418 - DNA, 511 bp, Homo sapiens
aacacagtgagagtgaggaaaaagggaaatgcagaaaggtcggagacacaatgcattcagcaccaaacatcctaatgagctataaagacatacagcaggtcatatgggcagctgcatccaatgggcacatggtacttctccagagacattgtaccaggctactactccttgaagaagtccataggaagaaggaagaagggggaattcacctacccagtaatttcctttgtttcccattgctgaaatttggcccatgggttaacttttccatttttctgggaggtatatggggtctcattggcagtcatttgtgatggtatattcctccacaggagatgtcctatctcatttaaacccaaaagtagctataacagccagaaattttaggcatatgcttgcttggcctaacctgcatgaaatagctaaagggcattcacttcccttggcttaggtagcaagtaggcagaaaaaaatataaggyggcccatcagagttttgtccaatcacagtg

SEQ ID NO: 479419 - DNA, 267 bp, Homo sapiens
aggccaccaccaccatcattagtagtcataaaacttaaggcatgattgtggtcgtaacaatcatcttctccaactacacattttacaggtaagaacatgatgggttacatsattctatccaaatcacaacataggaaatgccagtgccaagttattcttcttctctatctctcatcccaatttcaaaatcagtttgttaattagcatctaccaaatgctagtcatatcttaaattaatcaccctggaatgcttagaaggtaaatatg

SEQ ID NO: 479420 - DNA, 627 bp, Homo sapiens
cagaggaagaggatgagcatttttactctatgtataacagatataactagaagaaaggaattcaaataatagcatagcttttaggtgagcaacagcaggagggcacaatatctgctttcagtgtttatgatgacttgtcccgttagaaacataacagacattctgccaatattttgtgatgatctggaaaagtasgcaagagttccattagtaaaaaattacctagcaatgttgttttgttttgtttcctgcaacagggaataactgaatggtctatatccggcttctattttgtcattcccacctttgacaatactactgtgctacaggcacttatgtcttcatttggtgctaaccagttcccagaatggatgtgaaaaaggaaggtaagacattggaatcctcatcctcatccagaaatacaattaacttacaatctcttgtcttagccctaggcaattatgtgactactgagctatggcctcactccaggccccacctgacatgtggtgtgtcaagttcatatgatggtgtgggatggagtcacactggtttctttaattattctgaagtctagtcaacctcctaattcagggtttaaaccatacttattacactcatagttac

SEQ ID NO: 479421 - DNA, 627 bp, Homo sapiens
cagaggaagaggatgagcatttttactctatgtataacagatataactagaagaaaggaattcaaataatagcatagcttttaggtgagcaacagcaggagggcacaatatctgctttcagtgtttatgatgacttgtcccgttagaaacataacagacattctgccaatattttgtgatgatctggaaaagtaggcaagagttccattagtaaaaaattacctagcaatgttgttttgttttgtttcctgcaacagggaataactgaatggtctatatccggcttctattttgtcattcccacctttgacaatactactgtgctacaggcacttatgtcttcatttggtgctaaccagttcccagaatggatgtgaaaaaggaaggtaagacattggaatcctcatcctcatccagaaatacaattaacttacaatctcttgtcttagccctaggcaattatgtgactactgagctatggcctyactccaggccccacctgacatgtggtgtgtcaagttcatatgatggtgtgggatggagtcacactggtttctttaattattctgaagtctagtcaacctcctaattcagggtttaaaccatacttattacactcatagttac

SEQ ID NO: 479422 - DNA, 609 bp, Homo sapiens
ccatagcaaaaacttttaaaagtcttcacttttagggttgtgcttataagaatttattagcaaatattctataccatatggtaactttgatttataaactgcaggtgtttcattccatttttccaattatttaataaaaaattttttayagcaaggattttcccttgttctctcccagcacatttttacctaactggccattacctcatctagccacttttgttcaaatgaattttgaaacaccatctgcagagatgttcattcagtcctgtttagaattggggagagaggcctgaatagagggctttcttcagtgtagtgcttctataaacttatccatttgtgtggatctatataaatactcttgaacaaaatgtctaagcagaagccctttagtacatttcttggtcattttctcatggactattacaagaggagcttgttgcccaagcatccctctgccctctcaccacgtttctctccttggtgctggcaaaggcaagcctgccttgttttctggagagtgtgctatcctgtttctctgatgttagacggaagtggcacatggttagctgagctcagtgaaagagacaggagagtttttgccag

SEQ ID NO: 479423 - DNA, 623 bp, Homo sapiens
ctggcaggcagtaagtgctcaatacgttgtcaatgcttgtttttatatgttgtcaaygtaaaagacacactggatttcgaagacttgggtccaaaaaagaatataaaatacctaattaataattgttatgaaatgacaatattttagatatactgtgttaaatataatgtcaaaattaattttgcctatttttccctttttttacttgttaaagttctttttactgtggctgttataaaatttaaaattatatgtgtgacttgcatttcatttttattggccagggatgctccagaaggttgatgcctgaaactagagatccattacctttcctcctttctagggcttcaaattaggttttaatttaagaacacctttgctatatataatcaatacagaaaacttttaccacttattgtactttgccctgttgacactgacctcccattctccaccagaagaaataatcaaacccatcaccaacaaatcacccatccattattcaatttttataaatatcttagttacagtttttcacttaatgacctttcaaggatatacaacttaaaaccaatgactttaacttatatcccgaaggtccttccaaaggacatatgaatcaa

SEQ ID NO: 479424 - DNA, 623 bp, Homo sapiens
ctggcaggcagtaagtgctcaatacgttgtcaatgcttgtttttatatgttgtcaacgtaaaagacacactggatttcgaagacttgggtccaaaaaagaatataaaatacctaattaataattgttatgaaatgacaatattttagatatactgtgttaaatataatgtcaaaattaattttgcctatttttccctttttttacttgttaaagttctttttactgtggctgttataaaatttaaaattatatgtgtgacttgcatttcatttttattggccagggatgctccagaaggttgatgcctgaaactagagatccattacctttcctcctttctagggcttcaaattaggttttaatttaagaacacctttgctatatataatcaatacagaaaacttttaccacttattgtactttgccctgttgacactgacctcccattctccaccagaagaaataatcaaacccatcaccaacaaatcacccatccattwttcaatttttataaatatcttagttacagtttttcacttaatgacctttcaaggatatacaacttaaaaccaatgactttaacttatatcccgaaggtccttccaaaggacatatgaatcaa

SEQ ID NO: 479425 - DNA, 655 bp, Homo sapiens
agagcaggcaggtgactttctccctgtgacartcagttcaaaaaggcgctgtgtctcttctttgctacatgagatttgacttgtttaataacttgcttatataattttattgacttgggtggacttttccttcctacactgacttcctcaagtgtttgtatcgcctgtacagaatctacctcttgagatccacaaaaattaacatgtgtaaatcaagctattcattcatgcattctccggctgttagggatacacaggcagacagccatgtgattgggcacttacagccacagggaggacatggacattgagcagttaattacaagagtattgtgttacagtggccttgtaatggcttgtatgggagtgtataacatgagttaagagtgagaagcaatagaagaatgggctcaatagagtgccttcggagttgagagagaagcaagatgatttatattgaggaggatcagggatggcatcctggcgaatgctttttgttcctctggcaaatttgtctgacctgcacatcatgtgaaaaattcaagacaccaagtaccgaaaaagcagataacacgtcactactttttaaaataaaaaatacgtgatgactgaatgtctttacccatcacccagaatttgatatttctggcagctt

SEQ ID NO: 479426 - DNA, 655 bp, Homo sapiens
agagcaggcaggtgactttctccctgtgacagtcagttcaaaaaggcgctgtgtctcttctttgctacatgagatttgacttgtttaataacttgcttatataattttattgacttgggtggacttttccttcctacactgacttcctcaagtgtttgtatcgcctgtacagaatctacctcttgagatccacaaaaattaacatgtgtaaatcaagctattcattcatgcattctccggctgttagggatacacaggcagacagccatgtgattgggcacttacagccacagggaggacatggacattgagcagttaattacaagagtattgtgttacagtggccttgtaatggcttgtatgggagtgtataacatgagttaagagtgagaagcaatagaagaatgggctcaatagagtgccttcggagttgagagagaagcaagatgatttatattgaggaggatcagggatggcatcctggcgaatgctttttgttcctctggcaaatttgtctgacctgcacatcatgtgaaaaattcaagacaccaagtaccgaaaaagcagataacacgtcactactttttaaaataaaaaatacgtgatgacwgaatgtctttacccatcacccagaatttgatatttctggcagctt

SEQ ID NO: 479427 - DNA, 483 bp, Homo sapiens
ctctcctctttattcagattggctttagcaggggagagtcattataaagctcattaatcttcatttttcacagcaagattcattttataggactgaaagatgcagaaatggaaccacacagcactttgtcagcagctaggatttctgaatttgatgccgagtgaaaattaaacacaagagaccagacagcagctctaataactcagtaatttctaaataaatagactgagattgatggaactgaaaacagttttcactaacaagggaaagtatacagggtagtaatatttgactcaaatatgctttgcataagggattrgaattcctgaaagcctctcatttccccatcagagaatttgtttcttctatcagtcaaatggtggttaattatcacatttcaaggagcagctcattaattcattaactaaaaataactagatatttatgtaggaagataacacacaataaccaataacttgaata

SEQ ID NO: 479428 - DNA, 520 bp, Homo sapiens
caagtgaaattaagttaatgttgttattttctgttgtcaaaagagcaactactcatacaacatgtttattataaaattcaatgaaaacaaattacmaataagaaagaaaagatgcagatttgtttcggaaatgtattttcattgaatattgtcatgctattttgacattaagcagttttattttaccaagtaaatgaaaatcaagatgttctgaagaaagtagatgctcatgtaaagttgtactacatatgtaatatactttgagcagcaagtcaaattttaatatactgagcagtttttacatccacagcaatattcttttaatggcatattcaagtttgaaatccacaaacatcaggaaatgctatttaaaaatatttcaggtatttaaataaaatagcttgtggaagaactaagaaaaaaagtattgagtcaacattttttgaattaagaagacaaaagtaagcacctttacatctagctagtagaaccactcatcaacagaacatgtagtagctac

SEQ ID NO: 479429 - DNA, 330 bp, Homo sapiens
tgtaaaagttaagagaccccatttcaaattcacagaattgctcagtgttagtgattctcttctaatcagagtaaattaaccagcatatagatcttattttaaaggacactaattcaagaccaccagctaaacatattgtggataattatggttttgaaaattaatggttaaagaaggggaaaatttttaaaaagattctaggcatataattacactcaatttaaatcaatctttatcgtgataacttaagtatctagctgcaggcgagtattatggcaatagaatttttayagtacaaatcctgaagtgcagaaaagtttcaactcagag

SEQ ID NO: 479430 - DNA, 520 bp, Homo sapiens
caagtgaaattaagttaatgttgttattttctgttgtcaaaagagcaactactcatacaacatgtttattataaaattcaatgaaaacaaattacaaataagaaagaaaagatgcagatttgtttcggaaatgtattttcattgaatattgtcatgctattttgacattaagcagttttattttaccaagtaaatgaaaatcaagatgttctgaagaaagtagatgctcatgtaaagttgtactacatatgtaatatactttgagcagcaagtcaaattttaatatactgagcagtttttacatccacagcaatattcttttaatggcatattcaagtttgaaatccacaaacatcaggaaatgctatttaaaaawatttcaggtatttaaataaaatagcttgtggaagaactaagaaaaaaagtattgagtcaacattttttgaattaagaagacaaaagtaagcacctttacatctagctagtagaaccactcatcaacagaacatgtagtagctac

SEQ ID NO: 479431 - DNA, 520 bp, Homo sapiens
caagtgaaattaagttaatgttgttattttctgttgtcaaaagagcaactactcatacaacatgtttattataaaattcaatgaaaacaaattacaaataagaaagaaaagatgcagatttgtttcggaaatgtattttcattgaatattgtcatgctattttgacattaagcagttttattttaccaagtaaatgaaaatcaagatgttctgaagaaagtagatgctcatgtaaagttgtactacatatgtaatatactttgagcagcaagtcaaattttaatatactgagcagtttttacatccacagcaatattcttttaatggcatattcaagtttgaaatccacaaacatcaggaaatgctatttaaaaatawttcaggtatttaaataaaatagcttgtggaagaactaagaaaaaaagtattgagtcaacattttttgaattaagaagacaaaagtaagcacctttacatctagctagtagaaccactcatcaacagaacatgtagtagctac

SEQ ID NO: 479432 - DNA, 456 bp, Homo sapiens
cctttggcaaaatcattttatgcctttcccttccattcggccctcctctgagctgtttctgatatctaagtttccgtttgcttcttaattcttcatctcacctccctgtgctatttagcaacccaatggcaatttggaaatcgattttttatgatcctcatgttaatatcatctttcacaggcagtgttggaatgattctacttttatttaagatcatttcaactgctctgctagagcagcttggagcctcggaaatggagtttctacttgcatggacccctcatacatacctccctgcacacacatacagtagtttaaacaaactggaaacaaaagaamcgtacataacagccaaaaatgttgctaagaactttataaagcaacgacagagcagcatcaaagcatctgcaaatgctttctctttccaaattaatactctatcagtataaaggagg

SEQ ID NO: 479433 - DNA, 218 bp, Homo sapiens
gattcctgttctagatctccttgctgccctttacacattctggtcactgagtttggagcctattgtagtggaaaggattatgcctggccctacatccctgcagcccacctctgagttaacccccagtcrccattctgtgtgtatgtgtgcatgtgtgcatgtgtatgtgtgtgtgtgtttgtggggagagagagacagaaagagaaaaagacagggtc

SEQ ID NO: 479434 - DNA, 679 bp, Homo sapiens
tccttctccttgtggcatttcccctatgcctctgaccaccctcccaagggatccctgtgatgccaggcaggaatggcctgcttgaggactagkgagctcacagggcctttcccactgcttcctccatccctgtattttgctcagctctctaaatttcctcagctctttgtgaggtcgaaatcttctcccataaactagaccttcagtttccccagtgagggtgtgtgtttgggggcagatgatctccctttcccacttacacagcttgggcactcactgtatttggggtgtctcccaggtcctgtaggagcaatctgcttccttcagtgggtctgtgggtcctctcaggtttcctgatttattcctgcagttgttctggagctaaaattcacaatgcaagcctccacatgctgctctgtccctccaagttcgagctgcaatctagtcctgcctcccgtcctccatgatgtaatccatactaaaaaaaaattttttttttttgacacagagtctcactctgttccccaggctggagtgcaatcttggctcactgcagcctgcaactcctgggttcaagcgatcctcaacatttactgttaagcaaattttgttaagctatgcattttaatactgtgaaaggattggaagaaaaaaaccaaatagcctgtaacaaacaaat

SEQ ID NO: 479435 - DNA, 679 bp, Homo sapiens
tccttctccttgtggcatttcccctatgcctctgaccaccctcccaagggatccctgtgatgccaggcaggaatggcctgcttgaggactagtgagctcacagggcctttcccactgcttcctccatccctgtattttgctcagctctctaaatttcctcagctctttgtgaggtcgaaatcttctcccataaactagaccttcagtttccccagtgagggtgtgtgtttgggggcagatgatctccctttcccacttacacagcttgggcactcactgtatttggggtgtctcccaggtcctgtaggagcaatctgcttccttcagtgggtctgtgggtcctctcaggtttcctgatttattcctgcagttgttctggagctaaaattcacaatgcaagcctccacatgctgctctgtccctccaagttcgagctgcaayctagtcctgcctcccgtcctccatgatgtaatccatactaaaaaaaaattttttttttttgacacagagtctcactctgttccccaggctggagtgcaatcttggctcactgcagcctgcaactcctgggttcaagcgatcctcaacatttactgttaagcaaattttgttaagctatgcattttaatactgtgaaaggattggaagaaaaaaaccaaatagcctgtaacaaacaaat

SEQ ID NO: 479436 - DNA, 629 bp, Homo sapiens
ggttcctggaatagagctatgtccaaggagaggatccactaggagtgacttcagtgagcctagcaggaatcactctcagtcacagatcagaggtggagctgggaagactccagaggaaatgggtaccactggctttttgtgtagtaagtaatattacacaaagagctatataactgtacttcctgggttcaaatcccaactccaccaattgtgtgaccttggggaagacactttatttctctgtgtctcagttttctcatttgctaataaaataayagtaacatctagataatgattattgtgagaattatgtaagttaatatatgtaaagcacttaaagatgtctggaacatgtaaatacctagttaatgttacatgttattattgttgctatggtcattattagcactactactaccgtgaccacaatctttcttaaagagacaataacattttctcactaggaaacctagtattgttggaagctaaaaattctggttaggaggtaataaaaggaagtttcaaccataagagtaggtttttccccttgctacctagagaaatatttatccatcagttggctccatcttttctttcccatggaaagaaggggaataaaagtcttcagt

SEQ ID NO: 479437 - DNA, 629 bp, Homo sapiens
ggttcctggaatagagctatgtccaaggagaggatccactaggagtgacttcagtgagcctagcaggaatcactctcagtcacagatcagaggtggagctgggaagactccagaggaaatgggtaccactggctttttgtgtagtaagtaatattacacaaagagctatataactgtacttcctgggttcaaatcccaactccaccaattgtgtgaccttggggaagacactttatttctctgtgtctcagttttctcatttgctaataaaataatagtaacatctagataatgattattgtgagaattatgtaagttaatatatgtaaagcacttaaagatgtctggaacatgtaaatacctagttaatgttacatgttattattgttgctrtggtcattattagcactactactaccgtgaccacaatctttcttaaagagacaataacattttctcactaggaaacctagtattgttggaagctaaaaattctggttaggaggtaataaaaggaagtttcaaccataagagtaggtttttccccttgctacctagagaaatatttatccatcagttggctccatcttttctttcccatggaaagaaggggaataaaagtcttcagt

SEQ ID NO: 479438 - DNA, 524 bp, Homo sapiens
ataaagaaatataaaggagtatttttagagcacacatcagtatgtggaattgggtatattttaatctttacttattcactctctgttccccaccattaaaatgtaatagactttgtacattcactgctgtatctggagcgccccagcacatagagtctaggaaatgttaggaattatcaataacttctatcatgaaagcgtatcagaaagagtgctcaaggctgctgaggaagattaaggaagagaggaagcaccrcatcactattattcaattcaattttggtgggttgtgttattggacaaggattttgcacatatccctgtattcatgccctttggcagtgggcttagccattagacttgtttagacaatgggatagtagcaaacttgatgcaagcagaaacttgaaatgtgcttaaaggtgtctgattgctctctcggaaccttgccaccaccagaaacacaaacccagactagcctgctgggagagatgaaactatatggaacagagatgagtggcgtc

SEQ ID NO: 479439 - DNA, 578 bp, Homo sapiens
taacagtcccaaaagttcgctttagctgtgtttgcattattgctgatcattgaccttttagaaaacagaagttattttattttattattttacagatgggttccatctgagttttttgcttaaaagttgatgattttggctttcttttcaatgctcacttgagtaaaggtgtcaatgaattttttagtgataatgaaaattcttagtttaaccatttcatggtgatcctgttaggaatggctttgtccatggtggaatggctttcttgaccartaagtcttgttccttgagtgtcttggtccttgagtcattaaagtatctgcccaacaccctgcaaagcagaaagagaactaaatctctttttcacatgtgaaacacttttctcttatgttaactattgtccacttcagcattttccgcatatttatagacacttgtcagcccctcttccgggctgagtgtcttcatcaaatttactcttaggatatttggagctcagactcattctgggcaccacccccactgagcctgaatcccccccacccccccaccccatagatgtgtttctcgtcttcaca

SEQ ID NO: 479440 - DNA, 523 bp, Homo sapiens
tgtcctccctgtgctccaaaactatgcctctcctacctggtgtaaaacatcacaagctcttatgaattaggcttttgataagtgatggctgcattaaaaagagtgtattatatagtgaatctgaaagtggtgattgtggatatgtgcaaaagatcatcttggcacacggtggcctattccaggttgccactgccagactactaaacaagcaaatctgcaaattgtttcaaatctccagaactacagggtagctaatttctgtcatctaaacatgcattttagtttggtagattttactgcaatcacatttaaagtacatttaaagatcatttgaacagggcataggtagtactggtccagtgaaaactgaaaagataatgacttccacattataaagctgtttagaagcyctttttgtgcaaaaaataattttaccagtgtctctaatcctatgtggtccattgtagggcactagaaagcagcttaaaggtagaaggaatagtcagtaaccagcgtctgttgt

SEQ ID NO: 479441 - DNA, 576 bp, Homo sapiens
gtgtacactgtacttcaaaacaaaataagttcaaaagaatacagtgaagaccaataataaatccaggtaagtgatgccttgtggtccctactccagatttgcggtcagggtaaagaaacccaaattggtcataagtttccagaaaacgcaagcgccaaatctctgttactccrtcctccagtttcaacccagcctggcctgaccttctgataagctgaagaggaatgtgcaagggtggaggtccgctgagagacagttctaggcattcatttacatactctactcaccccctctcctcacccatcccaatctcaagccggtagcaacaagctggagttctgtggaagtgcagtctaactccctagagcttctctgaagagaactgtccctgggatgctataaaaagtaggctacttcagtccaatttaggagagccaaggaaatgtctggttaacaaatgtgctgcctgattgagcacacttttgccttcccactcattcatacagattgcctaaccattcttgatcccagctagtccttaccattgtccacctactcatgcattacattttatgt

SEQ ID NO: 479442 - DNA, 397 bp, Homo sapiens
gccttttaaaaatatgtgacccactcctgtttctttctgtaacagatacttagcacaagtcactatcttgattattcttccagaaaaaaagtctactaacaccacaccaggaatgtgcaagatatagttctaaaacatttcttttagaakgatctatatacatattgttgattttgagcattatttacatggtaataatggatgacaaaaagaatttaaacatttcaaactataccagtgcaaaaaattatgatattcaatgtacacatatattccacactaattttcttgttgtaattgttattgggatcatgctacactttgcaatgtaagtattcttaaaactcatggttttccactgtttccaagactaaataaaattttctgtggtgtaatc

SEQ ID NO: 479443 - DNA, 621 bp, Homo sapiens
tcgttgtggttgtcacacagatttatacattggtcaaacttactgaactcttcacttgaaatgagtgaattttattgtattcaatcaataaatatatkttaaaacatttttaaggtggattgcaaacaaactggtgacaaaaggctcagaatacatgattagttacaacatagaacaaagacagcctttcaatatgtgaaagcttacatttaaaatctacctatactatggcgcaggtatttatgtaggtaatagagacaatcactgtgtctgataggaaggtaaggcactgtaaattaattttggcaacaggcagacaatatagcatatatatgctctctagacaacacttcttaaaggtctttatgaggctgaggaggagtagaaaaccaaagtggaaactttgaatctcaacccttaattttgctaggttatggaaaacttttttcccaaaggttgggagaaagttaagaaaactgattcagaaaacaaaagtaagcccaatgccattatcgaggagccaagtaaacaatactttttgagtatattactatcatattagatgggcatttttgacagtatttgcctcatttacaagcctgttctgacattgtcttaaaa

SEQ ID NO: 479444 - DNA, 642 bp, Homo sapiens
acactatggtcataataataaatgccttatacatctgaagaaaatcgaccaatagtattgtccattaatttgctgaataaatgcacccaagaatcacaaaatacttttcacatcttactaatatcttatatgctcaatagcaaaacataatctgtgataaatattaaaataaatttttatgatagaacattccctaattaataaaaaaagaaaatcttttcccttccacctcccttgcatcttgtcccaaagtatatgaaattttacaggaaccaataattaatgattcccaacagaaggctttatactgaaaaaatgtaaggtaaactttcaccaacaacagattcagcaaaaccagtatcaatacaacttctaaacatctttaaaggtacatataagtatctatagaacatttcttttacaaacagtaaatgtctcatacctgggatgttatataaaaagtcccataattgctcttcttccatgtagctcacaaaaacgtttgcaaatgtttgtggagaaaaactgcaatggtacaatattttaaagatggyttccatcaagctgggtccttggttcaggttattttctgtgtcggaaacttgttcttgaaaggtacgttcttgaaaggaatcaaaatga

SEQ ID NO: 479445 - DNA, 602 bp, Homo sapiens
ctgctgtacggagacctatctgtggtctccatgttttgctatttttctctcttcaaaactgcccacctcttatcttgttccatgttctccccaccttccaagtctgacttaatcaagtattccgccaagaagtcttcccggatgatcccatcccataccatctgacttcctcttccttctgtcatctcagcatgcctgccaccaaaatgttagcaagttgcttcgtaaatattcttgtcttttggaagatgttctcaattagactataaacccattgacagaatgaaggaactatgtcttttgcttattttagaatcagagtttttttaatggaaggttctattgccatttaaaatgatttaaaatatcattttattgaactagttcacttcaacaggcaatgcctaagacagtatcagatacaacttaatacaacatcagttctcccaaccaaaattccaggtggattttttttatgaattcaaacttattttaaaatttatatgattataactatatacagcagctaaatatacctttaaaaagaaagaactgtcctgctagatattaagacataccrtaaagccataatattaaaactc

SEQ ID NO: 479446 - DNA, 536 bp, Homo sapiens
atggagtctcgctctgtcacccaggctggaatgcaacggtaccatctcagctcactgcaacctctgcctcccgggttcaagsgattctcctgcctcagcctcctgagtagctgggattacaggcatgtgccaccacgcccggctaatttttgtattttagtagagatggggtttcgccatgttggccaggctgatctcgaactcctgacctcaggtgatctgcctgccttggcctcccaaagttgcagggattacaggcatgagccaccgtgcccagacaatttttttttttttttaagacaaggtcttgctgtgatgcccaggctggagtgcagtgttgcaaccatagctcactatatccttgaactcttgggctcaagtaatcttcctgcctcctgagtagctagggcttataagaacaagccaccatgtccagctaatttttaatttttttgtagagatggggtcttgctatgttgcccaggctgaaaatactctagaaaaatactttaaaaaaaaaagaaagaaaaaacaaa

SEQ ID NO: 479447 - DNA, 536 bp, Homo sapiens
atggagtctcgctctgtcacccaggctggaatgcaacggtaccatctcagctcactgcaacctctgcctcccgggttcaagggattctcctgcctcagcctcctgagtagctgggattacaggcatgtgccaccacgcccggctaatttttgtattttagtagagatggggtttcgccatgttggccaggctgatctcgaactcctgacctcaggtgatctgcctgccttggcctcccmaagttgcagggattacaggcatgagccaccgtgcccagacaatttttttttttttttaagacaaggtcttgctgtgatgcccaggctggagtgcagtgttgcaaccatagctcactatatccttgaactcttgggctcaagtaatcttcctgcctcctgagtagctagggcttataagaacaagccaccatgtccagctaatttttaatttttttgtagagatggggtcttgctatgttgcccaggctgaaaatactctagaaaaatactttaaaaaaaaaagaaagaaaaaacaaa

SEQ ID NO: 479448 - DNA, 453 bp, Homo sapiens
ccgtatttgcatgtctttgtgtgtgtgtgattgcaattttaaaaactagtaacaaaaggaagtaaacaccatcataaaacacccaatatgctggcagcatttccacagtgcccccctgcagccggcctggctacctctgcccccagtgcctacttagcacagtgcctggcacacagtgggtgccagcgggaggcaytgtggttgctacggtgcccagggcttcggagggaaagcagaggtagctgtggtttagttcaatcacgtgggttttatttattaacatcatgtgcaaattctgctaaaggtgattaatttggtatatgaagtaactttttttcatcaaagtataagattttgaaaggacatttctacataaaatgtaatgggatcagtacttaatgtagtaagtagtaggtgctcaataaatgtttgatcaatgaaggacctgaaaaa

SEQ ID NO: 479449 - DNA, 617 bp, Homo sapiens
tgtaatgctacgtggcacagccttaaatgaagctgccataagatccgacttcagtgatttagatgctgcccttgagctcagtttcctgcccttcctcaaatttacccatgtttgtttctatttgttattctttctaaatgaaaaactccagatggctatacatggtttgttctttcacttcatttaggtttctactctaaagtcaccttatcagtgaggtcttattaccattcctaaaacagaaatatgacctgccccagcatcactccttattctgctttactttttctccatagcatttaccactacctgctaatttgtttattgaaattttgtatagctgtgttcacttctgcacatctagtctagaaaataattgagcacagtgtatgtgcagagtaatcacgtttgctaagagccacatactacctacacgttgggctacatattgcactgagctttcctggcttaatcttmaaaaactgctaaaatttaccaccatctatccccacggataaggggttgacatatttaaaacagactccttgagcctaaaatccaagtctatgagttgaagaatctggatttatagtccaacttcaaagcctatgatcttc

SEQ ID NO: 479450 - DNA, 466 bp, Homo sapiens
ttctctagttagctttgctgcatcatgagccaacttagtttatgatgattaatttttttttttaattatgactttactgactatgtagaaaagaactcatggaacattaagttcaatttattttccttctacttctcttctgataataaacatgcacttacatttgaaatagctgtaatccttgggtatgtaatcctcttctagatgcctgtctatctccatccattttcatttcatcacaagtctactcccgtgagcagtgttatgtgtgaacctgtgaacccttgttcatgtcatgtctcttgtgttttcatgagatgcctttttaattaactgtgacattcagtcccaagaaaggctttgcttacgagtaaaattgcgaagtatgttagccattgggatggttagcttatacaatctctttggagccmtgtgaatgaaaagctttagctaaatttaagattac

SEQ ID NO: 479451 - DNA, 631 bp, Homo sapiens
ggggagaatatttctatttcttaaactttgtccaaccttgaaaatgagaacttaaaagagaatctttctttttccctaaattaaataatttataagtatttatttattataacatttaaagactttgaggaccttgaaaggaaatctgtaaattctgacattaacatacagaaaatcaatttgataaatgtaggatttggagttactttattttagggtagaaaatacatgtgaaatatgggcttgtgagttttattaatgtttttatcctcggggcccaaatgctgacacttcaccattaggcctttgagaatttatggtgatggacaatctatcagtaagccttaggccatagacctttccagcagcccagtggtctagtgatcaatatggaataagctagtgaaaactcttgccactcttgtcatcacattgtaacttgcaaataatacaaatctagccagtctgatttgttgtgatatttatgtgttctcargttttttattcttggagcatgatttttatcccaaatgcccaataaattaccatgtaaagttcactcaacataacatagcaattacgatatcagtgtttggaataaaaaaaaaaaacagctgtgtgaacatggaca

SEQ ID NO: 479452 - DNA, 631 bp, Homo sapiens
ggggagaatatttctatttcttaaactttgtccaaccttgaaaatgagaacttaaaagagaatctttctttttccctaaattaaataatttataagtatttatttattataacatttaaagactttgaggaccttgaaaggaaatctgtaaattctgacattaacatacagaaaatcaatttgataaatgtaggatttggagttactttattttagggtagaaaatacatgtgaaatatgggcttgtgagttttattaatgtttttatcctcggggcccaaatgctgacacttcaccattaggcctttgagaatttatggtgatggacaatctatcagtaagccttaggccatagacctttccagcagcccagtggtctagtgatcaatatggaataagctagtgaaaactcttgccactcttgtcatcacattgtaacttgcaaataatacaaatctagccagtctgatttgttgtgatatttatgtgttctcaggttttttattcttggagcatgatttttaycccaaatgcccaataaattaccatgtaaagttcactcaacataacatagcaattacgatatcagtgtttggaataaaaaaaaaaaacagctgtgtgaacatggaca

SEQ ID NO: 479453 - DNA, 429 bp, Homo sapiens
agctgcttgggaggctgaggcaggagaatcrtttgaacctggagggcagaggttgcagtgagcctaggtcgtaccgttgcagtgagcctaggtcttaccattgcactccagcctgggcagcaagagcgagactctgtctcaaaaaaaaaaataaaaaataaaaaataaaagaattaacatgttcttcgtattatctaatattcaatgaatattgaaattgttttcattattacacattgttttctaaataattcctctgtttattgacttggtttccagatgtgatctatttattgttttttgattctgaaatctcaattttcttttagcttttttacccctagatcactccctcttcctttttttcctctgtgtatttgcttattgaagaaacaaggtaattatcccatagaaaagtcttacattcta

SEQ ID NO: 479454 - DNA, 518 bp, Homo sapiens
ttctcatttcttctgtcaccgcttggttgtgtatcttggaaaaaaaatatacttctggtgggaagactcaaggagagaatctgtgctgtgtggtatactggcaatatttgtactgacctggttaatataaattgttaagaaaacattggtaaatattatttattcatagtgttaactattctttcaataggcagtccttgtttcttttcattgcagttggcattctctgggttgtgtattcacatacaggatgtttactggggagtacttttgggattggcaccagtggaagggaggggaagaaaacaggatgcagtagagggagaagtggagtatggtgcatgcccaaggatatatacacaaggacgaggaactctggagctggaatggcctttcgaaactctcttccctgaggagcagacagcctgcccaacagtcattgtgttgtaagtggaccaccttggagaaggagtttgactttaccaakgcattgctctttagctggggcaatccccaaa

SEQ ID NO: 479455 - DNA, 628 bp, Homo sapiens
ctgtcgtgattgccctcacaacgcggcctcacatacttttaaatgaaacatggggcaggttatgaaagagtaggtatagtatgatcccatttttaaaagagtttttctacacagtgacagttctggaagaatttactccagaatctttagttttgttgctgggtagtgagattatgagtgttcttattttcttctttttgattacccatatcgtctaactgttcaaaattcaatagttcttgtgtaatttaaaaatgttttttaaaagcaaaactaggagccacttacaattcctacatacccagtcctccctggccctttttgctctggagataraaatgtttcattcaggtaaaataatccaatagcttagaaatatatactccccaaccccaaatagtttcattccaattcctcactagggttttcctcctcaccgagaaaatgaaaaactaccacaaaaggctatgatgtgacaaggatccaagatttcccccttttcctcttcccctccctccattctcaaggggagtacctctgtccttggcaaaatggggaagggctatgccttggaggcagcagggtaccccaaaaggcacaagccacaccagtcactttgagccagggg

SEQ ID NO: 479456 - DNA, 548 bp, Homo sapiens
cgcctgtaatcccagctactcgggaggctgatgcaggagaattgcttgaacccaggaggcagaggttgcagtgagccaagatcgcgccattgcactccagcctgggcaacaagagtaaaactctgtctcaaaataaaataaaataaaataaaataaataaaataaaatataaaattattaggtattaaagaactaaaaaggcaaaatgagttcatagaggtagtaattgcaggaagcagytgagggagcggggcagaggaaagaggtcaaaatgactaaaacttcaaaacttggagctgggtcaggcgtttctgagaagggggtgcagcccggctgacaggtattggtgtctctaaaggggcaccatgagattgtttctgagtgtcggggaaactacaaataggaaccaacttctactatgaaacaaactactttgttgtgttggagctgacaggtacagacaaataggataaagctttctttcctttcaccctcctctaagcgccttcccctatagcgccccctataggcagaatgtgagagggagg

SEQ ID NO: 479457 - DNA, 548 bp, Homo sapiens
cgcctgtaatcccagctactcgggaggctgatgcaggagaattgcttgaacccaggaggcagaggttgcagtgagccaagatcgcgccattgcactccagcctgggcaacaagagtaaaactctgtctcaaaataaaataaaataaaataaaataaataaaataaaatataaaattattaggtattaaagaactaaaaaggcaaaatgagttcatagaggtagtaattgcaggaagcagctgagggagcggggcagaggaaagaggtcaaaatgactaaaacttcaaaacttggagctgggtcaggcgtttctgagaagggggtgcagcccggctgacaggtattggtgtctctaaaggggcaccatgagattgtttctgagtgtcggggaaactacaaataggaaccaacttctactatgaaacaaactactttgttgtgttgragctgacaggtacagacaaataggataaagctttctttcctttcaccctcctctaagcgccttcccctatagcgccccctataggcagaatgtgagagggagg

SEQ ID NO: 479458 - DNA, 526 bp, Homo sapiens
acctaaacagcaagggctttacatgggccagatttcctttgcctaaagtgtgatccaagcaggcaccacacacccgtcaatatagacagcatatatgggcattagagagtatttttagaaccataagctacccataagccaccatttccacaaaagtcctggttccataggaaaacctaggagaaggagaaaaataacactccaacatacataaataactccgatggtccagcatacattttcaattccaggacaaggccatggacaatctagcaatttcagaattgaatgaaagagaaataccctgtcaagccctgctctggaatcaaaacaatatgtcttcatcatgtatgtccgtgygcacagacacacacggtgggagactgggtgctgggacgatgtgaaacttccttgcagccttgatgaaaagtctcctgatgcccctttcttgttggcctgaacctgagaagcaggcatgcagctcctgccctttcagacagaaatgcctacagagctgctattgttt

SEQ ID NO: 479459 - DNA, 527 bp, Homo sapiens
ccaagttggcttcctccaacagagagtatttcctttttcccgagagcgcactccagaggcggaaaggccaggctgaaggttgattagtagaccagaaactccattgtgggattaacaaaacaaagcaaaacaaaacactggggctcacacttcaatgtatcaccaactttaatttgattgtgtaatgaggcatgataaataagatttgcatgattgcaccctttcctttgcttaaatatcaaacattgcaatgaatatttggactaaatggttgtctttgaagtgagttttgtttttaaaatgcttcaataagttacctagagagaagagagtcagcacatttaagtcaagtcccccaaacttcaatttcstcatctgtagaatgggtataataatggttcaccataactacagttggtctccttccatccggtatctgtgggttccaattgtgcactgaaaatatttattaaaaatggatggttgcatctgtagtgaacatgtaagactttttttccttgtcatta

SEQ ID NO: 479460 - DNA, 597 bp, Homo sapiens
ttaggataagtcctgaaaggtagatttacccactgggttgaaagtctgcacatgatagcaaatacagagcataccccaatttgtactcttaccagcagtgtatgatggtgcccctttgccaattagcattggcttttatctttttatctaatcttgccaacttgtattttttaactttctttgtatgtgtgtaggaacttatacattttctcattttttttctgcaacatgcttaatattgtccatttcaaggagggtatttgttattttcttgtagatttgtaagatctctttattcttaacacatgtcagttgctgtcttagtcggctcagtctgctattacagaccatagactggtctatggtttaaattataagccatatactaggtggcttataaacagtagaaatatatatatttatatttattttaaatgttaagtatatagattttaaaaaacatatatacacacacacacacacacacacacacacacacacacacacacacacacacacacacacacacacactytctcacattctggaggctgggaagtccaagaagaaggtgctggcagattgctgtctggtgaa

SEQ ID NO: 479461 - DNA, 586 bp, Homo sapiens
ctgctttttggaagagcccccactttgctcagctcccacagcaccccatacctccctcaaaacatgcacgttagtaaagttcttgcttcagaattgaaaggtgcttccacatttgagcttcaaaatggacctgtgaagtagacagacttagtccctgcctaccttttcccccaaactcacccctgattttacagataagggattcaagatggtgagaaggcagggagttggtgttcattacacaaaggtgtgacttctgcacagcctttcttttggagtgaaaagggcctggattcaaattgaggccttgcccctggcttgcaaggttgcctctttaaagttttttggactattctaagtgttttctttttttaatctataaaatagggataatataatacattgggactaatatgaagattaaattagamaacatagcaggcgttcaatcatgggggtcatactggctgtatcttccacagcccacacaccgtgttgttttattttttgttggtcatatgccactcatatgccatatctttccagggccatttaccattaatgataacccaatgtgagcatttcc

SEQ ID NO: 479462 - DNA, 515 bp, Homo sapiens
gatgtggcctctctctaggggcaagagacagccagtgggaatcctgggaaagtagttccttctcttttggctccaactcactcccagcctgactacatgtgtgcaactgggacatgcaccccctgccggtgttggatttggagtctctcaggtactgcccatggtgcaagttgaagataggtcctaggagaggatgagctgcctgcttgtggttgccattgatgaggagataccaaatggttaacggacttgcctacctaagccatcaggtctgtggagagaagcgcagtgaacccagtagcaacaaatacttacctacagaacactgtccccatcatgaccctaggaaggcttttaccttcttctctttataaagaaggacatgtaggcttggagaggttcaacagcttacccacagttctgcagytgccaaacaacagagccagaatgagtgaatcatgactgctcccttgaactgcctagttcacccacaggtgccacactaagacccaggc

SEQ ID NO: 479463 - DNA, 515 bp, Homo sapiens
gatgtggcctctctctaggggcaagagacagccagtgggaatcctgggaaagtagttccttctcttttggctccaactcactcccagcctgactacatgtgtgcaactgggacatgcaccccctgccggtgttggatttggagtctctcaggtactgcccatggtgcaagttgaagataggtcctaggagaggatgagctgcctgcttgtggttgccattgatgaggagataccaaatggttaacggacttgcctacctaagccatcaggtctgtggagagaagcgcagtgaacccagtagcaacaaatacttacctacagaacactgtccccatcatgaccctaggaaggcttttaccttcttctctttataaagaaggacatgtaggcttggagaggttcaacagcttacccacagttctgcagctgccamacaacagagccagaatgagtgaatcatgactgctcccttgaactgcctagttcacccacaggtgccacactaagacccaggc

SEQ ID NO: 479464 - DNA, 451 bp, Homo sapiens
ggcagggatgctgggaccaggctgcctggtctctgtcagccccctcttcctccccaccactgtcccctcacccccacatacacttcactcttggccgcagcaacgatgcacacagctccacacttctgaacctttgcacacactgtccacctgccgggcacatccttcccttctttgtccatcttcagctcagttacctcctcttccaggaagccttctagggttttctccttccyagagtcaggccatctgtccctgttcccaccacatatattctgtcgcatgtgacatgacctgttgttaatgtagggtctgcacaactcttcccctgtagagtcaggaaaagggtctaatccctgtgcctctggtattggatggggcctggcaggcagcatgtgcccagaaaatgtgtgcgaagtcaaaccaaggaagtatggcaagaacgataatg

SEQ ID NO: 479465 - DNA, 531 bp, Homo sapiens
ctgcaggcccagttgtgggggtatcctttaaggactgccctgcctagggctgagccccccttcaaagaaaggaatgagaggcctatggggagtgaggatggggcagtgatgagggcttacatccccagcaggcatgtcccctcctgggacaccttggaacaccaaccttcttggctgatgaatgaaaaaatgggattctttacacactagggcagtgccagggccgtctgaattggggcacaatagtgctcctcctggctggtgaagaaaagcctgctctggcaggggatgtttattggctggattggagcccaactccaggtctggtatttagggyataagactaggtggttacaagaggcaagggtgggttggggttccacgtggatacagccccataggtttcaagggaggatatagctgttcctgccatcaagtgcaagctaagcattggagaatttccagtgttgaagaaactaacctttgggaaggagcatcagtcagaacaaaaaaaagtcttaaaaaaaggct

SEQ ID NO: 479466 - DNA, 142 bp, Homo sapiens
gactcgtaggatgcagggacgcagmgctctaggtgtgctggtttgttccagttgggtctgaaaatctttatcttccaagaccttttcttagttaataacatgcagacggctgacggcagccccccaggatcctcacgctgca

SEQ ID NO: 479467 - DNA, 396 bp, Homo sapiens
ttgggatatgaccaaggcatcatttcaagttagttgagaagacatggtgggagacagggtttgttctgtttgtataaaacaaagagaaatcgtgtgtactcctgacagctctggaagggcccgtggcgaccccagggccgactgttctgggagggagctgtgtggccaggagacccattcatgtctcctttctattacatgcgtgcgttgttacacgttaaaaaacraacaaacaaaaaacccaaaacaacaacaacaacaacaacaaacaagtgcaacgtgactttttaaagctgggcctgagagccccagggagagccgggcctgggtgcccagcaggaccctgagctgcagagccggccagcggctggggggccgttctccctcccggaccct

SEQ ID NO: 479468 - DNA, 396 bp, Homo sapiens
ttgggatatgaccaaggcatcatttcaagttagttgagaagacatggtgggagacagggtttgttctgtttgtataaaacaaagagaaatcgtgtgtactcctgacagctctggaagggcccgtggcgaccccagggccgactgttctgggagggagctgtgtggccaggagacccattcatgtctcctttctattacatgcgtgcgttgttacacgttaaaaaacgaacaaacaaaaaacccaaaacaacaacaacaacaacaacaaacaagtgcaacrtgactttttaaagctgggcctgagagccccagggagagccgggcctgggtgcccagcaggaccctgagctgcagagccggccagcggctggggggccgttctccctcccggaccct

SEQ ID NO: 479469 - DNA, 573 bp, Homo sapiens
acactgagtcaaagttctggcctctcccacaaatgcccttggcaccgactttgttcctgtaactgaatttttgctttgttctctccactgtggttctgagtagcaaagtggccttattccttgtcccaagtcacctaatactatccaagattgacacaaggacaggttctgagctgaatactctttggctgggaacccatctacctggctctaccccagaacaagtctttgtcttcctctggtctatagtcagaaggctggacctggcagcaagacccattccctgtgtcctgtgtgcagtccagcatctcttgctttggggaaaccctttgatatggtttggctgtgtccccacccaaatctcatcttgaattgtagctmccataattcccacgtgtcatgagagggacacagtgggaggtaattgaatcatgcgggtgggtctttcccatgttgttctcatgatagtgaataagtgttatgagatctgatggttttataagggggagttcccttgcacatactcttttgccctctgccatgtaagacatgactttactcctcattcacctt

SEQ ID NO: 479470 - DNA, 573 bp, Homo sapiens
acactgagtcaaagttctggcctctcccacaaatgcccttggcaccgactttgttcctgtaactgaatttttgctttgttctctccactgtggttctgagtagcaaagtggccttattccttgtcccaagtcacctaatactatccaagattgacacaaggacaggttctgagctgaatactctttggctgggaacccatctacctggctctaccccagaacaagtctttgtcttcctctggtctatagtcagaaggctggacctggcagcaagacccattccctgtgtcctgtgtgcagtccagcatctcttgctttggggaaaccctttgatatggtttggctgtgtccccacccaaatctcatcttgaattgtagctaccataattcccacgtgtcatgagagggacacagtgggaggtaattgaatcatgsgggtgggtctttcccatgttgttctcatgatagtgaataagtgttatgagatctgatggttttataagggggagttcccttgcacatactcttttgccctctgccatgtaagacatgactttactcctcattcacctt

SEQ ID NO: 479471 - DNA, 633 bp, Homo sapiens
ggaaaacttcttttaggagagggcatctgcgctgagagctgaaggataagtccctgctgtttgaagacctggtaggagggttcctcacagtccaagaagtgtgtgcaaagtcccccatgaaaaagaaggcatatggtttaagcccaggtaagatgtgcacaatgtggaaaccaaacgagccaggaccaaggtcttgggccaaggcagccatgtttggtggcatagattgtgcactgcacaattctagggagagccattcacacagatcaggtggcagtaaagttttttttgtaaagggccagattgtaaatattttargctttgtggagcaggtgatctctgtcacaactactcaattcgttaagcagctgcaaatgatatgtaaataaatgagtgtggctatgttccaataaaattgtattttatggggctgatgtagttactcaagcctgtaatcccagtattttgggaggtaaagatggaacagttgcttgagcccaggagttcaaggctgcagcaagccatgatcatgcccttgcaccagaacctgagcaaaagagtgaaaccttgtctcaaaacaactacagcaataaaacaactgtggacatcaaacttgaatttcataaattaaaa

SEQ ID NO: 479472 - DNA, 566 bp, Homo sapiens
tgaagagcagaggtttccaaatgtattttatccagagaccttcatccaaatggaagccgacatggaagctcagcatgtgaaatgggaaaatatgacaattcattcaggtaggagtgagctgaggacctggagtgtggcctgttcctacttccttcccactctcccctcttccaaacagcaggccctgacgaggctcatggacctttaggcctcaacagagtcctttgcagtcactgccacagtgaacacaggactctgcgttctacagacaggactctgcactcagcactatgctaggccatccaagggagtgtgagcyggagggcggggctgggggacatccaggctggatgtgtgcaagggccctgcactgatctgtaagggaaattacttcctcttctctggcatttttccccactttatttctttaaggttcttatactcctgacaaaccgcaagcctggtggccactagaggcaaccccagatattcccccagctccatccctttccatatggatggacctgcctctgcgcgatgccaactgtacctgggccttagccgtc

SEQ ID NO: 479473 - DNA, 601 bp, Homo sapiens
gctcctctcccctgtggaaatgagctgcttggcagtaacaggtttgctattcatcttatctcctattaggtaacccttcccgtcatcccagggctcattctctctctctctctctctctgtctttcatacacactccttaaatcccctatattaaattactgttgaaatgtttcgaactctcagctccaagatcatatgacagaacgyatgagggtttgctttttaatcttgcccaagagagagaaatgaaaatgacttgcaggattttgacaaaatgatcagacaaaaaactttttagcccccacccctcgaataaatgagaacttgtcaaatgccattatcaaatcatatagatcagaattcgtctcagttttttttgggcggggggtgcctaaaagcaataaagagttgtaaccgcattccaagttatgtttggattactgacgactccatgactgaagatttgtctgtcttgaaggcagatggagtttgagctgatttatctcctggagctggagaccccatggatgcctcattgagtcgtaaaatgtcacagtgagctctgcccctgaccactttgaaccattgagcttggatttt

SEQ ID NO: 479474 - DNA, 620 bp, Homo sapiens
gctctgcagcacctccctcaggacaccgtctcacattttcctagattgggtgacgactttttttctgaggtttctcagctccctgtaatarcactgtcaggatccttcctttactatgtggttcttccctagtcctatgctgctaatacactgtggtctcttaaaagcaggggctagattttctgtctctgaatcctcagaatccaggacagagcgtggcacgtagtgagtcggtaccactccgtattgaaatttatgtagagagcttttgtagaataacaatacttgagtctcatcaccagagacttagaatttgtcttgggtggaacctgggcatgaatatatttatatatatggaaaatcccccgcttgttttaaaaatgcagctatggttatagaccactgaagcagatgcttagataatgcttcttgaggtattggactataacagatattatcctggccatctcattttttggtagggcagggggttggagaggagctgcaacctgctgtttaggcagcttctcaaggatctcagttcacttcaggctgcagaaacctgggagcagatgactgcttctagatgctgcatacttatctgaaagaaaaccttaatg

SEQ ID NO: 479475 - DNA, 607 bp, Homo sapiens
tgtccactgcagaattcattgcttgcttggtggtggggatagactctcgcacatttgttacagatgtcttctgtgttcatggttgcggcatgggagcagagggaaagtagcgtgtgttttttccacttaggaatttttaaaggattttcaacaggaaaatgctatgatcgcatctgtgtttttagaaaggtccctctgaccattatgtagaaactggattgaaagaaaataagagagagggaagggrcactggttcagagacccccacaggtgaaaggaaatggaggcttggtcctccatggtactgatgaagatggagaggggtaaatggcttttggggtggaattaatgggtcttgatgactcaataactttcaagcaattcaagatagtcccttcttagcccaaggctttgacttgggcaccagtggggcctttaggctgtgcttggaaactagagggtgtttttttattgtccaaaaacaggcttggttttggacaatacatgttctgaaatagatagtaatgttcattttcaactcaggtgcttaaaaaagaagctaagtcttatgggccagtatgtatggaacatgtatgtaacgtgttat

SEQ ID NO: 479476 - DNA, 607 bp, Homo sapiens
tgtccactgcagaattcattgcttgcttggtggtggggatagactctcgcacatttgttacagatgtcttctgtgttcatggttgcggcatgggagcagagggaaagtagcgtgtgttttttccacttaggaatttttaaaggattttcaacaggaaaatgctatgatcgcatctgtgtttttagaaaggtccctctgaccattatgtagaaactggattgaaagaaaataagagagagggaagggacactggttcagagacccccacaggtgaraggaaatggaggcttggtcctccatggtactgatgaagatggagaggggtaaatggcttttggggtggaattaatgggtcttgatgactcaataactttcaagcaattcaagatagtcccttcttagcccaaggctttgacttgggcaccagtggggcctttaggctgtgcttggaaactagagggtgtttttttattgtccaaaaacaggcttggttttggacaatacatgttctgaaatagatagtaatgttcattttcaactcaggtgcttaaaaaagaagctaagtcttatgggccagtatgtatggaacatgtatgtaacgtgttat

SEQ ID NO: 479477 - DNA, 607 bp, Homo sapiens
tgtccactgcagaattcattgcttgcttggtggtggggatagactctcgcacatttgttacagatgtcttctgtgttcatggttgcggcatgggagcagagggaaagtagcgtgtgttttttccacttaggaatttttaaaggattttcaacaggaaaatgctatgatcgcatctgtgtttttagaaaggtccctctgaccattatgtagaaactggattgaaagaaaataagagagagggaagggacactggttcagagacccccacaggtgaaaggaaatggaggcttggtcctccatggtactgatgaagatggagaggggtaaatggcttttggggtggaattaatgggtcttgatgactcaataactttcaagcaattcaagatagtcccttcttagcccaaggctttgacttgggcacsagtggggcctttaggctgtgcttggaaactagagggtgtttttttattgtccaaaaacaggcttggttttggacaatacatgttctgaaatagatagtaatgttcattttcaactcaggtgcttaaaaaagaagctaagtcttatgggccagtatgtatggaacatgtatgtaacgtgttat

SEQ ID NO: 479478 - DNA, 582 bp, Homo sapiens
aagaatccatgagacggctctttgaatccatcaacaatctgatgaaaagtcaatacaaaactaccatccttttgcaggttggtttatgctacaataaaatctatcttctccttggccatccagtaaataacagcatgctaagataatatcttcttttacttaaatatgcaaacttgtatccagtgaaggcctgggctggccactaggttaaagaccaagggctcctcaggacaagagaaaacgtatttattgtttgttacccrtgaagctagcagtgccttcttttaaaatagctctgaaatttttgttacctagaaggaaattagtcaaaccggatccacttccaatggagagaacagttcatggtagcagtctcttaaactgagtttaattctcgacaacataaagtcagggacccttttgggattaaagagggctcctcaataaacaagaggtgctttggagagaatgagtcctctcatgtgtggtccacgatgctaatctgtgaagactgcaaatctttgagaaactgtgaggcctatccctgtgtttgggaaggagttgagcagctaagagtctgaa

SEQ ID NO: 479479 - DNA, 487 bp, Homo sapiens
aaaacttaatttttagtctacgtcttcaccttcatcccaagacctgtatcgttaactggctctctgacatatcaaattccacatgtgatagttggagccacatttttgatgaagagaggcaatgtttagaacaggttttccaattcaaaaaatgtttattgattctctggcataaacaaaacattttgtagccatttagaaaatacaragatgatgaaaatatggtgatgtcctcaaggagcttgcctttatttgcaaaatgaggcattctttattataatgcagaatgaatattttatagtagagataataagcaaagcgccatgagacttcagaggagagagccagaggatgttaaagtcattcttgtagtttaaaacctccaaaagattatttaaaatgaacaagaaacaccaaagaacttcagaaattggaaatattcaacttttattatattagatttggtaacctctgattttttcatgat

SEQ ID NO: 479480 - DNA, 487 bp, Homo sapiens
aaaacttaatttttagtctacgtcttcaccttcatcccaagacctgtatcgttaactggctctctgacatatcaaattccacatgtgatagttggagccacatttttgatgaagagaggcaatgtttagaacaggttttccaattcaaaaaatgtttattgattctctggcataaacaaaacattttgtagccatttagaaaatacaaagatgatgaaaatatggtgatgtcctcaaggagcttgcctttatttgcaaaatgaggcattctttattataatgcagaatgaatattttatagtagagataataagcaaagcgccatgagacttcagaggagagagccagaggatgttaaagtcattcttgtagtttaaaacctccaaaagattayttaaaatgaacaagaaacaccaaagaacttcagaaattggaaatattcaacttttattatattagatttggtaacctctgattttttcatgat

SEQ ID NO: 479481 - DNA, 491 bp, Homo sapiens
taacatgataacttgcatattaaagttaattcagacctactgctaatggaaggggcatacaaaattaatttctacagcacctcataaattatgatcactcactcttctttggctggtgttctttgtcttggcaggggctgcatgtgtacttaaagtgggcacacttcagttagtaggggggcatctttggcccctgaggaatttgggaagcttggggtgtgtgccttgtagctcttaatcactgcctgtctgccggtgttttcctgctggaatgtgtgtactccattaccagccagcttgttgactggcgtggatcttggttttaatatttaatgagatgatgaaaccgrgctgaaatgagaagaatgtggaaggtgggagaaagaatgggaaagataagaaaagagctgccctctcttgatggcaggagattctccaagaagagttcagcacagcatcttcaggcaactattgctgtcctgttgagtacc

SEQ ID NO: 479482 - DNA, 568 bp, Homo sapiens
ctgcaggctgccgctggaacgggtcaagcgaatgatgaagagcacactgagccaagccagtggaagcccccaagttcatttttcttgtaagaacaggccggcagccactttcaaagaacatgtgtcatagagtctagtttagaactgcgttaaggatgacttgcttactctgaatcacatccaactgcagagctttgttatagatggttgttggcacttagagggaaatacccggtctctatcaataatcagtcatgctctggcacaagagaagcagcactgagtggggcattatccgaccacgttctagtcgcagctccatcatccctgggtgtgtgacatgtcgggatcagtgtctctcaaagtgtatctgaggaccacttcaggaggaccctgggttgggggtaagagggagactctgggtcctgccccggaatattgggtgctcctggtgctgtgtgagccaagtttcttgrttggctctctgcttatggcaggctgatttctcatcatccccaaatgtttattgagtgcctgttatctagagggcacagtttgggatattgta

SEQ ID NO: 479483 - DNA, 440 bp, Homo sapiens
cagtgtgatgtgctgcaagatgggtttgatcagcactttggtttggggaatatattttcatttgagaagatgcctctgctgggcttcttgtggcattggttttggaagcacagattctcagcccagccgagggaaggccacgacacatacagggtgtggagagcacagacctgctttaaacttcttgccaggagtggctagcctttcctgccccccaccgccccagcatcaagcccagctagtgagattctgttctgaattgaattttagccttaatgagataccaagtcccttctgttctcagtaacagagaccttgagagtttttattagagagtgagtgagacaaaacttttcactgtttttcatgttcctaataacagcctaagtygtaacctgaatttttatgtaactaattatgactgtgacttgggtatgaaa

SEQ ID NO: 479484 - DNA, 684 bp, Homo sapiens
atccatgcacacctgtgcacacaggtacaggtatagaagtcacctttcatcggactttcttcttgtaactagaacaacrttaatgcttttgccctgctggaatgtgtaggtactaatcacactttggagccacacggctgggttctgcagtagccaaactattcttagcttctctgaaacagatgtcccatcgctcacaccccctctagtggcagccagccctagaacagggctgagcatgcacagactaaagacaaaaaaacctcccaagaactcacaagaatatttccatgctaggtgtcacagcccttgtattggtataaattttacacaacctttcaaatatacaatattctggctttgggaactgttcactttaagcattaggcatctacctttttcctttaaatgaccatttgtactgccatatcgtaaactcagaaacagaaacagtggacactatggaaaaaaaaatccaaagtcagtgcaaaaagagcagataaataagttgtgatatagtccacatgatggaatatcgtacagccacaaaatatgaatgaactacagctatacacagcaacacaactgatctttttaaaaaacgtgtaagaaaaaaaaaacactagtcctagaagagcacataaatatggtaccattttgatacacctcaaaaacaaaaacttt

SEQ ID NO: 479485 - DNA, 684 bp, Homo sapiens
atccatgcacacctgtgcacacaggtacaggtatagaagtcacctttcatcggactttcttcttgtaactagaacaacattaatgcttttgccctgctggaatgtgtaggtactaatcacactttggagccacacggctgggttctgcagtagccaaactattcttagcttctctgaaacagatgtcccatcgctcacaccccctctagtggcagccagccctagaacagggctgagcatgcacagactaaagacaaaaaaacctcccaagaactcacaagaatatttccatgctaggtgtcacagcccttgtattggtataaattttacacaacctttcaaatatacaatattctggctttgggaactgttcactttaagcattaggcatctacctttttcctttaaatgaccatttgtactgccatatcgtaaactcagaaacagaaacagtgsacactatggaaaaaaaaatccaaagtcagtgcaaaaagagcagataaataagttgtgatatagtccacatgatggaatatcgtacagccacaaaatatgaatgaactacagctatacacagcaacacaactgatctttttaaaaaacgtgtaagaaaaaaaaaacactagtcctagaagagcacataaatatggtaccattttgatacacctcaaaaacaaaaacttt

SEQ ID NO: 479486 - DNA, 615 bp, Homo sapiens
cagctgtgtaggcccaaggcactgccacaggaaacaccttttttttttctttttttttggagacagagtctcgctctgtcgcccaggcttgagtgcagtggcgtgatcttggctcaccacaagctccgcctcccaggttcacgccattctcctgcctcagcctccggagctgggactacaggcacccgccgccacgcccggctaatttttttgtgtgtatttttagtagagacggggtttcactgtgttagccaggatggtctcgatctcctgacctcgtgatcctcccgcctcrgcctcccaaagtgctggaattacaggcgtgagctaccgagcgaggatgaagtagccccaaaataatgaaaaatgggtgattgaactcatgttcaatcagattgtcataaaattacattaacttaaaggaatgtcaaaaacgatcctgaacaacaaaaattataaattataagaaaatataacattgaatatcttttgcttagggagttctgagtattacgtcattgataagttacctaatgtccactgctgccagacccacctaaaatcctggatcccctagtttcctgttttgacttgacaaatctgaatttaaggaga

SEQ ID NO: 479487 - DNA, 615 bp, Homo sapiens
cagctgtgtaggcccaaggcactgccacaggaaacaccttttttttttctttttttttggagacagagtctcgctctgtcgcccaggcttgagtgcagtggcgtgatcttggctcaccacaagctccgcctcccaggttcacgccattctcctgcctcagcctccggagctgggactacaggcacccgccgccacgcccggctaatttttttgtgtgtatttttagtagagacggggtttcactgtgttagccaggatggtctcgatctcctgacctcgtgatcctcccgcctcggcctcccaaagtgctggaattacaggcgtgagctaccgagcgaggatgaagtagccccaaaataatgaaaaatgggtgaytgaactcatgttcaatcagattgtcataaaattacattaacttaaaggaatgtcaaaaacgatcctgaacaacaaaaattataaattataagaaaatataacattgaatatcttttgcttagggagttctgagtattacgtcattgataagttacctaatgtccactgctgccagacccacctaaaatcctggatcccctagtttcctgttttgacttgacaaatctgaatttaaggaga

SEQ ID NO: 479488 - DNA, 615 bp, Homo sapiens
cagctgtgtaggcccaaggcactgccacaggaaacaccttttttttttctttttttttggagacagagtctcgctctgtcgcccaggcttgagtgcagtggcgtgatcttggctcaccacaagctccgcctcccaggttcacgccattctcctgcctcagcctccggagctgggactacaggcacccgccgccacgcccggctaatttttttgtgtgtatttttagtagagacggggtttcactgtgttagccaggatggtctcgatctcctgacctcgtgatcctcccgcctcggcctcccaaagtgctggaattacaggcgtgagctaccgagcgaggatgaagtagccccaaaataatgaaaaatgggtgattgaactcatgttcaatcagattgtcataaaattacattaacttaaaggaatgtcaaaaacgatcctgaacaacaaaaattataaattataagaaaatataacattgaatatcttttgcttagggagttctgagtattacrtcattgataagttacctaatgtccactgctgccagacccacctaaaatcctggatcccctagtttcctgttttgacttgacaaatctgaatttaaggaga

SEQ ID NO: 479489 - DNA, 553 bp, Homo sapiens
ctactgataaaactctatcagtaaagaaaattattgcctgtgcataattgcaatttaaaataattctaaaaactcatactgaacaaactatgtatgaaattccttgtcttcatagatgtcttttactgatttccaacattatactgcataaatcagatcctatttccagctgagacgttctcttacagttttttatttaaatgatttccctaaaagatgacaatgtagaaaaagcacttggagcatgaagcagatagacagcaaaacccaaaacacattttaatccattccaaacacatgrctgtttccctatctcaaaagagtaatttaaggttctctttatcttgacattcccacaagcaagtttctataaaatagaaagagaaccttaacctgcctatgcgcagcacacagatcagagcacagggcaagacaaatgcctaccagagcctatgccagctcttccctggggccagcccacccctcccaggctgcccgccacctccacgagaagcaccagggatcacgtttctcttcttatatccaatgtcac

SEQ ID NO: 479490 - DNA, 348 bp, Homo sapiens
acacacgctaccggtgacagtaacagcctgagagacaggtgacaatggatctgtctagtggcactggaggctggaaatcctgaactctgtgctgtacttgaacacatttgcccagggaaagattccccaagggacaagtgcatcaatctygtatgactcttggttcttcaaaaaaagtcaattaaaatttttcaaggccagtacagtaaacagtgctctgtgtgatgctcacacctgtgcatgagggagcaggatgtgggtaacacaaagtcaacagcgcagactcacctggcatcttctggggactctgcaatcaggtggaaagtcctatcggccataatgatgtcg

SEQ ID NO: 479491 - DNA, 557 bp, Homo sapiens
ctgctgataactccttctctgaagtgttctcacctcacctagccctttttctccagtctcaaggctgccatccctgttcaagcttcagtgcctgtcatccatctgaactgcatcagcctcatatctcctcttccaatcctccctgtacacctctcctttaaaacagtgctttcaacctgtascatccacccccaagcgcttacaacgatgcccagtttcctagaactgctacacctaaaagaaatcaccagccgccttctaaagctggttcatccgacaaatctctttctaaaagctgcatttctcactgctcccaaatgtgaacactcggctattgtcaaactagctcatctctgagttcactctccaagcaaactttcacatccatgctgttgctcatgctatactatctttccttgtcttttcaaccttctggaagcccagatcttctatctgcagttcagcttgctcttcttgcatgaaccctaaatcaagtggaaaaagcatgggtttcttagtcatgaggatctgaatttgaccctagatccatcactacc

SEQ ID NO: 479492 - DNA, 614 bp, Homo sapiens
ctgcggagacaatcaagcaatggccttcatgtaaggaaaacactgaccagtgagtgccgcccagcaatggaaatgctgccttatggagaagacagctcacaattccagaaagtgctcaaacataatggttctcaaactggaacatgtattgaatcacctrgagagctggagaaaacccagatgctttgggcccacctgcagagattcctgttcagtgagtgtggaggaggcccatgattttgcatctccaggtgacactggtgatgtggatgctgctagcccaggacctcactttgagagccatggctctaacgcaagctggggcaccccattcaggctggcagagaaggggtgcttgacatcaagtgggaggttgaaccctgcaaacttccaaaatcaatttgactcggtaggtcctgctggcattcaggactgcctggtgcccagcctgagacgcctgaaaagtcagagtgacccaggtctcccgccaggggtgccccatgacgtggacacctcaggcaaatcactttcctacagttttactatttataccaatagaaggtaatgccatcatcatgcaatgccacaggcactaaggaaaaaggcctatgcat

SEQ ID NO: 479493 - DNA, 595 bp, Homo sapiens
ctgagggaccttgggacttagtttcttcatctgtaacacgaggtggttaaactggagcaaagatttcctctcctttcatttcatcatayggatgccttcttttgaaaggttttaactgccaatgaaacaaataatatggtttactaggtcagagctggtgcaacttgatcatagaaataattatcttccatgatgcgtttgaaatactgaaaacagactagtgccttcaaagaactgggcagctctgggatatgatttcaatatgattcttttgctgaaatctgccactccagaggcacatttctttccctgctacgcagactggcaaaacacatgcaaaagctgccagagtggctttttggaagctgacaaggggaaactggcacccatgtagcattaagcattacgctcgaagccaaacctaaaatgtaagcagtagtgacgctctcaactcaatgcatcctggtcaatcacagactagaatatttgttttgaaagttgtcctgctgagaccaaagtatgaattctcttttcattcagttaagcacagcctattctaggatccggcagttcccacaaagccaggccaattacc

SEQ ID NO: 479494 - DNA, 595 bp, Homo sapiens
ctgagggaccttgggacttagtttcttcatctgtaacacgaggtggttaaactggagcaaagatttcctctcctttcatttcatcatacggatgccttcttttgaaaggttttaactgccaatgaaacaaataatatggtttactaggtcagagctggtgcaacttgatsatagaaataattatcttccatgatgcgtttgaaatactgaaaacagactagtgccttcaaagaactgggcagctctgggatatgatttcaatatgattcttttgctgaaatctgccactccagaggcacatttctttccctgctacgcagactggcaaaacacatgcaaaagctgccagagtggctttttggaagctgacaaggggaaactggcacccatgtagcattaagcattacgctcgaagccaaacctaaaatgtaagcagtagtgacgctctcaactcaatgcatcctggtcaatcacagactagaatatttgttttgaaagttgtcctgctgagaccaaagtatgaattctcttttcattcagttaagcacagcctattctaggatccggcagttcccacaaagccaggccaattacc

SEQ ID NO: 479495 - DNA, 539 bp, Homo sapiens
taattgtgtatgatatggcacttttcaggcagccacatccatgaacacgctgagattttccgtagatgtggaatttcaaagcagtgttagacattaaatcaagcttcctgttggtcttctcaacaacaaaatccagggccaggatcttttaattttttggcaaactagcaaaaaaagagtatcatcaaccagaacacaactcccaagggactaaatttctatactttccaatcctacagggtcaaagctcagggcattcactgaatatttagcatcaatcacatccccaatgttctgcagataagaatcatcttaactcatttaaagatccaacatgattatcataggtctgtattcccaataaactatctcactgtcaggatgtataagtcatttttgaacactaaaacataaggattaagattaaattttttattaaatggtgacwttaagtgtttttatggagtttttttttttcaatattgaagtttggctaaataataggagcatctgcatgcaagcatcatgtatcatgaacc

SEQ ID NO: 479496 - DNA, 541 bp, Homo sapiens
catggtgaaaccccgtctctactaaaaacacaaaaattagctgggcgtggtggcgggcgcctgtagtcccagctactcgggaggctgaggcaggagaatcgcttgaacctgggaggcagaggttgcagtgatctgagatcatgccactgtactccagcctgggcaacagagtgagactctgtctcaaaaataaaaaaaaaaatactactactactactamtaataataatataaaggtaaagttctcactttaccatcctattattattattattccttgtttttgagatgggagaaatagcagtatggatgatgacagggataatccagtcatcagagggaaaagagatgaaggcaggggatcactagctctatgtccttaagcaaacaagtgacgatgagatctacggcacaggtggaggggttgaccttagctaaagtgcaaagtatgtgggctgtggaatctctctccctcccaaaggcaatggaactcaatccccaacccctccaggcggtctctggatttctccagaccacctac

SEQ ID NO: 479497 - DNA, 542 bp, Homo sapiens
acatggtgaaaccccgtctctactaaaaacacaaaaattagctgggcgtggtggcgggcgcctgtagtcccagctactcgggaggctgaggcaggagaatcgcttgaacctgggaggcagaggttgcagtgatctgagatcatgccactgtactccagcctgggcaacagagtgagactctgtctcaaaaataaaaaaaaaaatactactactactactactamtaataatataaaggtaaagttctcactttaccatcctattattattattattccttgtttttgagatgggagaaatagcagtatggatgatgacagggataatccagtcatcagagggaaaagagatgaaggcaggggatcactagctctatgtccttaagcaaacaagtgacgatgagatctacggcacaggtggaggggttgaccttagctaaagtgcaaagtatgtgggctgtggaatctctctccctcccaaaggcaatggaactcaatccccaacccctccaggcggtctctggatttctccagaccacctac

SEQ ID NO: 479498 - DNA, 573 bp, Homo sapiens
ctatgagtctaaggggtaagtctattaacctctctgtatataattttcctcttctgtactcgaaatgttgaacaagactatcttaaagaatttctcacatggactttttcagtagctcctaactagtctccctgctttcattttgctcctgccatcccagaaattttattcttggaggtagtacctgctctagtccccaacttcctctctaatctcatcttctatcactgttccctgcactcactctgtccaggcacactggtctccatgctgtttcttgtacrctccaaacatactcccctctccgggcttttacatttgcttttcccactgcttagaaagctttccatacctgcccccaaggttcacatgactcattccttcacttccttcaattacataaatgccttttcaggagccattctctgatatgatcaccttacataaaatagcacctccatgccactctctgccctgcctttttctttttagttcttatgactgcctaactcatcatatatttccttgtttgtcttgttttcctccaatagaagatgcatacctttagaatag

SEQ ID NO: 479499 - DNA, 573 bp, Homo sapiens
ctatgagtctaaggggtaagtctattaacctctctgtatataattttcctcttctgtactcgaaatgttgaacaagactatcttaaagaatttctcacatggactttttcagtagctcctaactagtctccctgctttcattttgctcctgccatcccagaaattttattcttggaggtagtacctgctctagtccccaacttcctctctaatctcatcttctatcactgttccctgcactcactctgtccaggcacactggtctccatgctgtttcttgtacactccaaacatactcccctctccgggcttttacatttgcttttcccactgcttagaaagctttccatacctgcccccaaggttcacatgactcattccttcacttccttcaattacataaatgccttttcaggagccattctctgatatgatcaccttacataaaatagcacctccatgccactctctgccctgcctttttctttttarttcttatgactgcctaactcatcatatatttccttgtttgtcttgttttcctccaatagaagatgcatacctttagaatag

SEQ ID NO: 479500 - DNA, 698 bp, Homo sapiens
  misc_feature (1)...(698): n = A,T,C or G
gctgtgcaattctgattttatttkattgcagtaaggggcttaggctggccagggagtgcttgacattttattactgtcactgtcacttcatgatctgctaagcacccctgggaacagaatgtcacagttggcatgccctgagcccaattcacctcagggtcttatggaacaagacacccctcccccttcctgtcctacctcccacagttatgactgcttcctatagggaacgcttatctgaatagaagcacatgtatttgaacatgattttcttcttgtagcaaggtaaaatcctggattcttggagctggactaaaccttaaaatctcatctggttctgcctctgaccctaggaagtctggtcctctagggatcccatatactctgtagcatcagtttccatgttttcctctggatagccttccatccactaactctcctgccttatcgtatgtattccccacaaagtnaggccacctagagaaagaagaatgaggtacctagtaaaatttaaggaggcactcaatcccagggttgcataaatgccaaccctgcacttgcagggaccagagagtgagcacctcattaaattttgtgcctcacctgcttcactctagtcctggccctgctacaacatcctaaatcccggagcttggtctacagggtgggatttcctgtagatgatcaaatctatttgc

SEQ ID NO: 479501 - DNA, 628 bp, Homo sapiens
ctggacagcgagggcttcctggaggacaaggccctgcctaggcccatccggccacacaggaacatctcagccctgaagcggtgcgttgccctccagggctggggtgggctcatgtgagccaggttcgctgaccttggctgggacctgcctggtccaagtgtgtagacctggagaaggtgtccacattcacccctcatgggctccccacttgggaaggaagccaggtaaacagatcattgcagtcccgtgtggagaggcagcaggagatagcagtgatgtcctgaggataccactaatggggaggaagctcttcacactttattcctcttggccctatgatgggaaggggctcttaccatccctaggtatcagacaaggaagctgaggcacagagaggttaagtaacttgcctgaagtccctcggttagtgagcagtggagccaggatgtagccacctcagccagggtgttctgacacccccagaaaggctttggtaaatctgggctcaagtgcacggcctccrtcccaccgtgattgacagctctcctgtataccctgagactccttggccagaggcctctcacagccatgggacccccaggggtcctgagtttgacgtggaagcaga

SEQ ID NO: 479502 - DNA, 544 bp, Homo sapiens
gatatatatatagtgtttattctccttggaactcaccctgctctgacccaatatacttcaactcttctgtgggcaaagcaggtggacggacatgcatgtgtgattctgttccacacagcaaagacatcaatgcctcctcctgttctcctggctaatctgagctacagccacatgtgctgccagaggcatttggcagactaacccaatgttcagttaggtgtgtaaagagtaagtcagtagctcaatggggcarcataattagttcaaatatgtgggcccagtcctcatagatatcgtgccctgagcagtgggatttggtgttaaatggagttggagacatgctgggtcacaaacagaagctacacgtcaggcttgatttctggtctgtgaaatgggagtcgagtgggcaaggagcccccaggattttccatgaggaggcactgagcactattccaaggggagaaccataagatctgtctgggtttaatgctaagtcagaaaccagagtggaagccctatccaaaattcatccaatgtctgcggt

SEQ ID NO: 479503 - DNA, 645 bp, Homo sapiens
gatttactatttaaattctggattatagccctttaaaaatccctgaagagggcaacatggcaaggctctgtctctacaaaaaattttaaaagttaaccaggcatggtgttggacatgtgttatcccacttacttgggaggctgaggcaggaggattgcttgaacctgggaggtcgaggctgcagtgagtcgtgtttgcaccactgcactccagcctgggcgacagagcragacctgtctgggaaaaaaaaaaaaaaaaaagttccctagagcagtaagtttaagaaatgaaggactgctttacacagaggggtataaaacccagagaattcatcattttgagagatgtatcaaaaagaaaatggaatagattcctcccaaaaaggaaaaataacttgaatggtatgttcgtcatctttggggttgatctgaatgaggttggcagaattgttgttagaagtagaatgctagatggagaggccacagagcagggacagggagagatgacagtggcctgttccacaggcatctcacacacagtttaagttttagcatcctggactctcctaatactgcctcccttctcactaaggattttaactgtgccttgtcagagccagagcagggtaaggagggcattcccaca

SEQ ID NO: 479504 - DNA, 539 bp, Homo sapiens
gccagccttatgagaggtcctgagtggcttggggactgaggtggagttcttttcactctacttgaataggaaaatgggctcctttaaacgattacctggagttggatttctaaggctgaatagccccagtccaatgcaagcccttctattcagatttctcagctctagggggcaatggtaagagctggtgagatgtatggagggttgactttgaatattaaacgtgcggttcctaacagctaatgttttcgtgtgcctgctatgtgccatgcactgtgccaggtgctgtgcacgtgttttctcatttgatcctaagccacgaaaagttggtacccagagaggtcgtgcacctagaaatgatggagcaggggttggcatttttctccacagaatcccctgtgtctgtgcaagaggtcatccaggcaccccagraatgagaccacagttgcttgccttcaatcatttagaaagccaagagggtccttggtgcgggtggattttgagagagaaagacagtggcctttggctcctttgtgctg

SEQ ID NO: 479505 - DNA, 606 bp, Homo sapiens
gaggccaaggtggatggatcgcctgaggtcaggagtttaaagctggggagatctgctggaggtgtgagaatctccaggtgtgtgatcttggctcactgcaacttccacctcctgggttcaagtgatactcctgactcagcctcccaagtagctgggactacaggtgtgcgccaccacgcccagctaatttttgtatttttagtagatatggggtttcaccatgttggccaggatggtctcgatctcctgacctcgtgatatgcccacctcagcctcccaaagtgctgggattataggcgtgarccaccacaactggctgatgaattcaattttcattccaaaccccctttcttcccaagatggtaaagactagaacaagaattcgtaagaactctttctatgctcctaatatcaaagtgactttttccccctaaagcaatcctattctctgccctaaagtctggagcatgcaccaactggtaagggcatttgtcaaacattttattatagattgtatcttttaataaaaaatactattgtgaccattaatctatttatttgttctataaatatttattgagtggcactatggctgtgaattttcag

SEQ ID NO: 479506 - DNA, 638 bp, Homo sapiens
tgagcttgaacttgggcttcacacgtgtgtttacacgcaccacttgtcattgcctgtgactttcctgtccctgctcctcctctttcaaacactccctggagccatttagtgcctagatgatgcgtgtttttataccagccactctactcgaaagcaaaatctgtttgaaagctgtgttacaggtttttccagaacttccagtttttaagaatctcttccccttgctgcagcttcctttgtaccatgcagccactggctccaaagggaccttctaccagggaatttgattacttggatagagcccttctgtcgaccactgacctcagggctagctccccaaaaygtcgccttctctacgctcgtttctgcaaagtagcaacaggtcagttaggatgtggattttcttgctctctcaaaggttcttttatttaaatatgttcatacatttttctcctaccgctctctttcctgaaagaatgaagttagaggattaggttgctaagtttagctcttgctgacgcactggcctctcactagcagtctcctcgtgtctcagtgtttctttaagcctcgcttttttgctggtagacgcacaccatcacatcctacataatatttagctctgaggcgtttccaga

SEQ ID NO: 479507 - DNA, 563 bp, Homo sapiens
ctgtttccatgtttagctcagtggattagcttttgtcctctatgggttaggcactgacattccagctcccgccacttcagagggtgtgacgcagtgatggagatgcacaagcaggcaataaaaactagtataatgaggttcaagttttaatagagaaagtagagcccaggtgcctagactatcctggaggtcagggaaggcttcctggaggaagaggagtctaggctgggtcttgaaggatgaatagaatttgaccacatacagttagttgcacaggctccaaggtcttaaaagaaaaatgaaagcttaggcttaagaaatctgacaaatttaagaaattgaaactttaatgccaggtttgtttccctctgcccccacctccacaccttccgcatccgcctatgccccaagtctctagctcctccctgttgctagaggcatggctcacattgtgtggggcatgtggaaagggctgatatgtggttggttgtcttggggctagatgtatgcaaatgasacttttatctttagaatcttggaagcaagagtcccagattaaaatc

SEQ ID NO: 479508 - DNA, 460 bp, Homo sapiens
tcaactgagggtatatccccagtcactctccatctcaacacccactttatttctttcataggatttttcctaattgatgactttatggtctatcctgtctcctagactgtaagttccatgaggtcatagactttgcactgctcrctgggaggaaaactggaagggaaggaaggaaagaaaaccttttaggggtccttgaatatgctttaaaagtctaagattttaatctgctgttgactctgacttgggaattgaaactattaagagacacaggggccgggcttggtggcacatgcctgtcatcccagcactttgggaggccgaggcaggtggattgcttgagctcaggaggtcgagatgagcctgcacaacctagcgagacctcatctctacaaaaaaaaaaaaaaaaaaaaaaaattagccaggcgtggtggtgtgtatctgtagtcccagctattta

SEQ ID NO: 479509 - DNA, 630 bp, Homo sapiens
cagaagtgagtcaccatcccacccgtggctggatccacgtataagtcacaattttaactgcaaactgcatttacatgtgagatttgagatcttaacatgtgtaagttaaaatcctaactgtcggctgggtgtgcatgtgagaatcacagtctcacctatgtgctgagccctgttatgacactctttgcaccaactgaaagccttatacaatatgcatgagtattgtaattttctctgaccgtcgtacaagaaacacacccaaaccttactcactgcttgaagcctagcaaagagaatcaatatctctcctatttgctgggttcaggtakgattgtcatcattgcaccagtgagctgagcccagatgtatgtcacaatcccgcccgtagacagggaccaggcagaagagtcacatcacctggatgctaggacaggaatatgtcaatcctcattatgagcaggatgagggaagaagagtcattgctgggttctgggcctagtgatatgccacagcccttcatgtgggcaggtcccaagcagacgagaacaataacattacttaggtgatgagcccagcaatatgtaacaatgcccaatatgagcagggcccagggaagagaggagagtcaca

SEQ ID NO: 479510 - DNA, 456 bp, Homo sapiens
cttcttgggaggctgaggcatgagaatcgccggaacccaggaggcagaggttgcagygagcccagatcgcaccactgcaactctagcctgggtgacacagcaagactccgtctcaaaaaaaagaaacccaaacctctgcatcatgcaatatacccagtgtaacaaactggcacacatccccactgaatctaaaataaaataaaatctgctcccaattctaaaaacgaaaaatgaaagaatcgaggctgagtttgagcgtagggagctggtgggttcttttacggctgggatgaggattggggttagggtcggagttaaaatcctgtatttgagttgtgttgaggaaccggggagttggtttagtgttgggagtgatactggggtgaggatgcctagaggaagagttgatgtgaaggttgaactcgtgtttaagttgggctgagatgagtttttggt

SEQ ID NO: 479511 - DNA, 572 bp, Homo sapiens
ctgagtagctgggactacaggctcatgacaacaccatgcccagctaagtttttaattttttcatagagatggggtctcacactgttgcccaagctgctctcaaactcctggtctcaggtgatcctcctgcctcagcctcccaaagtgctgagattacaggcgtgagtcactgtctgctacatggttttttggttttttttctttctttctttctttttttttctgagatggagtctcgctctgtcgcccaggctggagtgcagtggcacaatctcagctcactgcaacctccgcctcctggcttcaagcgattctcctgcctcggctgcccaagtagctgggattacaggtgcccaccaccacgcctggctaatttttttattttttagtacagacagggtttcaccatgttggccaggctggtctcaaactcctgacctcagatgatcctcccacctctgcctctcaaagtgctgggatcacaggcgtgagccaccgtgcccatctgttacgtgttttcttaatgcrtttgcggctctctcctgagaagggccacacagagagccctgccc

SEQ ID NO: 479512 - DNA, 622 bp, Homo sapiens
tctagccaatgaggggcgacatggggaggaggctaagcctgccctttcttgagtccccgggaaggcttctgcgcgtgcgtcggtggtaatacgtgacgtcctgtggggagctggagggtgtgcaggttttgggttaccaggccgtggttccgctggctggctggctggctctccgcgccgttgcgcggcaggaggagggagtgagactttgatttgtgcttgatttatgccaaggcccagagaagggagcgacttgcccttctctcttttttctttttctttcttttttttttttttttttttttacttttttaaagacagggtctcgctctgttgcccagactgtagtgcagtggcaggatcttggctcactgccgcctggacytccccgagctcaaatgatcctctcgcctcagcctgcagaaatagctgggactatcggcgcgcgccgctaggcccggccaatttttaaaaaaatgtttgtggagaccgagtctcactgtgttgagctcagttgccttgctgtttggatgaaacccaagcccctcgggctggtattcaataccctgtctaggcgcgtctcccatctgttttttaccttttatctgatgtcctggagaat

SEQ ID NO: 479513 - DNA, 591 bp, Homo sapiens
aaccaataaaacaaatagtctttaaaaatagcccattactatctagaatagaatataaatactgatgatttccttggaaagaaaacaattatattaactttcttaccactggaactaaaaaacttaagaataaaaaaaaaatcttcccactcctaacacttaagatatagtatcctttttgtttttatgctgggcttttgtgtgcttttaagctttctgcyaacttattagtattatgtatttattgactttgaagtggttttagatatgcaactgcacctaaatcacctttttaccaccaagtaatcactattgcccctaaatatcttatagtccacaaagaagtcaaatttacctcaaatttagaaaagcaaacaaatgtttcctacatatagcaaggtgttcagaaatgagcaaaaaatgttgacaaagaatggtttaaaaatgattaggaatttgtattactaaacatcaataaaaatagtgactcttggtaagatactaatggtaaaaaaaagtctgccacttaaagtcctcacaaaacggactgatgcagaccgtagacattaaaattaacccacctccctgtac

SEQ ID NO: 479514 - DNA, 591 bp, Homo sapiens
aaccaataaaacaaatagtctttaaaaatagcccattactatctagaatagaatataaatactgatgatttccttggaaagaaaacaattatattaactttcttaccactggaactaaaaaacttaagaataaaaaaaaaatcttcccactcctaacacttaagatatagtatcctttttgtttttatgctgggcttttgtgtgcttttaagctttctgctaacttattagtattatgtatttattgactttgaagtggttttagatatgcaactgcacctaaatcacctttttaccaccaagtaatcactattgcccctaaatatcttatagtccacaaagaagtcaaatttacctcaaatttagaaaagcaaacaaatgtttcctacatatagcaaggtgttcagaaatgagcaaaaaatgttgacaaagaatggtttaaaaatgattaggaatttgtattactaaacatcaataaaaatagtgactcttggtaagatactaatggtaaaaaraagtctgccacttaaagtcctcacaaaacggactgatgcagaccgtagacattaaaattaacccacctccctgtac

SEQ ID NO: 479515 - DNA, 604 bp, Homo sapiens
tgtagtcccagctacttaggaggctgaggtgggaggatsgcttgagccccagaggtcgaggctgcgaggagcttttatcatgccactgcattccagtctgggtgacagagtaagaccctgcctccaaaaaaaggggagggggagggaagagtcaaaaggccaatgtggttgaatgaagtgtggttattggggttggggttgtggggagtggtagggcttgggcctgacagatgagcagaggtcagatagtgtaggatcataaaagacacgtgaatgaatttagatttgagaagggaatgttctagaagggtatgagaactgaagacattcctattttaatgttcaggattctcagtatggttggtaccgtgggttcctaagtccttcaacttacaactgaactgtaattatcatcaagagcatcctgggaggttccaggaacttgcaggggctcaggagagcatggggttgccaggtgtggtttatttagaatgcagagattgggtgacacacaccatggctcatagcatctttgccagaggccacatgaccagagttacagcttcagccacgcaggtatggatgatccaaggggcaggggcag

SEQ ID NO: 479516 - DNA, 666 bp, Homo sapiens
ttctttcagcacactaggctactcagttgcatattaatcctttgagaccttattccttatgcagcttgcctttgatcctatttttaaaacccactttcacttgcacaaaatcattctgtgtgatctctaggcttgctactggtctctaaaataagttttcccagcccccttaatgaaggccacagcacagcactctctaagattgtccagttaatgtttacatcaaacaatatagtgataattgtgcaggaaccaggcaaaaacatgttaagcacatacctttagatatagctaaggtactttataaagcactttataattwatcacacccagcttcatgtcacctaaaaatgtaagtattctcaattaacagctatgcaaagtaagtatccaaaattaagagagcaatgcatttactaagatcacaccacagtgtactctcacacatgcaacaactatattgacatacatacaataatagggaatgtctaaataaacaatggcatttttatatccttactaaatatagtcattagataataattatcctatatgaatggaaaatattagaaatacaccaaaatttttactgtaattatccctagctgaggattattggcaattttttctttataaatttctaaattttctaaatccaaaatgatt

SEQ ID NO: 479517 - DNA, 611 bp, Homo sapiens
gggcacgcgggcacgtggctgtccccaggggcctggcttgggtctcgcccctgggccggggcgcackcgcgggcgggacatctgggggcgcccacgcgctctgggacgagtgtcgctggccaggcccggactgaggaaaggcgagtgagacactactcgcctggggtgcaaaatttaagggagtgaaaaaaaaaaaaaaagaaagaaaccaaaaccacctcgagtcaccaaaataaacattttaatgcagtattttttaaaaaatcaacaggaatcctccaaagcccactatgaacaaaatagcaaaatggtagagaaaggatctgtgccgctgcgtcgggcctgtggggcgcctcccgggggtctgaaactggaggagactcggggctgtagggcgcgcggatctggggcgcgccctcggtcccggcgcgcccagggcctcccgcgcggggcccggcacagggaggcggggaggcgggcggggcggggcgggaccgggcggcacctccctcccctgcaagctttccctccctctcctgggcctctcccgggcgcagagtcccttcctaggccagatccgcgccgccttttcccgcggcccgcacggggcc

SEQ ID NO: 479518 - DNA, 611 bp, Homo sapiens
gggcacgcgggcacgtggctgtccccaggggcctggcttgggtctcgcccctgggccggggcgcacgcgcgggcgggacatctgggggcgcccacgcgctctgggacgagtgtcgctggccaggcccggactgaggaaaggcgagtgagacactactcgcctggggtgcaaaatttaagggagtgaaaaaaaaaaaaaaagaaagaaaccaaaaccacctcgagtcaccaaaataaacattttaatgcagtattttttaaaaaatcaacaggaatcctccaaagcccactatgaacaaaatagcaaaatggtagagaaaggatctgtgccgctgcgtcgggcctgtggggcgcctcccgggggtctgaaactggaggagactcggggctgtagggcgcgcggatctggggcgcgccctcggtcccggcgcgcccagggcctcccgcgcggggcccggcacagggaggcggggaggcgggcggggcggggcgggrccgggcggcacctccctcccctgcaagctttccctccctctcctgggcctctcccgggcgcagagtcccttcctaggccagatccgcgccgccttttcccgcggcccgcacggggcc

SEQ ID NO: 479519 - DNA, 581 bp, Homo sapiens
gtcttccatcattcccggggggcgttgccacggggacaggatgacagaaactcctcctctccaaacgccctcgccagggcagaagtcaaagactggaaaarcttttcttggaaatctctgccaacgaagacgtagaggaaggggttgaggctgctgttgacacagcccaaggcaaagctagcctggaggatgagcagcatccgggggtggtagatttccttgagcatcacccgtcgccacagatggaccaacagcaccacgttaaacggggaccagaagataaagaaagcgctcaccagcaccagcagcagcctcttgggccggttggcatggacccagccctcccgcaagagcttggcccggatgaggtgggcgcaggtgcctatgattgctaagggccccaggaagcccagcaggaagtggccaatggtccctataatgtgtccctccacgaccccttcaatccaaatctgggcagtctcattgtcagagttgaacgccaagtagcagtgcgtacagccattccattttctggttgtccggaatttcaggtgcgcagagcacaaggcggcggccaggag

SEQ ID NO: 479520 - DNA, 587 bp, Homo sapiens
ctagaaaatcgttgagtttgttcatgtcacaagtgaaagtattttttcatgcattcatcgttggcacgtcgtcctttggcaatattaaaatctaccaacaaatgggaaaagttaacatttgcaccatcttgccatattcaaaaaccttgtgcttaagtgttttgaaagtaagtttcatggccgracgcggtggctcatgcctgttatcccagcactttgggaggccgaggtgggtgggtcgcttgaccctaggagttcaagaccagcctgagcaacatggcaaaaccccatttctacaaaaaaatagtaaagtgagccaagcgtggtggtgcgggcctgtagtcccagctacttatgaaggaagtgggagaatgcctttagccaagatcgcgccactgcactccagcctgggcaacagagcagactcttacttgaaagaaaggttcatatttcactcaaaatagtgtacttgtgtacctacagtaacatttttctacttaatgttattagcattgtcacccttaatactgcaatttaacaatctgctttgtgcctgttgttcctcagtcatcttcgaaatgtctttt

SEQ ID NO: 479521 - DNA, 587 bp, Homo sapiens
ctagaaaatcgttgagtttgttcatgtcacaagtgaaagtattttttcatgcattcatcgttggcacgtcgtcctttggcaatattaaaatctaccaacaaatgggaaaagttaacatttgcaccatcttgccatattcaaaaaccttgtgcttaagtgttttgaaagtaagtttcatggccgarcgcggtggctcatgcctgttatcccagcactttgggaggccgaggtgggtgggtcgcttgaccctaggagttcaagaccagcctgagcaacatggcaaaaccccatttctacaaaaaaatagtaaagtgagccaagcgtggtggtgcgggcctgtagtcccagctacttatgaaggaagtgggagaatgcctttagccaagatcgcgccactgcactccagcctgggcaacagagcagactcttacttgaaagaaaggttcatatttcactcaaaatagtgtacttgtgtacctacagtaacatttttctacttaatgttattagcattgtcacccttaatactgcaatttaacaatctgctttgtgcctgttgttcctcagtcatcttcgaaatgtctttt

SEQ ID NO: 479522 - DNA, 579 bp, Homo sapiens
gttgtggagtgccattcccccagcccttagttctgaagaccttgggtgaaccccaagcccagggtcctatgtccatgttagccggtatatagagttgttccaatttctggcagccatgtgaacgggtgtggaaagtttttccagaaaggtacaagatgtgcaaatgcttaggtgcagtacggagctgggtgcatttatgaagccacaagtctccttgctttctggtgggaagcaaagaacaggaggataggcgtcaggactgcagtggctgcctgagaagttgagtgtgttttcaggaggtaatagcaagtttgaatcagaaaaaagaggtaatttaccaaggtcttcacaggcttcatctgtgtgcacagtggggcacaaactggggggttgagggaggaggaaggaaaatcagggtagactagtccaagtgagggttactggcccaggatcgygatttaggagatgtggttagattccggatgtgtggtttcaaaagggacaactaaattacataatgtaggtggtgagggagtgaaacagagggttcagagaagactccagggtttttggtattag

SEQ ID NO: 479523 - DNA, 634 bp, Homo sapiens
catgcttccattgcttgattcctcgaaaagggcggggactctgggcagcggttgtggagtgccgcgggtccacagtgctgcactgagcagagaggaaggggcgtcccgggatatttggaggataaaggtgtgggcaaggtatcatgtggaggcaaaggggcgagaagtgaggggcggtgagaggggagcggggcgggcaatgtgtgcgattcccagaatgtcttttccgcagggtgatgaccacacctgccggctccggcagcggcttcggctccgtgtcctggtggggcctgtccccggcgctggacctgcaggctgaaagtgagtcccagcacgcaaggtctgatacaccgtctgccttcccagcctgagcagacggccttttagagctcgtagtcccagcgtcggtggcaaggggggcgctaacgttctccaacgctccagcggcagagggcgcgctcccaggggcagccccgaggtcctgtctgcggactrcgaatcccagaatactcagaggaaacacctccccttagaacctaggccacgggcggaacgcctactgggatttgtagtccattttttataggggatgctacggtggacgctctgccaaccaccatggtgccccagccag

SEQ ID NO: 479524 - DNA, 400 bp, Homo sapiens
cctggcccactgctgctgctcggagtcmtaggagtcaggggccccaacatcgacctcacctgcctcctctctccctccttttccagcgtggggagcgcgtggcagcgcgcgggtactggggggacatcgccacggggcccttcgtggccttcggcatcgaagcggacgacgagagcctcctgcggacgagcaacggccagccagtcaaggtgcgcggcgaggctgggactgggggtagaggtggggctgggggtcggtgggtgcgcaaggccccgcccccacagcaggccccgcccccagctccagaccccgcccgtcgcttggtgggaacgactccattcagagaacaggccccatccccgcgggataggtcccgccccacttcacatcctccaagcag

SEQ ID NO: 479525 - DNA, 529 bp, Homo sapiens
cagtgggctgtgtttcttaagattcctttcccaggggctcctttaactgctcatgcctggctacctacctactccaagctggtttgtggacagaaakactttatttatttattttttgtaaaggtgtctcactctgtcacccaggctggagtgcagtggcgtgatctcggctcactgcaacctccagctccctggttcaagcgattctcctgcctcaccctcccgagtagctgggattatagccacatgccaccacgcccagctagtttttgtatttttagtagagatggggtttcaccactttggccaggatggccttgatctcctgacctcatgatctgcctgcctcagcctcctaaagtgatgggattacaggcatgagccactgagcctggcgctagaaagacttttaaagtagtatctagttcatccacatttgtatgtttcttctattcaatctgaatgcaaatttacctgaaggttttcccctgagatcacagagaacaactttcttcaccttaattttatt

SEQ ID NO: 479526 - DNA, 529 bp, Homo sapiens
cagtgggctgtgtttcttaagattcctttcccaggggctcctttaactgctcatgcctggctacctacctactccaagctggtttgtggacagaaatactttatttatttattttttgtaaaggtgtctcactctgtcacccaggctggagtgcagtggcgtgatctcggctcactgcaacctccagctccctggttcaagygattctcctgcctcaccctcccgagtagctgggattatagccacatgccaccacgcccagctagtttttgtatttttagtagagatggggtttcaccactttggccaggatggccttgatctcctgacctcatgatctgcctgcctcagcctcctaaagtgatgggattacaggcatgagccactgagcctggcgctagaaagacttttaaagtagtatctagttcatccacatttgtatgtttcttctattcaatctgaatgcaaatttacctgaaggttttcccctgagatcacagagaacaactttcttcaccttaattttatt

SEQ ID NO: 479527 - DNA, 529 bp, Homo sapiens
cagtgggctgtgtttcttaagattcctttcccaggggctcctttaactgctcatgcctggctacctacctactccaagctggtttgtggacagaaatactttatttatttattttttgtaaaggtgtctcactctgtcacccaggctggagtgcagtggcgtgatctcggctcactgcaacctccagctccctggttcaagcgattctcctgcctcaccctcccgagtagctgggattayagccacatgccaccacgcccagctagtttttgtatttttagtagagatggggtttcaccactttggccaggatggccttgatctcctgacctcatgatctgcctgcctcagcctcctaaagtgatgggattacaggcatgagccactgagcctggcgctagaaagacttttaaagtagtatctagttcatccacatttgtatgtttcttctattcaatctgaatgcaaatttacctgaaggttttcccctgagatcacagagaacaactttcttcaccttaattttatt

SEQ ID NO: 479528 - DNA, 529 bp, Homo sapiens
cagtgggctgtgtttcttaagattcctttcccaggggctcctttaactgctcatgcctggctacctacctactccaagctggtttgtggacagaaatactttatttatttattttttgtaaaggtgtctcactctgtcacccaggctggagtgcagtggcgtgatctcggctcactgcaacctccagctccctggttcaagcgattctcctgcctcaccctcccgagtagctgggattatagccacatgccaccacgcccagctagtttttgtatttttagtagagatggggtttcaccactttggccaggatggycttgatctcctgacctcatgatctgcctgcctcagcctcctaaagtgatgggattacaggcatgagccactgagcctggcgctagaaagacttttaaagtagtatctagttcatccacatttgtatgtttcttctattcaatctgaatgcaaatttacctgaaggttttcccctgagatcacagagaacaactttcttcaccttaattttatt

SEQ ID NO: 479529 - DNA, 538 bp, Homo sapiens
agacatctctgttttattggtaggctttggtggtacttttgtgtggggtggagtcactatgagtggaaataaatacattgtcgtgggtcagtgagaccctaagatatttatgtgtattatttcattgttactgggacttgcgaaatttcgtagccgggcttctataaaccctgtgtcctcaggcagtgcctgacctttatggactatctggggagtgcaagaccccatgggagtttgtaagcgtgtctgagtccagagggcaacggggrtcctaagaatcaggcgcagatggctttcattagggagggtttgttgtgggggcgtctgtgggtgcaactcaagagggagtgattatcagggtcccagagtaagggaaagatttctccaagaatcagagtgaaacacagcacactgacctgcggcccaaaggcttccactgggactgtccttgggaagataaagctgccacattcttgcagccaggccggtggcctctccctgtttattccaagataacagagtcacagagtcacaaggc

SEQ ID NO: 479530 - DNA, 538 bp, Homo sapiens
agacatctctgttttattggtaggctttggtggtacttttgtgtggggtggagtcactatgagtggaaataaatacattgtcgtgggtcagtgagaccctaagatatttatgtgtattatttcattgttactgggacttgcgaaatttcgtagccgggcttctataaaccctgtgtcctcaggcagtgcctgacctttatggactatctggggagtgcaagaccccatgggagtttgtaagcgtgtctgagtccagagggcaacggggaycctaagaatcaggcgcagatggctttcattagggagggtttgttgtgggggcgtctgtgggtgcaactcaagagggagtgattatcagggtcccagagtaagggaaagatttctccaagaatcagagtgaaacacagcacactgacctgcggcccaaaggcttccactgggactgtccttgggaagataaagctgccacattcttgcagccaggccggtggcctctccctgtttattccaagataacagagtcacagagtcacaaggc

SEQ ID NO: 479531 - DNA, 600 bp, Homo sapiens
ttcttaccattagtttattgggtgttttggttttacttatgtattataattttagacaatttgcaattctgcttgtatactttaagtcaattttaggtttaagagataaattatgcatgtctgtcacaatcaggttacatatgtatgtctgtttataaatatgacaccaattttagttatggcttatcttatactctttcttagcttattttccatggtagttttatcttgtctaagtaagtactcatggggatagtcttattttaccatgtgtttagtrattaatatgtatttcctttcatgagagaaacatttttgtgatttgaaggtaattttcaaaaaaatatgtaatttttttttcagtttttctttaaaaaaattgttttaaaaacacataatgtaaaatttaccatcttaaatctattgaagtgtacatttcagggccaggcgtggtggtggctctgatctgtaatcccaggattttgggaggccaagacaggaggatacctggagcccaaaagtttgagaccagcctgggcagcatatggagactctcctctataaaaaaaattaataatagccaggcatggtggtgtgcag

SEQ ID NO: 479532 - DNA, 587 bp, Homo sapiens
gccctgtttgtttggtttgattcagttgtgaagcagctttgtagagagtgaagagcaagatactagaakgtacacaaacttcagtgttatggaaaattgattgtatttctatcctatgactaattatttgtcctcacttttgtttacaaaatagaaggctattataaccttgtgtcttacaagtttggtgataattacaaacaggctaagcattcagtaaaacatcatttttctcctatttgctctaactgaagacaggattactttgaatgaccagaacagtcgtatgcttgcaatagctaatttacaataactctagagttcttgaagtttgccctagggcattaaagatgccaactatggcctatgagaaatatcaaagcatgagacaaggccattcaataagaagaggtcagaaatttctcaactgctgcaaaattttttagcaataaactcatttctggtaagtcttttacatcacccactcctacctttacatacaaatgtgaattattacctaatttttgtatcagtgaaagaatttgaggatagcctgaaatgatattgtgggttttggagcttacaaa

SEQ ID NO: 479533 - DNA, 295 bp, Homo sapiens
ctgcttctaaaacaccaaaatgtagtgctcctctgatgaggatgaggaggaaccatagctgagagctctcatacatccccactcatcaagaactgggactcccttcacctcctctgtcccacttgactgctcctggcaagctcaggagtccagatttccctccagcatctctgggttccaacgaagcttagcctatggcctccagcaagactttgagccctagatgtctatgagttcccaccttccrcttatttgtgacgacatcttattatctgcaagccggattgctgtgggg

SEQ ID NO: 479534 - DNA, 352 bp, Homo sapiens
ggaacagacgggagctctggatgtagctctttttgagttatctcacttggactggaatagccaggcctttaaacccagcattggtcattcgttagttgtggcctaccctgggaagggcatggtttgggcgagggaggccattttgaagctgagaccatctctgatttgggctgaacaccaaaggctgcctgcagacagcactcactggagctgggcagcaagtcctttcttgaagggggatctaggaagcccacgtctatctccatcacaggggcaattccacggacaatgagtgaagggaggaggakactgcaggaagacaaggggtaagagaattccagcacaaggaaga

SEQ ID NO: 479535 - DNA, 119 bp, Homo sapiens
cagagcagtgaggtcagttgatccatgcgggagatttaragaccatttctacaggctggagaacatctttcaagcttaaataaccacctttagaaataccctctgcaccacctgcttca

SEQ ID NO: 479536 - DNA, 533 bp, Homo sapiens
gggcacgcgggctacgatctgtacagtgcctgtgattacacaccaccacctatggagaaggctcttgtgaaaacggacattcagacagcgcttccttctggatgttayggagagtagctccaaggtctggcttggctgcaaaacactttgttgatgtaggagctggtatcacagatgaagattatagaggaaatgttggtgttgtactctttaatttttgcaaagaaaagtttgaagtcaaaaaaaggtgatcgaattgcacagctcatttgtgaacggattttttaatccagaaatagaagaagttcaagctttggatgacaccaaaaggggatcaggaggttttggctctaccggaaagaattaaaatttatgccaagaacagaaaacgagaagtcatacctttttcttaaaaacaaagagtttttgcttaaagtgttttggtgttttacacttctgtaaacttactagctttaccttctaaaagtactgcattttttttttatgatcaaagaagagatcatttaaaaaaa

SEQ ID NO: 479537 - DNA, 614 bp, Homo sapiens
ggcactgccagctctgtagactggattatggaagctgctcgtggaagtcttaatgtgcacaactgcctgataaaatttggaagaagagattaggaagaggaaatcttttctgcctgattttatactccatttgtagtaaatgtttaacagcaagagattctttaaaccattctaagtacatccatcctatggagattgtggtattcctgcagagactcttgtgaaacagatgtttcaggtgaaaatggtaagacttgggtaatacttcttctaggatggggcatttcctattttcttagatctctcaaggttcccctgttatccccagctgcaggggtacctctcctatcaagaacatgtgaaattttgccctcattaaaaaaaaaacaacaacttgctactatgtwtatatatatatatattttgaaaatctgggaaaaatgacaaccctctgtattttcatttttcaatttattgtctacataggttttattattttggggacatgtatatacaaaatgaattttcatgctttgctcaattttctttccatgtattttagtatgtgttttaatttctgtggtttttatttctttcatatgccctgatgtctt

SEQ ID NO: 479538 - DNA, 623 bp, Homo sapiens
tgtggggagtgggcttaactaggagccagcaagtctggccacattccattgcttcaaaggagtgtctttctccttgaacacaatgtttacagataagagagcaggtcttgctcagagcatgsgaacattatggcaattaggaggctttcctcctcagaggcctcttgtggctttctgcaacttattgtcccatatttttatggccagtttatacaggcaccccgtaagccctttccccaacagttttctctatgttttttaatgtttataccattttttactagcttaaaatagaaaaatgttgatgaactaaatgttgatgaacagttgatacatttcattgttccatacatgctgaaatggacacaaacaaaaatggcgatttttaagaagttgttgaaaaactcacttgtggacaactgttatataagttaatttaatcgtgtgtatatgtatgtctacatgagtgcatggatgagcaagcccatggctcttatgaaacactcatcataatttaatcaataagttttatatttaacacttgaaattatctctacagtagtttccatggccttaaatttttcctacactgtcacactgagttaaacaatagtaagcatagt

SEQ ID NO: 479539 - DNA, 665 bp, Homo sapiens
gctgtttcaagccggaaggaaaatttacagaagtaatcaagttgaaaagtttacaaaccatcgttcctcagtttcaccacttcaaaaaatttcttctagtttcacaacacacatttttaataaatatagaaatgatcttattgatttcccattactcccacaagaagagaaagcatacattagaggaaaatcttatgaatatgaatgtagtgaagatggtgaagtttttagagtccctgcaagccttactaaccatcaagtaatccatacygcagagaaaccttacaaatgtactgaatgtggcaaggtcttcagtcgcaattcacaccttgtagaacattggagaattcatactggacagaagccttacaaatgtagtgaatgtgacaaggtgtttaatcgcaattcaaaccttgcacgacatcaaagaattcatactggagagaagcctcacaaatgtaacgaatgtggcaaagcttttagagagtgttcgggacttactacccatcttgtaatccatactggagagaaaccttacaaatgtaatgagtgtggcaagaacttcaggcacaaattttctctaaccaatcatcagagaagtcacacggcggaaaaaccttacaaatgtaatgaatgtggcaaggtctttagtctgctttcatacc

SEQ ID NO: 479540 - DNA, 665 bp, Homo sapiens
gctgtttcaagccggaaggaaaatttacagaagtaatcaagttgaaaagtttacaaaccatcgttcctcagtttcaccacttcaaaaaatttcttctagtttcacaacacacatttttaataaatatagaaatgatcttattgatttcccattactcccacaagaagagaaagcatacattagaggaaaatcttatgaatatgaatgtagtgaagatggtgaagtttttagagtccctgcaagccttactaaccatcaagtaatccatactgcagagaaaccttacaaatgtactgaatgtggcaaggtcttcagtcgcaattcacaccttgtagaacattggagaattcatactggacagaagccttacaaatgtagtgaatgtgacaaggtgtttaatcgcaattcaaaccttgcacgacatcaaagaattcatactggagagaagcctcacaaatgtaacgaatgtggcaaagcttttagagagtgttcrggacttactacccatcttgtaatccatactggagagaaaccttacaaatgtaatgagtgtggcaagaacttcaggcacaaattttctctaaccaatcatcagagaagtcacacggcggaaaaaccttacaaatgtaatgaatgtggcaaggtctttagtctgctttcatacc

SEQ ID NO: 479541 - DNA, 638 bp, Homo sapiens
tttacaggtttaatagaattgtttagggttaggctgagatgggaggatttcttaaggctaggagtttgagactagtctgagcaacatagcgtgacctcatctctaaaaagaaaaattttttggccaggcgcagtggctcacacctgtaatcccagcactttggaaggccgaggtgggctgatcacttgaggtcaggatttgaaaccagcctggtcaacatggtgaaaccccatctctactaaaaatacaaaacaattagcctgtaatcccagctacttgggaggctgaggcaggagaagtgcttgaacctaggagttggaggttgcagtgagccaagatcacaccactgcactccagcctgggcaatagagcaagactccgtctcaaaaaaaaaaawttattttttaaaattagcccggcatggtgttccatctacttgtgaatgtgaggctgagttgagtagacttattaagcccagcagtttgaggatacagtgagctatgattgtgccactgagctccaacctggatgacagagtgagacctcatctctacaaaaataaaaacaattgtctagtgttaccatctgtgcctgaaaattgcattatttgggcattatttgggagaatgttttatata

SEQ ID NO: 479542 - DNA, 638 bp, Homo sapiens
tttacaggtttaatagaattgtttagggttaggctgagatgggaggatttcttaaggctaggagtttgagactagtctgagcaacatagcgtgacctcatctctaaaaagaaaaattttttggccaggcgcagtggctcacacctgtaatcccagcactttggaaggccgaggtgggctgatcacttgaggtcaggatttgaaaccagcctggtcaacatggtgaaaccccatctctactaaaaatacaaaacaattagcctgtaatcccagctacttgggaggctgaggcaggagaagtgcttgaacctaggagttggaggttgcagtgagccaagatcacaccactgcactccagcctgggcaatagagcaagactccgtctcaaaaaaaaaaaattattttttaaaattagcccggcatggtgttccatctacttgtgaatstgaggctgagttgagtagacttattaagcccagcagtttgaggatacagtgagctatgattgtgccactgagctccaacctggatgacagagtgagacctcatctctacaaaaataaaaacaattgtctagtgttaccatctgtgcctgaaaattgcattatttgggcattatttgggagaatgttttatata

SEQ ID NO: 479543 - DNA, 493 bp, Homo sapiens
ccatgttggccaggctggtctcgaactccagacctcaagtgatcygcccaccttgacctcccaaagtgctgggattataggcgtgagccactgctcccggccaaaaataatttacattccagtgtctgattccaagaggagcagacctgcttcttcatctaaaagaagaaagcctggggtcctatttgtgaacatgctttatcctttttgggtaagggagtacatatgtcattccaactccccctgccacagaaggctagaggcttggtacagtggaggggtaattggtgctgggaccacaatgcttgggtttgaatcccaactctgacactcacaagctacgtgaccttgagcaagttcctcagtgtctgaggtctcagttttctcatctgaaaaatgggaataatcaaaatacttaccttggtggggttgtttttagcgctcagtgagttcatacatgggaagtaatcacaatagtctcaggccacgtagc

SEQ ID NO: 479544 - DNA, 592 bp, Homo sapiens
taaatgtccatcagttgatgatggataaacaaaatgtggtctacccatacaatgggatgttattcaaccacgaaaaggaataaagtgttgatacaagctgcaatgtagatgcaccttaaaaatattaagctaagtgagataagccacttgcaaaaggccccatcttgtatgcttccatttatataaaatgtccagaatagctaaatccatagagaaagtagatcagtggttgctaggggctgagggaagggtggaacgggagagtgactgctgacaggtgcagggtttctttgtggaatggtaaaaatggtctgcaattagatcacggtgatacttgcacaaccttgtgaatatattaaaacgactaaatttgatacttcaaaagagtgcattttatggtatgtgaattatagctcaataaaaatgcaaaaaatttacaggaagaggaggaagctaaaatgatccatatcacaacaacggattagagttggagatatcagtggtaattcatgtttagcttaatatygctgtggtttcacatagaaatatttatagatgtgtatatacataggccagtacatagacattcgtt

SEQ ID NO: 479545 - DNA, 604 bp, Homo sapiens
tttcaatgtgccccccaacgtttaagtgttataaacttaatccccagggtaacagcgttgggagatggacctttaagagatgattaggtcacgggggctctgccctcawgaatgcattaatgctgttatcagagaagtggcttcctgattttaaaacaaggatgaatttggccaggcccctttcctcctcactcttgccagggatgccccaacaagaaggccctcaccagatacagccccttgaccttggacttcccaacccccagaactgtaaaaaatcaatctctgttctttataaattacccaggctcaggtattctgttatagctatagcagcacaaaacgaactaagacaccatgtaaattacacttttcatacctcacctgattaacgattcacaaaaattatattcttcccttttcaaagctcctcttaattaaaactaagaatgtgggagatggggatggcacagaagtggcctagaaaacacctagggctgtgcattctcggcttcattaggatgtaagtagttctgcagcaaaaggtttgagaaagagtggatggaagaggttcagtggtcacagttatcacaccaacacctgg

SEQ ID NO: 479546 - DNA, 604 bp, Homo sapiens
tttcaatgtgccccccaacgtttaagtgttataaacttaatccccagggtaacagcgttgggagatggacctttaagagatgattaggtcacgggggctctgccctcaagaatgcattaatgctgttatcagagaagtggcttcctgattttaaaacaaggatgaatttggccaggcccctttcctcctcactcttgccagggatgccccaacaagaaggccctcaccagatacagccccttgaccttggacttcccaacccccagaactgtaaaaaatcaatctctgttctttataaattacccaggctcaggtattctgttatagctatagcagcacaaaacgaactaagacaccatgtaaattacacttttcatacctcacctgattaacgatycacaaaaattatattcttcccttttcaaagctcctcttaattaaaactaagaatgtgggagatggggatggcacagaagtggcctagaaaacacctagggctgtgcattctcggcttcattaggatgtaagtagttctgcagcaaaaggtttgagaaagagtggatggaagaggttcagtggtcacagttatcacaccaacacctgg

SEQ ID NO: 479547 - DNA, 569 bp, Homo sapiens
ccatcgtcacccccaattttatcccagcctttaagttaatgaattttacaaaatatcacttgaacttctggctctccaaaatgagttccaattatgttgttgtgacctgagccgctttctgcataactgagtcatggatgcgtacagcmaagagcgcccacctacatgagcttccaagcccagcaagtctatctgcctgcagcggagagcctccacatccgactcatatttccttctgatgttgcctaagatttgttctgtgtttggaaggtcattcagcaaaaggcctggtttggcaggccacggaaactgacagggaatttcgggaagggctctcatctctctggccttctctgtgaagcaggtttaggtgaagacccttaggccagtggccaagaagaggtaggtgcctttgtatacctgcaggtggtgcctggaggaagcagtgggagggggtgcttgggaagagaaagactgctgagtgactttggagagccagcctggggaccagagcagagagaggcacaagtggcttccctaagaccaaaggccacagaggccacgtgttg

SEQ ID NO: 479548 - DNA, 569 bp, Homo sapiens
ccatcgtcacccccaattttatcccagcctttaagttaatgaattttacaaaatatcacttgaacttctggctctccaaaatgagttccaattatgttgttgtgacctgagccgctttctgcataactgagtcatggatgcgtacagccaagagcgcccacctacatgagcttccaagcccagcaagtctatctgcctgcagcrgagagcctccacatccgactcatatttccttctgatgttgcctaagatttgttctgtgtttggaaggtcattcagcaaaaggcctggtttggcaggccacggaaactgacagggaatttcgggaagggctctcatctctctggccttctctgtgaagcaggtttaggtgaagacccttaggccagtggccaagaagaggtaggtgcctttgtatacctgcaggtggtgcctggaggaagcagtgggagggggtgcttgggaagagaaagactgctgagtgactttggagagccagcctggggaccagagcagagagaggcacaagtggcttccctaagaccaaaggccacagaggccacgtgttg

SEQ ID NO: 479549 - DNA, 540 bp, Homo sapiens
tgcataatgacttcaatgtaccgaataccacacaacagcaccctcaccagataggtaacatgagacagtttatgttacgtgtattttaccacagtgaaatccctagtcatcaccccgatttctcagatgagattgaagcccagaggggcaagaagcttgcccacgtgcccacagctttgacgcagcattactgccgattcaaacccaagcttttccatcccaaaatcttagccctgaccactgagtgaaagggcagctaggaggatggtgaaagaaacgtgggattgttttcctatcctgtgctgttaactgggtctgacaccagttgggacggccaaccaagtttgctggagattttaagtcaaacaaggttaacatttatcacaggcctgttcagcagcttatggcaagaggtcaactttttgatcacacagaatagatgggagttaccacccaagacagggctggaccacgtgacttctgatgtgctkccagccatgaggaggtcgattaagtaccctggggaggtggcaggactcc

SEQ ID NO: 479550 - DNA, 437 bp, Homo sapiens
acgacatggagaatggctcgagcagggacgctatccttcgaggcctgtttgtcagatgggaccaacagcattactcacctcatgcggttgtcgggaggaacaaatgaggcaatggagcatcaagcatacagtaagtgctcaatggatggtcagtccgatcctctttggtgtggagactggatagtcccattaagtcgttccaccgcagcagacaaaggcccatagacttatttcaggacaccctgtattgctaatgattatttttatttattgagcacttactgtgtgtcagatcctgggctactaagcccttgatgtttacccttcaaagccgttacaagacttacagcaatgctggaaggaatctgaggcctagagaggtggtgaaacgtgctsaaaaccacacagcactgaatggtggacttaagtgcaaggac

SEQ ID NO: 479551 - DNA, 427 bp, Homo sapiens
cccagctgctgaggcggctgaggcaaaagaatcgcttgaaccggggaggcagaggttacagtgagctaagatcacgccactgcactccagcctggrcaacaggctggactttttttttttttttttttttttttgactcctaccacctccccccacccaaaacaaaaaaaaaaaccaaacaccttctgcaggtgtttacatttgctgctattaaaagactttagtcacaccaacaatcttaaaaatcaagacaaaggatgaaccaactgagtaaaaacccatttaaaatagaaatctgttttgtcccccagctttcccattagttggatacttactttacactgcattctaaaagcccagatgagatcatcacccaagcagtaaaaatgaaagcatcaaaaagggttcctgaacatagagaaaatag

SEQ ID NO: 479552 - DNA, 427 bp, Homo sapiens
cccagctgctgaggcggctgaggcaaaagaatcgcttgaaccggggaggcagaggttacagtgagctaagatcacgccactgcactccagcctgggcaacaggctggactttttttttttttttttttttttttgactcctaccacctcccccsacccaaaacaaaaaaaaaaaccaaacaccttctgcaggtgtttacatttgctgctattaaaagactttagtcacaccaacaatcttaaaaatcaagacaaaggatgaaccaactgagtaaaaacccatttaaaatagaaatctgttttgtcccccagctttcccattagttggatacttactttacactgcattctaaaagcccagatgagatcatcacccaagcagtaaaaatgaaagcatcaaaaagggttcctgaacatagagaaaatag

SEQ ID NO: 479553 - DNA, 427 bp, Homo sapiens
cccagctgctgaggcggctgaggcaaaagaatcgcttgaaccggggaggcagaggttacagtgagctaagatcacgccactgcactccagcctgggcaacaggctggactttttttttttttttttttttttttgactcctaccacctccccccacccaaaacaaaaaaaaaaaccaaacaccttctgcaggtgtttacatttgctgctattraaagactttagtcacaccaacaatcttaaaaatcaagacaaaggatgaaccaactgagtaaaaacccatttaaaatagaaatctgttttgtcccccagctttcccattagttggatacttactttacactgcattctaaaagcccagatgagatcatcacccaagcagtaaaaatgaaagcatcaaaaagggttcctgaacatagagaaaatag

SEQ ID NO: 479554 - DNA, 566 bp, Homo sapiens
gagccagcgcatggtgggaggagaggaagcaggcctgggcaaggccactgaatcaggctcctttccagttgacagaacctaggataagagattgggggaagggtgcacctaggaaggggcagttgacaaggggaggtatgacaggacaggccccagtgccagtttctatcaagtcaagcctcatggagacaggcctgcgggtcctcagcgaaagccacggatcccccaacccacagcccgtggccggccagtggccagygtcaaagagctggggatgtcgagaccgtggaaatagcctgtaatggacctgggacctctcaggagagatgcccgaactgccccggtagggctaagggcctccggaaagtcgggaatccaggcaggaggaaatgatgccttggccacagcccgttttgaatttttttagagacagtgtctcacactgtgtcacccaggctagagtggacagcatcatagctcactgcagccttgacttcccgggctcaagcgatcctcctacctcagcctcctgagtacgtgggactacaggtatatgccaccacacc

SEQ ID NO: 479555 - DNA, 594 bp, Homo sapiens
cattctgttaagtgctatcctatcctgctttggtgtgaaggccactgctggaggggacagagcatgccattgtcaagtgtaagaaaccactaggggagtgtctaaaaatgcagtttcctggactcacctccagagagtccaagtctgtgggtctaggatgaagaccagaaatacacacttttaacaacggtccccagaaatctgggggattctgatgctgaaggtctacagagaacacttgaagaaatatcatgctcatgactattattgggagtttcttctactataattcatatgcctaaattatttcttagtaactttttggaactttattctatttctcctttgactttgtttcctagcctgcgccaaacctctacaaggagcagaaagaacactcagccaagagtcctgaattctaaccttgctctgtcattaacttgtactgggctattaggcttctagcttctttgggcctcagtttccttatcaytcaattagaggattaaaaacaaaaactgaactccatagaaccctaggattccctagatgtgccccagacccaaacatttagtgaggggtgaaggatagact

SEQ ID NO: 479556 - DNA, 594 bp, Homo sapiens
cattctgttaagtgctatcctatcctgctttggtgtgaaggccactgctggaggggacagagcatgccattgtcaagtgtaagaaaccactaggggagtgtctaaaaatgcagtttcctggactcacctccagagagtccaagtctgtgggtctaggatgaagaccagaaatacacacttttaacaacggtccccagaaatctgggggattctgatgctgaaggtctacagagaacacttgaagaaatatcatgctcatgactattattgggagtttcttctactataattcatatgcctaaattatttcttagtaactttttggaactttattctatttctcctttgactttgtttcctagcctgcgccaaacctctacaaggagcagaaagaacactcagccaagagtcctgaattctaaccttgctctgtcattaacttgtactgggctattaggcttctagcttctttgggcctcagtttccttatcactcaattaraggattaaaaacaaaaactgaactccatagaaccctaggattccctagatgtgccccagacccaaacatttagtgaggggtgaaggatagact

SEQ ID NO: 479557 - DNA, 630 bp, Homo sapiens
cgaggtgggaggattgcttgaagtcaggggttcaagactggcctgagcaacagagtgagactctgtctctttaaaaaaaaatcactttggcctggtggtgcatgcctgtagtgctagctacttgggaggctgagatgagaggaacacttgagcccaggagttctaggttagtgagatgtgattgtgccattgcaccccagcttgggtgacagagagaaaccctgtctcaaaaaaaaaaaattaaaataaacaatattctayaaatgtgtgttagttttaataatactctaaggctattactgtcctaataggacatgtgcattccagggatgtcatctggcatttaatcagaagacaacactgcagaggtaactactgtaagcactttggctatctttatgatccacactacaggtttttctaattagcataatgaatgctagaaatgggttttcattggtgtaaataatagtgcttaatatatgtggattggctagtgcagcagttggcaaactctttccataaaggaccagatagtatttctggctttgtgagccttaaggtttctatcatgaccactcactctgtcattgtagtataaaatcagtcatagatatatgtaaataaact

SEQ ID NO: 479558 - DNA, 622 bp, Homo sapiens
ctgcaggtttatgttgggtgagcacgctctgccgtaaaggtagtttgacctacacactatttccagtccatagcattcaccatcagtgaagagtctgggaaaaattcaaagattcagaactgagacaaaaaggcaaggccggggcgatgactcacgtctataatcccagagctttggaaggctaaagccggaggttcacttgaggccaggagcttgagaccagcttgggcaacatagtaagaccccgtctctacaaataatgaaaaaacaaattaaccaggcatggtggtagtcccagctacctgtgaggctgaagcaggaaaatcacttgagcccagaagtttgaggctgcccagaagtttgatcatggctcacccactgaactctagcttagacaacagatcaagaccctggcttaaaaaaaaaaaaaagcgcaaatgcagagggtaagtatgttgtttcatttggcttgagtggagaagggacagttgttgcagaaatcaacacrgtgaacacacatactttgcacttgaccaacactgctgttaaacatcactgtcctttggcctttgcaagtttggagggccacattatttctgaccagtctttatgagtacttatt

SEQ ID NO: 479559 - DNA, 588 bp, Homo sapiens
gttgctgggtctctgaacattgacaaaaggctgcattctgtatccatgaccttccctctgcaatcraagtaaatgatgagggataaaaggggaaggggatgaggagtgaagatgatcaagctgaagggaggcttattatttatccaaaccgtggaataggaggcctccacaacatccaaaatgtattcttcccttcaagagacatgtaatacacaccagcagtcatcagagagcgccattgctgtattaataatccaaaacattcggaaatggctgtgcggaacattgttttaactttggcttaggtagtaatctggttttcaggtatccttcacgtagcaaattgttgttgcttctcagtattaaaacttgtctgtaataagttgcccgaccccaaagaattacgcattttaggtgctggaatattttttgttgaaggccacatgaaaaagtagaacttccccaagcccaaatctagacctcactgaaactggaaaagaaatgagatctatcatttgccaagggagatataagaaagtagtcacatgtatggactttttgcatcaggtgacactggattggaatccc

SEQ ID NO: 479560 - DNA, 456 bp, Homo sapiens
agctgcagtctcctcatctgtaaaacaaatatccagagccccccctccacggagggctgtgctcagcatgaaactagcaatgcatgtgaaatgttgaacccattggtggcgtgtagaaggtgctggcatcactgccgtggygaccttggcttagtcaaggtcacagatatggtgccccttggtggcatcagtatagggctagagctttgtaccaaccttagaaagatgatgaaacatgttggaaacgctgaatcatctctaccaagtctttacatgaagtttgccgtcaaggtatctgcaggccaggaagcgtgtttggaaacaggagctgggcgcctccatgggattgatcttcttgaattgccctttggaggccactcaccacatccggtcctccctagaatccacacactgccaagagctcatcgcggatcaagagcatagtaaccaaacccg

SEQ ID NO: 479561 - DNA, 592 bp, Homo sapiens
tgaaatttgcccaaagtttccaaaatatcctaaggataaatatttgcatttttatgtaattgaaatagttgcaaaaggactcaggatttgtaccaaaacagaaacatttaacaaataactgtacagatacctacaccataataatggtgataastatcatgatgcaaactctggagtcatgagtgtatacaattcaagtcctgaaacagtatgattcaaaactcaagatacaaggttataaaagtgattttatgcaaggaaattatcaggcggattatcttgagaaaagaaggacctggccattttgataaaaaagttgtagtgccttttggcaggtgcatattaagaaaggtgtgtaggccagtgagaacgctcttgagggtgggatagcttcagtcctttgtacataacattgaggattttgaaatatgttcaagtaaaaaaaaatagagaagaaaaaagtgaataaaaccttgagcatctttcctacagacatattaaggataatttacctttatactttagcatactacatggaaaatgataatacaaatgtagcgttttttaaaaatcatttttataacaacatgtt

SEQ ID NO: 479562 - DNA, 592 bp, Homo sapiens
tgaaatttgcccaaagtttccaaaatatcctaaggataaatatttgcatttttatgtaattgaaatagttgcaaaaggactcaggatttgtaccaaaacagaaacatttaacaaataactgtacagatacctacaccataataatggtgataagtatcatgawgcaaactctggagtcatgagtgtatacaattcaagtcctgaaacagtatgattcaaaactcaagatacaaggttataaaagtgattttatgcaaggaaattatcaggcggattatcttgagaaaagaaggacctggccattttgataaaaaagttgtagtgccttttggcaggtgcatattaagaaaggtgtgtaggccagtgagaacgctcttgagggtgggatagcttcagtcctttgtacataacattgaggattttgaaatatgttcaagtaaaaaaaaatagagaagaaaaaagtgaataaaaccttgagcatctttcctacagacatattaaggataatttacctttatactttagcatactacatggaaaatgataatacaaatgtagcgttttttaaaaatcatttttataacaacatgtt

SEQ ID NO: 479563 - DNA, 604 bp, Homo sapiens
ttagacttgtcagctttgttggcattttgaatgtgaatactctaagatgtgaatctgactgaataagtgatatttatttcaaaaagctgtagtatatcaattcctagaacsttatatgaatgcatactttatgaaatgaattttatgactggcttgaataaaattgttgtaaattattgcctgataaagcagaatggtatctaactttagttacctttagcttctaatttagtgaaaataaaagacttctcgaaatgtcaaaaaaaaaaaatgatgtgggaattacgccatttttagtctataccctgggaaagatttttggacagaatattctcttcttcttaattatttggtagaatttgataagaggaagagatttttcaagtttttcgtttaaatgtttgcatccttcataacattgatttcagaacttgatgaggttatgaaaagagaagaaaattgcagactgatcattcttttttttttttttttcttgagaagtaatgtcactctgtcacccaggctggagtgcagtggcatgatctcttctcattgcaacctctgccacctgggctcaatcgattctcctgcatcagcttcccaa

SEQ ID NO: 479564 - DNA, 442 bp, Homo sapiens
ctactgctgttgggtgacatgttctgtaaatgtctgctaagtccattgggtctgtggtgcagcttaaatccaatgtttgttaattttctgtctagatctgtgcaatgctgggaatgagttattaaagtctccaactgttattgtattgagatctatctctctctctttagatctaataatacttgcttttatctgggtgttccagtgtttggatacatttttataatatttataattattatattctcttgctgaactgattcctttattgtaattttccagaaggaggaggaagagggagaggaaaaggaagggaagggaaggaataataagaatccttaagttgcwaactgttcaccttcgtttgtattatctgccatgacacaccacatggatctcatttccaaggacatttagaaagttgtgagtcaattttcccaag

SEQ ID NO: 479565 - DNA, 511 bp, Homo sapiens
tatttatagcaacccaaatgaactgagctctgaattccctgtttagctrttgcatcactcccacagtcaattttgtcatgtctacccccgtctcttcctttattctcgttagatattgtggagcttagctttcaaagatgtcaggttttacaattgtattttctttaaaagctctatccagtatcagaagaagagctagttatccattgcctgtctaaagtctttactgtaagaaatgatttatgttttctgtctctcataagacatcccacagtctctctctttttagtatcttcaacaatcagtcaatcagtctcaaatattctgatggctctttttttttttttttagcttcaagcatattcaagtcattcctttgctataacaaatcttttaaagtaaaaatatatatatatatataaataatcatacaattctgacttctcccacaataaaaatgctattttttttatttttcgtatttctaagctctgtgttctgtctctacaac

SEQ ID NO: 479566 - DNA, 648 bp, Homo sapiens
ccagggctgcgtgactgtgtatcattcctagatgtagctttcagcggggagacccggaggaaacatgctggtaactgtcaatatytggattgccattccaaagtctttagattgttttctgcccttcctcatgtggctttgaccaaaagaatttattctgagaaaaaaaagtactgaaaactgtttaaaatgacatgctttttgacattgcaggtactgacagccttccccttctcctaaccatctcttctaaccctggctagcattagtgggttttaggcaccaggattatatctttagacaaatttaaaagtaggcagttaacttttatgctcctctaacaactttcttcaaggaccttagaggaggtaccagcttaatatttaagaacttattatttattaagaggcagtagttaccatgctcacttaactcatccagaaacttaagttcaggaagtgatatgactttcccaagatcatacaacaatcctaaactgcttcttccttacatcatgcttctaatacatgttgttgtaagatagaacaaaattaattaaattaaattataataaaaataataatttcaataaccatataggaatcatgataattatcaattatcaaaatggttatcacaaatcgacaa

SEQ ID NO: 479567 - DNA, 487 bp, Homo sapiens
gcctaacatagataaatggtaaaaggaagtaaagagaagctatggtgggccgggcacggtggctcacacctgtaatcccagcactttgggaggctgaggcgggcggatcacgaggtcaggagatcgagaccatcctggctaacacggtaaaccccatctctactaaaaatacaaaaaattagctgggcgtggtggtgggcgcctgtaattccrgctactcaggaggctgaggcaggagaatggcgtgaatccaggaggtggagcgggcagagagctgagaccaagccactgccctccagcctgggtgatggagcaagactctgtctcaaaaaaaaaaaaaaaatgaagctatggtgaactaataaaggagatgaggtgacatgtgaataaattgtttccctaagtacgtagaaatgatgggaaaaatgcaaagataaaaagaaaaaaaactaaattttccaattgcaaatgcactgtattgtttgag

SEQ ID NO: 479568 - DNA, 617 bp, Homo sapiens
tttccctgtggcttgtcttcatcctaggcagtgaaaagggggaaacagcacagaggctcttatgtgggagggctttatgcatcaggtctggaaagggtgcacgttacctctaagtccattcctttggcaaaaagccaatcacaaaaccatgcccaactccaagaaaatctggaaacgtattcatgctattgcaagaagcaggaaagtggtgtggtagtcaatgccataatctattgaggaaataaatgtggtttaaaaaggaagcaagaaaaatttacagttgatcctcattattcrtggatttcatatttgcaaattcacctattagctaaaacttattagtaacctcatagtcaatacttaaagtgttttcttagtcattgtgaacatgcacagaacagtgaaaattttgagtcaccctatgtgcatgtcaccagctgaagctgaataaggtgatactgtgcattcttgcttcagctctcatctgtaaacaaatgtgcttttcaagtctatttaatgccatgtttttttatgtttttgtgctattttgttagtgatttcactgcttaaaagactccccaagcactgggctgaagtgttatctagtgttccttagt

SEQ ID NO: 479569 - DNA, 569 bp, Homo sapiens
gggagagggcctcaggtgaggggccctctccatgggagagactgcccagagcccagtaaccaagctctgggtcctaaactaccctctaacttctgctcaccaagggagaaatgccgtctaaaatcctgctgagctaatgaagccgctgacttgatttgcagctctatcacagttcaccaatgaactccaagtttgtaataaaacacaggctacaatgcagaataactcccttgtaagaaaaatgtatgtgaattttaatgatagaacattctttgaggtatatttaacttcagtcattagacaggatttatgcatattttatgggttttttactagctatatcagaatccgtaccacctaactcaggaaactaatagtgagcttgtgtataatgtaaatyggaatgtctccatgatagattggtaacattaaggagctaattacatgtatattatcatggagacatacctgcctctccaaaagcatgaaatatgtaaagagattcttctaggaaaaaagaaatgtgacgctctctcaccaagatgctgaagctgacattcatcaataag

SEQ ID NO: 479570 - DNA, 526 bp, Homo sapiens
ttcattaaatgtgtctagtaaacacttgaagatctacaccctgagaggcattcccagccgtggtccgagtttcaaatgtgggcagtttttccttcctgctccatacagtatgggatcccagagggcaaggacagcacttcatgtccttcacatgccccagagtgcctagtaaagtgctggatacatggatatgcacaaggaatagttgttgagttgaatttgtctgaattaaagagaggaatcaaaggcaaccccgctggtggcaaggctgcagaaaaccttgagaaaatgaaaaggagagttggtttggggaagggggagcrgaaacaaaggatgaagttggcaaaataatgaaatattccttaaacttcataaaggcctttatgtaagttacctataaaattttaaaactgtaaaattaatacattgtatggaaggcaagcttacggtacttttaaaaatacatggcagcctcaaaggagttttattcaaaagaatgacacgccatgaatgcggtagttaaaac

SEQ ID NO: 479571 - DNA, 598 bp, Homo sapiens
tggccatccataaaacacagggtgggttctgcaatctctaaggtcttttcataccccaatctgcaatgactttttttttcctaactagctaatatcctcatcatttttctgtagattttagagagaggtcattctttctatttctgtaaggtcaccctccttaattcatattcctgctgttggcagctttttgcccggttctcagacccttttagcccaagttggggcctctcggcctctgcccctgcagctcttgctcagccacagattgccctgccctccctccatctatcttctctaggctttatcaccttcctcgtccccagtttaaaaaggcgggagactgggggaggcaataaagacagagcagccctttgcttctgagaagggagacttctaccctccatttgacttttccttcaattactgctggtttgacattttttttycccttcattctgagaagtccctcctgaactctctcacttggagtttgaattattttgcattcaatgacttttcagcttttgatttaacatttaacaactttgcctgtcagcctcccttccttttcctccaaaatgctataagatagttt

SEQ ID NO: 479572 - DNA, 680 bp, Homo sapiens
ctaggtttataattacggctaaagtgggtaccatgctcccctatcaccccatacrttttctagttggctattaccccttgagtattttaaccctttgagggtcattagaacttttaggtccctttagtaggcagtttctctcagttggtatgctaaatttcgggccttgtggcactctgatcaccttctcaggccattagtataaatgtgaagaaattactcaggtatattggaccagtttagcaaaaagactcctctctcagaacatataaaaaccaaggtcttactagagagaacgcattcaaatctatagttcattaaaacaggtatgttttgagctcatcagtttatcaagaaagtccattctttcacttacgaagatataccgtctttgtgtagttgttttgaggttttcactcaaaacctcctaattatcatacagaattatctatagtcagatgaggcagtaaagaaaatttaaggattgatttgttagtggatatagtatagtaagtctctacgaaacatactaaatttataaggaacttggagctcactggttgaagttctcttcctaaatgtcatatactaaggatatcttaattcttttcttcaggttcaattagcagaatttctagaaaatttacaagaaaagtccttgaggattgaagcctttgtta

SEQ ID NO: 479573 - DNA, 680 bp, Homo sapiens
ctaggtttataattacggctaaagtgggtaccatgctcccctatcaccccatacgttttctagttggctattaccccttgagtattttaaccctttgagggtcattagaacttttaggtccctttagtaggcagtttctctcagttggtatgctaaatttcrggccttgtggcactctgatcaccttctcaggccattagtataaatgtgaagaaattactcaggtatattggaccagtttagcaaaaagactcctctctcagaacatataaaaaccaaggtcttactagagagaacgcattcaaatctatagttcattaaaacaggtatgttttgagctcatcagtttatcaagaaagtccattctttcacttacgaagatataccgtctttgtgtagttgttttgaggttttcactcaaaacctcctaattatcatacagaattatctatagtcagatgaggcagtaaagaaaatttaaggattgatttgttagtggatatagtatagtaagtctctacgaaacatactaaatttataaggaacttggagctcactggttgaagttctcttcctaaatgtcatatactaaggatatcttaattcttttcttcaggttcaattagcagaatttctagaaaatttacaagaaaagtccttgaggattgaagcctttgtta

SEQ ID NO: 479574 - DNA, 680 bp, Homo sapiens
ctaggtttataattacggctaaagtgggtaccatgctcccctatcaccccatacgttttctagttggctattaccccttgagtattttaaccctttgagggtcattagaacttttaggtccctttagtaggcagtttctctcagttggtatgctaaatttcgggccttgtggcactctgatcaccttctcaggccattagtataaatgtgaagaaattactcaggtatattggaccagtttagcaaaaagactcctctctcagaacatataaaaaccaaggtcttactagagagaacgcattcaaatctatagttcattaaaacaggtatgttttgagctcatcagtttatcaagaaagtccattctttcacttacgaagatatacygtctttgtgtagttgttttgaggttttcactcaaaacctcctaattatcatacagaattatctatagtcagatgaggcagtaaagaaaatttaaggattgatttgttagtggatatagtatagtaagtctctacgaaacatactaaatttataaggaacttggagctcactggttgaagttctcttcctaaatgtcatatactaaggatatcttaattcttttcttcaggttcaattagcagaatttctagaaaatttacaagaaaagtccttgaggattgaagcctttgtta

SEQ ID NO: 479575 - DNA, 600 bp, Homo sapiens
cctctccaatgcttgttatgatcagcattttgttctgctgttttatttgtttaccattctaatgggtgtagtgtgggggtatcccactatggctctattcacrtttgcttactaactagtgatgttgagcatattttcatgggcttattggcatttgatatatcttctctgtcatgtttattcaaaccttttgcccattttcttattgggttgtcttcttatttttgatctataaacattctttatatgttttagatccaacactgcatatttctgagagggccagacagacagggaggacctaagctggcaggactctctagcgtggtgctgtgggatctccctccagactggggtccagccctctgcctctctgtgtacttgggaggatgtggctcagcagtgctgttgagcccctcacaggctgtgggaatgcaccaaggagagaaagtgtttctgctacatgtcacctgcaggctgtggccacggaggtctctctctcatggtcaggatctccttcctcctacctcctaaccccaaggcctgagcaccaagacgccactgccctgtctcagcaccgcaggcccaggacttgagcgg

SEQ ID NO: 479576 - DNA, 600 bp, Homo sapiens
cctctccaatgcttgttatgatcagcattttgttctgctgttttatttgtttaccattctaatgggtgtagtgtgggggtatcccactatggctctattcacgtttgcttactaactagtgatgttgagcatattttcatgggcttattggcatttgatatatcttctctgtcatgtttattcaaaccttttgcccattttcttattgggttgtcttcttatttttgatctataaacattctttatatgttttagatccaacactgcatatttctgagagggccagacagacagggaggacctaagctggcaggactctctagcgtggtgcygtgggatctccctccagactggggtccagccctctgcctctctgtgtacttgggaggatgtggctcagcagtgctgttgagcccctcacaggctgtgggaatgcaccaaggagagaaagtgtttctgctacatgtcacctgcaggctgtggccacggaggtctctctctcatggtcaggatctccttcctcctacctcctaaccccaaggcctgagcaccaagacgccactgccctgtctcagcaccgcaggcccaggacttgagcgg

SEQ ID NO: 479577 - DNA, 615 bp, Homo sapiens
tgacactgtgtgtctttaacccaacagcagcactccttaggaaacttggaggaaaatgtcacgtcaccctcaggagcaccagagggttgtgcagtggcatgaakgtccctggtacacagcagggccacaggggaagtggaggagtcactgtgagctgccaagacccgcactttgctgctgtcttccctctcatgcgtatcccacctgtgtggatgtgggtcccgtgcacgcctctgtgaaatgcccgcctcacctggaggactgcagtgcgaaggcaccatgcagatgtccctcagcctgcctccagcaactggaaggcaaggcaccatgcttcttcttttatggatgaggacggcgaggctcggacagggaagtaaccagctcacgttcacaggaacagacaatgttgggagtaagatttgaggccgcactgtgtagctctaggttttattctccttccccatcttgcctttccttattatttccaaggagggtaactgtattctgatgcttgcttagaataagccaagcaaacaggaaagagcagagagaacctgctactcctggaggtctggcccagggaggctgtcaggacatgagacagggctctgcagg

SEQ ID NO: 479578 - DNA, 604 bp, Homo sapiens
gaaatatgacaagaaattctatatcatagtttctaaaacttactaaaaagattcagatttctgaataaatatgcatacacaacttatatatgtgagattaaaattacttggaatgtgaacactccatatgatgatgttaccaagatttgtgggaaaacaaatgtttaagttaatttatattatattttawcttcatctgttacagttatgttgaattttactaagggttgtagtattgtagctaattatcttttactgctaattctcttttcatgttctagctaattttcttttaatggggcaagataaacaaaggtaatttgaaaaatattttttccagttaccttatttctaaaggcttttctctgtttcttgtcaatatgatattccttatggctgctgataatttttttctttaagaatctaatatgtcaaatccaatttagggcaacacttgccaacctaagtccttatacggtttcaaagataaagtgttcatcagacaaagtgataacaagggatgtgctggctgtttataatccccttcaggtgtatttgttgaacttagtgacttaaagcaggtccaaatctcaattcctgacag

SEQ ID NO: 479579 - DNA, 612 bp, Homo sapiens
cagaaatttatttcatttcttattttcaataattgcattattattaatagctaaaaacagttaaattcttaacactctcacccataaaattacattttaatgaagaaaatttgcaataaacaaaagaaattttaaaatccactaagaattaatggaaaatatatcttcatttcaacgtgtactcacttccagaaaacaaggatattgtaatattttaaagtttattttatgagtgtgtaggaaggagcatactgtaattgatcagagttttycttataaagaacatttctttatctatgcctgctagtaaaagaatcataaatcttacttatgctgttttatttctttaaatttttctccattcatctactcatttaggaaatttacggaaccattattgcacatgtatggacagtgtactaggttctgcagagggaaaaaagcaaaacaaagctatagactcttaggaaactctcttgagagaattgtttgtttaaaaacaaaaattcacacaaaaatttgcaaacaaaaattacaactccaataattggacgtccttgttactatgggagaatacacaggaagaaaatgataggctttcaaaaattaata

SEQ ID NO: 479580 - DNA, 605 bp, Homo sapiens
ttagcattttgttagtgagattaatcttcatagttgtacacagataatgtattctaagttttggtagtcatgttttacagcatttcattgtatctatataccctattttatttatacattcaaatttgatgggaataaagtatattttggggaagtgagtgctattataaatagtatagctataagctttttagtaaatataatttaattaacaagtgtattaattcattttgtgtatatatcttcaaatgcacttagggggccacaggatacacatatgttcaattttagaagataacgaaaaatatttttccagaatcattgttcaaatgtatactctcaccagcggtgtataaaatattggatgtacatatcccggmcaaaacttggaattgtcattcattttcattttagccattcttgtttgtgaaaatttatatcatttcactggtggttgatggagttaaacatcttttaaaaagatgcttattgtccatttaaatatgctttaatgtgaaatactcatttcttcttgctgctttttggatcatttagcattttcttgttcatttgttgtataaaataaatcgatataagtacagtga

SEQ ID NO: 479581 - DNA, 664 bp, Homo sapiens
atattttactctatacctacatctacctatgtatctacgtatgtatttatgtatctttctatctatctattggctcatttatctatatatctctctataaaaatccctagaggtttttaagagagtgactgagcaataatgagaactctgctcaatttcttatagacayatgcaaacacttattaaaaccatcaataatctaccctccaaataccaggggtccttttgtgtatcctactctggcttacccacagggtctacactatgatgcccacactgtgatgtccatactgtgatgctttgggcccttattacttaagtgagctaatatgtataaagttttaaaaagagtacctagtacatttcctaggtactattaaataaaacaataaagaaaagaataactcactaaaaaagataaaatccctatgtcaaaataggttttgggagcagatagaaaaaaatcactgttgattcagctgaagggcactagaaagcaagatattagtaagtgtacatatacaggatggaacataaataaaataaaataaaatgaaaacctttgaaggcaactgcaaaccctcttaccaggaagattgagttcagaaagtgatttgtcagcatccataaaactgtagcaggctgactggtagcccaaaggtaa

SEQ ID NO: 479582 - DNA, 599 bp, Homo sapiens
ccccgcagaagttcgggattatgttaaacaaccaaacctaagaataattggcattcttgaggaagaagagaaatctaaaagttggggaaacatatttgggacttaattaaactaaagaccttttgcatggcgaaaggaacagtcagtagagtaaacagacaacccaacgagtgggagaaaatcttcacaatctgtacatccagcaaaggactaatatccagaatctacaaggaactcaagcaaattatcaggaaaaaaacaaacaatcccataaaaatagacatgaatagacatgaatagacaattctccaaggaagatatacaatggccaacaaacatatgaaaaaatgttcaacatcactaatgatcagggaaatgcatatcaaatccacaatgtgataccaccttactcctgcaagaatggccataataaaaaaaaaatatagatgttggcatgggtatggtaaacaggaacacttttacactgctggtgggaactagtactgagggaagagagagaccctctcatattgttttatattgtttcatactcagtacctgtttttttwaaaaaaaaaaaaaccaaggacgtaaaaccc

SEQ ID NO: 479583 - DNA, 298 bp, Homo sapiens
tattgcctagcaattcagctctggccccagacttgcctagctctctcagcaaaactcagaagccctatagataactggactcatctcccctacacagcattttatagactctttgttaacaagaattccccttgaaggttttaccccattcactccatccccaagcatctttataatatttatcttccagtygtaaattactgtctgtaagaggtgttcttgtaattaccattgtcttcatcttatatttccagtgaaatttttacttccttgtgatattttagcattcttcaggcga

SEQ ID NO: 479584 - DNA, 602 bp, Homo sapiens
agtagatgtggtaggtaaataaccatgaggaagagaggcagagaactacttctccrttttaaaaagactttgatgaggaagcagtgaggggataaaaaccaaaatgacctgttttcatgaagaccacttcatcagaagactaattcttcctcaatctacaactgtcatgatcctaaaaattactgtagcaatttggcgtaaagcctaattgtcatccctcgtggtgtctcaaaatgaacataaatgaatgaaaaatctttaaaaaatataacataaaacaaaactaatagaaatgactccctaaagggagggaacaggataacggaagaaggaatgaaatgagtttattatcttattattatctatcttattatatagttatatatatataacatatatatatatagtcagagatatattataagatggtggagacagaagtaagccatgatcacatcactgcactgcagcctcggcaacagagggagaccctgtttctaaataagtaaataaatacaattttattttacatataaaacatttatgtaatttatatggccaaactatataatatatatattatggctggagctgaacagtta

SEQ ID NO: 479585 - DNA, 602 bp, Homo sapiens
agtagatgtggtaggtaaataaccatgaggaagagaggcagagaactacttctccgttttaaaaagactttgatgaggaagcagtgaggggataaaaaccaaaatgacctgttttcatgaagaccacttcatcagaagactaattcttcctcaatctacaactgtcatgatcctaaaaattactgtagcaatttggcgtaaagcctaattgtcatccctcgtggtgtctcaaaatgaacataaatgaatgaaaaatctttaaaaaatataacayaaaacaaaactaatagaaatgactccctaaagggagggaacaggataacggaagaaggaatgaaatgagtttattatcttattattatctatcttattatatagttatatatatataacatatatatatatagtcagagatatattataagatggtggagacagaagtaagccatgatcacatcactgcactgcagcctcggcaacagagggagaccctgtttctaaataagtaaataaatacaattttattttacatataaaacatttatgtaatttatatggccaaactatataatatatatattatggctggagctgaacagtta

SEQ ID NO: 479586 - DNA, 524 bp, Homo sapiens
tttactttttgttagttccacactactttaacttcataataggcttagtatttggcaagtcaaattctcttttcttctcttttcctctttcccctctctctctctcactcctaatttttttcaaaatatcctttgcattcttgcatgttttattttccaaatgaactttaaagccagtttttcatataaacattttattggtattttatttgtacaatattaagttatagattaataattttctacggattttcaataagtgaagtactagtataatatggagtattaagaaacggtcctaccacaacrcacctgggacacagattcactcagatatttgtagactcccctctggcctctttttcttcctctaattccctggttgggcattgtgttcatgtgtccatgcaatgttttggagaaatgtagacaggaacacatttcctccatgggtgagaactctgggaggcttcatagcacttccaatatcagaaccatcagaactagcacaaatgagccatttt

SEQ ID NO: 479587 - DNA, 539 bp, Homo sapiens
aaatagggtccctttgtcatttatcctcataacagcaagctgacaggctgtgttgccatttataaatgaagaaagtagacttcagaccccttacatctgtctaacgtccaacagggaagcaacagtggagctggaatgcacttgaatgtcctcgaagatgatgtttttatactttatgtaacactggctttaatatattttaacacaggatcatgctacttttatgctgtaaattattcagtaattcyctgttatctttgagataatatcagactttgtagtttagcatgaaaaacctgtcggtatctggccccttttcctcttcaactcatgtgtcgacctcccaacatctgaacctcttcacatttccttactccccatccactcagttttcacatttcaggatgtttgtaaatgttgcacattttcgtggtaccctttcaattcagttttcacctctcaccatctgattttggtctttcaaaactcagttcagctacagtgtcacttccacctggaaatgttccaggacctcatgc

SEQ ID NO: 479588 - DNA, 539 bp, Homo sapiens
aaatagggtccctttgtcatttatcctcataacagcaagctgacaggctgtgttgccatttataaatgaagaaagtagacttcagaccccttacatctgtctaacgtccaacagggaagcaacagtggagctggaatgcacttgaatgtcctcgaagatgatgtttttatactttatgtaacactggctttaatatattttaacacaggatcatgctacttttatgctgtaaattattcagtaattctctgttatctttgagataatatcagactttgtagtttagcatgaaaaacctgtcggtatctggccccttttcctcttcaactcatgygtcgacctcccaacatctgaacctcttcacatttccttactccccatccactcagttttcacatttcaggatgtttgtaaatgttgcacattttcgtggtaccctttcaattcagttttcacctctcaccatctgattttggtctttcaaaactcagttcagctacagtgtcacttccacctggaaatgttccaggacctcatgc

SEQ ID NO: 479589 - DNA, 539 bp, Homo sapiens
aaatagggtccctttgtcatttatcctcataacagcaagctgacaggctgtgttgccatttataaatgaagaaagtagacttcagaccccttacatctgtctaacgtccaacagggaagcaacagtggagctggaatgcacttgaatgtcctcgaagatgatgtttttatactttatgtaacactggctttaatatattttaacacaggatcatgctacttttatgctgtaaattattcagtaattctctgttatctttgagataatatcagactttgtagtttagcatgaaaaacctgtcggtatctggccccttttcctcttcaactcatgtgtcgasctcccaacatctgaacctcttcacatttccttactccccatccactcagttttcacatttcaggatgtttgtaaatgttgcacattttcgtggtaccctttcaattcagttttcacctctcaccatctgattttggtctttcaaaactcagttcagctacagtgtcacttccacctggaaatgttccaggacctcatgc

SEQ ID NO: 479590 - DNA, 602 bp, Homo sapiens
cttttgaaagtttctctgaataaataaataaagggaggtccagcacctaggaagtcgaaataaaaagcctattatgaagtatcaggaagtttctgtacattacacagtccacgagtagaaaggaattgtgttaatagcaataacccagatatctcagattcttgcctcacataaaacaccaaccattaacagttaaacccttaaaagttcatccatctcagctgggcgtggtaactcacgcctgtaattccagcactttgggagactgaggcgggcggataacttgaggtcaggagtatgagaccagcctggacaacatggtgaaacttcttctctactaaaaatacaaaaattagccgggcgtagtggcaggcacctgtaatcccagctacttgggaggctgaggcaggagaattgcatgaacccgrgagatggaggttgcagtgagccaagattgtgacactgcactccagcctgggtgatagagtaagactccatctcaaaaaaaaaaaaaaaaaagttcatccatctctaagaatgtctggaatttcaagtctcacacataaagacacgagtaaatctacccagtttcatatgatctc

SEQ ID NO: 479591 - DNA, 581 bp, Homo sapiens
accccgtctctgctaagaatacaaaaattagccagcgtggtsgtgggtgcctgtaatcccagacacttgggaggctgagacaggagaatcgcttgaaccccagagggagaggttgcagtgagccgagattgcatcattgcactccagcctgggcaacaaggacgaaactccgtctcaaaaaataaatacataaaataaaaataatagagccaaagcctcttttagatgattttgctgcattcaagctttctaagtccaaggggttgtgtgtgggtgtgtctgtctgtctgtccttctcattatgtgttcatttctatctggtgaggaagcagaagtcattatgtctataaatcttgcatcttttgagccttgacatattttagacagtgtcccagtggatgccacatgtccagtcatctgtgactccttcaggaaactaaaatgcacacctagagaggaaagagtcaaaagccagaaatgcaggtagagtccacgctgaggttcaggtcatccaatagagtgtttcttagaaaataagccttctgcagtatgcagaggaaaggctttcctccctacctcca

SEQ ID NO: 479592 - DNA, 581 bp, Homo sapiens
accccgtctctgctaagaatacaaaaattagccagcgtggtcgygggtgcctgtaatcccagacacttgggaggctgagacaggagaatcgcttgaaccccagagggagaggttgcagtgagccgagattgcatcattgcactccagcctgggcaacaaggacgaaactccgtctcaaaaaataaatacataaaataaaaataatagagccaaagcctcttttagatgattttgctgcattcaagctttctaagtccaaggggttgtgtgtgggtgtgtctgtctgtctgtccttctcattatgtgttcatttctatctggtgaggaagcagaagtcattatgtctataaatcttgcatcttttgagccttgacatattttagacagtgtcccagtggatgccacatgtccagtcatctgtgactccttcaggaaactaaaatgcacacctagagaggaaagagtcaaaagccagaaatgcaggtagagtccacgctgaggttcaggtcatccaatagagtgtttcttagaaaataagccttctgcagtatgcagaggaaaggctttcctccctacctcca

SEQ ID NO: 479593 - DNA, 328 bp, Homo sapiens
ttttattagcctgagaacaaaaatataactataatttttgctggagtacccaggaaggtcagatggccacatgagtcagttaaaacaggagcaacatttactttaaagcctatgtgtgccatcacatttgtgatgtgtgtatatctccctgcagtacatatattaattatcatgtgtagtgtgcttcttgtactttctttgcctctgtctgtgtctctatctctcacacatggacaccaatttatacactagcattaagggattaagagggtttcagatgcttccaatgacttaraggtacaatatctggaatgaggtagtttagtgg

SEQ ID NO: 479594 - DNA, 638 bp, Homo sapiens
tcacaaaatattatagtaggaaaaaactttcgagactatctcatccaactccatcattttacctaaaagaaaatagggactgtaaaacattgaagaagaaatatgcagtctggcacatagagcttagaaatcttcagttagccctaatagcaaataaaaagttgaacaaactaaaaattaacaactctccatagatctgtcagagaagtgaggtctcaggaaaactgctgctccccaaaactaaggaaacagacagggagctacggagaatcacaattttggaacagaaagagccaatgcagtaagtaggaaaacgtgaactggkatgaactgctagtagcttggtgtgaaccagcctgagagataaaaactccaggggacccagtcacaaggcagccccacactttcgtgacttttacctccagggagctctaccaggtcctcacagtgaatatcagagaaaagttccctcattcttctggcatagggaagagaaaagaaaccattctgaaacatgccagacaattctgttcttgttaacaaggcctgccctcggagaaactatttgccagagcctaacctgttgaggttctatcagagcctaactgaccagggagaagagaaatacccaactccag

SEQ ID NO: 479595 - DNA, 652 bp, Homo sapiens
aaagcagttctgaaccttagacatttttgttttatctagagatgttagtggggtatggagttagatgtgtgagttttttcacaactattatgagtataataattaaatgcccttactagaatgagattttgtgtggcgattcaaggtcactatattatgatattcccacactgctgtaaagacatacctgagagactgagtaacttatgaagtaaagaggtttaattgactcacagttgcataggctgtacaggaagcacacctcgggaggcctcaggaaacttagaatcatggcagaaggtgaatgggaagcaggcactgtctttacttggccagagcaggggaaagggagtaaaaggggaagtgctacatactttgaaacaaccagatcttgtgagaactcactagctatcacaagaagaacaagggagaaatccccctccatgatccctcacctcttaccccaacaatggagattacagttcaacctgagatttggattgggacacagacccaaaccatatcagtcaccatccagaaattggaygaccttctaagaacaccatccaagacataaaaatcataattaattaaaccccatatgtagaggatccatgaagaaagaacatctacactttcagtgttcttcaag

SEQ ID NO: 479596 - DNA, 575 bp, Homo sapiens
ctggaatgcagcaaggaggtacctaggtccctgtggtgctcagaagcccaagatagcaacatagagaggggaattaagcaccctgtctctgctgccctatttccccacccaagatctggtcagtcaggagagtcaagtctttaccccttgtaaagaaaaggtaagcaaaagatccccaccagttctcattgccactgcagacactggcagttcttattacagggtaatcctacaattctcacaagccctgagccaagtcttgggagctgcctggaattcatatggctgcattgctctggactaagagttatatactcctaatcctgcccatgacccaatctgctgcagtatgaagccatcttgaaaccagagccactactgaagtgtgacctgccctgggggccagtagtcaccacctcyccagccctggagctctgccatcattccaccaagaccatcaagcccacatggattcatgtgggcttagctacgatgataaaaccctggttgctcagagcgtgggatgaggtatgactataactgtggtcctgcatagtggagaagccaaactggac

SEQ ID NO: 479597 - DNA, 569 bp, Homo sapiens
aatatcaatttaagaccatatgcagaaaaactatcattacttgagtttttcagaaagggattagtagaaattatttatatccactttcaaaaggaaagaatagagatctttaaatcaacataggaagtcacattattcatttataatgaatgtctgctgcttgcttagaaagaggagactaagaaatgggttccactctctaatttttttttttgctttcagcatcagtgcagacagagcaagaagaacaaagtmgtagctttaaaagataaggttctgctattcaatgccagcctcccagcattaaccttaatctctcttatttcatgagatcccaggtccacaattgctgaggatgtcagtttctagaggaaaacagagccctgagaggaaaggcccaaaggaagaatatcagaatttaggaaacttctccaattaatgctctgcccctccatgggaattaaataacaatagagctgggcagtgggtctttcctactaaatgttgatgtgagatatagtggaaaggatactggctaagtttggaaagaaaatttccaggtcaaccct

SEQ ID NO: 479598 - DNA, 580 bp, Homo sapiens
tggttaggtaggaaaaccaggaggatgggaaccctagcaccagttcagaaagaatttcaagaacttagttcccttatttccccttattgtattttttcacccctttaaaactcattttgrcctgtagcagtggtaaacaatagctctgacagtagtaacagtaaaggcagccagcatttatacctgttctgtgccacacagatgctaaacaccttacctgctctatctcattgaatcctcactccagctccttgatgtgggctttattattatccctggtctaaactgagcaaagtgaggcccagagaggttgagtgacttgcccaaagtcacacagctcataagtgacagagccagaattagaaccctacatgcctcaaatcttttcccaaaataggttagctataaataaatgtcctgagaagctcctgggaaaagggtagtggttgatgggaggacattcactctggtatttaaggaactgctattcatcagtccagaaacagaatagaggcagacaatacaaaattcctgctcttctgggggagcctcagtatcctcatctgtgaaatggggatat

SEQ ID NO: 479599 - DNA, 536 bp, Homo sapiens
caacttgaatttttttcactcaacactgtgtttctgagaccaatcctcgctgatacatagagagctagttaattcctcctgccttctgcatagcatctcactatgttattaattgccttttgttttctcaagctatttctgtgttgatgggcatttgtgttgtgtctactgccttgctattgaaaatagcacttcagtgcgtgcaccgcgtaggcctctgtgtactaccgtgaagtgtttcctgaggccagtagttctcaacttggctgcagacagaatcacctgaacgttttttttttaacaatcwcaccaactctctgcctttccccaaattcttaattgaatggttcagggtaggcatcggcagttttagaagctccagggtgcttctaaatgtgcattcagggttgagacctgctgttctggggtgtacattggggatgttggtgttgcaatgactgggccaaaagaagaacccaaccccgtgttttaccaggctctgcccaattgcctttcaaggtgactgaactgatcta

SEQ ID NO: 479600 - DNA, 637 bp, Homo sapiens
tcttttgcttcataacttcagcagtcttttgcttttcctttcataccattatacaggacaactggtcagctaagtagtccaggtcactagttttggtcatagctcacttagtcatatgacgtttgacaagaatgcctaatttatcacagaaaccattttgaaaatttgaatttaataatgtgtgatttttgtttttttaatagttatctgctgacattctgcaatattgtcctagtgttttagcaaagtagataaaataatggaaaacagactcatctgttcttccaagaatggaatctggctaggactactacacattgcaggagcttcctctcagacwccctcatgagattatccactgcctgagaatgccctggaagtaagttctcttttgtctttggagtggaaattccacattcatacactataggtcattaaaagttggtcaaatccagaagaaggaaaaccaaaaccaagcaaccaaacaagaaaaagcaattgcagaagaaaaagaagttaggactggcaaaaattcagcaaacaaacttaagataatactccaacaggactggcaaaaattcagcaaacaaacttaagataatactccaacccaactcctgacttagagatgaagtta

SEQ ID NO: 479601 - DNA, 619 bp, Homo sapiens
tttcccaatacacatttgctaaaataccctggctgaatagacgtataaacaataagatttatttaaaattatygcttccgaaaaaaggtaaaaactgtaaatcctaggagactactgaatcattatcatcccaggcccatttccacacatcccccagcacagtaatccacgaaaatcaaaggtaacgtgttcggaatcaaatcatttgtttagggcaggcctttctgtgatctgaaaaccattggactcaggtaacttttaaggctatttcaaactttctaagaaatactgttaagaaacacagatttaaagagaagatgaaatgatagaaagggacaatgtctctagcaatcatttgattctcatgagatctttgctctcaaaaacacagtttgtatcttctcatttcacaaacaaagctaaaagttataatataaagtggaattaaagttctaaatctgagtaacaaccatggctcctcatctgtattccaatttttttttttgttacacaataagagggttaatattttagtagttttctataaatctttagtaataacttctttttcatttgcaaatcccaaacaacatttctatttcattattaaggctaggta

SEQ ID NO: 479602 - DNA, 584 bp, Homo sapiens
agtggagctctgaccctagaaacagaagttagacattaaaaaaaaaaattaaagtaccctcccaacccttttcaagatatcattatcaaattttataaaaataattcaattaagtaccatgtagccccgttttattttttaggagctcagttaaatccttcagaattatctggtgtatgtgagtgtgtatgcgtgaaaaatattgtgttttwgaattgaatttgcattttttacttaaaaaataaaatatatttctccaaatatgaaccactgaatttccagagtagatacatacaataaactggggtaccctgtttagattaaaaccctatttgagaaaaaaaaactatccatgtactttagttttttttttttttcatacaaatgtatttgcctaaagaaggtcattttcaccgactagcattttgtcagaaaatttgaaggactcaagtgtacttctgtggatctgctggccaaaatgtgacatctgttattccctaaaaccaatgtgacccttgtacacaagaaatgctccagaaaatactatgggaattacagactaagactaactctcgtaactgaaa

SEQ ID NO: 479603 - DNA, 584 bp, Homo sapiens
agtggagctctgaccctagaaacagaagttagacattaaaaaaaaaaattaaagtaccctcccaacccttttcaagatatcattatcaaattttataaaaataattcaattaagtaccatgtagccccgttttattttttaggagctcagttaaatccttcagaattatctggtgtatgtgagtgtgtatgcgtgaaaaatattgtgtttttgaattgaatttgcattttttacttaaaaaataaaatatatttctccaaatatgaaccactgaatttccagagtagatacatacaataaactggggtaccctgtttagattaaaacccyatttgagaaaaaaaaactatccatgtactttagttttttttttttttcatacaaatgtatttgcctaaagaaggtcattttcaccgactagcattttgtcagaaaatttgaaggactcaagtgtacttctgtggatctgctggccaaaatgtgacatctgttattccctaaaaccaatgtgacccttgtacacaagaaatgctccagaaaatactatgggaattacagactaagactaactctcgtaactgaaa

SEQ ID NO: 479604 - DNA, 582 bp, Homo sapiens
ttgcttgcattacctcctgagctctgcctcctgtcagatcagtggcagcaatagattctcataggagtgtgaaccctattgtgaactacagatgtgagggatctaggttgcacactctgtatgagaatctagtgcctgacgatctgtcactgtctcccatcacccccagatgggactgtctagttgcaggaaaacaagctcaggactcccactgattctacattacggtgagctgtataattatttcattatgtatcataatgtaataataatagaaataaagtgcataataaatgtaatgtgcttgaatcatcctgaaaccaccctctgaccctggtctgtggaaaaattgtcttccacaaaaccagtcccyggtgcccaaaaggctgcggatggctgccataaggtgtgcttttttttctggtaaaaaaacctctggcctccttcctgacctctgcacatgatgtttgcagaccacaggtctctttccctgacccatctctgttttcactgctcttccatttcatatttttcctaaccagtaggccaagtgcatgtacttttccttgctatggagttgct

SEQ ID NO: 479605 - DNA, 647 bp, Homo sapiens
tatccattctgacttctgcctgctcccctttgctcactgctaccttttattctggaggttgatgaccctctcttatgcctttccaaaccactttacatgctttcttttttgtgacaaaatctacatatatttatttggttgttctcaaacactagtgacgaattgcgtgtgtgtgtgtgtattttaaaaygcaaaatatttatatatataatatatatattttgcccttttgactcattctttgttatatattgtcagtattgtgtactttgaaaaattttaaaattgacatattgtaaaattgtgttggtgtatcaaatttaaaatccaaagagctccaaatacacagatttgaatacaataaacaaacaaataagaactcaagagttcacgtcattcacaactttaagtatgtatatggcatttttataaggtcacaattcccattgtctgtaacatacaagacacacaaaaataatttagacaaattaaatgaaaagctagagttaatcaccaaaaagtctacattcaattgtcattattttgaagtttaaaaataaggtaagagctaataatcttttaagttagagttgcttttcaaaataaaaagatataaattacctataattagaattttaaacatacat

SEQ ID NO: 479606 - DNA, 647 bp, Homo sapiens
tatccattctgacttctgcctgctcccctttgctcactgctaccttttattctggaggttgatgaccctctcttatgcctttccaaaccactttacatgctttcttttttgtgacaaaatctacatatatttatttggttgttctcaaacactagtgacgaattgcgtgtgtgtgtgtgtattttaaaatgcaaaatatttatatatataatatatatattttgcccttttgactcattctttgttatatattgtcagtattgtgtactttgaaaaattttaaaattgacatattgtaaaattgtgttggtgtatcaaatttaaaatccaaagagctccaaatacacagatttgaatacaataaacaaacaaataagaactcaagagttcacgtcattcacaactttaagtatgtatatggcatttttataaggtcmcaattcccattgtctgtaacatacaagacacacaaaaataatttagacaaattaaatgaaaagctagagttaatcaccaaaaagtctacattcaattgtcattattttgaagtttaaaaataaggtaagagctaataatcttttaagttagagttgcttttcaaaataaaaagatataaattacctataattagaattttaaacatacat

SEQ ID NO: 479607 - DNA, 647 bp, Homo sapiens
tatccattctgacttctgcctgctcccctttgctcactgctaccttttattctggaggttgatgaccctctcttatgcctttccaaaccactttacatgctttcttttttgtgacaaaatctacatatatttatttggttgttctcaaacactagtgacgaattgcgtgtgtgtgtgtgtattttaaaatgcaaaatatttatatatataatatatatattttgcccttttgactcattctttgttatatattgtcagtattgtgtactttgaaaaattttaaaattgacatattgtaaaattgtgttggtgtatcaaatttaaaatccaaagagctccaaatacacagatttgaatacaataaacaaacaaataagaactcaagagttcacgtcattcacaactttaagtatgtatatggcatttttataaggtcacaattcccattgtctgtaacatacaagacacacaaaaataatttagacaaattaaatgaaaagctagagttaatcaccraaaagtctacattcaattgtcattattttgaagtttaaaaataaggtaagagctaataatcttttaagttagagttgcttttcaaaataaaaagatataaattacctataattagaattttaaacatacat

SEQ ID NO: 479608 - DNA, 533 bp, Homo sapiens
tgcaagtacacttccctccggtgcatagatttctcacaaaaaaacagagaaaagggaggtgtgaatgtatcaccttgctcatgaacatgttggacgggatcgccgtttscactgcgactcttctcccctccacatggaaaccgaagactgctctgtggctctgactcaattagcagcatgttttttcacaagtgggtgggccatctccattagagtgacctaattctatggggctgcttctgtattgatctgggtgcattaccacaaggttacacattcgttagtgtaactgggtaaagaacactttcagggaaagcgtggaaagagatggaaggaacaatatatgcgctctccttggagcagaaattagaatccttagattattcttgtccagattagtgaaaagttatgccttgatattcttcccaaagctcctttccaaacacctcactgcttttgtctgtctctcatgatctaccatgatgaagatcataaaagggagacctgataaactgggccacaactaactctgc

SEQ ID NO: 479609 - DNA, 533 bp, Homo sapiens
atataccactatcaagaccaatttatgagccacactaaaataattatcattgttttattataatctcaccttattaaccagaaatgttaatctggttaatcatctaccatattcaccagactgaataattggcagttcttttaaaaaatcaaatttatcctggaaagaggagtatttgccaactcaaggatgttttaaagaatgtgctagggactcrtggccactctaaaagaggagttccagaaatgttgaagcattttgggaataactgtatagtcttccaggtcttctactttgaagagagatgacttagatggatagatttttatatatctttgggattcctcagattactttgtagtcacaagtcagattgagttttgactggagcaggtcatttggcaactatttgatagaaaaatatttaatagtatttatcagaaagagaatgtcttggcagatctctgaggcttgtgtgtaggtgttctcaggaatcctcccagggaacctgctcttgtgggttccttgggaat

SEQ ID NO: 479610 - DNA, 533 bp, Homo sapiens
atataccactatcaagaccaatttatgagccacactaaaataattatcattgttttattataatctcaccttattaaccagaaatgttaatctggttaatcatctaccatattcaccagactgaataattggcagttcttttaaaaaatcaaatttatcctggaaagaggagtatttgccaactcaaggatgttttaaagaatgtgctagggactcgtggccactctaaaagaggagttccagaaatgttgaagcattttgggaataactgtatagtcttccaggtcttctactttgaagagagatgacttagatggatagatttttatatayctttgggattcctcagattactttgtagtcacaagtcagattgagttttgactggagcaggtcatttggcaactatttgatagaaaaatatttaatagtatttatcagaaagagaatgtcttggcagatctctgaggcttgtgtgtaggtgttctcaggaatcctcccagggaacctgctcttgtgggttccttgggaat

SEQ ID NO: 479611 - DNA, 643 bp, Homo sapiens
aacctatttgtagcgatctgtaatttctgttcagattcttgtttcctttccagaatgttcccccagtgagagctctgaccccttyagaaacaacctggtgagtgagtgaagcagttctcagttcttttgattggtccagctccgtgttttgttacaagcattgcacagctactatctgaaaaggaatctacctctttatgggaacatacagctgctgctgttaccatacgatccattttcctttaaaaaaccctgtttgctctacagtttatagaaactgacatttgaagagatagtgtcagcttgacccttcagttgtctgaaaagaggagaatcaaacctgtcttctctgttttttctttctccctcttttatttcctaacttccttcctctttacttacttttcatcaacttatatggcccagcagtcctggaattcttggtaaagagaaattcagtcccttaaaaaaagcattgtaaaggagaaattggacgagtagagaattttaaaattgtttaccaagtggaagtaaaatgaagttgattgctatactctggctggcccagtccccataaggtgacaaagcctagagactaaacacaaagatctgggatgtttagacatgtttagtaagttgttct

SEQ ID NO: 479612 - DNA, 575 bp, Homo sapiens
tgcaataaacataacatgtctttagttttctaattatgaatttgagccctcatcctactcctctgacagaaaattccatccctattggagctccctcccttctcagtggacatttaagaccccgtgggtcccaggcagtgtggaacatcggcgaaggttttctggtcctcagtctatactggccacctaagtattccataagtaattgtcatctggctaatgcattcctcgtcaaaacctcatagcctcttaaaggcaaatagcttagctgcttctgtgttaagtacttgagtcaagaatccttgtcacgtttgggattaataggggaagtattcttctggagatctttctatctttctggagctgtaggarggagctaagtgtgtgtctcttatactgatagaacctgcaaattgccaagccatcttccttttagtttgagaaatctctttttgccttctgttcttgaagttttgtgtcagttataattgcattcaccatcaagtaacagaaaacaactatatataagtaataggtttatttctcaatgagaagttgaggggttgagccaatca

SEQ ID NO: 479613 - DNA, 553 bp, Homo sapiens
ctattgtatacattactgtgaaaaataatccagtttgtattttctgggggtatttgtacaaaattttctctagaatatatactcataagttgaattattgtgtacaaggttaataaatttcaactttaataagtattgcaaaacctctatcttaaaccatcttagtgtaacatatcctgaaatcacctgtaaaattgtatgtaattatcaaaagaaattcctagaacttaattaataaatacggcattgcctatatgttagctatcaataattggaaaatgaaataaacatatataataaaagcatatgtataacaagtgaaattcttaagtataaatcaaataaaacatatacaggatatgtatactaaaaatgaaaacactgataaaaatgatcctaaataaatggtgagatgtagtacaaacatagattggaaagttcaatgttgttaagatatcaattctttccaaattgatctatagacaacaaaattttaatcaaaaytctagcagaatttgttgtaaaaatacacaggagatcaaaaaccacatca

SEQ ID NO: 479614 - DNA, 472 bp, Homo sapiens
cataatttatcctaggtcaagagatgataggttgctgaaacagagtttgaattcaggtctgtataactgcaacatcttgtccttaaaatgatgctataattcattcacatgtataatggcatttgctatgtgaaactgtgtcattactggagggctacaatatacctgaaagcatatgttaaaataggaaaatggtattttaaaaatctctacattaaatcaggaactgtaccaaaaaatgaaaataaaatattactacattccttccatgttacttcctaaggatattatgtgtaacaatgctagacaggattgtaaatcatatacagagattaactaaggctcaccaatcattcaatgtygtagagcattcacttgactgtagataagatcttctaagtaacaagacttactgtgttattatatagatatatgaagttccacattactatacagagtaaggcagacagca

SEQ ID NO: 479615 - DNA, 456 bp, Homo sapiens
gttttcttcctggtggaacgttccacttgaaactgttccacaagggctgttctcgcctccgactccgggaggaactgtaattaacacagcaacaaacgcccacgacgctaactggcaaagggagtgtaacacgagccgctgctacaaccsaactgggccaattgctttcccttcttgcctcccatttggtctgttttggttccgcagtcatccaactgtagcgtttcttaaaacatgtcagtggctggtgtttgtgttttgggttgaacagtttcacacacgtcgctggagcccgtgctcgaccagctgctgtgctggggatttgctttctgcggctttgggagtgtcaggtagcaaaacgaagagagtagtcgactagaacggtggcggggaggaggaggagggattgtctgcagtggagtcgggagcctcctccggaccaggacaggtaaaacc

SEQ ID NO: 479616 - DNA, 498 bp, Homo sapiens
tggaataaaatgaactcttatgayatttaagctatgaattttagttttattatttttattatattttactataataacatgaatatacaatttaggtaatcaaatatagacttacaatccagtaacacacatacaggagaacaaatagtcatataggcacagatataattaggcaattcatatatggagatacaaaagattaataataaatgatgaagaactatttttacatttgcatattcttggaatgagaggtagtctgtgtttcttgcttaacatggtttaacagactttttaagctgtacatcattgatggggaaggagatcttaaattggatgggatcacatcatttataaataatatgaacactactttgactcacaagtaatcagagaaatgcaattttcttaaaaagagactgtacacttaccatatgagctgaaaattcaaactttaaataacactaaattctgatgaggattttggaaagcagaaat

SEQ ID NO: 479617 - DNA, 530 bp, Homo sapiens
aaattttcaaataaacttttaaaaaacaactataaggccaccaaaacattgtgtaatattctttcataggaatccaccacaatttataatttataaaaataattgatcatttatttgattctcccctagttaggttcayttagattggtaaacctatgctctttctactatatgacatcaaccaagagcagcaagcataagtaggaagagcagggtcctaggcaggtgcccaggtagaaagctactgagtaaaagggattcagatggacatagttcagcaccctggagagctccatgacagtattgctccattatggactcagcagtaacactggctgggaaccctttagggttctgaactgctttcccagaatgggatgttaaaagagataatacacggctaagttttggggggtggaggtggtctctttgtccctgaagggattcatccttaccagtccccggttcaaagagcactgtggctgtgggtagtttttctcaccactctgctttttctcatgctagcccct

SEQ ID NO: 479618 - DNA, 530 bp, Homo sapiens
aaattttcaaataaacttttaaaaaacaactataaggccaccaaaacattgtgtaatattctttcataggaatccaccacaatttataatttataaaaataattgatcatttatttgattctcccctagttaggttcatttagattggtaaacctatgctctttctactatatgacatcaaccaagagcagcaagcataagtaggaagagcagggtcctaggcaggtgcccaggtagaaagctactgagtaaaagggattcagatggacayagttcagcaccctggagagctccatgacagtattgctccattatggactcagcagtaacactggctgggaaccctttagggttctgaactgctttcccagaatgggatgttaaaagagataatacacggctaagttttggggggtggaggtggtctctttgtccctgaagggattcatccttaccagtccccggttcaaagagcactgtggctgtgggtagtttttctcaccactctgctttttctcatgctagcccct

SEQ ID NO: 479619 - DNA, 530 bp, Homo sapiens
aaattttcaaataaacttttaaaaaacaactataaggccaccaaaacattgtgtaatattctttcataggaatccaccacaatttataatttataaaaataattgatcatttatttgattctcccctagttaggttcatttagattggtaaacctatgctctttctactatatgacatcaaccaagagcagcaagcataagtaggaagagcagggtcctaggcaggtgcccaggtagaaagctactgagtaaaagggattcagatggacatagttcagcaccctggagagctccatgacagtattgctccattatggactcagcagtaacactggctgggamccctttagggttctgaactgctttcccagaatgggatgttaaaagagataatacacggctaagttttggggggtggaggtggtctctttgtccctgaagggattcatccttaccagtccccggttcaaagagcactgtggctgtgggtagtttttctcaccactctgctttttctcatgctagcccct

SEQ ID NO: 479620 - DNA, 458 bp, Homo sapiens
tgggaaacaatctggaaaactgtcactagcccctgcagtgggtgtcctgccgggccagattctcccccaagccagcagatgtgctggtgctgaccatacccctctgcccgtcatccatgcagtgccctcctagctggggacactctgctctgtttggacaggtcagtaggttgcctggtgaaagcatgtgtcagcatcactctgggagcatgtctatctaaacccagggcaggctcccacagccgaggcaggtacttttgggtcctgttctagaaggttcctgtcaccaccaaccacactggaaattmagagttcacagaactcagttttggcacagcctctctttttggaatgctctgagactgagagctgctgcatatggtcaaaccctccatctccacctacccaccgttggggttattgtgtacacatctttttttttttgagacagagtctca

SEQ ID NO: 479621 - DNA, 460 bp, Homo sapiens
actttttcactgagaaacctctaaatgtcagcatctgtaggtcctttctcttgggtcaatttcccagtaatttgctgagtccctcaaatttgctcagagatataaaccagttccaatgttctgatgctgagtggggaagggcttggggaaactacttttggtgtgcagacttgcacttaatttctagcctcacctgtgttaacctctctataagccagcccatcttctgctatagtggagaaggctttgcaagaagtaggaggggatctggggctctcactgcttcttcactcacttccagccagtmcctctcagccctccaccctggcacccgcttctgaggtatccagtgtttccaagcgctgagccattggaggctccctaagctcgaagctcaaagcagcctgcttttcattgccatcctgaccatcctcccacctccaggccaggcagctatggt

SEQ ID NO: 479622 - DNA, 546 bp, Homo sapiens
ctctccccactcatcccttgccctgtgtgggtcccttcttgcctgtcatgagctcttgccttgaaggaggtgtccaggagccaggaaagatggaagagaaggmccaggaataagaagaaaagaaagatcacaaggagggtgctgcctgggcccagcagccatacaattaggtgatgtgtgctgggtttgtaaattatctctcttatcatttttgctttgatgcagaacaaacagaactccccatggcatttaagtctctcaaaggctgggatctttgttttgctctctgttgtctcccgagtgtctagatgcccagcccatagcaggtgcttggttaatgactgtgggacgggtgacagagtctcagccggttgtgtgggcatggacttttggactcttcttccaacagttccaagtccctgtccagcccaccttgctccccacacgttcctagggggttcccttagggatctcacaggctctgtggaacccactttgagaacacctggaggagctgtcctcttcaaattctaagctcccgaggaa

SEQ ID NO: 479623 - DNA, 598 bp, Homo sapiens
cctgaagtcaatactgggtgtatagcatctcctaggccatgcccaggaagagtgcttgattccaytgtgctcaagccccagacaaaattgttcatgtccagaggctcccagccagggaccatagctaccagccaaaaggtatggccaccttgggtcatgttaggctttcctgaagaccaagggtcaagagaagcttctagctcactggttgtacacagattgaaaagatctgtactgtcttattcttgattcctgtaatcctgtaatcgcctaatgggttcttcctgcccactgcacagacaataccaattcattgagactatggaattgcagtaaagaaaatgttttaattgacatgaggccagccacacaacatgggagatggagatggagttaatactcaaatcaatctccccaaaaattcagaggctagggtttttcaaggatagtttggtaaacagggggataggtgaatgggtactgctgattggttgtggatgcaatcgtaggtgtgtggaaaattgtcctcatgtgctaagtctgcttctgggtcggggccacaggagcagttgagccaaaaatcacaggtctgggtggg

SEQ ID NO: 479624 - DNA, 598 bp, Homo sapiens
cctgaagtcaatactgggtgtatagcatctcctaggccatgcccaggaagagtgcttgattccattgtgctcaagccccagacaaaattgttcatgtccagaggctcccagccagggaccatagctaccagccaaaaggtatggccaccttgggtcatgttaggctttcctgaaraccaagggtcaagagaagcttctagctcactggttgtacacagattgaaaagatctgtactgtcttattcttgattcctgtaatcctgtaatcgcctaatgggttcttcctgcccactgcacagacaataccaattcattgagactatggaattgcagtaaagaaaatgttttaattgacatgaggccagccacacaacatgggagatggagatggagttaatactcaaatcaatctccccaaaaattcagaggctagggtttttcaaggatagtttggtaaacagggggataggtgaatgggtactgctgattggttgtggatgcaatcgtaggtgtgtggaaaattgtcctcatgtgctaagtctgcttctgggtcggggccacaggagcagttgagccaaaaatcacaggtctgggtggg

SEQ ID NO: 479625 - DNA, 598 bp, Homo sapiens
cctgaagtcaatactgggtgtatagcatctcctaggccatgcccaggaagagtgcttgattccattgtgctcaagccccagacaaaattgttcatgtccagaggctcccagccagggaccatagctaccagccaaaaggtatggccaccttgggtcatgttaggctttcctgaagaccaagggtcaagagaagcttctagctcactggttgtacacagattgaaaagatctgtactgtcttattcttgattcctgtaatcctgtaatcgcctaatgggttcttcctgcccactgcacagacaatacsaattcattgagactatggaattgcagtaaagaaaatgttttaattgacatgaggccagccacacaacatgggagatggagatggagttaatactcaaatcaatctccccaaaaattcagaggctagggtttttcaaggatagtttggtaaacagggggataggtgaatgggtactgctgattggttgtggatgcaatcgtaggtgtgtggaaaattgtcctcatgtgctaagtctgcttctgggtcggggccacaggagcagttgagccaaaaatcacaggtctgggtggg

SEQ ID NO: 479626 - DNA, 579 bp, Homo sapiens
aataaggaacattcttagctgataacttaactacatgaaattttaaaagtaattcctgtatgtgaatggaaacactttaaaggtaactaaaactactaaaaacacttcataatgataggtatctccagsgtcaataattacaaccaaaaaatagattttagttcttttaggtaaatagtgaatttactagagactataacaagctcacagtgttcattcattcaataagtactgatctagtactattacgtttcaggtattgttctagccattggcacatgacagtgaagaaaagataaaaatttctttcttcctgaggctcagcttctaatgagagaatcacacaaaatcaaatcagaaaaataccagaatagtagatcatgctaaagggaaaattaaagcagggatggggagagggagttacactcattgggggcttccctaaatggaaaaggatgatgatgacactgtcatttttgagaacccactctgtggcattagcccactaagacgctattgtgacttaagaggttaaatggctcactctgaacatgccaggtatagcaggaactcagattc

SEQ ID NO: 479627 - DNA, 615 bp, Homo sapiens
cacatgcctgtggtcccagctactcgggaggatgaggtggaaggattgcttgagcccaggagtttgaggctgtagagagtcttgtttatgccactgcactccagcctgtgtgacagagtgagaccctttctgaaccaagaatcaatcgatcaatcaatcaaaatcactacatctacttagcagagtgggaaaagctggaattttagaatttrtaaaagagcatgcaaacaaaaacaaggcaattcatgctgtagaactctagtacatcttgggaattgaatacatcagataccaaggtgaagggatagggtacagcaaagaggggggaaggttgaaacaaaactgggtgaacctctacataaggagcacttcggctcccagatcctttccccaacttgcacagacagaccactaacccaggcttacaccagcaagaggagaaaaatgtgttctccggagcagcagttcttaaagtatagagtccccaggacacttctggggatttacatgatcaaaactatttttataataataccagaatattatatgtgtttttcattctcattaatacataggggagttttccagagggtacatgcagagaagctatgagaa

SEQ ID NO: 479628 - DNA, 615 bp, Homo sapiens
cacatgcctgtggtcccagctactcgggaggatgaggtggaaggattgcttgagcccaggagtttgaggctgtagagagtcttgtttatgccactgcactccagcctgtgtgacagagtgagaccctttctgaaccaagaatcaatcgatcaatcaatcaaaatcactacatctacttagcagagtgggaaaagctggaattttagaatttgtaaaagagcatgcaaacaaaaacaaggcaattcatgctgtagaactctagtacatcttgggaattgaatacatcagataccaaggtgaagggatagggtacagcaaagaggggggaaggttgaaacaaaactgggtgaacctctacataaggagcacttcggctcccagatcctttccccaacttgcacagacagaccactaacccagkcttacaccagcaagaggagaaaaatgtgttctccggagcagcagttcttaaagtatagagtccccaggacacttctggggatttacatgatcaaaactatttttataataataccagaatattatatgtgtttttcattctcattaatacataggggagttttccagagggtacatgcagagaagctatgagaa

SEQ ID NO: 479629 - DNA, 508 bp, Homo sapiens
acaaagtcattcagtgcttctgctcacaagatgtgcagaaagccaagagactcatggagaaatgtctgccaatgcctacattttggttttcgagttcattcttctccatgaagtatactgaatatacaaccactcaattaaaagctattagtcatccggcagacttgaatgacaaggagcttactaccttaattcccccaatgaaaaggaaggaccagaagaactacattaggaactgcacctactcatgcctcagaaaagcataaaaaccttgctaggaaatattgacggatacaacaatccccaaacttcaactcttgagagaggattttggatttcagtgagagagagtacgcagccattttcagaaaacrtcatttctttactgaggtagaaagaacattgacttctgcctttttgtaaatcatctatttcatttgccaggttactttcaaaccatctcattttaaagagaagtatgcatcataaaaataaaaacatatttttc

SEQ ID NO: 479630 - DNA, 618 bp, Homo sapiens
ttaaaaatatatattgtgactctataaaggcatacttgtgagtatacagtcaggaggcacttaacgatggggatgcattctgataaatgcatcattaggccactctcttgtgaaagcatcacagagtctataacacagacataggtggtccaacctcctatgcacttaagctgtgtggtgcagcctatcgtttctgagcaacaaacttgtgcagcatgtcactgtgctgaatactgcaggcaactgtaacaccatggtaagaatgtgtgtatctaaacacatctaaacataggaaagctacagtaaaaacaaagtacgaaagataaaaaatgggacacctgtctagtgcacctaccgtgaatggaggttacaggattggaagtggctctgggtgagtccgggagtggtgagtggatgtgaggacctagggygttactgcacactcctgtagactctgtaaacactgtacacttaggctacactaaatgtatacaaaacatgacccttctttaatgctaaattaattattgcttactgtaactgttttagtttatacatttttgtgttaaaatcttaattcttttgtaacacttagcttaaagcacaaacacattgtac

SEQ ID NO: 479631 - DNA, 655 bp, Homo sapiens
ggcagcggtccccagcacccaaccactgtgacttcgccaccatctcaccccaacaggagttacattcagcagccttcacaggctgaatgttaaccccaattcttctgtgctgaagaaataagagtccagtgacacccttcagttttggtgcctggataaatctttacaaaactccagttaagacctggctttactgtgaggcaacctgacagaagcaggaattgccactggagagatcctractcttacagattggaatgaagccagcgtgctcacaatgacagtctgagattattgcttggatggtgctccagattgtgtgagatgttcacagaaactgaaaggaaaaaatatatgaagatgccaagaaggacacaggtatgagcacgtcactcatacaagagaaaactgggaaatgttcaaacttatttgctaacaaaagtcataaagtgtagcagcactcagccacgtgtctttgaaaggtatttttcgagcattgatttttgtcatgtgcgtttgcagattcagaaaatacagcaatgaaagaagcaggctagtccctgttttcatgggggttacatcctagtgggaagatataggaaaacgaacaaagaaatacacagcatgtcaggtaacatggtcagatgggcttgga

SEQ ID NO: 479632 - DNA, 655 bp, Homo sapiens
ggcagcggtccccagcacccaaccactgtgacttcgccaccatctcaccccaacaggagttacattcagcagccttcacaggctgaatgttaaccccaattcttctgtgctgaagaaataagagtccagtgacacccttcagttttggtgcctggataaatctttacaaaactccagttaagacctggctttactgtgaggcaacctgacagaagcaggaattgccactggagagatcctaactcttacagattggaatgaagccagcgtgctcacaatgacagtctgagattattgcttggatggtgctccakattgtgtgagatgttcacagaaactgaaaggaaaaaatatatgaagatgccaagaaggacacaggtatgagcacgtcactcatacaagagaaaactgggaaatgttcaaacttatttgctaacaaaagtcataaagtgtagcagcactcagccacgtgtctttgaaaggtatttttcgagcattgatttttgtcatgtgcgtttgcagattcagaaaatacagcaatgaaagaagcaggctagtccctgttttcatgggggttacatcctagtgggaagatataggaaaacgaacaaagaaatacacagcatgtcaggtaacatggtcagatgggcttgga

SEQ ID NO: 479633 - DNA, 576 bp, Homo sapiens
atgctgcttataaatagtagaagtttattcctcacagtcctagaggttggaagtctaagatgtgtaagatgagggtgccagcaaggttgagttcttccatgttcttgcatcttctcattgtaytctcacagggcagaaagagagcaaactggctttctggcctcttcttatatgggcactaatcccgttcatgaaggttccaccctcatgacccaattatctctcaaaggccccacctccaaataccaccacatcaggattagggttgccacacatgaatttttggagagacacaaacatttagtccattaaacctttctttttacttttacagattaattaacttagatgaagggaatcaatgttgtttctgtcaaactacatgtcctaatttccctttccattgagaggcaactatatattcttttattttgaaattcactttaatttccccttttatttttcagtagttaacttgctcttacagacaagttgagtgatatttttccctctgcatttgagcagtagttttaccagataaggaagagtgctgctgttgcctatttttccttctat

SEQ ID NO: 479634 - DNA, 646 bp, Homo sapiens
aactttgaaatatttgccctcaaaaggtattgtcataccataagcaaatcaaatgtgaaaaatctcactttccatgttggggaatatactgctttttgtaaggctagaggaaaaaataaaaaattactgtgctgagaatgattgcatcatttgattctcttgcattaccagggaactgggtgagattcttattgtttgggggcattccaggagaaggaataaattacgcaagtaggcctggccatcagggctggggcacctagaagcaggtctggcaggtccactctcagtccaccacatgacctgcatgagtcagggttcacgggagaaayagacccaatttgatgtgcatagagagatttattttaagaaattggctcatgtgattatagaggctggtaaatccaaaatctgcagggtaggcgggcagcctagagacccaggaaagaattgtagtttgagtctgaaggctgtctgctgacagaattccctcctatcccagggacgtcaatgtttttctcttaaggccatcaaccaattggataaggctcacccacccagattatgagaggtcatcagctttactcaaagtctactgatttaaatgtcaagaaaaacttcacagaaacatctagaataatgtttg

SEQ ID NO: 479635 - DNA, 534 bp, Homo sapiens
gagaatcatttgagttcctgccacccagtacgaagatatcttgttgactacacagggcatttttgtagagtcctcagaaaatcagtaggagtctctcccaaaaaagtggagacaaaatagcctagagttaaagactgcttcagacatatcctgaaagatacataaaaccaagctgccaaaggaccaagctgaccctcaaatagtgtgtctgcttatacgcctgcccaaagccaccatgctctcaagccatagcgaatatccagagstcaaaatcataaaattcacaacatctggaatacaacaaaaatttaatagaaataagaaaatttcactggatgctattaacaaaaaataaataccataaaaaaatgaatttgaaaacatagtaaaagaagctatataagatgagaaaaagaaatttaagacattgaactcactaaaatttgttataacctcaaaatcaatatccgaatcaatggtcactcatgggcgcgcgtaagacagtgaaacatttgagtcattcaaaaggctcat

SEQ ID NO: 479636 - DNA, 538 bp, Homo sapiens
caaggcagaaaaaaactacrtactctattaattcattcattcagtatttctaaagcaccccaatgttcgtagaactacttgcagcagcatgaaagagagtaagaagctggactgcaaagtagaacacatggtctggaatacacaagtccaccttttctctgatcagctggaaattcactctgctcctctgtcaaagcataaacacattcttgggatggcagaggaatgctggagcttccaaggttgatgtgttaaagcagccttatccaggggacagcagctttttcctttgtccccttatgtagtctggttgaaactgcagaataatttgaaatgtggactaaaaatagtgcacaaaggaaacttagaaatctcagaaggaaggagagatgaggaaaggccttgagaaatcactgcactccttgccttacagcaagtctatatttatcatagatttaaaaaactttattattgactttcctttaaagttttgggtagaatgtacagtgtttttaatttttatttgccaattaaaaaa

SEQ ID NO: 479637 - DNA, 609 bp, Homo sapiens
gaagtcacaagtttgcttataaaaccagaatcaactaacttcattttttacctgtcataaaatgtacagaaggttttatccatcaattaagtggattttcaaacaatttatcttcagtttgaacacaaaccagttgcagcccccacccaacaaagatatatgaaatgcattaagttcaatgaaagttcaattactagtattaaaggtgcttctctttggattgtctaggctctacatatttcgtccttaattttatatacttctggcctatgagtcaactcatagttcattagtatctttgttaagggaagaaaaagagaaaataaaatgaaattcagacctgtcatcttagttatcagtagcaactctaacaacagacttcatggtggaaaatgtagaaactcctggttaaagtagtttcataggctgaatctgacaatgtatatataattatccatgtgcttcctgcctaccactgtcattagataatggaatttgactatttggacctatttttttcctcrgagtcagaaagatagtctggataataaaatgtagcatattatgtcatactgaataagaagagaattacccttatggcataaacga

SEQ ID NO: 479638 - DNA, 606 bp, Homo sapiens
ggaagtcacaagtttgcttataaaaccagaatcaactaacttcattttttacctgtcataaaatgtacagaaggttttatccatcaattaagtggattttcaaacaatttatcttcagtttgaacacaaaccagttgcagcccccacccaacaaagatatatgaaatgcattaagttcaatgaaagttcaattactagtattaaaggtgcttctctttggattgtctaggctctacatatttcgtccttaattttatatacttctggcctatgagtcaactcatagttcattagtatctttgttaagggaagaaaaagagaaaataaaatgaaattcagacctgtcatcttagttatcagtagcaactctaacaacagacttcatggtggaaaatgtagaaactcctggttaaagtagtttcataggctgaatctgacaatgtatatataattatccatgtgcttcctgcctaccactgtcattagataatggaatttgactatttggacctatttttttcctcagagtcagaaagatagtctggataataaaatgtagcatattatgtcatactgaataagaaragaattacccttatggcataa

SEQ ID NO: 479639 - DNA, 592 bp, Homo sapiens
aaactcaattcacatctccctcagtgccaccccctccactcagtgccatgctgtaatagagtaatactacttgaagtccagaatctcatctaaatcagtcatctctaaactagccaaaagataagaatgttcttttatttttctgtgcgtatattggtatacgcatctgtgcacgtctgtgtagaaagtgatctataaaagaaaactcaattttgttttcttaatgtacttttaaaagaagggcagtgacatatatagtgatgatttggtataggtctgtttcctaatcaatcttatyactggtccttgagagtaattattatcaaagtgatcctaagggtgtttcaaagttctgttccaattaaaattccaaatccatatgttctttcttctggttttttgtttcttctttgtcccactaaagaatagaaaagtgacatccttacataagtatgtggattagtgggaaaaaaaatgacccttaattagcaaggcaaaagcttgtatatccagtagtattgatggaattgtttgtgaagaggagcgatacatctcttacatggtcctttttgacatacatagagggtataaa

SEQ ID NO: 479640 - DNA, 437 bp, Homo sapiens
aaataaatacaaattacagcttcaaaaaagtctgatttagattaatktatttcttcaatcagaaaaaaaaagataaaggtttcagactacttaattttcttattttaaagagaagtgactaaactaatcctatatatggtttgataatcctcaaactattagaatgtactgccatactagtatatcctttctcaagataaaataataactataacttgatactaaatcactgtcattatagtaactaatactgtcaacagataactgagtaactattggttaagaaattatataactggacgggcacaatggctcacacttgtaattccaacactttgggaggtctaggtgagaggactgcttgagcccaggagtttgagaccaacctgggcaacatagtaagaccctgtctctataaaaaacgaaaaactcagcca

SEQ ID NO: 479641 - DNA, 437 bp, Homo sapiens
aaataaatacaaattacagcttcaaaaaagtctgatttagattaatttatttcttcaatcagaaaaaaaaagataaaggtttcagactacttaattttcttattttaaagagaagtgactaaactaatcctatatatggtttgataatcctcaaactattagaatgtrctgccatactagtatatcctttctcaagataaaataataactataacttgatactaaatcactgtcattatagtaactaatactgtcaacagataactgagtaactattggttaagaaattatataactggacgggcacaatggctcacacttgtaattccaacactttgggaggtctaggtgagaggactgcttgagcccaggagtttgagaccaacctgggcaacatagtaagaccctgtctctataaaaaacgaaaaactcagcca

SEQ ID NO: 479642 - DNA, 437 bp, Homo sapiens
aaataaatacaaattacagcttcaaaaaagtctgatttagattaatttatttcttcaatcagaaaaaaaaagataaaggtttcagactacttaattttcttattttaaagagaagtgactaaactaatcctatatatggtttgataatcctcaaactattagaatgtactgccatactagtatatcctttctcaagataaaataataactataacttgatactaaatcactgtcattatagtaactaatactgtcaacagataactgagtaactattggttaagaaattatataactggacgggcacaatggctcacacttgtaattccaacactttgggaggtctaggtgagaggactgcttgagyccaggagtttgagaccaacctgggcaacatagtaagaccctgtctctataaaaaacgaaaaactcagcca

SEQ ID NO: 479643 - DNA, 589 bp, Homo sapiens
aatggaattaatatattttgttctgtgaggacatgtgttttgttgggacaatggctgcattctgtggtttgaatgtccccaccaaaacttacattgaaatttaatgccaatgtaatggtattaagaggtgggacctttaagatgtgattagattatggasgctatgccctcataaacggaccgataccattatcatgatcatagattagttatagcaggagtttggccccctttttctcccttttccatgtgcatgctttcttatctctctgtaaaatgacccttgctagacaccagtgccatattctttgacttcccagttctgacaacaatgagctagctaagtctttcttcataaattacccagtctctggtattctcttatagcagcataaaaaggactaagacttgctaagaaacaagatatttcattattttagctgtttgttcccctatagtacttatagcaattttagccctatagaccacatgcagactaaatttcctgtccttttacttaggtttaatgagtttttcacccacaaaaaggaaagaaaaagttttcaagatacaaaaaaatctctcatgc

SEQ ID NO: 479644 - DNA, 589 bp, Homo sapiens
aatggaattaatatattttgttctgtgaggacatgtgttttgttgggacaatggctgcattctgtggtttgaatgtccccaccaaaacttacattgaaatttaatgccaatgtaatggtattaagaggtgggacctttaagatgtgattagattatggaggctatgccctcataaacggaccgataccattatcatgatcatagattagttatagcaggagtttggccccctttttctcccttttccatgtgcatgctttcttatctctctgtaaaatgacccttgctagacaccagtgccatattctttgacttcccagttctgacaacaatgagctagctaagtctttcttcataaattacccagtctctggtattctcttatagcagcataaaaaggactaagacttgctaagaaacaagatatttcattattttagctgtttgttcccctatagtacttatagcaattttagccctatagaccacatgcagactaaatttcctgtccttttacttaggtttaatgagtttttcacccacaaaaaggaaagawaaagttttcaagatacaaaaaaatctctcatgc

SEQ ID NO: 479645 - DNA, 569 bp, Homo sapiens
acacagggcaatgacactgtgccaagctaagaataaggctagcaaactatagatgacgtgtgcatagtgggagctgtactaagtaaacctagcagcggttagaacagggaaatcttcagtagtctttatattttgacttcaaagcagcaatttggctacttaaatactgcaaaagatgggatttagaaagctataaaggataaataatgtagataaataaaaggtaaatgatgtagatacatctcaatgtagataaatcttgtggcttcttttataccatagatctgtaggctgaccatatgtcctggctcatgcaggatggctcttgtttacacttgtcttaattcaataatagtggctccttttattcacagyagtgttctagtttggatggtaaggtatacgttcacataatatatcagcaaaatgtttctgataggtatttttgagtcatttgagagttttgggcagtcttgggctcatgcttccttaacctgtacatttgtaggttgaaaaaaaggatttcaggaatctaattatgcttgaggctctgcttacatagcatacag

SEQ ID NO: 479646 - DNA, 386 bp, Homo sapiens
gcctgacatcaaaagattccctagcacacgccctgaggaagaggcagtggttttatctggatcagacccactcccatcacaaaagtgtcccraacaggctgcacacgcctggcatgttatccttaggctctctttacatggctgtctcaggagcccacaagagtgccgcgatgatgcgtcacctgatccgccacctgcaggcaattccttgccaaaggcactggtggctgatgagcaaatgtcactgtcaacatccagggatgatttatcaaagacatgcggacttagggatctttgtctcagaattttaatcctgaaattccttaatccttggcatggacctgttctacaggttttctaatacaatcacggttttactatatgtc

SEQ ID NO: 479647 - DNA, 386 bp, Homo sapiens
gcctgacatcaaaagattccctagcacacgccctgaggaagaggcagtggttttatctggatcagacccactcccatcacaaaagtgtcccaaacaggctgcacacgcctggcatgttatccttaggctctctttacatggctgtctcaggagcccacaagagtgccgcgatgatgcgtcacctgatccgccacctgcaggcaattccttgccaaaggcactggtggctgatgagcaaatgtcactgtcaacatccagggatsatttatcaaagacatgcggacttagggatctttgtctcagaattttaatcctgaaattccttaatccttggcatggacctgttctacaggttttctaatacaatcacggttttactatatgtc

SEQ ID NO: 479648 - DNA, 304 bp, Homo sapiens
gctgcttctcttctctctgccagtagagcttgaggtttttaggggcacaggataggggtggggtggtcatgggtggttttggaaaaggcaacactccagcgagaaaacagggatgtatgttctcactttgggccacagtttcatgcttgagggtggggccctcaccagggatccaccctcttctgcccagaatttccctgcctcctgtccctatcagtaatactgaatatgttttcatgtrtttgccaaccatctgtcttccatgataaagtattttttgaaggttttgctagttttttgttgt

SEQ ID NO: 479649 - DNA, 667 bp, Homo sapiens
cccccttccaaaaactcttgctccatggctgctttaactcatttaatctatagattctttcagaatgtttgcagttgcctaaatctttctgtgaattatcctgctgtacctgtaatccattttagattaagcctctggaggccaatgaaaaaatctgactttgttacctctcagcacagcctgacccacaatctctgctttctaatgaagattccaggatctttaggagaaactgtaaaatggaaacttccactaatttgagaagggggagatttaagaaaggttgggttttattatgactaaacttccccacccacgttttttgcaaaatttatcttttctcatttttattggcttattctttcaaaatattcatttattcagcaaggtttaattaagcatgcctctgtgccaggtattgcattagggtcacagaaagaacaagrtacatgcttgtctgcagtgcctagtaggagagctataaggtatcatgttagaataaataagaccggttttaaacgccatttttattttgggggagggcagaattattttacatcaagaacaaaataagggttacttcttacctgacttgatgatttttcagcagcatagtctggtctgtctggatcagtggtttacctatttcatatggtcacatgtgtca

SEQ ID NO: 479650 - DNA, 468 bp, Homo sapiens
aggagtttcaataaaaagaggaaaagcacataggtcaattacattttgctcatctggacaggtgtttgcctctgaagctyggcatgtctttggacacagtgcatccttctgtcatgatgtgctttagccattgtgggcaggtatttcgttactgctatgctgccagtggattagggggactgtttgctgatggagctcactggcagctccttgtgcatcttcttactgttcttaccctccaggaggtgtcatgccttcatcttcttctactgctcacctcaggcacagcagatgctttatcccctggcaccaccgtgaacctgggagcatggcatctgtccttgaagctgattgtgtcaagcatttaatatttgtacacttaaaccttgccagaagctaaatgagcacaacattttcttaaaacttattcttaacatttgacaactaatttttttaaaggtttaacca

SEQ ID NO: 479651 - DNA, 468 bp, Homo sapiens
aggagtttcaataaaaagaggaaaagcacataggtcaattacattttgctcatctggacaggtgtttgcctctgaagcttggcatgtctttggacacagtgcatccttctgtcatgatgtrctttagccattgtgggcaggtatttcgttactgctatgctgccagtggattagggggactgtttgctgatggagctcactggcagctccttgtgcatcttcttactgttcttaccctccaggaggtgtcatgccttcatcttcttctactgctcacctcaggcacagcagatgctttatcccctggcaccaccgtgaacctgggagcatggcatctgtccttgaagctgattgtgtcaagcatttaatatttgtacacttaaaccttgccagaagctaaatgagcacaacattttcttaaaacttattcttaacatttgacaactaatttttttaaaggtttaacca

SEQ ID NO: 479652 - DNA, 468 bp, Homo sapiens
aggagtttcaataaaaagaggaaaagcacataggtcaattacattttgctcatctggacaggtgtttgcctctgaagcttggcatgtctttggacacagtgcatccttctgtcatgatgtgctttagccattgtgggcaggtatttcgttactgctatgctgccagtggattagggggactgyttgctgatggagctcactggcagctccttgtgcatcttcttactgttcttaccctccaggaggtgtcatgccttcatcttcttctactgctcacctcaggcacagcagatgctttatcccctggcaccaccgtgaacctgggagcatggcatctgtccttgaagctgattgtgtcaagcatttaatatttgtacacttaaaccttgccagaagctaaatgagcacaacattttcttaaaacttattcttaacatttgacaactaatttttttaaaggtttaacca

SEQ ID NO: 479653 - DNA, 579 bp, Homo sapiens
ctgcagccaagttgatagaagcttcatctgagctgattttagggaataaacttaatttgcaagtcccacatactgtgggaagtcctttacatgccaaccaaactcagtatttttcagaaagtagaccaacatcttgttaaattaatctccttctaatctctatttaaaattctgcaacatacttaactctgctattccattactcctgtctgatgatggtgaagcctataattttgtaaggataatatcagaaatagttgcctcttgtgttgatttatgagatacaccattggataatcataagtttttgtcaatgagccctgtgccaaaaattcagaaggaaaatattgggcagggtatgccattgccacccaaaataagttgagagagaagggagctcttcctcaatttaagtcagctcaggacatggagctttttgcycccacctgagcttgtcatatagctgagggcaagtcagtaaatatttatgcagatggctgatatacctttggcatagcacacaattttggtatgttatagaaacaccaaaggtttctcatttctagtgggaacttcatc

SEQ ID NO: 479654 - DNA, 624 bp, Homo sapiens
caaagacccaatgtgtcaaaaaaataatcgaaatagcaaagtgagagtcaagagtttttccgttgtttcttgaagtcttagaaagattgtttcctttgtattccctatattcagaatataaaagcctctcagaaatccaatctttactaggtcaaacatttcaaaatggagtaaaattattttgcagttgcttctcagtttaaggcatgtgctttaggaacttccaatcttcctcctatttatgaataagaaaaacaaaacaaaaaactaagtaaatgccatataatcccagctacattgtcctcatgtaaacatcctaacacagcatgatggaaaaagttccaaattgtgatctcagagatctgagttccagccctagttttgtgaaaatrtagcttgatgggtttgtcaagttttgtatttaatgataaggaattaggatttttttatctggtgtctgtgctattcagcagtactgttcacaagcatttaaaaaaatagagacagggtcttgctctgttgcccaggcttccgtgcagtggtgcaatcatagtttagctcactgcagccttgaactcctgggctcaagtgatcctcctgcttcctttcaagtaatggattcta

SEQ ID NO: 479655 - DNA, 505 bp, Homo sapiens
ctcggatgcagcggctcctcctagacgtctggcccgggcagcagcgacaaacagcaacgctataaatagtggagtggaagtcactcaggcccctagcaccccagaactctgcaaaggagggcaatcggggaggggaaaccaagacgcatcctgagggggcttgaaacaggtatatgactaacgaggttcttctccccacgcctcagtttctccatctgtacaatgggaggcaaattggcttagacttcgggctgaagggcacagaaaccgtacttttgtcttatgaagagattttggcgtamgattttattgaaaaaatacgttattttaaagccttttaaaagtgattaaaaaacaaaaacaaaaacaaaagactcgatttctaagagcatttctaagcccgcactgtctgggaatctagaaccccgccctcccgcacatcccggtccgggactcagacgccatcctgagcctggccgacaggtggcgccattttcacaggcct

SEQ ID NO: 479656 - DNA, 460 bp, Homo sapiens
agcgacaaacagcaacgctataaatagtggagtggaagtcactcaggcccctagcaccccagaactctgcaaaggagggcaatcggggaggggaaaccaagacgcatcctgagggggcttgaaacaggtatatgactaacgaggttcttctccccacgcctcagtttctccatctgtacaatgggaggcaaattggcttagacttcgggctgaagggcacagaaaccgtacttttgtcttatgaagagattttggcgtacgattttattgaaaaaawacgttattttaaagccttttaaaagtgattaaaaaacaaaaacaaaaacaaaagactcgatttctaagagcatttctaagcccgcactgtctgggaatctagaaccccgccctcccgcacatcccggtccgggactcagacgccatcctgagcctggccgacaggtggcgccattttcacagg

SEQ ID NO: 479657 - DNA, 460 bp, Homo sapiens
agcgacaaacagcaacgctataaatagtggagtggaagtcactcaggcccctagcaccccagaactctgcaaaggagggcaatcggggaggggaaaccaagacgcatcctgagggggcttgaaacaggtatatgactaacgaggttcttctccccacgcctcagtttctccatctgtacaatgggaggcaaattggcttagacttcgggctgaagggcacagaaaccgtacttttgtcttatgaagagattttggcgtacgattttattgaaaaaatwcgttattttaaagccttttaaaagtgattaaaaaacaaaaacaaaaacaaaagactcgatttctaagagcatttctaagcccgcactgtctgggaatctagaaccccgccctcccgcacatcccggtccgggactcagacgccatcctgagcctggccgacaggtggcgccattttcacagg

SEQ ID NO: 479658 - DNA, 505 bp, Homo sapiens
ctcggatgcagcggctcctcctagacgtctggcccgggcagcagcgacaaacagcaacgctataaatagtggagtggaagtcactcaggcccctagcaccccagaactctgcaaaggagggcaatcggggaggggaaaccaagacgcatcctgagggggcttgaaacaggtatatgactaacgaggttcttctccccacgcctcagtttctccatctgtacaatgggaggcaaattggcttagacttcgggctgaagggcacagaaaccgtacttttgtcttatgaagagattttggcgtacgattttattgaaaaaatacgttattttaaagccttttaaaagtgattaaaaaacaaaaacaaaaacaaaagactygatttctaagagcatttctaagcccgcactgtctgggaatctagaaccccgccctcccgcacatcccggtccgggactcagacgccatcctgagcctggccgacaggtggcgccattttcacaggcct

SEQ ID NO: 479659 - DNA, 574 bp, Homo sapiens
ggggagctccctgcccctctcctcctattcccttttgccccctactcatactccatcttccagaacccacctcggatgcagcggctcctcctagacgtctggcccgggcagcagcgacaaacagcaacgctataaatagtggagtggaagtcactcaggcccctagcaccccagaactctgcaaaggagggcaatcggggaggggaaaccaagacgcatcctgagggggcttgaaacaggtatatgactaacgaggttcttctccccacgcctcagtttctccatctgtacaatgggaggcaaattggcttagacttcgggctgaagggcacagaaaccgtacttttgtcttatgaagagattttggcgtacgattttattgaaaaaatacgttattttaaagccttttaaaagtgattaaaaaacaaaaacaaaaacaaaagactcgatttctaagagcatttctaagcccgsactgtctgggaatctagaaccccgccctcccgcacatcccggtccgggactcagacgccatcctgagcctggccgacaggtggcgccattttcacaggcc

SEQ ID NO: 479660 - DNA, 616 bp, Homo sapiens
ttttctgaggacctttttcagatgtacatttgcttaaatcattcacttctgctccaagtttgaacataaagtgcagaggcagcaccgttggtagcrtcttggcagtgggacagagtaataagctaactatgcagagtcccctgttgattccttaagtgttctccattttttgtccattgattagtactatagttatcacaggcaggggacccgggaatactccatttcctaggtcccattggacagtgacaagggtgagggcagcttcagtgaagcaaatgtattcaggcagaagatacagttgagatttttgagagaaaggagtgaaataaatggtttattttctttgtgagcagaatcagtgcagttgcacagcaccgctttttcatcagcgtccaactgaggagaggaagttggaaggtgggaggctgcagtggctccgtgcgactcaaagggtttgctttgggagtgagtgggcaccctctgtgtgtggccagttgctcaccccaccccaccacctgcatgtggaaggcaggttaccatcttaagtagaaatgtccatggattggataatgtcatggatgtttttgattaaatattttgactctttcatgaa

SEQ ID NO: 479661 - DNA, 504 bp, Homo sapiens
tgtttcccagcaggaggctgggccatttcctcctcccttctctcactcccacagccagccccatagcccgcagcacactcttgtgtccctgtagtttgtctgggctactgccctttagcaagaggtgacaggggagagctgagcgtctgcaggctaagcacaggcagagtgagctcctgaagccagtgaggaaaatccaggcttcgttttgggttttcaaatgcattgccttcatttttagagcatatgtrtcttttctttttcatttcacaaatatttgaatgctagctggatgcggagcacagtgcgaggcaggctgaggaggagacccactcctaacagcttctgtaagtcacatgcctaccaccactggcactgggggactcagggtgactgtgcccagccccatctccgccctcccagtccagggatggaaagttcacagaagagtagggtgagcctgcttctggtgatgaaggcagacacacacacgtgtaactccag

SEQ ID NO: 479662 - DNA, 601 bp, Homo sapiens
ggaaagggggcagaataatagttttggggcaaaaatcttttactcctggatgcaaactgataaagaaaaaatggcttttcctttgtgattgctttttccatttattcactcatacataacatgctcattgtgagtaaagttctgtaatcaactaggggagtaggaagaggagaaatctggcccccaaagatgaaaaaaagatttccattaagatgacttctctgggcagtggaatgcatttggaattattagatcayaattcaaactggaaatctgaaacttgatctttttcatagagacgaaatgttggagggcccatggcctctcaagaatgggcaaagccagagtgcagcgaacttaggacaccaggttctagaattagctcttccataaacaatgtctggccttgggcaactgagtttgtctctacgggcttcagcttcctccctgcaccaaaggtttcttccaacgtgcacagacagcagtatgtacagtggctatcttaagtctgactgctgctttgaaatctcactttacgtcccctgctatgtttggttacgtgatttttctgtgcttcccttttcctaccctaaaatgggga

SEQ ID NO: 479663 - DNA, 601 bp, Homo sapiens
ggaaagggggcagaataatagttttggggcaaaaatcttttactcctggatgcaaactgataaagaaaaaatggcttttcctttgtgattgctttttccatttattcactcatacataacatgctcattgtgagtaaagttctgtaatcaactaggggagtaggaagaggagaaatctggcccccaaagatgaaaaaaagatttccattaagatgacttctctgggcagtggaatgcatttggaattattagatcataattcaaactggaaatctgaaacttgatctttttcatagagacgaaatgttggagggcccatggcctctcaagaatgggcaaagccagagtgcagcgaacttaggacaccaggttctagaattagctcttccataaacratgtctggccttgggcaactgagtttgtctctacgggcttcagcttcctccctgcaccaaaggtttcttccaacgtgcacagacagcagtatgtacagtggctatcttaagtctgactgctgctttgaaatctcactttacgtcccctgctatgtttggttacgtgatttttctgtgcttcccttttcctaccctaaaatgggga

SEQ ID NO: 479664 - DNA, 577 bp, Homo sapiens
aatgttgcatttttttctttccagtcagaatgygacctaaaatgatgtcaggcaagctgtgatccaaaagacgatctcaaacagaacacaagccaaacaaaatggtatgaaaaccatcatttggaacctgtgaattccagattattactcagatgatttccatactcggggacattttattacttgaagaatttcattatatatggacatcacaaaaagtatgatgtgtaagttgtccaaattgcaaacatctaccagtatttataagagatctgctgtaaagaaacccaccttcttggcattttctattcttttcttgatgatgattcctccttagtgcaacccaatcgtcccttctgcctggccctgcccagcgacctgcatgaataagcctctgagaaacggcccactaagttagatggaagtacactggatccagagacgatgctgcccttggggaggctggtaaggctagccagtggtcacaaaatggcagcaggtatgttgctcttgccaagaagtacaatgacaggttacgaattaaaatgcatcaccggatctgccaagcactcagggg

SEQ ID NO: 479665 - DNA, 505 bp, Homo sapiens
agctggaagctggtggggctctgtggggactatggaggatggcgggtgttcctgtggggagcacacagccaccaccctgtcagccacagaaaattcttaaggaaaggctcagctctcccaaaacggaaggaggtaaatactagtaaacacaactccatatccacaggaggtgtgtgtttttacaaagcatggtcatgcatgttaaattattacattcccacagctagggcctcagctagatctgactttggaacccccatttttattttcttcccttccttggtatcttacttttcaaacttttcatttaaaatagaaattwatggaaataaagcttgaacattgtaggaaaaaagggggaatatagataagcaaagagaaaaaatgcaaagctgtccaaatcctccttccaaggcaacctctattaacatttattttttcctagacacttttacccccaaatatacacatactttttttttaaagaaagtgatatcatacatat

SEQ ID NO: 479666 - DNA, 505 bp, Homo sapiens
agctggaagctggtggggctctgtggggactatggaggatggcgggtgttcctgtggggagcacacagccaccaccctgtcagccacagaaaattcttaaggaaaggctcagctctcccaaaacggaaggaggtaaatactagtaaacacaactccatatccacaggaggtgtgtgtttttacaaagcatggtcatgcatgttaaattattacattcccacagctagggcctcagctagatctgactttggaacccccatttttattttcttcccttccttggtatcttacttttcaaacttttcatttaaaatagaaattaatggaaataaagcttgaacattgtaggaaaaaagggggaatatagataagcaaagagaaaaaatgcaaagctgtccaaatcctccttccaaggcaacctctattaacatttattttttcctagacacttttacccccaaatayacacatactttttttttaaagaaagtgatatcatacatat

SEQ ID NO: 479667 - DNA, 625 bp, Homo sapiens
cagataatgtataaaatagcagagagacagacacatgtgcatgccgagcagtgtgctttaaacatctcaatatattacctggcatgcggggtgcatcctgactgctctatggatgcttccctcccgccctcctgcctttgatatgcaagaagctagggccaaatcagccactccgtcatttccattataagtatctttggggatgcgtgctttggcagtgaggtgccagggccccagattggaccccaccatgaagttctcaaagcttagcaattttgcagaatttaatgggcgttgggagacgattttacagactgatttccaggagcacaaatattcaaattgcycagcccctatttgaagacagatctgaaggtgcaccttacaacctgtgtggagcaggctcttttgaatcttgtccttgaaacaaaaaaaggggggagaaaaagaaagaaagaaatgcagcgccccctgggactttaccggcagagactctaagtgcagcgtgactgcaaaggcctgccaggagtccttggggcaggagggaggaaggggatgagagagaccggagatgagaagggccttcaacagccattggggaggcggtggcgggggagaagaaagg

SEQ ID NO: 479668 - DNA, 609 bp, Homo sapiens
gtctctttcactaaacagtgtgatggagtgttttatctgcaatgttgaagaggaaagcccttgaagtaccgarttccctaagagagatgaaacacacacatactccaaccacagcatttattatcctgacattgcaatttagcaaacaaaagatacaaaaagtgtcattctggcctacctttttgtagatacacatatgagagagttccttgaaaatgtaatgaagccaaaagcttattcgaagacgcaaattaagccctgatatctgaactggtctaataaatgccaaattatgttgtcagccatttagatgaatgctcagaattttaaggttcttctgcagataggtgatgcataagatcaaataaattttatgtacctttcacactccgtatgtttcatcagaatggtaaaaacacttatttttgtcggatttatcacctgcatacactcattatacctcttaaaaatccttcagtttgtagaactagcagggcatttcacaaacaggcccaaaatgctcttatagagcctcaaaggatgaactccatgtcatctccaaccaggtattcaagagcagacaacttaacagacagtatacatcatcca

SEQ ID NO: 479669 - DNA, 632 bp, Homo sapiens
tgcctgtagcctaaggtagagctcagacctgccccattttctttcaatcctattctagaatacctttcttctgatttcctaattctactaatatttcattgtccattttgacttcaattcttcatgatttaagccaggtacttctgccctcaaatgaccatctcccattctgagctattcaaaatatttattgtacgtaagatacacattgccatgattgcagtggactgctggtgatatggaagtggctgggaagggaagagtgtggtcccttcagataatacagaagcagggaagggaagtgctaggtagaaaagggcatggtccctggctaagattccaccccaatggacctacgtgaggacaggcattttctgcccaaatattgcatttcccaagaccacccyggcctgccacacccccaccctgtgcctataaaaacccgacaccctagcaggcaaacacacaagtggctggacatcgtgaggaacaaacacataggtggaagaagacgcaagtggttggtagtccagaggggcatgctggaagaaaagcacaccaacaggcactgtcacactggcaggtcatcgacaggcgggacaaagcggagtttggcccaggctatcagggga

SEQ ID NO: 479670 - DNA, 632 bp, Homo sapiens
cactcaaatcctctatgtacatactattcaatttaactaagagtctgtcatcactggagggtagagctctttaaatgcctatgaaggtattggctttagaccctcccaataaatatttatttggggaactgctaatactaaaaaatgacaatgtgatgttctactaagcttttcctctacaaagtaattgactcatacagaaaaaaaaaaaaacaaaacagcttgtgttgaaatagtctgttgtaatggatcccacacaagggattgaaataccatctgtggggcacataatcctattcatttatttgaaaacagaaagagtttttagcttaattccacacttacataggcattatctattctggccacaactctcacagtgtgtctctataggttgagtcagatttaagtaacgtaagtaacatgaccttaatggactawaacatcaaaatgttaaccagcactggaataaactctagttttcctgagcacaaattcctaacaactgaacctacaacaggtctgaagatacaactgcaaattgattcaatttgagaaggatttcaaaatcgtcagcatattgtttagggaagaaatcagaaggaaggtaccttcatttgggacaaattatt

SEQ ID NO: 479671 - DNA, 630 bp, Homo sapiens
ctttcttttagaagagctccctggctaaccttgtcattcttcttctttgctcctgtaacaccctgaaacatcccaagagtagctgatgtgttcttcgtcagagtagtaacacacaccacaccgctcatctctccactagctaccagactccttaatgtcagaatggtacactgttcatctctacatgttctyggtattcttgaatgaatgtatggcccacaggaaaaataaagctcagaatatgcaaatcacttgttctggaaccctgaaatcattattcttaatatttaaaaggcagaaatggaaggtcaagattatcatttaattgctaatatacaactgcagtggaaaatcctagagttgaaacaaaatgattgcaataccagtgattacaaatatgaaaaaacactgaaagttttgtttgggggatatttgttttaattagagataaaaaatatgtagtctctgaaaagaacgtatgggcactttcaatggcttaattaatagttaatcattctgtaaattcatttaaagcttaaggctttctactcattagccttcctgtattgtcaataattggacctgctcaaacatggctgcattggtgatgattcttgcaggcatggtatt

SEQ ID NO: 479672 - DNA, 606 bp, Homo sapiens
ttggatactatggattttaaagacccagtaaaaaagaatctgctttatatagttcaacaaagttgaaaaaagtcttaataagtcatataaatcagaggtgtttgcctttgcacttgcaagacaaaaaaaaaaaaaaaaaaaaaaataccagacaccatggcctgcctcagtctggacccagataaaagcaagtagaaaggattgctaggcagatcttggagcttkggttttttctgtggccttttcttgttgggggaaatgagcacctcccttcaccctcacagcaggggcccagccttctgcttttatatgatcccctctcccaagaccaaacagacagacatatacatatgaacctgcagacacactctccagccctcaatacccaaaagggtcagatagtgagtcatttgtacttgtggctgattgggtgcaggcatgttaattaaactcatttgactaaagttattacctccaacttggatttgcacttatatgtcactggacaaaggaaggtaggtctccccttattttaacagttcaggcatcccttagctgcatgagacatcacctcacgacagattagtccctgaagtagcagctcac

SEQ ID NO: 479673 - DNA, 540 bp, Homo sapiens
taaggtcttatatttagagttcttattataaatgcgtatctattttttcaaatawgacttactttaagcacttttgtagtctctttgagactaagatatttgtctacattttacagcatttctgtttttctctctcatggcttttcttctctttctctgatacctagcttagattatatatttatttcagttttacattgtcgtttctattcaggactgtgtacgtgctgtccatcctctcttcctgtagcagtttcccaaacttttcatataactacttctttcaggcctctacgtaacattactttgtagacaaggctttcccgcctccttgaaatatggtgtctcagtacctgtattgtaataaaacctatcacacaaatgtttctcattttattttttgtttttaatactgtagaggtaaggcctgtgacttttctatctacccagcattccccagcactcataatgtatttgctcaataaatgttcctagatagtccctattttgggaatttcactgtcatcttttccctttcca

SEQ ID NO: 479674 - DNA, 442 bp, Homo sapiens
taaggtcttatatttagagttcttattataaatgcgtatctattttttcaaatatgacttactttaagcacttttgtagtctctttgagactaagatatttgtctacattttacagcatttctgtttttctctctcrtggcttttcttctctttctctgatacctagcttagattatatatttatttcagttttacattgtcgtttctattcaggactgtgtacgtgctgtccatcctctcttcctgtagcagtttcccaaacttttcatataactacttctttcaggcctctacgtaacattactttgtagacaaggctttcccgcctccttgaaatatggtgtctcagtacctgtattgtaataaaacctatcacacaaatgtttctcattttattttttgtttttaatactgtagaggtaaggcctgtgacttttctat

SEQ ID NO: 479675 - DNA, 540 bp, Homo sapiens
gctgtgtgggtaattatttctcagtttttcttttggtgattttatttattttaaattcacaccaaaaaaattcatgacaggaraagtaaaattgtccctgccaacatcatagaattcaagtgagagattaatgatgtcatatataaagcatcactttgaacttcagaaagtcaattaaatttaaatttataaaaaaaaacaaatactcaaacctttctaggtttcaagtttctatctaagctgtaagaaaaagttacaatatagtcgtatgttaaagtacatgagtcaatgatagtgatatttttctgtaatttatggagtaattattttatatgttgtatatattattatctgtatataaggtaataggtaccaggtggaaaaaaaatagtgttcacgttagtattactatgcttgttaagataattttaattcaaaatctattaagcaccacatattattttaccagggctgccacaacaaaatacaagagactggatggcttaaacaacagcaatgtattttcccacagttctggag

SEQ ID NO: 479676 - DNA, 546 bp, Homo sapiens
tactccagcaatgcataatggaggtaaatattaggacttcatgtggataatttatagaatgtaaatttgatgtatgtatatccaatccatttctaagtatgagatattataggcaaacatttactttctgtctgagtagaacatttctcgctgacagggagatgatttttatgttgttatttgcatttgcaaaagaacactatcttttctttatcaagatgttcttgatcctgtgtgaaatattttcagaaaaattaaagagaaattaaacttagacaattccctcttatacacctgaagcaagccccttgacactcaaatagtcacataataattctttcctctttttgtggaaaaagcctataataaaagctaaataaatttagtatygactattaaagtcaagaaagtcacaacaaatattgtgtttaccattttcaacaaaacctattttatttattacaatataagaaatatgaaatgcatatatctctcgtgtgaaataatttttaaatttttctgttgaatatttcatgtcattaatag

SEQ ID NO: 479677 - DNA, 549 bp, Homo sapiens
cggtaaatgggatgttattcaatcaataaagagtttcaaatttgcaagattaaatcagttctagagattggtttcacaatgtaactacacttaacactactgaataggccacttaaaaatggacctcgggcaaagaacaaattcctcttacatgcaaatatccccgccgggaaaacccactctgggaagctagctcggctcaaccacgtgccctcctgcatggctgtcactcaggggtcagggggcgggggcacacaaactgtccagtcagcatcggtgttgaaaaggcgcttgcaccctagctctgaatgcgcgtgtgaacatccttattctagcggttcgctaggattgcgtcccagcctcggactgtctgtggctctgcgtatgctttgtctcactgggacctgcaggtagtgagggatccgtagggaggactcctggagcctcygtaagccgagaaatggtgagtgtgcggggccgggagtcccgagacctgaggaggggacttgtcggaaccggctatgggaagacccgagtccccctggcgca

SEQ ID NO: 479678 - DNA, 549 bp, Homo sapiens
cggtaaatgggatgttattcaatcaataaagagtttcaaatttgcaagattaaatcagttctagagattggtttcacaatgtaactacacttaacactactgaataggccacttaaaaatggacctcgggcaaagaacaaattcctcttacatgcaaatatccccgccgggaaaacccactctgggaagctagctcggctcaaccacgtgccctcctgcatggctgtcactcaggggtcagggggcgggggcacacaaactgtccagtcagcatcggtgttgaaaaggcgcttgcaccctagctctgaatgcgcgtgtgaacatccttattctagcggttcgctaggattgcgtcccagcctcggactgtctgtggctctgcgtatgctttgtctcactgggacctgcaggtagtgagggatccgtagggaggactcctggagcctccgtaagccgagaaatggtgagtgtgcggggccgggagtcccgagacctgaggaggggacttgtcggaaccggctrtgggaagacccgagtccccctggcgca

SEQ ID NO: 479679 - DNA, 599 bp, Homo sapiens
gggcgcccccagccccgcgtctccgaagattgtgcaggggccacgggaaagtcatgacggattctcgtgtgtttgagaatccatttgggtcagaacattaaggtgaatccacctgtgagaattgaagcctggaggagggaacattttttttgcagctaggggagaggagggcgtgtggagctcccagagttcgttcctgtggctgctcagatgcccctgctgtcatcaccaggcactgacccactgtctgggctaccgctctcaagtttgggaatttgtttgtttttgacacggtctcgcagtgtcgcccaggctgaagtgcggtggcgccatcaaacctcactgcatctcaagcgatcctcccgcctcagcctcctgagtagctgggactaaaggcatctgccactactggctaatttcaaatttttattttgtagatacagggtcttgctgtgttgctcrtgctagtcttgaacgcctggctttaagggatcctcttgccttggcctcccaaaatgttggtattataggcgtgaccatgcctggcccttgtgaatgtatttacctttcgattgtgagttttccattttaacggtgga

SEQ ID NO: 479680 - DNA, 458 bp, Homo sapiens
ctgattgaatgagctgattgaatgacccttccaaattatgaagggtaatctggtttattcataatctattgacttaagtgttaatcacatctaaaaataccttcacagcatacagttacaagaaataaattctaatgtgtgctagcaaaacaaggtgactatacttagcaacaatattttgtatatttcaaaataactagaagacttgaaatgataccaacacatagaaatgataaatatgcaaggtaattcataccccaaatactctaccttgattattatacattctatgcaggtaacaaacactcacatatacctcataaatatgtaaaatattatgtatcaataaaaggaaaaaatwaccaaatacttacttcacacaaattaatgacaaacccaggaagtgaagaaaatcctaataaactataatctctcctttcgggggtggggggtgggaa

SEQ ID NO: 479681 - DNA, 521 bp, Homo sapiens
tacatggacaatgaggtaagatgagctttgaagttaaccttgatttacatttactatattttatgttttacttaccacttttcatttgaacttcaaaagaactatgtgtggcaggtattattattccagtattagaaacgtggaaactaaggctatgaaaatggtgcatagagctggagatggaacctagaatccttaggctgtacctcaactgcttgcctgctttgtgggtggtaaggtragaagatttcttcttagatggcagacaatgaagggagtcaatggaaaattatgggagaacgaagagctgcttggtttgttattttttcagtcattgctaacaactcatcaaattcttccttataggaattctctaacatgatagaattcatttgtgagctatagtgagtgagcaagtgccatggtggaattttgctttacttgctcatgaacataggcaaacaaaaaaactctttcctatttgagtggagcttttttttctagcccaaatcgggtttatt

SEQ ID NO: 479682 - DNA, 607 bp, Homo sapiens
agtggatgcaggaagctcaaggagaggctgttgtcagagtccacgtatgagatgtcgcggatgtgagctgcagcaatggcagtgaggacagacttgagaaatgttcaagaaaaggcaacattaggacttggtgattagatgggggtagggtaagatggaattctttaggatgattcccagatttctagttaccatgacaaagtcaatagtattgcaatttgttgagacaaggaatcctgaagataacatgtcagggacaagatgaggtgggcagcagggataatttattgctggatgggttgaatttgagttgcctgtgtggcattcattacyggagatgtccagcaaactttcagctacggggttctgaacttcagggaaaaggttgggtctagagatttaggtatacaggtttagaagttttccatagatatcatgtgttcttataagaccccccagaagagccatgagccaagcaacggatggaggaagaacagcgcttggagggatttacgctttggtgataaccagggatgctgggatcagttgggtgtgagtttataatggaactgggtatcactggacatcactggtagagatccctttc

SEQ ID NO: 479683 - DNA, 607 bp, Homo sapiens
agtggatgcaggaagctcaaggagaggctgttgtcagagtccacgtatgagatgtcgcggatgtgagctgcagcaatggcagtgaggacagacttgagaaatgttcaagaaaaggcaacattaggacttggtgattagatgggggtagggtaagatggaattctttaggatgattcccagatttctagttaccatgacaaagtcaatagtattgcaatttgttgagacaaggaatcctgaagataacatgtcagggacaagatgaggtgggcagcagggataatttattgctggatgggttgaatttgagttgcctgtgtggcattcattactggagatgtccagcaaactttcagctacggggttctgaacttcagggaaaaggttgggtctagagatttaggtatayaggtttagaagttttccatagatatcatgtgttcttataagaccccccagaagagccatgagccaagcaacggatggaggaagaacagcgcttggagggatttacgctttggtgataaccagggatgctgggatcagttgggtgtgagtttataatggaactgggtatcactggacatcactggtagagatccctttc

SEQ ID NO: 479684 - DNA, 607 bp, Homo sapiens
agtggatgcaggaagctcaaggagaggctgttgtcagagtccacgtatgagatgtcgcggatgtgagctgcagcaatggcagtgaggacagacttgagaaatgttcaagaaaaggcaacattaggacttggtgattagatgggggtagggtaagatggaattctttaggatgattcccagatttctagttaccatgacaaagtcaatagtattgcaatttgttgagacaaggaatcctgaagataacatgtcagggacaagatgaggtgggcagcagggataatttattgctggatgggttgaatttgagttgcctgtgtggcattcattactggagatgtccagcaaactttcagctacggggttctgaacttcagggaaaaggttgggtctagagatttaggtatacaggtttagaagttttccrtagatatcatgtgttcttataagaccccccagaagagccatgagccaagcaacggatggaggaagaacagcgcttggagggatttacgctttggtgataaccagggatgctgggatcagttgggtgtgagtttataatggaactgggtatcactggacatcactggtagagatccctttc

SEQ ID NO: 479685 - DNA, 539 bp, Homo sapiens
tgcttgatcttgacagatctcctgttgtacaggtgcaaccatttctcccggggctattcctagtggtgcaattgctagaatgtccagctctcagagataaggccactgttttttaaaggtgttgcacatgttacactctcacagcagggtataagaagtcctattgcttcatgtcctctccaacacttggaattgacagtcgagtagtgtgaactggtggcttattgtggccttcttcagtatttccctcattattaatgaatctgaacacatgtgagccatacgagttttctcttccatgaagcacttgctcatgtccctagtccatttttccactggaytctttgtgcttttcttattgatttatagagttgttatatattctttatacaaaccttttgtcagttgggtgaattacagatagagtctgtccatgtgcagcttaactccatgtttaatttaatataccattctagaaaccagatcatgcattacaatatagtcatgtttatacatattgtataagtaatgctttttgg

SEQ ID NO: 479686 - DNA, 539 bp, Homo sapiens
tgcttgatcttgacagatctcctgttgtacaggtgcaaccatttctcccggggctattcctagtggtgcaattgctagaatgtccagctctcagagataaggccactgttttttaaaggtgttgcacatgttacactctcacagcagggtataagaagtcctattgcttcatgtcctctccaacacttggaattgacagtcgagtagtgtgaactggtggcttattgtggccttcttcagtatttccctcattattaatgaatctgaacacatgtgagccatacgagttttctcttccatgaagcacttgctcatgtccctagtccatttttccactggactctttgtgcttttcttattgatttatagagttgttatatattctttatacaaaccttttgtcagttgggtgaattacagatagagtctgtccaygtgcagcttaactccatgtttaatttaatataccattctagaaaccagatcatgcattacaatatagtcatgtttatacatattgtataagtaatgctttttgg

SEQ ID NO: 479687 - DNA, 517 bp, Homo sapiens
tgcagacccctcctgctgaccatcagctagctgcagaactgggcccacaagggcacctgcactcatcctgacctcacagggcctgcatggtgggcggagcagttctccctgtgcaggggccggatcagtggcactggccactctgctgagctgtcctgtgggcgccgtgcaaagccgcagggctggtatcttgtcctgttcctccttttccctttccagaggccaagaagatgaccacctttgagtatctcattaatacccgcaaagaagagagttcaaaacatcaagcagtgaggaaagatccatacgtgcaaatggacaaaggatttctccaggtaccacctgtctctctgctccatttctccagrcctgggacaatgtctaaggtcactcggtggttgggacctctcagccatgctcctttacttcagggccgatgcagcccatggactctgctgtgtgtgtgtctgtgtgtgaggctctgtgcatgggtgtgtctatgtgtctttgtgaacat

SEQ ID NO: 479688 - DNA, 616 bp, Homo sapiens
  misc_feature (1)...(616): n = A,T,C or G
tttttttaaatcgtatttgattacatgctgattgaaagtacagcacaagccaaatccattaagatccatgtacctcagatttacgctggagcaatcatcatttagaggtytgggagaggagaagaaaccagcaaaggagattaagagcatccagcagacagagcgataaaaaccaggagaacagtagatgnnctnctggaaaaggtccaaggaaatgaatagcgtttcanaggaaaacgaatgttaactggcatgaaatgttgctgatgagtgaaatgtggaatggaataatggattcaacattgtggagagattggtgatcttgatgagatagcttgataaagagttgatggaggtaacctgactagtgtgagttcaggagaatatgggagagcattaattctttgattagttctgctgtaaaacaaataaatggagtggtaactacagatgaaagtggggtaagtagaataatattttaaggtggaagaaattatagcatatttaagtgatgatgaaaaacatttgatagagggtgtgaaaatacaaatttcaaaaagttaaaaaaagttatcctcaaacaaatgattgtcaactctttatttaacttattaat

SEQ ID NO: 479689 - DNA, 616 bp, Homo sapiens
  misc_feature (1)...(616): n = A,T,C or G
tttttttaaatcgtatttgattacatgctgattgaaagtacagcacaagccaaatccattaagatccatgtacctcagatttacgctggagcaatcatcatttagaggtctgggagaggagaagaaaccagcaaaggagattaagagcatccagcagacagagcgataaaaaccaggagaacagtagatgnnctnctggaaaaggtccaaggaaatgaatagcgtttcanaggaaaacgaatgttaactggcatgaaatgttgctgatgagtgaaatgtggaatggaataatggattcaacattgtggagagattggtgatcttgatgagatagcttgataaagagttgatggaggtaacctgactagtgtgagttcaggagaatatgggagagcattaattctttgattagttctgctgtaaaacaaataaatggagtggtaactacagatgaaagtggggtaagtagaakaatattttaaggtggaagaaattatagcatatttaagtgatgatgaaaaacatttgatagagggtgtgaaaatacaaatttcaaaaagttaaaaaaagttatcctcaaacaaatgattgtcaactctttatttaacttattaat

SEQ ID NO: 479690 - DNA, 623 bp, Homo sapiens
atttccagtttttgaaaaatttgtctattctatccatgggcctaattaaatgttttcctctttgataatattattattttttcaagatattgatttkcaggctgggtgcagtggctcatgcctgtaatcccagtgctttgggaggcctgggtaggaggatcgcttgaatctaggagtttgagaccagcgtggtcaacatagtgagacctcgtctcttaaaaagtaaataattaatacaatttttaaaatatgcgtattgtcttcctttcaaaatagtcactcccatatccccaaggatataatatccactctgaatgtttgagaatataaaatatatttttcaaaaaatttgcactggctctgttaactttgaggcttggacattctttcatttttcagtttgactgtttatcttttaattcatcaatttcttcagatgctcgttaattttgggttatgtgttaatattcgtatttgggattccatatacacctgttctggggtgctatttctaattaccatatactgcttttagtgataaagagtgaaccgcgattggctattaaacagcaatgtgccagtagtttgaattctggcgatccccgagtccctaaccattaata

SEQ ID NO: 479691 - DNA, 616 bp, Homo sapiens
atgcatttagtaaagtccatctcatttaagtcaaggttactcaacctttgtgtattgacattctgggtcaaataattctttttttgtgggggttgttctgtgcatttcaggatgctgaaccacattcctggcctctactcaagagttaccaatatttccctccctcatacccctctagtagagacaatcaaaaactgacttaaacatgaccatatgttccctttggtacaaaatcactccatttgagaacttttagtaaaaaaataatatgtgtttttctccaattgggtttctgcacatacagaaggaaaatttgaaagtatcgagaaatctacttgcaggaaaattgaccaatcatttttatttgtataaccttttacggaagtataatatacatacaaaaaagtgcatatatcctcaatgaacagaccagtgaattttaacacactgagcacacctgggaaactagcattgagatcaagaaatagaacataacccacaacagttggttcaccttgtgccctttcccacattctrccttccaggggtaacgattttcctgacctctaacagcccagattgattttgcctgcctttgtcctttctgtgaatgaaa

SEQ ID NO: 479692 - DNA, 594 bp, Homo sapiens
aggcagtcccaagggatggaaaactggattgggatagacaagtgactcaggtgggagaaactgagaatgacaactgaaagcaggcatagtcatagatattagaatcagtcccagtcaacaatagaggcacaaatttgttggcatcacaagctggctccccccagccaggctgtccagttgcacaccctcaaggttctcgtagcccaactaatggccactccacattgcacaaatgaatgaagtgctttcatgtgtccttaactatgactgagctgttctccaggacctgtctgcccatttcagcccatctcactcaatattcaaygatctagccgagtgttctgctcctgtaacaccacctccccatcaccacgtcatacaaatggagagtctgtccatcatgttacgcatagttgaatttggctccgaatctgccctctggcttccacagcactatgacaatgcctaggtaagagttagtaaatgtgggttgtatttgatgtcacacaggatctaaacacagagaactcacaaataagaaagggtcattctgtcacataaatgtgctgcatccaaatatccctttagagacag

SEQ ID NO: 479693 - DNA, 594 bp, Homo sapiens
aggcagtcccaagggatggaaaactggattgggatagacaagtgactcaggtgggagaaactgagaatgacaactgaaagcaggcatagtcatagatattagaatcagtcccagtcaacaatagaggcacaaatttgttggcatcacaagctggctccccccagccaggctgtccagttgcacaccctcaaggttctcgtagcccaactaatggccactccacattgcacaaatgaatgaagtgctttcatgtgtccttaactatgactgagctgttctccaggacctgtctgcccatttcagcccatctcactcaatattcaacgatctagccgagtgttctgctcctgtaacaccacctccccatcaccacgtcatacaaatggagagtctgtccatcatgttacgcatagttgaatttggctccgawtctgccctctggcttccacagcactatgacaatgcctaggtaagagttagtaaatgtgggttgtatttgatgtcacacaggatctaaacacagagaactcacaaataagaaagggtcattctgtcacataaatgtgctgcatccaaatatccctttagagacag

SEQ ID NO: 479694 - DNA, 640 bp, Homo sapiens
tcctgattgatgattatcaaggaaaaatatgatgcattttgttttcccctacatatttctgctgtcatatcttaagcataacactatatttatgaaacaggaggataaccttgtggtccacttggaaggacaaagcaaatgtgtttaaacaatgtgagacaggaaagggtagggtcttcactgcctctctttcctgtgattcaactggcccctgaatacacacctcacttttgttttcagtttcacatcaatattawgatagagagaagaagagcaagttgatattttctattgaatatataagacattatataaatctgtcattctggaaaactccctgggaagtagccatgcttgaagatgatattccgtatagcattgaattgtaaaaccaaattactaatgaaacaagagaaaatccttgtgtcacttagtctattttctcctcaagtgaaatccctaaagatgataacattgtggttgtgaaaatgtagtaagatttatacacgggttcaggcattctgttttcaggaactatcttgctatatggtaaagctagatgttattcagaaccacttatataaaccagtaccacaactctgtaatgtaggtatcactatctgcattctttcagtgaagc

SEQ ID NO: 479695 - DNA, 577 bp, Homo sapiens
tctttttaagtgactgcgatgtgctgatagtatcttgtgctcaagtttactttgttctattttaaaaatagaaatagaattgaagtaattcatctagattgcttcattcatccttcatattaaaagtgatttttagtacatcctagacgccatgttaggcctgcagttacaaatctaattgtgatgaaacctaattctcattttctgggtactcacagttgatgtaaatacaatgtagtgagttctgtgctatcatggagtcctttatgcctcagccatcctacatttataaacacttaacagtttatgaagtttgtttgttcccattatttcatttaatcctattacaaccctgtgagatgtggaaactcacatgccagaatgtttgctgtgtagtgggagtgccaggttcactcaggccctttgacaagtccagcattctttctgacatcccttatggatcatccatctgggccttggatcagcgggtttccccaggctggaaagggggaagcacattcccaaaccaggcttagtgggaaytgaaggcattcttgctgatgagaaagttagcgat

SEQ ID NO: 479696 - DNA, 468 bp, Homo sapiens
tgcccaaaaggtaaggctctaggagtccaggagtgtgctgccatgtgaatcacagagagtctgtcttagaacaaggtattcttgtgaaggtaatatgaactgatccacacataatcctattccttcctcctgggcttattgatagctatgcactctcaaggcaagggcttctccctcaggctgaaacccacatctccccatccatgatcctttcacctggtccatgagctatagattaatggcaggagttaacctaaggaagctgggcattcccttctcatgcgattgtcagcagcaactagatagtgattgccacactttcagtagtgcattcagcaatttctatcaaattaatggactacarttgcacgcccttgaactgatcttgcagttgtcagatggggggctggagagaaagaacaagagcaagtgagagcaagccggggtcttcgaagccataaccagagt

SEQ ID NO: 479697 - DNA, 508 bp, Homo sapiens
tgtgttgccattcatattccagattcccctctgggatcaggctgaggttacatcagttgaaaccacatcttcgcttggcatcttctcctgccctatcctgcttccctcacttccttacgttctctactgggaaaaatcactcagtgattcatttgcactacaatccctcactcaggctttctcactaaggaacctgacctaaaacaggcaggcagtaagcaagcatttattgaaccaaactaaactgacctagtagaccccttattctataattgagtaaactcaaacttagaaaagcttagggacttgcataaagtcaacagttggttagaaacagagctaggacacaaaccaagctttccccactactaatccagttttttatgaagataggaagttaatacagaaatgaakatgatccctacagactctcctaaatatgcataagcacccttttctctctttaaaatatgcatcaataattaaacttaatagaactagaatgtag

SEQ ID NO: 479698 - DNA, 632 bp, Homo sapiens
ttcaaagcctgtcctcccagtgctctctgggttacctccttgagttctcttctgtctacacataactttaacgtaaagcctgctcttcaaagaggcatattcttttgtayagtaaataatatgactggtttttgtcttttatttcttggaagaagattaaatccttgggctatcctgagtaataggaatggttttgttattggtgagcctcttggattatacctgagtttatcctacaagataagatgaggctcaggatggctggtcatctgcacgaacaattgtgtgattagagaagcaaggctttgagccacatagcataaacctaacctctggggaagggagctggaaagtgagttcaatcacatagatgatgattcagtcagtcacgcctatgagatgaaacgccaagaaaaactttgcacaccaaagctcagtggttgatgaacacactgatgtgccaggggaggtcatggaaattggaatttgtagtcagttggttagaaatgcaggtgacctggggaccccaccccccaccgccaatcatggctggcatctgagggacagcctggtggaattctgagcccttaacttttggggtctcccctaatgcgggatggttagtgccacca

SEQ ID NO: 479699 - DNA, 641 bp, Homo sapiens
ctcatttgctcagcttcctccttccctatcctgcccacctcaccatggttcagggtttgtgctaggccccgcctcaatttatccctatctcagggcctgcttctgggaagcccaaacaaagacaccctgtatctgcattgcataaaagccaaaaagccacatatttgactattttgtcatttcattgaagtgcaaaaagacttgtctttcttgaggaaataacatgaggtttcctatttatagtgcatgatgttctaaatacctaattaggtgacttctaaatgggaaatgattyctttttataggatctaggtccttttttttcttgctggtatccaactgtgagaaattcagaatcagttctaagaataaaaaaaatggaaactattatgttttagggaaaaagaaaacgttcgattaagagctctgtgtattgccaacaactcttttcagttgaattttcttttctggaataagatgtctcatgcaccccttattactctgagacttttaccatgtcatcaggcactggatagtacaagaaaaaatttctgccacattaatttgagtctaggtccaacttctagaatcatctcattgttgtgcctagatgagctttggattacttgcctaacaaaacc

SEQ ID NO: 479700 - DNA, 459 bp, Homo sapiens
tggtgagcttgcacagaataagctggttggtgtggtcatgtcatgctgttgccatcttactttaactgtgacaactctgaatggatttcctagttccagagcgcctcctaagatgagcaaaattctttattgtgattgtaacgtattttgacttttctctaagacaatcttgttttctctacctctgtagaagtgttgagcacaagagccctccagactaacttttctacatgaaattctttgtctcaaattatttttcccaatgactctttcctgtgacaattggtaataagaactcccagctaagaagtctgagaygctctactggagagaaacatgtcacaaggaacagaactaagatccccaacgtgtgagtgagaaggccctctgcaccagtctgttaaagtgagacttcagttgactttagcctagttaatttctcactgcaaatatatgagg

SEQ ID NO: 479701 - DNA, 501 bp, Homo sapiens
cttttaaacactggcacatttttggtggcataaggaccaccaaacacgacccaaagtagaagcccttaacttacaaggtctcgaagtggacatggacagatttgcgctttctggaaaggcgaactgcaagcctaagctcgggcgcgccacgcttcccaccggacgcccaccgggccgagcccggccactcctcgcacccacccgggcggtctcacccgccccgccggccccacccacgggctgcgggctgctcctcaggacaacccgcacagagggcggcagaggcccagcccagccaggcggccaccggccgctatccgcccgggtgaccttgggcagacacgactcctccccgagtccacctgccaggcactgaggcgaggggctacctcagcccgcggggtcccaggaccccaggcccrgaccaaggcggcggaggggacgcccagcaagcccgcggggttgtgaccttcacccggacgcggactatctactaaggac

SEQ ID NO: 479702 - DNA, 609 bp, Homo sapiens
gctgctttactggactattcttactattacagcctccagtgcctgtgctctatctgcagggctggactccttccggtggggagggaggacaagctgtgaccccctggacaccacagttgtccctttcttcaacagttagctgggcgctgccccactgtgtcctcagctcagctactgaacctgctgctggctcatgaagcatcagaactgcgctgtgctggagtggaaagaagaaggcttggggccggtgaagtgagattgaatgctatctctccaatggatcggctgtgtgaccttcataaggtcattcatctttcaatcggggcttcccttggaagaaaagatgagctaacctttatgaaagcacttgacacaggsttagcacacagtaggctgtcaataaatcttagctctcccgccctgccttctccatgtgaaatacggctattcaaaataaagaagtgttagccacaggccctacgaattttatgtgtttgctcagccccccaggggaggaactgtgagtgtatgtggggtcgatgtatgagcgggtaaaactgggcagtgtatataccaggctattaataatgatgtggctcatatgtttga

SEQ ID NO: 479703 - DNA, 609 bp, Homo sapiens
gctgctttactggactattcttactattacagcctccagtgcctgtgctctatctgcagggctggactccttccggtggggagggaggacaagctgtgaccccctggacaccacagttgtccctttcttcaacagttagctgggcgctgccccactgtgtcctcagctcagctactgaacctgctgctggctcatgaagcatcagaactgcgctgtgctggagtggaaagaagaaggcttggggccggtgaagtgagattgaatgctatctctccaatggatcggctgtgtgaccttcataaggtcattcatctttcaatcggggcttcccttggaagaaaagatgagctaacctttatgaaagcacttgacacaggcytagcacacagtaggctgtcaataaatcttagctctcccgccctgccttctccatgtgaaatacggctattcaaaataaagaagtgttagccacaggccctacgaattttatgtgtttgctcagccccccaggggaggaactgtgagtgtatgtggggtcgatgtatgagcgggtaaaactgggcagtgtatataccaggctattaataatgatgtggctcatatgtttga

SEQ ID NO: 479704 - DNA, 630 bp, Homo sapiens
ggaaagatgaactaatatgactcttgagccccaagtttggtatgaaatagcaggaagagctggactagagaacattattgtagagagtgctctcactggatgtcatgggaggaaatcattggctctgctgattctttctgaacaacccaagaggctttgtctggtgtatcagatgcttttaattgatttcagtagttttatctcattttctgggtgatctaactgcagagtgtgagtgagcagaacaggatgccattgctgagaaaagcattattcatgtcattggaggagatttttagacaaaggaacacctagaagyatgctcttgataccgttatcctgatgggttggtgagggaagtcaccaagtctctgagtcagaggacttctctcctttagcctgagaaaactcgacttccagggttgccagtctgctaacgatatgggagaagagtccgtaattcccacaccagtgagtgccctccttgaatctgagtggagaatttcattatattgactcatttttgagcaagagacgcccaaatatgtaacgtagcactatccttctcttatattaggttgagctatatgaaagtgaagatagtcaaccttctttttctaacttcagaaa

SEQ ID NO: 479705 - DNA, 479 bp, Homo sapiens
gccacagctctggtggaacgcccggtgggaaacacacgggtgtccacagtgaagtcacggccctctgggacatgacctaaaccctggtctagggttctagaaataccaaccccgatcaacaggcaaaggccacagygtgtccaggaggccaggctgggagcatcccctggagcccaacgtctccccacgagttgggagggtggaggtgatgggagccgaggcagaggagagggagcggggagggaggagagagacagagaggaaggcttcagagaactgggtgggcgtgtcgggcagcattttccagacctcggggctcccgggtccctctggagtgggtgtggaaccccaagtctgggacgttatccagaaggcgcagctcctacaccgcccgacacaggacgggcctctcctacagctttcatcgccaccagcagcacctcgcacccctagatccataggcacctcccaggctgcac

SEQ ID NO: 479706 - DNA, 479 bp, Homo sapiens
gccacagctctggtggaacgcccggtgggaaacacacgggtgtccacagtgaagtcacggccctctgggacatgacctaaaccctggtctagggttctagaaataccaaccccgatcaacaggcaaaggccacagtgtgtccaggaggccaggctgggagcatcccctggagcccaacgtctccccacgagttgggagggtggaggtgatgggagccgaggcagaggagagggagcggggagggaggagagagacagagaggaaggcttcagagaactgggtgggcgtgtcgggcagcattttccagacctcggggctcccgggtccctctggagtgggtgtggaaccccaagtctgggacgttatccagaaggcgcagctcctacaccgccygacacaggacgggcctctcctacagctttcatcgccaccagcagcacctcgcacccctagatccataggcacctcccaggctgcac

SEQ ID NO: 479707 - DNA, 479 bp, Homo sapiens
gccacagctctggtggaacgcccggtgggaaacacacgggtgtccacagtgaagtcacggccctctgggacatgacctaaaccctggtctagggttctagaaataccaaccccgatcaacaggcaaaggccacagtgtgtccaggaggccaggctgggagcatcccctggagcccaacgtctccccacgagttgggagggtggaggtgatgggagccgaggcagaggagagggagcggggagggaggagagagacagagaggaaggcttcagagaactgggtgggcgtgtcgggcagcattttccagacctcggggctcccgggtccctctggagtgggtgtggaaccccaagtctgggacgttatccagaaggcgcagctcctacaccgcccgacacaggacgggcctctcctacagctttcatcgccaccagcagcacctsgcacccctagatccataggcacctcccaggctgcac

SEQ ID NO: 479708 - DNA, 388 bp, Homo sapiens
ttgggggaggtggtcgcagaggtagagggagggtagagggagctggaaacggggaggggaaaggcccctcgcactgggtgcccgccctgcaagtgttgtgctggccaggatgagaagctgtggccactcagcagccctggagcaggccatcggggaatctccagggaggggctggcaggcagaggcccagaggcaggacctgcagctcgagttgaatgggcagcagggccacaaagacrccaaggccggggcactgtgggacccctgcccgcaaggaaggggggcgccatgtgggctgcgcggggctgggttttgctgttttggcccatgctttccctgtgcctctgcctgttcagagcccctggcgccctggaggaaggtctgcggg

SEQ ID NO: 479709 - DNA, 575 bp, Homo sapiens
gatataatagaaaattgttcaagttcaagactccaaaaattaatctgatcccatttcaaagtgaagctaaaaagatgtccatgtttttagttgtggaatttagagtatgtgatggggcctacttggaatcctagtagacagaggaattaaataataaaatttgcattactcagatctatcatagtggtggaaatggacactgctcaccttgtgagccttgaatgaatcaatgttggatcactggcttgcaatggatgaagcttggcaggcgtggtcttcctgaagtggcactcctctagaccaacacatgatactcttattccatcataatcatactacagagaatagacccccataaggaccataaatattgtttgtctgtactgtactgcaggtgatcaaaactctggcaaccaataggatttattttctagaggacagatactactccaaaacartactagatcaaaaaggaaggctttaaaaattacacagaagtgtttgtggcaaagatccctctttgtatgtgtaggactataggtattaagattcggaagcaagcagaacaagttctg

SEQ ID NO: 479710 - DNA, 593 bp, Homo sapiens
acttggtagcttttagtataatcctgaaattagttaatggaagtgccactaatgagcatctattaatagaaggcaagtgtagtaacactgctaatgtaatggcctggagctataataaaacatgtgaacaaaacacatctaatactgttctatgttaaaatagctctcttgaaaaacacagagctagaaaatgatcacaactaagagacattttaacaacagggacattacttgatgggactcaccatcaagttttaaatggggtagtggacagtaatacttccagaccctctttccccaggggattttcttgattattctggctgggtatcaaaagttctgatcttttcttagaactctttatataacaaggaactaatatttaaaattcaacatttaagtttgtacttctttatggttctttgttttgtgggttaatatagtctccacagcaaaattatttccaacctgaaaacaggggacctatctgtaatagaatatcttccctactgtttttctttctcaycactccagcttgagattgaatgagtaccacactctgtgatctcacagagtgttctgttttcctttct

SEQ ID NO: 479711 - DNA, 601 bp, Homo sapiens
cattatgctagtgtacatagtaagagtttaatcatattcactgatatcttactaaatcattttgattcctttcaagaacgtacctttcaagaacaagtttcygacacagaaaataacctgaaccaaggacccagcttgatggaagccatctttaaaatattgtaccattgcagtttttctccacaaacatttgcaaacgtttttgtgagctacatggaagaagagcaattatgggactttttatataacatcccaggtatgagacatttactgtttgtaaaagaaatattctatagatacttatatgtacctttaaagatgtttagaagttgtattgatactggttttgctgaatctgttgttggtgaaagtttaccttacattttttcagtataaagccttctgttgggaatcattaattattggttcctgtaaaatttcatatactttgggacaagatgcaagggaggtggaagggaaaagattttctttttttattaattagggaatgttctatcataaaaatttattttaatatttatcacagattatgttttgctattgagcatataagatattagtaagatgtgaaaagtatttt

SEQ ID NO: 479712 - DNA, 601 bp, Homo sapiens
cattatgctagtgtacatagtaagagtttaatcatattcactgatatcttactaaatcattttgattcctttcaagaacgtacctttcaagaacaagtttctgacacagaaaataacctgaaccaaggacccagcttgatggaagccatctttaaaatattgtaccattgcagtttttctccacaaacatttgcaaacgtttttgtgagctacatggaagaagagcaattatgggactttttatataacatcccaggtatgagacatttactgtttgtaaaagaaatattctatagatacttatatgtacctttaaagatgtttagaagttgtattgatactggttttgctgaatctgttgttggtgaaagtttaccttacattttttcagtataargccttctgttgggaatcattaattattggttcctgtaaaatttcatatactttgggacaagatgcaagggaggtggaagggaaaagattttctttttttattaattagggaatgttctatcataaaaatttattttaatatttatcacagattatgttttgctattgagcatataagatattagtaagatgtgaaaagtatttt

SEQ ID NO: 479713 - DNA, 616 bp, Homo sapiens
cagctgcggtagccatgcgaccaacctctggtagagtgtaagcaagcattctgcaagaattccaagaaagtctctttaaaggaggtgacttcttccctactgcttaatccttagaatgggaccattataatcagatttccaaaaaccatcttggaccaggaggtaattttgagcaagaaagccacgtgctgagaatagtaaatggcaaaccatctgagtccctggggataatggagcaaacttactatcagaggaaagaaagaaacytctatcttacttaagccactttatcctatttatatttgtttttataccttactaaataaaggcaaacctaagtccagttgatactataagcatgaaaaagcagtcatttaattttataggaggactgaaagtttgagggaggaggtgtcttttgagttagaactaagatgaggaaattctgaacctcaacttttatcattagtctgaaaaaaagacatggtaaaatattttgcatgctatatttgtgtagaatcaattccacaaaagagtcaataatgacagctctattttttaaggttcagttgttccagtcttcctattctgctttgattatatttaaattttttct

SEQ ID NO: 479714 - DNA, 581 bp, Homo sapiens
ctttacatccctctcagaagaggtccatccacaaaccaaccaacagtggtgactttgataaaacgccttcttatctttgcttccctttagtatcaatattatattccaaaagtaccactcttaatatgttgctctcctggtttaaaaccctcccacagttccccyttgcctgcagaataaaccagcatgtccttaaagtgccactgaaatttggcaataatctccagtcttttcttttacttgccctatattccagccaaaataaaccagtcactattcctacaccatatccataagttttctagcagtgtttcttgtttcataattttatatcttccagaagaatcctaagaccctcatttcttctgataaaatatttctatacttttctgatccagatcaaatgctccttcttttatgaagacttccttgattctcatttccctgtgtgataacttgtaatgtgtttcccagtattatcagttacctactcatttaaatgtctctcttaaattctaagctccttgagggtaaaggcagtatgatctatctctaccacctttgcagtacaaagttaaatt

SEQ ID NO: 479715 - DNA, 574 bp, Homo sapiens
ctgggctgactaatgaatatttcaggaagcccagatatatctgtgcattacagtaattaaaagaggaggaataaaacacatattcatcagaaaattaatattgctgaaggctgattcttctgaagaaatgccaggtgaccttggggcctaagggtttcaggcccctgggcttcagtggattttttatacattttcatctgtgtccttgggagcaagcaggagtacaccacctcattcagccctgcctcggtcagcgttctccagcactgctctatcagcattcagactttcattccgtgccgaacgttgtaacattcaatgacagtgcatggtgatccctagcagttactgtttttaattgtcagtgttgtcaccacagagaaggcaagaagatgaagacagcrtctgagaggacctggaatctaaatcttgtttgtgaggctcacttaagactacctacaaaatcacaagggctgacagataaaatgaaggaagggtatatgctgaggttgctcttaatttttgactagccactttcaggagctaagggacagatatgcaaatagtatcagac

SEQ ID NO: 479716 - DNA, 573 bp, Homo sapiens
gtgctcactactagggaccattattctgcctatgttgtaggcagaatatatagccaatatatataatagctatatattaaaaagttggtttctgccaaaaaactgaccttgtccctaaggcttcagagcraaggattttctgcatagtgaacagtttagctgatgaattgagattggaaagttgatcagatgtgaaggttcatgaatgaaagcttcagtctgactcttttaggctgacaacctcctacctgctcagagaaacactgaacccacaggtttgttttgactcaaatgttacaaacactaagaaacagagaagcagacatggaagctgtttgcagacttttgttttttctattttttagtgtttttgttttcacttttgttttccccgtttattgaagccattgtttaatttctacccattccctatctttttagctttctctcaaaaccaagagggaaaaagaaaacctatactacacatactcccttcaaaggtccaagaattctaaaagattttttcccaaaccaacagtgtactgtaagaccaacttttacaggctttggata

SEQ ID NO: 479717 - DNA, 573 bp, Homo sapiens
gtgctcactactagggaccattattctgcctatgttgtaggcagaatatatagccaatatatataatagctatatattaaaaagttggtttctgccaaaaaactgaccttgtccctaaggcttcagagcaaaggattttctgcatagtgaacagtttagctgatgaattgagattggaaagttgatcagatgtgaaggttcatgaatgaaagcttcartctgactcttttaggctgacaacctcctacctgctcagagaaacactgaacccacaggtttgttttgactcaaatgttacaaacactaagaaacagagaagcagacatggaagctgtttgcagacttttgttttttctattttttagtgtttttgttttcacttttgttttccccgtttattgaagccattgtttaatttctacccattccctatctttttagctttctctcaaaaccaagagggaaaaagaaaacctatactacacatactcccttcaaaggtccaagaattctaaaagattttttcccaaaccaacagtgtactgtaagaccaacttttacaggctttggata

SEQ ID NO: 479718 - DNA, 675 bp, Homo sapiens
ctggcgggtggtggctttcccagccagcttctccgagagctgccccagcccaggccactgctatttctccaggattcttccttgggggtagctctatgatcatttttattggatgtgtcaaaatcactttgcttaaactcaaatctgrtctaggttctctgttgaaataaatcctaaacgtctcaatgcagacttcaaggctctgcaaaattcaacctcaccctaaattcaagcctcaccctttctctcctcacattctccttgggctccagaatcacatacatattatttctctcttctcctggcctttggttatcctgtgtcccctgcctggcacacaacctccccagcaggcattttggctgactccagagccatccttcagtgttggagagtagagggaacggtggctttgaagtgcccaggtctggagtcaaatgcctgctctgctacttgctggatgtgtgatctgttgttctctgagcctcaagcttcccatctgtaaactggttatcactaaagcaactacacagggctgaagtgaggatccagtgagaaaatggacataaaacacaaagtgaagtgagaaaatgtgccactctgatatgctgtcagcatagaaaactgtctcttccattccttcaacaaatatcccctctttgcactctaccccca

SEQ ID NO: 479719 - DNA, 675 bp, Homo sapiens
ctggcgggtggtggctttcccagccagcttctccgagagctgccccagcccaggccactgctatttctccaggattcttccttgggggtagctctatgatcatttttattggatgtgtcaaaatcactttgcttaaactcaaatctggtctaggttctctgttgaaataaatcctaaacgtctcaatgcagacttcaaggctctgcaaaattcaacctcaccctaaattcaagcctcaccctttctctcctcacattctccttgggctccagaatcacatacatattatttctctcttctcctggcctttggttatcctgtgtcccctgcctggcacacaacctccccagcaggcattttggctgactccagagccatccttcagtgttggagagtagagggaacggtggctttgargtgcccaggtctggagtcaaatgcctgctctgctacttgctggatgtgtgatctgttgttctctgagcctcaagcttcccatctgtaaactggttatcactaaagcaactacacagggctgaagtgaggatccagtgagaaaatggacataaaacacaaagtgaagtgagaaaatgtgccactctgatatgctgtcagcatagaaaactgtctcttccattccttcaacaaatatcccctctttgcactctaccccca

SEQ ID NO: 479720 - DNA, 523 bp, Homo sapiens
gctatatatatatatatatatatatatgctatatattttactgcatagaatatataatatattatatagcatagaatatattatatattatatattaattatataatatacattacatattatatataatatattatattattatgctatatcttatatattatatatgttatatatgtatatatatattatatrtacacatatacacatacatacacacatgtatattttaatagctaatatcttacactggtatatttatattacatatgattatatacaaatatttttgtactttatgtttatgctgtatatacagatgtaattagttgtttatgttatatgtaatataaacatgatgtatattcttattttcctgtgaggacccactgtcttcttaatacactgtcttctgaccaaagtcttccacacaaatcagctgttactatatatatatatatatatatataatatttatatacacatatacacatacatacacacatatgtatattttaatagc

SEQ ID NO: 479721 - DNA, 523 bp, Homo sapiens
gctatatatatatatatatatatatatgctatatattttactgcatagaatatataatatattatatagcatagaatatattatatattatatattaattatataatatacattacatattatatataatatattatattattatgctatatcttatatattatatatgttatatatgtatatatatattatatatacacatatacacatacatacacacatgtatattttaatagctaatatcttacactggtatatttatattwcatatgattatatacaaatatttttgtactttatgtttatgctgtatatacagatgtaattagttgtttatgttatatgtaatataaacatgatgtatattcttattttcctgtgaggacccactgtcttcttaatacactgtcttctgaccaaagtcttccacacaaatcagctgttactatatatatatatatatatatataatatttatatacacatatacacatacatacacacatatgtatattttaatagc

SEQ ID NO: 479722 - DNA, 523 bp, Homo sapiens
gctatatatatatatatatatatatatgctatatattttactgcatagaatatataatatattatatagcatagaatatattatatattatatattaattatataatatacattacatattatatataatatattatattattatgctatatcttatatattatatatgttatatatgtatatatatattatatatacacatatacacatacatacacacatgtatattttaatagctaatatcttacactggtatatttatattacataygattatatacaaatatttttgtactttatgtttatgctgtatatacagatgtaattagttgtttatgttatatgtaatataaacatgatgtatattcttattttcctgtgaggacccactgtcttcttaatacactgtcttctgaccaaagtcttccacacaaatcagctgttactatatatatatatatatatatataatatttatatacacatatacacatacatacacacatatgtatattttaatagc

SEQ ID NO: 479723 - DNA, 523 bp, Homo sapiens
gctatatatatatatatatatatatatgctatatattttactgcatagaatatataatatattatatagcatagaatatattatatattatatattaattatataatatacattacatattatatataatatattatattattatgctatatcttatatattatatatgttatatatgtatatatatattatatatacacatatacacatacatacacacatgtatattttaatagctaatatcttacactggtatatttatattacatatgattatatacaaatatttttgtactttatgtttatgctgtatatacagatgtaattagttgtttatgttatatrtaatataaacatgatgtatattcttattttcctgtgaggacccactgtcttcttaatacactgtcttctgaccaaagtcttccacacaaatcagctgttactatatatatatatatatatatataatatttatatacacatatacacatacatacacacatatgtatattttaatagc

SEQ ID NO: 479724 - DNA, 561 bp, Homo sapiens
gctaatttttaaattgtttgtagagacagggtcatgctgtgttgcccaggcagatctcaaactcccgggctcaagccatcctcctgattgacgttccaaagtgctgggattacaggtgggagccccctcaccaggcttcaagttgctttttatgtttcctgatatgacaaataatttcaaatatgttctggagatttcggttattatgtaaggaaactttttatcctatttgaacattccagttcagtccatggtacccttatttggtttaccatataggccccagcctgctttaggggaaatgtagagtcaatgacaatttagttttcaaagccctcccagtgctattctggtctcgtttgttcttctggatctgctggggctctggttcaatccctgtgcatgttgctggggttgccctgtgcggygggggtaggttaaggaaacgccgggttctgagtgtggtctctgcgccgtggtcagcagagcctttgtggcctgggtgtgatgctgagggccaggcttgagcggagctgctgtgacatggatcagtaggaatct

SEQ ID NO: 479725 - DNA, 549 bp, Homo sapiens
ggctaatttttaaattgtttgtagagacagggtcatgctgtgttgcccaggcagatctcaaactcccgggctcaagccatcctcctgattgacgttccaaagtgctgggattacaggtgggagccccctcaccaggcttcaagttgctttttatgtttcctgatatgacaaataatttcaaatatgttctggagatttcggttattatgtaaggaaactttttatcctatttgaacattccagttcagtccatggtacccttatttggtttaccatataggccccagcctgctttaggggaaatgtagagtcaatgacaatttagttttcaaagccctcccagtgctattctggtctcgtttgttcttctggatctgctggggctctggttcaatccctgtgcatgttgctggggttgccctgtgcggcgggggtaggttaaggaaacgccgggtkctgagtgtggtctctgcgccgtggtcagcagagcctttgtggcctgggtgtgatgctgagggccaggcttgagcggagctgctgtgacatgga

SEQ ID NO: 479726 - DNA, 561 bp, Homo sapiens
gctaatttttaaattgtttgtagagacagggtcatgctgtgttgcccaggcagatctcaaactcccgggctcaagccatcctcctgattgacgttccaaagtgctgggattacaggtgggagccccctcaccaggcttcaagttgctttttatgtttcctgatatgacaaataatttcaaatatgttctggagatttcggttattatgtaaggaaactttttatcctatttgaacattccagttcagtccatggtacccttatttggtttaccatataggccccagcctgctttaggggaaatgtagagtcaatgacaatttagttttcaaagccctcccagtgctattctggtctcgtttgttcttctggatctgctggggctctggttcaatccctgtgcatgttgctggggttgccctgtgcggcgggggtaggttaaggaaacgccgggttctgrgtgtggtctctgcgccgtggtcagcagagcctttgtggcctgggtgtgatgctgagggccaggcttgagcggagctgctgtgacatggatcagtaggaatct

SEQ ID NO: 479727 - DNA, 187 bp, Homo sapiens
gacagagcaagactccgtctccaaaaaaaaaaaagagagatacactccaggtagatgggactgcatgagcaasggcttgggttagaaattatggcagcatggatgagagacactgttctcatgtattttgtttcacgaggacaataataaaacttgtttactgtgatgacaattaaataagataatg

SEQ ID NO: 479728 - DNA, 187 bp, Homo sapiens
gacagagcaagactccgtctccaaaaaaaaaaaagagagatacactccaggtagatgggactgcatgagcaacggcttgggttagaaattatggcagcatggatgagagacactgttctcatgtattttgtttcacraggacaataataaaacttgtttactgtgatgacaattaaataagataatg

SEQ ID NO: 479729 - DNA, 287 bp, Homo sapiens
gagtcacctccagatcccacctgcaccatgcttcctgcggggactgcctgtcttcctaatacactgtcttctgaccagtcttccagacaaatcaccggttgctatatatatatatatatatttttttttttttaatagctaatatcttacactgatatatttatattatatataaatawttttgtactttatgtttatgctatatatacagatgtagttagctatttatgttatatataatataaacatgatgtatattcttatatttctctggggactcactgtct

SEQ ID NO: 479730 - DNA, 287 bp, Homo sapiens
gagtcacctccagatcccacctgcaccatgcttcctgcggggactgcctgtcttcctaatacactgtcttctgaccagtcttccagacaaatcaccggttgctatatatatatatatatatttttttttttttaatagctaatatcttacactgatatatttatattatatataaatatttttgtrctttatgtttatgctatatatacagatgtagttagctatttatgttatatataatataaacatgatgtatattcttatatttctctggggactcactgtct

SEQ ID NO: 479731 - DNA, 483 bp, Homo sapiens
tcttcagtgaccagctccactcattgtgcagaacttgctgaaacgtgtttctgggtcctcccctcactgccccactcacttcattccggggctcccctcacttctcatctgagggagataaattgtttcctggctggcttccctgagttggggaccctggacggcggggagactatactcagcagagcccaggacctgtgggcacatgataactatggatgaatgaatgaatgaatgaatgaagcatcttgtgggcaccatttgtgagtgaatgaatgagtgaatgtggcaccttgttaggtactcggtaactttgtgaatgaatgaatgagtggcagtagctgaatgaatgaatgaattcacactgggtctggcggtcactgtgggrggctcagaggaaaccagcagtttcccttcagagggaagggggccttttgaagggcgctgggggctcctggaggggtggatatggcaggacaccac

SEQ ID NO: 479732 - DNA, 421 bp, Homo sapiens
tgaaggagcgaggccgcagcgtctcccgccagtgaaagtagctcaggtagcgggcgtggtccttgtccagctcctgcaggtaccgggccaggtccttggggctctggaagtcgtccacgtggatgaaggcgtcgggtggcaggaacctctcgtagttgcttctgctggggcccagcaccacgggcacggcccaggcctccagggcgttcctccacagcttctcggtgatgtagtcggggtgcaaggagttctcgaaggccagatagaacttgtaccgggacagcgtctccatcatggtccccttgggcaggggcttgtgggagcgtccgtacacgtccaccttgagatgagcctgcaggctctggtagtagcgcaccctggcygagtccggcttccagttggacaccgcccaggccaccag

SEQ ID NO: 479733 - DNA, 567 bp, Homo sapiens
taaacaggcaaaagtagaagcagtgagaccaacttggaagttggtactattttctgagtgatgagtaatgctgacttgaaatagaatgacagaataaacatttcagaacttagttgtatttatttcaaatactaagccaagagaaattgctagcagattgatcatggagagatgtaaaaaaaaaaaaaaagaccaatgaatacaattaaattttaatctgtgcaaytggcataattgagttactattcagagaaagggataagtttggggaaagataccacttttcttcatatagaaataaaaaatttaggttttgcacaatatttaatttgaaatgccctatcagatttataattggtaagcaccactttaagttaatccattaaaaagagaaaatttatttttgtggagactgtatcttcttaccctgaaaaataaacctcgatacattttatttcatttatgttcagtaaaattatatttcatgtttcctgaaaaaacatatgcaagtattgattttaaaagaagtaatgacataaaagcattgacctcatatttgtctttttc

SEQ ID NO: 479734 - DNA, 634 bp, Homo sapiens
atactggatctgaattcattttgccataggctgttacaattatcctaatagatatgatttttaatagttttctttactatttgattcttacatctttccatttttcacatgaatgattttcattttactatttcatatctttttgtcttaaatatatttttgtcttaaatatattttcatatctggttaaatatgtatttccctcttttctctgtttgaaaagtattgttttttgtcttgtatataacatttataattgcattaccaacttaaaaatcatctttaaattttgctttccattgtttcacgacagcaaaatttggagaaggtttagatctttttccccacaccactatcattgtgtagcttttggttagtcaaagctcatttttaacattacagttgtatagttttatgacacttaggttatagaatttcattgtaaagsgtatttcaagactttattttttctatcattaattcaatattttctgatatttagttattcttggatatataagttgctatcatatatttagattatagctaactctttctttaccaaactcttattaattgtaattttcttattttcttactttttctagatgttatattattattttatatctta

SEQ ID NO: 479735 - DNA, 453 bp, Homo sapiens
actccgtcctttccataagccccacaaattcagtcattcccagacctagaaatcaccccctcctcattttcatcctttgtgctcttctacatcayccccagaccaggtctcccagtctcctgggagactcttgtaattagttcctcactggcccgcccatcccaagctgtccacctccttccctggctacctgatggaagtttccaggatgaaaatctgatcatgtcattttcttccctggaatattctaatgactcacattggaatcatgcattagatttatgcccacagacaatcctccatgcaatcgtgtggctacactcttcccttgcactccaggattccatggagttgcagccacaatgagatggaagagagaggcagggctgagggttcaagctctggaaaatattggaaacaggctgctgtggaagttatgagctgccaccagca

SEQ ID NO: 479736 - DNA, 484 bp, Homo sapiens
tttctggggttttttggataccagccatcctaatgggtgtgtcttttttttttttttttttttttttgagatggagtctcactctgtcgcccaggctggagtgcagttgtgtgatctctgctcactgcaacctcccaggttcaagttattcccctgcctcagcctcccaagtagctgggactataggtgcataccaccaggcctggctaatttttgtattttttagtagagatagggtttcaccatgttagccaggctgaytttaaactcctgacttcaattgatccgcccacctcagtctcccaaagtgttagcgttacaggcgtgagccaccgtgcctggctgattattcattttttatgtctccctgtatcatatacagatgtgtttggctaaaagtcactaaccaaccacagtgccccgaggacatgtgggattaattttcttacaaaagaaaaagacagaccgggcaccgtgactcaca

SEQ ID NO: 479737 - DNA, 484 bp, Homo sapiens
tttctggggttttttggataccagccatcctaatgggtgtgtcttttttttttttttttttttttttgagatggagtctcactctgtcgcccaggctggagtgcagttgtgtgatctctgctcactgcaacctcccaggttcaagttattcccctgcctcagcctcccaagtagctgggactataggtgcataccaccaggcctggctaatttttgtattttttagtagagatagggtttcaccatgttagccaggctgattttaaactcctgacttcaattgatccgcccacctcagtctcccaaagtgttagcrttacaggcgtgagccaccgtgcctggctgattattcattttttatgtctccctgtatcatatacagatgtgtttggctaaaagtcactaaccaaccacagtgccccgaggacatgtgggattaattttcttacaaaagaaaaagacagaccgggcaccgtgactcaca

SEQ ID NO: 479738 - DNA, 484 bp, Homo sapiens
tttctggggttttttggataccagccatcctaatgggtgtgtcttttttttttttttttttttttttgagatggagtctcactctgtcgcccaggctggagtgcagttgtgtgatctctgctcactgcaacctcccaggttcaagttattcccctgcctcagcctcccaagtagctgggactataggtgcataccaccaggcctggctaatttttgtattttttagtagagatagggtttcaccatgttagccaggctgattttaaactcctgacttcaattgatccgcccacctcagtctcccaaagtgttagcgttacaggcgtgagccaccgtgcctggctgattattcattttttatgtctccctgtatcatatacaratgtgtttggctaaaagtcactaaccaaccacagtgccccgaggacatgtgggattaattttcttacaaaagaaaaagacagaccgggcaccgtgactcaca

SEQ ID NO: 479739 - DNA, 606 bp, Homo sapiens
ccgggtcttatggcctcggaatacaccatcaagcatcaagtcactggatcatggcgatgagtgttttagcatcaaatttctccctgaaggggttggatgaagtcgctttctcagtagcaatatatgagagtgtaaaccaaaaataaaattctaagccccccaccacccaaccatctgaatagacctctcctgtcagccagggcactccaaagttaacctgaaaaatgggttcagtccctgatgggaagtgggggtcggacatgcctccttataccctcctcccttttggaattcaggaaaagctgactagcagtcatgtcaacacaaatttttttttttttttttgagatggagttttgctctttttgcccaggctggagtgcaatggcgcgatctcagctcaccgcaacctcsgcctcctgggtttaagcgattctcctgcctcccgagtagctgggattacaggcatgcgccaccacgcctggctaattttgtatttttagtagagacagggtttctccatgttggtcaggctggtctcaaactcctgacctcgtgatctacccaccttggcctcccaaagtgttgggattacaggcgtgagcc

SEQ ID NO: 479740 - DNA, 606 bp, Homo sapiens
ccgggtcttatggcctcggaatacaccatcaagcatcaagtcactggatcatggcgatgagtgttttagcatcaaatttctccctgaaggggttggatgaagtcgctttctcagtagcaatatatgagagtgtaaaccaaaaataaaattctaagccccccaccacccaaccatctgaatagacctctcctgtcagccagggcactccaaagttaacctgaaaaatgggttcagtccctgatgggaagtgggggtcggacatgcctccttataccctcctcccttttggaattcaggaaaagctgactagcagtcatgtcaacacaaatttttttttttttttttgagatggagttttgctctttttgcccaggctggagtgcaatggcgcgatctcagctcaccgcaacctccgcctcctgggtttaagygattctcctgcctcccgagtagctgggattacaggcatgcgccaccacgcctggctaattttgtatttttagtagagacagggtttctccatgttggtcaggctggtctcaaactcctgacctcgtgatctacccaccttggcctcccaaagtgttgggattacaggcgtgagcc

SEQ ID NO: 479741 - DNA, 606 bp, Homo sapiens
ccgggtcttatggcctcggaatacaccatcaagcatcaagtcactggatcatggcgatgagtgttttagcatcaaatttctccctgaaggggttggatgaagtcgctttctcagtagcaatatatgagagtgtaaaccaaaaataaaattctaagccccccaccacccaaccatctgaatagacctctcctgtcagccagggcactccaaagttaacctgaaaaatgggttcagtccctgatgggaagtgggggtcggacatgcctccttataccctcctcccttttggaattcaggaaaagctgactagcagtcatgtcaacacaaatttttttttttttttttgagatggagttttgctctttttgcccaggctggagtgcaatggcgcgatctcagctcaccgcaacctccgcctcctgggtttaagcgattctcctgcctcccgagtagctgggattacaggcatgcgccaccacgccyggctaattttgtatttttagtagagacagggtttctccatgttggtcaggctggtctcaaactcctgacctcgtgatctacccaccttggcctcccaaagtgttgggattacaggcgtgagcc

SEQ ID NO: 479742 - DNA, 446 bp, Homo sapiens
aggaaataacattcgatgtgcatttcctatcccaattcattcattcatttgagaattacttattacttgctcacaaagtgtaaggatgtggggaatacaatagtaataaaatacacaatgacctacttcctatgtagctctgagtctcatcaggaaagcacgtatcatataagtgattgcaagaacattgagaatcaccaaaataacgtggtgggtattgtaacctggcaatattcaagcagtcttgcatttccccagtgccccacaatacattcttgtgcttccttttccctagctaggaagctatggaatctggttgcaggattgaaaatgtcaaccaacaatacaaaagactctcatttataaatcacagacaatattggtgttttatctaccaagaacsccagctccactgagaaaacaggggagtcaaacagacattagtc

SEQ ID NO: 479743 - DNA, 567 bp, Homo sapiens
ctggtataggaaaaatgtgatatgaagattcacagacttagcattcacaacacagtatggaaaggtgattttgtagctaagaaaaagtagctatacacccagcacatttgtcaagctttaaatacactaggaaaattcacactgaattatattgcctatatatttgaaaatttattcttgcttagaaactcagcagacaatgccttatatagtattttgattaaacctctgtatttataaaagcttatcaaactaaaaaaaggataaaaataaataaatgttccatgttaaattgttgattgacaaattgactccattgcgttaggttatgtatcttgcatgttactttgtgaatgttcaagctcaatcactacttaaattaactctcggtgttatctagatttaagtataccttaattatcttgattccagcagtttgaatggtcatgaagctttattacgtttrcaattgttatcaagttttaaaaaagacaacaattatatacatggcaccaattaatcctctgccattattggagaaatctggatttaccacctaagctactc

SEQ ID NO: 479744 - DNA, 599 bp, Homo sapiens
tgggtatggatgatacataaaagaaagttgttgggtgggacttccagcaaaattctgtaaagaagtacacacatatttctcattaaaggcacccagcactccctggagaaatagctaattctaggactgcagtagagaatgtacatgaataaacctggaatatcttgttgtagcagaagtttcaaaagtgttttaaggccaggcgyggtggcttacgcctgtaatcccagcactttgggaggccaaggcgagtggatcacaaggtcaggagatcgagaccatcctggctaacacagtgaaaccccgtctctactaaaaatacaaaaaattagccgggtgtggtggcgcacgcctgtagtcccagctacttgggaggctgaggcagaagaattgtttgaatccgggaggcggaggttgcagtgagctgagattgcaccactgcactccagccgggtgacagagcaagactccatctcaaaaaaaaaaaaaagtgttttaaaaataaaagatgattctaaaaaggtacaaatgcaattcagtaagagaggatagtcttttcaacaaataatgccagaacaatttaatacacacatgtaact

SEQ ID NO: 479745 - DNA, 598 bp, Homo sapiens
gtatggatgatacataaaagaaagttgttgggtgggacttccagcaaaattctgtaaagaagtacacacatatttctcattaaaggcacccagcactccctggagaaatagctaattctaggactgcagtagagaatgtacatgaataaacctggaatatcttgttgtagcagaagtttcaaaagtgttttaaggccaggcgcggtggcttacgcctgtaatcccagcactttgggaggccaaggcgagtggatcacaaggtcaggagatcgagaccakcctggctaacacagtgaaaccccgtctctactaaaaatacaaaaaattagccgggtgtggtggcgcacgcctgtagtcccagctacttgggaggctgaggcagaagaattgtttgaatccgggaggcggaggttgcagtgagctgagattgcaccactgcactccagccgggtgacagagcaagactccatctcaaaaaaaaaaaaaagtgttttaaaaataaaagatgattctaaaaaggtacaaatgcaattcagtaagagaggatagtcttttcaacaaataatgccagaacaatttaatacacacatgtaacttc

SEQ ID NO: 479746 - DNA, 305 bp, Homo sapiens
cccttgcttccccttttggaaacctctctcccagcctcatccctccctctttccagctctgaccctaaagctctgactgtcccaggctggtgactcctcaggaaccgggtgggggctgaatacagggggtgggggtcgagcaattggcsgatcaggcccccttcctgaccctgaggtccaaccgcctggcgagtctcagactctttggggatttcctgcagcctctataaataacccccatggctgcttcccacaaaccacctcacccttcttggaaaaaaaggattgtagccaaggacctcagg

SEQ ID NO: 479747 - DNA, 584 bp, Homo sapiens
tgcctgagggcctgccgccgctgcgcctctgtttccgcgtggataaggtccgccagcccctccacttcggtcaggttcagcttcccattggcgaacgcccgtctggtgaactcgcctgcctccgccggtcgaagccctggcacgctgcctgcaggaaggtcccagtctgacaccccctggtccccacccaggcccattgggaggaccaagcatctcacccaacgctgcaactcacccaaggcctgcaggacgccgctcaccactgccgggcctccatgcacgtggaactccacgcagtcctcaccggtgaaactctggggacctaatgtgacagacaggtgacaggaggacagcacagccagtgcaaacccttggaagggggaaactgagtcatgggacctacaggaggctcggaacctggggaccctcacctgggaaccagagcaccagtgcgcggtccagaggctccccggagcggggatcgctgagcaggcgcaggctggcgtggcgagcaaggggcaggtctcggggtgckgtgagaattcggagggcgtggccgctggcggggccgctggtccggatca

SEQ ID NO: 479748 - DNA, 578 bp, Homo sapiens
cagctccaggccgcggcggcagccccasgcggcggccacatgcagcggcgtcagtgcctcgacagatctggggcggcagcgcaagaggggtcattgcggactcagcctcccggcaggaaccccgatctccgctctggggacctggagccttcgttctcggcctcccggatctccgccgtccaccctggtacactgcccttggaacctagatgctatgacctcaggccaggacccaaacctctgccgtctgaccctggtgcctccactccaatatccgaacccttgatccccactttggtcctagcgcagccccattccacgccctcggtctgggaccccagcgcctccctcgagccctagcccctgcccttggacccccaagttccctccccaagatcccctaaaccccaccctcgagccccgaggcctggcccgggatgatggggcgccccttcccggattcccagacttcggcttggggagaccccgccccggacccaggctctatcttaccgagcgttggggtccccgccttggcgcagtagggccccgaggcaacgcaggccgcgcgggtgccg

SEQ ID NO: 479749 - DNA, 578 bp, Homo sapiens
cagctccaggccgcggcggcagccccacgcggcggccacatgcagcggcgtcagtgcctcgacagatctggggcggcagcgcaagaggggtcattgcggactcagccwcccggcaggaaccccgatctccgctctggggacctggagccttcgttctcggcctcccggatctccgccgtccaccctggtacactgcccttggaacctagatgctatgacctcaggccaggacccaaacctctgccgtctgaccctggtgcctccactccaatatccgaacccttgatccccactttggtcctagcgcagccccattccacgccctcggtctgggaccccagcgcctccctcgagccctagcccctgcccttggacccccaagttccctccccaagatcccctaaaccccaccctcgagccccgaggcctggcccgggatgatggggcgccccttcccggattcccagacttcggcttggggagaccccgccccggacccaggctctatcttaccgagcgttggggtccccgccttggcgcagtagggccccgaggcaacgcaggccgcgcgggtgccg

SEQ ID NO: 479750 - DNA, 578 bp, Homo sapiens
cagctccaggccgcggcggcagccccacgcggcggccacatgcagcggcgtcagtgcctcgacagatctggggcggcagcgcaagaggggtcattgcggactcagcctcccggcaggaaccccgatctccgctctggggacctggagccttcgttctcggcctcccggatctccgccgtccaccctggtacactgcccttggaasctagatgctatgacctcaggccaggacccaaacctctgccgtctgaccctggtgcctccactccaatatccgaacccttgatccccactttggtcctagcgcagccccattccacgccctcggtctgggaccccagcgcctccctcgagccctagcccctgcccttggacccccaagttccctccccaagatcccctaaaccccaccctcgagccccgaggcctggcccgggatgatggggcgccccttcccggattcccagacttcggcttggggagaccccgccccggacccaggctctatcttaccgagcgttggggtccccgccttggcgcagtagggccccgaggcaacgcaggccgcgcgggtgccg

SEQ ID NO: 479751 - DNA, 578 bp, Homo sapiens
cagctccaggccgcggcggcagccccacgcggcggccacatgcagcggcgtcagtgcctcgacagatctggggcggcagcgcaagaggggtcattgcggactcagcctcccggcaggaaccccgatctccgctctggggacctggagccttcgttctcggcctcccggatctccgccgtccaccctggtacactgcccttggaacctagatgctatgacctcaggccaggacccaaacctctgccgtctgaccctggtgcctccactccaatatccgaacccttgatccccactttggtcctagcgcagccccattccacgccctcggtctgggaccccagcgcctccctcgagccctagcccctgcccttggacccccaagttccctccccaagatcccctaaaccccaccctcgagccccgaggcctggcccgggatgatggggcgccccttcccggattcccagacttcggcttggggagaccccgccccggacccaggctctatcttaccgarcgttggggtccccgccttggcgcagtagggccccgaggcaacgcaggccgcgcgggtgccg

SEQ ID NO: 479752 - DNA, 625 bp, Homo sapiens
gtctgctagcatggaggaaggagcttccccatttagttcccagactcacaggcccatctcctctggaaactcactcacagacataccagaagtaaggctttaccacttctttaggttctccttaatccaaccaagttgatacctaaattaagatgaagatatttcagccactgygagttttgcagtttggatacctacatgcacttgtctcttgttggctgccagactgcacattgatgggataaattaaaatattctggagctgagtcaatgcccttacaaacctcaatagattcatcatcttaggtttgccttagattgaatccttactagttgattacatatgcacttcaaaagaggaccccaatctcccccattttgatattgtttgttataatcagtttagcagagttgtgcaacatcagtgagccttgtcaactggtgcttattgttgcccttacatttccctgaaggcctgagctatctgtgaactagtggccatgcagtgttctgaaggaacagcaagagaacagtcgtaaatgcctaaacaaggttctcctgaccattactaccacagtgactcgactcaaggatgcagagttcaccgagaaagctgatatgtgaa

SEQ ID NO: 479753 - DNA, 625 bp, Homo sapiens
gtctgctagcatggaggaaggagcttccccatttagttcccagactcacaggcccatctcctctggaaactcactcacagacataccagaagtaaggctttaccacttctttaggttctccttaatccaaccaagttgatacctaaattaagatgaagatatttcagccactgtgagttttgcagtttggatacctacatgcacttgtctcttgttggctgccagactgcacattgatgggataaattaaaatattctggagctgagtcaatgcccttacaaacctcaatagattcatcatcttaggtttgccttagattgaatccttactagttgattacatatgcacttcaaaagaggaccccaatctcccccattttgatattgtttgttataatcagtttagcagagttgtgcaacatcagtgagccttgtcaactggtgcttattgttgcccttacatttccctraaggcctgagctatctgtgaactagtggccatgcagtgttctgaaggaacagcaagagaacagtcgtaaatgcctaaacaaggttctcctgaccattactaccacagtgactcgactcaaggatgcagagttcaccgagaaagctgatatgtgaa

SEQ ID NO: 479754 - DNA, 632 bp, Homo sapiens
ctgattaataatttacagttggcattcacgacctcaggctcatgaataattgacgtgttcatttaagatttgcaactgttctgtataatgataaagtgcgccaatctgagcctctccggcatttcaacagtgaaagtttgcartgaaatcaggcttttttttggttttgcagaggttgaaagtaaagcttataatcaaataatggaggataatagttgtatgtgccagatgctctctctgttgagacaaggaagagtaactggcacatagggaagccacaatcctcataccagcactaagaagtggattttattggcttcatttgtagttgaaggaaaggggctcaggaaatctaattaaattcctgttacctctctggccttttaaagttatataggagtagtaggaagtataaaaatatatatgtgtacatatgtgtgtgcatatacacactgtatatgtacactacatacatgtatttctgatcactatctatttaattattatagtgtttcaagaaaaaaaaacaataaaaaacaatgatacaactagtctaagtttttgtgtggctatcaattgtcaaattggtcacaccaaaatgcccatttttaacctcatatttttcagggaat

SEQ ID NO: 479755 - DNA, 632 bp, Homo sapiens
ctgattaataatttacagttggcattcacgacctcaggctcatgaataattgacgtgttcatttaagatttgcaactgttctgtataatgataaagtgcgccaatctgagcctctccggcatttcaacagtgaaagtttgcagtgaaatcaggctttyttttggttttgcagaggttgaaagtaaagcttataatcaaataatggaggataatagttgtatgtgccagatgctctctctgttgagacaaggaagagtaactggcacatagggaagccacaatcctcataccagcactaagaagtggattttattggcttcatttgtagttgaaggaaaggggctcaggaaatctaattaaattcctgttacctctctggccttttaaagttatataggagtagtaggaagtataaaaatatatatgtgtacatatgtgtgtgcatatacacactgtatatgtacactacatacatgtatttctgatcactatctatttaattattatagtgtttcaagaaaaaaaaacaataaaaaacaatgatacaactagtctaagtttttgtgtggctatcaattgtcaaattggtcacaccaaaatgcccatttttaacctcatatttttcagggaat

SEQ ID NO: 479756 - DNA, 632 bp, Homo sapiens
ctgattaataatttacagttggcattcacgacctcaggctcatgaataattgacgtgttcatttaagatttgcaactgttctgtataatgataaagtgcgccaatctgagcctctccggcatttcaacagtgaaagtttgcagtgaaatcaggcttttttttggttttgcagaggttgaaagtaaagcttataatcaaataatggaggataatarttgtatgtgccagatgctctctctgttgagacaaggaagagtaactggcacatagggaagccacaatcctcataccagcactaagaagtggattttattggcttcatttgtagttgaaggaaaggggctcaggaaatctaattaaattcctgttacctctctggccttttaaagttatataggagtagtaggaagtataaaaatatatatgtgtacatatgtgtgtgcatatacacactgtatatgtacactacatacatgtatttctgatcactatctatttaattattatagtgtttcaagaaaaaaaaacaataaaaaacaatgatacaactagtctaagtttttgtgtggctatcaattgtcaaattggtcacaccaaaatgcccatttttaacctcatatttttcagggaat

SEQ ID NO: 479757 - DNA, 624 bp, Homo sapiens
aaaagccaatatactatgaataacagtaggagggaaatttcctggctccttgatgacatagatgcgcttctgcactaacctatcctgaaatacattatctccaacttccagttgtatgggacattgaactccttattggttgggtgctctttagtatgcagtcaaaaaaggttttttcccacaaggtatatatttcactgaaacagcaagtagagacaatactatgaaactcctaatgaagaggcaataataaattttgaaaccataactgatgtctcaaataaatagtttaagcccttttcttgaaattattctacgtagctcattcattcaaaatatgcaagaaattccacataaacagaactggccytccactttcctgatgcttctgtttttgactttataatcttaaaataattgggaatcttttttctcagaatcattcttctgaaaatatgtatgtgtatgaaaggagttctgccctatttcaaaatttaatatcaggtagtttatattaccttttctgattttaatcaaacgcttatgccatatgttaatataattttcatgtcagtttccctagcagaaaaacaaagtcccatttaagacatctgcatcaccaac

SEQ ID NO: 479758 - DNA, 624 bp, Homo sapiens
aaaagccaatatactatgaataacagtaggagggaaatttcctggctccttgatgacatagatgcgcttctgcactaacctatcctgaaatacattatctccaacttccagttgtatgggacattgaactccttattggttgggtgctctttagtatgcagtcaaaaaaggttttttcccacaaggtatatatttcactgaaacagcaagtagagacaatactatgaaactcctaatgaagaggcaataataaattttgaaaccataactgatgtctcaaataaatagtttaagcccttttcttgaaattattctacgtagctcattcattcaaaatatgcaagaaattccacataaacagaactggccttccactttcctgatgcttctgtttttgactttataatcttaaaataattgggaatcttttttctcagaatcattcttctgaaaatatgtatgtgtatgaaaggagttctgccctatttcaaaatttaatatcaggtagtttatattaccttttctgattttaatcaaacgcttatgccatatgttaatataatttkcatgtcagtttccctagcagaaaaacaaagtcccatttaagacatctgcatcaccaac

SEQ ID NO: 479759 - DNA, 490 bp, Homo sapiens
ctgcttgggagactgaggcaggagaatcacttgaacctgggaggcaaaggttggagttagccaagaytgcgccactgcactccagcctgggcaacagacagactccttctcaagaaagaaaaaaaaaaaaaagaaagaaagaaatgaaagaagtctaaagagtaactccaacccacaaatatacaaaaagttctccagtaaaggtaaataaaaagacagataagctgggcgcggtggttcacacctgtaatcccagcactttaagaggccaaggcaggcggatcaccacctgagaggcagaagttcgagaccagtctgaccaacaaggagaaaccctgtctctactaaaaatacaaaattagccaggcatggtggcacaggcctgtaatcccagctactcggaaaactgaggcaggagaatcacttaaacccagaagtcggaggttgcagtgacctgagattgtgccattgcactccagcctaggcaaca

SEQ ID NO: 479760 - DNA, 438 bp, Homo sapiens
cccaaaagctgccattgtctgggggactcctttacagcggagagctaagaagttggctacaatcaggtgcttaacaatcaaatctgtggaccttaacctgyacccagtgcagtaaagggagagataatggagaagaagagagaagctccccaggactcccaccacggtctgtgataagaagatcattcccactgccacataccgggaggccattctgccactgatgtctgtcactgatgtttgtcttcagggctgggaggtcctgcatggaaataggaggcatgagctacgtttatagtgtcacctgcaacccagcattctccacctcccattgctctgcccttagaaatacttaaagtcactcttctcttaagaggcttttgagagttgaatgcgtaacctttaaagagcacttcccatgtgggaatcactgctgtg

SEQ ID NO: 479761 - DNA, 438 bp, Homo sapiens
cccaaaagctgccattgtctgggggactcctttacagcggagagctaagaagttggctacaatcaggtgcttaacaatcaaatctgtggaccttaacctgtacccagtgcagtaaarggagagataatggagaagaagagagaagctccccaggactcccaccacggtctgtgataagaagatcattcccactgccacataccgggaggccattctgccactgatgtctgtcactgatgtttgtcttcagggctgggaggtcctgcatggaaataggaggcatgagctacgtttatagtgtcacctgcaacccagcattctccacctcccattgctctgcccttagaaatacttaaagtcactcttctcttaagaggcttttgagagttgaatgcgtaacctttaaagagcacttcccatgtgggaatcactgctgtg

SEQ ID NO: 479762 - DNA, 438 bp, Homo sapiens
cccaaaagctgccattgtctgggggactcctttacagcggagagctaagaagttggctacaatcaggtgcttaacaatcaaatctgtggaccttaacctgtacccagtgcagtaaagggagagataatggagaagaasagagaagctccccaggactcccaccacggtctgtgataagaagatcattcccactgccacataccgggaggccattctgccactgatgtctgtcactgatgtttgtcttcagggctgggaggtcctgcatggaaataggaggcatgagctacgtttatagtgtcacctgcaacccagcattctccacctcccattgctctgcccttagaaatacttaaagtcactcttctcttaagaggcttttgagagttgaatgcgtaacctttaaagagcacttcccatgtgggaatcactgctgtg

SEQ ID NO: 479763 - DNA, 506 bp, Homo sapiens
ttttcctggagggagaggcaggcatatgtgctgagcacagaactacagatggtgaaaaggcaagagttctgagaaggtcacattcccaagacccatgtatatagggccccctaagactgaagtttaatcaaaacaacagagactgtcccctctgctccctagtaccaagctaacacgcatcagataaaaagtaacagtggggtgctgctaggaagttgtaagaacggggagacagaccctctcaacagcataatgcaaataagagaactaaagctgagtgtggaccagatagaggaacctgctcaggaaaaccaggccccacccaaaactaaagatrtggttagagaaatctgaagcatgtggtacaccaagaataagcattagcatgaattaaactgcaaatccaaacaatatcctcagtagattaacccaaacctccacaaaaaatgcctagcataagggaaggcatgcttacttacaggcatgaaaactactatttccacttt

SEQ ID NO: 479764 - DNA, 637 bp, Homo sapiens
ctgctaattaattccacccayatcctctttcttttttcttatgaaccatcttctgggaattctgatccttggtcttctattaagttgcttttggttcttactaatatttctagattgaggggctagaatgttatacctgtctccaccacccatcttcagcttttttgtcacttttcggtcagctttttagagagcagggtttccaatacctgtcctcttccttgctgccaagctcaagataatagatgttactttctgatggatcctttcctttgtctcagtatagaagttctcataggtcgatctgctaaatgcagcctaggagctgaggccaatatctgagtttcctcagtacacaagtctgagataagtcctagcaacctcaagctcagaactatggcggcagcagctccctctccatgtcaaagccttcctgcctttccagggagaggcatggaccaaagcccatgggcactgaggagtgaactgctgcccaccctggtgtgtgcaaccctacctcctccttctgcctctactgacctgatatttctttagaaatacagttctttctgaaattttgtagcctttcagtctattcaatgccacatgtgagaaaccatagccaaagatagtatgg

SEQ ID NO: 479765 - DNA, 637 bp, Homo sapiens
ctgctaattaattccacccacatcctctttcttttttcttatgaaccatcttctgggaattctgatccttggtcttctattaagttgcttttggttcttactaatatttctagattgaggggctagaatgttatacctgtctccaccacccatcttcagcttttttgtcacttttcggtcagctttttagagagcagggyttccaatacctgtcctcttccttgctgccaagctcaagataatagatgttactttctgatggatcctttcctttgtctcagtatagaagttctcataggtcgatctgctaaatgcagcctaggagctgaggccaatatctgagtttcctcagtacacaagtctgagataagtcctagcaacctcaagctcagaactatggcggcagcagctccctctccatgtcaaagccttcctgcctttccagggagaggcatggaccaaagcccatgggcactgaggagtgaactgctgcccaccctggtgtgtgcaaccctacctcctccttctgcctctactgacctgatatttctttagaaatacagttctttctgaaattttgtagcctttcagtctattcaatgccacatgtgagaaaccatagccaaagatagtatgg

SEQ ID NO: 479766 - DNA, 603 bp, Homo sapiens
gggctgtgaggagcagatttgggcatatgagaccagagcctgagataacaggggggccaggaagagaagttcctccaagtcaggtgatgagctgtgatcccaggtctgactcattcactctatgccggcacagtgtgggtggccgtggcccatgggtgctatctgcattcaggaagaagtgaaaggcctgttgaggcagggtaggggtgccggctgggattccatatgtcacaaaggcagacagacatgcaggtcacagactctgagagcttcattttggggtggggtagagtagggttgccayataaaataccagacagtttaatttgaatttcagataaacaatgaataatattttagtataaatatgtcccaactattacatgggacatacctacattaagatatactacaatatttggagcatacttatattaaaacattatttcttgttttcagaaattcatttttaactgggagctatacattcttatttgctgaatcttacaaccctacatgggtgggaaatgaggagtctccggagacattaggatgttaaaattaaccttcttcctgtggtcccagtctcagtcatgcaggagt

SEQ ID NO: 479767 - DNA, 603 bp, Homo sapiens
gggctgtgaggagcagatttgggcatatgagaccagagcctgagataacaggggggccaggaagagaagttcctccaagtcaggtgatgagctgtgatcccaggtctgactcattcactctatgccggcacagtgtgggtggccgtggcccatgggtgctatctgcattcaggaagaagtgaaaggcctgttgaggcagggtaggggtgccggctgggattccatatgtcacaaaggcagacagacatgcaggtcacagactctgagagcttcattttggggtggggtagagtagggttgccatataaaataccagacagtttaatttgaatttcagataaacaatgaataatattttagtataaatatgtcccarctattacatgggacatacctacattaagatatactacaatatttggagcatacttatattaaaacattatttcttgttttcagaaattcatttttaactgggagctatacattcttatttgctgaatcttacaaccctacatgggtgggaaatgaggagtctccggagacattaggatgttaaaattaaccttcttcctgtggtcccagtctcagtcatgcaggagt

SEQ ID NO: 479768 - DNA, 560 bp, Homo sapiens
tcccactaaaatcccttaggattcgattcttttagagaagaaaaacaaatctaggaccataatcctcaaacttttggactcaggacaactttaccctcttaaaaattatggaacatcccaaakagcttttgtttttgtggattatatctattgatattcactgtaatggaaactaaaattatgtaatttctaaaaatatttacttattttaaaataataacagattcattaaatgttaacatcttttaatgaaaaatagctatattttctagaataaaaaaggtaatgagtgaaatggcttttttacacttctgagaatctcttcaatgtatgcttaatagaagaaagctggatcctcctatctacttctgcattttttttgttatgatagcatttgtcatttagcctctggaaaattccactgcacattcatgagagaatgaatagaaaaagtcaaataacatttcagtattattacaaaagcagttttgatcttgtggactctatgaaaaggacttgtggtgggggaggtccctaagcatccccttgtccatactttc

SEQ ID NO: 479769 - DNA, 570 bp, Homo sapiens
actaaaatcccttaggattcgattcttttagagaagaaaaacaaatctaggaccataatcctcaaacttttggactcaggacaactttaccctcttaaaaattatggaacatcccaaagagcttttgtttttgtggattatatctattgatattcactgtaatggaaactaaaattatgtaatttctaaaaatatttacttattttaaaataataacagattcattaaatgttaacatcttttaatgaaaaatagctatattttctagaataaaaaaggtaatgagtgaaatggcttttttacacttctgagaatctcttcaatgtatgcttaatagaagaaagctggatcctcctatctacttctgcatttkttttgttatgatagcatttgtcatttagcctctggaaaattccactgcacattcatgagagaatgaatagaaaaagtcaaataacatttcagtattattacaaaagcagttttgatcttgtggactctatgaaaaggacttgtggtgggggaggtccctaagcatccccttgtccatactttcagaagtgctggttt

SEQ ID NO: 479770 - DNA, 570 bp, Homo sapiens
actaaaatcccttaggattcgattcttttagagaagaaaaacaaatctaggaccataatcctcaaacttttggactcaggacaactttaccctcttaaaaattatggaacatcccaaagagcttttgtttttgtggattatatctattgatattcactgtaatggaaactaaaattatgtaatttctaaaaatatttacttattttaaaataataacagattcattaaatgttaacatcttttaatgaaaaatagctatattttctagaataaaaaaggtaatgagtgaaatggcttttttacacttctgagaatctcttcaatgtatgcttaatagaagaaagctggatcctcctatctacttctgcattttktttgttatgatagcatttgtcatttagcctctggaaaattccactgcacattcatgagagaatgaatagaaaaagtcaaataacatttcagtattattacaaaagcagttttgatcttgtggactctatgaaaaggacttgtggtgggggaggtccctaagcatccccttgtccatactttcagaagtgctggttt

SEQ ID NO: 479771 - DNA, 531 bp, Homo sapiens
tgtgtcactctgccgtatttccacagctttctgtacatgaaaggtatgactgcagccgccatggagtctgggttagggggagagcgaggygttattttatccgggctgatggatggcggtgggaaataacggaggtgttattgtatctgggctgatggatggggactgggaaagtcgttctacctacccttacctcagtgttgggccacttagatgaatgaagggacaccttgtcatgttggtgtgacatgggtgctgtggtcctaccagcatgaacacagtcgtgactcccctggtttggtgcagagtggcaggacgaagcatttgcaaccactgcctccagtatcagtccttctcccctgtctctccctgtctcgttttcctttcttagctctttcttcatccttctattttctctccctctctctcccactttctctttcactgtctccctctctgtctcagtctcattgctctctctcatatatacagacatacaaaccaatgtgtgtgttgctgctgctgctggaa

SEQ ID NO: 479772 - DNA, 641 bp, Homo sapiens
tgacctaggacaaaccacatgctctttctgaccttgaatgaaatgtgaccaactgagaaagcactgtgagggatgtctgacacatcagaggtgcttagtgaagggtactttccttcccactgggccycagtcttcccatatgtaaggtgaaggtggttgagatcttttttgtctttaactgcctaagaatttgggtctgatatcataggtactgattaaaaggggtatcctttttgggactggccaggtgagtcaaagcctcagggtgagtaggactcccacaggattaacggtcatcacccaagagagttgctatccactgtcacccatggcagagtgcagggtcctgagggagtgggcgcgggaggaggcaacatagagaggtggccgggatgatggactccaaaccaactttgccacaaattagcagtggggctttgctgtctccagctttagctgatccaactggaaaataggaggaccgctcttgaggattctaaggagtggaccatggtaaggaatccggtgaaggggcgtggaggcagagggttctgggaaattcaggagaaagtgggcagttaggaatggaagagtgactcaaacttcatctatctcatagctgaggccagattttaccttta

SEQ ID NO: 479773 - DNA, 622 bp, Homo sapiens
tgccattgtccctaccacagatgtcttcattcctccaagtcccgccaactgctaggtggcctggcttaagattcctctctttctctccatccatatccctcctttgactcaacgctaggaacaatttaccctcacgtatgcatttatttcagaatgagtggcattttcttctcagcattagttacaatcttctcatagacgaagaccctggctcctacttctttgacagcccgctttgcgctaatctgaggaatgtacctcctgctgctcactctctcttgtgcatgtgctcactgaggaaatgccatactgaattgcccacacaatttcctctctccctacacagaggtgaattcccttagctcrgtgattctcaaagcccagcatcagcatcacctagaaacttgataaaatgcagattctcaagccctatcccagagtgactgaacctgaaattctgagagtagagcccagtaatctgtattttaacaagccctccaggtgattctgatgcacacttaaattggagaaccactgccctgtgtggttcaacttgactctaattgagatcaggggagctgtaaccctcaaactcatcactgtattacccatgcttctaaat

SEQ ID NO: 479774 - DNA, 386 bp, Homo sapiens
tttttaaaaattatattaccagataacccttcctttcatagatagtttggaaatttgaaaaaaattataaaatctacttctggatcaccagattatatctattatcttataaatatcaacagaataaggattttattctcggcattttctgtgaatagggtggttctctttcctgctcatttatccaaatatttctgaatacattcttataatttaaatattaacaacatctaacaaaaacttatatctgagataaatgaatatccacatgtagaagatgaatttggacccctgcatcacatcatacacaaaaatggactcaaagtagatcatagwcctacatataaaagctaaagctataaaactcagaagaaaatatgagagta

SEQ ID NO: 479775 - DNA, 318 bp, Homo sapiens
agcgttgcctttagttctgtttcaagagacaagtatctcaagggaagatgtttggggatgacccctatcgaggtcagatcagaaagggatggcaagaaggttaatttgaagaaaaaaaacaatgaaaatatstacaagagttgtaacacagttaaccacaagtaaaagcaacagcatcctcttagctaaatgatgctcagcacacaaagggaggacacattctggggaacacaagttaaaaagagttgcagtctacttgcttaaggtgtgcattgacagactcctaaagaggtttattacccagaggagactttgaga

SEQ ID NO: 479776 - DNA, 636 bp, Homo sapiens
atcagaaggaaaaataaaaatgaatgcacatactcaaatacctaatgtgggtatatatacatatgattatttatttcctgataatgtgaggctatgttgtaaatgactttcaaaatatgatgcttgtgtttaagtcatagtcatgacatttgtagttatcaaatgtgtgcatgacataatttttttttgttttttaccaaagattcggtgcctagaatgtgtggttcttctacaacagaagctgcttttgccaagtatgcaggcgtttccatctattatttctctcaaatcatctaataccttctttgaaacttaacttcctgagcaaaacatttatctcaccaagcatcactttcaaatgttcaaatgtctggtgttattgctatatcaacatggtaatacatgaaattattcaacaattgctatcaatgcattgcacttgatgtttctctaattttgtaaaaatcatyataccatgctagaaactcaagctttcaacagacaacaatgttattttatttaatttctcagtaacagaaaaaatatatacttgaaggttatatgcatggccaagcctacctcttacagggattaactactctctctttttttaataatcattttaattttatttat

SEQ ID NO: 479777 - DNA, 572 bp, Homo sapiens
cctgtaggtctgcccaccgaggaaaattttctccagtgcccagccctgccctcaatctcaggaagcaccttcctcaacacccaggaaagtccatagccttgtaattgagtgcaaattcccctttatctgctctactttgtcttgagtaagcccacatttggcctttagtatttagttaaaaattttatctgaattgctttttacccacttgtattccagccacaatttcccctttgctctgccaagggtaagcccgtgtgtgcatcctggttctttttgaagacatctgtcatttctccagtttcagattagttgtgtgctctggagcctaatctctctgaaggatttgagaaaaatatgaccttccagattacctgcatctttcttattgcctaggtgagaacawtgctctttccagctctctgtaaactgggtggaaaccggaatttcccgactttttatgtagacaaattgttccatgggacaattcttgactgctttctgtaagatgaaaataccacattccttcaaagttaagtgggtctgaatttcttcatttttatgcaaagttt

SEQ ID NO: 479778 - DNA, 580 bp, Homo sapiens
gtgctagaatatactaggtagagaaaaatgggatagctggcaatgaactctagatactggagtcacatctcagcagaggagagaaaggtggagcagaaagtactagctctgctttccctgcaagagtatccattatttgaaacctataaaattcaaaagcagagtaaaggcaaaattttataaaaaagtattgagcaagtacaaaggcctgactgaaccccatggcaacagaggctacaaaaatttcattagtgacaacttccgtccactaatctgctgarggtgtttcaccatcttgtcacataaattaatgataagaatatataaatgttattctataaaagataagttattatatcttttataattttagttctattgatattcaaggtaaagtgttccaacctcagctcatatagataccataaagccattctatattagctaaattttgtacctcaccacttacccatacattcaaatcgttaggttagtgatgactttcaaatcattggacaataaagtttttcttatttctaataaaaatgtctcatatactccacacatagactcccacttg

SEQ ID NO: 479779 - DNA, 634 bp, Homo sapiens
cttttcattttacagcacctctgtacctgtagcttaatacaagcaagcttaaaatggcacactagacatatgaacatggtgcaaggttgtatattcttataaagcattatttcttcggacattaatgcattatcagttttcaggcatcactgcaaagaacaatattccaacacagattttcacagcttttcaccaargtggatatttgcttaaatgattttttcattgaatatgtacaattcttatattgtgaactatgtattttttcttcttattttagtacaaaaattatttgtgtcatttatgtgacatgtgtagataaggacagttgcttttagaaaaatacttaaagtagaaaaacatataggactatattagtcccttgcaacttggaatttgccctgatcaggtttgaaaatctgacagtttccacctcttctaatcactgtaaacgttatgaaaagagcagaaagagaagattattagaaggctcagaataaaaaggcattttaacagtttatgtttttatagaaagtatgggcataaagttagataccagtaaagtgcggtatcttgtactacgatcttgaacaaaatttcaagaatgcaaaaacacagtcttcaggaaaataag

SEQ ID NO: 479780 - DNA, 634 bp, Homo sapiens
cttttcattttacagcacctctgtacctgtagcttaatacaagcaagcttaaaatggcacactagacatatgaacatggtgcaaggttgtatattcttataaagcattatttcttcggacattaatgcattatcagttttcaggcatcactgcaaagaacaatattccaacacagattttcacagcttttcaccaaggtggatatttgcttaaatgattttttcattgaatatgtacaattcttatattgtgaactatgtattttttcttcttattttagtacaaaaattatttgtgtcatttatgtgacatgtgtagataargacagttgcttttagaaaaatacttaaagtagaaaaacatataggactatattagtcccttgcaacttggaatttgccctgatcaggtttgaaaatctgacagtttccacctcttctaatcactgtaaacgttatgaaaagagcagaaagagaagattattagaaggctcagaataaaaaggcattttaacagtttatgtttttatagaaagtatgggcataaagttagataccagtaaagtgcggtatcttgtactacgatcttgaacaaaatttcaagaatgcaaaaacacagtcttcaggaaaataag

SEQ ID NO: 479781 - DNA, 634 bp, Homo sapiens
cttttcattttacagcacctctgtacctgtagcttaatacaagcaagcttaaaatggcacactagacatatgaacatggtgcaaggttgtatattcttataaagcattatttcttcggacattaatgcattatcagttttcaggcatcactgcaaagaacaatattccaacacagattttcacagcttttcaccaaggtggatatttgcttaaatgattttttcattgaatatgtacaattcttatattgtgaactatgtattttttcttcttattttagtacaaaaattatttgtgtcatttatgtgacatgtgtagataaggacagttgcttttagaaaaatacttaaagtagaaaaacatataggactatattagtcccttgcaacttggaatttgccctgatcargtttgaaaatctgacagtttccacctcttctaatcactgtaaacgttatgaaaagagcagaaagagaagattattagaaggctcagaataaaaaggcattttaacagtttatgtttttatagaaagtatgggcataaagttagataccagtaaagtgcggtatcttgtactacgatcttgaacaaaatttcaagaatgcaaaaacacagtcttcaggaaaataag

SEQ ID NO: 479782 - DNA, 287 bp, Homo sapiens
attcctctgtgggttttttgactctatcattgacttgcctcatggaagctgaccaggtcttataaataccttcagtatttgaytgcatagcataaattgcacgttaatctctgcattgctcattccagagagatggaaagcatgacttaaaattggattaaactggctgcgatatggattagtttgccggaaactacactgaattccatgtaaaattaagaaggcatggcaaatagatgctacagaagcaaacagaaagattcagcttcagcatggctgagcctctg

SEQ ID NO: 479783 - DNA, 513 bp, Homo sapiens
ctgagcctttaggtccgggtctttgagtggtccccaagcacacagaccccaaatcagggagaggccagacacggcgtggagaaggaaatggaaagtgggacgtctagagagtttcaggggcaaacgggagcgaggagctggcatttgcatagaatgaggaaaccaagtacttgggaagattacctttcttaaaaggaacaacaaaatcactttttcttcctcctggcagtctcgcgttggactctttatccctgtgtgtcttgcatacactctctgtctctctccagtgccttccctttcactatcatctcctttcttactcgggtcagaatgcctccgagatgtgtgccaggagccacctcttgttcaaggttgagaagtaattctgccccgggactctggttcaggaccatggagagcatcctataagggagcggtcctctcccaaaataaaacaagaaccaagaaccctgtggagagtaagggagyaggtgaagtagaagtagggcgggg

SEQ ID NO: 479784 - DNA, 563 bp, Homo sapiens
tcagctggctgttgggtccccaggccctcctgactgcacagtttagtggagacgtgcaaactcgcccagttgcacacactcacatgtacacatatgcacacgcacacacacacgcacactttcacatgggcatgccacacatacacacatatgtgcgtgctcatacccacgcacactctcacatgggcttgtcacacatacacacatgtgcgtgctcacatccacacacactctcacatgtgcacaattgcacacatgcacactctcacaggggcatgttcacacccacgcacactctcacatatgcataattgctcacatcggcatggtcatacacatgcatactcacattrtgtacacttacacacacacacacacacactcctacacatgtccacactctcatgcatgctctcacatgaaccaaaatacttgcctcttctgcctatagcagagcagaggtgcgtccgtcgatgccccatggtgtttctcaggatccacgcatcccatgtactgagtgttgttagccgggagattgcctgctcctgtgtggctgcgctctc

SEQ ID NO: 479785 - DNA, 563 bp, Homo sapiens
tcagctggctgttgggtccccaggccctcctgactgcacagtttagtggagacgtgcaaactcgcccagttgcacacactcacatgtacacatatgcacacgcacacacacacgcacactttcacatgggcatgccacacatacacacatatgtgcgtgctcatacccacgcacactctcacatgggcttgtcacacatacacacatgtgcgtgctcacatccacacacactctcacatgtgcacaattgcacacatgcacactctcacaggggcatgttcacacccacgcacactctcacatatgcataattgctcacatcggcatggtcatacacatgcatactcacattgtgtacacttacacacacacacacacacactcctacacatgtccacactctcatgcatgctctcacatgaaccaaartacttgcctcttctgcctatagcagagcagaggtgcgtccgtcgatgccccatggtgtttctcaggatccacgcatcccatgtactgagtgttgttagccgggagattgcctgctcctgtgtggctgcgctctc

SEQ ID NO: 479786 - DNA, 562 bp, Homo sapiens
ggggacagtggcctgcattcctggtgtgacttrctggtgccagggtggggaataagaaccttatcctccaaaaattagagttgtgtgttttgattgctgatccttttgacctctgggggactggcacagagtccagccattgtttcagatcacaagagctagagcagcttttctgctgtgaggggatttaaagagacatgacttccctgttccctcccctcacctcaacaattttgggagccaaacatttaaggaaatctttgtcaggtcattgactgacagagacaacggaacaggaacttcaaggaccacatgcaataagcaatcacaatttgtaaaaataatctggaaaaaaatcacagatggatggctccatccttaacaagcaaaaatccacaatccttgaggagtgtgagagttagagttccaggattaccacaataataatcagaatgcccagtactcaacaaaaaaagtacaaaacatacaaggaaataggaaagtatgacctgttcacaggaaaagaacatttgacagaaaccatccccgaagaagaccagac

SEQ ID NO: 479787 - DNA, 562 bp, Homo sapiens
ggggacagtggcctgcattcctggtgtgacttgctggtgccagggtggggaataagraccttatcctccaaaaattagagttgtgtgttttgattgctgatccttttgacctctgggggactggcacagagtccagccattgtttcagatcacaagagctagagcagcttttctgctgtgaggggatttaaagagacatgacttccctgttccctcccctcacctcaacaattttgggagccaaacatttaaggaaatctttgtcaggtcattgactgacagagacaacggaacaggaacttcaaggaccacatgcaataagcaatcacaatttgtaaaaataatctggaaaaaaatcacagatggatggctccatccttaacaagcaaaaatccacaatccttgaggagtgtgagagttagagttccaggattaccacaataataatcagaatgcccagtactcaacaaaaaaagtacaaaacatacaaggaaataggaaagtatgacctgttcacaggaaaagaacatttgacagaaaccatccccgaagaagaccagac

SEQ ID NO: 479788 - DNA, 593 bp, Homo sapiens
catcagaaaggcccctcctgacctctgggagtggggagctcaagggtgggaggccatagcttggggatgctggcaatgtgtgggatgggcccagggatggcctctggcctactaagggctctggccctgacccacggccaytcactcctcagagacgtctcccacaacctgctccgggcgctggacgttgggctcctggcgaacctctcggcgctggcagagctgtgagtgtcccccagtcgtgccagcatgcggggctcactccgggtgggctggcggcaccgcctcttgctgctcagctgtgggggcttccgtcagctttgccgaatcccccctctcttccagggatataagcaacaacaagatttctacgttagaagaaggaatatttgctaatttatttaatttaagtgaaatgtaagttgtggttctttgggtggggtcctggctggaccccaggcccccagtatcccttctgccctcccagttggtccgtgtccccttccaggcttgagaccagatcctgggggcagttcactacctgcttggagccccccagtgccggcttggttggggcaggggaggcggtgctg

SEQ ID NO: 479789 - DNA, 593 bp, Homo sapiens
catcagaaaggcccctcctgacctctgggagtggggagctcaagggtgggaggccatagcttggggatgctggcaatgtgtgggatgggcccagggatggcctctggcctactaagggctctggccctgacccacggccactcactcctcagagacgtctcccacaacctgctccgggcgctggacgttgggctcctggcgaacctctcggcgctggcagagctgtgagtgtcccccagtcgtgccagcatgcggggctcactccgggtgggctggcggcaccgcctcttgctgctcagctgtgggggcttccgtcagctttgccgaatcccccctctcttccagggatataagcaacaacaagatttctacgttagaagaaggaatatttgctaatttatttaatttaagtgaaatgtaagttgtggttctttgggtggggtcctggctggaccccaggcccccagtatcccttctgccctcccagttggtcygtgtccccttccaggcttgagaccagatcctgggggcagttcactacctgcttggagccccccagtgccggcttggttggggcaggggaggcggtgctg

SEQ ID NO: 479790 - DNA, 464 bp, Homo sapiens
gctgtggtcgccctcaacaggtgagccaggccgtgggagggcgcccccgagactgccacctgctcaccacccccctctgctcgtaggtctctggccatcaccctcccagagcccaacggcagcgcaatggggctcacagtctggctgcacgggctcaccgctagtgtgctcccagggctgctgcggcaggccgatccccagcwcgtcatcgagtactcgctggccctggtcactgtgctgaacgaggtgagtgcagcctgggaggggacctcacatctgctgcatgcgtgctggggaccaagacctgttcccctgcctggagctttgcggagggctcatcccgggccccagagataaatcccagtgaccctgaagcagcaccccgacgttccgctcccagcagccacacccaccgggccctctccggcgtctgctttccacaatgcagcccccgcccaggaggg

SEQ ID NO: 479791 - DNA, 464 bp, Homo sapiens
gctgtggtcgccctcaacaggtgagccaggccgtgggagggcgcccccgagactgccacctgctcaccacccccctctgctcgtaggtctctggccatcaccctcccagagcccaacggcagcgcaatggggctcacagtctggctgcacgggctcaccgctagtgtgctcccagggctgctgcggcaggccgatccccagctcgtcatcgagtactcgctggccctggtcactgtgctgaacgaggtgagtgcagcctggsaggggacctcacatctgctgcatgcgtgctggggaccaagacctgttcccctgcctggagctttgcggagggctcatcccgggccccagagataaatcccagtgaccctgaagcagcaccccgacgttccgctcccagcagccacacccaccgggccctctccggcgtctgctttccacaatgcagcccccgcccaggaggg

SEQ ID NO: 479792 - DNA, 464 bp, Homo sapiens
gctgtggtcgccctcaacaggtgagccaggccgtgggagggcgcccccgagactgccacctgctcaccacccccctctgctcgtaggtctctggccatcaccctcccagagcccaacggcagcgcaatggggctcacagtctggctgcacgggctcaccgctagtgtgctcccagggctgctgcggcaggccgatccccagctcgtcatcgagtactcgctggccctggtcactgtgctgaacgaggtgagtgcagcctgggaggggacctcacatctgctgcatgcgtgctggggaccaagacctgtwcccctgcctggagctttgcggagggctcatcccgggccccagagataaatcccagtgaccctgaagcagcaccccgacgttccgctcccagcagccacacccaccgggccctctccggcgtctgctttccacaatgcagcccccgcccaggaggg

SEQ ID NO: 479793 - DNA, 593 bp, Homo sapiens
aattaaatttaaagtagtttaattgagcaatgaatgattcgcgaattgggcagaccccagaatcacagcagattcatagagactccagcgcagccacgtggtggaagaagatttatggacaaaagaagggaaatgatgtacagaaatcagaagtgaagtacagaatggctggattgttacaagttggcgtttgccttatttgagtacagtttgaacactcagcagcgtatgagcggttgaactacggcctctgggattggccaagactcagctattgttacaggcgcatactcctaagttaggttttcaatcttgtctacctattaagctaggttgcaatttgtccacaaggactcaactatagaagtacgaagtcccactcaggccatatttagttcactttaacactagcttcggcaactgtctctcagagcccaggrcagggcagggatgcaactgggcttcaggaaacttgaattcattgactgtctcttccccatcttagatgcagtgctaagggctttttagtaattttctcatttgactctcaaaacaaactgatgaggaaacggtctgagagtagttaggcagct

SEQ ID NO: 479794 - DNA, 593 bp, Homo sapiens
aattaaatttaaagtagtttaattgagcaatgaatgattcgcgaattgggcagaccccagaatcacagcagattcatagagactccagcgcagccacgtggtggaagaagatttatggacaaaagaagggaaatgatgtacagaaatcagaagtgaagtacagaatggctggattgttacaagttggcgtttgccttatttgagtacagtttgaacactcagcagcgtatgagcggttgaactacggcctctgggattggccaagactcagctattgttacaggcgcatactcctaagttaggttttcaatcttgtctacctattaagctaggttgcaatttgtccacaaggactcaactatagaagtacgaagtcccactcaggccatatttagttcactttaacactagcttcggcaactgtctctcagagcccagggcagggcagggatgcaactgggcttcaggaaacttgaattcattgactgtctcttccccatcttagatgcagtgctaagggctttttagtaattttctcatttgaytctcaaaacaaactgatgaggaaacggtctgagagtagttaggcagct

SEQ ID NO: 479795 - DNA, 498 bp, Homo sapiens
ggggcaatgtaaagcctgacattgccggatgatgtcagaagcrgaacccataggcaaaagccagctttccagcactccactctcagtttcctgccatctccacttctgtggatgtgtgcccggcatctgcctctgcccctgcctctgagagcagtgactgagcaaacagtcctggacctggttgaaaggatgggcctgtctgtttctagcagagtggtctttcagaaagctgattcctgaaagttggcatcaagggaagcagagccaggaggtggaaattgagactgggtcccgctatgcatgaagccagagactcttggatttctccgttacttgaccagaggaatgccccattttgctcaagctagttggagttggatttctgttacttgaaaccaagagagccttaactaatacacaactagaaatgcatccatggtcactgcccattcatgtgacagacatttattgagcactattccagttacctaatgttgc

SEQ ID NO: 479796 - DNA, 498 bp, Homo sapiens
ggggcaatgtaaagcctgacattgccggatgatgtcagaagcggaacccataggcaaaagccagctttccagcactccactctcagtttcctgccatctccacttctgtggatgtgtgcccggcatctgcctctgcccctgcctctgagagcagtgactgagcaaacagtcctggacctggttgaaaggatgggcctgtctgtttctagcagagtggtctttcagaaagctgattcctgaaagttggcatcaagggaagcagagccaggaggtggaaattgagactgggtcccgctatgcatgaagccagagactcttggatttctccgttacttgaccagaggaatgccccattttgctcaagctagttggagttggatttctgttacttgaaaccaagagagccttaactaatacayaactagaaatgcatccatggtcactgcccattcatgtgacagacatttattgagcactattccagttacctaatgttgc

SEQ ID NO: 479797 - DNA, 524 bp, Homo sapiens
cactttcaaaccacaccttcctgccggagggataagctgccatcaatttcttttctcatacattttgagggatgctctggaaaattgtaatttaagaaggctaaagctttattttattctttctaggctttatttgaaataatggagctttcaataacatggaaataactcacttcctctttcaytccatatattcagtagaaaatggtccatttttctaaacccaatctttccaattactcttcctctaaagtgattctgtataagtctacaaaaaatacacatatatgtgtgtatctgtgtgtatacatgtatatatgtatgcatctctctatctatagatgtgtatcttttttattttgtatttttatttttttgtagagacggggtcttgctatgttgcctaggctggtcttgaacttccagactcaagagaacttcccacttcagcctccaaaagtgctgggattataggtgtgagccactgtgccttgccagacactcatgtgtatctatctatctac

SEQ ID NO: 479798 - DNA, 452 bp, Homo sapiens
tccttctaagttacccaccaaaatccaatctctcttttccattttaaatgcctctgttctgaaggggggatttctttgtccctgtttctggtcatggaatgctgccttcctaacctggcatgaagcttctttgctaatatttgcagggcacaggaaggacaaaagggagccatgccagatgtttgggggaatcacagatagggtttactcagtagagggaaatagtgtgcagttactaatgtcccacttagccgaccccttaacacacttcatttagccccacttttgcatkgagggactcagcctgcaagaggcaattggagatccaaacccagacccagactggccagccagttgactcctagaagcaatttggtccctctgttctaaactgtgcaggggtaaaaggctctgcaaagaagtgaactgggcatttagaagcaagttgctta

SEQ ID NO: 479799 - DNA, 581 bp, Homo sapiens
aatgtgcataatttgcatccatgctttgtactgtttattacatgtgattgttcacataataatatataatactatttgtattttaaccaatttacttaaatgatattgttctgtatatatgcttttgaaacatgcttttctttggacattatgttttrtagacttatccatgttaattcaatatacttatttcattttaactgctgtaagtaattagctatatgaatatagcacagtttgtctatttactactctattgatggatatgttggccttttacaatttttttataattataaacattggcaaaatgaacatatttacatacattccttgtgcacatagatgaaattttcttcattatgtatctagaagttgatgggtcatggaatatgtgcattttaaaattaactagaggttaagaaatggctctgtaaactcattaaatgaattaacaatatcattagcaatgtagaagcactaccatttcttaaccttcttgcaaactgttaacattattagattttaaatctgatctaatatatgtgaagatagtatctaacttttaaaatttgcatttg

SEQ ID NO: 479800 - DNA, 623 bp, Homo sapiens
gcctcagggaagctctgccaaccttctccttctccttggtcaacttaccctgtaatggaactcagtacctattcctattctgcatagctctccaatagcccccctcctaatacttcctacyattcaccttcactctcaacacatggctccagtggttgtgaaactccctatttctccctcccactagccattattacagcattctactttcagtctcaatgattttgtctactttaaggacctcatataagtggaatcatatattatttgtcttttgggtactggcttatttcacttaacacaacaccctcaagattcatttatgttgtagcccaatgcagaattttcagccctttttaaacactgaataccaatccattgtctgtacctaccaacttttaaaattccatttatctgtcaatggaaatgggttgcttccatgttttagctgttttgaataacgttgctatgaacataggtgtaaaaatatctcttcaagaccctcctttcaattcttttgcatatatatgcagaagtggaattgctggagcatatggcaattctatttttatttttctgagagactgccacactgttttccacagcagctcttccatttttca

SEQ ID NO: 479801 - DNA, 555 bp, Homo sapiens
cagttcaataatccacattccctcaaacaaacggctgaactggtccagggttgaggggtagagggatggtggcacttaggacaaagaggtgagagagttgtaggtgttcacgagagtagctgcttaccgtaaccagcaaaggcaagagggtacaggggtgtgtgcagagaggggggctgacaaacagggagaaagggaaggagcaaaggagctgcaagtcacartgcaattgatgaacaaatgggagagatgaaaggagaggtgacctgacggagagtggaatccaaagttgactattttaagggtattggtccacttctggatgatgacaaggtctagagtgtagccactggactaagctgatgaagagaagttaaagccagtggtgtggacattacggattgtttcagttgtttgtttgagtgaatgctgaaattaatagatctgttgctgaagtcctttataaatgtttgagagtgatcttgaaaagtaggcagggaccaaggcagcagaggggcccacagatggtccaagggtggggcctcccacaaagag

SEQ ID NO: 479802 - DNA, 555 bp, Homo sapiens
cagttcaataatccacattccctcaaacaaacggctgaactggtccagggttgaggggtagagggatggtggcacttaggacaaagaggtgagagagttgtaggtgttcacgagagtagctgcttaccgtaaccagcaaaggcaagagggtacaggggtgtgtgcagagaggggggctgacaaacagggagaaagggaaggagcaaaggagctgcaagtcacagtgcaattgatgaacaaatgggagagatgaaaggagaggtgacctgacggagagtggaatccaaagttgactattttaagggtattggtccacttctggatgatgacaaggtctagagtgtagccactrgactaagctgatgaagagaagttaaagccagtggtgtggacattacggattgtttcagttgtttgtttgagtgaatgctgaaattaatagatctgttgctgaagtcctttataaatgtttgagagtgatcttgaaaagtaggcagggaccaaggcagcagaggggcccacagatggtccaagggtggggcctcccacaaagag

SEQ ID NO: 479803 - DNA, 573 bp, Homo sapiens
gttgtggggagtttggctggtgactgaatctggaaaggacccagagtgatgtgttgaaggacgggctgaaggcatgagggagaccccatggggaggctctgacatgggaggaggagcccttgaccacgytcacctggaaggggaggactcaggaaggcatcggtgtgtttgctgtgaggtcccagctctcagggagaggaggaaagatcaggcacagtggccagggctagggagaccccactcctctgaaatgactccaagacagccccgggtgagaaggaggccctggggtcagagactcagagcgtgagagacagtgagacctgcagggccaggacgggagaaggaaggggcgtgggaggaaccagccctctcagtcctggctcctctttccctccaggcgtgtctaggaagccctccctcctgaccctgcagggccctgtcctggcccctgggcagagcctgaccctccagtgtggctctgatgtcggctacgacagatttgttctgtataaggagggggaacgtgacttcctccagcgccctggccagcagccccaggctgggctctcc

SEQ ID NO: 479804 - DNA, 573 bp, Homo sapiens
gttgtggggagtttggctggtgactgaatctggaaaggacccagagtgatgtgttgaaggacgggctgaaggcatgagggagaccccatggggaggctctgacatgggaggaggagcccttgaccacgttcacctgraaggggaggactcaggaaggcatcggtgtgtttgctgtgaggtcccagctctcagggagaggaggaaagatcaggcacagtggccagggctagggagaccccactcctctgaaatgactccaagacagccccgggtgagaaggaggccctggggtcagagactcagagcgtgagagacagtgagacctgcagggccaggacgggagaaggaaggggcgtgggaggaaccagccctctcagtcctggctcctctttccctccaggcgtgtctaggaagccctccctcctgaccctgcagggccctgtcctggcccctgggcagagcctgaccctccagtgtggctctgatgtcggctacgacagatttgttctgtataaggagggggaacgtgacttcctccagcgccctggccagcagccccaggctgggctctcc

SEQ ID NO: 479805 - DNA, 573 bp, Homo sapiens
gttgtggggagtttggctggtgactgaatctggaaaggacccagagtgatgtgttgaaggacgggctgaaggcatgagggagaccccatggggaggctctgacatgggaggaggagcccttgaccacgttcacctggamggggaggactcaggaaggcatcggtgtgtttgctgtgaggtcccagctctcagggagaggaggaaagatcaggcacagtggccagggctagggagaccccactcctctgaaatgactccaagacagccccgggtgagaaggaggccctggggtcagagactcagagcgtgagagacagtgagacctgcagggccaggacgggagaaggaaggggcgtgggaggaaccagccctctcagtcctggctcctctttccctccaggcgtgtctaggaagccctccctcctgaccctgcagggccctgtcctggcccctgggcagagcctgaccctccagtgtggctctgatgtcggctacgacagatttgttctgtataaggagggggaacgtgacttcctccagcgccctggccagcagccccaggctgggctctcc

SEQ ID NO: 479806 - DNA, 573 bp, Homo sapiens
gttgtggggagtttggctggtgactgaatctggaaaggacccagagtgatgtgttgaaggacgggctgaaggcatgagggagaccccatggggaggctctgacatgggaggaggagcccttgaccacgttcacctggaaggggaggactcaggaaggcatcggtgtgtttgctgtgaggtcccagctctcagggagaggaggaaagatcaggcacagtggccagggctagggagaccccactcctctgaaatgactccaagacagccccgggtgagaaggaggccctggggtcagagactcagagcrtgagagacagtgagacctgcagggccaggacgggagaaggaaggggcgtgggaggaaccagccctctcagtcctggctcctctttccctccaggcgtgtctaggaagccctccctcctgaccctgcagggccctgtcctggcccctgggcagagcctgaccctccagtgtggctctgatgtcggctacgacagatttgttctgtataaggagggggaacgtgacttcctccagcgccctggccagcagccccaggctgggctctcc

SEQ ID NO: 479807 - DNA, 493 bp, Homo sapiens
tgtgcatttccagcatcctatgtcatactatggcttcaatttttgttcttttttaactcaacatcagaggatatttaaacacctgaatatcaaaatacaaaaacatgtccaaaaggcaatgaaaatgagtttgggaycatttacctctttggacacttcacgcctttttgtctttacattagaaaatggaaacttaagccacgcacagtcccttatgcctggcctataaacccaatattttgggaggctgaggcaggaggatcagttgagtccagaagtttgaaactagcctcggcaacacagtgagaccgcatttgtaccaaaacaaacaaaaaagtaaaactaaattagctgggcatggtggtacatggtggattgtggtcccagctactagagctgaggaggatcacttaagcacaggaggtccaggctgcagtgagccacgaccatgccactgtgctccagcccgggagacaaagtgagatcgtcacca

SEQ ID NO: 479808 - DNA, 493 bp, Homo sapiens
tgtgcatttccagcatcctatgtcatactatggcttcaatttttgttcttttttaactcaacatcagaggatatttaaacacctgaatatcaaaatacaaaaacatgtccaaaaggcaatgaaaatgagtttgggatcatttacctctttggacacttcacgcctttttgtctttacattagaaaatggaaacttaagccacgcacagtcccttatgcctggcctataaacccaatattttgggaggctgaggcaggaggatcagttgagtccagaagtttgaaactagcctcggcaacacagtgagaccgcatttgtaccaaaacaaacaaaaaagtaaaactaaattagcygggcatggtggtacatggtggattgtggtcccagctactagagctgaggaggatcacttaagcacaggaggtccaggctgcagtgagccacgaccatgccactgtgctccagcccgggagacaaagtgagatcgtcacca

SEQ ID NO: 479809 - DNA, 636 bp, Homo sapiens
tgtttttactaacataagtgatattgggccagataggaacacatcttggtacacttttcccaaaaagaaagattaatatcaccaaattgtaaacaaatttagtcattcaacaaatatttatcaagagcctacaatgtagcgcagtcacaaagttgaggcctaaggaaaacaggtaacacatgaataatctgcaggcaacaggaagtaatcaatctgatatatttacaattaatgagatctcattggaacagagtgtccaattggtgacaaatttttaaaagatgtgtggaaactagagcagattcaaagtaaaatagtaagaatgattaacaaagaaaattaggttacataggaaaaggttatattagagttccttaacttagagaagactaagggctgacttgattatcatcttcatgactgagagaggcttkatgctgttttccttaaaggctcagatgtgagacaatgggataaaattaaagcatgtgtttagccattgatccaatcaataaacacacataataggggtatctgccttgttacgtaaaacaacagaagattgtagaagcacgaagagagtacaacatagtccctgctaatgaaaggcatttcatttggacatagaacataatt

SEQ ID NO: 479810 - DNA, 409 bp, Homo sapiens
aggaaggcaagcctggaaatgccaacctcccatcatattaattttaatgccagatgctccagcgttccctgatgtacaaagctgctggttgaagtgtgtttttatgttgttatatgaccamaggcacaaaaccctgcatgtctgcggcagccttttatgagctcttccacagactccctgtgggccttggactgcggaggtgggcatcggcgtacactcagaagacaagactctgggcagccggctttgtgtccataatcctgtgtgcgcctaagtagttcatgatgcaggcctagcagctgttgtaatgtttcatcacattaaaagcaaactatttttgcaaattaaagccttcagtaagttgatgaaaaaagcaattactgagggaaaaaggaaaaagcacaatcca

SEQ ID NO: 479811 - DNA, 589 bp, Homo sapiens
gcatgcacaatttaaaatttatggagatttctttgttattaagaatgatagaaatgaaaataatatttttaataaggtgacagtatgacttyacctactaataatactcctaacaatcatataatgtaggcaatttttgcatctgtgttctactgttgagagattaattgactaaatgactaaatgacactgctggaggctgagtaaggactcaagcccaagtcttttcatactgttcctcatctaattccaaatccaatcctgcagtgttctctctttacagttattctttgttaaaaatttaccagaaacaataaacaaaacaaaacaaaaacaatttaagtattcaagagaaaaagtacatgggacagttcttatgcccacctcacatcctcttaccttaccttttaccctggttattgccatggaaatctgatacaccatttatctcctgctttctgtctccaggattttctgactttgcagtgtgggacacccgggggaatcctctagttcattctcatgcatgcataagtctagaagtgagaactaacatcccatgggcaatctttgactaacacatggtgac

SEQ ID NO: 479812 - DNA, 589 bp, Homo sapiens
gcatgcacaatttaaaatttatggagatttctttgttattaagaatgatagaaatgaaaataatatttttaataaggtgacagtatgactttacctactaataatactcctaacaatcatataatgtaggcaatttttgcatctgtgttctactgttgagagattaattgactaaatgactaaatgacactgctggagrctgagtaaggactcaagcccaagtcttttcatactgttcctcatctaattccaaatccaatcctgcagtgttctctctttacagttattctttgttaaaaatttaccagaaacaataaacaaaacaaaacaaaaacaatttaagtattcaagagaaaaagtacatgggacagttcttatgcccacctcacatcctcttaccttaccttttaccctggttattgccatggaaatctgatacaccatttatctcctgctttctgtctccaggattttctgactttgcagtgtgggacacccgggggaatcctctagttcattctcatgcatgcataagtctagaagtgagaactaacatcccatgggcaatctttgactaacacatggtgac

SEQ ID NO: 479813 - DNA, 549 bp, Homo sapiens
agcccatgactgtgccgttccatgtaagcccagggaaatttactttagtagggaaaagcttcctctccttagctccagggtggtacacagtcactcttcataagcccatcaaatttttttctgaggcagatcctcctggaatgctattttactttctccagaaaattgttagaagtactaayggagtctaaaatcataatttttttttcttgctttctctttccagattggaaggccttataaataagagctcctttggtagaaatgttcatggagacttttgggctaattccaaaccagggtgaaagtaagacacattctttctgagagtgctgaccagtggcatattcatgtttgaatggaaataaactgaaacatgttcacttcatgggaaagagaaacctggaaagcaggaatgctaaaggggaactggggtgatggtggacagataaggtgaagccagactgcaatgagagaaggcagcatgaaaggccagacctattttgggaccataccctgagtcacagagtaacagagagcagaggtgac

SEQ ID NO: 479814 - DNA, 622 bp, Homo sapiens
tgtccaataaatagctcagagtcgatgtaacaaatctaaacttacttcatgaaatctgtttctcttttcattttcagtcttctaggctaagggtctggttattttgaccagtctctcccccttgtcctctaaatctgatcttgctccttttctttctatttcagatacagatttgtgtagttcaggttctcattacctcctctctgaagttttgtaataaggtcctgtctggttggggcatccatggtgtctattctgcttgtttaggtttaacacttctttcatttaaatgggaactgtcaatgtcctcactggacctgtccaaacatatcactcactttcagggtgctcgtgttggtataccctgagtactgttctaagtgagactaacaggtaggccaccaaaatgttgtttcatcaacaaatatgcttggaaagttctcggctaaacaaagwtaaacagagtgtttctttacccagaacttctcagagaatttaatatgttaatggacgctgtatttccaagaaaatacacaagattcagaaattcccaaattttatggtcatatgatttccttgtgtgttggtgggtccgtgcatttatatccccctagaaaacaaa

SEQ ID NO: 479815 - DNA, 678 bp, Homo sapiens
ctgaggttttcaccagtatgcctatctcctgccttctccacttcttggacaagctccagttcaattctgcctccttgtttytaccagtcaaaccccacaggcacacacttccaaagtaattacgtaatagcagcctatggcaaaacaaagcaatgatcgtaatgatactggggaaagatggagccacagactcttcttcaaaaccttttgaagtcacaaatagttctctattttaaaggcgatggctactgattacattaggaataatctctttaatctttggagaatggaagctgtaaattcagttcgtgtaatgcagcaaaattttctgcttcaaacaggttgttagtagcgaacgattcattctggctctcagtgcctgtcactttctgaaggcacttctcttattttagtatttcctgtttgggaacaaggtaatggaagatgaaacgtcacttacggaacctttgctgaggatgagcagagagtaaatacagccacagaatgcttttctccttaatcctcatagaaatctgcgtccttctcttctctaatttcatacatactcatgactaatatcaccagccccgctcagtgattcatcttcccagcagttatcaggcatggtcatgcttgcttaacagaggagatgggaatgatcaatagattaatcactaa

SEQ ID NO: 479816 - DNA, 501 bp, Homo sapiens
tgagaaagcccacgaccagcccaagccgggggctgcctttccatggtatggaacctgggcttcctggaccctaaaccgtgagatgggcctggccttccacccactggaatctccacagcccgagaatcccacgctaagagagccatattcctaaaatccagccgtrcccttgctgcaggggtaagacctcccccgggtgtgagctccgcgaccatcagagggaacggttgcccccgtgtgtgctgcactgtttccccagctttattgcacatcctgtgggcagcgggcactcagcccctgtctgctgaattgcaccacaggaaaggcagtccttccagatttttaaaaataatccctataactggctcatgtctgccaagataaatgtcacttcaacagtgctgctgaaatatttaatgtgattagtactcgctcatttcatatgtaaaatagggaggaaaggaaaagacaaagatgaggaatttgagggacacgagtgtc

SEQ ID NO: 479817 - DNA, 565 bp, Homo sapiens
ttttcatcccttcacatttagtctattttgtccttagatgtgaaatgagtctcttgtaagaagcatacagtggggtttttaaaaaattattcagccactctatgtcttttaactggagaatttaatctatttatattcaaagtaatattgaatggtgagtatttactattgccattctgtcaattgttttctaattaatttgtagatccttttttctttatcttttgctgtctttctctgtggtttggtgaatttctatagtagtatgctttgaatcctttctttatatcttttgtggttttgcttwgtggttattatgagccttacataaaaacattttatactaataacaggtcagtttgagcttggttataagttaactttgatcacttatgcaaactatgcctttactccttgcctaatttatttttaatggtatgttttgtatcttttataccttttattcccttaacaaattattgtagctattttgctaattttggttttttgccttcatactagttatatgattgacttccacaccaccattatgatataatagtgt

SEQ ID NO: 479818 - DNA, 580 bp, Homo sapiens
ctgctgcttctgctccaaggctgctctggctgatggctttggccatgctgctcactggacagtctggcaytgaggtggccatggcctcagctcctcagcactgcaccacactgcagattgagccacttcttcaattggccttaaatttatcaaagggaaattgtctaggtgagcctgagttaatcacacaaactctataaatctgaatgtagaagtcaaatatcaagaaagtcagaagccagagagattcagaccttgagaaggatttgacctgtcgttgctggctttaaaggtggtaaggaccacatgaaaaaaacccaagaacatcttctaggagcagagtgatccctggctaacaatgagctaaaaaaacaggggcctcagttctacactgcaaggaactgaattctgccaacaacactaatgagtttgaacacaattcttccccagactccagatgaaaacacagcttggtcaactccttgattgtataaccctgagaatagaacccatataaatcttgcccagattcctgatgaagacaccatgaaaataatgaatgagtgttgtttcaagccac

SEQ ID NO: 479819 - DNA, 604 bp, Homo sapiens
tggaccgccaccccagtcccagaaagacacctgcttagggacctgcgaatttggtcccaccctgatttccctcagggacctaggagtaggtcttgtcccccaggaacccaggagttgggggctcccatgtttttgttttgttttgttttgtttgagacggagtctcgctctattatccaggctggagtgcagtggtgtgatctcagctcactgcaacgtctgcctcccgggttcaaacgattctcctgcctcagcctcctgagtagctgggattataggcgcacgccaccacgcccagctaattttcgtatttttagtagagatggggtttcaccatattggtagggctggtcttgaactcctgaactcgtgatccgcctgcctcggcctcccaaagtgctgggattacargcatgagccactgtgcccagccgggggctcccatctttaggaatccaggagttcagtccttccccacttgggaaccctggagtaggggatcctgctggactgtctccagctataccctcagggacccaggagtctgccctcaaccctgccagttcagacaagccctcggggactcagcagtccacctccagtc

SEQ ID NO: 479820 - DNA, 482 bp, Homo sapiens
tcttggagatctgtccttggggcaggttgagccaccagcttcgtgtgtgtgtgtgtgtgtgtgtgtgtgtktgttcgtgtttgtgtgggtgtttgtgttcgtgtgtgtgtgttcgtgtgggggtgcgtatgtgtgtgtgttcgtgggtgtgtttgtgttcgtgtgggtgtgtgttcgtgtgggtgtttgtgtttgttcgttcgtgtgggtgtttgtgttcatgtgggtgtgtttggatatttgtgttcgtgtgtgtctgtgtgtgttcgtgtgggtgtttgtgtgtgtttgtgtttgcgttcgtgtgtgtgttcgtgtttgttcgtgtgtctgtgtgttaatgtgggtgttcgtgtgtgtgttcgtttgtgtttgtgttcgtgtgtttgtgtgtttgtgtgtgtgtgtgtgcggtctctgttctttagttgggagggaagggaagcgtaggcttcaggtcggcacagactctggggaccctg

SEQ ID NO: 479821 - DNA, 482 bp, Homo sapiens
tcttggagatctgtccttggggcaggttgagccaccagcttcgtgtgtgtgtgtgtgtgtgtgtgtgtgtgygttcgtgtttgtgtgggtgtttgtgttcgtgtgtgtgtgttcgtgtgggggtgcgtatgtgtgtgtgttcgtgggtgtgtttgtgttcgtgtgggtgtgtgttcgtgtgggtgtttgtgtttgttcgttcgtgtgggtgtttgtgttcatgtgggtgtgtttggatatttgtgttcgtgtgtgtctgtgtgtgttcgtgtgggtgtttgtgtgtgtttgtgtttgcgttcgtgtgtgtgttcgtgtttgttcgtgtgtctgtgtgttaatgtgggtgttcgtgtgtgtgttcgtttgtgtttgtgttcgtgtgtttgtgtgtttgtgtgtgtgtgtgtgcggtctctgttctttagttgggagggaagggaagcgtaggcttcaggtcggcacagactctggggaccctg

SEQ ID NO: 479822 - DNA, 538 bp, Homo sapiens
ggagtgtcatgtggccctgcaagctcagcccgccctcaggtggaagtggagccctcatcctgcctgggttgctcttgccctccaagcctctctgagggcctctctacctttccccaagctaggtatgcagcaggtactcaataaacactgacctgacctcatgggcctctcaacagccatgacttggcaaaggacacttaattcacccagtgcagaagtgcttgtacttacatcccagaactcgaacatgttttgagggtcaattccaaactcyttcactttggtctacaaaaaaaaaaacaaagggagagaaatgcaaagaagcatttgctagcgggatgggaacaggagctccgggaggcagggagctgtgctccgtgagctgagcctcaccttccccagagccagggatggggcagggctggagcagcctgtgagtcgagggcagggcccaggatctgcccaccccaagctggacaccagatcagtccatgaccagcacgccagtgacgttgtgcctgcaaagccccctgctgag

SEQ ID NO: 479823 - DNA, 625 bp, Homo sapiens
attatataattatttataataattgtattacaaaaataaaacttgatgacctttataaaaatactagaagaaaaagggaaaattacataaggtacagaacatacaaattataccatgaagcagtaaaaaacaggatcaaattttctatgttttttaaaaatatgccttctctaaaatgttttctctctgaaatgatatttagaagacataattgaaaataaatacaaaataaagtgataaaaaataatctggcaaaattcaggatgtaatgagtaaagacaaccatgaaagaaatgaagatcaataaaagcaggaaaaaaagtgggaagtggagagaataatgctgctaaaaacacagatagaatataaatgacaggcttaaatatatcctgagcaaaacraaatagaaaacacaagaaggtgaaatgtaacattaaagtcaggtccaacaaatgagaaattagtgtgaaagagctcacaatatctggttaaaaaattcaaagataaaagaaaacttttctgaaatgaagaaaacattgaatctaatggttaaagggcttatctttatccagaaaaaatgtgttatagtatgaccacatcaaggcagatgcaactgaatttaccg

SEQ ID NO: 479824 - DNA, 581 bp, Homo sapiens
gcctggcatgaggtgaggctggaggagggcaggggccaggccacatgggcctcataggattttattctgtgtatagcgctctgggagaaacacctcctctgtgtctctgttccagagtcctagggactgttgcaccgggggtccgtggagcactcgggtctgcaaggaaagaccccgtctattagcgtttccaggccaaattgagggttgggctgctatttctcacggcccagtaacgagatgcagatgaactggggaggaagggagtttttatttctgtaaccagttatggggaagaaggcctaggaaatgtcaccagaccaactcaaaattcgggtttcagagtttatataccttctaagctatatgtttatgtgtaagtgtacattcatctaaagacataagtgattaacttatttatttattttttgagacggagtcttgctctgttacccaggctggagtgcagtggtgcaatctcagctcactgcaacctccgcctcccgggttcaagtgattctcctgcctcagcctcctgagtagttgggattacaggcgcmcgccaccacaccagctaattt

SEQ ID NO: 479825 - DNA, 601 bp, Homo sapiens
ctgctatttgcttattcactaactgctgcctgtcctgtctgtgggaactttccaccgtctggatgctgtctgtcatacaggcgcttggagctgctgagctttcctgaaaagggggacccttccttaaaactctaggaactagagtggcattgtgatggaaatactcttatgctcattgaaactgtccctctgaacttctccctcgaaggcccgccacgatgactatcatggtggaggacatcatgaagctgctgtgctccctttctggggagaggaagatgaaggcggctgtcaagcactctgggaagggtgccctggtcacaggggccatggccttcgtcgggggtttggtgggcggcccaccgggactcgccgttggtaagtgcaggtgtctcacagagatagccagcctcggggatgtcataaaagggccgttgaaacacagggagaaggccaggcacagtgtggctcatgcctgtaatccyagcactttgggaggccgaggcgggcggatcacctgaggtcaggagtttgagactagcctggccaacatggtgaaaccccgtctctactaaaaatacaaaaaatagctgggcgtggt

SEQ ID NO: 479826 - DNA, 538 bp, Homo sapiens
tagatggcaaacgataagatttctttattctagaggttagatggtgaatgatatgatttctttattctagagggtagatggtgaatgataacatttctctattctagagggtagatggtgaatgataagatgtctttattctagagggtarctggcgaacgataagatttctttactctagagggtagacggcaaatgataagatttgtttactctagagggtagatggtgaatgataacatttctttattctagagagtagattgtgaatatttggtccttcatgttttctcaggatcctccctccaaacattctatcctatacagcaaagctttacatccttcaaacacaacagtcgtcttggacctagatatgttgaactctttaatgctaggactcaagtcctcttgctgtttgggacaattcagaaaagaatcagccccagtcattttgcatacttctgtctgactgtcataggtgagtagaaagaaacagctcaactgcttgacaagattcatcgacctgaggtcttgtctg

SEQ ID NO: 479827 - DNA, 538 bp, Homo sapiens
tagatggcaaacgataagatttctttattctagaggttagatggtgaatgatatgatttctttattctagagggtagatggtgaatgataacatttctctattctagagggtagatggtgaatgataagatgtctttattctagagggtagctggcgaacgataagatttctttactctagagggtagacggcaaatgataagatttgtttactctagagggtagatggtgaatgataasatttctttattctagagagtagattgtgaatatttggtccttcatgttttctcaggatcctccctccaaacattctatcctatacagcaaagctttacatccttcaaacacaacagtcgtcttggacctagatatgttgaactctttaatgctaggactcaagtcctcttgctgtttgggacaattcagaaaagaatcagccccagtcattttgcatacttctgtctgactgtcataggtgagtagaaagaaacagctcaactgcttgacaagattcatcgacctgaggtcttgtctg

SEQ ID NO: 479828 - DNA, 571 bp, Homo sapiens
ttgactaacatacctcccccatgtctcataagctagcaagtggcagaacacaaacccagtgtgtggctgcaaagaccaaaatctcctaaccatcaccagttccaccactcagctctccagcccctcccggctcccccgcccccaacacacacaccctgcctcaaagctgggcttcagtaagaatgtatcccctaattggccgggtgcggtggctcacacctgtaatcccagcactttggaaagccgaggcaggcggatcacaayatcaaaagatcgagaccatcctggtcaacatggtgaaacccgatctctactaaaaatacaaaaattagcccggcatggtggcgggcacctgtaatcccagccactcgggaggctgaggcaggagaatcacttgaacccaggaggcggaggttgcagtgagccgagatcacgccactgcactccagcctggcgacagagggagactccatctcaaaacaaaacaaaataaaacaaaaaaaacaatgtatccctcaattgatggaaggttgaaggaaaggcagtaggggtcgaagagagagaggggaga

SEQ ID NO: 479829 - DNA, 551 bp, Homo sapiens
taccctcaggtccaagaaccacctaatagaggctgggcacggtggctcacgcctgtaatcctagcatttggggaggctgaggcgggtggatcacgaggtcaggagttcaagaccagcctggccaacgtggtgaaaacccatctctactaaaaatacaaaaattagccgtgcatagaggcaggcgcctatagtcccagctactcgggaggctgaggcaggagaactgcttgaactcaggaagcggaggttgcagtgagccgagatcgcaccactgtactccatccagcctgggcaacggagcaagactccatgtcartaaatacatacatacatgcatacatacatacatacatacatacataaatggggggacacaggagctagaaggtggagtgagaaaggtctctgtgggagtgtgagggtggggggcaggtgctgagccaggacacatagtactcactctggaacattccaggggggcccagatcctccagaccaaaactggaaaagctcagaggcctggataggacacaaagaaaaatggttggtca

SEQ ID NO: 479830 - DNA, 456 bp, Homo sapiens
gtcgcgcaggctggagtgcagtggcacaatctcggctgactgcaacctctgcctctcaggtttaagcaattctcccacctcagtctcccgagtagctgggattacaggcgtgcaccaccacactcggctaatttttgtattttttggtagagacagagcttcaccatgttggccaggctggtcttaaactcctgacctcaagtgatccccctgcctcggcctcccaaaatgctgggattacaggsgtgaggcactgctccagcccaaatgctttttaaaaggaaggaaaaagaaggacagctcaaccctttctcactaaagggcaaaggactgctagctgggcatgtaaaagtgtgcattttcctgaagtgtgttctctggaatcctcttccccagagatgttgaaacggaggtgctttgtttagtgcagtggcggcagatgacagccacaggaca

SEQ ID NO: 479831 - DNA, 306 bp, Homo sapiens
ttctgggaagaccatgagtgcctcgatctataccatcttggcatttgcatactgcaggtgctgaatacaaacagcgagtgaatgaatcaatgagtgaaagaaaattgactagtggacrgttcagagccattttgagctcttcctgtttaacaagcagcacagggatgaagagcacagactcccatgcagtggcctggctttgaacccactccccaccactgtgtgaacttgggcaaggtacttaacatctctgtgcataattatagtacccacttcttgaggtaggagtaacctagtttctctatt

SEQ ID NO: 479832 - DNA, 658 bp, Homo sapiens
tgtcaccccttccaccaactgtacggtggtcttgctgagggtggcctcccggacgcgtcacgcagacctctcttgggatggaatgtctctgctggttgagctcatcacgtcagggctgcccacgtccccagttagcttctgcaagcagagagaggttggattaactgcaggccaaatccccacttcatttccattcctttcagtaagscttcaggactgggcatgagtttatcacgtgggagctacgggctttggggaagctcactgactgctttgagctcagcttgctcatttatgaagtggggataagagtgtacccagtacaaagctgtcactgggattcactgagtaatgcatataagtctcttagcacaatgcctggtacatagtaagcactccatatttatctgttataattgatcaaaattgtgcttagatatgattttgtaataagaaaacggggaattaaaggagtccagatgaggaacatataatccacactggggttcagtttagggagaggacagatggctggactcaatcctttagtgaggttgctgtaataagaaaggagagtgtgggattccatgcagaaggaacatcacatccaaaagcacagtgtgctccaagatgttcagcatgcctggaggtagtaacg

SEQ ID NO: 479833 - DNA, 627 bp, Homo sapiens
tagacaggaaacacatcagacaagctctctcttcccaagggaatttggctcaccagcggcaggattctcaggcaaaaaaacgcggagacaaggatcagacatttggctgcgtcaggctsccttactgccttacatatatttagatgatttctgagtctttctaaagctaccactgagagccttcggttcttattgttataaacagaacgtctgagattctagtagcaacacagagatagaaatgcaaaattaagctttcgaggagcaatacagtattgttgggagacacacagacactctgagcacaaaataaaaaatacattggctaccaagtctatgagattattctcagcttccctagtaatcaaatgcatgaaaatcaaaatatgatatgatacgattctcagttgacaaatatgaatgaatgaatgaataagtgaatgaatgaaagcatgtatgcatgcagaagaaacataatacctagtgctggtaagggtgtggggaaacaggcactctcatgtaccatacaggagcaaaaattattctacccaagtatgttaataacatggttgaaaaatttaaaaatgcacagaatgcctatagaacccctagggatttatattaaat

SEQ ID NO: 479834 - DNA, 620 bp, Homo sapiens
cttacaatactctcagcttctgacacgaagcctaatgccacaacttcataccaaaactccccacaaagggcatcagcattttaattcctttacctagtactggaccatagttctatatatcacttattcatttactaagcaaaggagtcagtgtctactagttgtttagaacagtgctgggtactgggaatactatattgagcaaaaactgtcagagtttcaaggtgcaggggagtagtaagcaatacaaccgcaaaagtaaatgtatggaaactgactataatagaaagacgttcgggtaagaagctgaccaaaggttcatggaagacatttctaatgaacaaagaagaaagaacaatttagtgagtatctgaagagcgagcaggcataaacatgtgtctacagcgtggatgattcagtgtgtgttaggtcaaaggcacagtagtgcaaaggccctgtcatgtaaataataccagcaaggmtggagaagcaggtggagtttttcagattgtaactaagcctttaggccatcaaggtttagcatgcttctaaaatcagtgggaagaaacccaaaggtttttccatcttggacagagagatagtgatgtgactacatggca

SEQ ID NO: 479835 - DNA, 585 bp, Homo sapiens
tctataataattaatattatatgacctacttttcaaagcacctttcaaatagcaaacacttttatgttcattgactttatgtttattgatagtaaaattcctgaaatcctgtgatatataaaccacagatataataatctgatttcacagatgagaaaactgagacttagtgtaagctataaaatatgttgatgctcttatagaaaattaatgcaaaagctggaaaggagccatattagtcggtgttctccagggagatagaaacaatgggaaccaatgtttctccagagaaacagaacctatatacgtgtgtgtgtgtgtgtgtgtgtgtgtgtgtatgtgtgtgtggagagaaagaracagagagagagagacagagagagagagagagatttcttatgaggaattgatttataagactgtggaggctggggagttcaagatctgcagtaggcaagctggtaacaaaagaggtaagactgacgtaagttctgctctgaggctaagtgcgaagtcagaagactgatgtcccagctgaaagacaactaagggaagaaagaattaatacttacccagactcttatt

SEQ ID NO: 479836 - DNA, 671 bp, Homo sapiens
tactttgtagtcacaactttgctaaccaaaataggatcttgtcctgacaaagtgaagataccacaggaaccagcagatggcgatgaaagcaatcctcaactgccctcrctgctaattagcataagatactccaccagcaccatggcggtttacaaatgccatggcacaaacccagaagttaccaccttttttcatggcaataacctagaagttacttccccttttctagaaagttctaaacaaccaacccacaatttgcattgatcatccctcagtttacatgtacttgaaagtgggtttacatgagtataaataagtttgccagcagcccatatattgttgactctgggcacactgcccatgagttacccctgctccacatggagcagccctggttcaattaaagatttccgttcaataacactggcttgcccttgaattctaccctgagagaaactaagaacctacacaagataagccccagtttggggactcacatgtcctgcaccatttggtgaccatgaggggacaaagaaagcaagtgacggacagtgactgataccattgtgagacacagcagagatggcagtgattgggtggtaagatggcaagtcagtgctgatcagcagagagggggtgagactgcagtgattggtcaccagtggagatat

SEQ ID NO: 479837 - DNA, 430 bp, Homo sapiens
atatcatgcataatatcacagggtatacacccactgtgatagtagcagaaagaccgtgaagatatcatgtgtaatatcagagggtgtacacccactgtgatagcagaaagatcgtgaagatatcatgtataatattactgggtgtacacccaaggtgatagtagcagaaagatcgcgaggatatcatgcataatatcacaaggtgtacacccgctgtgatagtagcagaaagatcacacgtggtattggaaaaatgacactgatagacttgcttgatgtggggttgccacaaaccttcaatttttaaaagacccaatatctgcaaaggataataaactgcagtgcaatgaaataagttgtgcctgtatatcctgcctattaaaaaaatggtktaaggtgattgaactgatattaacgcagaagctaagtg

SEQ ID NO: 479838 - DNA, 589 bp, Homo sapiens
cctcgagaccccccagtggatgagtgggagagggtacctgctgttacccagggaacacgagatgctagtggctgccttgcaggggttcaactgcaacaccagccattcctcccagggcgctgttggcatattggggtaggcagcatgaatcactgtgttcacccccacaggctgcctgccccatagatgcccatggtgacaccgagtccagaaggttgcgattggagaaagaggctggtgcgtggtggcttacgcctgtaatcccagcactttgctgggagtgcagaggatcccaaggaggctgaggcaggcagatcacttgaggttaggagttcaaaaccagcctggccaacatggtgaaaccccgtctctactaaaaacacaaaaattagscaggagtggtggcgcctgcctgtaatcccagctactcaggaggctgaggcaggagaatcacttgaacccgggaggtggaggttgcagtgagccgagatcacaccactacactccagtctgggtgacagagcgagactccatctcaaaaaaaaaagagatggggtcctgcggtcatgagggtgggggccaccatcgc

SEQ ID NO: 479839 - DNA, 592 bp, Homo sapiens
actctgaccccttctcttctgaggacacccagccggagagagcaagaaggggtggagtgtgggggtgggggcaggagcctctgctgttcctttccaagactttttcttcctgttttccccaagcctccacaactctaaatatgaygagctctcaactgtgagctaataatgttgaatgtaacgccctttgtgtccttagatgacaaaaagacttgtgagtactagcggagagggtgatgttggtgtgaattttccacattggtccgtgtctccgtggactggccgcttcccccgctggtagcttcctggctgtgagaggccatgcggtggatggagccaccgctgcactggggtcctggctcgaacttgagtaaggtgctgtcttccaagtctggagaggagaggagaagagaagagaggcagtcccttcagcaccttggagagcgctcccggctgcctgcctgggttgggtggacggctggactgcactttcgctctaggcatcctcttcaagccaaaccatctctccttgccagtgaccgcctggtcccggaccctccagcacactcaaccaccagaagtgtgcctatgc

SEQ ID NO: 479840 - DNA, 592 bp, Homo sapiens
actctgaccccttctcttctgaggacacccagccggagagagcaagaaggggtggagtgtgggggtgggggcaggagcctctgctgttcctttccaagactttttcttcctgttttccccaagcctccacaactctaaatatgatgagctctcaactgtgagctaataatgttgaatgtaacgccctttgtgtccttagatgacaaaaagacttgtgagtactagmggagagggtgatgttggtgtgaattttccacattggtccgtgtctccgtggactggccgcttcccccgctggtagcttcctggctgtgagaggccatgcggtggatggagccaccgctgcactggggtcctggctcgaacttgagtaaggtgctgtcttccaagtctggagaggagaggagaagagaagagaggcagtcccttcagcaccttggagagcgctcccggctgcctgcctgggttgggtggacggctggactgcactttcgctctaggcatcctcttcaagccaaaccatctctccttgccagtgaccgcctggtcccggaccctccagcacactcaaccaccagaagtgtgcctatgc

SEQ ID NO: 479841 - DNA, 592 bp, Homo sapiens
actctgaccccttctcttctgaggacacccagccggagagagcaagaaggggtggagtgtgggggtgggggcaggagcctctgctgttcctttccaagactttttcttcctgttttccccaagcctccacaactctaaatatgatgagctctcaactgtgagctaataatgttgaatgtaacgccctttgtgtccttagatgacaaaaagacttgtgagtactagcggagagggtgatgttggtgtgaattttccacattggtccgtgtctccgtggactggccgcttcccccgctggtagcttcmtggctgtgagaggccatgcggtggatggagccaccgctgcactggggtcctggctcgaacttgagtaaggtgctgtcttccaagtctggagaggagaggagaagagaagagaggcagtcccttcagcaccttggagagcgctcccggctgcctgcctgggttgggtggacggctggactgcactttcgctctaggcatcctcttcaagccaaaccatctctccttgccagtgaccgcctggtcccggaccctccagcacactcaaccaccagaagtgtgcctatgc

SEQ ID NO: 479842 - DNA, 592 bp, Homo sapiens
actctgaccccttctcttctgaggacacccagccggagagagcaagaaggggtggagtgtgggggtgggggcaggagcctctgctgttcctttccaagactttttcttcctgttttccccaagcctccacaactctaaatatgatgagctctcaactgtgagctaataatgttgaatgtaacgccctttgtgtccttagatgacaaaaagacttgtgagtactagcggagagggtgatgttggtgtgaattttccacattggtccgtgtctccgtggactggccgcttcccccgctggtagcttcctggctgtgagaggccatgcggtggatggagccaccgctgcactggggtcctggctcgaacttgagtaaggtgctgtcttccaagtctggagaggagaggagragagaagagaggcagtcccttcagcaccttggagagcgctcccggctgcctgcctgggttgggtggacggctggactgcactttcgctctaggcatcctcttcaagccaaaccatctctccttgccagtgaccgcctggtcccggaccctccagcacactcaaccaccagaagtgtgcctatgc

SEQ ID NO: 479843 - DNA, 576 bp, Homo sapiens
ttgaggtcctctgggtacagcctgggcattgggattctttttattttaatttttttcagacgggggctggctccgtctgtcgtcctggmgtgcaatagtgtgtgatcgtggctcactgcaacctctgcctcctggcctcaagccatcttcccacctcagcctcctgagtagctgggactgcaggcatgcacccccatgcccagctaagttttgttatttgttgtagagatggggttttgtcgtgtttcccagactggtctcaaactcctgagctcaagcgatccgcccaccttggcctcctgaagtgcttttacaggtgtgagcaactttttttacaggattacaggtgtgagcaactgcacctggcctgggattattttttaaacattccaggtgattctaacgttcagcgcaggttgaggaccactcatctggagcgtctgtagctggacatcacttgggagctttgatgactgacccatgccggggtccatccaagaccactgacactggaaactttaaggcgggggtctcagcctgagtatctggtcacagcaagcagggcctagagttgca

SEQ ID NO: 479844 - DNA, 611 bp, Homo sapiens
tgggggagcggctggttggaggattggtcagracacagagcatttattaagttcactgtcttatatgggtgcgatgtgtggcatcccaaaataaccacactagtaacctcaaagaccactgatcacagatcaccatgaacagatataatcatgaaaaagcttgaaataccgtgagaattaccaaagtgtggcacggacacacgatgtgagcacgtgctgttgggaaaacggcaccaagaggcttgccccatgcacgggtgccacaaacctccaatgtgtaaaaacacagcgtctgcaaagcacaatgaagcgaaaccccctgaatcaaggtgggcctgcccccagaacaatcccttctcctcctctcagcttgggtttctgctttgcaaaaccccttggcatcccttcacagcaacgtttgcacgagacgcagcagagagggggtcccagcagaaacaatcccatcaaatcctggctgagcttttgcaggctttgcggggctgcaggaggcatagctttcacatgggccaccccgtctctccctctcccgcagcagaagcagccaatgggtcacacttgagatgtctccttcaccctggggttctgagcag

SEQ ID NO: 479845 - DNA, 611 bp, Homo sapiens
tgggggagcggctggttggaggattggtcagaacacagagcatttattaagttcactgtcttatatgggtgcgatgtgtggcatcccaaaataaccacactagtaacctcaaagaccactgatcacagatcaccatgaacagatataatcatgaaaaagcttgaaataccgtgagaattaccaaagtgtggcacggacacacgatgtgagcacgtgctgttgggaaaacggcaccaagaggcttgccccatgcacgggtgccacaaacctccaatgtgtaaaaacacagcgtctgcaaagcacaatgaagcgaaaccccctgaatcaaggtgggcctgcccccagaacaatcccttctcctcctctcagcttgggtttctgctttgcaaaaccccttggcatcccttcacagcaacgtttgcacgagacgcagcagagagggggtcccagcagaaacaatcccatcaaatsctggctgagcttttgcaggctttgcggggctgcaggaggcatagctttcacatgggccaccccgtctctccctctcccgcagcagaagcagccaatgggtcacacttgagatgtctccttcaccctggggttctgagcag

SEQ ID NO: 479846 - DNA, 242 bp, Homo sapiens
agcaggaggcccgtaactcagaggaggcctctrcccatcctgccagggagaaagtcaaaagctgctgttctgtgacccttgccccgaccctgtggcacccccccaaccatggggcaggaggagacactcctcagagggttgcacttgttcctaaaagcagcaggagctatttcgatgattgcaacatttataaaagaagaaatcacgacctccttcaacagccctttgacctgaagagtgtc

SEQ ID NO: 479847 - DNA, 573 bp, Homo sapiens
tgggagggagacaggtactccccaagggcccttcccaccggaggcccacgcatcccagccacgcccgtttgccactgaagagcagactacagggaccgtgggtggtgctggcagcrgaatcccacagccccggggccagcgggtacttgcccagagcaccgtctctctcctgctgaggaaaggccttccctggccaaggcggcaggcaaggctgacgagggctgaggctggtcctgggagggcacctgaatgtgggcctctgctagtatttaacggtggggatggcggagctggtgtccacctgctagaacctgcctgggcctctggtagggcacgtgtggataacagacccccccacggagccctccggctgcactccctgcctgcgccacccggcaggcactgacccacagcagaggacgcagtagacagggacgtggtccaggccatcacctgcacctgcttgccagggaacatgcgcgcccaggagccctggcaggacgcacgtaacttccagtcccaggacaccgacgtccacctggtgacattgcccaagtcaggtaaggtgcggtg

SEQ ID NO: 479848 - DNA, 669 bp, Homo sapiens
ggcttacaaattgaccaccatgcagggactcagagtggaggtggccctgccctttggcaggtttcctcctggtgcttaggaccagtttgggccttctttattgctcaggacagtaggacaatttgctgagatccgggagccctaccaccctccagagaatctctgatctcccgaaacttggttgaggtcgaaagtttattttgcgcacaatgccttttccttttccggtgttttacttgcttccaacaaagaaggcgagttttcctgcttccgtgatgatgggagcaggagacttccctggagtttcagctcggaaacaactcgagtttttcctgattccacgatgggggagagcagtctaaagcctgggccccattcctaggtaagtggctgaattggggttctgtcttggaagttctccttatgactaaagctaacattaacgactggctggtcttwacttcttacttattaagcaattgctcagtaagtgtataattgtgggattgtttgttttggcttaactgctttttgtttgtttctgtgtttgctatttttgctgtttcagtctttttcccgttggatttgacgaattctgttagacttggtcaaatctgaagcaaacttccaagttgtgggaaacaagcctctgaattagctgaattccca

SEQ ID NO: 479849 - DNA, 416 bp, Homo sapiens
accattcaccgggcaggagaggggtggcctggcagcagatgtagacacttgccgaggcagccctcaggagtggcactggctcactaggctctaagccttcctatcttcgtgctcaggctcattccatggtttggggcccagtcaagaacaaagaagcaggtgaaactctgggacccactgctggccttctttcctagagtgctggggggtgacatagggcaaagatccctgggcaagtaagggcacaaggtgtcaaaaaggcacctcccctagcaggcactagttgtggccatcacctgctgccctaggcctgatccaagtcctcagactagcttgggtgcaccaggccrcatttggaagccaggcggtcttgacgttgggagtgagggccacataaatactcctaactttggaca

SEQ ID NO: 479850 - DNA, 268 bp, Homo sapiens
aaatatttgtcttggttctgctgcccctcccttgcctcccttctcctctctctcctccctcccgtctctccctccttcccttcctcacatttcccaagctgccactgctgcttctggggtgaggggtcacccaagggtgtgctacagagcagarcctggagaggtgggcagggggtgggcgtggcaggggcaggaggagtgcagcactgtgggtgggggtggggcactaggcggggcctaggaccagctgggctaggactggaggggg

SEQ ID NO: 479851 - DNA, 554 bp, Homo sapiens
acatcccaccctgggggacagagcccagtcagggaggatggcagacggccaccagargtcacaggcagaccccccaccccactcacatcagtcaccatggagagatcaatgacaaagcggagggcacaacagagggccacagagatctccctttggaaacagaagtagtaggaggctgggaggaggttgaggaggccggtgatgaagccctccacacctacaaactgtggccaggctagctcaggccgagccccgcaccaccctccacccctttccttgcccgcagccctcactccgcccctctcctggctccctgtcccagagccccatgcaaatctggttgtcgagaccaagcagcaacagcatgaagaagaacagggcagcccagagtggggccactggcatcagtgtgacagcctgtgggtaggcgatgaaggccaggcccggccctgtgggaaaggtgcaggctctagaccttgcagccgatgtcgtgccctgcgcgcaccctgagccctgcctgcaacactcacgcccatgcccacgcctgcctctga

SEQ ID NO: 479852 - DNA, 554 bp, Homo sapiens
acatcccaccctgggggacagagcccagtcagggaggatggcagacggccaccagaggtcacaggcagaccccccaccccactcacatcagtcaccatggagagatcaatgacaaagcggagggcacaacagagggccacagagatctccctttggaaacagaagtagtaggaggctgggaggaggttgaggaggccggtgatgaagccctccacacctacaaactgtggccaggctagctcaggccgagccccgcaccaccctccacccctttccttgcccgcagccctcactccgcccctctcctggctccctgtcccagagccccatgcaaatctggttgtcgagaccaagcagcaacagcatgaagaagaacagggcagcccagagtggggccactggcatcagtgtgacagcctgtgggtaggcgatgaaggccaggcccggccctgtgggaaaggtgcaggctctagaccttgcagccgatgtcgtgccctgcgckcaccctgagccctgcctgcaacactcacgcccatgcccacgcctgcctctga

SEQ ID NO: 479853 - DNA, 528 bp, Homo sapiens
ccttgtttcctcctcagagtccatgccgaggtggcgcagggtgcgcccgcaggccttgctgactgccacccatagcagcacactggtggaggtggtggtggcactgctgtgcacgctgcactccctgactcagtggaatgggctcatcaacaagtacatcaactcccagctccgctccatcacccacagctttgygggaaggccttctgaaggggtgagtttgtgttctcagaattaatttagttgaacagtaaacttgtagggattgggcagctccgtgagtgtccctggtcgagctcactgtttggtctgcactaggcccagttagaggactacttccccgactccgagaaccctgaagtggggggcctcatggcggtcctggctgtgattggaggcatcgatggtcgcctgtgcctgggcggccaaattgtgcacgatgagtttggagaagacaccgtgactggcatcaccccgaagggcaaaatcaccgtgcagttctctgacatgcggacgtgtcacatttgc

SEQ ID NO: 479854 - DNA, 603 bp, Homo sapiens
tttattttctattgtttgtttgcagtgataggatccccaattcagaaatcaagtaaaggaagtatgcctccaagaggtattggagtagataaactagatattacaaagcctacagattcagtctattaatttttaaaaataaattattaatttatttataaacagtgtgtgtgtgtgtgtgtgtatgtgtgtgtgtgtgtgtgtgtgtgatggagtctcgctctgtcgcccaggcttgagggcagtggtgcagtggcccgatcttggttcactgcaacctccccctaccgggttcaagtgattcccctgcctcagcttcctaagtagctgggattacaggcacccgmcaccaggcccggttaattttgtatgtttagtggagagggtttcaccatattagccaggatggtctcgatcgcctgacctcatgattcgtccacctcagcctcccaaagtgctgggattataggtgtgagccaccgtgcccggcctatttaaacaagtttttaaaataaattattttattttaacttatcatattcctttattcagggagataagttactgagataactggtagtaggcaaagagaagaaacagggt

SEQ ID NO: 479855 - DNA, 603 bp, Homo sapiens
tttattttctattgtttgtttgcagtgataggatccccaattcagaaatcaagtaaaggaagtatgcctccaagaggtattggagtagataaactagatattacaaagcctacagattcagtctattaatttttaaaaataaattattaatttatttataaacagtgtgtgtgtgtgtgtgtgtatgtgtgtgtgtgtgtgtgtgtgtgatggagtctcgctctgtcgcccaggcttgagggcagtggtgcagtggcccgatcttggttcactgcaacctccccctaccgggttcaagtgattcccctgcctcagcttcctaagtagctgggattacaggcacccgacaccaggcccggttaattttgtatgtttagtggagagggtttcaccatattagccaggatggtctcratcgcctgacctcatgattcgtccacctcagcctcccaaagtgctgggattataggtgtgagccaccgtgcccggcctatttaaacaagtttttaaaataaattattttattttaacttatcatattcctttattcagggagataagttactgagataactggtagtaggcaaagagaagaaacagggt

SEQ ID NO: 479856 - DNA, 603 bp, Homo sapiens
tttattttctattgtttgtttgcagtgataggatccccaattcagaaatcaagtaaaggaagtatgcctccaagaggtattggagtagataaactagatattacaaagcctacagattcagtctattaatttttaaaaataaattattaatttatttataaacagtgtgtgtgtgtgtgtgtgtatgtgtgtgtgtgtgtgtgtgtgtgatggagtctcgctctgtcgcccaggcttgagggcagtggtgcagtggcccgatcttggttcactgcaacctccccctaccgggttcaagtgattcccctgcctcagcttcctaagtagctgggattacaggcacccgacaccaggcccggttaattttgtatgtttagtggagagggtttcaccatattagccaggatggtctcgatcgcctgacctcatgattcgtccacctcrgcctcccaaagtgctgggattataggtgtgagccaccgtgcccggcctatttaaacaagtttttaaaataaattattttattttaacttatcatattcctttattcagggagataagttactgagataactggtagtaggcaaagagaagaaacagggt

SEQ ID NO: 479857 - DNA, 603 bp, Homo sapiens
tttattttctattgtttgtttgcagtgataggatccccaattcagaaatcaagtaaaggaagtatgcctccaagaggtattggagtagataaactagatattacaaagcctacagattcagtctattaatttttaaaaataaattattaatttatttataaacagtgtgtgtgtgtgtgtgtgtatgtgtgtgtgtgtgtgtgtgtgtgatggagtctcgctctgtcgcccaggcttgagggcagtggtgcagtggcccgatcttggttcactgcaacctccccctaccgggttcaagtgattcccctgcctcagcttcctaagtagctgggattacaggcacccgacaccaggcccggttaattttgtatgtttagtggagagggtttcaccatattagccaggatggtctcgatcgcctgacctcatgattcgtccacctcagcctcccaaagtgctgggattataggtgtgagccaccgtgcccggcctatttaaacaagtttttaaaataaattattktattttaacttatcatattcctttattcagggagataagttactgagataactggtagtaggcaaagagaagaaacagggt

SEQ ID NO: 479858 - DNA, 445 bp, Homo sapiens
tgttaacggatcatattttactgctgaaacyatcatgtgtgatataattgctcattatgtgccttaaaacacaagcaatataattattttcaacttggagcaaattaaaatcttatcagcaatttaaaatctctagagtcgtcttcttctggttaattattttaaacttgtatttttctctttatgtttttagtgagttctcttatcaaggagaagaactcaaggtgattattctttttttctcttccatgcacctcacaggtgtgttaataatttcatttctcagaaaatgttctttcatatctatcttacatgatgagagaccttttaacatcttccattcggatgtcataccagtaatggaaaatattccagcttcatgaatatggtgatacaaatagttatccgtctaacctctttcagtgccaaatgtttactatactca

SEQ ID NO: 479859 - DNA, 323 bp, Homo sapiens
tatgaaatacatccatggcctaacgacttctcaccactactaccactcatcctgacagcattctcacctaagtcactaccttttttcgctggattagagtagcctcccaatttatttgctcacataacctatttattctacacagtgcaccagatacaccccctttgaaatgcaaacacaatcatattatwctctggtgaaattatctcatatattcctatcgcatttaaaattaattcagaatcatcccatgattatcaaaaccctacatgctcttccacaacatggtttacttccaagatatctcttcaacatttttttca

SEQ ID NO: 479860 - DNA, 472 bp, Homo sapiens
gctgcttaaccttttttgatttttatctggttcctcagtgcaatgacaatgtctgctgtctctgggattcgtctctactgctgtcacggagaatctgggaataaagcaggactcattctggctccttctcttctcttgccgagcacagtcctgtgctgcctgatgttcagtacttcaaaaaaatgtttcatatattttgtccagtttactattctttaactctaaaagtgtaactccagtcccagttacagcatcatgttctgtaactctactccttcttgcttcattctgccattgtctggtatgatctcccgtttcccttctgtaatcaggccaagagcataatataatactagttataactgcacaggttgccttcgttgtgtaaaaaaatccctgagacttaactgtgtccaacttttaaaatgtgaatataagtacaactaaagytatattttggttaatatttgca

SEQ ID NO: 479861 - DNA, 659 bp, Homo sapiens
cctctatcttccccatgtaaactaggctgagaaattccaagatgcgcctgagaacagccaaccccagtgcccactccaggacaactgggaagaggaaaaataaaatagggagaattctctcttccacaggttcattagctatggctggaacccagaccctcatgcttgggaaactctgtggataaagagttaacaaggtagtgctttagcaaacaccagaatatcctggtacacctgctgaaaatgcaggtgcctgacctctccccctagactggttcaggctatccttttagggatctccagttttgaccagtgccccagttgctgctggtgcaaatcgtccctggccccacctggggaaccgccagactagagtctggtctggagctggagtcccctcctttgtttaatgctggcttcgagaacacaggagatgaattatgcaggtctgtggagactttcaggaagacctcagccaccttgttaattggagctcaacagaaccgagattggaggttggaataaaaatagctgcatgcaggttgaaaggtaaaattagctttggtgtcaggaatttggtttcaaggttgtgcgggagatggggtgrggagtcagggaactgcatgtttgtgttctagtgtttgtgtgggtcatttgga

SEQ ID NO: 479862 - DNA, 659 bp, Homo sapiens
cctctatcttccccatgtaaactaggctgagaaattccaagatgcgcctgagaacagccaaccccagtgcccactccaggacaactgggaagaggaaaaataaaatagggagaattctctcttccacaggttcattagctatggctggaacccagaccctcatgcttgggaaactctgtggataaagagttaacaaggtagtgctttagcaaacaccagaatatcctggtacacctgctgaaaatgcaggtgcctgacctctccccctagactggttcaggctatccttttagggatctccagttttgaccagtgccccagttgctgctggtgcaaatcgtccctggccccacctggggaaccgccagactagagtctggtctggagctggagtcccctcctttgtttaatgctggcttcgagaacacaggagatgaattatgcaggtctgtggagactttcaggaagacctcagccaccttgttaattggagctcaacagaaccgagattggaggttggaataaaaatagctgcatgcaggttgaaaggtaaaattagctttggtgtcaggaatttggtttcaaggttgtgcgggagatggggtggggagtcarggaactgcatgtttgtgttctagtgtttgtgtgggtcatttgga

SEQ ID NO: 479863 - DNA, 316 bp, Homo sapiens
gcgcttgttaatcaattataaaataataataatgaacacttcaggagagaggatggaggttgaaagacagtggagggctggacttgaggttggaagatttgcagagacctggattgtgcattcgacctttacaaattgaagcgagaggctttgcatctctgaacatcaggattccactctataaaaaggagaatgaaagcattcagtttataggtttgctgtgagggctcaacgagaatgtggatccaaaaaagctttggaaaccaaaataccgctrgttagcttgctgctttattatccaaaagaggctgcaaag

SEQ ID NO: 479864 - DNA, 536 bp, Homo sapiens
ctgcccctaggttttcctctctgctggttttctgaaagctgtctccaccatgagcagctcttgtcattgagactgacttccctggaggtgaggactttgtcctcctctcttctgttctatctgggcccttaaaataggaattttgccctgcrttctctggaaaatcctggggaggggttcttccctatctcttcaccctttactcttccctgtgggagaaagagcggatttcccctgagctgcagcttgccttccatgacctgtgctggctgcaggtgtagaaagcgttccctacggtgcggaagaagaaggaatgcgagaagctggctgtctcaggcttctgccccttctccagcgctgaccacctcacaggcctcggagaagggtcagggctctgaacagatgcagccccgtggcgagcagcttcaggacggtctcccatcgtctttgtcttctgcttgcattaggctgaatcaacggggtgtggcaggggagaggctctggtgcatttttcaaatctgtctgttccataacca

SEQ ID NO: 479865 - DNA, 536 bp, Homo sapiens
ctgcccctaggttttcctctctgctggttttctgaaagctgtctccaccatgagcagctcttgtcattgagactgacttccctggaggtgaggactttgtcctcctctcttctgttctatctgggcccttaaaataggaattttgccctgcgttctctggaaaatcctggggaggggttcttccctatctcttcaccctttactcttccctgtgggagaaagagcggatttcccctgagctgcagcttgccttccatgacctgtgctggctgcaggtgtagaaagcgttccctacggtgcggaagaagaagsaatgcgagaagctggctgtctcaggcttctgccccttctccagcgctgaccacctcacaggcctcggagaagggtcagggctctgaacagatgcagccccgtggcgagcagcttcaggacggtctcccatcgtctttgtcttctgcttgcattaggctgaatcaacggggtgtggcaggggagaggctctggtgcatttttcaaatctgtctgttccataacca

SEQ ID NO: 479866 - DNA, 659 bp, Homo sapiens
ctctccaaggatgtagaaaagaaagatttcctcggtcctctgtgcatgccccaaaggacatctaaaatcttcccaaggttaacaccagaataaaagagacctttggcaattgtgatattgtgagaatttccattcgataaagataatggaatttttaaagtacttcttggttgctattaggtccatgctgggaaaatgatggaaaaaatccagtaaaaatatttttttaatattagtgggaaataatatagagaaaaagaaaatcccccgctaatgaggaacaatctaatttctggaaatggccactgtgtggatagattttctgtaatttcgattatggtatgattgattaatctgggatggccaacaagaatgtaaagagtgtctggtcacagattctttttttttttttttttaattttattrtactttaagttctgggatacatgtgcacaatgtgcaggtttgttacataggtatacacatgccatggtggtttgctgcacccatcaacccgtcatctacattaggtatttctcctaatgctatccctcccctagccccccaccccccgacaggccctggtgtgtgatgttcccctccctgtgcccatgtgttctcattgtctggtcacagattctagggaatgggagattgag

SEQ ID NO: 479867 - DNA, 602 bp, Homo sapiens
ggaggttgtctctgttttcgtgaaaactgcagcctatttggaggagccagcrttaaacaaacaagtaaaaagtaattaaaactatgaatgtgataggttctacaaaggaaaagcttactaggagtgcctccaaatttccttgtatcactgtagtccagtggttctcagcagagggcaactttgcctgccagggaatatttggcagtgtctgaagatattttgggggaataggtgctcctggcatctggtgagatgaggcagagctgctgctaaatacagtgtataggaccgcacaggaccacaatgatctggccccagatgttcacagtgtggagattgggagacccctgctgtaacccccttccccagcataatgtcctgtaacagatacaccaaaaatgcttgctgaataaatgggtgaagaaaggaagtcattcagttgtggtggccagagatgccagtgcttcttagatgagcacctgtgaatgatttctccaatctttgcagggtggggcaggacttgtgtcatcgcaggtatggggctgggtcgcttgcacaaatacccatgctcagaaaggccccagcttggttgaatgctctgc

SEQ ID NO: 479868 - DNA, 624 bp, Homo sapiens
acgaggagcctgctctgtgctgggtccaccctaggcaaggacaacaaacttggtgcctgcccttaggagcttatggtccgggggggtgggtggcaataaacaattagacacatactaagttgaaccacacaaaactgccatttttgtaggtcataattggttaaacaatttcatatgattgccttaaatactacaaagaaaactaacagaaagtagtccttaagaataacaaggggaccaggcacagtggctcacacctataatcccagcactttgggaggccaaggcaggaggatcacttgagcccaggagttcaagaccaacctgggcaatatgacgaaatcctgcctctactaaaaatacaaaaaaaatagccaggtgtggtggtgtgtgcctgtagtcccagctactcgggaggctgaggcaggacgatggcttgagcctgagagacggaggttgcagtgagctgagatcgtgcccccgtactccagcttgggtgatagagccagaccctgcctcaaaaaacaaaaaccaaaaccaaaaacgaaacaaagactaacaaggagcttgccctatctagacagsgtggtcggggagggctgggagacagggtggcatttagga

SEQ ID NO: 479869 - DNA, 456 bp, Homo sapiens
tggcccgaggctctggaggggacactagagctgggtactgacagatggcagtagaggagtgtgcaggcagaagagaccaggccggtgtagggaagaaggctgagagcagagacagcaggcgcttctgcctggggagatgcttctctggaccaggcggatgtgcccctgtgctggcagtgcctgtggctggacaggtagacaagggcagctctggaagggcctgcaggccccaccctgtggttgggatcttccctaggcaggaccagtaggttaggcttaagagccactggtttcctaacagccaggtgctggggccatggggatttgtgaatcccagaaaccgtccttctgctgaaaatgaatgccactcatcccatcccgtcccttggcaaatattaggttagagctcccaggcggyttcctcaggctctgcaacctgctcccagttgcccgcag

SEQ ID NO: 479870 - DNA, 455 bp, Homo sapiens
gctggttgcgctgccgctccatgggaagcaggatggccggggaggcatacacatgtgtggagccatcgtcccagggcaccaggtcaatgatgcgggccatagctggggggcagagggttctaaggggctcaccctgggctcatgctggccagacacccttctctgcatgaaaacaaccttggccagtgccgatgtctacttgccaaacatttatttagcacctactgtgtgccaggccatttttctggagctcagcatgaggtggcaggaacattcagataacagaagataacagagacaaccctcccactccccttccaacacacacayacacacacacacacacacacacacactcacattgtgcccatggctgtgagggaggtcagtacagagtgtgtgtttctggggaggctggggttaggacattcaaggaatggtctaaaagaggtggt

SEQ ID NO: 479871 - DNA, 569 bp, Homo sapiens
atccccaccctgggtctgtcttcctgcctttgttcatccacaagcattactgagcacctaccgtttgccaggcactgagcaggtgctacagggcacaaggcacaaacttcaggtgagacggttttgaggtttttgtgaatcaaaaggtacagtgaaaaaatgtcaaaactgctgatatctagtacaaaatatgatgttcacgagttctccctgacccctaccccacccctgcccgcagcttggaccctcaccctatccctgaacctcccyattgccagccccaggccctgggttaggacatcattttgcaggtaactttgtaatcgacaccgctataactctgtagcagttaataatttagtcctgattggtgtgttggttccggaagagaccacaggccccattcctgagccccaggtccagttagaataaaaagagccagtgaatgagcccagggcgggccagagggcatgagttagcccatgagaacagctatggtccctgtttttgtgatttgagagaagagttggggggagaagggaggacttgagagtagcctgcctggaacg

SEQ ID NO: 479872 - DNA, 549 bp, Homo sapiens
  misc_feature (1)...(549): n = A,T,C or G
gcatattctctgaaactactgtttgaaggacaaacaattttagcaaaccagtcaatacaaagggactattactcaacctgtttgctttcactgtatctgttagggaacttcagggtaggaaatggctatacctgtactgcccaagacagcagcccttagtggacacttgaaatgtggctcgtctgaactgaaagtgcattaagtataaaatgcacactggactctgaagactcatgtgaaaaataaaagtatttcattaatttttgccgattattattttgaaataccagttttaaggaattggattaaaatataataccaacataaaytttccctatttctttttgctttattttttccnnntatggctactaaaaaatttaaaattatatcggttgacttgcattatatttctactgtacagcgctagcctgaagcaaagagatggtagagttccacacatcacaaaaaagaaataggagatttcatgggggaataaaacaaacttctgttgtcattatttaaaaataaagatctactgcatactaa

SEQ ID NO: 479873 - DNA, 549 bp, Homo sapiens
  misc_feature (1)...(549): n = A,T,C or G
gcatattctctgaaactactgtttgaaggacaaacaattttagcaaaccagtcaatacaaagggactattactcaacctgtttgctttcactgtatctgttagggaacttcagggtaggaaatggctatacctgtactgcccaagacagcagcccttagtggacacttgaaatgtggctcgtctgaactgaaagtgcattaagtataaaatgcacactggactctgaagactcatgtgaaaaataaaagtatttcattaatttttgccgattattattttgaaataccagttttaaggaattggattaaaatataataccaacataaattttccctatttctttttgctttattttttccnnntatggctactaaaaaatttaaaattatatcggttgacttgcattatatttctactgtacagygctagcctgaagcaaagagatggtagagttccacacatcacaaaaaagaaataggagatttcatgggggaataaaacaaacttctgttgtcattatttaaaaataaagatctactgcatactaa

SEQ ID NO: 479874 - DNA, 404 bp, Homo sapiens
atacatcaaaagcatcccttcaggagaggtgagcttgctgtccagacagaacactctcaccagacttgcattatggtatttgagtgtattttgccctgtaattggatagaaaaccgtgggaacgggctttcatgggaaaaacttgatgtgactgaagaggaactcctgggtttgttcacagagacgtgtacaaagtccaagcaaatgtttttggtcaygaaagccttagtgctatcattaggcctgtttatatttagacttcagatatttatcagtaccactttctcttaaactgtttattgctgatggtgggaaaccacgcaatttcacccacatttagggtcttctggagagaactttctaaggcactgccctaggctcatggaaaacaaggatgaaatgag

SEQ ID NO: 479875 - DNA, 654 bp, Homo sapiens
ggttgggagttcaagaccagcctgaccaacatggagaaaccccatttcaactaaaaatacaaaattagccggacatggcagtgcatgcctgtaatcctagctactcaggaagctgaggcaggagaattgctcgaacccgtgaggcagaggttgcagtgagccaagatcatgccattgcactccagcctgggcaacaagagtgaaactccatctcaaaaaaaaaaaaaaaagcaagcaacataggcaggaaggactggcctttcagcctcccatgtgagacccctcaaactggccttagtcaccttggggtcctgctctctggcaagaaccttggctcytctttttaaaaagaagtttgatctggcattttgcttcaagtttgttatgagcaaataattctcttcacaaatcatgtctgaagaggagagaagccagaacaaaataacaaaaaaaaacctttttaacctttcttgatgaaatgagtaatagcctaagaaaacatcactgatttcagtttgtctgtctcacaaaacacataaatacaacccagtctaatccttaacttcacatgatcctctcaagtgaccgaaaagctccaagggggtgtatgtaattcaacaaacccctactagctaacaaggccctccaaagcag

SEQ ID NO: 479876 - DNA, 545 bp, Homo sapiens
tgggggactcaggtctctccccttgatttggaaccagagcctgacaccttccctacccccaccctccatcccctggtgccctggggggatttattggagtrtatcaacctctccaacagcccctctaagagtcaggcttcaaagggtcctttcccactgccctgggaagatggaggtcttatttcggggtgaatggggggtagggtagaaaaatctcaaacaaaataagtatttttttaaaaaatgtataaatgttgttttcttatagtacagacaggtcttgctatgttggccaggttggtcttgaactcttggcttagccagtcccccaccccaagcctaaaattagtatcttgactttatttgggatgatggtaacagtcaagggtcggttgtgggccaggtgcttttacaaacaatatcctcacctttatcatatatttttttctttcttgtttttcatttttgagacagagtctccttctgtcacttaggtggagtgcagtggcacaatctcagctcgttgcaacctccgtctctgggtt

SEQ ID NO: 479877 - DNA, 619 bp, Homo sapiens
gagttcagcaagggtagagggatatgagagtgaatgtggcccactggcctccctgcctgcagtctctcctctctgatccttgcttcctaagggtcttcactgagccccacctctgaccaagtccccggcggcacaggcagcacagatcctctgctgtacytacaccaagaccccagggccaacgcttctcccattgtgcagctccacctctgcccccggggcctagctgaggcctcctccaagctgagccacctactatcttccaaactcccaccctccatctggtgtcacctcctcccagaagccctctgtatcagtttcctgttttctgccataaaaaaaatcactccaagtttagtggcttaacatgacacaagtttaccattttacagtttaaaaggctagaagtccaccatggccctccctgagctaagatcaagctgtcagcagaaccagattccttctgggggctataggggagaattaattccctcgctttctgcagcttctagaggcttcccccattccttggcttccctccatctacttttatttagggcgagggaagcttcctgctctgactttctcatttatggtattctcccctgctttccagcag

SEQ ID NO: 479878 - DNA, 619 bp, Homo sapiens
gagttcagcaagggtagagggatatgagagtgaatgtggcccactggcctccctgcctgcagtctctcctctctgatccttgcttcctaagggtcttcactgagccccacctctgaccaagtccccggcggcacaggcagcacagatcctctgctgtacctacaccaagaccccagggccaacgcttctcccattgtgcagctccacctctgcccccggggcctagctgaggcctcctccaagctgagccacctactatcttccaaactcccaccctccatctggtgtcacctcctcccagaagccctctgtatcagtttcctgttttctgccataaaaaaaatcactccaagtttagtggcttaacatgacacaagtttaccattttacagtttaaaaggctagaagtccaccatggccctccytgagctaagatcaagctgtcagcagaaccagattccttctgggggctataggggagaattaattccctcgctttctgcagcttctagaggcttcccccattccttggcttccctccatctacttttatttagggcgagggaagcttcctgctctgactttctcatttatggtattctcccctgctttccagcag

SEQ ID NO: 479879 - DNA, 509 bp, Homo sapiens
ctgagtatgtgtcaagcgtcctctggggaagtgggagctggactccagggcttggcctcagcagagggggaggttgtgcaggcagagggttctggggccaccaaaggaggcccagcctgggaagtttgcagggktggggaccccagagctggccaagctcttgactggcctgggcagcatgtggataccatctgatagcggaggctgccctgaggtcatgtcgggtctccctgcagcctgtgactctggtagagtgcggaccgatgcccctgactgctacctgtctttccataagctgctcctgcatctccaaggggagcgagagtaagtacaccaccctgtggcccccattcctgctcgtgcccatcctgttagtgtgtccacggctccttccaggctcaaccccacacagggcatgcttgtgggtggccaaacctgagggcagcaataccttcagtggggtcacttcctaccccctcccatcaatacaccctcaaaggctggaaaca

SEQ ID NO: 479880 - DNA, 624 bp, Homo sapiens
ctgtttctgtctcaagaaaggaagggctgctcccgctgacatccaggcgtaagcaacgccctggtgaacatcctcgtagctagagctttgctcacattctggatggcttccttaggctcartcctcaaagtggactcctaaagggatatatgaacttttattttttaaatgtttgaaaccgtgttgtcaaatttctctcctaaaagattgtgccaatgtagagaggctgccgaccgctggaagcttcccaatcccccagcacctatcccttgtgggtgggatggatcctgtaccatcgccagaccctcaagaaccccttgtcctgcacggtcccttctgtccctcctggtgaaatggaaggagcatgcatgccttgggaagctggtgctttgaggcattcagatcttaccgtggcatcatgtttgaagagagaaatagcttgctgttttgtgtgtctctcaatagtcttattcactgagttcttgaaggtgtcctgtgtgtttctggactgcagaatccttttattgaaatggacaggtcagtgttttcccagagaaagacctatccagtaggagttcacaagaggattttaggaggtatgtggagagggcatccgattccatt

SEQ ID NO: 479881 - DNA, 624 bp, Homo sapiens
ctgtttctgtctcaagaaaggaagggctgctcccgctgacatccaggcgtaagcaacgccctggtgaacatcctcgtagctagagctttgctcacattctggatggcttccttaggctcaatcctcaaagtggactcctaaagggatatatgaacttttattttttaaatgtttgaaaccgtgttgtcaaatttctctcctaaaagattgtgccaatgtagagaggctgccgaccgctggaagcttcccaatcccccagcacctatcccttgtgggtgggatggaycctgtaccatcgccagaccctcaagaaccccttgtcctgcacggtcccttctgtccctcctggtgaaatggaaggagcatgcatgccttgggaagctggtgctttgaggcattcagatcttaccgtggcatcatgtttgaagagagaaatagcttgctgttttgtgtgtctctcaatagtcttattcactgagttcttgaaggtgtcctgtgtgtttctggactgcagaatccttttattgaaatggacaggtcagtgttttcccagagaaagacctatccagtaggagttcacaagaggattttaggaggtatgtggagagggcatccgattccatt

SEQ ID NO: 479882 - DNA, 488 bp, Homo sapiens
ggcaacagtcacccctgcatcatyactgactcacagaaatggatatgccctataaggacatctcttgcttgccctgccagcatttgtgggcgggggaggaaatggccactaaccattcctgaaggcacctcccaagggacccctgaaaggagggtgacgcctcccagaaagagaccagtggcccagcccagccctgctcttagttttgtttcctctgctttgaatgccagcaaggcctttccctcccagggcctcagtttccccatctttacaatgggcacagcatagacccatcactggggctctttctgctctgccaccctgtgcatccaggctcaggtgttatccgaagccctgacatcatcagccattcccggggggaaggcagaggcgctgggttctctgtgtccccctggtagggcttggtgtaggattcagggaggattggagggcctctgtggcctcaggtcctcccccagggtccccag

SEQ ID NO: 479883 - DNA, 469 bp, Homo sapiens
tgagttgtccaccccaccgctgggtaccagggaaggccctgtagagccccaggaggtccccgtgttcgyaatcagcagtaagggtgctgatccactgccacccctgcttcctcccaactccagcaaagtcaagatggtttgaccatgccttgccttcacctccggcatgagccactgtcttagtccaatcatctagcacccttacatgtgtaaaatgcgttcattatacatcagtggcttgcattccaattcatctttgtagctgccctggagcacggtggggtggggtgttgcactggggaggtgtcagggtgggtgggatgttgcactgtggaggtgtcatgctggggtgctagggtagggagtggtgtgttcctgtggggatacactgttgggtgaggggtggtgagatggaaaggtaggctattaggctgctgggtgtgctgtggtgttgcatggggtgagggtg

SEQ ID NO: 479884 - DNA, 604 bp, Homo sapiens
tgcttccctgacacatgcaggtcctagcctggacgagacagagcaacaaaggccgagtggggacgaacactggcctggctttcaggtccacctttgcctcacgcagatgcttctctaccctttatgattgagatcctggagcaggggatcacctagttgtaaggaccataaagtggagaaggagcagggagmggttaggaccattgctgcaagctcctggtgtccctgacagtgagagaggcaggacactcgcctgggctgggcctgaggatgctgctttctcctctgcatgcctggggtccaacgagggtcatgggacccaggaatgtctctgcaactctgtctgtaaacatccaggagctaattgtgacctggaagtcattcggaactcagcacagaggccttcagaagtccctgccttcagataagggcaggtgcttactcctctcccagtggctagcactgttaaaacagacttttttttttctatagccaacatcataacaaatgatgaaatactcaataactccccctaaaacggggagaaagggaagggtttctgtttttgttttcatctcttctagtgagcattgggctgggaggt

SEQ ID NO: 479885 - DNA, 604 bp, Homo sapiens
tgcttccctgacacatgcaggtcctagcctggacgagacagagcaacaaaggccgagtggggacgaacactggcctggctttcaggtccacctttgcctcacgcagatgcttctctaccctttatgattgagatcctggagcaggggatcacctagttgtaaggaccataaagtggagaaggagcagggagaggttaggaccattgctgcaagctcctggtgtccctgacagtgagagaggcaggacactcgcctgggctgggcctgaggatgctgctttcycctctgcatgcctggggtccaacgagggtcatgggacccaggaatgtctctgcaactctgtctgtaaacatccaggagctaattgtgacctggaagtcattcggaactcagcacagaggccttcagaagtccctgccttcagataagggcaggtgcttactcctctcccagtggctagcactgttaaaacagacttttttttttctatagccaacatcataacaaatgatgaaatactcaataactccccctaaaacggggagaaagggaagggtttctgtttttgttttcatctcttctagtgagcattgggctgggaggt

SEQ ID NO: 479886 - DNA, 604 bp, Homo sapiens
tgcttccctgacacatgcaggtcctagcctggacgagacagagcaacaaaggccgagtggggacgaacactggcctggctttcaggtccacctttgcctcacgcagatgcttctctaccctttatgattgagatcctggagcaggggatcacctagttgtaaggaccataaagtggagaaggagcagggagaggttaggaccattgctgcaagctcctggtgtccctgacagtgagagaggcaggacactcgcctgggctgggcctgaggatgctgctttctcctctgcatgcctggggtccaacgagggtcatgggacccaggaaygtctctgcaactctgtctgtaaacatccaggagctaattgtgacctggaagtcattcggaactcagcacagaggccttcagaagtccctgccttcagataagggcaggtgcttactcctctcccagtggctagcactgttaaaacagacttttttttttctatagccaacatcataacaaatgatgaaatactcaataactccccctaaaacggggagaaagggaagggtttctgtttttgttttcatctcttctagtgagcattgggctgggaggt

SEQ ID NO: 479887 - DNA, 604 bp, Homo sapiens
tgcttccctgacacatgcaggtcctagcctggacgagacagagcaacaaaggccgagtggggacgaacactggcctggctttcaggtccacctttgcctcacgcagatgcttctctaccctttatgattgagatcctggagcaggggatcacctagttgtaaggaccataaagtggagaaggagcagggagaggttaggaccattgctgcaagctcctggtgtccctgacagtgagagaggcaggacactcgcctgggctgggcctgaggatgctgctttctcctctgcatgcctggggtccaacgagggtcatgggacccaggaatgtctctgcaactctgtctgtaaacatccaggagctaattgtgacctggaagtcattyggaactcagcacagaggccttcagaagtccctgccttcagataagggcaggtgcttactcctctcccagtggctagcactgttaaaacagacttttttttttctatagccaacatcataacaaatgatgaaatactcaataactccccctaaaacggggagaaagggaagggtttctgtttttgttttcatctcttctagtgagcattgggctgggaggt

SEQ ID NO: 479888 - DNA, 637 bp, Homo sapiens
aaacatttatacaggatttgctgtttgtgatcttacactttgtagcagctatgtacttagatagatacataatagtactctccttgtgatgaatgtttatgtgttttttttaacttcaaaatgatttatactgggagttaaaatgttgcgtctttcttttaatatgcagcctaaacactagataactgtaaaacaagagaagaaaagggaaaaaaaatcgatgtataaattttgctacaccawcaacaaaatgacagcaaaccttctgtgtccaaacatttaaatattttactgtccaaatgactattttagcaacaatgccaagaaagagaagagtctaaaaagattgtggaaattggcttaaactaaaatcttgtgacttcccagcaaactccattttcttaaatagtgaagaaagaaaaaaaacaaaactagttttgaggcatatttaggccctagtgctcagtatgtattgggcactttgtatgtatgtatgtatgtatgctcagtatgtattgggcactttgtatgtatgtatgctcagtgtgtattgggcactttgtatgtatgtatgtatgtatgctcagtatgtattgggcactttgggaggatacagaattgaagaagaaagatgcct

SEQ ID NO: 479889 - DNA, 607 bp, Homo sapiens
tacaacccaggggacaaagataccaaaattgccaagaggatggctgtgttgatcttcaccgacttcatatgcatggccccaatctcattctatgctctgtcagcaattctgaacaagcctctcatcactgttagcaactccaaaatcttgctggtactcttctatccacttaactcctgtgccaatccattcctctatgctattttcaccaaggccttccagagggatgtgttcatcctactcagcaagtttggcatctgtaaacgccaggctcaggcataccgggggcagagggttcctccaaagaacagcactgatattcaggttcaaaaggttacccacgasatgaggcagggtctccacaacatggaagatgtctatgaactgattgaaaactcccatctaaccccaaagaagcaaggccaaatctcagaagagtatatgcaaacggttttgtaagttaacactacactactcacaatggtaggggaacttacaaaataatagtttcttgaatatgcattccaatcccatgacacccccaacacatagctgccctcactcttgtgcaggcgatgtttcaatgtttcatggggcaagagtttat

SEQ ID NO: 479890 - DNA, 506 bp, Homo sapiens
tgtggctggtgcgcaagcgcgggggaggagcctccactcagaacactgggaggagtgagaagcagttcgtgggccagcgcgggatgagacttgtctctctcagggcctttcagggaagggttgcggcctgtctgcaagccttagcctctgccggagagagcccccacagctccgaacacctaacaaaggaaacgtaagtgcagctccagtgattggagggggctcctctaagggccaggagaggacttggcaaaaggatcatctctctcccctgaactatggagcatgactgcgaatacaaaataccaaagagccarcgctgagtcagagcctgccggcaattactcttaagcgccatctactggtttgccgccgaaattacaatttcaaaatattctgccagtatagagcacctgtaaaacccagagcaagaatctagccacaaagatcccatacagagccttggccctctgaaagtatccagaaatgaagccaattgactatac

SEQ ID NO: 479891 - DNA, 618 bp, Homo sapiens
aaactgagccaagggctattttacaaagcccttataagatgccagtgaaacagtatctataaaatgacttgcagagtacaaggcactatggacacagtctatgaatatttgctttttcttagctttaatccaagtaatataaattaagatatgttatatatccactcttaacttaaaataaatctaattcagtccatttaggcttacataaattcctatggagctgaattttcagattgccaaagtatacaaaaaactccagaatgtaagatatattttaaaaactaatctgaaacatgtctttgaaagaacatgttttatagagaaagcaaataactattktaccatataaaataataaatcccttagtaaataaaccttttagatttaacttaggaaatccatcactatatagccttttcaaaacaaaatattaatataacttctctgaatatcttaggctttcaattagtaaattacttgtctaccattactctacagatacaacctacattgtatacaaatttatatacatttacatacacatccctcagccaagagaaaggggggaaaaagcccgaaatcaacagaggggtttttgtttatttttaggttctc

SEQ ID NO: 479892 - DNA, 618 bp, Homo sapiens
aaactgagccaagggctattttacaaagcccttataagatgccagtgaaacagtatctataaaatgacttgcagagtacaaggcactatggacacagtctatgaatatttgctttttcttagctttaatccaagtaatataaattaagatatgttatatatccactcttaacttaaaataaatctaattcagtccatttaggcttacataaattcctatggagctgaattttcagattgccaaagtatacaaaaaactccagaatgtaagatatattttaaaaactaatctgaaacatgtctttgaaagaacatgttttatagagaaagcaaataactattgtaccatataaaataataaatcccttagtaaataaaccttttagatttaacttaggaaatccatcactatatagccttttcaaaacaaaatattaatataacttctctgaatatcttaggctttcaattagtaaattacttgtctaccattactctacagatacaacctacattktatacaaatttatatacatttacatacacatccctcagccaagagaaaggggggaaaaagcccgaaatcaacagaggggtttttgtttatttttaggttctc

SEQ ID NO: 479893 - DNA, 452 bp, Homo sapiens
ctcaaacagaagcatggagttggaacgagaagctgagtccatgagacagcaaataaggagtccacgttggccaaagaacagggcaacacacgggactttgccaggcatctttgagagagaatggaatgggaggaatcaagacactgagggctagagacatgactgtayccctgggaaatgctgccacccagcacggcacggaagtcatggagacattcttcaaggctgccatgggccaaagactcacaaaattcatcatctcttccacctccaccttgctttaattagggctttgctgaagacaacgacttaacctaaagatcgagtccacggtgggagtactgggctccaagtcagggcagtgaaggcgcaaggtagtagactaacacccctccacctgcactggcacatcctccatgcatttggcaatctcaccaaacacagggtcaagg

SEQ ID NO: 479894 - DNA, 452 bp, Homo sapiens
ctcaaacagaagcatggagttggaacgagaagctgagtccatgagacagcaaataaggagtccacgttggccaaagaacagggcaacacacgggactttgccaggcatctttgagagagaatggaatgggaggaatcaagacactgagggctagagacatgactgtatccctgggaaatgctgccacccagcacggcacggaagtcatggagacattcttcaaggctgccatgggccaaagactcacraaattcatcatctcttccacctccaccttgctttaattagggctttgctgaagacaacgacttaacctaaagatcgagtccacggtgggagtactgggctccaagtcagggcagtgaaggcgcaaggtagtagactaacacccctccacctgcactggcacatcctccatgcatttggcaatctcaccaaacacagggtcaagg

SEQ ID NO: 479895 - DNA, 581 bp, Homo sapiens
tgtcaactctcacttatctgctcctgggtaattatatactccctgcttttcaacctatgctactatctcttgtgtgaattagatgatgacttgaagtctttttgcatatttaagtagcaatcctcacattgttgagagctaataaaacctaagaccaatgcattggaattcagagctcaggatacttctatgtgttactgaaatggacagtcctgtaatggtgctgtgccttgaggtctgattatcatacaaatttgaggagttctttttagcttaaagcaaaagaccatgyccacaagaccaggcccactccatagtcagtgcctcaagtaactgatgcagtaccaggaactctacaaggactcactaaacttttggcgaccaaggaatactttctatactgcctaaagcagaaactcttagatgtaactccatgcttttgctctattttcctttcttcctggaatggcttttctctttctttgcttagaaaaagtttatggctattttaagaaccaagttcagttccatctactaagtccagtcctctctaattttcctcactttacattcctacagca

SEQ ID NO: 479896 - DNA, 604 bp, Homo sapiens
gatgaagcatcctaatgattacagtggcacagaggtgttctttgagtgaaccaagcaaataaaaattaaagttcaaagtcactgggtaatctaagacattcattacacctgtgctgagccagtcaggcctgatcagccaaataggcatcaggccagtgagtgtgcaggagaaagtaaacacctctaagattcaccttgtttcctcccaagggtgtcaacattgtgggatgcaaacaatatttcaaataagtttgccttgaaaagcactagagggctttaaaaaactgctctgagtctcaagcctgggatatagatgggtgatcatatttatagttcattcaataaaaaattaaatacagatttaaaatcactatagcagccaatctgaaccaagaacgattggcatcaatgaatcaggcaayaagaaatcagatgctgataaaaaaaaaaaaaaagaaaaaagctacagcaaagtctttcccagccataagatgcaggaaaatgagagtgcttttcacagtggagaaggacagaatgattccataaagcaggcgggcaaaacccacagtagatctccagctatgagtagcagggtgtagctgac

SEQ ID NO: 479897 - DNA, 675 bp, Homo sapiens
ctgtaaacacagataaacttcacttgctaatctgcattcacctcctgctgtgtggcccagttcctaataggccacaaactgctactggtccgtggcctgggggttggggacccctgccctacatgatgatttctaccttcagcaacaatttatttctaatgacttgctcacatagcagagatgtccatctaccctgggactgacttcatctgctgaagtaggcaaccatacagggagcttatctgatgggaaggagggaaggatgctaccctcagatgaagccaaatttctgtggctctcaaagaagtcctttatgaccatccttgataaaacacccacataacatcacccttacttacttttatggcatttactacctcttatatattcatatacacacacayattaagacacatatatgtacatatattttaactatttatctatcagaatgagtttcacgagaacaaagtctttgttttgttcactgatgtattctgtgtctcgagtagtgtgtctcaatattgtaggtgtttgattcgttgaatggatatagaatatatatttttctccatgttgctacctgtcagcatggctaagacaaagagtaacagggcttaatcatattgcttaaaaacaacttctttctatcccaaatcataaaggctgaaaatg

SEQ ID NO: 479898 - DNA, 489 bp, Homo sapiens
aaaataatgagcagcagaagacactcaggaactaggtgtgcatcacaagtggcttggaaggatatagaccaaaaacacaagtgtagttatctctagatagtgggattacaggatggccttcattttctccaatactggattagtcttttattctttttataatgaacatrtactattttcacaagctgaaaattgatggaaaattttttggacaaaataaagattttatttctgcacagagagttaatttaattaacttaggatcactgtacttgacacccatgtcttgcttaccacccctcatagcagggtccttcatttgcatcatatcactatcaaaatcacaaccagtctatttcatgggagaaagtagggcaagatcaagagtcaggagaccatgaaatttaacatatgagcctccatcctctctttaaagccagtcctgcctcctgtctgtcaaatatttcggttggtggcaccactatctac

SEQ ID NO: 479899 - DNA, 489 bp, Homo sapiens
aaaataatgagcagcagaagacactcaggaactaggtgtgcatcacaagtggcttggaaggatatagaccaaaaacacaagtgtagttatctctagatagtgggattacaggatggccttcattttctccaatactggattagtcttttattctttttataatgaacatgtactattttcacaagctgaaaattgatggaaaattttttggacaaaataaagattttatttctgcacagagagttaatttaattaacttaggatcactgtacttgacacccatgtcttgcttaccacccctcatagcagggtccttcatttgcatcatatcactatcaaaatcacaaccagtctatttcatgggagaaagtagggcaagatcaagagtcaggagaccatgaaatttaacatatgagcctccatcctctctttaaagccagtcctgcytcctgtctgtcaaatatttcggttggtggcaccactatctac

SEQ ID NO: 479900 - DNA, 648 bp, Homo sapiens
ttattttcctaaagcagaggtcagattaggtcatctaccttccttagaaatgattatgcattacctactcagtagtttggcaygtgagaccatccacggtttgacttcagactttttgtttttattttaatttttttcgtagaccatttttttaggctttcagaacaattgagcagaaagtacagagtaccagtttattttctccagactgtctttttactcttatcttctaatgtgccatttgctctagccaaagtctaattaactcatgaacccccgaccctattgagactgattccccattgtatagagtcaagagagactgtgggtgatcataaggcttggcttctctaggtatgtttatccccttcaatggatccagatgaatacttcacactggatatattcattttctgttgctgtgtaacaaattaccataaacttagctgtggctcaggagttcagatacagcattacttactgggtcctttgctcagggtcttacaaggctgtggtcaagctgttgtcttggctgcattctcatctagaggtttaattggggaagaatctgcttccaggcttatatagattgctggcagaatttatatcctggtggtcgtatgactgagggtcctagctttttgctgg

SEQ ID NO: 479901 - DNA, 648 bp, Homo sapiens
ttattttcctaaagcagaggtcagattaggtcatctaccttccttagaaatgattatgcattacctactcagtagtttggcacgtgagaccatccacggtttgacttcagactttttgtttttattttaatttttttcgtagaccatttttttaggctttcagaacaattgagcagaaagtacagagtaccagtttattttctccagactgtctttttactcttatcttctaatgtgccatttgctctagccaaagtctaattaactcatgaacccccgaccctattgagactgaytccccattgtatagagtcaagagagactgtgggtgatcataaggcttggcttctctaggtatgtttatccccttcaatggatccagatgaatacttcacactggatatattcattttctgttgctgtgtaacaaattaccataaacttagctgtggctcaggagttcagatacagcattacttactgggtcctttgctcagggtcttacaaggctgtggtcaagctgttgtcttggctgcattctcatctagaggtttaattggggaagaatctgcttccaggcttatatagattgctggcagaatttatatcctggtggtcgtatgactgagggtcctagctttttgctgg

SEQ ID NO: 479902 - DNA, 621 bp, Homo sapiens
acttgttcttcctcactcatctaccaagaggaaatttacatttagcaaagtaagatgtctcctgtgcattgttcatgttggttgtctgatagtctctgtagtccaaacaactaagttgttaacatttcatttttctgccagttgctttattgtaatgtggatactgccttagaatattttcatgctttaaaatatgttgtkccaaagaggtttggaaaaaactacatctccaactccaaggcaaacccatccaaaaaaaaaggtagcattagaagtgctctatatagtggttcatatttccttatacattttaatttcctcactcacaaatccttcaagaaactactctccaacattcctttttaagcacaatcttcaaggaaataagagagaaaaatcaagaaagcctcttgtcactgcaggtggcttttcatggtggcaagagtatctccgggaaattgccttaatgttgcacatatccagctatttgtggtgagagcctagaaacccacaacagagtctgacaatttctctgagggacgttgtttgcttttgggaaatccattaactcttccagtctccgaggatccacttaatccagcactgtctaatagacatgtg

SEQ ID NO: 479903 - DNA, 581 bp, Homo sapiens
gaagataatcctccctattctttttctaatgaaatatcaatgagaattccatttaaaatcatttgtggaaagagatgtgaatagttagcactataaataacgtttttgtctatttttaaataggatctgatgccatcaaaagtcacaagaactggccgggcaaggtggctcacgcctgtaatcccagcactttgggaggtcaaggctggcggatcacgaggtcaggagattgagaccatcctggctaacacagtgaaaccacgtctctactaaaaatacaaaaaattagccaggcatggtggcggtcgcctgtaatcccagctactcgggaggctgaggcaggagaatggcgtgaacccgggaggcggaacttgccgtgagccgagatcacgccactgcactccagcctgggygacagagtgagactctgtctcaaaaaaaaaaagtcacgagaactgtctggaaatgtgagcaatttcaagcgagagattagttgttttacaaagttcattaaaatatgcatcaaccattcttcatctctttgaataaaggtaggacactatgtaattttatgtagattt

SEQ ID NO: 479904 - DNA, 549 bp, Homo sapiens
ctaaataaaataatgcactcaaatatgttgcttataagcatcaaatgcacaatgatacagaagacgaaagaattacatttcttaagtttcttaaaacaaatttcatctggactccaagactccattttccagtgttggtaaaagggccccatcagtcacattggctcctctctcccttgctttctccagtctcaggaaaatggccgagtgccctcagccttaatgcatgcgcacattcctaaggtcacatgatcattcctagacgttcaatgctaattggacttccttgattgccttaaatcaatattgatacattccctgggtctcggcacattgtcatayaaacaaagtcaacaaagaagaagtggaaatagctgttgggaaggccacccacagtatctactacaatcagattgaaaagaggttcccaaaaatatcaacaagagacaaagtggtgggaggaacgaaagagacattatgaaaatattgagactagaaatgtcatcataagctaatgtattaatttcatagggaaagaataaataaata

SEQ ID NO: 479905 - DNA, 501 bp, Homo sapiens
gccctttggtgacactgtgcccactccataccaaggtgccagctcagccatgcactttgtttaccccaacattgagtgcaggggtgtaggacttggtgatggataatcaccaaggattaccagggagccacatccctgttgcattctgttatttatggctcctcctcaaatacaactctagaaaatgtgaataatgcctcctggagttgatccttctgcccctacacttgggccttgagtgtggcaaaaaagcactagaaaattttctcttggaataggtcctcatctgcccatcatcatttagctaatagamtttcctgcttttgagggccttctttatttcctatgtgggaaagagttagggaaggggaaggggaaccagggctagaagccaagctagagtaagaaatccttccggtagtgtgcagacattttgggcagatctttttgtagccaccctctcatgtgcacacatcgtgttggactacctcaccacacacc

SEQ ID NO: 479906 - DNA, 519 bp, Homo sapiens
caaataattatgatgtttattttgctacctgcacataaaatgcttccttggctgctttcctgagccatacaattattttaagatgtgtttttcatgctctctgcagtcagagatatgtttcttttttaatttaaaataaaacgactttttggtaatcatatcaatttttctttcgggaagacactacttttttttttaacttactgtttaaaaaactgtccaaatcaatataactttcatggttgggtactggcttacttgattatgttaggggaatatgtatagtgttggaaayagcatttacttctctggctctatttgctttgtaggaataaccattcctacattaacaacatacaccattaatttagagtaagctctctattaataatgacaactgatttttttgtttaatttctctataacaaaatggcacactttacaacaagcccaaatttaaggctcctgtgggacttcagattacactgcatctttttaaagtttatgtttgatgaccta

SEQ ID NO: 479907 - DNA, 519 bp, Homo sapiens
caaataattatgatgtttattttgctacctgcacataaaatgcttccttggctgctttcctgagccatacaattattttaagatgtgtttttcatgctctctgcagtcagagatatgtttcttttttaatttaaaataaaacgactttttggtaatcatatcaatttttctttcgggaagacactacttttttttttaacttactgtttaaaaaactgtccaaatcaatataactttcatggttgggtactggcttacttgattatgttaggggaatatgtatagtgttggaaacagcatttacttctctggctctatttgctttgtaggaataaccattcctacattaacaacatacaccattaatttagagtaagctctctaytaataatgacaactgatttttttgtttaatttctctataacaaaatggcacactttacaacaagcccaaatttaaggctcctgtgggacttcagattacactgcatctttttaaagtttatgtttgatgaccta

SEQ ID NO: 479908 - DNA, 519 bp, Homo sapiens
caaataattatgatgtttattttgctacctgcacataaaatgcttccttggctgctttcctgagccatacaattattttaagatgtgtttttcatgctctctgcagtcagagatatgtttcttttttaatttaaaataaaacgactttttggtaatcatatcaatttttctttcgggaagacactacttttttttttaacttactgtttaaaaaactgtccaaatcaatataactttcatggttgggtactggcttacttgattatgttaggggaatatgtatagtgttggaaacagcatttacttctctggctctatttgctttgtaggaataaccattcctacattaacaacatacaccattaatttagagtaagctctctattaataatgacaactgatttttttgtttaatttctctataacmaaatggcacactttacaacaagcccaaatttaaggctcctgtgggacttcagattacactgcatctttttaaagtttatgtttgatgaccta

SEQ ID NO: 479909 - DNA, 519 bp, Homo sapiens
caaataattatgatgtttattttgctacctgcacataaaatgcttccttggctgctttcctgagccatacaattattttaagatgtgtttttcatgctctctgcagtcagagatatgtttcttttttaatttaaaataaaacgactttttggtaatcatatcaatttttctttcgggaagacactacttttttttttaacttactgtttaaaaaactgtccaaatcaatataactttcatggttgggtactggcttacttgattatgttaggggaatatgtatagtgttggaaacagcatttacttctctggctctatttgctttgtaggaataaccattcctacattaacaacatacaccattaatttagagtaagctctctattaataatgacaactgatttttttgtttaatttctctataacaaaatggcacactttacaacaagcccaaatttaaggctcctgtgggacttcagattacactgcatctttttaaagkttatgtttgatgaccta

SEQ ID NO: 479910 - DNA, 555 bp, Homo sapiens
gcaaaaggtttttctcatttcttcttgtcacttatggtaaaatttgagaggagagacaaaaattacggaaaaaacacattaaacaaaatcaattgttaagcaagtgtcccctgcaggaaaagatacagtagaggggttagccggatgctgtgtgatacacatacataggcagaacactggagcacatgctgaatctgaaagmgggaaagatattcccacacaaggtcataagtccagtacaggatgtgaggactctatctcttggttgagttccaagctcaactcctattcttatacggccgaaagagggtccaaagactgaaacacatcagactgccttcccaaattaaacaaggatctgatgattggggaagtgtgtagcctatccatatggtggaagattctaaaattaagatattgcttccaaaatatggcatagagtaaaagacaaggctgtggccatataattgtttgctaaaaccttagaaagaaaaaaaagtcagtcacaggaaaggatattttaaaagattaagagtatgccttacagatcctctc

SEQ ID NO: 479911 - DNA, 555 bp, Homo sapiens
gcaaaaggtttttctcatttcttcttgtcacttatggtaaaatttgagaggagagacaaaaattacggaaaaaacacattaaacaaaatcaattgttaagcaagtgtcccctgcaggaaaagatacagtagaggggttagccggatgctgtgtgatacacatacataggcagaacactggagcacatgctgaatctgaaagcgggaaagatattcccacacaaggtcataagtccagtacaggatgtgaggactctatctcttggttgagttscaagctcaactcctattcttatacggccgaaagagggtccaaagactgaaacacatcagactgccttcccaaattaaacaaggatctgatgattggggaagtgtgtagcctatccatatggtggaagattctaaaattaagatattgcttccaaaatatggcatagagtaaaagacaaggctgtggccatataattgtttgctaaaaccttagaaagaaaaaaaagtcagtcacaggaaaggatattttaaaagattaagagtatgccttacagatcctctc

SEQ ID NO: 479912 - DNA, 628 bp, Homo sapiens
ctctcacctggccatcaatatggaaacatttaatttaaaatagtttccagaaacatcaagagaagatgcatattagtgtgttaattattctcattctccatagcaggaactatgctttattcatccttgtactcctgaaagccaagctggccagtagaaggtttatagaaaatgtcttataaatatgtttgttttattgtacaacttttgtcttgtttatataaaatgtatatatagataagtgattttttctattagtcataaatattgayttcacatgtagatggtgtgaaatgcagatgtggatccacatttgaccaaacttgttcatcacagagttatcacaatctctgggtctaatctaagaaatatactgttttcttataccaagtcaagactctatgacctgctcctctacctattttcaccattctcatctcttcctatttacagcttcaagaaaggcctcctctgctaaaaatgctctctgattagccattcactgcttcctgaactatgaagacatcttctaggaatactcaggatcttctgctatgtggctttaatttattttaagattaattcctcattaccttcttacacaaagccaccattagcatatcaagca

SEQ ID NO: 479913 - DNA, 552 bp, Homo sapiens
ctgaacatcataaagtgcagaaccacacacctggcatccttgtccctacacaaggtatgttgctgttaaagtatmatttgttactctccaaagcacactcacaattccctacttgggtcccttgttgcatgttactgctcctcatttatgcatttggatgctttcttatatttttcctcaacctctaccacattcagttaggcactcagcctatatttcatgtatacctatgtagcaggtcttatgaccagagttggggatgcacagaaattgcagatttcttattcatgacattacttctcatccccacaactcaatatgataattcctttccctaaccaccccacttcccaatgcacatagtattttgtctgtactttcctttgggaatttacattttctactctttctagtactgtgcaaacatatgttttctttgccattaaacttaatggcatggacttaaaaatcttgatatctagaacagtgcctagccctgtaacttgaggatataaattaaacttaattgaattattcattaccttccttgta

SEQ ID NO: 479914 - DNA, 650 bp, Homo sapiens
agctggtgacccaggatagcagcagtctctgggaaggagaggggagggagagaccaagaatatgtccagaggaagtggagggagatggaactgctagtgagcagaggttccaaatacctgtgagtatgctctgttttctaaagagtttcaccagcaacacacaaattcaaagataaaagtattaagatttttaagatagagacgccattaaaccccaagtgctagtctttctatccccagagccttgccctctgtcactgctcttattgcaagctcattgagagagagagaccaagacagagagagagagagagagagagagagagagagagagagagagagagagagagagagagagaggagggaggaaaagaagagacaggaaaggggaaagaaagatattcttagcatttaggatgtgcctcactggaacatcaagtagtgttgagatgttggcattcatttcaccttaagtaatatctctttattttaaataycatatttatgaatacaagtaaaacataataacctctgaataaagattccttgatagactgtctttggggttggatgcatccctgacagcaacctgcctttcccagcactgcttttcagatagacccccagggagatttgtgtgcttatcatcc

SEQ ID NO: 479915 - DNA, 625 bp, Homo sapiens
gctaatgtgcataatactgtcataaacatgagaatttggatatctctttgagatacttattttccttggatttataccaagaagtgaaattgttggatcattccactagtttgaggcaatatggtctacattagagcttgaacttgttgtagcactatgttattgtctggatgccgcataagtcttgcatttcagatcactcagcaaataaattgaagtaatttttccttttgtgatgtgaactgtctataaagcccaaacagacctaccaagtcgtgtgcctctgtctgactgataggagctggaagatgtaagagcttgttgtttcatttgaggggatgccccagcatgttggtaactgtaggatagaagagctgtttctctagatgttgtgtattatttgatataaattgatgtgattctatttttaattgtaaattaaactttaaaatttaactaattaaataaagtttagttaatataattagtctatgtttatttttttgaggaaactccatcatattttccattatagttgtatcattatacattctcattcacaatataccaggcttcctttttatccacattctcacyaatacttgttattttttgcctcaaagat

SEQ ID NO: 479916 - DNA, 555 bp, Homo sapiens
taaaaaggtctagctttttcttcatagttcaaatgatttaattgtatgctttctaagtgtgtaatcgttatgtacctaagtttacattcccataatattttgtcatggatcattcagaaataaaattccaacataatctaaacatagacattttcttcattaagcggagtgatcmtttgctactctacatctgaatgagcaaggctttactcaaaccattataaaggaaaatcacagtacaatatgtggattacctcttccagatccttttctttacttctcatgttatgccacctaatctatcctttgaggctatatgaattccaacaatgatagaagtctgttctgctctatacatgttttccccgaggtctttaagctgtgaaatactcccttggcatgtatgaatcagcaagtatcagatacataaataaaaaataggtcatttagaaattcaaagaagtaatatttcagtatagagttattctctagggatggaattggaccttttatgatagaattttggtaggcagacaaaaatagagtttgcacaaa

SEQ ID NO: 479917 - DNA, 555 bp, Homo sapiens
taaaaaggtctagctttttcttcatagttcaaatgatttaattgtatgctttctaagtgtgtaatcgttatgtacctaagtttacattcccataatattttgtcatggatcattcagaaataaaattccaacataatctaaacatagacattttcttcattaagcggagtgatcatttgctactctacatctgawtgagcaaggctttactcaaaccattataaaggaaaatcacagtacaatatgtggattacctcttccagatccttttctttacttctcatgttatgccacctaatctatcctttgaggctatatgaattccaacaatgatagaagtctgttctgctctatacatgttttccccgaggtctttaagctgtgaaatactcccttggcatgtatgaatcagcaagtatcagatacataaataaaaaataggtcatttagaaattcaaagaagtaatatttcagtatagagttattctctagggatggaattggaccttttatgatagaattttggtaggcagacaaaaatagagtttgcacaaa

SEQ ID NO: 479918 - DNA, 643 bp, Homo sapiens
gctctgtgcagcagatgatctgtgcagcacattttcatggcagccacacttgggtctgagtggaatgtatagaattgtgtctttccaaataatcatttttgacaattattactgcayttttatactctaggaaaataaagatctttctaatcatttcaagattgaaatcatctttggtcatcaaacattatgtgaaaggacattacatttaaagaacacagtatcatcattttctctgcagtatccattacttttaacaacgtatgatctgaaagtatttgcctaaaatgtccttgagtgcgtgttagagtatctggaacatctttcatcataattcaaatgttatttgttcacatcatatttgtatttaattgcttcaaattaaaaatataaaaattagtcatttaaaagataaaaaatatctaatttaattatttaagtattttatacataatagacttggtcaatattttgacaaaattaactcccattattacttaatttgaagtggtgtacactactgggaagcactgtattaggttggagcaaaagtaattgtgatttttgccataatagtagtaaatagagcttagatttttgagttagaattaaataaaatactactgttcctcataaggactta

SEQ ID NO: 479919 - DNA, 629 bp, Homo sapiens
gtcaacagccagcaagaagctgagggccccaggctaacagtcctccaggaattcaatcctgccaataacaacacaaacttggaagtggatcctgccacagtagggtcttaagctctgattcctgaattccgttcttatgagagaccctgaagcagaggaccccgttgagctgtgctcagacagaaagtgaaccacagaaaatgtgaaataactaatgtatgtttttttaagctgctaaatttgtgataatttgttatacaacaatagataaccaatatacaggaactattaacaacacagtaatgacacaagtattaatttcagaaatggtagaaaaagatgacattagaaatacggaaaatgtcataatttttcaacttgttttctttcrctttgtttaatgcaagttaaagtataaatttaaaagaatataatgcattctttttaggtatacagatccatgagttttgattagtgtttgcaacatgatagagatatagaatattttcatcactccaagtttcctttgtgtgattactttcttctcctaaacactgttactttcaatacttacctgatttctgaccctattgtttatcctttttcagaataccctatgcattaaatca

SEQ ID NO: 479920 - DNA, 459 bp, Homo sapiens
cttttgcagatttctggggctctctctctgtgcaaccatctcttatccagctctgctctgcaaattcsagccaccttgacctcccaaattttcatcactgtttcttcaactgaggtagtacactgggctctgtttgggttcccgtatcctgcactgtgaccttgaaacttttcgaggtagtcagccagagtagtaatcataggacccacttaatttgtttttcttccttcagggatcactgtcctgtactgcctgttgtccaaacgtttgaataccattgtttcatatattttatcaagttttatagttgtctaaggcaggagggtaaatctagtctctatatggagttcctgcacattcaagcttgagaaacaatcttagaagacttcattagcctcattgtgtccaccaagttctatccaaacttgctcagagatggagtcatcccctaagatttta

SEQ ID NO: 479921 - DNA, 535 bp, Homo sapiens
ctgaaccttttgcagatttctggggctctctctctgtgcaaccatctcttatccagctctgctctgcaaattcgagccaccttgacctcccaaattttcatcactgtttcttcaactgaggtagtacactgggctctgtttgggttcccgtatcctgcactgtgaccttgaaacttttcgaggtagtcagccagagtagtaatcataggacccacttaatttgtttttcttccttcagggatcactgtcctgtactgcctgttgtccaaacgtttgaataccattgtttcatatattttatcaagttttatagttgtctaaggcaggagggtaaatctagtctctatatggagttcctgcacattcaagcttgagaaacaatcttagaagacttcattagcctcattgtgtccaccaagttctatccaaacttgctcagagatggagtcatcccctaagattttatgagacccaatacaatttttttttcrtaatttcttctcagatgccaccctttttctgaaaagaggtttct

SEQ ID NO: 479922 - DNA, 577 bp, Homo sapiens
ccctgcagggccaccccaaggaagcaagcaccagagacggcagcagggaaggaaagggttaggcaggacaagcaggtttaggattggccaattttcatgatttcagcaagctctggggcttaggagctatccctatcagatatcagatatctggctctgggcaattagggcaggtgcatagtggcctaaagcatgagaggtgaggcagtttggggtgtagactttgtttgtttgtttatgtgtgacaggatctccctctatcacsgaggctggaacgcagtgacacaatcttggctccctgtaacctcaaccttccagagtcaggtggtcctcccacctcagcctcccaagtagttgggactacaggcatgcaccatcacacccagctaatttccttgtattttttgtagagacagggtttcgctatgttgcccgggctggtgttgacctcctaggctcaagcaatctgcctgcctcagtctcccaaagtgccaggattacaggcgtgagccacggtgcccagccaagaagtatgacttaaccagctgcctaagaaggggatgtgaccagcctctag

SEQ ID NO: 479923 - DNA, 553 bp, Homo sapiens
cgagacagtaaaagcctaggatgtgaagagaaagataaaagaagcagagagatgcaaaatgtgtttaactaagggctagtagttattatctctaatccagatatagatagcactgtcagaaawgttaaattatcctgttgtataaattaaataactaaaatataaattagcaatatcagctattttttccttacagttattgagattttatgctttgctgaaacattcatttagccaaataaaatgcattaaaatttagcattaaagacaaagcaacaagatattttaaaactatttgtatgctttagctaattttctcaacagctctccacagttattactcttgttttttctgtaagtaatagttctcttggcattttggccatggctcttgattcacttagatattcaaaggtagaatacaaaagaaaaaagagacaatttgaatgatgcaaattgtaaagaagattttagtaactatatagattttaaaatataatcaggaaagaagaaaactgcattagaagtagtgatttaattttcaatcttgtct

SEQ ID NO: 479924 - DNA, 553 bp, Homo sapiens
cgagacagtaaaagcctaggatgtgaagagaaagataaaagaagcagagagatgcaaaatgtgtttaactaagggctagtagttattatctctaatccagatatagatagcactgtcagaaaagttaaattatcctgttgtataaattaaataactaaaatataaattagcaatatcagctattttttccttacagttattgagattttatgctttgctgaaacattcatttagccaaataaaatgcattaaaatttagcattamagacaaagcaacaagatattttaaaactatttgtatgctttagctaattttctcaacagctctccacagttattactcttgttttttctgtaagtaatagttctcttggcattttggccatggctcttgattcacttagatattcaaaggtagaatacaaaagaaaaaagagacaatttgaatgatgcaaattgtaaagaagattttagtaactatatagattttaaaatataatcaggaaagaagaaaactgcattagaagtagtgatttaattttcaatcttgtct

SEQ ID NO: 479925 - DNA, 553 bp, Homo sapiens
cgagacagtaaaagcctaggatgtgaagagaaagataaaagaagcagagagatgcaaaatgtgtttaactaagggctagtagttattatctctaatccagatatagatagcactgtcagaaaagttaaattatcctgttgtataaattaaataactaaaatataaattagcaatatcagctattttttccttacagttattgagattttatgctttgctgaaacattcatttagccaaataaaatgcattaaaatttagcattaaagacaaagcaacaagatattttaaaactatttgtatgctttagctaattttctcaacagctctccacagttattactcttgttttttctgtaagtaatagttctcttggcattttggccatggctcttgattcacttagatattcaaaggtagaatacaamagaaaaaagagacaatttgaatgatgcaaattgtaaagaagattttagtaactatatagattttaaaatataatcaggaaagaagaaaactgcattagaagtagtgatttaattttcaatcttgtct

SEQ ID NO: 479926 - DNA, 588 bp, Homo sapiens
aaacaaacgtacagcaagatttcacaatacttatccataaattgtgagaatccaagtaatcttccatagtttttctgccttttcttattctcttatttttttctaaataaccattacttatttctataaagtsctaaaatcaataaaagatttttattcatctgaaagtagggcaaatctgttttctttttgtttacaaaacctttttcatttgggcaggtgccatggctcacacctgtaatcccagcactttgggaggctgaggcggtcagatcacgaggtcagtagttcgagactagcctggccaatataatgaaaccccatctctactaaaaatacaaaaaattagcagggtgtggtggcaggcgcctataatcccagctactcgggaggctgaggcaggagaatcgcttgaatcctggaggtggaggttgcagtgagctgagatcgcgccattgcactccatcccctggatctagcagatggctctaacttctgaatatacggagtctaagaaaaaaatcattagggtctgtatgcatattatacatttgctaaggtatggccaaagcagtatcccagcctgac

SEQ ID NO: 479927 - DNA, 588 bp, Homo sapiens
aaacaaacgtacagcaagatttcacaatacttatccataaattgtgagaatccaagtaatcttccatagtttttctgccttttcttattctcttatttttttctaaataaccattacttatttctataaagtgctaaaatcaataaaagatttttattcatctgaaagtagggcaaatctgttttctttttgtttacaaaacctttttcatttgggcaggtgccatggctcacacctgtaatcccagcactttgggaggctgaggcggtcagatcacgaggtcagtagttcgagactagcctggccaatataatgaaaccccatctctactaaaaatacaaaaaattagcagggtgtggtggcaggcgcctataatsccagctactcgggaggctgaggcaggagaatcgcttgaatcctggaggtggaggttgcagtgagctgagatcgcgccattgcactccatcccctggatctagcagatggctctaacttctgaatatacggagtctaagaaaaaaatcattagggtctgtatgcatattatacatttgctaaggtatggccaaagcagtatcccagcctgac

SEQ ID NO: 479928 - DNA, 588 bp, Homo sapiens
aaacaaacgtacagcaagatttcacaatacttatccataaattgtgagaatccaagtaatcttccatagtttttctgccttttcttattctcttatttttttctaaataaccattacttatttctataaagtgctaaaatcaataaaagatttttattcatctgaaagtagggcaaatctgttttctttttgtttacaaaacctttttcatttgggcaggtgccatggctcacacctgtaatcccagcactttgggaggctgaggcggtcagatcacgaggtcagtagttcgagactagcctggccaatataatgaaaccccatctctactaaaaatacaaaaaattagcagggtgtggtggcaggcgcctataatcccagctactcgggaggctgaggcaggagaatygcttgaatcctggaggtggaggttgcagtgagctgagatcgcgccattgcactccatcccctggatctagcagatggctctaacttctgaatatacggagtctaagaaaaaaatcattagggtctgtatgcatattatacatttgctaaggtatggccaaagcagtatcccagcctgac

SEQ ID NO: 479929 - DNA, 580 bp, Homo sapiens
tctgcctcagttcttgaaaaggactaggcaattgttgattttacccttaaatgtgtgctgccacatgcaaatgtgatgaaattcaattttcttagttttttttaaattttcttctgtttatttgacaaacatttatttagcatctactgagggaagcaaaattcattatgacatacaggctttatcatggaaatgataaaatatggtgtgcagaccaaatcaactccatcttggttgccagtccactatgcyaacttctgattaaccccagttccaagaaggaactggaatctttaagatttccagtttatctattgttctttgcgtaagagcatgtacttaccataaatcttgcccttgggtcaaaacaaccttgaccatcaatgctacgttcacatagcattcttgcctttccttgggaggtcaacttcattgtcctacatgttacttccctatggtatataagccatgggtctggggggtaatggcacagggatccaccatcttgtcttgccactgcccaagacacacacatggcttctgttcctaagtccttattaaatgtttctttctaagcagc

SEQ ID NO: 479930 - DNA, 575 bp, Homo sapiens
tcctggtttcactggtgacaggaagacaacgtaaactcagctattagtgttgggcccacagcccaagctgcagccacagtcacagygtcatcactgcaccatgccggcaaggatggggtgcttgtctaggagctttgtgagcacagacaggatgctgcgtgcctttgtagagccagtctgtggtgtcaggcaggcaggaaatgtgctacccttgagtgaagcaggatcccacacatttggcttggttgtctgagaccagatttggaaagcactaaatcctggcctaagaagccagggctttattctgcaggaactggaaaatcattgtaacgaagggctaaagaagtatttggaaaggttaactggtggaaaggttaaggatgaactgaagataatacggttaactttttatgaacccccacaaagaagtcaatgtagggaaaactttgagttacattgtgagtaaaataagaataattgtgacatattttggatataaagtgaacatataaagtcaatcattcattcaataccgtagcacttttgtgttttctcaaaagaaaacatccaattca

SEQ ID NO: 479931 - DNA, 605 bp, Homo sapiens
tccttcccgaactcactccagctcctgtttaattccatagcatcaggatttccctgcttcccagctgcgcacagagctggaaccagtgagcagagctcagcagtgaggctttggattaattgttgcagtgggtayttgaaaagtaattgatttccatactcagtttgaactcaattgaaaaatcatttatagacttcactttatgggtgagacgcagagccaagtacagtgggttccaggccacaacagctgaacggaggaggcagcgcggcccctgcccaattgcgacctatgtcaaataataaaaataataataataataagtattattctctgaattatattactaacaaattaaatgccttattgagttggcacacgatagcaataatacgttttgtctcacttccctgtaaaaatcggtccgtgtttttgtaagatccttaaaagcaatgctaaccggcactcacatttcagtactaggctgagatttctaccagttttcttaaaacggatcactgagtagaacccatgagctatttgggaagacatcgctgcaacctcacagtccccctgcaaaggcagaggcctcaggtgaggcgggg

SEQ ID NO: 479932 - DNA, 605 bp, Homo sapiens
tccttcccgaactcactccagctcctgtttaattccatagcatcaggatttccctgcttcccagctgcgcacagagctggaaccagtgagcagagctcagcagtgaggctttggattaattgttgcagtgggtacttgaaaagtaattgatttccatactcartttgaactcaattgaaaaatcatttatagacttcactttatgggtgagacgcagagccaagtacagtgggttccaggccacaacagctgaacggaggaggcagcgcggcccctgcccaattgcgacctatgtcaaataataaaaataataataataataagtattattctctgaattatattactaacaaattaaatgccttattgagttggcacacgatagcaataatacgttttgtctcacttccctgtaaaaatcggtccgtgtttttgtaagatccttaaaagcaatgctaaccggcactcacatttcagtactaggctgagatttctaccagttttcttaaaacggatcactgagtagaacccatgagctatttgggaagacatcgctgcaacctcacagtccccctgcaaaggcagaggcctcaggtgaggcgggg

SEQ ID NO: 479933 - DNA, 605 bp, Homo sapiens
tccttcccgaactcactccagctcctgtttaattccatagcatcaggatttccctgcttcccagctgcgcacagagctggaaccagtgagcagagctcagcagtgaggctttggattaattgttgcagtgggtacttgaaaagtaattgatttccatactcagtttgaactcaattgaaaaatcatttayagacttcactttatgggtgagacgcagagccaagtacagtgggttccaggccacaacagctgaacggaggaggcagcgcggcccctgcccaattgcgacctatgtcaaataataaaaataataataataataagtattattctctgaattatattactaacaaattaaatgccttattgagttggcacacgatagcaataatacgttttgtctcacttccctgtaaaaatcggtccgtgtttttgtaagatccttaaaagcaatgctaaccggcactcacatttcagtactaggctgagatttctaccagttttcttaaaacggatcactgagtagaacccatgagctatttgggaagacatcgctgcaacctcacagtccccctgcaaaggcagaggcctcaggtgaggcgggg

SEQ ID NO: 479934 - DNA, 532 bp, Homo sapiens
tgatagacgcccttggggtctgaaacgtctttgcaagcatcctgtagctgactagcaggctcggatgagtgcttaagtgagagactaggttcttcatcagatggatgatgaaccattctggggcattttctctgaggaagcatggtgcagctccaaacctaggtaggagagatcacaagatcagcactcaggcatcatcagaagtgtttagaagagaaggagtacattagtccactagggctgccataacatttcatgagcccaaaggcttaaacaacaggtgtttatttctcacagctctggagtctgggaatccaagatgaatttctcggcaggtttgctttccccaaggcctctcttctcggcttgcaggtggctgccttcttctgtgtcctttcttctatacctgtacatccctggtgtctctctttctttttatgagaacaccagtcttaytggattaggaccccactgttatgagctcattaacatcagttactttttaaaagccatattcaaaatccagttgcat

SEQ ID NO: 479935 - DNA, 623 bp, Homo sapiens
tctgctggttctaaagcagaagacactctgttttcttttytttttccctgagacagagtctcgctctgtcactgcagtggcgtgatctcggctcactgcaagctccgcctccagggttcaagcgattttccaccccaccctcccaagtagctgggagtacaggcgcttgctaccatgcctagctatttttttttgtattttagtagagatggggtttcaccatgttggccaggctggtctcgaactcttgacctcaggtgatctgccagcctcggcctcccaaagtgctgggattacaggtgtgagccaccgcgccctgccaacactctattttcaatcctatccaaagtattctgaggttttgatcccaaactcttgagattaatactcagtaatttgtattcctggctttcctcaaacattatccccacatcatggacctattactactatattactctataccagcactttgaatacccttacttccaccatccaacctggtctccttctcatggaatgcagtctctgccttctcaaaacagcacctaacatatagactcgaatactgctttgatgactttgaaggagcagaaaaacaatacatgagttacaagttaggc

SEQ ID NO: 479936 - DNA, 623 bp, Homo sapiens
tctgctggttctaaagcagaagacactctgttttcttttttttttccctgagacagagtctcgctctgtcactgcagtggcgtgatctcggctcactgcaagctccgcctccagggttcaagcgattttccaccycaccctcccaagtagctgggagtacaggcgcttgctaccatgcctagctatttttttttgtattttagtagagatggggtttcaccatgttggccaggctggtctcgaactcttgacctcaggtgatctgccagcctcggcctcccaaagtgctgggattacaggtgtgagccaccgcgccctgccaacactctattttcaatcctatccaaagtattctgaggttttgatcccaaactcttgagattaatactcagtaatttgtattcctggctttcctcaaacattatccccacatcatggacctattactactatattactctataccagcactttgaatacccttacttccaccatccaacctggtctccttctcatggaatgcagtctctgccttctcaaaacagcacctaacatatagactcgaatactgctttgatgactttgaaggagcagaaaaacaatacatgagttacaagttaggc

SEQ ID NO: 479937 - DNA, 623 bp, Homo sapiens
ccgctcacctcctgctgtgaggcctggttccggtccatggcctgggatttggggatccctgtcctaaataacttggtaggggactgattggaaaactaaaaattaagtcagggtttgcccactaaagatgaaagcaaattttgcatttggtgggatgagtctaaatgcaatggagacattgatctttgtaacrgcaaaacattaaatccaggcttttcttttaccttgttaagggacatttcgttcatcctgagacgttgctttggcataactcagaggtagattcagcccaacaactggccctacaatgctcagccatgatgtgatatagttgacattcctaggaaacaagtgaaatacaggccatgctaacgtttccattgtagtttttggatgaatggtagaacatcagttggtcaccaacaataacaaaagtgaggctttcttcaaagatttgtacctaccacctggaatctcagcatttctgaatgccagccccattgcttgacaagaatttaaggtccagagagcctgtaaggatccctcattagggtagttgaagaatgaggtaaggtactggctcctgacttcccttgatgattcaaattttacccttacagttt

SEQ ID NO: 479938 - DNA, 623 bp, Homo sapiens
ccgctcacctcctgctgtgaggcctggttccggtccatggcctgggatttggggatccctgtcctaaataacttggtaggggactgattggaaaactaaaaattaagtcagggtttgcccactaaagatgaaagcaaattttgcatttggtgggatgagtctaaatgcaatggagacattgatctttgtaacggcaaaacattaaatccaggcttttcttttaccttgttaakggacatttcgttcatcctgagacgttgctttggcataactcagaggtagattcagcccaacaactggccctacaatgctcagccatgatgtgatatagttgacattcctaggaaacaagtgaaatacaggccatgctaacgtttccattgtagtttttggatgaatggtagaacatcagttggtcaccaacaataacaaaagtgaggctttcttcaaagatttgtacctaccacctggaatctcagcatttctgaatgccagccccattgcttgacaagaatttaaggtccagagagcctgtaaggatccctcattagggtagttgaagaatgaggtaaggtactggctcctgacttcccttgatgattcaaattttacccttacagttt

SEQ ID NO: 479939 - DNA, 623 bp, Homo sapiens
ccgctcacctcctgctgtgaggcctggttccggtccatggcctgggatttggggatccctgtcctaaataacttggtaggggactgattggaaaactaaaaattaagtcagggtttgcccactaaagatgaaagcaaattttgcatttggtgggatgagtctaaatgcaatggagacattgatctttgtaacggcaaaacattaaatccaggcttttcttttaccttgttaagggacatttcgttcatcctgagacrttgctttggcataactcagaggtagattcagcccaacaactggccctacaatgctcagccatgatgtgatatagttgacattcctaggaaacaagtgaaatacaggccatgctaacgtttccattgtagtttttggatgaatggtagaacatcagttggtcaccaacaataacaaaagtgaggctttcttcaaagatttgtacctaccacctggaatctcagcatttctgaatgccagccccattgcttgacaagaatttaaggtccagagagcctgtaaggatccctcattagggtagttgaagaatgaggtaaggtactggctcctgacttcccttgatgattcaaattttacccttacagttt

SEQ ID NO: 479940 - DNA, 519 bp, Homo sapiens
tttctgagcagtggagtaagaagagctcaatcccaagatccccgctcatggcaggcttgtttggggtggaagacagtttattgcacttacaacgctgagttacaataatctgtttatgttgtttgtcttctttgctaggcagtcagattcttataaagggctagagatgtttttctcatctacctgtgattccctgttacctaatgttgtgtttggcaagtagtagatacttagtatttatcaaaatgcactgaatgaagataagaatgggtaagacactaaaggcagaatgatcagtaggtggactatgacgtcatcctagtgaaacaggaaaagaacctgaattaggatrggcctatgatcaggatgagaagaatatcactgtcaaagatattcagaaaatataattaatttttggatgggttctatggtttgaatatgtcccccaaagttcatgtgttttagaaatttgatctcccatgcagcagcagtgttgggaggtagtcattagggcataat

SEQ ID NO: 479941 - DNA, 576 bp, Homo sapiens
ccttaataccacttcaattttaactcccttttgccaagtaatgtaccacgttcacatttcacaggaatttggacacagaaatatttgggattcattattctgcctatcacagtataatacaagtatatcaatgagaaggcatttagagaaactcgtggcatatattgaaggccacattacaaataaaaagaaagtaactatgaagaaatttcagcatgaaactttactgaaattaataatacttcaaaagagttacatcatatctgtactaaacatctargatattttaagtctgtttttttgtttattcaatctccataactttgtagataatatccatcaatgtttataaaacctggaatattttttaataatgttatttttgaataacttttgctctagcataaatgatctaaacacacacccatgcacacacatacacacacaacaatcatagagaaagagagaagaattagtgaacaaatttggaataatatgcatttttaatatgaaatgcattttcacctacccattgtaaaaatcattttatagctagtactcagtgctgtagggaat

SEQ ID NO: 479942 - DNA, 628 bp, Homo sapiens
ttggttgctatctctgttggactaaagtagagtttttatcttctataaatcaatcaggacagtggaaatcaccaaatgacatcatcataaccacagagtacttaatagatgcagcctttgtgtcttgctacttaagaaacagctaagcttcaaccatcttaaaacttccctttttgcagactggcccagcgccaaacttgtaatgacacacagagtgatacatttcctyatttctttcaagcttctcttgagtttcatttttcacaatttttttaccatctggacacattctacaaactttccattcaccttgcttataatgcttttttatcaaataaaatcatttattctttattctttcgtggccaatgttttttctttcagacactaattaggaatctgaaatattgctagcaattgagagttaaggatggccaaagtttttcaagaataactagcccattttgtttggttttgctttgcaatttagaaaaggaaatcacgttgcttttgaaaacaaatgtggtgaaattgtaagccatgccatttttattctggccttcagttgaaactctctttgtggtcagcaatgcacacaaagtcctgtctaaatcagcctcgagcaata

SEQ ID NO: 479943 - DNA, 546 bp, Homo sapiens
ttgttacatttatttattcaatatatctttccagaacacatagtgaatgcttactatgtactagatactaaagattaaaaaataaataagatataattccttatctcaaggagctcaaagtgaattacaaattttaaaacagtgataagcctaagtttgtgacatttttatctcatatgaagacagcrgaatatatcaagtgaccttttaatatttcttccaaatctttctgtggtttgatgagtctaggaatctttggagcactttcctccatctaaatttattttaactgtctggtttgagctctaagttgagtgaatctggctttgattctgctaagattgtcccttatggggcttggtagcaaatataaagcagatgttcataaaatattttaggatagcatactttggctattaaaagcagtatgtaaaaatgaatttccttctagcatattatgtgtagccaaataaaataacttgatgaggtggaaaaatctccaagatgctcatcacctgttgggttcatctcagctttggaggagtc

SEQ ID NO: 479944 - DNA, 590 bp, Homo sapiens
ttaagaaaaccctgaaaaacagagctggggaaggccatgaagagagggttctcacacttgtgtggctgattataaaactatcacaaaagactgcaaaaaccacaaccttggccaggcacagaggctcacatctgtaatgccagcactttgggaggctgaggagggaagattgcttgaggccaggagtttgagaccagcctgagcaaaatagcaagaccccctgtctacaaaaaaatataaaaatcagccaggcatggtggcatgtgcctgtagtctcagctagaggcgagaggattgcttgagcccagaaggttgaggctgctgtgagccaagatcatgctactgcactcctgcctgggcaaaagagcaagactctgtctcaaaacacaaaacaaaaagcacataaaacaatgctatacagtgtaataattttggaacaacaatatgtagaaaaaggagaaaataacccaatgtatatcatttatgggagaggagagtcttcccagcaaggctgagctgacctttgaagcaagaacagatgaggcaraaggaaataaggacttttgaagtcattagttctgcccatcaaa

SEQ ID NO: 479945 - DNA, 590 bp, Homo sapiens
ttaagaaaaccctgaaaaacagagctggggaaggccatgaagagagggttctcacacttgtgtggctgattataaaactatcacaaaagactgcaaaaaccacaaccttggccaggcacagaggctcacatctgtaatgccagcactttgggaggctgaggagggaagattgcttgaggccaggagtttgagaccagcctgagcaaaatagcaagaccccctgtctacaaaaaaatataaaaatcagccaggcatggtggcatgtgcctgtagtctcagctagaggcgagaggattgcttgagcccagaaggttgaggctgctgtgagccaagatcatgctactgcactcctgcctgggcaaaagagcaagactctgtctcaaaacacaaaacaaaaagcacataaaacaatgctatacagtgtaataattttggaacaacaatatgtagaaaaaggagaaaataacccaatgtatatcatttatgggagaggagagtcttcccagcaaggctgagctgacctttgaagcaagaacagatgaggcagaaggaaataaggacttttgaartcattagttctgcccatcaaa

SEQ ID NO: 479946 - DNA, 590 bp, Homo sapiens
ctggcagcaggatgcggtgrtgtgtgcctgtaattccaggtacttgggaggctgaggcaaggggatcacttgagcctgtgagttcgagaccagcctcagtaacatagcaagaccccattaaaaaaaaaaaaaaaggaaaaaagaaatcagaagtagaaagtcaggtgcagtggctcactcctgcaatccctgcactttgggaggccaaagcgggtagatcacctaaggtcaggagtttgagaccagcctggccaacacggtgagaccccgtctctactaaaatacaaaacttagccaggtgtggtggcaggcgcctgtaatcccagctacttgggaggctgaggcaggagaatcgcttgaacccaggaggcagaggttgcagtgagcctagatcatgccattgcactccagcccgggtgacaagagcgagactccatctcaaaaaaaaaaaaaaaaatttcttcctgaattaaacgtgggctgtcacctttattcccatagccaggcaatgatttcctgacatggcccgtaactgtcctcacgtggcagccccacacagaagctagttaaaatgaaaccatggccctgcg

SEQ ID NO: 479947 - DNA, 645 bp, Homo sapiens
ggcagcaggatgcggtggtgtgtgcctgyaattccaggtacttgggaggctgaggcaaggggatcacttgagcctgtgagttcgagaccagcctcagtaacatagcaagaccccattaaaaaaaaaaaaaaaggaaaaaagaaatcagaagtagaaagtcaggtgcagtggctcactcctgcaatccctgcactttgggaggccaaagcgggtagatcacctaaggtcaggagtttgagaccagcctggccaacacggtgagaccccgtctctactaaaatacaaaacttagccaggtgtggtggcaggcgcctgtaatcccagctacttgggaggctgaggcaggagaatcgcttgaacccaggaggcagaggttgcagtgagcctagatcatgccattgcactccagcccgggtgacaagagcgagactccatctcaaaaaaaaaaaaaaaaatttcttcctgaattaaacgtgggctgtcacctttattcccatagccaggcaatgatttcctgacatggcccgtaactgtcctcacgtggcagccccacacagaagctagttaaaatgaaaccatggccctgcgaggaagtgccatcctccctcacattccacaagcatttgctgagcaccagctttttgc

SEQ ID NO: 479948 - DNA, 590 bp, Homo sapiens
ctggcagcaggatgcggtggtgtgtgcctgtaattccaggtacttgggaggctgaggcaaggggatcacttgagcctgtgagttcsagaccagcctcagtaacatagcaagaccccattaaaaaaaaaaaaaaaggaaaaaagaaatcagaagtagaaagtcaggtgcagtggctcactcctgcaatccctgcactttgggaggccaaagcgggtagatcacctaaggtcaggagtttgagaccagcctggccaacacggtgagaccccgtctctactaaaatacaaaacttagccaggtgtggtggcaggcgcctgtaatcccagctacttgggaggctgaggcaggagaatcgcttgaacccaggaggcagaggttgcagtgagcctagatcatgccattgcactccagcccgggtgacaagagcgagactccatctcaaaaaaaaaaaaaaaaatttcttcctgaattaaacgtgggctgtcacctttattcccatagccaggcaatgatttcctgacatggcccgtaactgtcctcacgtggcagccccacacagaagctagttaaaatgaaaccatggccctgcg

SEQ ID NO: 479949 - DNA, 519 bp, Homo sapiens
ggcagcaggatgcggtggtgtgtgcctgtaattccaggtacttgggaggctgaggcaaggggatcacttgagcctgtgagttcgrgaccagcctcagtaacatagcaagaccccattaaaaaaaaaaaaaaaggaaaaaagaaatcagaagtagaaagtcaggtgcagtggctcactcctgcaatccctgcactttgggaggccaaagcgggtagatcacctaaggtcaggagtttgagaccagcctggccaacacggtgagaccccgtctctactaaaatacaaaacttagccaggtgtggtggcaggcgcctgtaatcccagctacttgggaggctgaggcaggagaatcgcttgaacccaggaggcagaggttgcagtgagcctagatcatgccattgcactccagcccgggtgacaagagcgagactccatctcaaaaaaaaaaaaaaaaatttcttcctgaattaaacgtgggctgtcacctttattcccatagccaggcaatgatttcctgac

SEQ ID NO: 479950 - DNA, 590 bp, Homo sapiens
ctggcagcaggatgcggtggtgtgtgcctgtaattccaggtacttgggaggctgaggcaaggggatcacttgagcctgtgagttcgagaccagcctcagtaacatagcaagaccccattaaaaaaaaaaaaaaaggaaaaaagaaatcagaagtagaargtcaggtgcagtggctcactcctgcaatccctgcactttgggaggccaaagcgggtagatcacctaaggtcaggagtttgagaccagcctggccaacacggtgagaccccgtctctactaaaatacaaaacttagccaggtgtggtggcaggcgcctgtaatcccagctacttgggaggctgaggcaggagaatcgcttgaacccaggaggcagaggttgcagtgagcctagatcatgccattgcactccagcccgggtgacaagagcgagactccatctcaaaaaaaaaaaaaaaaatttcttcctgaattaaacgtgggctgtcacctttattcccatagccaggcaatgatttcctgacatggcccgtaactgtcctcacgtggcagccccacacagaagctagttaaaatgaaaccatggccctgcg

SEQ ID NO: 479951 - DNA, 590 bp, Homo sapiens
ctggcagcaggatgcggtggtgtgtgcctgtaattccaggtacttgggaggctgaggcaaggggatcacttgagcctgtgagttcgagaccagcctcagtaacatagcaagaccccattaaaaaaaaaaaaaaaggaaaaaagaaatcagaagtagaaagtcaggtgcagtggctcactcctgcaatccctgcactttgggaggccaaagcgggtagatcacctaaggtcaggagtttgagaccagcctggccaacacggtgagaccccgtctctactaaaatacaaaacttagccaggtgtggtggcaggcgcctgtaatcccagctacttgggaggctgaggcaggagaatcgcttgaacccaggaggcagaggttgcagtgagcctagatcatgccattgcactccagcccggstgacaagagcgagactccatctcaaaaaaaaaaaaaaaaatttcttcctgaattaaacgtgggctgtcacctttattcccatagccaggcaatgatttcctgacatggcccgtaactgtcctcacgtggcagccccacacagaagctagttaaaatgaaaccatggccctgcg

SEQ ID NO: 479952 - DNA, 519 bp, Homo sapiens
ggcagcaggatgcggtggtgtgtgcctgtaattccaggtacttgggaggctgaggcaaggggatcacttgagcctgtgagttcgagaccagcctcagtaacatagcaagaccccattaaaaaaaaaaaaaaaggaaaaaagaaatcagaagtagaaagtcaggtgcagtggctcactcctgcaatccctgcactttgggaggccaaagcgggtagatcacctaaggtcaggagtttgagaccagcctggccaacacggtgagaccccgtctctactaaaatacaaaacttagccaggtgtggtggcaggcgcctgtaatcccagctacttgggaggctgaggcaggagaatcgcttgaacccaggaggcagaggttgcagtgagcctagatcatgccattgcactccagcccgggtgacaagagygagactccatctcaaaaaaaaaaaaaaaaatttcttcctgaattaaacgtgggctgtcacctttattcccatagccaggcaatgatttcctgac

SEQ ID NO: 479953 - DNA, 519 bp, Homo sapiens
ggcagcaggatgcggtggtgtgtgcctgtaattccaggtacttgggaggctgaggcaaggggatcacttgagcctgtgagttcgagaccagcctcagtaacatagcaagaccccattaaaaaaaaaaaaaaaggaaaaaagaaatcagaagtagaaagtcaggtgcagtggctcactcctgcaatccctgcactttgggaggccaaagcgggtagatcacctaaggtcaggagtttgagaccagcctggccaacacggtgagaccccgtctctactaaaatacaaaacttagccaggtgtggtggcaggcgcctgtaatcccagctacttgggaggctgaggcaggagaatcgcttgaacccaggaggcagaggttgcagtgagcctagatcatgccattgcactccagcccgggtgacaagagcgagrctccatctcaaaaaaaaaaaaaaaaatttcttcctgaattaaacgtgggctgtcacctttattcccatagccaggcaatgatttcctgac

SEQ ID NO: 479954 - DNA, 473 bp, Homo sapiens
gacgttgtgtcctgaagcacagcagaaagagatacagagaagcgtgaggtcttggtgaacagggaagtctgggatcccggtgtcctgttggggatgggttaggaggcaccagcatctgtgtagctgacagtggcagggaagagaagagaggggtgtcctctgaggaggatgaggagggacaaggtctggaactgaccctgggtcatgaccttgagcatttagtccttgactcgcatcagcccgatgaggtcccaggacccagtgtcaatgcctggagctcctgccagcagcatcagggtcacacggagaaatgcagactctaggttccaccccagacttacttgggttcaggtccacatatctgacttcagcaaaccctgcaggkgctgaggatgtacactgccatttgagacacatttccccagaaagagaggctggtgggaagattccactgagctgagagaagcccccca

SEQ ID NO: 479955 - DNA, 474 bp, Homo sapiens
tgacgttgtgtcctgaagcacagcagaaagagatacagagaagcgtgaggtcttggtgaacagggaagtctgggatcccggtgtcctgttggggatgggttaggaggcaccaccagcatctgtgtagctgacagtggcagggaagagaagagaggggtgtcctctgaggaggatgaggagggacaaggtctggaactgaccctgggtcatgaccttgagcatttagtccttgactcgcatcagcccgatgaggtcccaggacccagtgtcaatgcctggagctcctgccagcagcatcagggtcacacggagaaatgcagactctagggtccaccccagacttacttgggttcaggtccacatatctgacttyagcaagccctgcaggggctgaggatgtacactgccatttgagacacatttccccagaaagagaggctggtgggaagattccactgagctgagagaagcccc

SEQ ID NO: 479956 - DNA, 474 bp, Homo sapiens
tgacgttgtgtcctgaagcacagcagaaagagatacagagaagcgtgaggtcttggtgaacagggaagtctgggatcccggtgtcctgttggggatgggttaggaggcaccaccagcatctgtgtagctgacagtggcagggaagagaagagaggggtgtcctctgaggaggatgaggagggacaaggtctggaactgaccctgggtcatgaccttgagcatttagtccttgactcgcatcagcccgatgaggtcccaggacccagtgtcaatgcctggagctcctgccagcagcatcagggtcacacggagaaatgcagactctagggtccaccccagacttacttgggttcaggtccacatatctgactttagcaarccctgcaggggctgaggatgtacactgccatttgagacacatttccccagaaagagaggctggtgggaagattccactgagctgagagaagcccc

SEQ ID NO: 479957 - DNA, 535 bp, Homo sapiens
cagggaccagtaagaattttgagggagggagttgggatggagaaggtatggcctttatgcgagcatagatccttttcttcctggctggtaatattcttctctgaatttaatcttcctttaaaaaaaaatcctccatctattgtcactatgttccccaaacataaactaagttccaggctgtcatgatgtatctgatatatggggtaacccagcaaggtgtaccttcctttggtgagagatggctgccggggcaaagacgggctttgattcagagcaagcattcccacctgttccatggaatccccctgaagtgagcacaaaggtgccctgggctccctgatggtttatkcccactcctttcaggctggtgatgcaccttacacacaaacacctaatgcaatgtctttttaaattctccaagtgggatgggagcatgtgagggaaattccaatccaaaacccattaatgtgctgaacgctttttttttttttttttttttttttgcaacaacaccttggacctctgtgttggggtt

SEQ ID NO: 479958 - DNA, 528 bp, Homo sapiens
ctgttgccgatggagcagccctcgcaggggacggtggcagggccggagcaacaggaccgggagggcaggaggacctgaaaccaccggagaagttcatcttactcatcaatatagagctgatttatcaaggcaggagaattggaatagagaaagaattcaaaacatgcacattggccgggcacrgtggctcacgcctgtaatcccagaactttgggaggccgaggcgggcggatcatgaggtcaggagatcgagaccatcctggctaacacggcgaaaccctgtctctactaaaaatacaaaaaattagccgggcttggtggtgggcgcctgtaatcccagctactcgggaggctgaggcaggagaatgtcatgaagccgggaggcggagctggcagtgagccgagattgcaccactgcactccagcctgggcgacagagcgagactccgtctcagaaaatacaaacaaacaaacaaaatgcacggccggctaaatggggaacctgaaaatttggaggctagggttttt

SEQ ID NO: 479959 - DNA, 528 bp, Homo sapiens
ctgttgccgatggagcagccctcgcaggggacggtggcagggccggagcaacaggaccgggagggcaggaggacctgaaaccaccggagaagttcatcttactcatcaatatagagctgatttatcaaggcaggagaattggaatagagaaagaattcaaaacatgcacattggccgggcacagtggctcacgcctgtaatcccagaactttgggaggccgaggcgggcggatcatgaggtcaggagatcgagaccatcctggctaacacggcgaaaccctgtctctactaaaaatacaaaaaattagccgggcttggtggtgggcgcctgtaatcccagctactcgggaggctgaggyaggagaatgtcatgaagccgggaggcggagctggcagtgagccgagattgcaccactgcactccagcctgggcgacagagcgagactccgtctcagaaaatacaaacaaacaaacaaaatgcacggccggctaaatggggaacctgaaaatttggaggctagggttttt

SEQ ID NO: 479960 - DNA, 536 bp, Homo sapiens
gcacaagctttgcaagcttccccctggcgcgcagtaagacactatctatctaattaatcaatcaatctagcaggcagtaagagtctatctattttgtgacacagggtctgttgctctggagcgcagcggtgcaatcatggttcactgcagcctggacctcctgggctcacctcagcctccagaatggctggaactacaggtgcataccaccacactcagctaagttttgtagagatgaggtttcaccatgttgccccggctggtcttgaactcctgggctcaagcagtcctcccacctcagcctcccaaagtgctgggattacaggcttgagccaccgcacccggccaaatcctatttaaaacagggaagcgcagacaaggctgtgcctgcaacacaaataggaattaataccgccaracaactgcttcacaggtctagctcagtggatctcaactgggagtgattttgctcccctgtcattcagcaatgtctgcagacctttcgggttgtcacaacttgggggatagggttaaca

SEQ ID NO: 479961 - DNA, 230 bp, Homo sapiens
gggtcttggaggaagaggagaatccattcacaaatagggaaagcccaaatgtacagccagaacgaaggggacttgctgggttagggtgcgactcctattggagaggtagggtaaggatcccccacggatggtcttgaaatttgggcagaaaaaaagtgagggttcctaatgacccctggaggccatttasatctccacgtggattagcttatcacacacactccaacccc

SEQ ID NO: 479962 - DNA, 272 bp, Homo sapiens
ctgcagcttcataggcctttcaggcttcagccagcacaagttgggtttctacaactcagaattgggactgatggtttgtactattactatccgcatcctttttcaggtaaggttgagtaacttacctgaagtcacactgtgagtaagctgcctaccarttggtcatgatcaaaactgggcaccaaatcactacttaagcaggacacatcggctaggtgcaccatgcacttcccattcaacttcaggcaactaagcacaatatagtttcccag

SEQ ID NO: 479963 - DNA, 317 bp, Homo sapiens
tgctgtttaccgtttactaaaagggggaaaacgtgtcaagaccaggtttggaaggaaaaaaaaaaatcaaagaatttgttctaactactttaagaatgggatggctattacgtgtctaagtggggaaaatcaaggagggaggtgtccctggagatgyagaaatggaagattttaaagtcatgggactagaagacatcacctagggaatgagagtaaatagaaaacagtgtcatcctacacaaattactcttagacaattatcgagcatggtaatttgtgaaatttaacaattctatctctacattaggaaaggtgtg

SEQ ID NO: 479964 - DNA, 627 bp, Homo sapiens
ttacagttcacgaaatggattcacagaggaaaagtgacttggtcatctgtgaatgacatggtcacacatatgacatggtcatctgtgaatcctcagcttcatatgacaagagtagctgataaagtccaagtcctctgtctccccatcttgtgtgctttccactataccacactatcacaaagcaaactggggaaattcccataatgctgactggctgctggggtgtcctctttgatgccctttgaagtgcatagttaagcctttccacaggtcaccaaatgaagggtttaactstcatttggggaagtaaggcctaggagaacaaatttcctggtacattaggtgtgctaagtaaagtcagttgattgaactaatgaatttctaggtcccttcggtgtttgtagaccctgtagacagtcttgaacctatttcggatatgggcctgtctataatggacagagagaaggtgatgtgactagctcaattgtcttcatgaatcaactagaaagggaggttccagacgaggggagttggggtctgttcttagctagcaaaccacactgcctctcaaaccatggttctgaatctcatcacgttttaccctgtctcacttctgtctttcctccc

SEQ ID NO: 479965 - DNA, 639 bp, Homo sapiens
aaactaggaaggagggctgataaaaatgtcctcaaattagattgttgagattgttctacaactgtaaacacatgaagattcattaaattgtatgcttaaaattggtgaattttatggtatgtaaattacaacaaaattgtttaaaaagccaattaaaaagcacagtgatgagagccacaatacgggtaaattcagtgctatgggaatttgaacactacacccagattcagagagacagagcctctagaaggcctccagaagaagtgatatrtaatcagaaacctaaagaatgcataagggataccggggaacagagtagagaaagattgaacttggcaacaagaagaacatgagcaaacatctggaagtgagtgagaacatgcctggtgtatatactgtaaaaggtaaatagttacagagctgagcataggaggaagagtgacaagaatttagtctggagagaggtacagtagtttagcattaggaccttacatatcatgaagaggaatttgaaatttattttaaaggccatttggagctatcaaaaatttcaagatatgagaatgtcatgaataaatttgaactttgaaagatcagtctggctgtagtgaggtcatttgtttaggaagagaaagccca

SEQ ID NO: 479966 - DNA, 579 bp, Homo sapiens
ctatgcagttattagtaaaacttactgcacatatattaacaactctgggcatgttgaggttaacattcaaaagatctatgagcaagctacctgattacatagatataactggggcagtgaacccaaatatatctggtccactattaaaattgccatcccaagtctcacctggtttttatcaatcctaggacctctgatagctgtcttgttattactaatctttggcccttgctactttaacctcttagtaaactttatgtcttctagattataacagttccaggtaaacacaatgctggcacaaggcttcaaacacattctgtctactgatacagagaataaaagcatcctgcctcttggccccctagataaggtatacagacatttttactcctctgatgccaggcagggcgtatgcccctaaaatcagcagaaagcagttacggaaaatgggccttcacctttctgcaaggagaagtatctaatctctgagcagggaatgaggtaagaggcaggaccagatgaaagacatcyggtctttcatccagaccagatgaaagacatctggtctttcatcca

SEQ ID NO: 479967 - DNA, 609 bp, Homo sapiens
gctgcccggtcctccctcaaagcgcacatcagcccttcctgcctattccaacatgcccagtccacagaccacactggactgcacckggatgctgtggctttcccttcttgttctcaccacgtgtgctttctgctgaggcgtgcagctcttcctcccagccatctcagtcatccttacagacccagctcaaatacccctgtcactgtgtacctggccccgatgcttgtgtcccctctgcagggcccaggttactttttatgtagttgcagaacagcagactgcaccatcagctcaaactgagacagtaactttgtaggaacaaaattttaaataaaatgagagcaaatactttttaattcatataaatcttaacatagctactattttaaaaattcattggcttgtcactaatcattacatcggtgctggcacttgggcatgaatcccatattgaagtgaatggaaaggaagtgagacaggctgtggtcgggtcttggggagcatctgcagacccggagcaacctccaggcacacgccagggacactctgtgtggctttgatggtgcattgcagatatgttcgcaagcaggtggcagaagaatgtgctgc

SEQ ID NO: 479968 - DNA, 609 bp, Homo sapiens
gctgcccggtcctccctcaaagcgcacatcagcccttcctgcctattccaacatgcccagtccacagaccacactggactgcaccgggakgctgtggctttcccttcttgttctcaccacgtgtgctttctgctgaggcgtgcagctcttcctcccagccatctcagtcatccttacagacccagctcaaatacccctgtcactgtgtacctggccccgatgcttgtgtcccctctgcagggcccaggttactttttatgtagttgcagaacagcagactgcaccatcagctcaaactgagacagtaactttgtaggaacaaaattttaaataaaatgagagcaaatactttttaattcatataaatcttaacatagctactattttaaaaattcattggcttgtcactaatcattacatcggtgctggcacttgggcatgaatcccatattgaagtgaatggaaaggaagtgagacaggctgtggtcgggtcttggggagcatctgcagacccggagcaacctccaggcacacgccagggacactctgtgtggctttgatggtgcattgcagatatgttcgcaagcaggtggcagaagaatgtgctgc

SEQ ID NO: 479969 - DNA, 609 bp, Homo sapiens
gctgcccggtcctccctcaaagcgcacatcagcccttcctgcctattccaacatgcccagtccacagaccacactggactgcaccgggatgctgtggctttcccttcttgttctcaccacgtgtgctttctgctgaggcgtgcagctcttcctcccagccatctcagtcatccttacagacccagctcaaatacccctgtcrctgtgtacctggccccgatgcttgtgtcccctctgcagggcccaggttactttttatgtagttgcagaacagcagactgcaccatcagctcaaactgagacagtaactttgtaggaacaaaattttaaataaaatgagagcaaatactttttaattcatataaatcttaacatagctactattttaaaaattcattggcttgtcactaatcattacatcggtgctggcacttgggcatgaatcccatattgaagtgaatggaaaggaagtgagacaggctgtggtcgggtcttggggagcatctgcagacccggagcaacctccaggcacacgccagggacactctgtgtggctttgatggtgcattgcagatatgttcgcaagcaggtggcagaagaatgtgctgc

SEQ ID NO: 479970 - DNA, 609 bp, Homo sapiens
gctgcccggtcctccctcaaagcgcacatcagcccttcctgcctattccaacatgcccagtccacagaccacactggactgcaccgggatgctgtggctttcccttcttgttctcaccacgtgtgctttctgctgaggcgtgcagctcttcctcccagccatctcagtcatccttacagacccagctcaaatacccctgtcactgtgtacctggccccgatgcttgtgtcccctctgcagggcccaggttactttttatgtagttgcagaacagcagactgcaccatcagctcaaactgagacagtaactttgtaggaamaaaattttaaataaaatgagagcaaatactttttaattcatataaatcttaacatagctactattttaaaaattcattggcttgtcactaatcattacatcggtgctggcacttgggcatgaatcccatattgaagtgaatggaaaggaagtgagacaggctgtggtcgggtcttggggagcatctgcagacccggagcaacctccaggcacacgccagggacactctgtgtggctttgatggtgcattgcagatatgttcgcaagcaggtggcagaagaatgtgctgc

SEQ ID NO: 479971 - DNA, 330 bp, Homo sapiens
aagctcctggcctcttaagggaagggaactcactccaatgtgtgccgatgcttctgttggaaaacactwtcttatctgattccccatctctccttccccatctctcctcctccatttcccgtcttccaactgtgcacaggacaaagagaacacagccagttctgcttccccaaaacaacctgcaaatgcttgctcttggcagccactccaagtcaatgcattcttcctgccttgacattatttcaagacctctcactcattttgtccaaacaatttcatatcacccaagctcctcttaaaagtgcaccggccccagtgacgctgccaaga

SEQ ID NO: 479972 - DNA, 330 bp, Homo sapiens
aagctcctggcctcttaagggaagggaactcactccaatgtgtgccgatgcttctgttggaaaacactttcttatctgattccccatctctccttccccatctctcctcctccatttcccgtcttccaactgtgcacaggacaaagagaacacagccagttctgcttccccaaaacaacctgcaaatgcttgctcttggcagccactccaagtcaatgcattcttcctgccttgacattatttcaagacctctcactcattttgtccaaacaatttcatatcacccaagctcctcttaaaagtgcacyggccccagtgacgctgccaaga

SEQ ID NO: 479973 - DNA, 595 bp, Homo sapiens
gctctgcttcaaactttagtctgtgggctgtgggttgactgggacacttctacttactgtatttacctttcctatgagacgagcaggctctctggggcatgttcttctcataatctctgcttcaaacatatctactaatatctaagttgccagagcatgtcaaatgaccaaatgtgacattaatgaagcaggaagttatatttttttcccaaggagtttgagggagagagaaataattgccaaataataatctcatctaccacgatgctccacaaatatcaattattgaatraacaagtgcaccttcccccaaatcagttgacctttgtagctaaaccacttttcaatcattacagtcttgtgcctcatcagtgttagtcttaggatatcagtcccctgtaaatccatgacctatgtaaaagaaccatactgccctgtttgccttggacaggagccagcttgagatctctgcttgtttaacagaggttaaagcctccttcatttgatcctggctctccctgtcccctcttcaggtatagggaaggtttcgttcctgccaaaaactagaggggatggaaccaattaggagaaccta

SEQ ID NO: 479974 - DNA, 616 bp, Homo sapiens
tgctgggtctttgttagtgatgtttctgtgtcccagttaaggtttctgtggcatctgccctgctggggctcttcctgtctgtcatttgccagcattaggttggtgtccaatgactccatcctctcatagaggagtggaggaatgtgaccatgtcatgataggtaccaatcctagaaaggattcagcccagaaggatccagacttgatttgtcctgaggttgattctccatctgaggaacactgagaagcggccctagagctcctgcccatctgcccaagatactggtggagggtgcatggtggttcttctccctgtggtcygggaacagggtgatgcggtggcattcggaggggctgttgtgctcctccaaactttcccgctccctgcatggtcccgccctggttccagtcctggcttctctctagccctgcccattccagctatcactgtgttgggctggcactgagcatcctgattgttttgggctttttgcctttgtgcttgcttggctatgacctggggttagcccctcacctaccctggatatggacagtggagttccagctcttgtgagagatgacctctccctgggagctggggcttcctcttaatgcc

SEQ ID NO: 479975 - DNA, 596 bp, Homo sapiens
caccctcacctttatcctcattctcgttgtcgccatcagtatatatggggagggtaggtgttatgtggtggaacaggtggggcacacattacaagcacctgctrctcagagaatgatacctggaccaggtgtttctgatgcacattgaagtcagataacctcggacttaagatgctgtgcagtgcggggagcaggtgtgggggtggctgggaacaggcgacacatgtgtctaacacatgctacaggtgttatgcacgtggaggaaggcgctcctcgaggagagagctggtcagagacacgtgctaggaaaggggaccggtgtttctggagagaagcaggttggagacaggtgtgagagatctgaaggtttcttcctaaaggtgtggtggtgacaagctgcagggacaggtatcaaaagtgaacatagcagagaatggggcagaggtgtgcagtgggttcccaatgcttgcaaaaggtgcaaagggactccggtcacatggatgtttggggggaggaaaaggagagaggtggctggagtgtggggaaccaggtgcatgtctgtgggacagggctgttttcaggaggtgacccctaga

SEQ ID NO: 479976 - DNA, 600 bp, Homo sapiens
tttttatttccaaaagattacttgtcacatgaactaaaaggtgttacacttttaacttttctgacaaaatatttgatttacgctcttactatttttaaaccaattaatcagagttctttcatatcacacacacaacacatgtaaatacaaagacagaagattcagtagttgtaaggtttttctttgtcaatttctttcttttttttgaaggaaagtttgtattattttaattatttttatgtatagaaaactcaacagtgtacatttaacccagtttagtggcaagttctttagtctttgcctttttgagcttggcgatctgagccacagacttgagacccagggccttccctccccagtgatggcggatctcatcctgtcattgtarttggtcctgatagcttcccccagcttagccaaagcacctttgtcttctgagttaacctgtgtgaagacgacagtggtgcaggtcttcctgtggactagacgtcctagtcttaccttccccttgataatgcagtaagggactccccttttatgacacagggcaggcaagaagacaaccagcttgatgggatccacatcatgcgcaatcaccac

SEQ ID NO: 479977 - DNA, 586 bp, Homo sapiens
cccccgattcaagtgattctcctgcctcagactcccgagtagctaggattataggcgactgccaccatgcctggctaatttttgtactttttgtatttttatatttttagtttcaccatgttggccaggctggtcttgaactcctgacctcatgatccgcccacctcagcctcccaaagtgctgggattacaggcgtgagccaccaagctaggccactgctcacccaattttaccaacaagaagactgagggttagatgatagcttcttaaactttaaagtatctatgcatcactggtggatcttgttaaaattcagatcctgattcaggaggtctggggtgaggcctggcccacttggaagtaaaaggctagaaggtctaagtcatttgcctcaaggtcaccccactggtaaagttcagtgccaggttttcaacctagcttcagtctgactctaaarcctgtacttttatcatctctcagagaccctgctccaagatctcttgcaactctaaaattccaattctggtgccagattaattggagaaatgcaaataaaataacagcaagcatgttctcgtgtcccag

SEQ ID NO: 479978 - DNA, 579 bp, Homo sapiens
gctgcattattctaaagtgatggtgtataaggcattggaaaaccaaagaactaaattgattatgaaattttacatggataataatcacttttaaggagactgaaaaggttcggttgaatatgctcaacttcagatagcagcccctgagcagcaggtgatggggaaggggatgtgggggtgaacaggtgatggttgctctttagtttacctcttttccttagtcttttaaatgtgggttcaagtccatagggtaggtaatttagaatacatcatctctctacaggttacaaagtgwctaaatctgcacagttgaggagaagcaggaatgaattcaataaaagctcaaccctgctagtaagacctctgtaaatacaatgacaaaaatattgcttacaatttcatcgtctgctattttacttacatgtttttatacatggagctagagaacaaaattcagcagaaaggccaggactggacattcaatgaaaatggctcattgacagcttttatctccaaaagcttcatctacattattttgggagaaaatatcttttgaaacagataaaccattaactcagg

SEQ ID NO: 479979 - DNA, 628 bp, Homo sapiens
gtcagcacaaaactgcttgcttaaaaatgcttttcaaaagtttgacctgtagacaattttggtgctcaattcattctataatttacacacacagaggtgtgtgtatgtgtgtatatatgtgtgtgtgtgtgtgcctgtgtgtgagcgcatgcgtgtgtttcacattcttctatgatatatatatatataaaatttgataattctataccaaatccaatactaatcattattcttataaagttataacctcatgctactttcattaccataaaaaggacatctaatagctgaaatccaaaacacaacgagtgctggtaaggatgtagaacacagggactctcatgcattgctgctaaggatacaaaacagccatgtkggagaccttttgaagcttcttttacaaaactgaatgtacttttaccataagatctagaaattgcactactaggtatttgcccaaatgagctgaaaacttatgtccacacaaaaacctgccatgaatgtctatagcagctttatttataattgcccaaaactagaggcaaccaagatactcttcaaatgccaaatttataaacaaactatggtacatccataaaatggattattactcagaggtaaaagtaaa

SEQ ID NO: 479980 - DNA, 628 bp, Homo sapiens
gtcagcacaaaactgcttgcttaaaaatgcttttcaaaagtttgacctgtagacaattttggtgctcaattcattctataatttacacacacagaggtgtgtgtatgtgtgtatatatgtgtgtgtgtgtgtgcctgtgtgtgagcgcatgcgtgtgtttcacattcttctatgatatatatatatataaaatttgataattctataccaaatccaatactaatcattattcttataaagttataacctcatgctactttcattaccataaaaaggacatctaatagctgaaatccaaaacacaacgagtgctggtaaggatgtagaacacagggactctcatgcattgctgctaaggatacaaaacagccatgttggagaccwtttgaagcttcttttacaaaactgaatgtacttttaccataagatctagaaattgcactactaggtatttgcccaaatgagctgaaaacttatgtccacacaaaaacctgccatgaatgtctatagcagctttatttataattgcccaaaactagaggcaaccaagatactcttcaaatgccaaatttataaacaaactatggtacatccataaaatggattattactcagaggtaaaagtaaa

SEQ ID NO: 479981 - DNA, 624 bp, Homo sapiens
ttggctatgaatattaatgtctaaagttttatcatgaccacagtcctacaaatgcatttcaactagagtgattaaaaatgtctctggaatgattattcattagtaaatatgatataattattttctattattctgtgcatattttaaaccttaatcgatccttcacaagtgtgataaaactgtatagatgtgccatttccactatctggagttcattttgcacatgttgctatagattgaaaaagtcaagtgtaacttaagaagcaattttaacaacttcatgtaaatataaattcataawacaaaacaagaacttcaggcaaccttattagagctctatagataaaagaaatgtttatgagacatataagaatgcctaagaaatctgaacaaagaaagtatctgaaggagattttggcccagtttttcaagtatggaagtcttgcctcttagccataaatcaattttcgtttataccaaatgcctgtaaactagttcttgtatagtacacctaattatgtcacatcagggatttccatgtttctttgacttagaatacgtagtaaacagatagaacagatcaatcacctaaactaatcaaaactctgcaatatctccctactc

SEQ ID NO: 479982 - DNA, 614 bp, Homo sapiens
ggatttgaacccacacaacccgactcccgagcccacgatgatcacccgtgtgttccactgcctcacccctgagtgaacctcactgaccatgagagatggggtaggaagagggctcacacctgctggatatcctcacccacctgggcaggtaactcgccgggcctctctctcctgcctcagctcttcccctcgatccacacgggagatcacgtcggatttggacccaggcagccctgcccctggggaaagatacaagagttggctgtgggtgccagaatcacagggaggtctacagggaaggtgcacgcactgagcgcctaatgattggacgtacaaatggccaacgccaagacttatttgttgtgtgcttagcacactgcagagaggctgagccaacttatttgttgagtgcttaggacactgcagagaggctgagctctgacaaagctgtttaaggctccgsgtctgtgctgttcgagttaactgcactgtgacagtataagaaacatcgtcttctgtgtttcgaagacttactaaagaaaaaaacagtaaaatctctcaatcatttgttaattgattattatttcagtgtgtcaagatgataagattttaga

SEQ ID NO: 479983 - DNA, 573 bp, Homo sapiens
tcactttggagtgagaaactctgttctataaaaggcacatggcatcaattatcctgattttgtgggtggatattcccatcacttctaaatcagctttcatatttttattaaaaaactagaaataaaaaagcaaaacatacttgagttagcaagaaatcttatgaacttctatgtcttttgctacagaactaacaagacagagttttcagttattttgcataaagtatctaattatgggcctgggaatggatgtgaatacagcataaaaagatgttataatggctgggtggctcatgcctgtaatcccagcactttgggaggctgaggcaggcagatcatgtatggccaggagttcaaaaccagcctggccaacatggcgaaacmctgtctctcctaaaaatacaaaaattagccaggtatggttgtgtacacctgtaattccagctactcgagaggctgaggcatgagaatctcttgaacccaggaagtggaggttgcagtaagccaagatggcaccaccacactccagcctgggtgacagagcgagacattgtctcacaaaaaaaagaagtt

SEQ ID NO: 479984 - DNA, 571 bp, Homo sapiens
tgaaaggggtttccccttataaaaccatcagatctcatgagacttattctccaccacaagaatagtatgggggaaaccgtccccawgattcaattatctcccacagggtccctcccgaaacatgtgggaattatgacagctacaattcaagatgagatttgggtggaacacagccaaaccatatcaccagtcaagatgatgagaacacaactgtttttgaaaagcaaaatcctcacaataaagaacaaaatcatgtatccaacattgtgctggatgttacttttcaaaaagtgagagttcataaaaatcaatttaattttgattaattttgattatgggggctaaagagaccccgttcccttcccccttaacagacaagagagtatggatagctgcactgcccaaatttaagatcacactgaattaggacaaaggaatttttttaactgaacttgctgtttgttcttggtttttttcagtaatatcctccttaattttcacattggctaaatgaattttcaaatacagatatgtgagtgtaaatattctaggcaaatatatcggaaaaaaa

SEQ ID NO: 479985 - DNA, 539 bp, Homo sapiens
tttgttacatgatttaatattaattccttatgtcagtattataatgaccatatagtatggcagagaaaaaaatagctatgtaaccttaggcaagttatttaacatttctgagcctcagtttctttgatgcaaaatctggatagtacctgctgtcttataaatatgaggattagaagggaggtgtgtcaaaggtccagaacactgcttgtgaaattatcactatatctaacacttgcttagcactttatagtttatgaagcacttttcatacaccatcccactgagttaagacctgaactggtcagagcaccaagcctagtgttctttccactgtacagaatgatctaagacctcatggaacatgttaattttaagtaaccttagacttcactaggtcataatttctgttttatccaacaaagtaacttagtgaattggtctggtccttggggtagtcaagaggccagaataagaaatcttcctggtagagagagaaaactgttaggtgttttaayagctattctcctgcaaaattaatc

SEQ ID NO: 479986 - DNA, 581 bp, Homo sapiens
aatttttgtccaagcttcaaataattttcagaggaattttcccatatgaaaaaaggagagaacactggcatcagttgaaattcagaagttctgaattataattacagtattyttttaattgtactgaagtgtacacacataaagcaggtcttttacccagtgaacaggatattttgatttagtggcagtgacataaaattcctgttagataaacatgttacctaccttgttatgaaatattccttgaaaaaaaaaatgggcaaaggacaggaacagacatttctcaaaagcagacatgcaagtgaccaacaagcatatgaaaaaatgctcaacatcactaatcatcagagaaatgcaaattaaaatcataatgagataccatcttatgccacccagaatggctatcattaaaatgtcagaaaacgaaagatgttggcaaagatgtggagaaaagggaatgttttacgcattgttggtgggaatgtaaattagcacaacctttatggaaaacaatatggagatttctcaaagaactaaaatagaactaccatttcacccagcaatctcaccagtaggtatat

SEQ ID NO: 479987 - DNA, 581 bp, Homo sapiens
aatttttgtccaagcttcaaataattttcagaggaattttcccatatgaaaaaaggagagaacactggcatcagttgaaattcagaagttctgaattataattacagtattcttttaattgtactgaagtgtacacacataaagcaggtcttttacccagtgaacaggatattttgatttagtggcagtgacataaaattcctgttagataaacatgttacctaccttgttatgaaatattccttgaaaaaaaaaatgggcaaaggacaggaacagacatttctcaaaagcagacatgcaagtgaccaacaagcatatgaaaaaatgctcaacatcactaatcatcagagaaatgcaaattaaaatcataatgagataccatcttatgccacccagaatggctatcattaaaaygtcagaaaacgaaagatgttggcaaagatgtggagaaaagggaatgttttacgcattgttggtgggaatgtaaattagcacaacctttatggaaaacaatatggagatttctcaaagaactaaaatagaactaccatttcacccagcaatctcaccagtaggtatat

SEQ ID NO: 479988 - DNA, 461 bp, Homo sapiens
tgcagaaagaagtcacggatggctagggatgctgggcttagatgtggctggctccagttctggtcgtggctgtcctcgtgacccatccagtatcatgcaaggtaacctttaaatagtttgcatttccagcttttcaactgtgtgatcagaatcagttatgccttctctccagaggtgctgcaaaaccagttacgttaagtctgtgctaattttcacactgtttgtaactagccagtgactcaagtacagcctgataagtgggggttgcaaacaccctggagcgaggtgagtgagcaggaccattgttgcgtatttcctgaaacatgcatatttgacatgtagcttggcaatgcagccaaagacaggaaagcaagactgctggctcatatcatactgcccagcacactctgcttyagtgtcttcaaaatgtttagctaaaagaaaatttcttcaaggtgaag

SEQ ID NO: 479989 - DNA, 551 bp, Homo sapiens
tgggcacggtggctcacatctgtaatcccagcactttgggaggccaaggtggagggctcgcttgaggccagaagtttgagaccagactggccaacatggtaaaaccccatctccactaaaaatacaaaaattagctgggcgtggtgtcgggcacctgtagttccagctattcaggaggctgaggaacgagaatcgcttgagcctggaaggtggaggttgcagtgagccaagatagcaccactgcattccagcctgggcgacagagcgagattctgtctccaaaaaaaaaaaaaaaaaaaaaaaaaaaaaaaaaaaaaaamccaagaaaacaaaaaaaaagaaaagaaaaccaaaatggctcatgtcctttagccacagaaggcagctaagatagatggcctatgtagataaatcaatatacatagcctcaacatctctaggccagctaagccaatcaggtcacgcaggattctaaatttatctaacaggtaatttttttttttagactaataggctaataggctgtcttacctaagtgaccaccctgagca

SEQ ID NO: 479990 - DNA, 585 bp, Homo sapiens
caaacaacctaaatgttcaacaatagagtgaggacaaagtaaagcctgatacagtgaacgaatctgatatcaggagacctaaaagtgaygtttatggggaccgtatatggaaaagtatattctgtatgatttccatgtgtttaactatgtattggaacattctgcaaaagagacacacaaagtggttgcctttgctctacaggagaagaggaaacacataaaggggttaagaacctgggatctgagtccaaattgtctgtttttaaatcctagctctgccacttgagtatatttgactttaagcaagttttaagttcatcgtgattaggtttctccctcagtaagttagtggtaaaatagtaccctcctcctggggttgttgcaaggattaaatttgctgctaacctaggcaacacccagcatatagcaagagctcagtaagcattagttatttactatttatttcagtgatacaaacaatatgggcaggattttgccccacctttctgcgttttccaattcaacttttctccttgaccatattactgttacattggaaaaaagcaataaatatttacctgaagg

SEQ ID NO: 479991 - DNA, 585 bp, Homo sapiens
caaacaacctaaatgttcaacaatagagtgaggacaaagtaaagcctgatacagtgaacgaatctgatatcaggagacctaaaagtgatgtttatggkgaccgtatatggaaaagtatattctgtatgatttccatgtgtttaactatgtattggaacattctgcaaaagagacacacaaagtggttgcctttgctctacaggagaagaggaaacacataaaggggttaagaacctgggatctgagtccaaattgtctgtttttaaatcctagctctgccacttgagtatatttgactttaagcaagttttaagttcatcgtgattaggtttctccctcagtaagttagtggtaaaatagtaccctcctcctggggttgttgcaaggattaaatttgctgctaacctaggcaacacccagcatatagcaagagctcagtaagcattagttatttactatttatttcagtgatacaaacaatatgggcaggattttgccccacctttctgcgttttccaattcaacttttctccttgaccatattactgttacattggaaaaaagcaataaatatttacctgaagg

SEQ ID NO: 479992 - DNA, 585 bp, Homo sapiens
caaacaacctaaatgttcaacaatagagtgaggacaaagtaaagcctgatacagtgaacgaatctgatatcaggagacctaaaagtgatgtttatggggaccgtatatggaaaagtatattctgtatgatttccatgtgtttaactatgtattggaacattctgcaaaagagacacacaaagtggttgcctttgctctacaggagaagaggaaacacataaaggggttaagaacctgggatctgagtccaaattgtctgtttttaaatcctagctctgccacttgagtatatttgactttaagcaagttttaagttcatcgtgattaggtttctccctcagtaagttagtggtaaaatagtaccctcctcctggggttgttgcaaggattaaatttgctgctaacctaggcaacacccagcatatagcaagagctcagtaagcattagttatttactatttatttcagtgatacaamcaatatgggcaggattttgccccacctttctgcgttttccaattcaacttttctccttgaccatattactgttacattggaaaaaagcaataaatatttacctgaagg

SEQ ID NO: 479993 - DNA, 520 bp, Homo sapiens
tcctgcttttgttgctcctccttatgtttggaaaaggtatctcattctattgaattactaacctacagatatttctatttttcaattgaaggccatgttaaattgttcccaatatttttgctatcctaaagaatgtttctctgaatgttcatgtcagaatttcctaggacacatggatgaaattctctctatgtcatatacccaggaggggaattactaaagggtagggtacgcaggtctgcacatcctccacttgaatagatagtgccaaatggctttttgtgtcttgtttaagaaacacttactttcaccagctcatgaagatattatcctgtattttattctaaagttttacagttttacttttcattttaagttctttgarccacccagaaatgtagatcttcctccctccctcaccccagtgtgaataagcagataaatagtttctccgggccatttagtgactggtccaaacctctctaccaacgaacaatcctcctgcttcagcctccccagc

SEQ ID NO: 479994 - DNA, 687 bp, Homo sapiens
aacccagagaagcaaaataaattacccagtgccttacagctaatactgggtgggattagtagtcaagccctggcctcaataacttcagcacaaacattctttctgccagtctttcaaatcctcatgttgaaaattgtttctggtgtgttttggagtgaagaatctggaagtagtatttggttgttttggtgcctactggggtagatctagggatttaaacttcttcattcttagactattctaagattctcgaacaaatctaggattagacatgactaatttgaggaaaaagtggtttctgtttgtttattgttttctttgcaattgaggggagtagactgtagtgtatgaatgggacagccagatcaattagtagctaagaagaataggaccatttattaagaactaccataccatgtgtcagatgcttctgcagagtgcrtgtatgtgaccatttcgcagatgagaaaatgaagacttggagatgtcaagcaacttaaccaagtcttcatattgagtaataaaaactggaaggttgatataaaagtggttgaatctgaatttaaacctaagcctttcattctttacttctccatgaggccatccaaacacatttaagatatagaagtagcaaatgtaggggttttttccaagaagtttggccatgaagaagaggaacaaaatcag

SEQ ID NO: 479995 - DNA, 600 bp, Homo sapiens
tggctgagctggccgagctggccaagctggcagtgcaaatacccctagaattgctcagttctgagccattcttatttatctgttttatgttgggtttccccttaagcctttatagaagcaaatttccactgttttttaaaaagttctgaagctttcttgagaaccaccaactcctccactatcaacatctccaactcctccactatcacgatcaccaccactccatcaccatatttttactgactgcttatgaggtgctaggacttttacatwtatcatctctataaccttattgattagatagtatcatcattatttcacagatgaggaaatggaactttagctctgcaaagaagccaagtaacttctccaagaccacaaaatagtgtagaataaaaatttcaaccaatgtagtctgaatccaaagtaagtgtgctttaaactactatgctaaatagcctcctttaattaaacaataatacagattttctctcatccatcagaatttttggctgggcgttaacatctaggaaacttttattcaagcctgctcttgcttgaattttcttagatgatatttttcagaaatgtcagcactgt

SEQ ID NO: 479996 - DNA, 642 bp, Homo sapiens
ttccctactgaacagagcatgcaggatcagcttcgttttattattattattattaattattattttcacaagtcaaaccacaactgcrctttgcttagaatcatcttttccaaacttggaaaatttacatctagcaccattctttttaaaatatccaacctgtgcttgtactggttactgtggtaggggatggggagacacgggataaacctcattacgagttcagcttagatgctttccatccctcactgcctatggtctgggttttatacaacactgatttaagctgtttatccttggcaagcagaaggaagcatggcagaatgacctagaaataggtcatttgcactattactgaaattagcatcaaggtaggcacaattttagaaccaatagcctcgacagtttcccgttggtgtgtgactctactagtaggaagcatatgggagggagttctcaggaaagaggctacctgggtttggtttcatattccaaagaaagtacctttggaagtcacgacaactgctagtgtctgagtggatcacttagctttgaccgtcaaagactaaagccaaataaagactttcaaacagctttacaaacataatagtaatccagttctcagaaagctgaactcatttg

SEQ ID NO: 479997 - DNA, 642 bp, Homo sapiens
ttccctactgaacagagcatgcaggatcagcttcgttttattattattattattaattattattttcacaagtcaaaccacaactgcactttgcttagaatcatcttttccaaacttggaaaatttacatctagcaccattctttttaaaatatccaacctgtgcttgtactggttactgtggtaggggatggggagacacgggataaacctcattacgagttcagyttagatgctttccatccctcactgcctatggtctgggttttatacaacactgatttaagctgtttatccttggcaagcagaaggaagcatggcagaatgacctagaaataggtcatttgcactattactgaaattagcatcaaggtaggcacaattttagaaccaatagcctcgacagtttcccgttggtgtgtgactctactagtaggaagcatatgggagggagttctcaggaaagaggctacctgggtttggtttcatattccaaagaaagtacctttggaagtcacgacaactgctagtgtctgagtggatcacttagctttgaccgtcaaagactaaagccaaataaagactttcaaacagctttacaaacataatagtaatccagttctcagaaagctgaactcatttg

SEQ ID NO: 479998 - DNA, 522 bp, Homo sapiens
cttcctctgtagtatttccttcatgactctttatttaaatttagaagaaatgctgctgtttctacgtagtggaagtacatttgttgcagtttctttaggattactttttagaaaaatcctcacaagtgaacccgctgtgcggtaccactatggtatccatcccttcatccactaactactgtactaagtaggttcctggcagttaatcatgtcagggaaaatgatacacaaagcacaccaggctatccattgtttcaatttaatctgaaaggggaataataactgctaatgtgagattatgattcagcatgcttattacaatgccattatgtctgattatttttatttcagtcactaacgcatgcaattaacacagtctctaaggayttaaaggcagttctatatttatttctgatctgaaatgcaactagaattgattaaactaatatgaagaaattatatttatcattaagcatcctctagttaagcctcagactttgataaatgaagaacggttttaca

SEQ ID NO: 479999 - DNA, 665 bp, Homo sapiens
cattcctgtatcgtcaccacattaatttttttagctactagctccactgaacccagagtttctatggacgaggggctgaagtggagagtgatacaatctgatatgtgcatcttcaagatccctctgactgctgtgtggctaatggactggagctggagggggtgtcagtgggagcagggagtccgagtatgtctattttgatcatccaggtaagagatgctcttggtccagacttggctttgggctattttgcaggtggagttaataagtgttgtatgtaggatgtgagagaaactgagaaatcaagaataattctttgatgttttatctgagcaactaggatcatggtgtgccagtactcagagctgggaggctggcggggagcagaattcttgaggagggctgtgctgtttgagatgcccgtttgtattcatccattttcatactgctatgaagaaatacccaagactgggaaatttataaagacaaaaaggtttaacgaactcagttccacatggctggggaggcctcacaatcatggtggaggatgaaggaagagcaaaggcacgtcttayatggcagcaggcaagagaacgtgtgcaggtaactgccctgtataaaaccatcagatctcctgagacttatttgctgtcatgagaatggca

SEQ ID NO: 480000 - DNA, 574 bp, Homo sapiens
ggcagggacaccccttttgttccagttctcctgccttctggtttcttctcatagagattatctcctgtttgtatgtgggtccacagaccctggaatacagcctgatgcagagtaggtgctcagcgaaagctatgaaatgaacagatggcaagaaaattcctcaggaaggaaggggcttcatgaaaatgtcctctatggagcaaatatttaaaattaagataaaagaagagctcaagataaatatcataaaacaacagcgggagttggaaaaaaygaagaagagccaaatagtagcagagaagctgccccagctatggaaaaggaagtccccacaaacagatagatgggcactgctggaaatacactcagagactgagagagttttaaaagaaagaaaagtgaggtggaaaggactaaatgttaaaagatggcaagagtataccaaagattgaagacaaagaaaattcattcctcttaattgccaaactcaaaactccacctctatccatatgtgctcggtccctcttaattgcttcctcttctggggaaacaaacgtaaccatgagtggacgcc

SEQ ID NO: 480001 - DNA, 595 bp, Homo sapiens
agggcttcgacatgtctttgttggggacccaataccacccgtaagaggcctggtgcttggcgggggctgcaggaggcagggcagagcagggcttcagccaagggccaggttggcccggaagctggttcgattccctggaaggggccgagggcaggaggtactgttccgtgtggctttggggcttcctgctgcaacgggctccgggcagagaggcctccgctgcctgccaaggttttagttgctgccgcttctcccttatgttcctccaaatctcccgctgcccccatctgaacctcagaagcatgctatgggggcaggggttcccggtcctcagcttcaggaggctggatctactcctaactggggtaatctgtttgcttctttcccaggggacaggttcccaaaaggcgtacccagagcagaaagctgaacatctaascagtctctgcctcctgatgcagaccgatgttgtgggaagacccgagagtcaggacccaggcgtgtgagagtccagccccagtcctgccctgcagggcctgttccatctcaccgggctccagtcttctcacctagaaaatgagggcttctgatgcaa

SEQ ID NO: 480002 - DNA, 595 bp, Homo sapiens
agggcttcgacatgtctttgttggggacccaataccacccgtaagaggcctggtgcttggcgggggctgcaggaggcagggcagagcagggcttcagccaagggccaggttggcccggaagctggttcgattccctggaaggggccgagggcaggaggtactgttccgtgtggctttggggcttcctgctgcaacgggctccgggcagagaggcctccgctgcctgccaaggttttagttgctgccgcttctcccttatgttcctccaaatctcccgctgcccccatctgaacctcagaagcatgctatgggggcaggggttcccggtcctcagcttcaggaggctggatctactcctaactggggtaatctgtttgcttctttcccaggggacaggttcccaaaaggcgtacccagagcagaaagctgaacatctaaccagtctctgcctcctgatgcagaccgatgttgtgggaagacccgagagtcaggacccaggcgtgtgagagtmcagccccagtcctgccctgcagggcctgttccatctcaccgggctccagtcttctcacctagaaaatgagggcttctgatgcaa

SEQ ID NO: 480003 - DNA, 602 bp, Homo sapiens
cctttaagcgctcctctaaccttactacacataagataattcatactggagagaaaccctacaaatgtgaagaatgtggcaaggcctttaagcgctcctctatccttactgcgcataagataattcatagcggagagaaaccctacaaatgtgaagaatgtggcaaagcctttaagcacccctctgtccttactacacataaaagaattcatactggagagaaaccctacaaatgtgaagaatgtggcagagcctttaagtacttctcatcccttactacacayaagataattcatagtggagagaaaccctacaaatgtgaagaatgtggcaaagccttcaactggtcctcacaccttactacacataagagaattcatactggagagaaaccctacaaatgtgaagaatgtggcgaagcctttaagtactcctcttcccttactacacataagataatccatactggacagcaacccttcaagtgtgaagaatgtggcaaggcctttaagtgcttctctatccttactacacataagagaattcatactggagagaaaccctacaaatgtgaagaatgtggcaaagccttcaactcgtcc

SEQ ID NO: 480004 - DNA, 532 bp, Homo sapiens
tgagaagatatgaaaaatgtgaacatgacaatttacagttaaaaaaaggatgtataagtgtggatgagtgtaaggtgcacaaagaaggttataatgaacttaaccaatgtttgacaactaccccaagaaaaatatgtcaatgtgataaatatgtgaaagtccttcatcaatttccaaattcaaacggacaaaagagaggacatactgggaaaaaacctttcaaatatatagaatgyggcaaagcttttaagcagttctcaactcttactacacataagaaaattcatactggagggaaaccctacaaatgtgaagaatgtggcaaagcctttaaccactcttgtagccttactagacataagaaaattcatactggagagaaaccctacaaatgtgaagaatgtggcaaagcctttaagcactcctccactcttactacacataagagaaatcatactggagagaaaccctacaagtgtgataaatgtggcaaagcctttatgtcatcctcaacccttagtaaacatgagat

SEQ ID NO: 480005 - DNA, 465 bp, Homo sapiens
ggctctttaggcaaggggtttgctcttccagttaccagaagtgacactttaaataaatgtactgccttcactctcacttacgtgtctattccacattttttttaggtttttgtggcaggcagaaagccttccaatgtaccaattatttattagctacagtaaaacctacattgctagagctaataagccccacawtatagatttcttattaaaactgaagagtgttttctgcttacattatgagcccaggaactctatgctccatgaatcagtccagaacccaacaaattgggtatggctttgttatccatgatacacagctattagtgttgccctggtcatcaccattttcatttgggatgaaagtaaaaaacaagggaattatgggcaattacatttaataaggggtattgctgtcctgcatttcacatttacttacatctcaatcatgagcacttagtcaca

SEQ ID NO: 480006 - DNA, 662 bp, Homo sapiens
atactgtcatagggcataatgactatttaataagagaaagcatgtaaagcatttattagagtgctcaatgaaacatatgcacttagtgttagctattattataaataacattattattgtttcctcaaccttatactctttcttcataaacaagcaatttttaaattggagtttgcagccctttgagggatcagcacacatgtyctcacgtgtgtctgagaagtttctctgaaatttgttgttttattttgtgctttcattttcatgataatcttaaaaataatgaataactgtgtactggttcccctttataagagagtcctgccatgagttatattgtccaagtttccccatgtttaaaggaaggcgctctactccagtgtttgtagatggataagcaataaaagagcagtcttaaaaatgtgcccgatacagtcagactcagtgaaggccacctgatgccatctctttgtaggagggaagggttccctgagttcgagtagaggaaagtgatatgcaggttgagtcctcacgcagccgggagtgggcacgtgcatgcacaaaacaaagagaacattggctttagcagtgagtactgtatttaaattttgaaagacagtttaatctcagcaaaataacatcatcaatcatgttaaactaat

SEQ ID NO: 480007 - DNA, 295 bp, Homo sapiens
ttctttaagtaggacgcatattcaaatattgaacccatctacagcatgggctattaatatgatatcttggttctacacattggttatcaaaccagacaacaatgcagccacgggattttcagagttacaaagggtcttgtcaatttttggatccaatacactcatttttttttacattaattaatgaaatcaccatctgtttattgaatatgagtcattgtgttaggtgctaaaagatgcaaagmtaaatgagaaacagttattgtcaaggaacagcagtagaaagacatgcaca

SEQ ID NO: 480008 - DNA, 505 bp, Homo sapiens
tgacagttaagagatatgcactggttttctgtttggggacctagtctaattctttcatcttatagatgaggaaattcaaattctgtgcactaaagtgacttgaccaatagcacatagctagctggcaaaagaacaaaaaacaagcttacagttcctggctgctgccattggtgctgtttttgaagagccatcatggaattttttcagagttctgctgctgctataactcagaattgactgcagatgggtctagagaccatttgcctgatccgtttgctcaactggtgtggaaaacagatacctcaatcattcctccatggtcctgttttactgattgtctgctgtgctttgaagagtgatctctgaagctcacaatagttggtgagtattcagtagaatactgaagaaaaaatactgaagaagcagcagatggttatagttgttattgtctgaaatcagcatttcgtgttacyggttattaagagtattggggaatatgcaatgc

SEQ ID NO: 480009 - DNA, 612 bp, Homo sapiens
cttatttatcttggtattggcatctgttggttgtcttctgttttaaattatggttttctcagttctttgtatgagcaggtgaacattctggtaattaaggtgagagactcttcaytctatctaaatcttaaatccagctacattctttaacaagcaatcatcatgtttaggtttagtttatagattctggccaatctttgtgggttttacccccaatgacaattaatttttcagagctcttacaataatattctagtccatttcaatcttttggtgctgatgggattcttattagatccctgctggttccatctgtgaggcagaaattgcttccctaggcttttctgttgttaggtgaccttcctggggtaggtgagacagaagccactgggcctgggtctccttaagccattgggtgtagattagaaagacatgaagttttgctgttgctaaaactgtgagtttaatttatgggaacactgtttctttccttacctctgattctcctgtccctgtttctggctttggaccaggggctagaatagctaggggctttactgttgctactgttcagggctgctgcttgggaatcagatcacttgcaagtgaccc

SEQ ID NO: 480010 - DNA, 512 bp, Homo sapiens
cctgtttttcaaggctccccagcggggctgaacctctgccctctgctgcccacagtagtagccggctcagtagcactttttttttttaagagatagaatccactcagtcacctagctagagtgtagtggcatgatcatagctcactgtagcctcaaactcctgggctcgagcctcctcttgcctcagccttccaaaacgctggaaccacaggcatgaaccgctgcacctggcctaagtagcacactttatcactgccttcccatccctgtctggcctccacatcccctttactgggaaatcccccttccctccccgtagttccctgtactcccgtctaagggtcagcttccraggtgatgcttctcagtgctgggcaggcctgcgggttactgtgcgtagtcagtgggctgcctggcatggtgggttagtcagttgggggtgggcagcgtggttctgacacccccatgcctgagcctggacatactccttgtctgtctcctcctgcagccgc

SEQ ID NO: 480011 - DNA, 512 bp, Homo sapiens
cctgtttttcaaggctccccagcggggctgaacctctgccctctgctgcccacagtagtagccggctcagtagcactttttttttttaagagatagaatccactcagtcacctagctagagtgtagtggcatgatcatagctcactgtagcctcaaactcctgggctcgagcctcctcttgcctcagccttccaaaacgctggaaccacaggcatgaaccgctgcacctggcctaagtagcacactttatcactgccttcccatccctgtctggcctccacatcccctttactgggaaatcccccttccctccccgtagttccctgtactcccgtctaagggtcagcttccgaggtgatgcttctcagtgctgggcaggcctgcgggttactgtgsgtagtcagtgggctgcctggcatggtgggttagtcagttgggggtgggcagcgtggttctgacacccccatgcctgagcctggacatactccttgtctgtctcctcctgcagccgc

SEQ ID NO: 480012 - DNA, 600 bp, Homo sapiens
ggcagagtcagggttgggttgggggtagagacacccaggtctcctggcacagaccgttctgatgtcccgttgaggcctgttccgccctgtttttcaaggctccccagcggggctgaacctctgccctctgctgcccacwgtagtagccggctcagtagcactttttttttttaagagatagaatccactcagtcacctagctagagtgtagtggcatgatcatagctcactgtagcctcaaactcctgggctcgagcctcctcttgcctcagccttccaaaacgctggaaccacaggcatgaaccgctgcacctggcctaagtagcacactttatcactgccttcccatccctgtctggcctccacatcccctttactgggaaatcccccttccctccccgtagttccctgtactcccgtctaagggtcagcttccgaggtgatgcttctcagtgctgggcaggcctgcgggttactgtgcgtagtcagtgggctgcctggcatggtgggttagtcagttgggggtgggcagcgtggttctgacacccccatgcctgagcctggacatactccttgtctgtctcctcctgcagccgccag

SEQ ID NO: 480013 - DNA, 636 bp, Homo sapiens
aggaatcctcctggattgagccccaattttgggatttgctagcatcactagagcaattttctgtgggaaccagtggccaactgccagcttcactacctgcttcagggtgtatcaacatctgtctatttccctgtcattacatctttattatttttttttaatttattttatttttttgagaaggagtctagctctgttgctcagactggagtgcagtggcgtgacctcagctcattgcaacctccacctcccgggttcaagcaattctccggcctcagcctcctgagtagccgggactacaagcacctaccactatgcccggctaatttttgtatttttagtagagacggggtttcaccatattggtcaggctggtctcgaactcctgacctygtgatgcgcctgcccccagcctcccaaagtgctgggattacaggtgtgagccactgtgtccagcaatttattttatttttttattttattattattttttgagacagtctcgctcttgttgcccaggctggagtgcaatggcacgatctcggctcaccgtagcctccacctccagggttcaggcgattgtcctgcctcagcctcccgagtagctgggattataggcatgtaccaccatgccca

SEQ ID NO: 480014 - DNA, 555 bp, Homo sapiens
ctgatttcacgagtttttgtatgcactctgtgcacgtgtgtgtgtgtgtgtgcaggggcggttaattgccattttgtcacagatgcagacttgtggatctcccacagtgaagatacagaactgcttcttgcccacaaagtgaactccttcctgccacccctttgaagtcacagtcaccaccactatcccctgccctccagcacactctccattcgggcagaattgtttggctgaatttttccccagaatcatcagctttggtggcctggacaacttcttccctcccctacccctttccctagcggtagcaggaaggctacagctagatgggggagctacagggtgtctgatgaggaractcatgtggagagggagacggggcaggggatgggggcaggtggtgatttgaggtggaggctgaagtcctggtgaatccagggagtagagaggagtgaagggtcccccttgggaggcaaccgggtcgggatagggagagggagatggggacgatggtgatctctctctggagtccgagaaacccggattccagttcag

SEQ ID NO: 480015 - DNA, 518 bp, Homo sapiens
ttctgtagaacattctggctcttsgttcaatgtttaattcatatgaaccccttacgaccatgatgtatatttgatcaggagaacaactaccatccaaggacgcaggacaaaaggaacagttgctccatccagattacactgccttgctttttgctttctcttcttctccttcgaagaacattctgtctcttgtaagccagtgttcctactaatagcccctttaaaaatcctcttgaagaatcccactagttatcctgttgccaagtaggtacttcctttataatagctggttgaatgtttctcccattcctttaaaaatagtaaccattcttgcaggaccaagactatgattagtcaagacagacagctagggtataaaatgtaaggcagcgctcactttcaggtgctgatcctgcacttgtgtgactcagagaatggccacctccttaaattttgcacgccagtcacctcctctgccccaccctcatctattccccacattattgcaaagacccaac

SEQ ID NO: 480016 - DNA, 518 bp, Homo sapiens
ttctgtagaacattctggctcttggttcaatgtttaattcatatgaaccccttacgaccatgatgtatattygatcaggagaacaactaccatccaaggacgcaggacaaaaggaacagttgctccatccagattacactgccttgctttttgctttctcttcttctccttcgaagaacattctgtctcttgtaagccagtgttcctactaatagcccctttaaaaatcctcttgaagaatcccactagttatcctgttgccaagtaggtacttcctttataatagctggttgaatgtttctcccattcctttaaaaatagtaaccattcttgcaggaccaagactatgattagtcaagacagacagctagggtataaaatgtaaggcagcgctcactttcaggtgctgatcctgcacttgtgtgactcagagaatggccacctccttaaattttgcacgccagtcacctcctctgccccaccctcatctattccccacattattgcaaagacccaac

SEQ ID NO: 480017 - DNA, 518 bp, Homo sapiens
ttctgtagaacattctggctcttggttcaatgtttaattcatatgaaccccttacgaccatgatgtatatttgatcaggagaacaactaccatccaaggacgcaggacaaaaggaacagttgctccatccagattacactgccttgctttttgctttctcttcttctccttcgaagaacattctgtctcttgtaagccagtgttcctactaatagcccctttaaaaatcctcttgaagaatcccactagttatcctgttgccaagtaggtacttcctttataatagctggttgaatgtttctcccattcctttaaaaatagtaaccattcttgcaggaccaagactatgattagtcaagacagacagctagggtataaaatgtaaggcagcgctcactttcaggtgctgatcctgcacttgtgtgactcagagaatggccacctccttaaattttgcacsccagtcacctcctctgccccaccctcatctattccccacattattgcaaagacccaac

SEQ ID NO: 480018 - DNA, 537 bp, Homo sapiens
gaatctgctgagctgcagccccacgttccccctgtagtagctgatgacatcagcaatgctgccaatgtaggcttaaccccggtattgagttcctataacccaataccacctctctttgcagtggtggcaggtggagaaggtgaaccccatcaagctgtatgaggagaacaaagtcatcgcggggttttcccttttaaatctgctcttcaaacaaggccgggcgggcctcattcggggagtggtggaaaaactcatagggctctacaaccagaagaagatcaagcctgtggtggactccttgtgggctctggaggaggtaagaatggtgcttttcttctgcaaataaactcctctttttaactcaggaaggtttgggcagccaaatacaatcttctactaaatgatttttttcccagaygggtttgttttaaatgagggtcctaaaagtcacctgtaccacagaatagtactttggatataagaaatactttaagctctttggtgatttgcaaaccacgtgcctcatcacaccatttg

SEQ ID NO: 480019 - DNA, 600 bp, Homo sapiens
tgttgttttctgcagtagatttgttacctataagactgtaggtaaagatgttaacatcatggtttttactgtttgagttacaaaataataacccccaatttcagagttgggttttttctttaaagctgttagatttaaaaccttgttaaattttacatctattaaagtgtcttaatatacttacttttctccactgaaacttaaggaagactccaagtaacatttataataatatacgattgctctactgaaaatatcctagtattctgactcccaktgagaggggttttggtgctcaatgttatgggtcaagaaaacatcctagtttccctttaataacatatgatgaatttagcatacatttatttattttgatagtttttaatcctgattatttttttctcttgaagcaatgatttctttctttctttttaaaggcaggatcttgctgtgttgccaaggctagtcttgcactcctggattcaagcgattctcatgccttagcctctcattcagcaggaatacatgtgtgtgccactgtgctcagctagtatctcattaattagtttttttttaagacagtgtctcactatgttgccc

SEQ ID NO: 480020 - DNA, 524 bp, Homo sapiens
tagaattggcatctttccctgaggttttccgagtggcaagtggcaccggctgtggcatgtattcatgccgcttcctatggcatttctcttccgatgtctgctttttctttgtttgttgttgactaggctgaatggtggggktttttttaagttaattataaacgaagttgaaatagcaaacaagccaacagcttgtcccccccaccaaaagaaaaattagccccacacaagcgccttctgctgcaacagatgcccagatcacccctggcacgggcaaacgggcaaacgattttggtggttttcagttttttctgtttgttgctgtatttgttgtttgttttccttgtttctttttgatttttcgaggagtccagaatcccggcctctgcttggaacggaacagtgtcatggcggagacgacggcctttgtcttgctgggtgtgaaaacatccgctgtgctggctccactgcggcagaatcaagtttaaaggaaaaaaagtgattaaagtcagctttgtgcctct

SEQ ID NO: 480021 - DNA, 524 bp, Homo sapiens
tagaattggcatctttccctgaggttttccgagtggcaagtggcaccggctgtggcatgtattcatgccgcttcctatggcatttctcttccgatgtctgctttttctttgtttgttgttgactaggctgaatggtggggttttttttaagttaattataaacgaagttgaaatagcaaacaagccaacagcttgycccccccaccaaaagaaaaattagccccacacaagcgccttctgctgcaacagatgcccagatcacccctggcacgggcaaacgggcaaacgattttggtggttttcagttttttctgtttgttgctgtatttgttgtttgttttccttgtttctttttgatttttcgaggagtccagaatcccggcctctgcttggaacggaacagtgtcatggcggagacgacggcctttgtcttgctgggtgtgaaaacatccgctgtgctggctccactgcggcagaatcaagtttaaaggaaaaaaagtgattaaagtcagctttgtgcctct

SEQ ID NO: 480022 - DNA, 610 bp, Homo sapiens
ctacatggtgaacagagttagaaatgaaacaccagtattaagcaggaaccctaggagcattatcaaataacaggatattaaaaacagaaacaaaacatctrcttttcagcagagacagaccacaaggaagatttttttctcaacctgggcccagtgtctaagtggggaaaattttaaaagcttccccatgaatttctgatcataatcataggcataccctttttaggtttgaggtttaaatttatactcctgactagttctatacactgggaaatcaaccaacgtatagttactgaatgttaatactcctgaggtgccttacagaaacttaagacaaaagccattttaaaagggtgtgttctcaacccaggctacgctgtattccctcagaaaatccactgcttagcatgggctcactttctgaaagttataaaatatgcaaggaaacagccagtatgaacaagaatcagtagaaccaatatataccagtattatcctctattaacttctgataattgagcacataatataaatattaaaatacaggctatttttaagcaaaatgaataagcaaaaaaaagaagaatatctaaaaaatgaaaaatatggc

SEQ ID NO: 480023 - DNA, 202 bp, Homo sapiens
atttttaggtgtctcattcaacaagttctggtggtatttcgccatttagccttggcacccagttatatttcctcttgtgtttggcagggtagccacatttgccacaggtcgtcttctggaggtggtgggccttagagccacagtggtggcacaatgtrtgtgtcttactgtgatgctttccaaacgatgagattcccttcat

SEQ ID NO: 480024 - DNA, 540 bp, Homo sapiens
aataaataattatttgaccccaaatatcaatagtgctgagattgagagcttctggtctagaggaactactagacaaaagctagaactagaccggtgcagtgcctcatgcctgtaatcccagttctttgggaggccaagacaagcgaatcacatgaggtcaggagtttgaaaccagcctagccaacatggttaaaccccatctctactaaaaatacaaaaattagccaggcwtggtggcacacacctgtaatcctagctactcaggaggctaaggtggaggattgcttgaacatggaaagtggaggcagcagtgagctaagactgcaccactgcactccagcctgggtgacagagcgagactgtctgaaaaaaaaaaaaaaaaaattggaactaaagcaaactatttaatcttctaaaggcatgaggacaatagactgtttcaatcttttgtacatgaaagagctatgtatcctcactgggcctcagtttcctaatctgagaaatgagattcttggattaaataatgtagaaagttctttc

SEQ ID NO: 480025 - DNA, 552 bp, Homo sapiens
gctttcatctttagatattatttctttgggcttgaaggcttttataaaatagacctctctctacaagaggtaaatcttatgtctcactcagcagatggttgaactctaggtcagctactgaggaggaaatagaagaaggagtgtccctaacacattaatcccataaatatctagtgagcatctactatgtgttaggcacaggggcatggacatgaacragacccagtcactgccctcaaggcttttaatctaatgaaggaccaaggctaggaaacaggtgattacaagtcccatgtgatgtatgctaatccaggaaggaattatgggagcacagaggagggacactgaactaagactcagagcattggcaaagacttcctgaaggaagtgacgtctagaccgaaatttaaaggatgaggagttaggaccacgaaggaggtatgaccattccaagtagagaaaacagaacagcacaggaaaaaagtccagggatgaagaagcatagtgtgtgggacgtgggtgcacctcaacacaaatgtggggcatggttag

SEQ ID NO: 480026 - DNA, 482 bp, Homo sapiens
cactcttttgtgtatagttgcagctttgtgtttgtgggggtggttgtgaggttgtagtttttgttgttgttttgttttccttttgctgtgatgtttggctagactagagtagagcagttattatttttactgggcttcccctttctttgtcctttggatagcaagagcttacttttcttgagccttctttttttttatgtcaacccccattggcattcttggattgctgacttctctagcaastggtctgggatatataaggccaagagaaaacccaacattataaaaatatatgtcctttctatctttctaggagcagaaatatggtcttttatcttttctataaacttggatatcattaggaaaaagaaaataaaacattttatgcatttatatgaaattcaaacaaaaggactttgactctttgtaaatgttaatttctgtgtttaattgcagaatcttttagctgaaaaagtagagca

SEQ ID NO: 480027 - DNA, 434 bp, Homo sapiens
gctggctaaaatcacgtggaaaagagcctatcacccttttgtttccttacagagaggtcacacctctcatgggtttagagtgtgaaattaacaaataaggtaaacttgggtcccttgtacatcacttaaagcacttgtaagtatattacttttttggggtttggtactacaacccttatcatttcctcttacctttgataatatttcttcatagcccttaatttttaagtttccttaaatttcttggctacctgaacaaggtatttcacctctttgcaagactggggaastgtcatgccttttacatgttctttttctggtttggctaacgtgagacatttttcaggcttgagtgaatccatgaccagtttggtataaatgatgccctcaagttactgctgagctatgtagtttaattttcttattttttacat

SEQ ID NO: 480028 - DNA, 434 bp, Homo sapiens
gctggctaaaatcacgtggaaaagagcctatcacccttttgtttccttacagagaggtcacacctctcatgggtttagagtgtgaaattaacaaataaggtaaacttgggtcccttgtacatcacttaaagcacttgtaagtatattacttttttggggtttggtactacaacccttatcatttcctcttacctttgataatatttcttcatagcccttaatttttaagtttccttaaatttcttggctacctgaacaaggtatttcacctctttgcaagactggggaagtgtcatgccttttacatgttctttttctggtttggctaamgtgagacatttttcaggcttgagtgaatccatgaccagtttggtataaatgatgccctcaagttactgctgagctatgtagtttaattttcttattttttacat

SEQ ID NO: 480029 - DNA, 616 bp, Homo sapiens
actgatttcctttcctttggataaataaccatcattgagattgctgaatattatggttgttgtatttctggtttttaaagaaatctctatactgttttccataatggctgtactaattcacattcccacgatgagtgtacaagagttccctttactacgcgtccttttccgaattttggggtggtttttttttttttttttggtctttttaataayagcctgaatagctgtacttgtatactttcactatatataaaaagtaaattggaaatttcaattctaacccaaggagtctgtttcatatataaattattatgtaactatatccttagcaaaaaagaataataatccggcatttcacagattactatgtccaaggcaatttacaaatttgtacaagcatgactttaaatttaaatgtcatgaaaacttaaattttcatcaactgttgaatggatagacaaaatatggtaggtccacacaatggaatactgctaggaaataaaaagaagccaacttgtaactgccacgacatggataagcctcaggaacattatattcactgaaagaagccagacataacagaccacacattttattctcccatttatataaa

SEQ ID NO: 480030 - DNA, 414 bp, Homo sapiens
ccctttccttctacaattcagtgtctgaggggttcttgtctgcggctcgtcctgctacaccatcatggtagtattcaaccttgattcagccatccttcctcataaatgcttcaagaggaaaaatgtacaggaaacaatggcaaaaaacagcacaaccactccactattatgagtacgagaaaaacttttaytccccttgaaaattctaaaaaacatggaccaatcagcattctcccttccttaagggaggccccgttttcttttccttcaacttaactcacatgttaaccaaaagaatattattaaaatataatattctaaaaataaaagttaaatgactctttgtatttcatttggtatgcctttaaaatgaaaacacctaccaatcaattataggcacacacaaaaaaataa

SEQ ID NO: 480031 - DNA, 611 bp, Homo sapiens
tttattttataaaagcatagtaaaaacctggaaaaaaatatatcaggattatgatataggtgatttttgttttcttcattttatttttctcaaatttctataatgtaatttcttatataatgagaagaaagggtgcttttttccaaccctaccccacatccacctgttagatcaattccgaggtgttaaagcaagatcgttgacaaagcaaaatagttaaaagacaagcacagttccgctgggcgcagtggctcactcttgtaatcccagcactttgggaggccaaggcrggtggatcaagaggtcaggaatttgagaccagcctgaccaacatggtgaaaccccgtctctactaaaaatacaaaaattaggtgggcgtggtggcgcacacctgtaaccccagctactcaggaggctgaggcaggagaattgcttgaacccaggaggcggaggttgcagtgagccgagatcgcgccaatgtactctagcatgggcgacagagtgagacttgtctccaaaagacaagtacagttcaactggactcctgggtagattactagaaagagtgcagcatcaacctgagctacccatagaagctcaacaattcgtta

SEQ ID NO: 480032 - DNA, 611 bp, Homo sapiens
tttattttataaaagcatagtaaaaacctggaaaaaaatatatcaggattatgatataggtgatttttgttttcttcattttatttttctcaaatttctataatgtaatttcttatataatgagaagaaagggtgcttttttccaaccctaccccacatccacctgttagatcaattccgaggtgttaaagcaagatcgttgacaaagcaaaatagttaaaagacaagcacagttccgctgggcgcagtggctcactcttgtaatcccagcactttgggaggccaaggcaggtggatcaagaggtcaggaatttgagacyagcctgaccaacatggtgaaaccccgtctctactaaaaatacaaaaattaggtgggcgtggtggcgcacacctgtaaccccagctactcaggaggctgaggcaggagaattgcttgaacccaggaggcggaggttgcagtgagccgagatcgcgccaatgtactctagcatgggcgacagagtgagacttgtctccaaaagacaagtacagttcaactggactcctgggtagattactagaaagagtgcagcatcaacctgagctacccatagaagctcaacaattcgtta

SEQ ID NO: 480033 - DNA, 506 bp, Homo sapiens
gtttttttttttaagacagggtcttgctatgttgcccaggctggtctcaaacacctaggctcaagcagyctgctcaccttagcctcccaaagtgttaggattataggcatgatccaccatgtctggccctctattcccttgtttgcagtggttttccagtcattctaaaatggctttaatattttttctttaatggaacaaattcttggagtacctgtgtgcagcacagtgttgggaatactgagagacatgataatgcaagttctttttctttttttttcgagacagagtcttgctgtgtcacccaggctagagtgcagtggcgcgatctcggctcactgtaagctctgcctcccgggttcacaccattctcctgcctcagcctcccgagtagctggggctacaggcgcccgccaccacacccggctaattttttgtatttttagtagagatggggtttcaccatgttggccaggatgggctcgatctcttgacctcgtgatcca

SEQ ID NO: 480034 - DNA, 506 bp, Homo sapiens
gtttttttttttaagacagggtcttgctatgttgcccaggctggtctcaaacacctaggctcaagcagtctgctcaccttagcctcccaaagtgttaggattataggcatgakccaccatgtctggccctctattcccttgtttgcagtggttttccagtcattctaaaatggctttaatattttttctttaatggaacaaattcttggagtacctgtgtgcagcacagtgttgggaatactgagagacatgataatgcaagttctttttctttttttttcgagacagagtcttgctgtgtcacccaggctagagtgcagtggcgcgatctcggctcactgtaagctctgcctcccgggttcacaccattctcctgcctcagcctcccgagtagctggggctacaggcgcccgccaccacacccggctaattttttgtatttttagtagagatggggtttcaccatgttggccaggatgggctcgatctcttgacctcgtgatcca

SEQ ID NO: 480035 - DNA, 602 bp, Homo sapiens
ctgagattacaggaacacacccccatgcctggctaatttttgtatttttagtagagagggggttttgttatgttggccaggctggtcttgaaatccagagatatgggtatcaattgaacttcgggtttgaagcaaggaaattgatgaggtggccttacttctgtagcatctgagttgttacaagaagcctattacataaacatcagagggtagaaatgatagaaaaagggttttctcttcagctaaagatctaagctccaggaattcaagwatttgaatgaatggtttggctcaatccttccataatacaccgtggtagacaggagagatggaaagaggaagagaggaagggcgagaaagatgatgcaagatgctccactgcttgctgattctgaagatggaaagggccaggaaccaaagaatatacgtggccttttgaaatggaagagagaaggaaagattctgccatcaaagcctccagaaggaattcccctgataacctgacttcagcttgcttaattttggacttctgacctacagaactattttcagccataaatgggttaaatttgtggtaatttgttaaagcaccaataagaaac

SEQ ID NO: 480036 - DNA, 606 bp, Homo sapiens
ctttcaagtaaattggcatcttcatgtgttctagaatgctagtcaatcaagaatcttaaatcatgaagagttcatgtttgtatagtgcttattttgtgccaagcactaatctacatactttacatctattacatttaaatatcacaacttcttgaaatagataccattataatccctatttttcaaatgaggaaactggagcacagggatgctataygatctgcccaaggtaacacggtaagccgtagagctgggactcaaactcaagacaacactggtttcagaacccatgctctaaaccaataatccttattatgagttccttccagttttaaaatttctacacattatttggccaaccccatcatttgactgaagagaaaccaaggaggagagagattcagtgaactgctgaaagttgcataaagcagagtttttcaaaatttagtgtgcatataaatcacgcagagatccttaaaaatgcagattcttattgaataggtataggatgaaggctgagattctacatttcaaacaagctcccatgatactgattttaaaaaccacgttccacaccttaagtagcaagaacaaagggaaatgcta

SEQ ID NO: 480037 - DNA, 606 bp, Homo sapiens
ctttcaagtaaattggcatcttcatgtgttctagaatgctagtcaatcaagaatcttaaatcatgaagagttcatgtttgtatagtgcttattttgtgccaagcactaatctacatactttacatctattacatttaaatatcacaacttcttgaaatagataccattataatccctatttttcaaatgaggaaactggagcacagggatgctatatgatctgcccaaggtaacacrgtaagccgtagagctgggactcaaactcaagacaacactggtttcagaacccatgctctaaaccaataatccttattatgagttccttccagttttaaaatttctacacattatttggccaaccccatcatttgactgaagagaaaccaaggaggagagagattcagtgaactgctgaaagttgcataaagcagagtttttcaaaatttagtgtgcatataaatcacgcagagatccttaaaaatgcagattcttattgaataggtataggatgaaggctgagattctacatttcaaacaagctcccatgatactgattttaaaaaccacgttccacaccttaagtagcaagaacaaagggaaatgcta

SEQ ID NO: 480038 - DNA, 593 bp, Homo sapiens
ctcattttataaaaccattataacattaataccaatacaggagaactgtttaaaaactataggtcgatatcactcatgaacataatacaaaaataagaaaatacatgtgcaaaccaaatcctgcaatgtattaaaaagaattacaaccaagtttggtttattctagaaatgaataaatgatttagcacttgaaaatctatataagttatcacattaacagatcaaagtagagaaaccatttgcttatctctacagatggaaaaaagcattaaaaaatcacccattcataaaaaatatcttagaaaactaggaatagaatgggacttccttgatctgattttcttaactgccaagccctacaacaaacattgtagtaaaacatggaaataktccctttaaaagcaggaacaaaaataattctgccattgctactgctattcaattatagccagcaaaaaaagaaaaaagaaagaaaaaagaaagaaaaatgaatgacatgaggactagaaatgaaagaccaattatttatttgatggaacattgtctacatagaaaatttttaaattatagatcatctattagaattattgaaa

SEQ ID NO: 480039 - DNA, 620 bp, Homo sapiens
taagaggaaattaatagcaataatctttacatgccagagccttggacagttgctagtacatgatgactatttatgaacttaggctacaactaagctatcaccctgagagtcttggcaaatctaaagacrgtcttatactctcctactttacaaacccctgtgtgccttttaggtatgttctcatcctgacccaggacatccttatacactgtccttatgaaaaagccattagtgtacctctcattcataagaaaaaagtttctctgatttattgaactaagtatgcagtgcctactctatcaaaaaacaaaacaaaacatgttttgcactacactgagtcctatgttactatttttggcaaggaatgcatgtcttatgattttatgccattctcaatcctctactctccaatctaatttgcacgcacaacaacaacaaaaagctatgagaactctaagccacttagttttctctgctataaagttactgtagcttacttccaaggttatgtaaccaatattttctaataaatgcataataacatgatgtagcttggctacgtttaatagtcgaaagcgttcacatgttatctttctcactagctgcaccaaaaatcaaga

SEQ ID NO: 480040 - DNA, 615 bp, Homo sapiens
ttttcattattttgtgtaaatacgcttgaagcatatctatctgattagtggagagagtgctcttctctgtcacatgccatgggcactgctatgtgcaagcaatcaaagtgctcagaaaatgagtttacattgttcactgctgaaatacacaaatgtcagagagtgactgcgcatcaaagcttagtcaaatcatctgctgtaaacaaacagattccaatgcacatttcagtttaaaacattccacagcagtgcactgactgagttggacttattgtcrgccaaaatgaagtgatgtgcagagaatagtaagtttctttagagagaataaacgaattcaaaatcagttttgttcatacagatacataatcatctatataatttccaatacagccaacatctaaagttgtattattttatcctaggaatatgaattaccttttacatgcttttaagtgtgaattgataaggaaatatgccacttgttcttattttagccctatacacacatacaatccacacattacttgagatttctaatgcaatgattcctaattctatgctcacaggattttcctttctctgttcacagtattatgttctatctgctaacacatt

SEQ ID NO: 480041 - DNA, 495 bp, Homo sapiens
ataaatttcttatatttttttctttgattttcttcccacactattttctcggtgttcactttcttcaactcctaaattgaccttattttatctcttttcccatcctccttatttttgtttttgtttttgttctgctttctacaagattttctccrctttatcattcagcccttccatcgattatttatttattttttttttagttatatttttaattgcaagcactctttattgttcttggatgtcctttcttactgcatttgtcttttctgccatggatgcaattatcaatgtgaatatttcttataggtttttttttaagttttttcctgttctctacattgtctcagtttcttccaagtgaaacaggaaaagttcccttgttcccctcccagggtgtgtgatgggggtgtgacttgctgcttcagcgccccactgctcaaacctctaggggagcatacagacagggagactgtgggggtctgaccccatggc

SEQ ID NO: 480042 - DNA, 643 bp, Homo sapiens
ttttataagtggttcctatttaccagacactatacatacataatatagtttaaactcacaaaaactgtcaggtaggtattattgtcattttaccaattgtaatggttaattttattttatgtgtaaacttcactgggctaagggatgcccaaatagctggtaaaacattatttctctgtgcatctatgagggtgtttccagaaaagactagtatttgaatcagtagactgagtaaagaagatctgcccttaccaaatgtgtatgaacatcatttttcctaacagaacaaaaaggtgtaggaaaaataaattctctcttattgagctgagacatccatctcttcctgaccttggacattggagctactagttctcaggcctttggactttggaactgacacagtgtacaccctcccagcccacctggtgttgtcagtccttcagacttggagttagatcattggcttcctggttctcaggcattcaaactcagmctgaattacacaactggctttcccattctccagcctgcagatggtaagtcatgggacttctccgctcccatgatcatttgagccaattcccataataaatttcctattttatatatcctattgattctgtttctctggagaaccctgatt

SEQ ID NO: 480043 - DNA, 593 bp, Homo sapiens
ctttaaaaagctgaaacattattgtcaaatcatctcttaagtattcatcaattamaaggattttctgcattccaagttgcattacctcagtggtgagatacattcttattttccgtaatagaagggaaagaagacctagatttgaattattcccttaccacctatggcttggcattgggcacagcactcttcagtaaagcttctgtttcatcacttagaaaattagaacaacagtgtttttctcacacagcaaccataaatgttacactgaatattgtagcagaaatgaggcatagactcaaatacctacaatatagggcataatattaaatgatcattaaaagatgaaatatgggtggcaggaagcgccagacaaggaaagaccagaggtctagaaaacttggttataaggataatctagtgtgaactataaaaagctgtgcactattcacaatagcaaagacatggaatcaatctaggtgcccatcaacagtagactggataatgaaaatgtggtacatagacaccaaggaatactatgcagccataaaaaatgaaatcatgtcctcggcagcaacagaggcaattatgca

SEQ ID NO: 480044 - DNA, 572 bp, Homo sapiens
atcatctcttaagtattcatcaattacaaggattttctgcattccaagttgcattacctcagtggtgagatacattcttattttccgtaatagaagggaaagaagacctagatttgaattattcccttaccacctatggcttggcattgggcacagcactcttcagtaaagcttctgtttcatcacttagaaaattagaacaacagtgtttttctcacacagcaaccataaatgttacactgaatattgtagcagaaatgaggcatagactcaaatacctacaatatagggcataatattaaatgatcattaaaagatgaaatatgggtggcaggaagcgccagayaaggaaagaccagaggtctagaaaacttggttataaggataatctagtgtgaactataaaaagctgtgcactattcacaatagcaaagacatggaatcaatctaggtgcccatcaacagtagactggataatgaaaatgtggtacatagacaccaaggaatactatgcagccataaaaaatgaaatcatgtcctcggcagcaacagaggcaattatgcagatgcag

SEQ ID NO: 480045 - DNA, 620 bp, Homo sapiens
ggcaacggaatattctgcaaattttaaagagaacaaagctgttctatgggtactgaatatagctgcttggtaccacataataggcacttttctgaagtgttcaacatgtattaattcattgtggcttcacaaaagcccacgaggtagggaccccaattttacagatgaggaaactaagataaaggttaagtcacttgtccaaatatccacagctagtaggtggcagaggcaggattcaaacccaggcagattggcttaaagactctaatcttggccaccctgctrtgctgtacacctgtcagacctaagtagtgatctttgtatttgcagctttagatacatgagaggaaacaaggttgagtttcttattcatcgttacattctgggaggctgacggtataatcaacatatagcttctgttgacagtaactaaataaaggtttagataaagaaagctaatagggaataacatttatgatcaatacttgaaagggtgaccgtttgtttcttccattactccttattttagatattttgaacttaaatctcttttttggggaaaatcagaagcgtacacactgaatagcttacaattgttagtgtaagaaatcagtgttcaa

SEQ ID NO: 480046 - DNA, 620 bp, Homo sapiens
ggcaacggaatattctgcaaattttaaagagaacaaagctgttctatgggtactgaatatagctgcttggtaccacataataggcacttttctgaagtgttcaacatgtattaattcattgtggcttcacaaaagcccacgaggtagggaccccaattttacagatgaggaaactaagataaaggttaagtcacttgtccaaatatccacagctagtaggtggcagaggcaggattcaaacccaggcagattggcttaaagactctaatcttggccaccctgctgtgctgtacacctgtcagacctaagtagtgatctttgtatttgcagctttagatacaygagaggaaacaaggttgagtttcttattcatcgttacattctgggaggctgacggtataatcaacatatagcttctgttgacagtaactaaataaaggtttagataaagaaagctaatagggaataacatttatgatcaatacttgaaagggtgaccgtttgtttcttccattactccttattttagatattttgaacttaaatctcttttttggggaaaatcagaagcgtacacactgaatagcttacaattgttagtgtaagaaatcagtgttcaa

SEQ ID NO: 480047 - DNA, 620 bp, Homo sapiens
ggcaacggaatattctgcaaattttaaagagaacaaagctgttctatgggtactgaatatagctgcttggtaccacataataggcacttttctgaagtgttcaacatgtattaattcattgtggcttcacaaaagcccacgaggtagggaccccaattttacagatgaggaaactaagataaaggttaagtcacttgtccaaatatccacagctagtaggtggcagaggcaggattcaaacccaggcagattggcttaaagactctaatcttggccaccctgctgtgctgtacacctgtcagacctaagtagtgatctttgtatttgcagctttagatacatgagaggaaacaaggttgagtttcttattcatcgttacattctgggaggctgacggtataatcaacatatagcttctgttgacagtaactaaataaaggtttagataaagaaagctaatagggaataacatttatgatcaatacttgaaagggtgaccgtttgtttcttccattactccttattttagatattttgaacttaaayctcttttttggggaaaatcagaagcgtacacactgaatagcttacaattgttagtgtaagaaatcagtgttcaa

SEQ ID NO: 480048 - DNA, 584 bp, Homo sapiens
tttatgttacacaggcttgaattaaaatcttttaagacattttcgtttggggggttgcataactaatctttattatgtttctccaccgtcttttaatttcagcttaaggtatcactgcctttgtatactttgcacaaattaggttggagaactcaattgataatttcctcaaatgataatttattttgaatattcaagtaatcacatcagttaagagactgcrctcagataagaaccatcagcagttgcctgtagcagaaaatgttgcttaaaagccttttgaatatttgtctccctgttatttgcaattgcagtcttttggtttagatgtttagaatatgattgaagtagagcccagactgcttaagctcaggctttaagggaaccattagaggcgtgtgtagtatcttggtgtctgttacctaccttggccattgattgtcttctctacaagatgcttcatccaagaaggaagttgccctttgaaacaggtgccctttgagcttctccagagagacccataaagacattatcccaggacctcatgtttctaggagaatgtgataaatattgtgatggtttca

SEQ ID NO: 480049 - DNA, 480 bp, Homo sapiens
ctcttctctatgaattgccatttataagtgattatcacatttcatttttaaaataccatgaagcccagatactcatgaattactctctacttgtttgccctctgaatactttctctaggactcaccaggtayaaacattggtacaaaggaggccaaaaacacagcaataacagaaacagcaaagacaagctctctttgttctccttctgagattttttgctaaaactgcaaattgtgccaggttggaaggaagaatcaatgacccatcatgagcaatgtacacacactcttggttttgccattttcttgtctttttgttgggccagaaggataccattgaaaattactgcttcagtgctttaaagagttaatgtagcttccagaaaggcttattacactccccaggagtagcttatgcattatgagaatgtgactcagtttgttggcaaaatgcacatctgctacaggacagggacaact

SEQ ID NO: 480050 - DNA, 480 bp, Homo sapiens
ctcttctctatgaattgccatttataagtgattatcacatttcatttttaaaataccatgaagcccagatactcatgaattactctctacttgtttgccctctgaatactttctctaggactcaccaggtacaaacattggtacaaaggaggccaaaaacacagcaataacagaaacagcaaagacaagctmtctttgttctccttctgagattttttgctaaaactgcaaattgtgccaggttggaaggaagaatcaatgacccatcatgagcaatgtacacacactcttggttttgccattttcttgtctttttgttgggccagaaggataccattgaaaattactgcttcagtgctttaaagagttaatgtagcttccagaaaggcttattacactccccaggagtagcttatgcattatgagaatgtgactcagtttgttggcaaaatgcacatctgctacaggacagggacaact

SEQ ID NO: 480051 - DNA, 480 bp, Homo sapiens
ctcttctctatgaattgccatttataagtgattatcacatttcatttttaaaataccatgaagcccagatactcatgaattactctctacttgtttgccctctgaatactttctctaggactcaccaggtacaaacattggtacaaaggaggccaaaaacacagcaataacagaaacagcaaagacaagctctctttgttctccttctgagattttttgctaaaactgcaaattgtgccaggttggaaggaagaatcaatgacccatcatgagcaatgtacacacactcttggttttgccattttcttgtctttttgttgggccagaaggataccattgaaaattactgcttcagtgctttaaagagttaatgtagcttccagaaaggcttattacactccccrggagtagcttatgcattatgagaatgtgactcagtttgttggcaaaatgcacatctgctacaggacagggacaact

SEQ ID NO: 480052 - DNA, 255 bp, Homo sapiens
tatatgatgtttccttaaatgggcaaagagaagttatcccatatgtaaaattattctcaacatctgtgctgctttaggaaccatattctctttgtaattggcttctgtaagaggayttttttcccttaaaaatgtagagaactgaatttgtacaaaatgtttataaataattcgaaagaggactttaaaagtactttttgcaagtttgttcttcttgcaagtataaatgtatacaagtataaatatatttgaaca

SEQ ID NO: 480053 - DNA, 255 bp, Homo sapiens
tatatgatgtttccttaaatgggcaaagagaagttatcccatatgtaaaattattctcaacatctgtgctgctttaggaaccatattctctttgtaattggcttctgtaagaggatttttttcccttaaaaatgtagagaactgaatttgtacaaaatgtttataaataattcgaaagaggactttaaaagtacttttygcaagtttgttcttcttgcaagtataaatgtatacaagtataaatatatttgaaca

SEQ ID NO: 480054 - DNA, 604 bp, Homo sapiens
tggagagggtctagtgaaaggggctattttgtattatgattgagttataaaatttctgtcactttctgtgaaaactatttgtcaggatgtatcaaagcatataaaaatgggcaaaatctttaacccaagaattccagttctaagaatctagacagacagacagatagatagatagatagatagatagatagatagatagatagacagacagatatctctttttaaaataccagaarcaaaatgcaataaaatagtacgatagtatttatcttggctaggattacatgtgagtgactttttttctcctgtacttttcaaattttccacaatgctcacatacttcttttataatcagaacagaaactttaaaatccctaagaatgattatttttaaagcttcctttgtaaacctaatctagcatctaattagctcaaaaatggaaaagtctaggtctgagtatgactataacttaaatttattttaaaaggtatttgctatgtttcagatggcaactcacaggccataactcatctgatttcaaagaattttgttaaattgaaaatcctattgatacatttgcaggttcctgtgcatgtcccagta

SEQ ID NO: 480055 - DNA, 604 bp, Homo sapiens
tggagagggtctagtgaaaggggctattttgtattatgattgagttataaaatttctgtcactttctgtgaaaactatttgtcaggatgtatcaaagcatataaaaatgggcaaaatctttaacccaagaattccagttctaagaatctagacagacagacagatagatagatagatagatagatagatagatagatagatagacagacagatatctctttttaaaataccagaagcaaaatgcaataaaatagtacratagtatttatcttggctaggattacatgtgagtgactttttttctcctgtacttttcaaattttccacaatgctcacatacttcttttataatcagaacagaaactttaaaatccctaagaatgattatttttaaagcttcctttgtaaacctaatctagcatctaattagctcaaaaatggaaaagtctaggtctgagtatgactataacttaaatttattttaaaaggtatttgctatgtttcagatggcaactcacaggccataactcatctgatttcaaagaattttgttaaattgaaaatcctattgatacatttgcaggttcctgtgcatgtcccagta

SEQ ID NO: 480056 - DNA, 549 bp, Homo sapiens
tgtctccgaagatttgtgcttttcggcaaaaatcttactcaaggaacaaacccaaaacatcccataaggaaccaaggggctgagatggcgcctccgcgtgcccttccagcaagcccacctccccaactcacacaagcacacaggtgtccacactctcggcgcccggctacggcccaggtaagcccagatcccggcccggcggcgcacccacctgacgaggggctccttctcaggcagggcgcgctcctccaagcactcgcaccsgcagcagcagcacacggttctcagccagtccctcagccccatggagagcgagggcccccaccggcgccggaagcctggggccgagtcgccgcggcgagcgatcgaggctggggcgcggccaccgcgccagcgtccaggtgcggggacagcggcagcccgggcgtcgcgggctggtccgcgcgcatcacgccgcggccggggacgcgggcgagggctgcaggccgcgcgccctcctctccttgcgttttgtttggggcgtgagttttcttcgggctttttttcccc

SEQ ID NO: 480057 - DNA, 602 bp, Homo sapiens
gaaagagcagagctgaagcactgagttcacttatggcttcttgacgtcatgtagcttgcttgacatcgtctaaggctccctcataccttgccacctttaccctagtcacctacctgatttcggtgatgctcaggtagaaagggaarttgtaggaaaaggaagttgtctatgtactgtgaggttgtggtgcacatgcacacactgttggattcatgttacaatcatgggctttgagatgcctttactggggaatgtgaggcggttagaaatggggagtatttgcttttacctatgcacatgtgtgtttctgtttccaggtctcctctgtggtctgcttcctactgtctcctgcagcttccttcatcactggacagtcgggtggatgtggatgggggccggagtctctatactcactcgtatgaggtaccaggtgagcagctgaggaatgagcagtcaccagctttatgctgtgtcatgttcaggggtttaaaatttattataagtagttacttaagagatgagggtgctctcttatagaacatcaaaatgtacaaaatgtttatattcatgatgtgatttttttaatgaaatattcctagtca

SEQ ID NO: 480058 - DNA, 402 bp, Homo sapiens
aaaaaaaaaaaaatccacaactggctgggcacggtggctcatgcctgtaattcttgtttcggaggatgcctgtttgggaggatcgcttsggcccacaagtttgagaccagcctgggcaacatagtgagaccccgcctttacaaaaaatttaaaaattagccaggtacagtggcatgcacctgtggtcccagctattgaggacactgaagtgggagggtcacctgagcccaggaggttgaggctgcagtgagccatgattgtaccactacactccagcttgggtgacagtgagaccctgtgtcaaaaaaaaaaaaaaatccaaaatctcacccagaccaatactgtatcagaattatcattttaacaatatctccagatgatttatatgcacattaaagtttg

SEQ ID NO: 480059 - DNA, 642 bp, Homo sapiens
aacacctctgttttgcaaagccctgtgtgacctggcccctgctgtcctctccaatacttctctcctgactcttcctcaagttctgttcttcaataaattgagctacttgcactccctcaaggggaccaagcactttcttgcctctgagtctttgcctgtcattctctctgccttcaggttcttcactcatctttgttgacctccttcaggaatcacttcctccatgaagtcttccatccctctcttgccaaggctaacttagatgccccacagaattctgtgtttataagcctttcagagcaccgattatggtggtgcaattgtttcctcccaggagattataaactccatgagggcagggaattcccagggcctatgtggcactgggcccagcayacagtgggtggtcaataagtgtttgggaatcaataagtcaatgaatgaatggaggtcttcctcaaagtgctttggaaagaggacaagaaggcagactgctccttggagcatctggcttcttgggtgctggctccacgcttttaccacctatggagaaagggttcaaggtgggtactggccatggctagcccaggtgccctcaggcttcaccttgctcacctctagctcccgcagtgcccttcccag

SEQ ID NO: 480060 - DNA, 533 bp, Homo sapiens
taatgacaagggtttgtaagatggattggaagtaatttctaatactgcaatgagtcagctaaaaacgttattaaggggatctgtggtttgtacctcctgtaaccaggcagcctgttgggtgatcttacctacatgggttgttaaatctcctataatgttgatataagtgcaacaagtggtgtgggctatcatgcaaattcccccttgtttagcaatgagaaaacctggtgcaatttgattgtctaaaaccacttgagygagagaatttaaggacttctactgtgtcataatacttattgcagcattttcagcaatttgtcctatggtggccggcatttttttttatcgtatctctgttagtgtatactccgtagctgagaaaaattacaccccaaaaactatgctaccacatatcctgatatccacttggtagctctcttttagcttaccggaaagcaagattttctttatgattgagatggatggaaaagagggcaacgtaatgacctagaaggcaaagtccttcaacttgc

SEQ ID NO: 480061 - DNA, 533 bp, Homo sapiens
taatgacaagggtttgtaagatggattggaagtaatttctaatactgcaatgagtcagctaaaaacgttattaaggggatctgtggtttgtacctcctgtaaccaggcagcctgttgggtgatcttacctacatgggttgttaaatctcctataatgttgatataagtgcaacaagtggtgtgggctatcatgcaaattcccccttgtttagcaatgagaaaacctggtgcaatttgattgtctaaaaccacttgagcgagagaatttaaggacttctactgtgtcataatacttattgcagcattttcagcaatttgtcctatggtggccggcatttttttttatcgtatctctgttagtgtatactccgtagctgagaaaaattayaccccaaaaactatgctaccacatatcctgatatccacttggtagctctcttttagcttaccggaaagcaagattttctttatgattgagatggatggaaaagagggcaacgtaatgacctagaaggcaaagtccttcaacttgc

SEQ ID NO: 480062 - DNA, 533 bp, Homo sapiens
taatgacaagggtttgtaagatggattggaagtaatttctaatactgcaatgagtcagctaaaaacgttattaaggggatctgtggtttgtacctcctgtaaccaggcagcctgttgggtgatcttacctacatgggttgttaaatctcctataatgttgatataagtgcaacaagtggtgtgggctatcatgcaaattcccccttgtttagcaatgagaaaacctggtgcaatttgattgtctaaaaccacttgagcgagagaatttaaggacttctactgtgtcataatacttattgcagcattttcagcaatttgtcctatggtggccggcatttttttttatcgtatctctgttagtgtatactccgtagctgagaaaaattacaccccaaaaactatgctaccacatatcctgatatccacttggtagctctcttttascttaccggaaagcaagattttctttatgattgagatggatggaaaagagggcaacgtaatgacctagaaggcaaagtccttcaacttgc

SEQ ID NO: 480063 - DNA, 550 bp, Homo sapiens
ctgtatgaccaaaaaaaaaaaaaatttttttwtaaattacaaaaaaaaaaataaggcccagagagtctaggagaaaaaagtagtttcagagccatttccttcagatcatgagaatcctaaacaaaggcaacaaatgtttccgctaatatacagaactcaggagatacaactctgggggtgggagtaggagtgggatgaggacagggtctcccatgattcataacataaaactcaaatctgggggagaggggaaggataggagacccttacctcttctctgagctccttcatcctttcctcaaaatcataatccttctgcttctcttccatcttcttcttgttgacctcaaaacgtttcttcacctgatccagggtggaacgttccacacgcatagacatgcccaggtttctctgatctgcatagggtcaacagtgaagaaggcaagttcattacaacatcctcagcccctcaaaaattattttcctgacttctctgacatctcataaaacacacagcaaaaataattatggctaaaagaaactcccttgg

SEQ ID NO: 480064 - DNA, 550 bp, Homo sapiens
ctgtatgaccaaaaaaaaaaaaaattttttttwaaattacaaaaaaaaaaataaggcccagagagtctaggagaaaaaagtagtttcagagccatttccttcagatcatgagaatcctaaacaaaggcaacaaatgtttccgctaatatacagaactcaggagatacaactctgggggtgggagtaggagtgggatgaggacagggtctcccatgattcataacataaaactcaaatctgggggagaggggaaggataggagacccttacctcttctctgagctccttcatcctttcctcaaaatcataatccttctgcttctcttccatcttcttcttgttgacctcaaaacgtttcttcacctgatccagggtggaacgttccacacgcatagacatgcccaggtttctctgatctgcatagggtcaacagtgaagaaggcaagttcattacaacatcctcagcccctcaaaaattattttcctgacttctctgacatctcataaaacacacagcaaaaataattatggctaaaagaaactcccttgg

SEQ ID NO: 480065 - DNA, 587 bp, Homo sapiens
agccttatacatttgcctttctctggtcacagttattatgccaagctacgccaacaagaaattgagagagagagagagctagcagagaagtaccgggatcgtgccaaggaacggagagatggagtgaacaaagattatgaagaaaccgagcttatcagcaccacagctaactatagggctgttggccccactgctgaggcgtgagtactgagggaacagggcatggttccctcagcatccgagagtcatgcaaatacaatgtgaactcttcctcttactttcctgccctggagcctacaataagcgatttcagaggcatttgccacccacaaagggctgttcttttttttttttttttttgagatggagtctcgctctgtcacccaggctggactgcagtggcacgatcttggctcayggcaagctccgcctcccaggttcatgccattctcctgcctcagcctcccgagtagctgggactacaggcgcccgcaccacgcccggctaattttttgtatttttagtagagacagggtttcaccgtgttagccaggctggtctcgatctgacctcatgatccacccgcc

SEQ ID NO: 480066 - DNA, 443 bp, Homo sapiens
cctcagggcctgagaaaggtagactgcatatcagctctcatgaggaaaactggctctgggattcctgagttctgccctcaaactttgcctcagttttccaacctaaggtggcctaaccctccccctcttccaagaggctgtcctggactgcattccttckgagtataaatggggagggcatcttacctgaacccctccccgactccacttctaccaccacggtcagcatggcatgtgggttgggagagaccatgagggcccctcaaggaggctgagttgcctgggccaaaccagcccctgcgctcaccacctctccacagtccatgccctctatgcctctcagcttcccctcaataattcatgaatctcatctgagggctagggaggggtggatctggacctcgtaacctactaagggaagtgacattcccttctcttgtgag

SEQ ID NO: 480067 - DNA, 522 bp, Homo sapiens
tttccagcaattatgacttgcagcttttacttggcttctagtcattgataactgccaggatttcttgactactcttttacagtctatccaggatgcctcggtacctactacttctggaattgaaactgcaagtgttgcacttcttcaaacactgtgtaaataacccctttccccctcccamcgacccctgaggttatttcacatatacatacttggattacgggcagttacgagtccagggggccaatctataaaggatgctaaaatatcactggagtcaattaataacatgacactagttagctcagttttccatgtttacataatatggcaaagtgtaaatatattcttttcccgttgaagtaagcagtaacatagagtggaaaacatatttcagttgggtactgtcattccaccaggatgtaacttttgaaacttatataaaaatagtacatttgaagggaaagtatattatttgcatgtgtaggacaccaatacctatctggctctttcagtcagttt

SEQ ID NO: 480068 - DNA, 664 bp, Homo sapiens
catgcttgtacatgttttttagtgaacataggtaagaatttctgaattgctggtcacagagtatgcaaatttgaaggtttaataagtactactaagtaactttccagtgtttgcaccaatttatattttactagcagggtatgagaattcatatccccagcaacatttggtttcatctgtctttgatttcagtcattctggtggatatgtagtggtgtctcactgtgatagtaatttgcatttttcctgacaactaaggaagttgaacaactatgtgtatatgtgtatatacatatatgtatayacacacacatatatatatttggtatttgaatattctttttgaaatatctgtccaaatatttgcttatttgtttttttcaactgttattttagattcagggaatacatatgcagatatattgcatgattctgaggtttgggatatgaatgaatccatcatccaggtagtgagcatagcacctaataggtagtttgtcaacccttgtctcacttcatcctttccccctctttatttcccagtatctattattcccatctttatgtgcatgtatacccagtgtttagctccacttacaagtgagaacatgtgttatttggttttctgtttctgtgttagtttgcttatgatagtggcttccag

SEQ ID NO: 480069 - DNA, 616 bp, Homo sapiens
attctactgttatgttagtatgttcataatttgagaaattctaagtcttaagaaatcttggaattgtatgaattctcttttacctactcattagcagactcataattttagaaatcttaattgagatccatgtgccagttatactaattagtgtataatttcataatctgagtacttacagaaagcacacwcttgaaaaactctgtatctacaaatgcttttgactatatggatttccagagtcaaaatattattcaaaaaagtaataataacatttaccacaaagcttccaatgatggttcatctgtgggtgaatttcccatttacaactttgctcccagagcactcagaaatattttaccccttttcatttttttaaactagactttattttttacagaagtcttaggttcacagcaaaaatgagaggaagttatagagatttcccgtatcttctctaccctacacatgtgtaacctcccccattgtcaatatcccccaccagagtgacacatttgttatagttgatgaatttacacatcaatatcacccaaagtccatagtttacattggggttcgctcttgtatattctatgggtttggaaaacatttaaaa

SEQ ID NO: 480070 - DNA, 616 bp, Homo sapiens
attctactgttatgttagtatgttcataatttgagaaattctaagtcttaagaaatcttggaattgtatgaattctcttttacctactcattagcagactcataattttagaaatcttaattgagatccatgtgccagttatactaattagtgtataatttcataatctgagtacttacagaaagcacactcttgaaaaactctgtatctacaaatgcttttgactatatggatttccagagtcaaaatattattcaaaaaagtaataataacatttaccacaaagcttccartgatggttcatctgtgggtgaatttcccatttacaactttgctcccagagcactcagaaatattttaccccttttcatttttttaaactagactttattttttacagaagtcttaggttcacagcaaaaatgagaggaagttatagagatttcccgtatcttctctaccctacacatgtgtaacctcccccattgtcaatatcccccaccagagtgacacatttgttatagttgatgaatttacacatcaatatcacccaaagtccatagtttacattggggttcgctcttgtatattctatgggtttggaaaacatttaaaa

SEQ ID NO: 480071 - DNA, 616 bp, Homo sapiens
attctactgttatgttagtatgttcataatttgagaaattctaagtcttaagaaatcttggaattgtatgaattctcttttacctactcattagcagactcataattttagaaatcttaattgagatccatgtgccagttatactaattagtgtataatttcataatctgagtacttacagaaagcacactcttgaaaaactctgtatctacaaatgcttttgactatatggatttccagagtcaaaatattattcaaaaaagtaataataacatttaccacaaagcttccaatgatggttcatctgtgggtgaatttcccatttacaactttgctcccagagcactcagaaatattttaccccttttcatttttttaaactagactttattttttacagaagtyttaggttcacagcaaaaatgagaggaagttatagagatttcccgtatcttctctaccctacacatgtgtaacctcccccattgtcaatatcccccaccagagtgacacatttgttatagttgatgaatttacacatcaatatcacccaaagtccatagtttacattggggttcgctcttgtatattctatgggtttggaaaacatttaaaa

SEQ ID NO: 480072 - DNA, 616 bp, Homo sapiens
attctactgttatgttagtatgttcataatttgagaaattctaagtcttaagaaatcttggaattgtatgaattctcttttacctactcattagcagactcataattttagaaatcttaattgagatccatgtgccagttatactaattagtgtataatttcataatctgagtacttacagaaagcacactcttgaaaaactctgtatctacaaatgcttttgactatatggatttccagagtcaaaatattattcaaaaaagtaataataacatttaccacaaagcttccaatgatggttcatctgtgggtgaatttcccatttacaactttgctcccagagcactcagaaatattttaccccttttcatttttttaaactagactttattttttacagaagtcttaggttcacagcaaaaatgagaggaagttatagagatttcccgtatcttctctaccctacacatgtgtaacctcccccattgtcaatatcccccaccagagtgacacatttgttatagttgatgaatttacacatcaatatcacccaaagtccatagtttacattggggttcrctcttgtatattctatgggtttggaaaacatttaaaa

SEQ ID NO: 480073 - DNA, 259 bp, Homo sapiens
ctgcctctctgagtaagaagatgggagcccccctgagggaaaagttgctttggtgagagtaagaaggccatcagacctcctccaaacaaaccaactccaccaacctctggctcttaaataacaaacatcatcatccagaaatgtaaggactcagccttggtcaaggtggtaaagggtctgtttgtctccctccattagacaagggtcttgtcttgctaccctaatggtaaagggstgactggggaggggttgtagggac

SEQ ID NO: 480074 - DNA, 612 bp, Homo sapiens
tattaaaattgtagtgaaaactctgcctccattgtgaaattggaaaaaaattagaaattttagaaaaaagtacgccctttggagctaggtagagttcasatccccacatttccattgagtagttgcatagcctctcagagcttcagcttcctactccttaagggttagtaacatgctttgcagtgttgttaggaatcagtgaaactgtgtgagatacttaactgcagtatctaacatggagtaggtagctatttcctggtagctgtaatgataataattttgatacgtttttacatgacttaagcattctgaaaagtctgatgcttctgagtatggaggcttagctatttctttcataaagaaggggccctgagacttgtgagtcttatccaaatgcatttcttcaaaggtgtcagatgaactgaaggataatggaaacaatagcaaatttatcttctcagtcacctgtgagtcttcctttgagagtgggacttgcagagtacttggtagggtagagctctttgtgactatgctatttaggaaatggtgagagatggattgttttcagtacatcagtcataagaggatatgagtgagttccaactttcctta

SEQ ID NO: 480075 - DNA, 617 bp, Homo sapiens
gaaattattaaaattgtagtgaaaactctgcctccattgtgaaattggaaaaaaattagaaattttagaaaaaagtacgccctttggagctaggtagagttcacatccccacatttccattgagtagttgcatagcctctcagagcttcagcttcctactccttaagggttagtaacatgctttgcagtgttgttagraatcagtgaaactgtgtgagatacttaactgcagtatctaacatggagtaggtagctatttcctggtagctgtaatgataataattttgatacgtttttacatgacttaagcattctgaaaagtctgatgcttctgagtatggaggcttagctatttctttcataaagaaggggccctgagacttgtgagtcttatccaaatgcatttcttcaaaggtgtcagatgaactgaaggataatggaaacaatagcaaatttatcttctcagtcacctgtgagtcttcctttgagagtgggacttgcagagtacttggtagggtagagctctttgtgactatgctatttaggaaatggtgagagatggattgttttcagtacatcagtcataagaggatatgagtgagttccaactttcctta

SEQ ID NO: 480076 - DNA, 617 bp, Homo sapiens
gaaattattaaaattgtagtgaaaactctgcctccattgtgaaattggaaaaaaattagaaattttagaaaaaagtacgccctttggagctaggtagagttcacatccccacatttccattgagtagttgcatagcctctcagagcttcagcttcctactccttaagggttagtaacatgctttgcagtgttgttaggaatcagtgaaactgtgtgagatacttaactgcagtatctaacatggagtaggtagctatttcctggtagctgtaatgataataattttgatacgtttttacatgacttaagcattctgaaaagtctgatgyttctgagtatggaggcttagctatttctttcataaagaaggggccctgagacttgtgagtcttatccaaatgcatttcttcaaaggtgtcagatgaactgaaggataatggaaacaatagcaaatttatcttctcagtcacctgtgagtcttcctttgagagtgggacttgcagagtacttggtagggtagagctctttgtgactatgctatttaggaaatggtgagagatggattgttttcagtacatcagtcataagaggatatgagtgagttccaactttcctta

SEQ ID NO: 480077 - DNA, 612 bp, Homo sapiens
tattaaaattgtagtgaaaactctgcctccattgtgaaattggaaaaaaattagaaattttagaaaaaagtacgccctttggagctaggtagagttcacatccccacatttccattgagtagttgcatagcctctcagagcttcagcttcctactccttaagggttagtaacatgctttgcagtgttgttaggaatcagtgaaactgtgtgagatacttaactgcagtatctaacatggagtaggtagctatttcctggtagctgtaatgataataattttgatacgtttttacatgacttaagcattctgaaaagtctgatgcttctgagtatggaggcttagctatttctttcataaagaaggggccctgagacttgtgagtcttatccaaatgcrtttcttcaaaggtgtcagatgaactgaaggataatggaaacaatagcaaatttatcttctcagtcacctgtgagtcttcctttgagagtgggacttgcagagtacttggtagggtagagctctttgtgactatgctatttaggaaatggtgagagatggattgttttcagtacatcagtcataagaggatatgagtgagttccaactttcctta

SEQ ID NO: 480078 - DNA, 178 bp, Homo sapiens
cagcccacacacccccaccagccctaatgattattctctctacccctccccacaatcttyctccaactcctcctctctgcatgcacctcagagccagtaccaagaactagcagtggccctggattcaagctccacaataatcagtcaactcactgaaaacatcaattcactggtaaga

SEQ ID NO: 480079 - DNA, 178 bp, Homo sapiens
cagcccacacacccccaccagccctaatgattattctctctacccctccccacaatcttcctccaactcctyctctctgcatgcacctcagagccagtaccaagaactagcagtggccctggattcaagctccacaataatcagtcaactcactgaaaacatcaattcactggtaaga

SEQ ID NO: 480080 - DNA, 178 bp, Homo sapiens
cagcccacacacccccaccagccctaatgattattctctctacccctccccacaatcttcctccaactcctcctctctgcatgcacctcagagccagtaccaagaactagcagtrgccctggattcaagctccacaataatcagtcaactcactgaaaacatcaattcactggtaaga

SEQ ID NO: 480081 - DNA, 178 bp, Homo sapiens
cagcccacacacccccaccagccctaatgattattctctctacccctccccacaatcttcctccaactcctcctctctgcatgcacctcagagccagtaccaagaactagcagtggccctggattcaagctccrcaataatcagtcaactcactgaaaacatcaattcactggtaaga

SEQ ID NO: 480082 - DNA, 608 bp, Homo sapiens
ctgcttcctgtaatgcaggactccccaggagcacccaggcatgggcagcaacccctgcatgccattctttttgggctgccgagaacagggagataaacaccaccatcatctaagagccggggaggggagggcgtaggtgtgggcatggcaaggttcctggtaaaggggctggaagggaaaggggaggaagatggagggagaagctggagtgcctggggctgtggcagccctccccaccccacacacactggcctctcccacggcacccaggcagtccacccacagttcagaccaatgctcaaccccctcaggcttccgcttctctggtcaccgtcttccaacgcactggcccagggccacctcttgcttggggagccccacccaacagccaccaagcctgacagaaggaacactgcttgaaccaaaatggtgaagctataagggatggctggctggagtgaatgccagaggcccctctgggctgtctgaaagcccagggtcctctgagggaccctggggaaggcaggaagggcaggtagcyggatgccattggccatagacttctaagtctaacaggggagcctcaactggttggtggagggctgcag

SEQ ID NO: 480083 - DNA, 170 bp, Homo sapiens
gctgtaatcaggggaccccactggactcttaccagtgaattgatgttttcagtgagttgactgattattgcggagcttgaatccagggcyactgctagttcttggtactggctctgaggtgcatgcagagagaaggagttggaggaagattgtggggaggggtagagaga

SEQ ID NO: 480084 - DNA, 170 bp, Homo sapiens
gctgtaatcaggggaccccactggactcttaccagtgaattgatgttttcagtgagttgactgattattgcggagcttgaatccagggccactgctagttcttggtactggctctgaggtgcatgcagagagaaggagttggagraagattgtggggaggggtagagaga

SEQ ID NO: 480085 - DNA, 569 bp, Homo sapiens
atcgcttgaacctgggaggcggaggttgcagtgagctgatatcgtgccattgcactccagcctgggcaacaagagtgaaactctgcctcaaaaaaaaaaaaaaaaaaaagaaagaaagaaaagaaaatatatctatgcaccagagctcaacactaggttaggagcatttctgagatttggagctattcaaccatggaagttcctggcacatacatcaggtattcacaataccctttctcaggtgtttggtcactgctagtgagcctgcctggatcagtgtttcccaaatggcagtcatttgcatctttgcatttttttgggggggggggttgtgggggtatataccataccagattttttaaaaattsacattaaaaatacatgtataaaatgtgtaaagtgcactaatctaaagtgcactggatgtattttttattgatgtacatacttttgttatccatcacccaggtcaaaatacagaatcagcaccacagagggttccctcctcctccttcccagccaataatcttctcctcctacctaaccaactgttcttacttcaatcactg

SEQ ID NO: 480086 - DNA, 595 bp, Homo sapiens
tgaaattattaaaattgtagtgaaaactctgcctccattgtgaaattggaaaaaaattagaaattttagaaaaaagtacgccctttggagctaggtagagttcasatccccacatttccattgagtagttgcatagcctctcagagcttcagcttcctactccttaagggttagtaacatgctttgcagtgttgttaggaatcagtgaaactgtgtgagatacttaactgcagtatctaacatggagtaggtagctatttcctggtagctgtaatgataataattttgatacgtttttacatgacttaagcattctgaaaagtctgatgcttctgagtatggaggcttagctatttctttcataaagaaggggccctgagacttgtgagtcttatccaaatgcgtttcttcaaaggtgtcagatgaactgaaggataatggaaacaatagcaaatttatcttctcagtcacctgtgagtcttcctttgagagtgggacttgcagagtacttggtagggtagagctctttgtgactatgctatttaggaaatggtgagagatggattgttttcagtacatcagtcataagaggata

SEQ ID NO: 480087 - DNA, 595 bp, Homo sapiens
tgaaattattaaaattgtagtgaaaactctgcctccattgtgaaattggaaaaaaattagaaattttagaaaaaagtacgccctttggagctaggtagagttcagatccccacatttccattgagtagttgcatagcctctcagagcttcagcttcctactccttaagggttagtaacatgctttgcagtgttgttagraatcagtgaaactgtgtgagatacttaactgcagtatctaacatggagtaggtagctatttcctggtagctgtaatgataataattttgatacgtttttacatgacttaagcattctgaaaagtctgatgcttctgagtatggaggcttagctatttctttcataaagaaggggccctgagacttgtgagtcttatccaaatgcgtttcttcaaaggtgtcagatgaactgaaggataatggaaacaatagcaaatttatcttctcagtcacctgtgagtcttcctttgagagtgggacttgcagagtacttggtagggtagagctctttgtgactatgctatttaggaaatggtgagagatggattgttttcagtacatcagtcataagaggata

SEQ ID NO: 480088 - DNA, 595 bp, Homo sapiens
tgaaattattaaaattgtagtgaaaactctgcctccattgtgaaattggaaaaaaattagaaattttagaaaaaagtacgccctttggagctaggtagagttcagatccccacatttccattgagtagttgcatagcctctcagagcttcagcttcctactccttaagggttagtaacatgctttgcagtgttgttaggaatcagtgaaactgtgtgagatacttaactgcagtatctaacatggagtaggtagctatttcctggtagctgtaatgataataattttgatacgtttttacatgacttaagcattctgaaaagtctgatgyttctgagtatggaggcttagctatttctttcataaagaaggggccctgagacttgtgagtcttatccaaatgcgtttcttcaaaggtgtcagatgaactgaaggataatggaaacaatagcaaatttatcttctcagtcacctgtgagtcttcctttgagagtgggacttgcagagtacttggtagggtagagctctttgtgactatgctatttaggaaatggtgagagatggattgttttcagtacatcagtcataagaggata

SEQ ID NO: 480089 - DNA, 595 bp, Homo sapiens
tgaaattattaaaattgtagtgaaaactctgcctccattgtgaaattggaaaaaaattagaaattttagaaaaaagtacgccctttggagctaggtagagttcagatccccacatttccattgagtagttgcatagcctctcagagcttcagcttcctactccttaagggttagtaacatgctttgcagtgttgttaggaatcagtgaaactgtgtgagatacttaactgcagtatctaacatggagtaggtagctatttcctggtagctgtaatgataataattttgatacgtttttacatgacttaagcattctgaaaagtctgatgcttctgagtatggaggcttagctatttctttcataaagaaggggccctgagacttgtgagtcttatccaaatgcrtttcttcaaaggtgtcagatgaactgaaggataatggaaacaatagcaaatttatcttctcagtcacctgtgagtcttcctttgagagtgggacttgcagagtacttggtagggtagagctctttgtgactatgctatttaggaaatggtgagagatggattgttttcagtacatcagtcataagaggata

SEQ ID NO: 480090 - DNA, 634 bp, Homo sapiens
caaaagagtgctgtttgcattagtcacgaatgcaagagcacaccgagcrggatagagcaggagtttatatccctaacgcagtccctacctctctgtcattcccacatgggctggagtcggactacacaatctaagcagacttgatttgctatcgcgaatattctccctaataaggaagggagagggaatgtgagttacaggttgggactgatgggaagagttgtttacaaggcaggtaactgagcagataactaagcaggtaaataggggtgagaaggtacagggaaattgttcttaggaacaaagaacaaggaagttgaacaggttaaacctttgaagaggaacttactgtacctaataagtttttttgattggctaattaaatgtctattcattattgccaaaaagtgcctaccccaacaacaagataccaaattttagaaaatgttggagctctctctgaatctaggaggaagtgagtagtttagcttttatttagtagttaggaccttaagtaaatcactttttttactgtgtttctgtataacatagataatattttttgccctgcaagagagcatatagaggaaagctctttggcagcgatactgtgccctatgaataaaaaagtgat

SEQ ID NO: 480091 - DNA, 386 bp, Homo sapiens
tctctgctcctaatggcctgtactcttcagagcccggcccaaacactgcctcctcccatgaggccttcctgatgccagatctgctggctcaccatgggccccaagctccagatgcagaccagaagggtctccgaaataagcagtgtggaagagtaaggctgagagcgggcaaggactggcctgaggtcacagggcatgtcagatctctggaaggcccgtggctgctctgtgrggttcctgggtaagcagaagcccttgacagaccctcctggtcctggtctgggctctgagaagagagcggggtacacaggggtctgagaggcagcggcctgtctccacggccagcaatcccaaaagttcaggacccgtgatgccctcccagggaa

SEQ ID NO: 480092 - DNA, 621 bp, Homo sapiens
acttttttctaaaccatgcctaaaatagcaaataaaagtaagaaacaccataaataaactaacagatacataaaaataaawtgaggaaattgtttggattagaaggggcatggggtaaagaattaggtatgtgagagcaaaaactatgtcttatttatccatcttttgtattttgcagagtttgtggaaaagcaacagttctcacattcatgcttagtgaataagtgaataaaaacaacaattagcaaaccacttaaaaatgacccactgtgaatcacaaggtcaggagatcgagaccatcctggccaacatggtgaaatctcccctctactaaaaattagctgtgtgtggtggcgtgcacctgtagttccagctactcgggaggctgactcaggagaattgcttgaatctgggaggtggaggttgcagtgacctgagatcccaccactgcactccagcttggcaaaactataagactccatctcaaaaaaaaaaaaaaaaaaagatccaccacaagcctgctatttctgaatttaccttatctttttttttctttcacattaagactataattatgatttcaacttcctcatctgattcccagtcatgaatctatctaac

SEQ ID NO: 480093 - DNA, 580 bp, Homo sapiens
ggtttacagcacaggttgaactttcccatctgtgtgttcagaagtgctgaacatcccacctcggtgacacctcctgtctgggatccagcacagataatgagtgtgggaatttgaactaacctcatggcatgtgagggtggggtgtcttgtctgagaaatggagtgtatcctggcaggcagttaggctgcctgctgtatcttcccctgacactggaaggtttcattttaattgcttgtgattatgtaaaatcttttctgagggttttgagaatcagtgtgacagaattacaacccacataaggttttccccttttctgcctttgggagaattcccactcaaagagccaggtcccattaggattggagtcagcagggctgaagatggctagaggacactgcagggagggagaaagcacttggagatgagatactcaattattgaaactgacttgcctcctcaagaaatctggaactttaaacccarttccagaattctctcctgattccagttaaagaaacctactacctaataacttaggcagccatttaggtgggatgtttcactttctgaaattcttag

SEQ ID NO: 480094 - DNA, 695 bp, Homo sapiens
gccttaactggctcacatctttcagataccagcctggctgctgtgagggctgtatacaggccagcatgcaggaagaaaaccagcagaaaggtggtggtgaggccaaggaagagcatctccaggaggaggggaatgcmtgagctaccagagaggatggggtggtgagggctaaaaagcctgtgggatttggcgtcatggaggtgacaggagggctgtggggagctgccggtgaggaggcagtacagaagctagagagtgagtggaggtggagtcggtgaggcgggtgggtggacgaggcttgcttacttctattgttggttggattctttcctctttttcttcttttaaaaaaagataacttgaatttagttgtatgctgagtggaaggagccagtagagagagagagagagagagagagagagagagagagagagaaattgaggatatagaagagagaagtggtcctaagtagagctgggtcttccagggtgccagaaaacatgagctctatggcctgggttttgccttaaccgggtcacaccgatgctggggacaaagagtggagggccagaagaggacatggggatgggcttctcagcttctgacctcgattttgtctttaagtcatctctggaggtggtgggaaagtggggagagggtgggacccagcagaggggagaaagccctggggaag

SEQ ID NO: 480095 - DNA, 413 bp, Homo sapiens
acagagagctctattccaaaactcccatttcagctgagagaaagaccactgacaatgggagggaggaaagtgggcttgcagccactgacatttaaaccctctaaatgcaactcagaaaggggtggggagaacagaatgagtctggaggagggaaagagcaggctttactagaaacattgttatttcaatatatacrcatcagctcctggtatgaatggtattaacttcttcatccattcattcagttctttgttcatttgttcactcatcatgttgtttcatattgatatttctcattctgggaaatggggaagtgactaaatcagaaccctcatgtggttggggaaatagaggaataaatggctaccatataaggcactgcagttacatctcagttaacaccacctcttaga

SEQ ID NO: 480096 - DNA, 619 bp, Homo sapiens
gcttggttacattaattcactgcctgtgattgactgcattctgctgctgtgattggctaagactcagctatttgttacagaagtttacatcctaagttaggcttttatatagtttacctactaaactaagttgcagtcgttatgtaatgactcaagtatggrggcatcgtcaagccaaatttggtttaatgtaacatactctttatcttttctgtgtctgatcacatggatgatttgcccagagcccctttatgtcctgtgatatcaagcacaatgccctttgggatgagctggggcagaagcctcaaggttgggagtctgattgaaactttaaactcttgtgaatcacaagagttttctaatgcttcttggtactcttctgatccccaccccaaccctttccaaacctttcttctcatcctggtaaccctctcctttctgctatcagggaacctgtcctttatcaaagaaactaaatatagattaaaaattatagacaaaataaaatcaaactaaagtggtagtggctaccaggagcttagtttcttgtccttcccatggagatatttgtcatttaaaagcagatacttaggaaaggtaattctgatttcaaaggaat

SEQ ID NO: 480097 - DNA, 581 bp, Homo sapiens
tttcatctgcagaactacagagtattttacaagtaatcagttcatgcagattgcacataaatcatgtctgctctggccctttggatactcatgttccyttattaaggcataagtaagccttcctgttctcatccattctttcagactttttttaattactgaaaagtagagcctggttgtcgctacaccgtctccttccactccacccgccccatgccctcgttgcttttctgaggttcagtttgtttttctggagcttgccaaattgccttaggaagctgggtaccttgtaaatgaattaagcaaaaggaaattcttatctctaaaaggaagcggtcactgggtttctgtgtgtgatattcttggctggttaatatttttgtgaaatatgttctgatggcagcagtggtaccccagagaggaggaaagcatcgtttatccttagtacacagaagcaaaatctcttctgctgaagttgggagagtggatgaaaagctatttcgtgaaagtcattctgcccaaataaacagagagccttcattgcttttaatcccatggaagattggaagctcagctcacct

SEQ ID NO: 480098 - DNA, 597 bp, Homo sapiens
tcatgccctcacagcagggctcagaggccttggcagttgaaaatctttctgctggtagcaagcgtccaacccttattttggaatatggctccttaagcaagtgtaactttcccctccaaggagcacatgctggagcacgatacgggggctggtacaaatcagcatttgtaaactgactttcagagtcctccrtgtgccagagaatcctttctaggtctcagcaccaaggcgtggtggctgctactggtgaccttgtcacttgattctcttcaacagtggcgcaggtgcttctcctttaggttaagtgttgagttgtgactttgtattcttgcctcccgacttctctcccactcctgtcacctcaatgcctagatgtgataaatacatgttaggttcattaattaatgcaaaactaatgaatgcctaagacttgcaatgtacagtgcataaagagagttacccagttggtgtcttagcagctaaggtgattcagggacaggactttgcaatatgtattattaaggggcgtccaacatctccctgatgttgccttaaaagacttcagaggtagtttagccagtttcaaaacctcatgct

SEQ ID NO: 480099 - DNA, 572 bp, Homo sapiens
ctggctgaatttttactaagaacacagcactagctgggataatggccaggagagagaactcagaccttctggctcctggtctggctactataaagagttttgatctctttagcagaaactgttaagtaaataggtgaaagggctaaaaaaaaaaaaaaaaagaaaaaagaaattcagtatttatgatgcaatgaaaaatgggcaagatggccagacgtaaggcaraggaaccagtggcatctcagcaggattacttacaggcattctgaccaaagactaccatccaagaattactgatgactgtgtcctggaaacctcagggccacacccgtccctgggaccatgggattaccccttacatacagcctctgtgtgagaagaagcagatcaagatggttctatattgaatgaataatatatgaatacagcttaacatttgtagggaatatttttggggagttaggctatattctccttataatgaaatgcagcatatttttaaataggatttaaataggcttattttaaataggctatattctccttataatgaaatgcagcatatttttaaa

SEQ ID NO: 480100 - DNA, 671 bp, Homo sapiens
tgtcactacggatagacattgtcttgggggaaaatgcactgggagtggcagaaagggtatatttctgacactggtttgagttgtcattcagtctctatgtcttaaaccagttcctggatatgacaagcccaactgtttgatatcatttgcacatgactcatcactgcatagcagactttttaaacttttccaagctgagaagctgttctcaggaaaatatccgtgctgtgcttgatgaggcagcacttgtacagcagccttctttcctggggttctggggtgagctctccctaagcggcttaggctctcagtagttcctttttggttgtctaaaaatgtgacaaaatctccaaccccctartgctttgtctctcagtgttccacccttatggatggataccctaagtacatactgtcatttctgtcggaatttggagaaaaaggaggtgtgcagttggaggtacttaattgggagggtgcctttatgtctgcaaaggaaccgagagctggtaaacatgctgtatgagttctctatggctgctgtaacaagtaccccaaaaggagtggcttaaccaacagaaatgtattattttgaagatctggaggctgggaatttgagatcaaggtgttggcaggattgattctttctgaaactgtaacagagactctgt

SEQ ID NO: 480101 - DNA, 671 bp, Homo sapiens
tgtcactacggatagacattgtcttgggggaaaatgcactgggagtggcagaaagggtatatttctgacactggtttgagttgtcattcagtctctatgtcttaaaccagttcctggatatgacaagcccaactgtttgatatcatttgcacatgactcatcactgcatagcagactttttaaacttttccaagctgagaagctgttctcaggaaaatatccgtgctgtgcttgatgaggcagcacttgtacagcagccttctttcctggggttctggggtgagctctccctaagcggcttaggctctcagtagttcctttttggttgtctaaaaatgtgacaaaatctccaaccccctaatgctttgtctctcagtgttccacccttatggatggataccctaagtacatactgtcatttctgtcggawtttggagaaaaaggaggtgtgcagttggaggtacttaattgggagggtgcctttatgtctgcaaaggaaccgagagctggtaaacatgctgtatgagttctctatggctgctgtaacaagtaccccaaaaggagtggcttaaccaacagaaatgtattattttgaagatctggaggctgggaatttgagatcaaggtgttggcaggattgattctttctgaaactgtaacagagactctgt

SEQ ID NO: 480102 - DNA, 457 bp, Homo sapiens
agggatgctatgatgagaaaaatgcatttcctgtccttcaagagctcacgagccatccagcagagcaggtccttaataaactgggcaggaaagcatatgaratgcttcaggctgccttggggaggtacaacaggggaagattcatgctggggaagacagagtgggaagttgaatttgtcaggttggcacggggacacgggagggaggcccttccacacacagagagtctgagaggttggggggtcactgttaagtgaacaagtggggctcaagtgagtgaggttattggtggtcctgggatggcaaaaatataagtatttaaatgttgttgaagtaaaaatgtgtgagatgaaggtgtagaatgcctgtggatgggaaccttcaaatactgcaatgaaaatcatgaagaagagaaggaatgccaatgtgaggctacagaaaagccaggggaaggagt

SEQ ID NO: 480103 - DNA, 595 bp, Homo sapiens
aggctgaggcaggaggttcacttaagatcaggagttggagaccagtgtgggcaacacaataagatcccatctctacaaaaaatagaaaattagctgggcatggtggcatgtgcctgtacccccagctacccaggaggctgagctgcaaggatgacttcagcttaggggtttgaagytgcagtgagctatgatagtgccagtgcactccagcctgggtgacagagaccctgtctctaaaaacaaaataaagcaaaacaaaacaaagacaaaatgtattccccttagaggaagaaaaatgtctattagtcacattatgcgtcagtggaagaatttaatatttcatccattatagaagataaaagacaatttattatcaaccaggatgcctcttgccaggaaatcattgagccaaaaaagtcaactgaatttcagatgtgtaaggaggaccccaaaaagaatctgaagggatgcagctccaactgtagaaccatatggagaatgataatccaagaaatgctgctgatgactgtacctgagtcccgtgattgggaaagtcctgcagagagtgcaccgagcagggtgagtgaccctttca

SEQ ID NO: 480104 - DNA, 492 bp, Homo sapiens
gctgtaactttggtgtccttaaatgtactaattgaaaggatgaattttaataatccttccttgaagtcttagagataggtaaaaatcaaagaggcctttcttgtaaaacatagtccttgttatcagcatttgttttcatcaatcatttccagttttgttcgtttgtgactatttctaattgtgacaggtaagtctgtgtaagtgtatgtatattttttctaaagatagatttgttattattcctggtttatgagcactagttttctcttagcttactgatttttttccccatcaaattccaagttttagcataattgctcaagaaatatagttttttaaaaaataatgtagtacaatatagattgtctcaacatttcttagtttaattgatagagtartgttcattcagtcactaagaattccatggacagttttttttttaatttctccttagtttataagtcaggaatcatttttcatgaattatgtgtt

SEQ ID NO: 480105 - DNA, 664 bp, Homo sapiens
cttatttaactatgagaagaacctggaagagcttcaccccaaggaccgttgactgagctggatgatgacctggacaccatggctgtttgtaacagtgattagcaggaacagacgaggttcagaaataaaagggctagagatgtcattatgagaaaagcctctaaagatcattgttatttagtctagaaaggcatgggctaatagctgaaggttgaagtatccaagagaaggtatgaagaggatgtacccagagttaactagttaaccactaaattttgatgggttatgtyaagggagaaagagagaaagggtgagagagacacacagacacacacacacacacacacacacacacacacacagagagagtgtgtgttagggaaagagcatactgatgactcccaaatagaaaataacagaattgagagtaactcatgggttagtaaaggcttcaatgcaaatgaagaaattttgaagtacattcttctttgtgtcaaaaatggtggcctcctccttcaacaaaccttgctctgccactgggagggacaaaaagcctgccttcctgagcctggcattttgtatgttctagaaaaatagtgagtctttgttttcctctgcgatgagaaaattaaaatttagatttataatctgatggtgtttgcag

SEQ ID NO: 480106 - DNA, 664 bp, Homo sapiens
cttatttaactatgagaagaacctggaagagcttcaccccaaggaccgttgactgagctggatgatgacctggacaccatggctgtttgtaacagtgattagcaggaacagacgaggttcagaaataaaagggctagagatgtcattatgagaaaagcctctaaagatcattgttatttagtctagaaaggcatgggctaatagctgaaggttgaagtatccaagagaaggtatgaagaggatgtacccagagttaactagttaaccactaaattttgatgggttatgttaagggagaaagagagaaagggtgagagagacacacagacacacacacacacacacacacacacacacacacasagagagtgtgtgttagggaaagagcatactgatgactcccaaatagaaaataacagaattgagagtaactcatgggttagtaaaggcttcaatgcaaatgaagaaattttgaagtacattcttctttgtgtcaaaaatggtggcctcctccttcaacaaaccttgctctgccactgggagggacaaaaagcctgccttcctgagcctggcattttgtatgttctagaaaaatagtgagtctttgttttcctctgcgatgagaaaattaaaatttagatttataatctgatggtgtttgcag

SEQ ID NO: 480107 - DNA, 622 bp, Homo sapiens
gagcagccagcacctgcacccgggggttgggccctggggcttccttcccagtccagcctctcagctcctgtctgtggcttagcacgtgcaccacagagccaaccagatcctctgtaaactktaagatcacaattttaccattaaaaacagttccaccatatcctgagacctatgtcatgcccacatggagaagggcaattttctttaacaccaactatgatgggccacaatgtggggaaaggtcatgcaatgtatgtagttactcgtttttctaatgatgcacttggctggcctagaacttttcccaaagcctttgtccaggagttctgacctcatcccaacagtattggggtttaggactccccgaggatggacagctccacaatgcctgctgtcttcattgctcaaaccaacaggatgatttgctgaggcccaggagctaccccctccagaaaatccctgatctccccaaatttggttgagatctaaggtttattttgctgagttttacttgcttccaaaaaggaaggcaagtcttcctgtttccataatgatagagggcaagcaactgctttctggagttgcagctcgcttccaacagggaaggggaattggaggtttt

SEQ ID NO: 480108 - DNA, 622 bp, Homo sapiens
gagcagccagcacctgcacccgggggttgggccctggggcttccttcccagtccagcctctcagctcctgtctgtggcttagcacgtgcaccacagagccaaccagatcctctgtaaactgtaagatcacaattttaccattaaaaacagttccaccatatcctgagacctatrtcatgcccacatggagaagggcaattttctttaacaccaactatgatgggccacaatgtggggaaaggtcatgcaatgtatgtagttactcgtttttctaatgatgcacttggctggcctagaacttttcccaaagcctttgtccaggagttctgacctcatcccaacagtattggggtttaggactccccgaggatggacagctccacaatgcctgctgtcttcattgctcaaaccaacaggatgatttgctgaggcccaggagctaccccctccagaaaatccctgatctccccaaatttggttgagatctaaggtttattttgctgagttttacttgcttccaaaaaggaaggcaagtcttcctgtttccataatgatagagggcaagcaactgctttctggagttgcagctcgcttccaacagggaaggggaattggaggtttt

SEQ ID NO: 480109 - DNA, 484 bp, Homo sapiens
ttgcttagaaacccaaattgtccctgttgccccagagcaggtaaaccatactgggggaccccagaatcccagctcttcccgggtgcctcccagtacccagaaggcaacaggaagaagcgactgcggttgaaaataataaaaatactgctacatgcaggccctgttcccctagagaactcgaccgccagctgggaactgataccaggccccacgagacccatcccccagggcccgtcccagagatactcagccccaggcgctggaaagcttttccaaagagattatgaaaaacgtctaatatgcggaaaaccagactaaaaaaacaagccctctttatacccaccacccagactcagccattgctaacattctgccctttcctactgttcgttggaatgttcgaagtgggtcaattctgacatttaagctttcaacatatttgaygcattttttaaaaaatgatgccgttgtactaaccacagaa

SEQ ID NO: 480110 - DNA, 612 bp, Homo sapiens
atgcatttttaattgaaccattaatcctactccccagttcatggcacatcatcatcatccttattatatatttgggtggtaaaaggtcacttttgttttatttatgtatttatttcctttcattttcattccccaatgcccaccccacatccccattggcaacaattttgtacacacagggggccatcctgacccctctctcttcactcctgcrtgcaatagccctgtctgaacccaggaaccattcctctacatagatctgttatgtctcttcaaagtggtcgtgcatcctccatctccaggacaggatatagctggttccctcctaggccttgcaggaagactagaatatgttaaaacttctagaaggccttgttaagcctagaatggacttttgcatagatcaccccaccttggaccctgtagaaaggaagtgccaaaatcccattagaagtcattttcatctgtaaataagtccctaacatgttttattattatgttattttgaagcctattacattccagtatcatattttaacctcctaaaaaagagtttgtcataaatgtcctacagtggataatgtgcctgtactaatttttttccccagaaaa

SEQ ID NO: 480111 - DNA, 587 bp, Homo sapiens
tgtggctaagtccaaggaattggttttgttcctcatattactgcccacttaggaaactctgaccctgcggatcactctctccttaaaatgctcttgcctctgcctctgtgatgccacacgctccttgggtttctcctcctactctcctttttcctcttagtttggggcttcctccttgcaaccatgtttacatgtaagcttcactcaagcctcagtcctgaccttcctctcttcctattctcgactctttccatgacctaagatatgattcccacagccagggaaagccttatttctctatcttcacgtccatcccagaggggacagtactggatcrcctcccctggctgtctctccaccatttaccactcttttccaaagaccaggtaaatgaaccgatggggggatggaagtggggtttggggaaaggctgcataagctctagggagccaaactggaccacatgggtggtctggcaatttcaccaaggggcctctgcctctgccgaggggaggtccacagcggagtggggagattcagtgcgggggaaggcattaggaagattagtggtgtctgcagagtcccag

SEQ ID NO: 480112 - DNA, 587 bp, Homo sapiens
tgtggctaagtccaaggaattggttttgttcctcatattactgcccacttaggaaactctgaccctgcggatcactctctccttaaaatgctcttgcctctgcctctgtgatgccacacgctccttgggtttctcctcctactctcctttttcctcttagtttggggcttcctccttgcaaccatgtttacatgtaagcttcactcaagcctcagtcctgaccttcctctcttcctattctcgactctttccatgacctaagatatgattcccacagccagggaaagccttatttctctatcttcacgtccatcccagaggggacagtactggatcacctcccctggctgtctctccaccatttaccactcttttccaaagaccaggtaaatgaaccgatggggggatggaagtggggtttggggaaaggctgcataagctctagggagccaaactggaccayatgggtggtctggcaatttcaccaaggggcctctgcctctgccgaggggaggtccacagcggagtggggagattcagtgcgggggaaggcattaggaagattagtggtgtctgcagagtcccag

SEQ ID NO: 480113 - DNA, 612 bp, Homo sapiens
aaattacaatcatcttagtaattctctcattttacacattagaaagttgagtcccagaaattaagtaaaacctaaagttaggttttctgactcatagtaatttgtgtgttataatactatgatactgtctgggtgcagtggctcatgtctataatcgtagcactttgggaggccaaggcgggcggatcacgaggtcaagatactgagaccatcctggccaacaaggtgaaaccctgtctctactaaaaatacaaaaattagctgggtgtggtggcgtgcacctgtagtcccagctactcgggaggcagaggcaggaggattgcttgaacccaggaggtggaggttgcagtgacccgagatcacgccatagcactccagcctgggcgacagagtgaggctccgtctcaaacaaacaaacaaacagaaccatgatactatgcccatgcattttgaaataaggctctaataaatgaaaggaaaaaaggaaggggtcttgtaatactactactataaatgtattaggttgagctagcagastaaactaacacatcagaaggtactggtgagacattcaggcactggtgttacgggatccttggggtgttgcttcgc

SEQ ID NO: 480114 - DNA, 544 bp, Homo sapiens
gggaagttaaacaatttccccaaaatcattaagttacagagccctcaatccaggcagtctggyttaagagttgttgccattagcaatatatttcatctagactaggaaattatgtaatatattttaaaatttatttaaaataaagtaagaagtgtctgagtaagggcctgaaaagtcttcttataggtaagtaccagaaatcaaaaatattattcttttacttattaatcagttttattgaggtataatttacatataacaaaatataccgattttaagtgtgcagttcagttagctttgacaaatgtatactctgacatatttacaacccccaaaaaagatataaaagaattccatcagtcccaaaacttccttcatgttccattgaaaagtagtccctgccactcccagaccgaggtaaccactgatcagttttctctcaggatatattagtttcgacagctctagcatttcatatacataaaatcataccatatgtgtcttttgtgtctctttttgttagcatattttaagattcgtcagt

SEQ ID NO: 480115 - DNA, 611 bp, Homo sapiens
tatacataagaaacatcaccttgaagagcttcccccaagacatataagttggcagacctagaaattcaacctagaagcatttagtaccaatatgtgtggcctttcttccctgcaccaccatgttgggctgctcttcctatggtctcacggatgataacccggcctctgatggttgccctggcactaactgaaataagttgtctgactcctagttggggagtttgttataccagttgagagtgggcacaatttagaaagcatagagaacaagtagagcagcatcagtaacagttcttcttgctgatggtgttagagttgggaatggaagactggtgggtctcatcaatacagaataaactctgttctataccctcccacccccacaaggaccagtggggaatgctatgaattctgcatgcaaaatcaacattcatgcatttgcagtaggatgtctgatgagtctttaaccactgtatcagttatctattgccatgtaaaaaatgattccaaaacttaaaagacttaaaagrgcaatggtttatttatatcacaatcaatgggttggtaatttgggctgggatcagttgagtcgttctgctaatctgagccag

SEQ ID NO: 480116 - DNA, 612 bp, Homo sapiens
tcttaatctagtgagtttgtaggcttaagacttaactatgttcagtcacccaactaccattagaattgctcctgccaaaacatcatgagatatctctactcagggaaaccactggaccctgtgtagtccccaagccacagctcatcctcctctctgccgaggtctccctttcaaggttttcacccaaccaatgctcaccttcaagtcaggaggcctgccctgagttcagccctgctggacaactgtgtcccaaggacatatttcagagtaatgagtgcctgtttggtgtcagtattattctctacaaatgtgttctgactagctggtcaggctctcaataccctctcctggaagacccatgggcttgtcaagaccttagacactgtagccatccaagctgtcacccagagttggcccctggtatagtgtccccgayttttatctatctgtcctggtgggcagggcccaggtgagattccagcccattcttttctctctcttctgtcatctccttggagccaggggcagagcatcatgccttaaagctaaggctcattatttgtgaagtaggtgggacaggtagatttcattaattgtctccattttcaaaaa
